United States Patent Application Publication US 2017/0009304 A1 - sequence listing, part 3

SEQ ID NO: 42769 - DNA, 82 bp, Homo sapiens
aaggaacgaggcaaggagctaaagcagcgtgcgttcagccctggggtgcatctgcagacgcagcaggaggtgaagctgcgca

SEQ ID NO: 42770 - DNA, 141 bp, Homo sapiens
gagagagcaccgagaggggcaggatgaaggaccacagacctgcgctgcttcctacacagcctcctgtcgtgagtgacttagtagaagaatattttgaagctcacagcagttcaaaagttttaacctctgatagaacactgc

SEQ ID NO: 42771 - DNA, 101 bp, Homo sapiens
gtaacaataacctggaggatgactccagtgtgagtgaagacttagatgtggattggaggttacttcctcagaatgttggcctcctgtatgttggaggttat

SEQ ID NO: 42772 - DNA, 100 bp, Homo sapiens
ggtcccgcggcccaggctccggctctggcccaagctccggcccggccggccgctgcgttcgaaaggatgtacagttacccagcacgtgtacctcctcctc

SEQ ID NO: 42773 - DNA, 98 bp, Homo sapiens
caccttacaaacgcccgaggtctgaagcctgggagtggcggtggaggtaaaatgtcggttccaggaccttaccaggcggccactgggccttcctcagc

SEQ ID NO: 42774 - DNA, 100 bp, Homo sapiens
caagcatgtggctcctggtcagtgtaattctaatctcacggatatcctctgttgggggagaaggtgcttttgaagatgatgatatcacgcacgttgaagg

SEQ ID NO: 42775 - DNA, 100 bp, Homo sapiens
taattggcctgatgaatcctttgatgaaatggacagtacactagctgttcaacaggtggatccataaagaacccagccaacccgcagagggaggggaggg

SEQ ID NO: 42776 - DNA, 87 bp, Homo sapiens
caaaggcaagaaggcaacgacgttccatctgtggaaggacctaccaaccaggagatacaactcgtcaacgaatcaaattcagtgatg

SEQ ID NO: 42777 - DNA, 100 bp, Homo sapiens
agaagattgcaactttgagtcagacctgtaggcctgatagactgattaaaccacagttcttcctgtccaagatccggtcccacgtggctacttgttccaa

SEQ ID NO: 42778 - DNA, 90 bp, Homo sapiens
tctctcaagcacctcttttgccttctttactaaaatgtctcaagccagagcctaagcctggagacctgattgagatttttcgccctttct

SEQ ID NO: 42779 - DNA, 100 bp, Homo sapiens
tccgttaaaaccaaatccactggatctgccacagcttcagcatcgagctgctgttatcccaccaatgcttaccctgaaagaagcagatcccagttcaaaa

SEQ ID NO: 42780 - DNA, 100 bp, Homo sapiens
actttgtaaaagccaaaaaggaggttgaaaattcacaggctgcccgaaaaaagaagaaacttgcatgggggagccgggtgtgggctgagccctgcctgat

SEQ ID NO: 42781 - DNA, 98 bp, Homo sapiens
ggagaagctgttgtgtttcttggtcttgaccagcctctctcatgcttttggccagacaggacttcctgttcttgggtgccaatgtccaatacatgaga

SEQ ID NO: 42782 - DNA, 75 bp, Homo sapiens
cgagattcaagattatttgcaacagctcacgggagcaagaacggtcaggctgccagatgggacctcactgaccca

SEQ ID NO: 42783 - DNA, 101 bp, Homo sapiens
atggagctcagaaagctgtatggacctctgtgtgggaaggtgtcttgctgcaggtaactaatgaagaagtggtcaaccacagagtcttcaagaaataagaa

SEQ ID NO: 42784 - DNA, 82 bp, Homo sapiens
cttcgctgtggcatggcggacgaggggaagtcgtacagcgtttggtgccctggttgtcagatgttggaaagcagtaggacgg

SEQ ID NO: 42785 - DNA, 97 bp, Homo sapiens
aaactgaatgaactgataacggagaatggaactgtatgccagcagcttgttgtacatgtcttaaagacttttctacatgatcctcttgtggaatgga

SEQ ID NO: 42786 - DNA, 83 bp, Homo sapiens
ggtcgatggtcggcggcgcccggatgggcagctgaggttcccaaaggtgggggcctacccatgaccactgaagttctcaagag

SEQ ID NO: 42787 - DNA, 97 bp, Homo sapiens
cgggctccgacccacgggccggccggccctgcccgggctgggtgaggggcgcccgcctcaagctagagtgtcacaccatgtctgaccggaaggcagt

SEQ ID NO: 42788 - DNA, 82 bp, Homo sapiens
cgccggggaggcagcgcgggatcccagcctcaggcgtgcgcggacggtgtgcgggtcagcccaaggccaaccccactgtcac

SEQ ID NO: 42789 - DNA, 87 bp, Homo sapiens
atacccctttgaattaattatggctcaggagcattggtttgaaaaggccctacgagacaagaagggcttcatcatcaagcagatgaa

SEQ ID NO: 42790 - DNA, 100 bp, Homo sapiens
ctgccaccaaaaatgtaaagaggaaaaatgcacttatgctgataaatatacccaaacaccctggagacgaattcctgctgcctgggtctcagccatttgg

SEQ ID NO: 42791 - DNA, 50 bp, Homo sapiens
taacccagcctgtttcacttcttgtgggccccatgctgattgagtttaac

SEQ ID NO: 42792 - DNA, 75 bp, Homo sapiens
gcccaggaaacacaggcagcggaacctgctagatgagatagcaagtagggagcaggaagtacagaagatctgtgc

SEQ ID NO: 42793 - DNA, 100 bp, Homo sapiens
aaccagtgaataaagatttggaatttcagctccatgaaccatttcttctgtatagaaatgcaagctctcttcctcctcccagaaagacacgtgctgagct

SEQ ID NO: 42794 - DNA, 106 bp, Homo sapiens
ggccttttgtccctttgcctcatcccaggttgccttggaaaatgccaacgccgtgtctgaaggccataaaattttgagtagaaaaatccagaaatttgaaaatcag

SEQ ID NO: 42795 - DNA, 90 bp, Homo sapiens
gggaggatgacgaacccaacctggtgcccggcccgcaggagtctgccgtgcacccgagggagattttcaagcagaaggagagggccatgt

SEQ ID NO: 42796 - DNA, 96 bp, Homo sapiens
ttgtggagcagctgtcccacaagacacccgactggctcggctacatgcgcttcctggtcatcccactgggtgaaggttatgctgcggatctggccc

SEQ ID NO: 42797 - DNA, 100 bp, Homo sapiens
gatggattgtccctggaggaggcatggagcccgaggaggagccaagtgtggcagcagttcgtgaagtctgtgaggagggattaaagcctgtggtttccac

SEQ ID NO: 42798 - DNA, 75 bp, Homo sapiens
aaatatcctgcagttagatgttaaggacatgagcaaatccttaaccaatatggagtctcactctgtcacccaggc

SEQ ID NO: 42799 - DNA, 90 bp, Homo sapiens
ctgctctgtcactaacaagctgcgtgatcttcggcaaatcctgatcctaactgttgtcttggagtatttgggctgagcttgtacaccaca

SEQ ID NO: 42800 - DNA, 89 bp, Homo sapiens
tgcagccgcgaggaggcgcgggaggtgttcgagaacgaccccgagacggtatcccggtgccggaaatgccggaagcgctacgagccagt

SEQ ID NO: 42801 - DNA, 139 bp, Homo sapiens
cgcctagagtagcgacccggggggagcgcggggcgacgctggctgcagggacccggtgacagcgtgagagttgttgacctcctgtactggagagacattaagaagactggagtggtgtttggtgccagcctattcctgc

SEQ ID NO: 42802 - DNA, 90 bp, Homo sapiens
ggcgagcggcgggtgtgcgcgactcggggtgattcacgccggggaccccaaggagaacccggcagtgggcaggtgtttgtgacttcagag

SEQ ID NO: 42803 - DNA, 100 bp, Homo sapiens
tgccttccatcagtcggatacacacatattcatcatcatgggtgcatcggcaggcagtatgacacctaagtcgccctccactgacatctttgatatgatt

SEQ ID NO: 42804 - DNA, 101 bp, Homo sapiens
tgcaaatgaagctctcgaggctgctaagagactaaatgagctttgatccaaaccttctccacaacaatggacataatgggtaccctaatggtacttcagca

SEQ ID NO: 42805 - DNA, 83 bp, Homo sapiens
ggtcgagtcagtgcgttcgcgcgagggaacggcaggagcagctgatgggatatcggaagagagggccgaagcccaaaccgcta

SEQ ID NO: 42806 - DNA, 100 bp, Homo sapiens
ctgtgtgctgtcggacccagagggtgacggcgccgctaggatgaagctcgtgaggttaaacactttaagatgagaaaaattgatctctgtctgagctctg

SEQ ID NO: 42807 - DNA, 75 bp, Homo sapiens
gtggcggtgcgagaatctcctcagctggctgagctatgttaccagggtcactttccgtatcctgatccttcccag

SEQ ID NO: 42808 - DNA, 100 bp, Homo sapiens
ccggaccccggcgcgctgaatgcaggctgctttgaatgctgcatcaagtgtctgggaggagtcccctacgcctccctggtggccaccatcctctgcttct

SEQ ID NO: 42809 - DNA, 97 bp, Homo sapiens
agctcaacgagctgctggaggacgagggccagctgacggagatggtgcagaagatggaggagatgtgtgcattgcaatgttgtgtactctgatgtgg

SEQ ID NO: 42810 - DNA, 132 bp, Homo sapiens
tgcgaccccgagggaagatgaacgggacgcggaactggtgtaccctggtggacgtgcacccagaggaccaggcggcggcagtcgatgatgtgaagaaaggttacatcaaagcagaagaaaagtcctatcaat

SEQ ID NO: 42811 - DNA, 100 bp, Homo sapiens
ataactgcctggaaggttagcgtcaaagaagttgaggttccagcaacagatagaaatgctttaagttcactctggggaaagctggcctctgaaatcttaa

SEQ ID NO: 42812 - DNA, 82 bp, Homo sapiens
cggcatcgggggcctggactgcacggcccggcagcagatattgaaatggattccaggcgtgtgcctcgagacaagctggcct

SEQ ID NO: 42813 - DNA, 100 bp, Homo sapiens
ctgattgctatcacttctgcagaatccagtggggactatgttcggagtgaactggagtttgcctatgagggaccaatgtatttagaacctctctctatga

SEQ ID NO: 42814 - DNA, 96 bp, Homo sapiens
tgccgaagtccgtcgtgggcctggaatactcccccagttgcaagaggcgcaggaccgtggaagacttcaacaaattctgcacctttgtcttggcct

SEQ ID NO: 42815 - DNA, 50 bp, Homo sapiens
tctcatctgcacaggaagcaggtctaagttcatccatgagctcggatttc

SEQ ID NO: 42816 - DNA, 100 bp, Homo sapiens
atggcctagcacgtggaattcgcgaagctgccaaagccttagacaaggaagaaggagaaagggccaacccctgaagaagcaatacagaaactgaaggaga

SEQ ID NO: 42817 - DNA, 100 bp, Homo sapiens
cttccacacatggaacagactctggcgatggcgccaccaggaaaatgtcctcagtgcaagagcaacacgtttccacagggggatcctggaccgttggcac

SEQ ID NO: 42818 - DNA, 100 bp, Homo sapiens
cccccacatcctcccctgagtccggagctaccaaaaccatcctcctggtgtcatggagaaactccagctgggcccagagattctgcagcgggaaaatcca

SEQ ID NO: 42819 - DNA, 100 bp, Homo sapiens
atagccaatgaacttttgcttactgaaagagcttatgtcaaccgacttgacctcttagatcaggtacttccagtgcccacccaagtttggtctcttcgcg

SEQ ID NO: 42820 - DNA, 90 bp, Homo sapiens
ggagctgcctccggtctccggtactggagccggcggctgcggccggcagccggcagctttgcagcggatcctgcagctccaccaaagaaa

SEQ ID NO: 42821 - DNA, 80 bp, Homo sapiens
aaattctgaggcatttagcaggaccccaaagtgagaaccaggtatgacagcagttatctgtacttaccctcttgacatgg

SEQ ID NO: 42822 - DNA, 50 bp, Homo sapiens
gacagggtatctgaagtaaaagggggtatcacctcttctgggctcaagat

SEQ ID NO: 42823 - DNA, 90 bp, Homo sapiens
aacaggcaggagaattatgggagcgcatttccccaggcgctaagctgcaacgaaaacgacgcagagcacctggaccgtgaccagccatac

SEQ ID NO: 42824 - DNA, 100 bp, Homo sapiens
gccctcgcgtcggacccttgccagaactagagctcagaaatatgctcagcaagtcttgcagaaggaatgtcgtcccaagtttgccaagacatcaatggcg

SEQ ID NO: 42825 - DNA, 98 bp, Homo sapiens
tgatggctcatcaaactgcaatgttacaatggccaacattggaataaatggaaatcattctctggaaacctgtgaaacaacactttttgctctccgaa

SEQ ID NO: 42826 - DNA, 89 bp, Homo sapiens
gcgcggagcggcgtcccctgcagccgcggaccgaggcagcggcggcacctgccggccgagaacccttaggagaaatcttgagagtggac

SEQ ID NO: 42827 - DNA, 101 bp, Homo sapiens
cgcacccgcgccccacgcgccgccgaggactcggcccggctcgtggagcccttcgcccgcggcaatcctcactatggatgggctcattgaggacattaagc

SEQ ID NO: 42828 - DNA, 90 bp, Homo sapiens
ctttcacaataagagcagaggatggaacacttcagtgcattcaaggagaatcttatttatactgctgatccagaatcctttgaagtaaat

SEQ ID NO: 42829 - DNA, 82 bp, Homo sapiens
tcgtcgacatgagtgatgtggaggaaaacaacttcgagggcagaatgccagtatggacagaatagcttatgatgcttatccc

SEQ ID NO: 42830 - DNA, 100 bp, Homo sapiens
ccagttgcagcccatggagatccagttcaattatgaatctcaggaacaccaccttctgtcagagccatccaaaactctgtttgtcaaaggcctgtctgag

SEQ ID NO: 42831 - DNA, 82 bp, Homo sapiens
aaggagagtgctacccggtgtactggaaccacgagccaaactcaggctgtaccttgagcagctcaagcaactggtgcccctg

SEQ ID NO: 42832 - DNA, 96 bp, Homo sapiens
ccgcgttcctatggacagacgcacagacacctgcaggtctgacagcagccgctgcagcagctgctgctgctaccaatgcagctattgctgaagcaa

SEQ ID NO: 42833 - DNA, 75 bp, Homo sapiens
ctccagcatgtatcagccgaggtggagctgcggggccctggcatgaaaggatgcagcagtctcggccctggctgc

SEQ ID NO: 42834 - DNA, 50 bp, Homo sapiens
tcctgaaaatgtgatctcccttaaaaagatctatgccctcaacagagtca

SEQ ID NO: 42835 - DNA, 101 bp, Homo sapiens
gcaagagaaggcactcaagtttatgatgacatggcagagcttctcctcggggagtcgaagctggagcagtacctgaaggaacaccccctgaggcagggggc

SEQ ID NO: 42836 - DNA, 101 bp, Homo sapiens
gctttctacctgcccggcctggcgcccgtcaacttctgcgacgaagaaaaaaagagcgacgagtgcaaggtgattcgcaaggggtggctcaccatcagcaa

SEQ ID NO: 42837 - DNA, 75 bp, Homo sapiens
ttcacctgctgcaccaatgacaaggccacccagcggaatagaagatgaactcaactgaattcaccgaagatgtag

SEQ ID NO: 42838 - DNA, 75 bp, Homo sapiens
cctacaccaggcagcccccaaatcccggcccagacgaagttatacggaagcgtctcctcattgatggagatggtg

SEQ ID NO: 42839 - DNA, 100 bp, Homo sapiens
gcaggtccttgcttgctggtctgattgtcgtttttacccggccaaagtcactgctgttaacaaggatgatcctgctcatctctgattacttctatgcctt

SEQ ID NO: 42840 - DNA, 82 bp, Homo sapiens
ggtgaagtggaaaggatggcccccaaattacagaatgtctgaaggggacagtgtgggagaatccgtccatgggaaaccttcg

SEQ ID NO: 42841 - DNA, 82 bp, Homo sapiens
caggacaagggtggtttaattcctcttcataatgcggcatcttatgggcagtccggagtaacactggccagaagactcagcc

SEQ ID NO: 42842 - DNA, 82 bp, Homo sapiens
caacaattccgatggcaaagccgttgccaagttgcaccaccagcaccaccttccagtagtcagctctgccgttacttccctg

SEQ ID NO: 42843 - DNA, 82 bp, Homo sapiens
ccgctacatactcatcatggggctcctgtacaagctacgagttccagggagctctgtcctggtgaccgtgcccgggttatga

SEQ ID NO: 42844 - DNA, 100 bp, Homo sapiens
atcgactttcccgccgagggcccggaccccgaatatgacgcttctcaataggtttggcatggacaagatctatgaaggccaagtggaggtgactggtgat

SEQ ID NO: 42845 - DNA, 51 bp, Homo sapiens
cgccatcgttgctgccttcttcgtcaaggaagagcccgatgcccttggttt

SEQ ID NO: 42846 - DNA, 90 bp, Homo sapiens
cgacaacatgtcacccgcgctccaagacctgtcgcaacccgtgttggagtttccagatcaaaagatgtgccaccatttggcccaccgatt

SEQ ID NO: 42847 - DNA, 97 bp, Homo sapiens
gtccatcaccaagggagacctggaggttgcaaaagcttctcatttcagagagatgccaggatcctaagtgcctgccaaacttaccaattctaaggaa

SEQ ID NO: 42848 - DNA, 100 bp, Homo sapiens
cgcattggggtccagccgtccccagaacgcagatcagaggtagtcggacctttcccgctggcgcgcagcctcagctagtttgaaagatgatgacagtggg

SEQ ID NO: 42849 - DNA, 89 bp, Homo sapiens
gagaacggtgcttctatggcaggatatgtgctacacacgcagggccctgtcgatggcagcctttacgcgaaggtgaggaagaaaagctc

SEQ ID NO: 42850 - DNA, 100 bp, Homo sapiens
gtgaaaagcagcagagccgatgggtcatgaggatgtaagtgcgtttgaaggcttccacaccctctactccaggtgacagctggagtatcagccttggaag

SEQ ID NO: 42851 - DNA, 75 bp, Homo sapiens
tctggggacagtttggtattaaaagctcccgtcttcgtcaggaagattttccacctcgcattgttgaacaccctt

SEQ ID NO: 42852 - DNA, 46 bp, Homo sapiens
agaatcactggtgcaatgtgtgaagccaaaattgcctggaaaagag

SEQ ID NO: 42853 - DNA, 98 bp, Homo sapiens
ggcaagagggagttaaggacattccaggcagaggcaagtgaaactggaacgccaagctgaagaagaacgaatacggaagcacaaagcagctgctgaga

SEQ ID NO: 42854 - DNA, 50 bp, Homo sapiens
gaagtgattaagaattccttggagagggctgctcacaatttatatggcca

SEQ ID NO: 42855 - DNA, 50 bp, Homo sapiens
gaggtgaaagactatgtggccaagcaacaacgaactgtctacagactgat

SEQ ID NO: 42856 - DNA, 82 bp, Homo sapiens
gaatctgatatcattactgcgtttgctgttaataaggtgtttgatcagtatgtaaagaccagggcagaggaagaacgcaggg

SEQ ID NO: 42857 - DNA, 96 bp, Homo sapiens
cagcagccatcgaggcgagccagagcctgcagtcccacacggttcgtgctggccgtgggcagcgccgtctttgatgccatgttcaacgggggaatg

SEQ ID NO: 42858 - DNA, 100 bp, Homo sapiens
tggatttattagaaaaatgcctaaagaacatccacagaatagacctgaagacaaaaatccagaagtacaagcagtctgaaaatgcttggacagaagagat

SEQ ID NO: 42859 - DNA, 100 bp, Homo sapiens
ggttcagttttcttcagaagaaggacttcggaatgcactacaacaggaaaatcatattatagatggagtaaagatcctaagtgtgaacgtgaagtcccca

SEQ ID NO: 42860 - DNA, 101 bp, Homo sapiens
cctccagagaaaggaatgcaagatggtcatcctgtctgtctgttcacagaatgtggaagatgtcaagtttgtgatcaactatgactatccaaacagctcag

SEQ ID NO: 42861 - DNA, 98 bp, Homo sapiens
ggaggacaacttcgcccgggacttcatggggaggcgccacctgctgcagaagtttcctcatcttttgtgatcctgtgtgtgtgcagtttaataatatt

SEQ ID NO: 42862 - DNA, 82 bp, Homo sapiens
agactctcaagaaaggagaagtttttttgtatgaaattggaggaaatattgatcctgtttgaccaaactcagagatcaatta

SEQ ID NO: 42863 - DNA, 90 bp, Homo sapiens
gctgtagggaggccagggactcagccgatgcctcaatggccaactgcagtacggcaagaagaagctgaaatacctgccctacaatcacca

SEQ ID NO: 42864 - DNA, 51 bp, Homo sapiens
agcaaatgcattccacgtgtatcagtttaattggttggggtcagataagaa

SEQ ID NO: 42865 - DNA, 95 bp, Homo sapiens
agctttctgaaatggtgtcccaccgcaaggactggagaaggatcatggaagggaagtggttgctgtgtatgttactggtgcttggaactgctatt

SEQ ID NO: 42866 - DNA, 99 bp, Homo sapiens
tgactgtattcaggaaggcacatgaactgaagcttctgtcagaatgccaatacaagcagttgatctgtctcgtaactgtgtaatcaaggaactagcacc

SEQ ID NO: 42867 - DNA, 74 bp, Homo sapiens
gccgagcaggctgagcgatacgacggacttcagaaatgggcttgggaaccagctgagttcaggatcccacacct

SEQ ID NO: 42868 - DNA, 82 bp, Homo sapiens
ctaaatatcgatgttgttggtgtcagaatcttgcctcctggaatccttcaaatcctgaatgtctcttacttgtggtgaagga

SEQ ID NO: 42869 - DNA, 100 bp, Homo sapiens
cagcaggacaccaggacctggcctgaagacatttcctctcctcccctctggatttctcagagatgaggaacataccactgaacacacgccgaaccaccat

SEQ ID NO: 42870 - DNA, 80 bp, Homo sapiens
ccagcccgtgccgcgagcgcggcctgcaggaggttatggaaacaaaggacatgctttacatcgtcactgaatttgctaaa

SEQ ID NO: 42871 - DNA, 100 bp, Homo sapiens
aaccacagctctattcccatggacccagatatcagttttagagaatgtggcgtggagaaattctcaaggaaagagtaaaatgctggtgatgtgctgaggg

SEQ ID NO: 42872 - DNA, 83 bp, Homo sapiens
ctcgctaacacggcttctccctgacctcttaatttcaggagtgtgccacctgggcttgaaggcatgaaggaacaggacctgtg

SEQ ID NO: 42873 - DNA, 100 bp, Homo sapiens
gaaggctgaagagattgctaatgagatgattgaggcagccaaggtacctgaaagaattccgcacagagcagtgcccactctttgtgcaacacaaatgcac

SEQ ID NO: 42874 - DNA, 100 bp, Homo sapiens
cagcctttggacaactattttcgtcatctttggaacaaagtgccggtggtggtgtgcacattgagccccggtatagacagttcccccagctgaccagatc

SEQ ID NO: 42875 - DNA, 75 bp, Homo sapiens
ccggactgcagaagctggcggacattatccagggcttgctctcaattttgcgcaagttgaaaagtgcaccagacc

SEQ ID NO: 42876 - DNA, 75 bp, Homo sapiens
tcatcatctacttcacaggaattgccatttgggccagtgtcattcaaagatgtggctgtggatttcacccaggag

SEQ ID NO: 42877 - DNA, 83 bp, Homo sapiens
aggtgggaaggtgtgtccggaggtttgcaggggtgcagtgtgtctggtcttatgagcaaactgtcatcaggagcttaaatagg

SEQ ID NO: 42878 - DNA, 75 bp, Homo sapiens
tgtttgtggatcgctgtgatcgtcacttggaaatcatcgagttccccatcctaaagctaaatggccggaccatgg

SEQ ID NO: 42879 - DNA, 76 bp, Homo sapiens
gaacagaaaaccaaacaccacatgttgtctcttagaagtgggagctgaacgaatacagatatggtccagaaatcag

SEQ ID NO: 42880 - DNA, 75 bp, Homo sapiens
aggcggcagaggattcgctcccagagcagctgcggccaggtcaaaaggctgagtttcaaattctggataatgtag

SEQ ID NO: 42881 - DNA, 75 bp, Homo sapiens
ctgctcatctgcctcgacctcttctgcctcttcatggcgcttctctgaagtagctttggaaagtagagaagaaaa

SEQ ID NO: 42882 - DNA, 76 bp, Homo sapiens
gtgccaggcgccggccggctgcgaagacgcggtgggccgcccctccgattgcaacacctgctcggtataccgtgac

SEQ ID NO: 42883 - DNA, 100 bp, Homo sapiens
ccagcctcaggcgtgcgcggacggtgtgcggggaaagggtgccacactgggaatgcaagctgtccttgcttctgaaccaagactactattgtgccaggaa

SEQ ID NO: 42884 - DNA, 100 bp, Homo sapiens
cggacgagtagggggcgcccgcgcctttgcccccgtgcgcacccccgccccgctcaccttagccccgcgcccgaggactcacaccacccggcaagaactg

SEQ ID NO: 42885 - DNA, 98 bp, Homo sapiens
tgagagtcggcccaaaaagcggcggccgttggaggtggctgcggcagctggatgaccatgaaagctgtggttctaattctaccaaccgtagtactgct

SEQ ID NO: 42886 - DNA, 144 bp, Homo sapiens
ggatttcatagcaacaatatcaggtcgatacctgagaaagcatttgtaggcaacccttctcttattacaatggtggcatggagaaatcgttgtcaaaacagagatgtccgtcagtatgttcaaggttgtggagtgtaactccag

SEQ ID NO: 42887 - DNA, 100 bp, Homo sapiens
tggagcctggaggaggccgaggggaccatgtccgggaggcgcttccacctctccaccaccgaccgcgtcatcaaaggctggagtgcaatggcctgatctc

SEQ ID NO: 42888 - DNA, 87 bp, Homo sapiens
tgggcaatggtgaatttgaaaaggtgtatactcttgatgtaccagatgcattctattactgttatagtccagaccctggtaatgcaa

SEQ ID NO: 42889 - DNA, 100 bp, Homo sapiens
ctctcttggaggagctggaaaggaagtggttacctggaaggaaaggagctgcagaacttgatccaggagctccagcaggcgcgaaagaaggctggattgg

SEQ ID NO: 42890 - DNA, 82 bp, Homo sapiens
ggggctttcgcccgggtcctcctagaaattccccccgaagaagactcccccacatctggagatgccctgtatccaagcccaa

SEQ ID NO: 42891 - DNA, 75 bp, Homo sapiens
cctaggctctatcagactgacccctcgggcacataccatgcctggaaggctggagcattggatttgctaaaggag

SEQ ID NO: 42892 - DNA, 96 bp, Homo sapiens
cggcggccgaggaggaggagggggaagcggcggcggcaaaggaacccttaggagaaatcttgagagtggacagcaattgtgaagatcgccagagag

SEQ ID NO: 42893 - DNA, 51 bp, Homo sapiens
ctgaagaccccacctttcctgatggagtctcattctgtcgctcaagctgaa

SEQ ID NO: 42894 - DNA, 74 bp, Homo sapiens
ggaagatgagagcagcctgaacttacactgtgaaaatacaaaagcaagccgggaggctggctgcctctcctcct

SEQ ID NO: 42895 - DNA, 100 bp, Homo sapiens
ggagaatatgcctatgtaactgtgaaacttggctgtaacttcaaaagaagatttgattctttatttctggactgcatatatatatataacaaggccatta

SEQ ID NO: 42896 - DNA, 83 bp, Homo sapiens
ctccagatggcgtcttccgtgggcaacgtggccgacagcacaggagtggagtcaacatatcaatggagcaagtcacagtcgtc

SEQ ID NO: 42897 - DNA, 97 bp, Homo sapiens
acgcggaccacgggccaactcaggcttgcccatggtgtcagactaaaggcaaacaaggactctctgtataagatttgcttgtaaatgcatcacgaag

SEQ ID NO: 42898 - DNA, 101 bp, Homo sapiens
atatactattgtactatggacttcatcgctttataatggttggtaaaggctttttcctagttcagacaaaggaagtgtccatgaaagctgaggatgctcaa

SEQ ID NO: 42899 - DNA, 83 bp, Homo sapiens
cttggtctcctgtggaatgatggaagccttattgaaggtttttttaacatgtggggatttggaagagtcagcaaacaagccag

SEQ ID NO: 42900 - DNA, 88 bp, Homo sapiens
agaaaaagctattggatcactgaaggaagtaatgacattccaacaatgtctcacccatcttggctgccacccaaaagcactggtgagc

SEQ ID NO: 42901 - DNA, 49 bp, Homo sapiens
gaaaacctagtatttgaccaaagacaatgcagacaccaggaagttgtgg

SEQ ID NO: 42902 - DNA, 137 bp, Homo sapiens
ccagcccaggctccagttgtccgcggttcctcctcctgtcgctgcccgtgtgattactgagactcagacgcagtaaaacgcaggactcttcccgcttggattcgcgaaggtcttgaaaaaatggaacgtgaaaagca

SEQ ID NO: 42903 - DNA, 100 bp, Homo sapiens
aaagacagtgttctgctttcatggagttcacagaagagtcgaggagactgatggtgcatctgcaatgttaatcatggcggaggaaaaggctctggccatg

SEQ ID NO: 42904 - DNA, 75 bp, Homo sapiens
ctgggggctccctggacaactccgagcagggcatgacgtccttgatgaaggccgcgctggacctcacctacccca

SEQ ID NO: 42905 - DNA, 88 bp, Homo sapiens
agaagagctcacgggcgtgcggttcaaggctcagctgaaggacccgcagggccccgggccagggctgttgataatcaggtgtatgtgg

SEQ ID NO: 42906 - DNA, 82 bp, Homo sapiens
cggaaaccggtagcgcttgcagcatggaatacggggtgctttgcattcaggaatacagaaaaaacagcaaagtggagtcaag

SEQ ID NO: 42907 - DNA, 74 bp, Homo sapiens
aagacctactggagcagtcgcagtgagtttaaaaactattgacctgaaaagtggttctggaaaagtgtaccaag

SEQ ID NO: 42908 - DNA, 100 bp, Homo sapiens
ggagaaggcagcgcgttgtacccgaggataaaatggaccagttgctacagatgctgcaaagtacagaccccagtgatgatcagccagacctaccagagct

SEQ ID NO: 42909 - DNA, 100 bp, Homo sapiens
ctggccaacctgagcgaaggcgtctccctggcagagaggggcagttttggagccatggaatgccaagaagaattggcaacgcattcaggagcatttcttt

SEQ ID NO: 42910 - DNA, 76 bp, Homo sapiens
ccaagaggaggacagttcgctacacagcaatgcatcgagcttcctggacaagatcgacgtgatcaagcaggctgac

SEQ ID NO: 42911 - DNA, 75 bp, Homo sapiens
agactttcaaagatggaatcacaaacggcgcacattggtatgatgtggaagtgttcaagaaggaagtgtatcttc

SEQ ID NO: 42912 - DNA, 83 bp, Homo sapiens
aatcagtctgaaagtacctgctatgaagtggcgctcctgaggaagttgccttaaagaatagacaagagctgtatgcactacct

SEQ ID NO: 42913 - DNA, 98 bp, Homo sapiens
ctttttgcacactgtcagcaaaacacgtccctttgagtatctccggctcaccagccttggagttattgacaagcaatcatctccttgggccaaaacca

SEQ ID NO: 42914 - DNA, 75 bp, Homo sapiens
attcctgctgttcccagaagcgaagtggagagcgccagagtaatggtcaggatttgcatgaagatgtcgaagaag

SEQ ID NO: 42915 - DNA, 98 bp, Homo sapiens
gagggggcgctgagctgttggggaaagaccacagcaagattctttcattcgtctcctcctagcctgggggaccaggctcgaactgaccctggacatca

SEQ ID NO: 42916 - DNA, 83 bp, Homo sapiens
catcgatgtgcggcgtccgctgtataaggaatgctgtctctgcaatttgagaggaggtgctcttaagcaaacgaagaacaata

SEQ ID NO: 42917 - DNA, 82 bp, Homo sapiens
ccgcagcagtcagggacatttctgaagcgagcgtcttcgatgacaatgcagatcttcgtgaagactctgactggtaagacca

SEQ ID NO: 42918 - DNA, 97 bp, Homo sapiens
gcaaatggaagcctcctatgattgacaatcccagttaccagggtaatctacagttgctgcagaactgcctggcagtgttaaatggagacacataagc

SEQ ID NO: 42919 - DNA, 95 bp, Homo sapiens
cgccgccgaagaagcatcgttaaagtctctcttcaccctgccgtcatgtctaagtcagagagatgtggtgcaattgctgaacaaaccccgatttt

SEQ ID NO: 42920 - DNA, 80 bp, Homo sapiens
agtcgctggagtccgcgcctccctgggcttcaacggaccacaccaaaatgccatctcaaatggaacacgccatggaaacc

SEQ ID NO: 42921 - DNA, 100 bp, Homo sapiens
ggctgactactggctggacgtgctgtacagcaagtgagtgagatcattggccgagacctgagtggcttccctgcacctcctggagaagagcctcctgcct

SEQ ID NO: 42922 - DNA, 100 bp, Homo sapiens
atcaaatcatactccttcccaaagcctggccacagaaagtgtctttggtgcaacactaacaaggcttgtctggactacccagttacaagcgtcttgccac

SEQ ID NO: 42923 - DNA, 100 bp, Homo sapiens
catgttctcctgccctgaagcaggtttccacttgagcggcacagtgacagaacctgcaatacaatcggagccagaaactgtttgcaacgtggccatcagc

SEQ ID NO: 42924 - DNA, 97 bp, Homo sapiens
cacctgtacccatatggactgtgggagagtttctctgatatggactgtgatgcgggttatccggtgttggctcctgctgcttactatgaccaaactg

SEQ ID NO: 42925 - DNA, 100 bp, Homo sapiens
gtcctaccatgtcagccttcccagtagctgggaccacaggattccagtggaatgacactggtgatgcttgccgccgccggagggcaggacgacctcctgc

SEQ ID NO: 42926 - DNA, 83 bp, Homo sapiens
gtgggcgcatatcctgggtagcctctaggaagcgctagacacattggaagtatgcgagacttaagagctcaagtgactagtgg

SEQ ID NO: 42927 - DNA, 100 bp, Homo sapiens
gaaatgtcatgcctctgaaaatgaagatgttcctcctgctgatcaagagaagctttttatccagaagttacgtcagtgttgcgtcctctttgactttgtt

SEQ ID NO: 42928 - DNA, 75 bp, Homo sapiens
ggaaggaatatatcctgactgattggtcaaaagcggctggtgctttccgaaagctgctcccgggactccatgagc

SEQ ID NO: 42929 - DNA, 90 bp, Homo sapiens
gaatgactggaaactgattggaaactctttgggaaagccactcgaaaagaattccttgtgtggatatcagatccggatggaatctcgagc

SEQ ID NO: 42930 - DNA, 97 bp, Homo sapiens
aacatctgggagaatatttaatggaaaatcgcttggttaaaacctgacacttttaacaggctaggcagctggaagagaaagaccgagtgctaaagaa

SEQ ID NO: 42931 - DNA, 90 bp, Homo sapiens
gcgacgccggggacgcccgcgcgacgagcaggtggcggcggctgcagatgaaggtcaccgtgtccaaagggggcgaccgggacagtgacg

SEQ ID NO: 42932 - DNA, 90 bp, Homo sapiens
ctcgccaaaaaggacatctttggagccagagtgcctggaagagctgggatgtctggttgagtcctatggcatgaatgtttgccaaccaac

SEQ ID NO: 42933 - DNA, 98 bp, Homo sapiens
tggagaggctgtgagccacaatgcatcgctggaagtagccaccttatgattctgcagatgactggtctgagcatattagctcttctgggaaaaagtac

SEQ ID NO: 42934 - DNA, 100 bp, Homo sapiens
ggtgcagaatgccttcttcactgaccccaatgaccagagtgcctggttttatcaccgttggctcctaggccgagcaatattttggtgtttaagcttggag

SEQ ID NO: 42935 - DNA, 83 bp, Homo sapiens
ctgggaactccgccatgtcatccacttcgcccaacctccagcatttgcaagtgaggaagcagcacaaccctgggttttagata

SEQ ID NO: 42936 - DNA, 88 bp, Homo sapiens
caaggcacaacaggctgctctgggattctcttcagccaatcttcattgctcaagttctcccatgggcaggtggtctctctggatgagc

SEQ ID NO: 42937 - DNA, 80 bp, Homo sapiens
tttgatctaagggttcagcctttcaatgtgacacaaggaaagtattctacaggcgttatctggaatgcgacacgtatggc

SEQ ID NO: 42938 - DNA, 98 bp, Homo sapiens
agcagagcgccagcatgaacttgggggtcagcatgctgaggatcctcttcctcctggggatagctgggagtatggccaccctgctccacgatgcggta

SEQ ID NO: 42939 - DNA, 100 bp, Homo sapiens
agaggcagacgacgacagaaccctgtacaatttgatagtcattcgtaatcagcaggccaaagactcagagcgactgcatttgcctccagacttgtcagac

SEQ ID NO: 42940 - DNA, 100 bp, Homo sapiens
ttgccatgaggaaagaattctccgaggccctgaagaggaaagtgaggatgactctcatctcgaaggcagggatcctgatatttggcatgttggttttaag

SEQ ID NO: 42941 - DNA, 88 bp, Homo sapiens
ttacatccattattgggaaatgtcaagatctgctaggatccagcttaagagatccagtactggagtcggcagaactggagtaaaatcc

SEQ ID NO: 42942 - DNA, 90 bp, Homo sapiens
actttggaaacctccatatacagatgaaaataaaaaagttggtttggcattaaagcagggaggagagagcgatggcttttttcacccaga

SEQ ID NO: 42943 - DNA, 74 bp, Homo sapiens
gaccagatgtgcctaggctcggaagcacgttcagtctggatacctccatgaattatatccagatcgagagacag

SEQ ID NO: 42944 - DNA, 51 bp, Homo sapiens
agtacctttatgaaccagtgtatcccaagatgtgattgacgtcatgaaaag

SEQ ID NO: 42945 - DNA, 100 bp, Homo sapiens
acatctgctcctccaaggcagagcggctcccccctttcggggcttcaagaagcgtgcacctcgggcactcaaagagattcggaaatttgccatgaaggag

SEQ ID NO: 42946 - DNA, 110 bp, Homo sapiens
agaagggccaaacgtgtgtggtgcactacacagttaaaagtttaacaaccggaacagctccagtctgcagctcccagcgtgatcgacgcagaagacaggtgatttctgca

SEQ ID NO: 42947 - DNA, 126 bp, Homo sapiens
aagagctcctggggagagcataactgtggccataaagaagatgctggagtgtcctgtacccctctaacaggtattgagaaggggcaaatcctgtcttcagcagcagacattgctgccacagtacag

SEQ ID NO: 42948 - DNA, 83 bp, Homo sapiens
ctcaagttgcaaggatattcctcatgtatcatgcaaggatattcctcatatatcatgagttaaagttcctcgtaattttcgct

SEQ ID NO: 42949 - DNA, 75 bp, Homo sapiens
caaggtgattcagattgcaacgtcatcctccacagctaagaatgttgtaccatctttgggtaggcagacttccct

SEQ ID NO: 42950 - DNA, 75 bp, Homo sapiens
gctgagtcagacaaggactctggcttttcagattcagaatggacagtttagaagaacctcagaaaaaagtcttta

SEQ ID NO: 42951 - DNA, 50 bp, Homo sapiens
aggggccactcagagtcgcccgagaaatagcctgggctggaagctcttct

SEQ ID NO: 42952 - DNA, 82 bp, Homo sapiens
ttccagaagcgcagcagctgcttgaaggtctatcagccacagtctctgcaagtttccaagagcagcagaaaatgaacacatt

SEQ ID NO: 42953 - DNA, 51 bp, Homo sapiens
gttccatcatggcgtcaatgcagattgtgttcaattagaccttcaggacct

SEQ ID NO: 42954 - DNA, 82 bp, Homo sapiens
gggaaccctggtcaccgtctcctcagcctcctggccgcctatgatgcctgtgccacccccaaggaacaagagacactgctga

SEQ ID NO: 42955 - DNA, 100 bp, Homo sapiens
ttttgggagatgggagatggtgctatacggtctttagggttacgtgaagtcaagtaaaatcgcacactgggagagataatgcatgtgagaaaacttcata

SEQ ID NO: 42956 - DNA, 101 bp, Homo sapiens
cctgttcttgaatacattgatctggtcagcagtgatgatgaagagcctagcacctcttatactgattagccggatcgagctgggagatgtgacaccacaca

SEQ ID NO: 42957 - DNA, 100 bp, Homo sapiens
ggagagccggagtcggggacccaggagtttcctgtgtccagcgctgccggagccgcctgagtaaagatgacggcgccttgaggtaagctacaggcaacac

SEQ ID NO: 42958 - DNA, 80 bp, Homo sapiens
agcaaccctgggtttcagtacagcctcgaaaggctatactgtggctagaattaagctcggagactaccatttctatgggt

SEQ ID NO: 42959 - DNA, 74 bp, Homo sapiens
atgttttgatgattggcagagacccactgtctgcactggaagacgcaacgcagtgaggagtatgaagcggaagg

SEQ ID NO: 42960 - DNA, 75 bp, Homo sapiens
ccagtgatggaccgtgctagtgacctgactgatgccttcgtggagatcatggaagggaagtggttgctgtgtatg

SEQ ID NO: 42961 - DNA, 100 bp, Homo sapiens
cgagcacaactcgacctcctatgactctgcagttagtttggacatatttgactcttttccccccaggttgaattgaccaaagcaatggtgatggagaagc

SEQ ID NO: 42962 - DNA, 75 bp, Homo sapiens
cggacctctggagtgcccccagcccagagcccggttcccatgatcagtggtgaaatatagtgattttcacctgtg

SEQ ID NO: 42963 - DNA, 106 bp, Homo sapiens
ccgagagcgcgaatatcgtcatcgttagaaggtctgaagaactgttgcccaattcaacagtgccagcattccaactttgttaaacctaccaacatcttaaatggac

SEQ ID NO: 42964 - DNA, 100 bp, Homo sapiens
tgcacgaaagctttcctaggccaaaaagagcccatcgatggtatacatgacaaggggattgtagaagacatccattgtggatccatgaagggcactggta

SEQ ID NO: 42965 - DNA, 75 bp, Homo sapiens
gaaaaaataagaaggaacccaaagaaccatctcccaaacaggatgacttagaaggttttgactccgtggtatcat

SEQ ID NO: 42966 - DNA, 98 bp, Homo sapiens
cagaaggatctctccttaacgcctttcaccattaagaggaaagcgatggaggagctgagcgctgatgagggagccagctctccgtggaccggcggcac

SEQ ID NO: 42967 - DNA, 102 bp, Homo sapiens
cgccttcccaggaccctcagggagagcgggcagccttccaggtggacaggattcggggaaactgcaaggcttatttcaggcagcattggagctcagcacaag

SEQ ID NO: 42968 - DNA, 82 bp, Homo sapiens
tgaaatcgacacacaaagaatagagttgagcctgtgggacacttcggaacactctgctccagccaaggtggtgagggcagct

SEQ ID NO: 42969 - DNA, 50 bp, Homo sapiens
cagatggcagccagtcagtggtggagaggcatttcatccttcatgaagcc

SEQ ID NO: 42970 - DNA, 75 bp, Homo sapiens
acggatgttgcagatgttttacttcaagcaggggctgatttagttctgacaacaaaggagattgtgacatattgc

SEQ ID NO: 42971 - DNA, 98 bp, Homo sapiens
cagaaatttatagataacaggatcatttcatctaagtgagaagattgctcacgtctggcatcgtgattcaggtgtttccactgcatgacagtgaagcc

SEQ ID NO: 42972 - DNA, 50 bp, Homo sapiens
ggctgttcgaggccttgactgtagcacaggttggagctgaaggagtgccc

SEQ ID NO: 42973 - DNA, 100 bp, Homo sapiens
atgactctgctgaggagggggacctactggatgatgatgataatgaagatcggggggatgaccaggtgggaaagcagtgccactctccgcttcacagatg

SEQ ID NO: 42974 - DNA, 96 bp, Homo sapiens
ttccagcggcctcccacgctggaggagttgtccccacccccaccggataaacggaatgtgttggaaaggacaacaaataagaagttaaatatgtgg

SEQ ID NO: 42975 - DNA, 100 bp, Homo sapiens
aagattttatctctagcagcagaaaaaacagcagacaaactgcaagaatttcttcaaaccctgagagaaggtgatcttttcagtttcatagaggttccca

SEQ ID NO: 42976 - DNA, 100 bp, Homo sapiens
gctcaagcaatctgcccacctcggtctcccaaagtgctgggattacaggagtgagccactgcgccctgcctggaatcttctgcggcttgtccatagtgtg

SEQ ID NO: 42977 - DNA, 74 bp, Homo sapiens
ggcgaaggcgggcggcagaggcgatcagaggcggggtttcaccatgttgcccagactggtcttgaactcctgag

SEQ ID NO: 42978 - DNA, 98 bp, Homo sapiens
cctgtgcttcaacaaaggacactacatcaaggactgcccccagtttgtgaagaaatatgggaacctttttagcttggagcttggtgacatatctgcag

SEQ ID NO: 42979 - DNA, 100 bp, Homo sapiens
ccggcacccagacaggtggcgacggcagaggagagcttgtgcagtggaggggtcaaagaaaactgatgttgaggagagaccaagaacaacactgatcatc

SEQ ID NO: 42980 - DNA, 75 bp, Homo sapiens
ccacagaccctggaagaaagcccctctcacacaggttcctggatgcctatgctgagcacaagttacagttctggg

SEQ ID NO: 42981 - DNA, 90 bp, Homo sapiens
ttgcgctcagacgagtaacttcggcaaagggatggggagaggtgaaaggtgtagcagtcactcggcctacacccacagcatcgaccttgt

SEQ ID NO: 42982 - DNA, 98 bp, Homo sapiens
agtgaagacacagatgttcctgttcagagcaaccagctaatcttcagataaaccagtcgatcattttctgtaactcctctcagcgagttgaattgcta

SEQ ID NO: 42983 - DNA, 101 bp, Homo sapiens
aagatgcctcctcaaaggggcggcggcagcagcaaactctttagctcttcttttaatggtggaagacgagatgagaagaactgatgaccaccccaatttta

SEQ ID NO: 42984 - DNA, 87 bp, Homo sapiens
gccaagagggatccttcacccgtgtctggattgaaagaaggtggcaagaggaagaagcagaagcagagagaggagtcgaagaagaag

SEQ ID NO: 42985 - DNA, 90 bp, Homo sapiens
agcaagtaaaggctggacaccagaagtcagcatccggtattgtagctgtccctttcagcgaatggctccttggaagcaaacctgccagtg

SEQ ID NO: 42986 - DNA, 83 bp, Homo sapiens
aagacaggtgcacttgcttttggatatgttggcagctattgctggaccaggttatggaggttttgatgactatggtggctata

SEQ ID NO: 42987 - DNA, 101 bp, Homo sapiens
gagaggaccaacggagcgctgaggcgggcgttttcttggatgaattgcttgctttggaggatggccgagcctcgatttaacaacccctacttctggccccc

SEQ ID NO: 42988 - DNA, 83 bp, Homo sapiens
agaggctgtttgatgctgagaagatcagtacgagtatgcgttgagacatttgtacgtgctggtcaacctttgtgagaagccgt

SEQ ID NO: 42989 - DNA, 97 bp, Homo sapiens
cctacaggatgctacccgtaaggaaaggctcctagaagactccaagggagtaaaagagctgatgaaacaatggcaaaaactgaggcttcttgaagag

SEQ ID NO: 42990 - DNA, 101 bp, Homo sapiens
tgagccagaaacatgctgagcctttgacaggctcacagaacatttcctgcctgttgctcacactctgttgtccacagcatacccgcaccctagatggctga

SEQ ID NO: 42991 - DNA, 100 bp, Homo sapiens
ctcctggaactgctgcacatatatgttggcattgagtcaaaccatcttctcccaaggtttttgcagcacgggctgtatattgggagttggacttgttctg

SEQ ID NO: 42992 - DNA, 96 bp, Homo sapiens
aacagattaaggtgctggaggtgacggaggagactctccaacatgtgccttctgaccatacaaatgaaacttccaacagtactgtgaaaccaccaa

SEQ ID NO: 42993 - DNA, 51 bp, Homo sapiens
gcggaggtgctgggagcgagttggctggtctctgctgctgatgaagctgtg

SEQ ID NO: 42994 - DNA, 75 bp, Homo sapiens
ccttactatttgaaacatccctcacattgaaatatgattgagaggatccagaatccagatctctggaatagctac

SEQ ID NO: 42995 - DNA, 75 bp, Homo sapiens
ctcgatctggccctaaccacagagtcaccttgaggtgattgtctgacaagcagaggcatgagctgggtccaggcc

SEQ ID NO: 42996 - DNA, 100 bp, Homo sapiens
gcccaaggctggccagacactgcagcagagggttttccagatcctagacagtaaggtctaacttcaaacttgtggctgttaattcaaaactctatgccat

SEQ ID NO: 42997 - DNA, 100 bp, Homo sapiens
tgacgcggcgccggccagaaatccgaccggaccgggctcgggggagcgtgagttgcaggcattgaacctggccacatcccaggtaccgtgaacatcccct

SEQ ID NO: 42998 - DNA, 100 bp, Homo sapiens
tgctggactccaccaacgccgacggtatcagcgccctgcaccagctgaagaagcatctgtagggaatccagaaggagcgttcatgaagatgttacaagcc

SEQ ID NO: 42999 - DNA, 49 bp, Homo sapiens
agcagagcatgatcctcttaagggtcctcatgctgataccgccagtgga

SEQ ID NO: 43000 - DNA, 88 bp, Homo sapiens
tgagctttagccgagagtacacagctgctgtagaagccaaacaagtgggtgctgggtaggccaggtttcagcatcgcagacaagaagc

SEQ ID NO: 43001 - DNA, 87 bp, Homo sapiens
acttcatgaacctcagcctggcggactgccttctggtcaacctggcctacgagtcctccgtccctggcaggtgcccggcccgccccc

SEQ ID NO: 43002 - DNA, 100 bp, Homo sapiens
tttgagcagatgagagccaacgtgggcaagttgctcaagggtatcgacaggtatgtcttactgaaagaaagaaacatgcttctaaccctagagcaggagg

SEQ ID NO: 43003 - DNA, 100 bp, Homo sapiens
gcggacctggtacctcttttgtgaagcggcagctgaggagactccggcgctcgccatggccgacgaaaagcccaaggttttcttccacccctgagatggc

SEQ ID NO: 43004 - DNA, 82 bp, Homo sapiens
cctttcttatttctttactcaacctctttgatgacacagcagccctgggaggagcggggacactgaggacctctctccaaat

SEQ ID NO: 43005 - DNA, 75 bp, Homo sapiens
tctgtgggttacgccatctttaagctcatgatggagcagtccaagaagtcctccctcatggtggcccgcagtatt

SEQ ID NO: 43006 - DNA, 97 bp, Homo sapiens
ggtaccatatccagcacctgcggccagatagccagttacccgctggccctggtccggacccgcatgcaggcacaagaaaaactgcttaaggttgaaa

SEQ ID NO: 43007 - DNA, 82 bp, Homo sapiens
cgattcctcctccttggtcgccgcgtccttggctggcgtcttgcgcgatctctggcctcttcaactgcatcaccatccaccc

SEQ ID NO: 43008 - DNA, 99 bp, Homo sapiens
agagcttcctggccatctgtccagcaggtcttatcacaatggccatacttagaacatgagcaaggatttcaattgacttctgaagtaaatctgtcttga

SEQ ID NO: 43009 - DNA, 90 bp, Homo sapiens
cagattcgcagtggtcgcttcttctccttgattgtgaataagtggaatacagctctcattggccttatgacatactttcgggaggctgtg

SEQ ID NO: 43010 - DNA, 100 bp, Homo sapiens
cccaggctttttatggctgtgagacacgttaaaatttcaggactagacgcttgaagcaaagctgccatcccagaagacgacatgctctcagcaacccccc

SEQ ID NO: 43011 - DNA, 100 bp, Homo sapiens
gggaaatcgtgcacttgcaggccgggcagtgcggcaaccaaatcggcgccaaggttcacaataaaggtgctaagaaagagaatgtaagacaggaaaataa

SEQ ID NO: 43012 - DNA, 83 bp, Homo sapiens
tatcacccatgtggtatgcaccaaccttcgttcagaaaaacctggtctatggcacaactaaaaaggtttgccgcagacccaaa

SEQ ID NO: 43013 - DNA, 75 bp, Homo sapiens
accgtccgccagtcgtcccgaggaattcctggtgactggaagggggagtgactcaggccctcaacctctagcagg

SEQ ID NO: 43014 - DNA, 100 bp, Homo sapiens
attgactattccattgtctagactttgtgttccaagatcagagggctacttctacaagtccgaacagccagtccagcaaaatgaacagcattgtctacca

SEQ ID NO: 43015 - DNA, 75 bp, Homo sapiens
ccggggcctgggtccacgccgagggcaggacgaacttcaccagattccttttggttccaagtccaatatggcaac

SEQ ID NO: 43016 - DNA, 74 bp, Homo sapiens
gggtcttttttgcctcctggagggtcgtgctggaagggttatgtggtccgaatcagtggtgggaacgacaaaca

SEQ ID NO: 43017 - DNA, 88 bp, Homo sapiens
agaagtggctgtagggagcatagctgctacactgaagatgaagcaaggcccaatgacccaggcgcaacgaagtaaacgaggaggttgg

SEQ ID NO: 43018 - DNA, 100 bp, Homo sapiens
aaatggtgatgccactttgaaatttgaaccatttgttcttcatgtgcagtgtcgacaattgcaggatgcacagattctgaagcgaatgtctgtgacggag

SEQ ID NO: 43019 - DNA, 96 bp, Homo sapiens
tagatccaaagccattcccaaattatagagctaattacaactttcggggcatgtacaatcagaggtgactgtaatcaatgagagactgaagacaga

SEQ ID NO: 43020 - DNA, 75 bp, Homo sapiens
acagtcctcgtcagcactgactttcagctatggaatcgtctgatctgaaatgtgtccaggatgccaagggaggtt

SEQ ID NO: 43021 - DNA, 100 bp, Homo sapiens
atacagatcacgttccagatctcgatcatactcacctcgtatctcgggggagctttgtgccttgatggatcaagttcatcatatgcagcactcaaaatgg

SEQ ID NO: 43022 - DNA, 100 bp, Homo sapiens
tctgaactcaggacttggcaagccaagaggcaacagcgaaaactcaacttcttaattacccagacagagttgtatgcccatttcatgagtcgcaaacgag

SEQ ID NO: 43023 - DNA, 76 bp, Homo sapiens
atagagaaggacattgcggctcatatcaagaaggctgctggcaaaggggacgtcccaacgaagagaccacctgtcc

SEQ ID NO: 43024 - DNA, 97 bp, Homo sapiens
gctgctgggtccgctgagcggggcgacccgaggtcgggtcacaaatcttcgaagagtgacatatgttgttttagatgaagcagacagaatgtttgac

SEQ ID NO: 43025 - DNA, 90 bp, Homo sapiens
gcggtgcaggagagcgcgcgaagtacgggaccgagatgatgcagaacttactcttggaagaaggcggcctggtccaggtggagagcgtca

SEQ ID NO: 43026 - DNA, 100 bp, Homo sapiens
gggaaatgtctgccgccgccggctctcgggagcgcaacactgcaggtactccaaagattcaggtttactcacgtcatccagcagagaatggaaagtcaaa

SEQ ID NO: 43027 - DNA, 90 bp, Homo sapiens
gtcagagtggtggctacagtgaccggagctcgggcgggtcctacagagacagttatgacagttacgtccaacatgtttaccgtggctgat

SEQ ID NO: 43028 - DNA, 101 bp, Homo sapiens
attgactgctgctggggctgggctcgccagtcttggggacagtgtcagcgtcctgggaactccaacaagggagcaaatcagagaaatgaacccaaactaca

SEQ ID NO: 43029 - DNA, 90 bp, Homo sapiens
gaaaaacttctttcacatggtacaaatattgaagaatgcagcaagtggatgaatacattgccattgccaaagaaaagcatgggtacaaca

SEQ ID NO: 43030 - DNA, 78 bp, Homo sapiens
aaacttcatggggaactgcaagacaggaagagaggccgtgcccctcaggacttgacacagcaagcaaaagacatacag

SEQ ID NO: 43031 - DNA, 73 bp, Homo sapiens
ccccgcagccccccaacatcctgctcctgctcatggacgacccacacccactcgcccgggtctatggccacgg

SEQ ID NO: 43032 - DNA, 90 bp, Homo sapiens
gcgaaagcaatccagaaaagagtaccctgtgcttatgacaagactgccttggcattagaggcgaacccggcagtaccagaggtggaaaat

SEQ ID NO: 43033 - DNA, 100 bp, Homo sapiens
cagagcattttagatgatgttgccatggagccttttgtggcagatgaatatattgaacgtcttgtatggagaaccccaggaggaggctctagaggtggac

SEQ ID NO: 43034 - DNA, 75 bp, Homo sapiens
cgccgcgccggaggaggccgagacgctggcagagaccgagccagatattgatgatgttaagaagttcaaaccggg

SEQ ID NO: 43035 - DNA, 51 bp, Homo sapiens
aggccgggatggagccccgcggagctgaaaatgtgtgtctgacatgcaagc

SEQ ID NO: 43036 - DNA, 76 bp, Homo sapiens
taggaggctgtcctgtctgcagtattgcctaagtgtaatcttgaacatgggcggtgctgtgagtgctggtgaagac

SEQ ID NO: 43037 - DNA, 83 bp, Homo sapiens
ttcgaacttttgacacggctttggaaacgacgtcatgtgttaggtgacggcaattgcctcatgcatgccacttctcagtacat

SEQ ID NO: 43038 - DNA, 74 bp, Homo sapiens
ccccagatgcccaccgggatggagaaggaggaggaatcgagatgtgctccggcatctattcgcctcatggacaa

SEQ ID NO: 43039 - DNA, 50 bp, Homo sapiens
cgcactttccccatcaccagtggagtgtgcactcacctagttaggcctat

SEQ ID NO: 43040 - DNA, 90 bp, Homo sapiens
tgagtatgatgcacctgcagtaggttatgaagacagtatggagtttccagaccatagtagacatttgctacagtgtctgagcgagcagag

SEQ ID NO: 43041 - DNA, 90 bp, Homo sapiens
gggaaacaatccctcgcctccggaggcggcgaggagcggcggatctctggaaacatggctacagaacatgttaatggaaatggtactgaa

SEQ ID NO: 43042 - DNA, 96 bp, Homo sapiens
ctcggcagcatggcgtccgtgacgctgagcgaggcggagaaggtgtacatcgtgcatggcgtccaggttgaaatcacaaagattagacaccttttt

SEQ ID NO: 43043 - DNA, 97 bp, Homo sapiens
caatcatgaaccaggaaaaactcgccaaactgcaggcacaagtgcgcattggtgggaaagcatggattccgtgaaggaacaacacctaaacccaaga

SEQ ID NO: 43044 - DNA, 101 bp, Homo sapiens
acgaaaacgtagggaccacatcaaagacagctttcacagtttgcgggactcagtcccatcactccaaggagagaaggattggatagctttagtcaaagcag

SEQ ID NO: 43045 - DNA, 75 bp, Homo sapiens
aagggacaatggacttctggctttggccactttacttcctgccagggacgcactctctgagatattttcgcctgg

SEQ ID NO: 43046 - DNA, 90 bp, Homo sapiens
cgcaggcctcgtgccgttacggccatcacggcggccgcagtggcgtcctggagccctcctcaggatgcttggatattaattcatctgtga

SEQ ID NO: 43047 - DNA, 51 bp, Homo sapiens
cttagaccacagcgacgaggacgactgccaacatccagtcatggataaaaa

SEQ ID NO: 43048 - DNA, 117 bp, Homo sapiens
cagcgccaccatccacgccagccgcaccatgccgctcctaagcctgcacagccgcggcggcagcagcagtgagagccttcctctctacacagggcttccacgtggaccacacggccg

SEQ ID NO: 43049 - DNA, 82 bp, Homo sapiens
gcaaagtgaccgttggagtttaatgagaggaatatactcatcatcagtctatttagaagagcaaattgtggctactaatttg

SEQ ID NO: 43050 - DNA, 98 bp, Homo sapiens
caaacattattgctatgggatttcctgcagaaagacttgaaggcgtatacaggaacaatattgatgatgtagtaagaaacattgctgaggctcttgtc

SEQ ID NO: 43051 - DNA, 83 bp, Homo sapiens
ccctcatcgccctggccgacaagcacgcaatgcctccggagccagcgtggtggccatagacaacaagatcgaacaggccatgg

SEQ ID NO: 43052 - DNA, 100 bp, Homo sapiens
gtgggcctcaacaagggccacaaagtgaccaagaacgtgagcaagcccaggcacagccgacgccgcgggggagcgagtcaaggccatgttctaccacgcc

SEQ ID NO: 43053 - DNA, 75 bp, Homo sapiens
agctgtggccgtctccagggaacctgaagctctttgaaagtgatgagccctcctcttcagctaggaaaatgacgg

SEQ ID NO: 43054 - DNA, 100 bp, Homo sapiens
acgagaggcagcgccatggcggagcagacctactcgtgagacgtctcagagaggctgtgcagctgctggaggactataagcatgggaccctgcgcccggg

SEQ ID NO: 43055 - DNA, 100 bp, Homo sapiens
cttccagttcgcagtcaagatctcgttccagttccagagaacgttcgagatctcgtgggtcgaaatcaagggtatttctcaagctgccagatacgtttac

SEQ ID NO: 43056 - DNA, 74 bp, Homo sapiens
ggggacgagcccgcctccagctccaggccggtccgctgccagtcaatgcaaaatcatgctgccgtgttccgtgt

SEQ ID NO: 43057 - DNA, 100 bp, Homo sapiens
gaaggagcatatctttattccagcaatctacagtcctggcctgaggaagctgtcggcagcatccagcccctccagtcacagtcctcacagagcttcagga

SEQ ID NO: 43058 - DNA, 75 bp, Homo sapiens
agcaaacaaaacttatctcctgaggagaagcaaaacaagctatcgatcagggaagatctccagttataatagata

SEQ ID NO: 43059 - DNA, 90 bp, Homo sapiens
cgagaacggtgcttctatggcaggatatgatccctaaagaagtggctgacatctttaacgcccccagtgatgatgaagagtttgttggct

SEQ ID NO: 43060 - DNA, 75 bp, Homo sapiens
agtggagctcagccaggggcagccggctctggtgctcccagaagagggactggtgattgcagctggaagtgccca

SEQ ID NO: 43061 - DNA, 100 bp, Homo sapiens
tttctccagcgaagaagtagacatggcgagcgactccccggctcgaagcctggatgaaatagatctctcggctctgaggtactctgtgcaaaaaacctgg

SEQ ID NO: 43062 - DNA, 115 bp, Homo sapiens
tgtgtaggttgttcaacagtgttgtgccagcctacaggaggaaaggccagactcacagaagaattcaaggaagccttctccctatttgataaagatggcgatggcaccatcacaa

SEQ ID NO: 43063 - DNA, 75 bp, Homo sapiens
cagcgaccgatatagctcgccaggtgattgctgtgctaaggagacagcaacgtatgataaaaaatcgagaatccg

SEQ ID NO: 43064 - DNA, 75 bp, Homo sapiens
gagcgcgagagcttcgagcggactcaggtaactgtggagaattttttacgggtattaactgggaggatcccacct

SEQ ID NO: 43065 - DNA, 100 bp, Homo sapiens
ctcagcgttcccctctggcgcctttgctgctcctctctctgcacgggtgggcttggtggaatcaaaaatccgaatcctggttggaagcttggagaagaat

SEQ ID NO: 43066 - DNA, 78 bp, Homo sapiens
agccagttgattttgagcaatggattgaaaaaggcaacagcctcagattccaatcaccacaggaacaggtgttgtgta

SEQ ID NO: 43067 - DNA, 100 bp, Homo sapiens
ttcctggaaagaagccccagcccccaggggaaacctccagaggaacaagggtgcaatatgtgacttctgtgaagcttgggtttgccatggtaggaaatgt

SEQ ID NO: 43068 - DNA, 101 bp, Homo sapiens
catcaatcttgcgactgctgatgtagtaattttgtatgattctgattggaatccccaagtagatcttcaggctatgaatgcagtaatagtggccttgtctt

SEQ ID NO: 43069 - DNA, 100 bp, Homo sapiens
cgggacacgcctagcgcgggctccagctgcagaagaaagatcagcaactggagcctaaaaaaagtaccagccctaaaaaagctgcggagcccactgtgga

SEQ ID NO: 43070 - DNA, 83 bp, Homo sapiens
agctactgcgacgccgccttcgctctggagcagatttccaaggtgcccgtggttgacacgagctgtgtccccagctgttcccg

SEQ ID NO: 43071 - DNA, 100 bp, Homo sapiens
ccgagggggagccccgcgcgcggcgtcgggaaaggaaaacctcttcagcgcaaggtgaaaccacctaagaagcaagaggaaaaggagaagaagggaaagg

SEQ ID NO: 43072 - DNA, 129 bp, Homo sapiens
gaacatggtggatgctcaaccccgggatgtaaagggattggccatttcaagagagcgagacatctgggccctcacagattctggaacttttcaaagcctgactctcttcttgaaacagtggagcatcat

SEQ ID NO: 43073 - DNA, 75 bp, Homo sapiens
cagaagtagaaagggtggtggctgactgtctgacaaattgttatcaggaggagatgttaaagtaacccatcttgc

SEQ ID NO: 43074 - DNA, 75 bp, Homo sapiens
acgcatcacaggccgcgtctttgacgattgaatatgaacacagagcaccagagtgccgtctgggtctgaaggaag

SEQ ID NO: 43075 - DNA, 74 bp, Homo sapiens
tgaatccttctagagacgtccacgcatgatgccttcttctgtagagtgggcgctttgcagaatacgtgttgaat

SEQ ID NO: 43076 - DNA, 100 bp, Homo sapiens
cccacatcaggacagctgttccttggccatcccaaagctattctgggggcaacagagatatgatggtaattccctgctaagtagcattgaatgttatgac

SEQ ID NO: 43077 - DNA, 82 bp, Homo sapiens
cgcggcggcggcccacgcgcagcgacagggagaggttcgtgctggccgtgggcagcgccgtctttgatgccatgttcaacgg

SEQ ID NO: 43078 - DNA, 82 bp, Homo sapiens
cacagccgcggcggcagcagcagtgagagtgcctccggagccagcgtggtggccatagacaacaagatcgaacaggccatgg

SEQ ID NO: 43079 - DNA, 75 bp, Homo sapiens
gaaagagtcaacagcagtggcaacaggtggaaaggagactatggaaccaggatccagcagtacttcccatccaac

SEQ ID NO: 43080 - DNA, 75 bp, Homo sapiens
cttctgataatcaaccaactgttacaatcaaggtctatgaagataactgcgacctccacttcaaggtggcccgag

SEQ ID NO: 43081 - DNA, 83 bp, Homo sapiens
cggaaaacctaaccatgaagacttgaacttaatacagcaagaaagaccatcaagtttaccaatagtgtgtgtaccatatcagt

SEQ ID NO: 43082 - DNA, 100 bp, Homo sapiens
cgggaccccaacagcgaggagaacagcaacgatattgccctggtccacctctccagtcccctgcccctcacagttccagagagaaggactccctcctgct

SEQ ID NO: 43083 - DNA, 100 bp, Homo sapiens
gagcggccaggccgtgcgccggcctttggtcgcctccgtgggcctcaatgcggaggaaatatttgagagtgtaggagatcgagagctaagacaagtcttt

SEQ ID NO: 43084 - DNA, 96 bp, Homo sapiens
ggaaggcgcctgaagaggacgaaggtgcagattcactttataggaacagcttcagcttcagtgatgaaaaactgaattctccaacagactctaccc

SEQ ID NO: 43085 - DNA, 75 bp, Homo sapiens
tcactactcttggaatcaaagataaatccaaatactgcatatcagaaacaacagatggagtgaaggtacctgagc

SEQ ID NO: 43086 - DNA, 100 bp, Homo sapiens
gcagttggctgtgaatgcacattgtgttctgcaaaaaacaaaaaggatagcctccggcattccaggcaaagcactggcatattgaaaactgccttttcct

SEQ ID NO: 43087 - DNA, 90 bp, Homo sapiens
ggcggcggcggctccagcgtcctaagagcggagctggagttcgcccaaatcatcatcatcgtcgtggtggtcacggtgatggtggtggtc

SEQ ID NO: 43088 - DNA, 60 bp, Homo sapiens
tatgaacaatccgtctggatcacggatgtaggaagtgaactacatcaagatcgttcttct

SEQ ID NO: 43089 - DNA, 76 bp, Homo sapiens
tgatcgtcttcctcttcagccatccaggatgacgcggcatggcaagaactgcaccgcaggggccgtctacacctac

SEQ ID NO: 43090 - DNA, 83 bp, Homo sapiens
gaacgacctagtatttgaatttgctagtaacgtcatggaggatgaacgacaggtagcctttccagtaaatatatgactcaggg

SEQ ID NO: 43091 - DNA, 101 bp, Homo sapiens
cgacctgtggaaacctgtgatccattctcattaaataaatctctggagtgtgaacatggctacgcctcttcattcccgtccatgccgagcccccgactgca

SEQ ID NO: 43092 - DNA, 96 bp, Homo sapiens
gccactcggatgtccataattcaggatgagtctgctccagctgacaaacagtgtaaaccagaggcgacccaggccacttactcaacatcagctgtt

SEQ ID NO: 43093 - DNA, 100 bp, Homo sapiens
cgaggactgcttggccccagaggctctcctggccccacgggtcgcccgacatccagctctgtcacccaagctgcagtgtggtggcatgattgtagctcac

SEQ ID NO: 43094 - DNA, 74 bp, Homo sapiens
aaagggaagtgaaaagagatctgttttcagtgaaaatgcctcgtgtaaaagcagctcaagctggaagacagagc

SEQ ID NO: 43095 - DNA, 100 bp, Homo sapiens
aggggcgcgccgctggctcccgtggctggggctgtgcttctgggcggcagggaccgcggctgcccgagacagttgatattcataaagagaaagttgcaag

SEQ ID NO: 43096 - DNA, 101 bp, Homo sapiens
acctgcaggcagcaccggaggcccaggtctccgtgcagcccaacttccagcaggacaagtacccagtgcccctaggcgtttccgagtccggcagcccaacc

SEQ ID NO: 43097 - DNA, 51 bp, Homo sapiens
gcgctgttccacctcattcaacttcagatcgagaagaagctggaaccactg

SEQ ID NO: 43098 - DNA, 74 bp, Homo sapiens
gcggtggctgcgggactgacgattcaaatctgaacatcaatgatgtactagggaactactcattgactcttgtt

SEQ ID NO: 43099 - DNA, 98 bp, Homo sapiens
tccgacttatttctgtgggcagacattaacattcagtttattcatggaggacacactgctaagatttcagattttagctggaaccccaatgagccttg

SEQ ID NO: 43100 - DNA, 83 bp, Homo sapiens
accagtggtctgctacacaaagagttaagcatccactcatgtgaagtcaatatcaaaggtgcagaatctgggacaagttgcat

SEQ ID NO: 43101 - DNA, 75 bp, Homo sapiens
caaaaaaaggagatgcctggcagccccgctctctgcaagaactggaccccatcctgactgaggtcaccctgatga

SEQ ID NO: 43102 - DNA, 100 bp, Homo sapiens
cattgcagaccagttccagcttggcgtgtcccatgtttttgagtatatccgttctgagacatacaaatacttagaccatgctcagcctccaagcagcctt

SEQ ID NO: 43103 - DNA, 100 bp, Homo sapiens
catgcccagggcggcagcggcggcggttgcgggggggaagtgactgggcggtgccggcgccggagacgatgccgttgttgtccttctattcaggccactc

SEQ ID NO: 43104 - DNA, 100 bp, Homo sapiens
tgccgccgctctgccacggtctgcccacccaacgcgaagacggtaacccgtgtgactttgactgggaagaggagcaggacttggatggtgagaaggggcc

SEQ ID NO: 43105 - DNA, 122 bp, Homo sapiens
ttgaggacctcacttgcttctgggatgaggaagaggcagcgcccagtgggacataccagctgctgtatgcctacccgcggaaacaatgtgatgagaaccattcatggggtgggagagatgat

SEQ ID NO: 43106 - DNA, 74 bp, Homo sapiens
aacaagacggacgtcatcctgatcttggaactattggagaaatgaaggcagaggtcaccaaactacataaaaaa

SEQ ID NO: 43107 - DNA, 75 bp, Homo sapiens
gtgacctgtgaacagggctgtgggatgtgatcttcgtggtggaaagctaaattttaaaaccaccccaatggatgc

SEQ ID NO: 43108 - DNA, 75 bp, Homo sapiens
ctctgagggccccggcccctggatgcacagccccggcgctggtgtggacactgccagcggctgcagccgacttgg

SEQ ID NO: 43109 - DNA, 83 bp, Homo sapiens
gaaaaagtaccttcagtttgtggcagctctcacagatgtgaatacacgtgcggctggaagtatttcgggcagaggagctgatg

SEQ ID NO: 43110 - DNA, 100 bp, Homo sapiens
agcggccgggagcccgccgcgctggtagcggcaagaaactatattcagtctttgactcagatgccgaagatgaactttgcgaatgtatttattggtgcca

SEQ ID NO: 43111 - DNA, 100 bp, Homo sapiens
tgggcatcgccttgctggcctacgtcgccttgttttagagcactttgctgcaagggaccaccacctgcacgaccagaatatgacctggtttgcataggcc

SEQ ID NO: 43112 - DNA, 100 bp, Homo sapiens
ttctttttgaaagctgcctgcggcaaagttaaacacagtgggaatatcacttttgatgagattgtcaacattgctcgacagatgcggcaccgatccttag

SEQ ID NO: 43113 - DNA, 88 bp, Homo sapiens
ggctggaggaggatgaacactatgattaccaccaggagattgcaagcttctcccatggtacaagttgatgagaagggtgagaaagtga

SEQ ID NO: 43114 - DNA, 129 bp, Homo sapiens
gccggccggtgccagcacctttcggcttctgagacggcggcagcagcggcattcagggaactgggaacagccaggtgccccaaagcaaatacgcggagctgctggccatcattgaagagctggggaagg

SEQ ID NO: 43115 - DNA, 50 bp, Homo sapiens
cactgcgctggacaccttctctggtggaatgaatcttacttgttgaatat

SEQ ID NO: 43116 - DNA, 76 bp, Homo sapiens
aaaattacaaggtcgttgaacaagctggataacttgaccttgatggagatcaacaccagcgggactttcctcacac

SEQ ID NO: 43117 - DNA, 116 bp, Homo sapiens
aaaattaaaagaggagcagcatggcatttcagtcactggtttgcagagtccaggacttatcaaactggtttcaaagcacagagctcaagtaatttacaccagaaataccaagggtg

SEQ ID NO: 43118 - DNA, 75 bp, Homo sapiens
cctgccgcccctgcgccgccgagccagctgccaggtttgctggttggctcccgagcagacagcaggaaagaagaa

SEQ ID NO: 43119 - DNA, 75 bp, Homo sapiens
aggacacacccaggaaaagactcaggacggacaagcacagtcttcggaaggtggtaccatggccacatgtctggc

SEQ ID NO: 43120 - DNA, 100 bp, Homo sapiens
cggggacccacagacacagccggggtcgggagccgcccggggcagggctcgggagagcggagcgactactcaagcgacacagagagtgaggacaatttcc

SEQ ID NO: 43121 - DNA, 83 bp, Homo sapiens
atgagctctcagcaagcaactttgagctgcacgttgcacaagatattgagctcctggcagcttgcagagaagaatttcatagg

SEQ ID NO: 43122 - DNA, 100 bp, Homo sapiens
gtttcttatatgtgatgccattccagcactggactcatggaggctgagcatttattcaggagctcttgtccctggcaaagcgaaagcgcagtgactctga

SEQ ID NO: 43123 - DNA, 100 bp, Homo sapiens
aatacttcaagaatagcagaggagcagcatcctggtggggaagaagttttaagggaacaagctggaggtgacgctactgagaactttgaggatgtcgggc

SEQ ID NO: 43124 - DNA, 151 bp, Homo sapiens
ttttttttctctctctctctctcttaagaaaggaaaatatcccaaggactaatctgatcgggtcttccttcatatgccttcaattaagttgcagagttctgatggagagatatttgaagttgatgtggaaattgccaaacaatctgtgact

SEQ ID NO: 43125 - DNA, 76 bp, Homo sapiens
ggggagtgtgtgttgccatcgcgtctccgcctgcagttgatattcactgatggactccaaagaatcattaactcct

SEQ ID NO: 43126 - DNA, 101 bp, Homo sapiens
gcgcatcaggcatgaagaagaatatctatggcaatatcgaggacctggcctactgaacttgacgcactggtatttggccatctatacaccattcttaccac

SEQ ID NO: 43127 - DNA, 83 bp, Homo sapiens
ccacccaccgccgccgcctcccagacaggggcactatccacaaggtggtggaaccgggggagcaggagcacagcttcgccttc

SEQ ID NO: 43128 - DNA, 90 bp, Homo sapiens
gccaccgctccctcttcccacgatcgaagccgcggtcaaggccgccagagaagcctttcccagctggtcatcccgcagcccccaggagcg

SEQ ID NO: 43129 - DNA, 82 bp, Homo sapiens
tgcatgagagtcaccatgctcaaagtgaatatattaagggtgatcagcccatgacctaaacctccagacaaaataaaacgga

SEQ ID NO: 43130 - DNA, 82 bp, Homo sapiens
cgatgcaccgagtccagcccaggaaaatggagaggtgagcagtaggtcatccagtcccagtgtcagaatgattactacctca

SEQ ID NO: 43131 - DNA, 100 bp, Homo sapiens
cggggaggcgcggagcgcgcgtgtggtccttgcgccgctgacttctccactggttcctgggcaccgaaaggaggtaggaaaagtaattggaattgctatt

SEQ ID NO: 43132 - DNA, 75 bp, Homo sapiens
tgggcacgaggaccatgctgggccggagcctccgagaagtatgaggatacatgggctgcacttcacagaagagcc

SEQ ID NO: 43133 - DNA, 75 bp, Homo sapiens
cgcagggcctgcagcgggagctggacggcgagcgcgagcggcgcgagaaagctccaggaacactcggaggtgtct

SEQ ID NO: 43134 - DNA, 83 bp, Homo sapiens
gcgccgctgccactcccgggagcatgaaggaccgaacccaggagctccgcacgcattactctactgactggcagagacaggag

SEQ ID NO: 43135 - DNA, 100 bp, Homo sapiens
acagctatgcatgctgcttttgatgtctgacaacgtggatcgttgttttgaaacgctgggcggggagcgtcggaccagaagagaatcacgccaggaaagc

SEQ ID NO: 43136 - DNA, 83 bp, Homo sapiens
ctgcttcatctctaaaggtccttctaggagagaggtgaaagctctgagagagaccgaactctgcaggtggaactggaaggggc

SEQ ID NO: 43137 - DNA, 82 bp, Homo sapiens
ccaggatctcgggctcggaacgagactgcacgtgttctaatcttaggcgcttcaggcggagttggtacttttgctatacagg

SEQ ID NO: 43138 - DNA, 80 bp, Homo sapiens
cgcatttttgagcctccacctcccaaaaaacagaatggagcaattggaagaaaggtgctttgcaagatatcaccttgtca

SEQ ID NO: 43139 - DNA, 100 bp, Homo sapiens
cagcaacccccacacccagcaccagtggagaatctgtacacagccctgcagagcattgaccgtggcgagatcgtgaacatgctggagggttccggccgac

SEQ ID NO: 43140 - DNA, 75 bp, Homo sapiens
tgagatgtttcatcccaacactgtcaccactgactaaagaagagaaaactgcggcagagcaattcaaatttcaca

SEQ ID NO: 43141 - DNA, 82 bp, Homo sapiens
tgtgcctgaacctctctttcgcttttgtggaactactctacggcatctggagcaactgcaaaacaagctatcgatcagggaa

SEQ ID NO: 43142 - DNA, 83 bp, Homo sapiens
agggacacgcagtgacgagcggccgaagcagctttgcgccttatgccagcctggaccatcttggaggcagtgtaggatcatgg

SEQ ID NO: 43143 - DNA, 98 bp, Homo sapiens
agaaaaggtccatggaggaaaaggtcacagagaagtcagctcttcacagtcattactgtggtatcatttcagatgttgatgaatgcacatcaaatccc

SEQ ID NO: 43144 - DNA, 82 bp, Homo sapiens
ttggactgagtcctgcaggacacagtctgaccagtgcacaggacttcagggcttcctggtgttccacagctttggtgggggc

SEQ ID NO: 43145 - DNA, 100 bp, Homo sapiens
gctttgatgcgcctctgggagagccggtcagatatcgggctgggaccaatcccccagaggtgggaaaatgtggaggagccaaacctggatgagctgctgg

SEQ ID NO: 43146 - DNA, 90 bp, Homo sapiens
ttcatgttgggaagaactgtgtgattgagacgttgatccagcagcacgtgtcatttcattaggtcctgtatctgatgttgtggttagtgg

SEQ ID NO: 43147 - DNA, 74 bp, Homo sapiens
gatcggcggagaccctcgaagtgcgcaaacttgacactcaccctgaccgaggtcctgctgtactagccaccaaa

SEQ ID NO: 43148 - DNA, 128 bp, Homo sapiens
tgccatattgtgtcttccccggccggtccctcgcctcccggccgagctgacgatgatgctgtgtatctggacaatgagaaagaaagagaagagtatgtcctgaatgacatcggggtaattttttatgg

SEQ ID NO: 43149 - DNA, 120 bp, Homo sapiens
caggtgtccgcggggcagacgtcggtgtatgccctggatgagaatgccgagccgctgccgctcatggatttgtgccgtcgctcggtgcgcctggccctggggagggagcgcctgggggag

SEQ ID NO: 43150 - DNA, 100 bp, Homo sapiens
cagaaatggaagtcaagagggaatcttatgcaagagaaagaagacctcaggatatcattgtgtttgtaattggaggagccacctatgaagaggctctaac

SEQ ID NO: 43151 - DNA, 121 bp, Homo sapiens
cagtaatttcaacagaagagtgagagatggaacccgaagaagaaaggattcgttacagccagagattgtggccacagatgtctttaattccaaaaacctggccgttcaggcacaaaagaag

SEQ ID NO: 43152 - DNA, 74 bp, Homo sapiens
agttttgtgtccatgtgaacaactgcttacggagttcctatgctagtcagcatagtcagcttgggcaagacctt

SEQ ID NO: 43153 - DNA, 100 bp, Homo sapiens
aaaaacctgatagtaagaaggtggaggaagacttaaaggcagacgaaccatcaagtgaggaaagtgatctaggcttctctacagtttagcctttaatgcc

SEQ ID NO: 43154 - DNA, 95 bp, Homo sapiens
gagcccccagcgcagcggccgcgctctacgtctcctccgagagccgcttcaacaccctggccgagttggttcatcatcattcaacggtggccgac

SEQ ID NO: 43155 - DNA, 83 bp, Homo sapiens
cccacctgcccggtgcccgaggaggcagccaagctcgtggcctgcctctgcgtgcctgtttgcagacaaggtcccaaagacag

SEQ ID NO: 43156 - DNA, 95 bp, Homo sapiens
gtggggacaaggaggctacagggtacaaataaatgagtgaacgatgttgctctagatacaggaccgagtctcctgccattccgagcaggcctggt

SEQ ID NO: 43157 - DNA, 96 bp, Homo sapiens
gaaggcagtaccgtttcctcagcggcggtgaaggagaacgacctgctcagaatgagaagaggaaggagaaaaacataaaaagaggaggcaatcgct

SEQ ID NO: 43158 - DNA, 82 bp, Homo sapiens
atccatttctcctattgaggagtcaacccgcctgtcttggttagatggctctggattaggattctcactggaataccccacc

SEQ ID NO: 43159 - DNA, 100 bp, Homo sapiens
ttggatatcgaatcccagacctgtgcttctgactatcttctcttcaccagctcttcagatcaatatggtatgggcactaggaaaagacttcttccatcaa

SEQ ID NO: 43160 - DNA, 82 bp, Homo sapiens
tcgggggccgctctgggatcccggccaccagcaattgtccgacctggtcctgtagacgggaaggagcctggacacagtgaca

SEQ ID NO: 43161 - DNA, 92 bp, Homo sapiens
cacactctgcaccgctaggccgtccccgaccttgcctgaacaaggttctaagctggtctatgtccatcaccttcttggagaaggagcctttg

SEQ ID NO: 43162 - DNA, 95 bp, Homo sapiens
agatccatagggaggacggcggaacatctggaggctgggaaatggtgctgatagtctgcagcacaggtttagctgggattatgctgctcaactac

SEQ ID NO: 43163 - DNA, 75 bp, Homo sapiens
ccagcagcagcagtagctatggcagtggcagaagattttaattaggaagctcttcgtgggcggtcttgactggag

SEQ ID NO: 43164 - DNA, 96 bp, Homo sapiens
cgggcccgggggccggggccgcgctgcccgggccgcgaggacgaggcggcgccgccgggctgtggaggtttgtaaccccagatcagaagtactcca

SEQ ID NO: 43165 - DNA, 100 bp, Homo sapiens
aggttctgaagatgcaaggctgggaagaaaggctatttgggggcttggtgctggacatcaagcggaaggccccctggtactggagcgactaccgagatgc

SEQ ID NO: 43166 - DNA, 156 bp, Homo sapiens
agtaattggcctcatcctgccacccacattctccttccttgagatgatgtggaggatttgccctgccctggctgtggccgagaaggtgagctccctggggaaggactggcacaagttctgcctcaagtgcgagcgctgcagcaagacgctgacgcc

SEQ ID NO: 43167 - DNA, 133 bp, Homo sapiens
caacgtgctcttctgagtgcatttataacctcatacccagtgacttgaaggagcctccccagcctcctagagagtgaatctgtccttcgattttccattttatggccacttcctacgtgaaatcactgtggca

SEQ ID NO: 43168 - DNA, 50 bp, Homo sapiens
atggggagcagaaggactcggacacaggggactcgtgggggatgttagcg

SEQ ID NO: 43169 - DNA, 100 bp, Homo sapiens
caatgcatcagctgatgatgacagcagagagtggcagggctgaggacccaaagtcatttcccaggctggcggagattctgatagtatcagcagtgatgag

SEQ ID NO: 43170 - DNA, 75 bp, Homo sapiens
ggcgagatgcctttgttcaccgccaaccccttcgagcaagacgtgggcctctctctggaacgcctacccaactcc

SEQ ID NO: 43171 - DNA, 82 bp, Homo sapiens
cgtcttgcctgtgtcccacttgttcgcggcctatagacgccgcaccaggctgcaggccagcccttcaagttcactatcccgg

SEQ ID NO: 43172 - DNA, 100 bp, Homo sapiens
attcatcagtttgttgtgcttgtcaagatcagaacatacatatgatagttgagaaagacacatattctgatcatgaagaaataaacacaagttaaatatg

SEQ ID NO: 43173 - DNA, 100 bp, Homo sapiens
ccaagaagctttcagaaccttcttctctccagtacctaccttacagggattataattactccttgtggaaatttaatggagccaccatttcagaaccaaa

SEQ ID NO: 43174 - DNA, 100 bp, Homo sapiens
cgtgaccgagagcgtgaccgagagcgcgaatatcgtcatcgttagaaggggaacattttatcaaggctatttatgttttaagtgtggagcgagagcacac

SEQ ID NO: 43175 - DNA, 82 bp, Homo sapiens
gcgaggctgaagaaggccaaggctgcagaagccaaagccacggaggatacgaagcgttttcggcttcctgcccggagctgtg

SEQ ID NO: 43176 - DNA, 100 bp, Homo sapiens
actcctcagtggccctttcaacctgccaaggcttggaattgaaagatgttggccatcgtgatcagatggctgcagctagaggaatcctgcagaagaacgt

SEQ ID NO: 43177 - DNA, 100 bp, Homo sapiens
atcacctgctaatacacgatacctttttcttggcgattatgtggacagaggttattttagtatagaggttgttcatgtcaatggatatggaaagataact

SEQ ID NO: 43178 - DNA, 100 bp, Homo sapiens
gaaacaccatggctgcggcggcccagctctctctgacacagcctcttcgagcactactgctactcccggggcggcatgcgccacagctcctacacctgca

SEQ ID NO: 43179 - DNA, 74 bp, Homo sapiens
atggcttgggactgtctaatgagattggagctattgaaaaggctgtgttctgaagccagacacaagatgaaaaa

SEQ ID NO: 43180 - DNA, 82 bp, Homo sapiens
tgggaacccgcggtggagcgggacacgaacgtgagatggggtttcaccatcttggccaggctggtctcgaactgctgacctc

SEQ ID NO: 43181 - DNA, 104 bp, Homo sapiens
tggggttactgtaaatgggaaggacaggcagagctaaacaaggtatgagaaagtgccagtcatcttggttgggaacaaagtggacctggaaagtgagagagaag

SEQ ID NO: 43182 - DNA, 86 bp, Homo sapiens
ctgtggctgccagaagatagcgaacgtcattaaaacaccaatgaccagccagaagacatttgaatctttggtagactttagcaaag

SEQ ID NO: 43183 - DNA, 100 bp, Homo sapiens
gagcctcctcctctccttctacctgctggggttgcttgtcagtagcgggcaagttggaaaatggatataccttatttgattatgatgttggactgaatga

SEQ ID NO: 43184 - DNA, 74 bp, Homo sapiens
gccgggacaactcggggcggccactcttgccaggaggcatggctatatgcatccagttcatcctcatgtagtta

SEQ ID NO: 43185 - DNA, 90 bp, Homo sapiens
gtcagttttgaaggagaggggtcttaagaagattagattgggaatagaagactgttcgccatggatttccctatcaaccctcagccctgg

SEQ ID NO: 43186 - DNA, 100 bp, Homo sapiens
gatgaacatgtgcttggtgtcgtttttccttgagctgaacgtcttgcaacagtggccgcacgcataggtgagcgagatggaagtgaacgggcagttcgag

SEQ ID NO: 43187 - DNA, 75 bp, Homo sapiens
ctttggtactttcagtgtggaggaatatgggtatcagctctgtgataacagcgtgggggtgctcttcaatgactc

SEQ ID NO: 43188 - DNA, 75 bp, Homo sapiens
tacatctgcaaaaagaccctttttccaaatctaccaaggattcctcctgctttacagtagttctcaacaatctcc

SEQ ID NO: 43189 - DNA, 76 bp, Homo sapiens
cagacaagaggtttcagccagtgcatgaccttactattgcttgggcaatggtagatggtggttcaaatgtgaaagc

SEQ ID NO: 43190 - DNA, 77 bp, Homo sapiens
cttggctctgagtaaaagtctcaagtgatctgaaagtagagatgatggcaggggggactcagatcacacccctgaat

SEQ ID NO: 43191 - DNA, 75 bp, Homo sapiens
ttccagcccgtggtccttctccatattcgagatccgttggctgaatgccttttagtctgcatacatgcatctcat

SEQ ID NO: 43192 - DNA, 98 bp, Homo sapiens
gggacccgaaatccttcctgtaccgcttatgccaggccgatcccgacctggactcagacaaggacgagattgaggagctgcgggccgagatgctggag

SEQ ID NO: 43193 - DNA, 75 bp, Homo sapiens
aatgctgttgctggattgcaaccccgaggtggacctctccaaggacattcagcactgggaatccctgaaacccga

SEQ ID NO: 43194 - DNA, 98 bp, Homo sapiens
ctttggatcagattattcacgaagctctagaaaggtacaccagaggatcgcttcctggcagaatttgggagctgtttattgcagcactgttgtgccct

SEQ ID NO: 43195 - DNA, 83 bp, Homo sapiens
caaaaagaggttgattacagcggcctcagggttcaggcaatgcaaataagcaaatactgcatgtgatggtgataaggaatcag

SEQ ID NO: 43196 - DNA, 50 bp, Homo sapiens
gtaggacaaggagtaggagtcggtgaatatgaccatctcccagaacaggc

SEQ ID NO: 43197 - DNA, 75 bp, Homo sapiens
tgtcttttcttaacctgggaagtggaaccggatatttaagtacaatggcctactctgtgtatgatgaagacattg

SEQ ID NO: 43198 - DNA, 82 bp, Homo sapiens
aagtgggttcgttgtatttgtgacatctgtgggtttaatccaacagaagaaggaacatgcttaccctgctgatgaactcatg

SEQ ID NO: 43199 - DNA, 83 bp, Homo sapiens
ggaaggaacgaggcaaggagctaaagcagcgtgcgttcagccctggggtgagaagcctcacaagtgccaggtgtgcggcaagg

SEQ ID NO: 43200 - DNA, 100 bp, Homo sapiens
ataagaaatgatttttgtaataaacagagtgacagggtgtccgcaatgttgccagtgtctgtctgcagattggctacccaactgttgcatcagtacccca

SEQ ID NO: 43201 - DNA, 122 bp, Homo sapiens
gaggctcagggatgcctgtaccatgatgtgatgctggagaccttgacacttatatcctccctggtttggaaattttagcattcaggtgccaggaatgcagatgggacagccagtgccagaaa

SEQ ID NO: 43202 - DNA, 98 bp, Homo sapiens
ttccctcctcggcctggaaaagacagccagcatttccatcgcagagagctcagaaatatgctcagcaagtcttgcagaaggaatgtcgtcccaagttt

SEQ ID NO: 43203 - DNA, 60 bp, Homo sapiens
gaggaaaaggcccctgtgacctgcttgcagccctgagtgatcgagagactcggctgcagg

SEQ ID NO: 43204 - DNA, 100 bp, Homo sapiens
tcgtagagcacgcccggggcccgcgtcgcgatcgcgacggctacagctacggaagccgcagtttgggtacccagaccccacctacctgacccgggtgcaa

SEQ ID NO: 43205 - DNA, 83 bp, Homo sapiens
gcacatcagtgatgaatgcaagaggcgtttctataagaattggtggtgaagcagtattttccaatttgaagattcatttgaag

SEQ ID NO: 43206 - DNA, 82 bp, Homo sapiens
aggagctggcggagagcggcctgcgggcgatcgggccgaggtcatcatcagatttgaaatatttaaagtggatacaaaacta

SEQ ID NO: 43207 - DNA, 82 bp, Homo sapiens
cgtcggtctgcagcgcggctgaggttgttgatcattatgaaaatcctagaaacgtggggtcccttgacaagacatctaaaaa

SEQ ID NO: 43208 - DNA, 75 bp, Homo sapiens
tcagatttgtaccctagttactcgacccatcaactgactgtggtttttgggacagaggaccagagggatggcacg

SEQ ID NO: 43209 - DNA, 96 bp, Homo sapiens
aactaggagcctgtcctccatgttttataagtattgacattacacagtgttaacaatgcatccacagaggtggcagtaggggagatagtgaaagtg

SEQ ID NO: 43210 - DNA, 100 bp, Homo sapiens
tgcttgggatcctttatcctggtcatcttctatttccaaagtacctagtcgatagtcgctggttcaaacagtggaaaaaatatgttggctttgacagttg

SEQ ID NO: 43211 - DNA, 82 bp, Homo sapiens
gcactcatcctgcacgccggcgagtgccagcgcacttgcacctcctgcgccgccgccccccatccaaggatatgccttcaag

SEQ ID NO: 43212 - DNA, 97 bp, Homo sapiens
ccaccaccaccatctccatcacccaccaacaacaccacaataatccacagccaaggtaccttaacatggggaatcttcttaaagttttgacatgcac

SEQ ID NO: 43213 - DNA, 75 bp, Homo sapiens
aagtcagctgctgaacagttagctgtgattatgcaagcttcattacagtcttcagtacaacaatatgaagaaaaa

SEQ ID NO: 43214 - DNA, 100 bp, Homo sapiens
ggatgataattgggcctccaagagtttggttccgtggctccagatggacagtaccattcgcctattaggaacaagagtgcaagattcaatgccatgctgg

SEQ ID NO: 43215 - DNA, 97 bp, Homo sapiens
gtttgctttttcatcagccagtcaggaaaattgcctaagaattatgacccaaaagttaccccagatccagaaagatggctgccaatgcgagaacgtt

SEQ ID NO: 43216 - DNA, 74 bp, Homo sapiens
ctttgtagcgtggtgcttctgttgctcacagggtactgcgttcaacagatcctgatcgcttccaggtaatgttc

SEQ ID NO: 43217 - DNA, 100 bp, Homo sapiens
tttgactcactagagtcagggaaacagctgatgaccaaacacccaggcaaacgtctgggttgtggacctgaaggcgaacgtgatatcaaagagcatgcat

SEQ ID NO: 43218 - DNA, 82 bp, Homo sapiens
taatttccaaattacaagatgaatttgaaaaccgaactagaaatgttgatgtggtggtgctagagaatgaattgatgtatgg

SEQ ID NO: 43219 - DNA, 100 bp, Homo sapiens
aaagaaaccccttttctctcaaatccagggaggaaataatgctggccatacagttgttgtggattctgtggaatatgattttcatctcttacccagtgga

SEQ ID NO: 43220 - DNA, 74 bp, Homo sapiens
agcgaagagctgcttctgtatcttaaggagaagaaactgaggcctggaatttgattaactcattcaaggttacc

SEQ ID NO: 43221 - DNA, 131 bp, Homo sapiens
tctctgtgttctcagaagacgttctgtatttcagcttcctgctatgtgccctctttgttcctaaagaactaaagatgactcagagccatctggagaagaaacagtagaaaggacaaggaagccaagtcttt

SEQ ID NO: 43222 - DNA, 100 bp, Homo sapiens
tgtttgagaaaaggcctaagaattttggcattgacgtttgatgcaaatgatttgtatcaggggcagaattttaacaaggtcctcagttccttagtgactc

SEQ ID NO: 43223 - DNA, 100 bp, Homo sapiens
ctaccgttcggactatttgtagtcatgtacagaacatgatcaagggtgttacactggttccatgcctctgcagcggtgcctcatgtttgctgtgtagttg

SEQ ID NO: 43224 - DNA, 49 bp, Homo sapiens
gtttctctgccacaagaaccaccaaagagatggggttttgccatgttgc

SEQ ID NO: 43225 - DNA, 74 bp, Homo sapiens
aaaaatattatggtctttgtgcacatttacatcaaggaactagtttcagaaggaccagttccctgggtttccaa

SEQ ID NO: 43226 - DNA, 100 bp, Homo sapiens
cagggccttgatgggcacagccatcttgtcatgtacctgggaaccacctggctttggcccttcaaagagactgtgaggaaatgtgcccggagctgggtga

SEQ ID NO: 43227 - DNA, 100 bp, Homo sapiens
cctctacgaaggcggctacttcaaggacccagatgatgtggtaccagttggccaaagaagagcctggtgttggtgcatgtgctttggactagcatttatg

SEQ ID NO: 43228 - DNA, 100 bp, Homo sapiens
tcatgtatacttacttatctggccaagaattgttacctgtggatcagaaggcagtcctggtgacaggtgctggagaatctggtaaaagcaccattgtgaa

SEQ ID NO: 43229 - DNA, 100 bp, Homo sapiens
tcatctccaatgattcagaactcacgtccgtcgctgctgcaaccccaagatgtcggagacacggtggaaacgcttatggatgctcgacatgcagcagaag

SEQ ID NO: 43230 - DNA, 96 bp, Homo sapiens
gtaaattgagctctgcacgctggggagtttgttgggtgatgatgacagcctcttcatctatgactgcagtgctgcagaaaagaagtcacaagaaaa

SEQ ID NO: 43231 - DNA, 82 bp, Homo sapiens
ccttaccaaggaatctgcttttcaagtatgccaccaacagtgaagagtggtattggaaggaactggccctgggcctctggag

SEQ ID NO: 43232 - DNA, 99 bp, Homo sapiens
cattcttctgtctgtacaaacgctgttggctacagtgtttattctatctcctctacctttcagattgatttgggatgatgaaattgttgcagactttta

SEQ ID NO: 43233 - DNA, 100 bp, Homo sapiens
ctaaagtctttccaaaaggtcaaggttcacaagggagagtcccgtattctcagagtaaaagttgtttctggaattgatctcgccaaaaaggacatctttg

SEQ ID NO: 43234 - DNA, 100 bp, Homo sapiens
catgattatgatggcaataatttgcttgatggcttagaactctccacagccatcactcatgtccataaggaggttctcttattcaagtaccttccgttga

SEQ ID NO: 43235 - DNA, 95 bp, Homo sapiens
tacacagtttgaagagagacatttgaaatttctacagcaacttggcaagtttttccagaggcctcaaatacagcctcctagagctaccatcccga

SEQ ID NO: 43236 - DNA, 100 bp, Homo sapiens
accaatgggctgaatgatgccagcgactccatctacacgaaaggcaccccggagattgctttctggggaaggtcataaagaaggaaactggattttggag

SEQ ID NO: 43237 - DNA, 100 bp, Homo sapiens
ctgacggcactgcggatgtttaacaggacctacaagctctattcctacaggactgcctccgggcctgccaggagcagatcgaagccctgctggagtcaag

SEQ ID NO: 43238 - DNA, 51 bp, Homo sapiens
agatcttggaggagattgacacactgaggaggtggaaaagatgaataagaa

SEQ ID NO: 43239 - DNA, 100 bp, Homo sapiens
gacgaacgcttcactggggcagtctctgcatatcatggggagatagacgctgctgcctgcagccacctctcaacaacccatgaagtgtctggagctccac

SEQ ID NO: 43240 - DNA, 95 bp, Homo sapiens
acgcccacgtgatgtagatcatagtgtaaacaggaacatcgataagtagtgtaaaaacttgcacaatgaaatccgaagccaaggatggagaggag

SEQ ID NO: 43241 - DNA, 90 bp, Homo sapiens
gccagtgctaacaggccagcggttcaaaactcggaaaaggggttctctttgtaaagaatccttttctggtcaagtttcttcttcatcact

SEQ ID NO: 43242 - DNA, 50 bp, Homo sapiens
tccacgcgtgtgaaggctgcaaggtctctaattaacagaagatggcaaag

SEQ ID NO: 43243 - DNA, 82 bp, Homo sapiens
cgctgggctccggcctggtgaccgatgggaccatggccaccgaccagaggaaagtcaaggtacatgtcccagagcaagcaca

SEQ ID NO: 43244 - DNA, 100 bp, Homo sapiens
tgtgaggtgctggactacttcttgcggcgcctcggctcctcccaggtggcctcccgcgtgctggccatgaaggacacatgacggaagtgtgtatttttgg

SEQ ID NO: 43245 - DNA, 95 bp, Homo sapiens
tgcgtcaatcagagcgtcctgtgcggtcaatcatgcgaggctgtgacaacatgtgtagctactgcattgttcctttcacccggggcagggagagg

SEQ ID NO: 43246 - DNA, 75 bp, Homo sapiens
gatgcagctgcttctggaaaatttgggggtttctaagcatgaattgaggaacagaagaagcagagcagatgatcg

SEQ ID NO: 43247 - DNA, 100 bp, Homo sapiens
taaagattgggcagtcactggggagaacgtaaccccccgcggcctagcctggagcccgaggagcccaagaggcctgtccccgcagagcgcggtagcagct

SEQ ID NO: 43248 - DNA, 90 bp, Homo sapiens
cggcggaggcggcggaggccagggaggaagatgtcgtaatgagcggaggtggccaggtggaagtaaaatctgagaagcttgacttcaagg

SEQ ID NO: 43249 - DNA, 75 bp, Homo sapiens
gaacggcatggttggagtcagaagaggaagaagcagaactgggcaggcctgtatccggtgtccgaggcgaactca

SEQ ID NO: 43250 - DNA, 83 bp, Homo sapiens
ccttcatgcccaaatcccggaaactccagcgtgtctccagccgtgatggagaaggaggagacaacccgggagctgctgctgcc

SEQ ID NO: 43251 - DNA, 51 bp, Homo sapiens
ctgactttcagctatggaatcgaagggagaattccacaagttggctgatgc

SEQ ID NO: 43252 - DNA, 100 bp, Homo sapiens
ccaggatggagtgggaaggaagtgcgcaattctgactccacaaacacctttgttcttgggatatgagtaagttcttgaacattcagtgtcaactcagcag

SEQ ID NO: 43253 - DNA, 100 bp, Homo sapiens
ctgatgcagaagaaccggcggaaggaccggaagctaggggccagtctcttcaccattggcttcgccatctacgaggcccagagcaagagaggcatcctca

SEQ ID NO: 43254 - DNA, 75 bp, Homo sapiens
ttcacgtgactgtggatctcaagtactaccggccaactgaagtggccctgcatcatggaaactctttctaatgca

SEQ ID NO: 43255 - DNA, 96 bp, Homo sapiens
cttgccctgtctcctcgcagatgaggtggataagattgtggaccagctgcagcagttaatgcaggtgtatgacttggctgcccttcgggattattg

SEQ ID NO: 43256 - DNA, 50 bp, Homo sapiens
ggggaccacaagatcctcatcgacagcggagcgggcactggacacaatga

SEQ ID NO: 43257 - DNA, 100 bp, Homo sapiens
cctcatcccagccatgtcatcttatctacgaaatgattcagtgctgggctttgacaaacttcctctgtggggtaccatcctcatctcggtgggatgtgca

SEQ ID NO: 43258 - DNA, 100 bp, Homo sapiens
ataaaactccagcgagatccgggccgtgaacgaaagcagtgacggaggagcttgtaccaccgctctttcagtctcacatggcaacgaaaacaacttgtat

SEQ ID NO: 43259 - DNA, 83 bp, Homo sapiens
cgggcctcccgtttctggctccgggctgagcttcctggagaagaggaagaaatggaagcaactgtcgagattgcagcggaata

SEQ ID NO: 43260 - DNA, 82 bp, Homo sapiens
cgagggtttgatgaaggtggaggcagcgcggctctcagacttcccaagtaagaagcggaagaggagccgctggaaccaagac

SEQ ID NO: 43261 - DNA, 98 bp, Homo sapiens
cgaaacgccgccgcggagccgaggcggagccgctgtcctcgtccccagcggtcccgcccaacgcccgactcttgacgagtagcacagcccctctatgg

SEQ ID NO: 43262 - DNA, 100 bp, Homo sapiens
ggcatagtaatcctgaggaggaagaatggctgacagctgagcgaatggcagctctttcattatcatcctcatcttgatatagttccatgaatattaaatg

SEQ ID NO: 43263 - DNA, 98 bp, Homo sapiens
gcgaagtgaggatgaatcagagacagaagatgaagaggagaaaagccaagaggaccaggagcagaagaggaagaggttggatggcaagcatgtggtgt

SEQ ID NO: 43264 - DNA, 90 bp, Homo sapiens
gtgtcccggcctgaggtgtcggccggatccctccttctcccggcgcctcaagcggaaggtgctggagaatctggtaaaagcaccattgtg

SEQ ID NO: 43265 - DNA, 83 bp, Homo sapiens
caagaacagcgccgtcaccagcagagcaagtgcaccggcacctggaccaacacgaagtgagatacctgcagtttgccttccgc

SEQ ID NO: 43266 - DNA, 82 bp, Homo sapiens
gcaaggacagcgcgaggtccgcgcagcccagcgcagccatcaggtcaatggccagcaaggaggggggtccgagccggcggcg

SEQ ID NO: 43267 - DNA, 101 bp, Homo sapiens
aacgcacagaggaacgagctgagctggcagagtcggagaaaactggttgtcctggatgtttgaaaagttggtcgttgtcatggtgtgttacttcatcctat

SEQ ID NO: 43268 - DNA, 75 bp, Homo sapiens
tgtgtgctcaggatttgacacaggctaaagtaaataatgccagcctgattggactgggttatactcagacccttc

SEQ ID NO: 43269 - DNA, 96 bp, Homo sapiens
tcgagaacacaggcagactattcagatttagcatgtagactgctggggcaatcaatggatgaaagtggattaccacagctgaccagttatgattgt

SEQ ID NO: 43270 - DNA, 101 bp, Homo sapiens
tcgacgtcgtgatccagaagtccagagctgaggactgcctgtttgcaggaacgaatgcaggaatttgggaactgagctgtgcaagtgctgaagaaggagat

SEQ ID NO: 43271 - DNA, 97 bp, Homo sapiens
ccagaggagattagacgtagcagattagaggagctgaaggtccccctagaggagtatgtccacaaacgctaccccgggctggtgaaggtggtaagaa

SEQ ID NO: 43272 - DNA, 80 bp, Homo sapiens
catgccgctcctaagcctgcacagccgcggcggcagcagcagtgagaggcgccatgtcagaaccggctggggatgtccgt

SEQ ID NO: 43273 - DNA, 75 bp, Homo sapiens
cagcctgtgtcctaggcaagatcatgtacatttttgggggctacgagcagcaggaccagtgtgtggaaatcactg

SEQ ID NO: 43274 - DNA, 75 bp, Homo sapiens
gatggtagcctggccagcaacccttattctggtggtcgtgtgatggtaacagatgctgacaggtcaatactatct

SEQ ID NO: 43275 - DNA, 96 bp, Homo sapiens
acccgcacgccgggctttgttgtggaaatcccggttacctgagacaaagcatggaggacacaagaatgggaggaaaggcggactctcaggaacttc

SEQ ID NO: 43276 - DNA, 73 bp, Homo sapiens
ggaggacggtgacataacggataagccacaatggtgcgcatgaatgtcctggcagatgctctcaagagtatca

SEQ ID NO: 43277 - DNA, 100 bp, Homo sapiens
ttaaactatggacgactccgaggaacattgaggtcacgagaagagaatgccttctagatgcaaaatcacctccaaaccagaccacttttcttgacttgcc

SEQ ID NO: 43278 - DNA, 80 bp, Homo sapiens
aatgagtataaaggatgggttttaactacagacccagtctctgccaagcatcttgacagcagtagcaatgagcgtccaga

SEQ ID NO: 43279 - DNA, 49 bp, Homo sapiens
actcgctcgccttcagaagacagatatgttgatgatgtgatcagccgca

SEQ ID NO: 43280 - DNA, 75 bp, Homo sapiens
gacccggcctggcgccggactaggtcgcagcttcattgcctgatgtcttcgggaagtattttgaagtcatcgtgg

SEQ ID NO: 43281 - DNA, 101 bp, Homo sapiens
accctgcccggcttcctcatcgtggccgagatctgatgtcttggcattgcccattttcaagcaggaagattccagccttccattggatggtgaaacagagc

SEQ ID NO: 43282 - DNA, 100 bp, Homo sapiens
gcagccgccgccgcagcgcgaacatggacgccgtcaacgccttcaaccaggaggtggaaactaattctaagccagactgctggagatcaccctgttctag

SEQ ID NO: 43283 - DNA, 100 bp, Homo sapiens
cctggattgtgttgtcaacaacgctggccaccacccagcctccggctgtgacccccagcctcacacctgcctctggttcccgcctggtcctccagcttca

SEQ ID NO: 43284 - DNA, 100 bp, Homo sapiens
gatagaataagtgaaacacggaaactgagtatgggatctgatgatgctgcctacacacaaggcagaaggagaagacagcctgaagaagatgcagctgatg

SEQ ID NO: 43285 - DNA, 75 bp, Homo sapiens
ggacacttgctcccatctacttacttctctataatccactggaactgtggctgcaccatctgtcttcatcttccc

SEQ ID NO: 43286 - DNA, 100 bp, Homo sapiens
caccctgcgccagagaccagataaatttggtgccctggttgtcagatgttggaaagcagtaggacggaacatactcttcgtggttgtgtatccgttctgg

SEQ ID NO: 43287 - DNA, 75 bp, Homo sapiens
gcctcccaagtagctggaactacaggcgcccactaccacgcccagacacccttggtgcaggaggtgcaccagaac

SEQ ID NO: 43288 - DNA, 75 bp, Homo sapiens
cgagcctccttcgccgcgccccacttgctcgtgcactttacacacatgaggttatgaagacagtatggagtttcc

SEQ ID NO: 43289 - DNA, 82 bp, Homo sapiens
gacggggacagcgacgacgcggaggcagagaagggaacgcccggcccagccccacgctgaccggaaaggagattgagattga

SEQ ID NO: 43290 - DNA, 90 bp, Homo sapiens
atgtcctaccaaggcaagaagaacatcccgcggatcacggcatcatcatgtatagccatccttatccaggagtgcaagaccaagaacaag

SEQ ID NO: 43291 - DNA, 75 bp, Homo sapiens
tctgcccctattgtaagtgcagatggaacacaacaggtttttacccagtcttgctaggtcagcattagaaaaaaa

SEQ ID NO: 43292 - DNA, 82 bp, Homo sapiens
aagcagccgatccagcctgcggagcctgtggggcagcaccaaggatgacattgatcttgatgccttggctgcagaaatagaa

SEQ ID NO: 43293 - DNA, 130 bp, Homo sapiens
gaaacctccagtctgtgcagtatgtaaggtgaccatcgatgggacaggcgtttcgtgcagagcagccagactgccttccgggtcactgccatggaggagccgcagtcagatcctagcgtcgagccccctc

SEQ ID NO: 43294 - DNA, 100 bp, Homo sapiens
aggtacctgtggactcagcagcagcaactgtgggactttttgactacaattctcaacaacagctgcctactgaatcactcttctatcgtgctgttcttca

SEQ ID NO: 43295 - DNA, 98 bp, Homo sapiens
cctgccattcttatcatttctaagcaggttcatgccagcccagaacagagaatcagaactgacctgaagtttcagtgtagtcagagagctcttcaagt

SEQ ID NO: 43296 - DNA, 97 bp, Homo sapiens
tgagaagcaggcagaagattgcatcacacgaaccatccgggtatggctgaaaagagacagtggtcaatactggcccagcatttaccacacaatggcc

SEQ ID NO: 43297 - DNA, 100 bp, Homo sapiens
gtgtatcctggccgactgcacattgatcctcgcctggagacttacctcaacacttcactccatggcagttcccgagacccgccctaaccacactatttat

SEQ ID NO: 43298 - DNA, 83 bp, Homo sapiens
cgggtctttgcgggttgcggaagggggccccaatacccttcttcttcaggtgacttaagagattaaaattaatttggttgctg

SEQ ID NO: 43299 - DNA, 97 bp, Homo sapiens
gcctggctcggagcagcagcctctgagcaaacggggattcagcgtccgatcctttggaacagggactcacgtgaagcttccaggaccagctcccgac

SEQ ID NO: 43300 - DNA, 100 bp, Homo sapiens
cttatgtagtgactcgctactacagagcacccgaggtcatccttggcatgggctacaaggaaaacggagagaaagttggtgttggcaagatttgcttgtg

SEQ ID NO: 43301 - DNA, 82 bp, Homo sapiens
gcagatgcgggccctgctggaccagctcatgggcacggctcgggacggctgcctgctgtttcccggggagatcatgaaacga

SEQ ID NO: 43302 - DNA, 100 bp, Homo sapiens
gctaaatgcgttgaagctactaaacataagggagactgcattgcttattgatccaaaaaattcctgttcttcatcccgccagtgggttgctctggttgtg

SEQ ID NO: 43303 - DNA, 98 bp, Homo sapiens
cccgaaggctatttcgccgctggcgtcaggactattttcacgttttaatgccgagagaattaaacaaccaccatgtcgagcaaaaaggcaaagaccaa

SEQ ID NO: 43304 - DNA, 50 bp, Homo sapiens
ctcgttgtcgccgcggtcctgctgttgaaaatgcttggacagaagagatg

SEQ ID NO: 43305 - DNA, 100 bp, Homo sapiens
ggctgatcctgcaccacaaggtgtacgatttgaccaaatttctggaagaggctgagtcatcactagagagtgggaagggcagcagcagcagagaatccaa

SEQ ID NO: 43306 - DNA, 95 bp, Homo sapiens
ttttaaatcaagatttaacattccaacacataaaaattatttatccaacagctcctcccagctggaatagtcaaatgatttcagttcgtgaagcc

SEQ ID NO: 43307 - DNA, 76 bp, Homo sapiens
gcctcaggcgtgcgcggacggtgtgcgggtggttggttttggacacagagaccagagagatcgtgtctgatgtcat

SEQ ID NO: 43308 - DNA, 75 bp, Homo sapiens
ttgaggtcaacgagagggaggaggcagatccagctctaatctatgataagtgtgtggaagaggaggatggctttg

SEQ ID NO: 43309 - DNA, 75 bp, Homo sapiens
ccaaagcaagaaaattactaaagaggagtttgccaatgaatttctgatgccccctaaaaagggaggtgatggaat

SEQ ID NO: 43310 - DNA, 51 bp, Homo sapiens
acagcaatggttgtatcaactatgaaggggtgctttctctgtggtccgcag

SEQ ID NO: 43311 - DNA, 100 bp, Homo sapiens
cataaacaagaattggaagacatgaggaaagctggtcacgaagccctcagcattattgtggatgaatataagaatttcagaaactgtggaggagtgtcac

SEQ ID NO: 43312 - DNA, 75 bp, Homo sapiens
ctcggttcttctgacattcttaattacagggtcttcaagacccctggcctgcgtactccagcagcaggagagcgg

SEQ ID NO: 43313 - DNA, 100 bp, Homo sapiens
ctccgaatttgcaaagaggaggaaggagggacttcttggcttctcccagcatagccccagagtgtgaacatggctacgcctcttcattcccgtccatgcc

SEQ ID NO: 43314 - DNA, 74 bp, Homo sapiens
ccaaagtggagagtgcgattgcagaagggggtgcttctcgtttcaggtaagtcagtaatgttgtatgcagcaga

SEQ ID NO: 43315 - DNA, 100 bp, Homo sapiens
cgttcctgttacctctcatcattgtgttaatggtgaagcacagcgattcccgttgccaaggaaagtgtactgcagttttacccgaaagctaatatcgttg

SEQ ID NO: 43316 - DNA, 100 bp, Homo sapiens
gccgggccgcgcttcgccgctgcgcaccccagcggagccaagccccacgctggccggacagggccgcctgtcgccgggtgaaaggtgtagcagtcactcg

SEQ ID NO: 43317 - DNA, 95 bp, Homo sapiens
ctgggatctatgacatattgctggctcttatcttccttcatgacagagctgaggctgaggtggcctccttgaaccgtaggatccagctggttgaa

SEQ ID NO: 43318 - DNA, 98 bp, Homo sapiens
cttgcctaaatgaggaatgtctttcctaccatctaaaatacgaaggtttctggctgggagaatgcccacttcagcatctcagagtccttaattgctgc

SEQ ID NO: 43319 - DNA, 119 bp, Homo sapiens
gtgcagccgcaccacattggcgtggccgtcaaggagctggacctctacctggcctacttcgtgcgtgagcgaggtatcacctcttctgggctcaagatggacaacaagaagcgcctggc

SEQ ID NO: 43320 - DNA, 76 bp, Homo sapiens
gcttcatcaaaaatagtgatagctttgataagatcagttcttaagagcagccccggtaactggaggaatgggagcc

SEQ ID NO: 43321 - DNA, 100 bp, Homo sapiens
cagcttgtttcacatgctggtggactcacccatcgacccgagcgagagaatgccacgggtgacctggccaccagcaggaatgcagcggattcctctgtcc

SEQ ID NO: 43322 - DNA, 51 bp, Homo sapiens
gacaaactgaaggagctttatggacaagtgaccgcaggaactagattttaa

SEQ ID NO: 43323 - DNA, 100 bp, Homo sapiens
ttcctgaaatacatccaggaaagacatggagattctcttaaaaagtgctgaattatcccaaggcaatttctgggatgggctaggctctcctccagattcc

SEQ ID NO: 43324 - DNA, 51 bp, Homo sapiens
agcttcgccaaggctggcgcagtcgatgccgacaaaaggatcaaggtggcg

SEQ ID NO: 43325 - DNA, 76 bp, Homo sapiens
tgtatttgccagagcacatctggagaggcagatgcgaaccagaacaatgggacctcctctcaggacacagcggtga

SEQ ID NO: 43326 - DNA, 98 bp, Homo sapiens
agactttgatgaagagactggcattctccctaaggtggatgatgaagaagatttccacaagacggcaccctatgtcgtcactggcagcgtagatcaaa

SEQ ID NO: 43327 - DNA, 100 bp, Homo sapiens
ctcttattcagttccttggtgatgctattgttttgccagcgggagcacttcatcagaaaatttcccaggaacgagaaaaatttgctgatgaaggcagtat

SEQ ID NO: 43328 - DNA, 83 bp, Homo sapiens
tgaaccctgaagtcggtgtctgctgcgttcacggcaggattcggttagcaagaggtggaaacatacagaagaagcaaggaaat

SEQ ID NO: 43329 - DNA, 98 bp, Homo sapiens
ccacatcagcagtcaaaagcacaagctgaaatgcagtccaggactgaaactcagactacaggtgcagaaaacaaagctaaaaagcttacattgcctct

SEQ ID NO: 43330 - DNA, 51 bp, Homo sapiens
ccggcgcggcgttgtcccaggcgggttgggtgataaaagaaaatgtggctg

SEQ ID NO: 43331 - DNA, 90 bp, Homo sapiens
ataatgggtactctttcctcgtggaatttgaagattctacagataaatcagatcgtaaagctgaaaattgaaatcatgaaagtagacagg

SEQ ID NO: 43332 - DNA, 100 bp, Homo sapiens
gattcgtagctgagactccgctacacccctgaagtggggaaatggtggacgacatccttggagaaggcagcgacgacagcgacagcgagaagaggaggcc

SEQ ID NO: 43333 - DNA, 76 bp, Homo sapiens
atttttgggaaggtgcaaggggtgtttttccgtaagcatactcagggtcatgaaatggctgtgaatttgtccaaag

SEQ ID NO: 43334 - DNA, 50 bp, Homo sapiens
gtggacacgctgttcctctgcttctctgaacagatgggtaaggatggcag

SEQ ID NO: 43335 - DNA, 75 bp, Homo sapiens
ccagaaggcttgtaccttgccacggtggcagatgacagaacggtggcagccgaagttaggaagcagatctccgga

SEQ ID NO: 43336 - DNA, 80 bp, Homo sapiens
gacagatgaagaaggcgttcgcaccggaaaatgtagcttcccggttaagaacactggaactattttggggctgatgagaa

SEQ ID NO: 43337 - DNA, 88 bp, Homo sapiens
agcagcccccgaaggccctatcaggacatggagtatgaaagacggaactgtggctgcaccatctgtcttcatcttcccgccatctgat

SEQ ID NO: 43338 - DNA, 50 bp, Homo sapiens
tccccggggtgtaataatgttaactgaggactaccgaccagactcccgga

SEQ ID NO: 43339 - DNA, 100 bp, Homo sapiens
tggcgtacacggtgtgcaaggggagtcgtggcgtcgtctgcgaccgctgccttctcggatctcacattcttgaaggtggcattgaagagcactaagatcg

SEQ ID NO: 43340 - DNA, 73 bp, Homo sapiens
aattgacccttgaaggaatcaaacagttttatattaatgttgagagagagatatgtgcagcgggggctacagc

SEQ ID NO: 43341 - DNA, 75 bp, Homo sapiens
gcgggggagccccgggagccgcacgacctcttaagtcatgaaaatgcagcaacgctgaatgatgtaaagacattg

SEQ ID NO: 43342 - DNA, 75 bp, Homo sapiens
gcaggagcctggcgaggatgcaccttcccctgccttggaaagattgctggactcgctgaagagagactacgcagg

SEQ ID NO: 43343 - DNA, 75 bp, Homo sapiens
ccttctttgttcaagactgggcttccaccgagcagtcttcaggagacatatgaagcaaaaaggaatgaattcctg

SEQ ID NO: 43344 - DNA, 51 bp, Homo sapiens
gttcgagaacgaccccgagacgggccccccaggatctgaaggcctcccagg

SEQ ID NO: 43345 - DNA, 100 bp, Homo sapiens
gaaaaagttgtagaagcaacaaacagtgtgacagcagtgaggattcaacctcttgaggatataatttcagctgtagattctcaaagttggattggtggaa

SEQ ID NO: 43346 - DNA, 82 bp, Homo sapiens
gagccgcagaggctcccgggctggactcaggcttctcagacctcctgccccccgaggtctgcagtctcctgaacccagcagc

SEQ ID NO: 43347 - DNA, 76 bp, Homo sapiens
tacccaaaagcagaccttggagaacagtcaggatctgccactgtgaaggagatgatgagagccccctgatcacccc

SEQ ID NO: 43348 - DNA, 75 bp, Homo sapiens
cagagccacacacaccatcatggtcctggctgggccctgtctcaggcccccaggctttccccaaactggtgcgga

SEQ ID NO: 43349 - DNA, 74 bp, Homo sapiens
ccgcagatgttgtcaaggtggcctaccaggaggccaggggtgtcgccatggttgctgatcagctctgtgccaag

SEQ ID NO: 43350 - DNA, 75 bp, Homo sapiens
tgtggaacgtcttcttgtcacatggggttgtgattccaaagaatccctatcctgcctccgatgtgaatactgaga

SEQ ID NO: 43351 - DNA, 100 bp, Homo sapiens
gccctggcgggtccggaccaaggtgtttgtggccagtcctcacaaaacacagcctattgtggagatcctgttaaaaaatcagcccaaactcattgagttt

SEQ ID NO: 43352 - DNA, 82 bp, Homo sapiens
cgaaggggaaggcgcctgaagaggacgaagacctgcctagagctggaacgttacctccagagcgagccctgctatgtttcag

SEQ ID NO: 43353 - DNA, 100 bp, Homo sapiens
agggactcttgaagatggggacccaagtggttatgagattcaataactccttgctgccaacagagccttctgattgtcaccagacctgcaatctatggag

SEQ ID NO: 43354 - DNA, 100 bp, Homo sapiens
cgggaggtctgggccgcagcgggaccccagttcctccgccaagcgcggccgccgcccccgcctcagagtccgtgcgtcctggtgcctcctacaaacggca

SEQ ID NO: 43355 - DNA, 73 bp, Homo sapiens
ggctccagacaaataaacatggagtccatcttccacgagaaaggtcagatgacttgtctgcaaagctgtggga

SEQ ID NO: 43356 - DNA, 100 bp, Homo sapiens
cccgaggacaccgactaccagcagacagagctgtgaaccaaccccgctcacggctaacaagcccacccaccatggcgagccccactctgagccccgactc

SEQ ID NO: 43357 - DNA, 100 bp, Homo sapiens
cgcgccgcagtcggtcgtccgctggacaagcacgagggcgcgctcgagacgctcctgaggatgtgaggtctggaacagctgcagccattttgccaccatg

SEQ ID NO: 43358 - DNA, 100 bp, Homo sapiens
gaaagatccagtggaaccacatgggatatcccaagtagtacccgtcttccagtttctccttggaccaagatgactgatggaaaactctccacctctacaa

SEQ ID NO: 43359 - DNA, 75 bp, Homo sapiens
cccctcagacaatgaattcacaacctcaaacccgttctccgaattagtaagctgtgtgggctggactactgctga

SEQ ID NO: 43360 - DNA, 101 bp, Homo sapiens
ccgcggcgagaagccccagctgcactacgcgggttattttggagctgttggagcactccttgagctgttgaagatcccgtgatcattacctggggaggggt

SEQ ID NO: 43361 - DNA, 100 bp, Homo sapiens
gaacaagggaaagagccggtgaaggggcagaacaggcaggccaagcatggggatcagcacgagggtcagcactacaacatctccccccaggatttggaga

SEQ ID NO: 43362 - DNA, 100 bp, Homo sapiens
ctacatcccacagagatacccagacaacaggatcgtctcgtccaagaatgcaagttctagccggtttttcctacaaggaatccagttgaatacaattctt

SEQ ID NO: 43363 - DNA, 90 bp, Homo sapiens
agcttcaggcaccaccactgacctgggacagtgaatctcctatgtcacctgcaccctgggcatccagttcgtcggctacgtgatgatctg

SEQ ID NO: 43364 - DNA, 100 bp, Homo sapiens
atgtcacccgcttcctcaacgagatcctgcggatctgcacgcggtacacgcccgagcaggacaccatgaccttctcggacgggctgaccctgaaccggac

SEQ ID NO: 43365 - DNA, 75 bp, Homo sapiens
gcgggggattgtgggagtctccgcgtcccgctcgctgggagagagactgggagtgtcccaacttggaagaacaca

SEQ ID NO: 43366 - DNA, 100 bp, Homo sapiens
aggggaagtgtggatgtcatttccatgaggtatgtacaagctgtgaggacaacgcagaagccaatgggttttgtgtagagtgtgttgaatggctctgcaa

SEQ ID NO: 43367 - DNA, 98 bp, Homo sapiens
gacggcaaggtctactacatagaccacacgaaccgcaccaccagctggatcgacccgcgggacaggtgtaccttccggtttcccagcacggccatcaa

SEQ ID NO: 43368 - DNA, 97 bp, Homo sapiens
gtgctgccccacaccggctacatctaccacagtgacatcgtgcagtccctgccaccgggggccggcgtgatgtccgtgtacctgttcaccaagcgct

SEQ ID NO: 43369 - DNA, 100 bp, Homo sapiens
gcggaagtgcagctgcctcagttcttagcgcagatttttgattgtccccggctgaagttttctgagattccccagcgcctcacagccctgctattgcccc

SEQ ID NO: 43370 - DNA, 100 bp, Homo sapiens
atttcttcgaaaaaagcttattgggaagaagcggttcaagctctacgttcgtgacatcaaacctcctgttgggccatttccgagaactcccatcagtttc

SEQ ID NO: 43371 - DNA, 82 bp, Homo sapiens
ctcagctcctggggctgctaatgctctgggtctctggtgcggccgggtgtgtggcaacattacttcatgatgcagccatgaa

SEQ ID NO: 43372 - DNA, 75 bp, Homo sapiens
ctcccgtcaacaccaagaatcaagctgtgaaggacagagcgggatgccaccagcttgtccaaagggaagttccag

SEQ ID NO: 43373 - DNA, 83 bp, Homo sapiens
cgcggccttcccatcaccatcacagagagcgattggactcccgaaaaattgaccaggaagggaaaatcccagatgaaactttg

SEQ ID NO: 43374 - DNA, 98 bp, Homo sapiens
ggccacctacagaaacaaaatgtcaacaaattgatggaaatctcctgcaaagaagctgagccatgcaattagtaaatctttggggtgtgtacccacga

SEQ ID NO: 43375 - DNA, 100 bp, Homo sapiens
cgagcacccaggcgactgcctcatcttcaaggcattacgagattggacgaccaaatatttctgaacaggaaccccggcgtcccctctgtggtgaaattcc

SEQ ID NO: 43376 - DNA, 75 bp, Homo sapiens
ggccgctctgggatcccggccaccagcaattgtccgtgacagctatattgtgcgtgtcaaggctgtggttatgac

SEQ ID NO: 43377 - DNA, 83 bp, Homo sapiens
cttttgctcccggacggacttgagacaatgcagatcttcgtgaagactctgactggtaagaccatcaccctcgaggttgagcc

SEQ ID NO: 43378 - DNA, 83 bp, Homo sapiens
ccagacaccatggcccacctcatcagccctctgccctcccccacgggaaccatcagggtgacgagaacaagtcagtgcgcgac

SEQ ID NO: 43379 - DNA, 75 bp, Homo sapiens
agagagaaggcaaagaacctctggtgttgaaagagttgcatgctgagaatttgaaaaatgaagatgatgtagaca

SEQ ID NO: 43380 - DNA, 96 bp, Homo sapiens
gaaaaagtttgtagaatggctcaaaaatgctgaagaaggagatcatgaatcagacagataaaaatcaacaagaaatcccatcataccttaatgatg

SEQ ID NO: 43381 - DNA, 100 bp, Homo sapiens
cgccattatcctctgtttctctgctgcaccgacctcgacgtcttgcctgtgtcccacttgttcgcggcctatagcttcaaggttactgactttttatgat

SEQ ID NO: 43382 - DNA, 100 bp, Homo sapiens
gccgaaccccgcgcccgcaggacgccccagccagtctacatcagcatcagcatctgcgtcaccatttcaatctgcatggtatagtgaatctgagataact

SEQ ID NO: 43383 - DNA, 90 bp, Homo sapiens
acaaaatctgttcccatgcaaaccaatgagggagaagtatcggaagaaagcagttccaagactagacgcttgaagcaaagctgccatccc

SEQ ID NO: 43384 - DNA, 50 bp, Homo sapiens
tggacacagaagtatttgtgacagaaggggaccatctggaccaagatttg

SEQ ID NO: 43385 - DNA, 74 bp, Homo sapiens
gatgaagaaacttgcaaaagtatctcatatgaccagtgtgatttgccttcaaggaaactggggagtcagaaaat

SEQ ID NO: 43386 - DNA, 100 bp, Homo sapiens
tgcaccttccccacagccagcgctcaacgggacccaggtggagtctgtacagctcaaagtcaacatagcccgaaaacagcccatgctggatgccgctact

SEQ ID NO: 43387 - DNA, 83 bp, Homo sapiens
agaacgtccactgcgggccggcgaaagctggccagctgcgggccgtccagcggctgtgccacttctacagcgccgtcatgccc

SEQ ID NO: 43388 - DNA, 75 bp, Homo sapiens
tggaagatttggacaggacaggacctctttcaatgacaacgcgtgacgcatccaaagaagacattgacactgcta

SEQ ID NO: 43389 - DNA, 80 bp, Homo sapiens
ccgtcctttcctttctccctcgcgttagcccgagcgggaagaagttccgcagcaagccgcagctggcgcgctacctgggc

SEQ ID NO: 43390 - DNA, 87 bp, Homo sapiens
gaggagcggccggagtcagcgatggtgcccggcgaggagaaccaactggtcccgaaagaggagttttgagagcaaaatgacaacacc

SEQ ID NO: 43391 - DNA, 75 bp, Homo sapiens
ccacaggccaaagacgggtttcattaggttgactatagtcaatggggccaatggagccaagtgtatggaaaccca

SEQ ID NO: 43392 - DNA, 98 bp, Homo sapiens
ctaaatatcatctatcttctaactcttaaaacgcctagatgacgtgtccaacgatgtgaggatggcagccgcctccaccttggtcacctggctgcagt

SEQ ID NO: 43393 - DNA, 95 bp, Homo sapiens
ggattgaagagtatttgaagtctgtgtcaaacatccatatcataagtggaattttggagatattcaaaggacacattcagctaacgtattttagc

SEQ ID NO: 43394 - DNA, 75 bp, Homo sapiens
ttcatcacagcaatggagaagagaaagcacaaagcatggagaccctccctccagaaggagctcaaaaagtgggat

SEQ ID NO: 43395 - DNA, 101 bp, Homo sapiens
actctgtgtgagggaaagaaaacaatttctcctgctctgcagcttctgttcagctccagggttccttgaaaagaaaacaggtagttaacctatctcctgcc

SEQ ID NO: 43396 - DNA, 75 bp, Homo sapiens
aacgccccggtggagaagctgagacggttgatgatgaagcgccggccgtgtaaatgaagatcgggtgaggagcag

SEQ ID NO: 43397 - DNA, 90 bp, Homo sapiens
ccattggcgtggatccgctggcctccttcctacagcaacttcccactccaggtggccagacgggagttccagaccagtgttgtctcccgg

SEQ ID NO: 43398 - DNA, 75 bp, Homo sapiens
gcacaaagagcttgctccctacgatgagaactggttctacacgcgagctgattgttaaaggaaatgggctggcag

SEQ ID NO: 43399 - DNA, 75 bp, Homo sapiens
aactcagtatatcttggaacgaaagtctccccatacctgctggcagaatcccgtcacggggctgctgtcagccag

SEQ ID NO: 43400 - DNA, 100 bp, Homo sapiens
gcacatccaggctggtcagtgtggcaaccagatcggtgccaaggtgaatggaagagaatccgaagaagaaaatctcaataaatctgaaataagtcaagtg

SEQ ID NO: 43401 - DNA, 100 bp, Homo sapiens
gccactacattctgggtgacacgctgggggtcggcaccttcggcaaagtgaaggcaccagtatgcatgagcgggtgaaccgaacagaaagacagtttcga

SEQ ID NO: 43402 - DNA, 82 bp, Homo sapiens
atggcgcctgtgggcacagacaaggagctcagtgacctcctggacttcagcatggtttctgcaaatgcgtgaatgagccgga

SEQ ID NO: 43403 - DNA, 83 bp, Homo sapiens
atcgcctggagctggagcgcgtccacagaataccctctaccatctgctttggtcagggtgccgctcgaggatttaaaagcaac

SEQ ID NO: 43404 - DNA, 100 bp, Homo sapiens
accttcgtggtcgtctggtcctactacgcgtacgtggtggagctctgcgtgtgtatcacatcggtatcctcgaattcaaagtatcaaagtacaatttacc

SEQ ID NO: 43405 - DNA, 83 bp, Homo sapiens
ggacttcatctcccgatttgagaaccgagctgaagctgccatggaattcttacaagaattaaatagcgatgtctctggaagtt

SEQ ID NO: 43406 - DNA, 82 bp, Homo sapiens
cggaaccggacccagtccctgagccgcccctacacccacagtttgttgcatattctaaggacccagacataggcttggtggc

SEQ ID NO: 43407 - DNA, 82 bp, Homo sapiens
acgggatccagagcgccgcgcacttcgtcatgttcttcgcgccctggccgactcgcgggccgctgcacccaccgccaaggac

SEQ ID NO: 43408 - DNA, 74 bp, Homo sapiens
tggcagccccgctctctgcagatgccaagtttgtggaggaacggagaaagcagctccagaattacctgcgcagc

SEQ ID NO: 43409 - DNA, 102 bp, Homo sapiens
tggaaggccttgtgctcattaatgttgacccttgcgctaaaggctggattgactgggcagcttccaaagggatcctttcagatgatcatgggctggccgctg

SEQ ID NO: 43410 - DNA, 98 bp, Homo sapiens
acgtcctcaagcagctggagcgggtcaagatgtctttggtggacttgggaaagaggttgctagaagcagcaagaaaaggccaagatgatgaagtgaga

SEQ ID NO: 43411 - DNA, 89 bp, Homo sapiens
caaaatgtcaacaaattgatggtcccatgagcgtgtaagcaagcgtctacatcagagattccaggcctgggtagataaatggaccaagg

SEQ ID NO: 43412 - DNA, 100 bp, Homo sapiens
gagagaggcaccgggatcgtgaccgagaccgtgaccgagagcgtgaccgagagcgcgaatatcgtcatcgttagaagctcatggggcattcagaatggga

SEQ ID NO: 43413 - DNA, 98 bp, Homo sapiens
cgccatgggcctcactatctcctccctcttctcccgactatttggcaagaagcagatgcgcattttgatgggtgtcatggagaaactccagctgggcc

SEQ ID NO: 43414 - DNA, 83 bp, Homo sapiens
ccggaccggagagcgcggaggcagccatggtgcggttcaagcacaggctttgatgcggcctggaagaattgatagaatcatct

SEQ ID NO: 43415 - DNA, 90 bp, Homo sapiens
gcccagatccctgggacaccgagattctgagaggcatcagtcaagatattaataaggcagcggaaagaagaaatatgaatacggctccat

SEQ ID NO: 43416 - DNA, 83 bp, Homo sapiens
tgatgaggcctatgatgcagccccaggaaatctgagaatgaagatgacagcgagtgggaagatgtggatgatgagaagggaga

SEQ ID NO: 43417 - DNA, 50 bp, Homo sapiens
aggaggttttaaacagtataacaggaaatctggcattttttaaagtttgc

SEQ ID NO: 43418 - DNA, 87 bp, Homo sapiens
aaatttggattattttagaaacaaatttggaaagaaaaagaatggcgtccgtttcaggctttatgaaggcaaagaacagatggagtt

SEQ ID NO: 43419 - DNA, 75 bp, Homo sapiens
gtgcgcgaggctcctcactgcagcgaaggccctgggcgctgcctatggcacagccaagagcggtaccggcattgc

SEQ ID NO: 43420 - DNA, 100 bp, Homo sapiens
gacccgcggcagcaggcactggagctggtggtgcaggaggtctccagcgtgctcaggtcggcggaggagaagggtcatgtaggtacaacagcaaccaaga

SEQ ID NO: 43421 - DNA, 90 bp, Homo sapiens
gtgatgagcccctgtggaggtgaagacattgtggacaacctcgagctgtctctgcggagccagagtgacctcgacgaccaacacgactac

SEQ ID NO: 43422 - DNA, 100 bp, Homo sapiens
taaaaagagaggtgcctttatctgatgatgatgaaagttacacaggcatcaagcatgatggaaccatgtgtgatacctgccgccagcaaccaatcattgg

SEQ ID NO: 43423 - DNA, 100 bp, Homo sapiens
atgacgtccatccatttcgtggttcacccgctgccgggcaccgaggaccagctcaatgacagcacttgcacctcctgcgccgccgccccccatccaagga

SEQ ID NO: 43424 - DNA, 97 bp, Homo sapiens
gtaggggtgcacctcagcactatcccaagactgctggcaacagagttactgaaagctctcgaaattacggttacaatccttctcctgtgaagcctga

SEQ ID NO: 43425 - DNA, 50 bp, Homo sapiens
ctcagatggctttctcactgaaagtgtgcaactgaggaacatggctcaag

SEQ ID NO: 43426 - DNA, 100 bp, Homo sapiens
ttttggccttcacggagggtttgcccatgtcattgaagatcagcacaaattccctcattactttggaaaggctggtcgtctgatgataaggaaattagtt

SEQ ID NO: 43427 - DNA, 82 bp, Homo sapiens
ttgactgtatacagaatcttgaatcagaaattgagaagctgctatgaagtcttacactccatatttcattctcctgtggagt

SEQ ID NO: 43428 - DNA, 97 bp, Homo sapiens
gagctacagaaattagaagaacagattgcaaatcagactggaagatgcccgagggcaacatccttcgagaccggttcaagagcttccagaggaggaa

SEQ ID NO: 43429 - DNA, 100 bp, Homo sapiens
cgggattcgcggcccggagctcgggaccgagtgatcagcagctggactgtgccttggacctaatgaggcgcctgcctccccagcaaatcgagaaaaacct

SEQ ID NO: 43430 - DNA, 100 bp, Homo sapiens
gtttgtggtaaagtgaaatgtaaacgacataggtggactgggtggttatggatcaggagacagtgaagatgagaggagtgacagaggatctgagtcatct

SEQ ID NO: 43431 - DNA, 88 bp, Homo sapiens
cgttttccgcgccacagaccccagccaggcacttcgtcttagtaacatggccatggggaagacaaccacaggccagatagtcaatctg

SEQ ID NO: 43432 - DNA, 83 bp, Homo sapiens
aacaccctcagctccacattgagagcaaaatctacaagatgatgcagggaggagtgatcagggccaaagcggtcagtgagaag

SEQ ID NO: 43433 - DNA, 50 bp, Homo sapiens
aggcactgctttttcatgacggaagcggggagaggtggtgagagatgacc

SEQ ID NO: 43434 - DNA, 75 bp, Homo sapiens
cggccccggggaactagggagcgtctccggctgcacagcgctcagaaatacactttcgggaaatggcctctaaat

SEQ ID NO: 43435 - DNA, 82 bp, Homo sapiens
ccgcaccttcgtgccagcctcctcccccatgtaccacacctgtgtggccttcgcctggtttgacaactttaaacgggtcttc

SEQ ID NO: 43436 - DNA, 97 bp, Homo sapiens
ggcttcaggatttacacagacgtggggcgatgcttgtgaccctgcagctcctcaaagtgcactttacaggtccccgatgaaccaagagaaccctcca

SEQ ID NO: 43437 - DNA, 74 bp, Homo sapiens
cagaagaactgagctatttttgaaagaacatgaccaccttcgaaagttgatccaaggattagttttggatcatg

SEQ ID NO: 43438 - DNA, 90 bp, Homo sapiens
cgacatcagagatgaggacagcattgctgctccttgcagccctggctgtggctacagggccaggaaagaccacagcaagattctttcatt

SEQ ID NO: 43439 - DNA, 98 bp, Homo sapiens
ccttcgctaacgcctcccggctctcgtcagcctcccgccggccgtctccttaacaccgaacaccggactatgttcggagtgaactggagtttgcctat

SEQ ID NO: 43440 - DNA, 88 bp, Homo sapiens
tgtggagacggtgacagattctagccgctactttgtaatccggatccaggatggtactggacagtcattttgtttactcattcagccc

SEQ ID NO: 43441 - DNA, 100 bp, Homo sapiens
cccggcggctcttgcggggcacagaaaggaaggcagaggaagccacggccactggaccctggcgagggttccaaggacacagacagttcagcagggcgac

SEQ ID NO: 43442 - DNA, 74 bp, Homo sapiens
agtgaatgtgtctcattacattgaataacagctacaggatgttcgagagctgggatcgcttacacctgagacga

SEQ ID NO: 43443 - DNA, 90 bp, Homo sapiens
tgttacgacagcaatttgaggtcaatgggcatttcttcaaaaaccagatgaaaactcgctggatttttcctcctgtatgttacggcctgg

SEQ ID NO: 43444 - DNA, 87 bp, Homo sapiens
aactggaatgacaggaatggcctcctcccttagctccctgttcttgggccccagttgtgacagcgttgaggaagatatgaatgcttc

SEQ ID NO: 43445 - DNA, 82 bp, Homo sapiens
tgaagaaacccagcttgatatgttgcacctgaactcctggggggaccgtcagtcttcctcttccccccaaaacccaaggaca

SEQ ID NO: 43446 - DNA, 82 bp, Homo sapiens
gggtgctgccgggtcaaggcattcatcctctagctgtatgacaatctcctgagccagtttggctgcatgcaggtgtcttcgt

SEQ ID NO: 43447 - DNA, 100 bp, Homo sapiens
tccagtcttcgtacagtctgtcaaagaagaaggggtagaagagccatccaaaaaacgagttatagaaggaaaaaacagttctgcagttgagcaagatcac

SEQ ID NO: 43448 - DNA, 82 bp, Homo sapiens
ccacggggtgctgcagatcctgttccaggtttggtgcacctcgatttggaggaagtagggcagggcccttatctggaaagaa

SEQ ID NO: 43449 - DNA, 75 bp, Homo sapiens
gttagaggaagacgacgagtttgaagagttccctgccgaaggatggacaaccggaaattttctacacattttgga

SEQ ID NO: 43450 - DNA, 75 bp, Homo sapiens
gtggactcagcagcagcaactgtgggactttttgactacaattctcaacaacagagtttgctctccaaagctcgg

SEQ ID NO: 43451 - DNA, 83 bp, Homo sapiens
cctattattgctgtattctaacttattcatctcctatgataaacaggggtcacatgacgacagaagccaagagggctgcaaag

SEQ ID NO: 43452 - DNA, 75 bp, Homo sapiens
aaaaacaagtgtgtgcatctggctgttagaagaattcatgctcatccgggaactgtggctgcaccatctgtcttc

SEQ ID NO: 43453 - DNA, 74 bp, Homo sapiens
tccagggccaccatgtctgcctcctggtgaaaaaggccgccatggcatcagatgaaggcaaactttttgttgga

SEQ ID NO: 43454 - DNA, 100 bp, Homo sapiens
gctaggaatgcatgggatgcttatggaatgtgcgagaacacgggataaagttcacattcctggtgccatctacctctcaatcaaattcgactctcagtgc

SEQ ID NO: 43455 - DNA, 135 bp, Homo sapiens
gccaacgctccgatcatgagtttctcttccattactgcaacgcctacttaaatgctgtgcgctggcaccctcagaacatgccttgtctttgaagatgctcccaatggggtggaggcggccctggcagctgggatg

SEQ ID NO: 43456 - DNA, 90 bp, Homo sapiens
cggccccaatcctggccaggcggagattctgcggacattcaggttttttgcatgtctgacacccatgactccacctggaccttatggctc

SEQ ID NO: 43457 - DNA, 100 bp, Homo sapiens
ctacaggagaaagaacatttccatcaaaccctgagagctttattaccagacatgatctttcaggtttgttggcatccaaagctgttggggttgatggtgc

SEQ ID NO: 43458 - DNA, 75 bp, Homo sapiens
ggaaaatgccctcaaacgcgccaacggtggaaaacgaagctcattcccaacgtgcaaagccaaggcagcgacccc

SEQ ID NO: 43459 - DNA, 83 bp, Homo sapiens
tgcatgtaaaagcaacaggcctcagaattcagtttgcctgttctgtatgcaagttccgtagctttgatgacgaagagatccag

SEQ ID NO: 43460 - DNA, 51 bp, Homo sapiens
cggaagtggagaggttttcagagacaacacaggcagttctacataccggcc

SEQ ID NO: 43461 - DNA, 133 bp, Homo sapiens
ttcagaccgtggacaatgtgctctttgcccctattatggagaaaggtgttccctaggctttaaacctggccagcggaaagttttatttacctgtttcaagaggaatgataaacgtgaagtaaaagttgcccag

SEQ ID NO: 43462 - DNA, 53 bp, Homo sapiens
catccggcgctcagctgggcttgaggtacatgatgatgagggactgttggcat

SEQ ID NO: 43463 - DNA, 116 bp, Homo sapiens
caagagtaacagcagcgccgtcccgtccgacagccaggcccgggagaagactgttctgatggctacatgtgcaaaatacactttcaaattaagaatgggtctgtgatgtcacatct

SEQ ID NO: 43464 - DNA, 100 bp, Homo sapiens
caggagcggctccgcgccgcagtccccagtggatgctgtggggcaccacctccttgaggaccaaggcactccagctgccaggaatttggctgctaacctc

SEQ ID NO: 43465 - DNA, 83 bp, Homo sapiens
gtcgggagggaggaaggtggcaagatggtgttggaaagcactatggtgtgaaatcgagctatagcagattatcttcgttcaaa

SEQ ID NO: 43466 - DNA, 90 bp, Homo sapiens
cctgcaagatactgagagattgaagcatgctctggaaatgttcccagaacattgcacgatgcctcctgcgggaggaagcactgaaacaac

SEQ ID NO: 43467 - DNA, 100 bp, Homo sapiens
gacaagtgtatggcagtctggagtgaagatggacagaagtgctcctgtcctctcagctgtggccaccgtcggcatcacgattggagtgctggccagggtg

SEQ ID NO: 43468 - DNA, 82 bp, Homo sapiens
gactacctgctgtacaccctcaacaaacaccagcgctttggggcgaagctgtgctcaggcccgggctggacgcagagccaga

SEQ ID NO: 43469 - DNA, 75 bp, Homo sapiens
gcgaggaggatggcggagtcggggctcctgacgggtgataaaagaaaatgtggctgaagttacccgaagttcagc

SEQ ID NO: 43470 - DNA, 76 bp, Homo sapiens
gtgaccccaagcttcaagaactgatgaaggtggcagtagagaagagcatcacagaagttgctcaggagctgacaga

SEQ ID NO: 43471 - DNA, 133 bp, Homo sapiens
cccaaacatagttcagattattgaagtgtttgctaacagtgtccagtttccccatgagtccagccctagtgtcattggcacccccttctatgtgatggagtactgcccaggtctcatctacaaagacccttcc

SEQ ID NO: 43472 - DNA, 101 bp, Homo sapiens
atgtctccatccccgaccgccctcttctgtcttgacatgggaaagcggaaccaccaaaaggagtgatgatcaacgatctcatgataaatctggatgctagt

SEQ ID NO: 43473 - DNA, 83 bp, Homo sapiens
ctctttccggacctggccgagcaggaggcgccatcatgcgtgagtgcatctccatccacgttggccaggctggtgtccagatt

SEQ ID NO: 43474 - DNA, 99 bp, Homo sapiens
agagagaaaattgagacggagctaagagatatctgcaatgatgtactggatctccaggaggtgacccaggaccttcattatgaaaacttccgttctgag

SEQ ID NO: 43475 - DNA, 101 bp, Homo sapiens
tgggacccttgcatggtgtttcaaagggtggtgaagaactaagggtggttgagtttgcctcttatggtgacttaaagaatgctattgaaaaactttctgga

SEQ ID NO: 43476 - DNA, 89 bp, Homo sapiens
ctggaataaacttttgaaacactaatgtattatcaatgccctgtctcagagatatttccttcaagccaatgatcagaaagatatgaagg

SEQ ID NO: 43477 - DNA, 83 bp, Homo sapiens
gttgggatgagagtcggagccgaataccaagctcggatccctgaatttgatccagtttcactgttacatgccttgaagtgatg

SEQ ID NO: 43478 - DNA, 75 bp, Homo sapiens
gccattaaaaacaacaaggaagctttcagtgaggaagatgttgatcctaggtgagtgtggccctcgtctttctgg

SEQ ID NO: 43479 - DNA, 100 bp, Homo sapiens
atggattctttgcgagaaataacgaagagtacctggctctgatctttgaaaagggaggctcctacctgggtagagagaaacaggtgagaatgaccacttt

SEQ ID NO: 43480 - DNA, 75 bp, Homo sapiens
tgcagctgaccattttaatcagtttttggatgaagacttgaaggtagctgggaaatacaaaggaaatgattatag

SEQ ID NO: 43481 - DNA, 78 bp, Homo sapiens
catcttctgggtcagcaagtgggtggactattcggacaagtacggccttggtctcctcctcggcttcctcttcctccc

SEQ ID NO: 43482 - DNA, 75 bp, Homo sapiens
gaaacgttgagaggagcaatagaagacatgggatttgatgctaccttgtcaggtgtccagtgtgaagtgcagctg

SEQ ID NO: 43483 - DNA, 100 bp, Homo sapiens
atagaccctctcctgccactccagatagacgtatccgggtcacacacacctgatttaacaacatctcattatctcagggtctcactctgtcgcccaggct

SEQ ID NO: 43484 - DNA, 75 bp, Homo sapiens
cagcttccgtgtttgctgcgcccgcactgcggtagcgctggtatatggtcaaatgaatgaaccacctggtgctcg

SEQ ID NO: 43485 - DNA, 100 bp, Homo sapiens
gtgtctgagtggatggggacctgcctgctgatacacattccagttttcctgatggtgaacaaataggccctgaagatctcagcttcaatacagatgaaaa

SEQ ID NO: 43486 - DNA, 83 bp, Homo sapiens
ctcaatagcactggctaccggacaggaagttctactacatcaccctgctacgagaccccgtgtcccgctacctgagcgagtgg

SEQ ID NO: 43487 - DNA, 98 bp, Homo sapiens
ggcattctgttagacagtgaatgtggaaaggagattgacagtcacaattttgtaataagatcagcaggtcaaaaggtacaagattgttacttctatca

SEQ ID NO: 43488 - DNA, 101 bp, Homo sapiens
ccctgcccggcccggcccggccgccccgccgcccccgcggccccggccggaggagacagtggacagaggactgcagaaaatcaacctatcctccttcagga

SEQ ID NO: 43489 - DNA, 100 bp, Homo sapiens
caagaggcaggaaagagcacagacttcgacgttcagacctgggttcccgtccagttccattccttgcacaggtccctgaagaggaaggagaaggaatatg

SEQ ID NO: 43490 - DNA, 87 bp, Homo sapiens
tccattgagggccagaaggaagaggaaaggtgcacaggtttcatattccagaaggttggaaagttggctgcaacagctgtgggaggt

SEQ ID NO: 43491 - DNA, 82 bp, Homo sapiens
aagaaccggcacggcctcgtgcccttcgccttcgtgcgcttcgaggacccccgtgcccatgacgcttccggagacaaccctg

SEQ ID NO: 43492 - DNA, 82 bp, Homo sapiens
gccgcagccccccaatgcggccgcgagaagcagcgggggggcaggcgatcgaaggttttacttgtaatggacacaaggacag

SEQ ID NO: 43493 - DNA, 98 bp, Homo sapiens
ttgagcttggggactgcagctgtggggagatttcagtgcattgcctcccctgggtgctcttcatcttgggtgaaaggtgtagcagtcactcggcctac

SEQ ID NO: 43494 - DNA, 108 bp, Homo sapiens
ctggaaccatctcagaagccatgcccctcaggctggaacttgccctgtctcctcgcagatgagtgccggtggtggtgtgcacattgagccccggtatagacagttccc

SEQ ID NO: 43495 - DNA, 75 bp, Homo sapiens
gaacgtcaccgaggagaagtaccaggaggcgttggccaagggatctgaagaagctgaagaaaaacaggacagtga

SEQ ID NO: 43496 - DNA, 82 bp, Homo sapiens
ctcccttcttcaaaagcttggaaagcaacctttgagcgtgaggatcatccccggagaggacgggaggatcggcagcacaggg

SEQ ID NO: 43497 - DNA, 83 bp, Homo sapiens
gggactttgcagaaaggcttcactacccttatcccggagagctgacaatgatgaatctcacctagtgatttaaggaaacatcg

SEQ ID NO: 43498 - DNA, 97 bp, Homo sapiens
aatgggaatgtacacgataattaaagagtaaagttgtgctcaacggtagagcgggaaaaggccattcttttggccaacctacaggagtcacagacac

SEQ ID NO: 43499 - DNA, 114 bp, Homo sapiens
gaccaatgtgtgatttcagtggaataaatggcgtccaaagtcacagatgctatagtctggtatcaaaagaagactgggctggcttagatgaagatgaagatgcacatgtctggg

SEQ ID NO: 43500 - DNA, 83 bp, Homo sapiens
tggagaaagcccacatcaacctggtgagggggatatgagactttctactcggaatatcctgagtgttgcgtggatgtaaaacc

SEQ ID NO: 43501 - DNA, 101 bp, Homo sapiens
ccgccttcattatctcctacgtggtcgccgtgctctccgggcacgtcaaccccttcctcccgtatatcagactctaaaatagagctcaagcttgagaagag

SEQ ID NO: 43502 - DNA, 98 bp, Homo sapiens
agcttttgggggccgggcgggagaagcgtccgttcatccgcggaaccaagctgaggtgtggccgacgacgatgccctcgctgaggagcgcatgcggag

SEQ ID NO: 43503 - DNA, 95 bp, Homo sapiens
aagccggagcctgccagagccaaggccaagctctccaagttcagcatccccaagcagggggaggcttgtaattccacatctgaagtcaaagatct

SEQ ID NO: 43504 - DNA, 75 bp, Homo sapiens
agcgagctgtcagagcccggggacggcgaggccctcatgtaccacacggtctctaattaacagaagatggcaaag

SEQ ID NO: 43505 - DNA, 76 bp, Homo sapiens
gggcacttcgggcgccgcaacagcaggtgatagtagaaaaggctcccaaagctcggataggagacctggacaaaaa

SEQ ID NO: 43506 - DNA, 100 bp, Homo sapiens
ctaatctgggcctcttgtcatgaacactgagctgaaggttgaagtggagagcttgaaacgagaactccaggacaagaaacagcatctggataaaacatgg

SEQ ID NO: 43507 - DNA, 83 bp, Homo sapiens
cgtctgggatggtgtgggaccggcgatctagggcagccctgcagaggtacctgttctactgtaatcgctatatgaaccacatg

SEQ ID NO: 43508 - DNA, 90 bp, Homo sapiens
accccgccagctccagagccacgtacggaacattttagtggacaaaccaaatgaccaatcttcaagatggtcttcagagagcaactatcc

SEQ ID NO: 43509 - DNA, 100 bp, Homo sapiens
gatcttgaaaatgacattagaactttctttcctgagtatacccatcaactctttggggatgagaagagaggatggtgatgcaccggttacaaaagatgag

SEQ ID NO: 43510 - DNA, 75 bp, Homo sapiens
caacacggtcaacgtggacggcttgacagccctgcaccaggctaccggctctctgaccagttccacgacatcctc

SEQ ID NO: 43511 - DNA, 90 bp, Homo sapiens
ctcttctaaaaggatatgtgttgctaatacccatctttactggcatcctaaaggtgaaaaactgcaatggtttcaaaatcatcttgatcc

SEQ ID NO: 43512 - DNA, 74 bp, Homo sapiens
catccatatcataagtggaattttggagatattcaaaggaccctgatgctcccataagacagaaaatgcccctt

SEQ ID NO: 43513 - DNA, 75 bp, Homo sapiens
attttaattggtaataaagcagatctggatcatcaaagacaggccctttctggttactgtggctttatggcagcc

SEQ ID NO: 43514 - DNA, 100 bp, Homo sapiens
acaataagcccaagctacctgtggtgatctcgcagtgtggggagatgtagtccagacaaagactgaatcaggctgaaaatattttcagaagagagcgtac

SEQ ID NO: 43515 - DNA, 75 bp, Homo sapiens
gtcaccttctcaactgttgtcctcatgatgtcctttctggaactccgtttccctggggagatggtaaccatactc

SEQ ID NO: 43516 - DNA, 82 bp, Homo sapiens
agagagagagagaagagaggagattgcagcagcgaaccaatcccaagggaaagcaggcaggatgggagagtcgccgatagaa

SEQ ID NO: 43517 - DNA, 99 bp, Homo sapiens
gaaccacaggccctggcctgccttgggccggggatttaacacaggcatccgtgtcattctggaccttactcccaactaccggggtgagaactcgtggtt

SEQ ID NO: 43518 - DNA, 75 bp, Homo sapiens
gcccgtcagtccctgctctgtgcgcgcctccatctgggccatggatggtgtccccctacctcaagagcctgtcca

SEQ ID NO: 43519 - DNA, 82 bp, Homo sapiens
cttccatctgctgctcacctcagctgcctgggtccccgacgagagccaggagagaaaatgcagccccagagaaggatgagac

SEQ ID NO: 43520 - DNA, 75 bp, Homo sapiens
aaaaacaggataaaatcttatgattatgaggcatgggcaaaacttgatgtgggttacacatcattttggaatgac

SEQ ID NO: 43521 - DNA, 100 bp, Homo sapiens
gctgtttaccatgtcaccctcaaaagagtccagattcaacaggctgccaataaaggagcaagatggctagggatgcctgtgaggagccaccaacatttga

SEQ ID NO: 43522 - DNA, 98 bp, Homo sapiens
acccgagtgacacgttgaattcgccataatcaaggaaaccttttccgggtggggatctctgaaattactcaggcctgtgatacttgggctgtgatcct

SEQ ID NO: 43523 - DNA, 50 bp, Homo sapiens
ggaaatgatcagtctgttggataatgaggtgctgaaccggcaaatccaaa

SEQ ID NO: 43524 - DNA, 75 bp, Homo sapiens
agagggagtcatttcattggcgtttgagtcagcaaagcaaattgtggctactaatttgccccctgaagatcaaga

SEQ ID NO: 43525 - DNA, 98 bp, Homo sapiens
aagcctgagccggttcctgttcaaaaggagatcctaagaaaaagcttatatgttcagtgtgcaataaaaagtgttcttcagcatcaagcctacaggaa

SEQ ID NO: 43526 - DNA, 82 bp, Homo sapiens
caatagagatgactttaagatgaaggtgccggtggcgggacaggcttcattgggacagccctaacccagctgctgaatgcca

SEQ ID NO: 43527 - DNA, 88 bp, Homo sapiens
cgcaggttcgcaagcgcataacccagccccacaccagtgagaagcatcagcaccgtgaacttgtctgagaatagcagtgttgtcatcc

SEQ ID NO: 43528 - DNA, 74 bp, Homo sapiens
ccagatccagaaactggaggagtcccgctcgaagctaggatttttagactctgaggagcagttggagctaatcc

SEQ ID NO: 43529 - DNA, 78 bp, Homo sapiens
tcgctggcagcttctgcaccggcctcaagttggctacattcggacacagcattgttggttttgccatgtactatttta

SEQ ID NO: 43530 - DNA, 100 bp, Homo sapiens
cgggcaggagcctggcgaggatgcaccttcccctgccttggaaaggtggcttcgtcctgttcatcgccaactaggggaagcgaatgaggagtttgcactc

SEQ ID NO: 43531 - DNA, 100 bp, Homo sapiens
ctctcagaggctaagaaggtggagaccggagaagctgtgagagtggaacagatgtgcattcagattaaagaagttggagatcgtgtcaactacataaaaa

SEQ ID NO: 43532 - DNA, 98 bp, Homo sapiens
gagatcaaaccacttctaaatgataagataacggaggagatgatggatcaggcaaatgataaaaaagtggctgctattgaagccctaaatgatggtga

SEQ ID NO: 43533 - DNA, 100 bp, Homo sapiens
gagtcagctgtgtgtccagaacgtgccatggagacgcttaacggattaccatcgaccttctgttgaagaaattcttgagaaccctttaatagcagatttg

SEQ ID NO: 43534 - DNA, 51 bp, Homo sapiens
tgcctgctttgctggctgcaacagcacgagatggagtttcaccatgttggc

SEQ ID NO: 43535 - DNA, 77 bp, Homo sapiens
agcctcagttggaagcagccgatccagcctgcggagcctgtggggcaggtgcggtcttgctctgttgcctaggctgg

SEQ ID NO: 43536 - DNA, 82 bp, Homo sapiens
agaatgaccaaatttacgccatgaaagtggtgaagaaagagctggtgcatgatgacgagacaaatttacatgtattggagac

SEQ ID NO: 43537 - DNA, 100 bp, Homo sapiens
ctcaggtcctggatcagctgtccaaaaacatcaccaggatggggctaacaaacttcaccctcaactacctcaggatcgatctctttgggctgcctgacct

SEQ ID NO: 43538 - DNA, 98 bp, Homo sapiens
cagtggtcgcttcttctccttgttgtttttcagaggcaccaaataatgtcatctgaaatgttgccagcatttattgaaacttctaatgttgacaaaaa

SEQ ID NO: 43539 - DNA, 82 bp, Homo sapiens
gctccggcgcatcatggcggctggccgggcccaggtcccttcctccggaaagcaggcaggatgggagagtcgccgatagaac

SEQ ID NO: 43540 - DNA, 100 bp, Homo sapiens
gagctggcggacatcactttagaccctccacctaattgcagctccataaaattctaggagataaggtgaacaatactgctgtaattgaaaagcaagtact

SEQ ID NO: 43541 - DNA, 100 bp, Homo sapiens
cttgtcccgggatcgctccgtcgcacccaccatgatggaagacgacgggcagccccggactctaaactggcgatggaatatgagaggagccctctggaaa

SEQ ID NO: 43542 - DNA, 136 bp, Homo sapiens
tgggcgccttctgcggggcacggccaaccgcctgttggggttcgggggcggcggcgaagcccggcagcttgagaattacattgtggaaaacatgaagtcggagatggcccagatacagcagaatgcagttcagaac

SEQ ID NO: 43543 - DNA, 82 bp, Homo sapiens
cctacggtgccgtgtgtgcgtgagagaagaccagtctttcctctagtgtttaactgctgaagagatcttttcccttcatggc

SEQ ID NO: 43544 - DNA, 100 bp, Homo sapiens
taatcctcttggaaagctggaaacatagtccggcaaacatcctgtgtctgctttgatggagatctgtaataaaagaaggtggcaaccacctgaatttcta

SEQ ID NO: 43545 - DNA, 100 bp, Homo sapiens
ttgaactggaccccgcgagcaccagagtcggcgtaactatcgcctgacagggtatctgaagtaaaaggggattctccagtacaagaagaggtgctcggag

SEQ ID NO: 43546 - DNA, 75 bp, Homo sapiens
ctctctcctgatacagcaggcgctcaccatgttccctggagtggatactgaggctgtgtggctgctccaaggctg

SEQ ID NO: 43547 - DNA, 126 bp, Homo sapiens
cacaatttccatcaaaaagtgattaagcagagaatggagaagaaggttgattccaggatctagtgaaaagccatttgatgtatgcggtcagagaagaagtggaggtcctcaaagagcaaatcaaag

SEQ ID NO: 43548 - DNA, 100 bp, Homo sapiens
tcgcgcgcgcctgtagctcgcgggcctcgcagcccaaacgtgcagaatgccccacaagattggatttgtagtcgtcagctcatctggacacgaagacggc

SEQ ID NO: 43549 - DNA, 98 bp, Homo sapiens
gagaaactcagcgctggggaagaagacactacaacaacaggagtgcaaacttctctacagccgaaaagagggtcaaaggcaagaaaacaaaaacaaaa

SEQ ID NO: 43550 - DNA, 100 bp, Homo sapiens
cgaacacatgcggagcatgttgcatcacagggaacttgagaacctcaagggcagtgtggacaacagtgagtatatgcggaatggagacttcttacccacc

SEQ ID NO: 43551 - DNA, 82 bp, Homo sapiens
atttttctccctttcttctgtggataagctggaacagatctatgaatgcagtgtgaagatatgtgacgtgtataacgctgtc

SEQ ID NO: 43552 - DNA, 113 bp, Homo sapiens
agcgacagcgatggagactgcagctcgacaggaatggcaggaattggaaccagccagagaatcacctcagtctgctggactatgctacaacattatggtagaaggcaacagca

SEQ ID NO: 43553 - DNA, 122 bp, Homo sapiens
ctcagctctgttctgtgggctgcactgagtttctcggtgtgagctggagaaccttcccaactggagatgtgaaacggtcattctccatccactcacctggtttcctgccacagagatagaag

SEQ ID NO: 43554 - DNA, 82 bp, Homo sapiens
aaggattccaagtaactcttatttgtttgcccgaccatctgtaagtcacacggctgcaccgccgaaggcctctgttgccaca

SEQ ID NO: 43555 - DNA, 89 bp, Homo sapiens
aagtggaaaatactatgctatgaagattctgaagaaagaagtcattattgcaaaggcatcctctggtatcacgattccaaaacccccaa

SEQ ID NO: 43556 - DNA, 82 bp, Homo sapiens
gctgtgcgacctcttctgcggccggcctgggcaggtgtcttcctcgagaggctcacagaacatttcctgcctgttgctcaca

SEQ ID NO: 43557 - DNA, 57 bp, Homo sapiens
gacacagcctcgctggaggcagtttctggatgcaaagtattgttcctgggtgtgtct

SEQ ID NO: 43558 - DNA, 98 bp, Homo sapiens
gcctggttgatgatcgttgtgttgtacagccagaaaccggggaccttaacaatccacctaagaaattcagagatttgagagggaagatctgatctcct

SEQ ID NO: 43559 - DNA, 75 bp, Homo sapiens
ctgaagcccgagaggagccacaatggagacgccgccgctgcctcccgcgtgattaaagtatacagtgaagatgaa

SEQ ID NO: 43560 - DNA, 83 bp, Homo sapiens
atggcggcgcgatggagcagcgaaaacgtggttgtagagttccgtgactcccagaccctgtccccagaggggctggttctgcc

SEQ ID NO: 43561 - DNA, 89 bp, Homo sapiens
ggaaaagaaggatggatacacacagtctgcataaatggaagatgggatccagaagtgaactgctcaaatgcctgtgaggagccaccaac

SEQ ID NO: 43562 - DNA, 74 bp, Homo sapiens
atcatgtgcgagatcctgagttcacttcagataggcgacttcctggtcaaggttctagcaagaggagaagaaag

SEQ ID NO: 43563 - DNA, 90 bp, Homo sapiens
gacggggatgtctttggcccagagctggacaccctcctggactcgctggaaaaatctctcatcgaagtgtacatgcggcctctgtccaac

SEQ ID NO: 43564 - DNA, 82 bp, Homo sapiens
gaaggattacgctgttcagcagtacgtgcgggactccagggtccaccagattctagaagcccgtgtctctcctggaagagaa

SEQ ID NO: 43565 - DNA, 75 bp, Homo sapiens
ccagaattggacccgaaaccatgcctcactgtcctaggcaaggaagatgatccctatgatcttgaagatgtttct

SEQ ID NO: 43566 - DNA, 100 bp, Homo sapiens
gacttctccactggttcctgggcaccgaaagattctggaacttttcaaagcctgactctcttcttgaaacagtggagcatcatacagagtttacttgtgg

SEQ ID NO: 43567 - DNA, 100 bp, Homo sapiens
tggcgctcagcaactgcgatgggctgcccaggatggcggcccaggtgactctggaggacgcgctgtccaacgtggacctcctggaggagctgcccctgcc

SEQ ID NO: 43568 - DNA, 75 bp, Homo sapiens
atacctatctggaaacaacaggcgagacctggagatggacctgtgatctgggactttgcctcccgggccaaactg

SEQ ID NO: 43569 - DNA, 82 bp, Homo sapiens
atcatagcagagtacgatactcaggtcaaagtgtgccggtccaacaaaagcccttgggtctgtttgacttgttcaagtgtcc

SEQ ID NO: 43570 - DNA, 100 bp, Homo sapiens
cactggttcccctgttgaagcttgctagggattacagtgggtttgactcaattcaagaccctgatgctcccataagacagaaaatgccccttgatgatct

SEQ ID NO: 43571 - DNA, 100 bp, Homo sapiens
ctggaaagctttaggagttcacagtaccctcgagtcttccatccagggcctccggataatgtgaagctgagtgagcctccgccatccagcatgacaaact

SEQ ID NO: 43572 - DNA, 75 bp, Homo sapiens
aagccttgaaaaagctgccctgagacggtgtcccgccgaaaggaaccttttgaggatggctttgcaaatggggaa

SEQ ID NO: 43573 - DNA, 74 bp, Homo sapiens
ctcctttacacagtatcagaacgttgcactgctgtgatccatcctcatctcctaaagatgcatcctgacttatc

SEQ ID NO: 43574 - DNA, 96 bp, Homo sapiens
ggaggagatggtggaggaggctgaaggtacttcacatgactggaggttacggtgtggtgctgtggacttgtacttcacactttttggcctcagtag

SEQ ID NO: 43575 - DNA, 98 bp, Homo sapiens
gcagcaccgctactcggagggcgagcggacctccctggagaagacaagcagatgcccagtgtcgggaaggcagcccaggatcacagcagcacccaccg

SEQ ID NO: 43576 - DNA, 75 bp, Homo sapiens
gggcgatacactatcaaagttctctttgcatctcagacagagtgggaagctttggagctgacggatcaccagtgg

SEQ ID NO: 43577 - DNA, 100 bp, Homo sapiens
ccggtacatctgaaagccgggaaatgagcgatcgtcttctgatcaaaggaggtaaaattgttaatgatgaccagtcgttctatgcagacatatacatgga

SEQ ID NO: 43578 - DNA, 132 bp, Homo sapiens
gagacaaacaggtggaatacttagatctcgacttagattctgggaaatccacaccaccacgtaagcaaactgaccgggcaaatagattcgagtatttattaaagcagacagaactttttgcacatttcattc

SEQ ID NO: 43579 - DNA, 95 bp, Homo sapiens
gtctggagaccatggagaccctcacggagctgggcgacgagctgaccctgggagacatcgacggtgtggaagatttccttacaagggccgtgtta

SEQ ID NO: 43580 - DNA, 96 bp, Homo sapiens
ggacagtgcagggaagcaactgcagaggcaatctgaaagcaaatcctgtttagatgcaggcgaaggttcctggtgacccaggctctcaccttaccg

SEQ ID NO: 43581 - DNA, 100 bp, Homo sapiens
agatgttgaagattttgctagagctgaaggctgtgataatgaggaagatcttcaaatgggcattcacaagagaggccatttcaatcgaatatctcatggc

SEQ ID NO: 43582 - DNA, 100 bp, Homo sapiens
ctaccactgtctctgctcacagtgccaagaagccaaagatgttgaccaggaagatcaagctgtgggacatcaacgcccacatcacctgccgcctgtgcag

SEQ ID NO: 43583 - DNA, 75 bp, Homo sapiens
gacagaacagttaatcctcaatttaagcctgatctaacccctagaaacaggctgccatgtgttacatccatattg

SEQ ID NO: 43584 - DNA, 97 bp, Homo sapiens
atgacacaatggatctgaatcatctcttgaaagtatcaaaggtgcagaatctgggacaagttgcatgaagagcatatcaatgcaggacgtacagttc

SEQ ID NO: 43585 - DNA, 100 bp, Homo sapiens
gcgcctgggctgccggcacttcgcggcagattatctttctcaaggaatagatctttctggaatagaagtgatagaaaatgatctactttttattgcaaga

SEQ ID NO: 43586 - DNA, 75 bp, Homo sapiens
cggccggccaggaaccacccgttaagctgcaagctttcttcctggtggcagatgacatcatggattcatccctta

SEQ ID NO: 43587 - DNA, 100 bp, Homo sapiens
gtcgttgtggtgcgctgtcttcccgcttgcgtcagggacctgcccgactcagtggtaacctggatgaggacatcattgcagaagagaacatcgtttcccg

SEQ ID NO: 43588 - DNA, 75 bp, Homo sapiens
gcggccggaggagccatggactgcagcctcgtgcggacgctcgtgcacagatacacatcgggctggggagtgact

SEQ ID NO: 43589 - DNA, 99 bp, Homo sapiens
gtttagaagaatctattaaaacaaatgagaagctacggaaacagttggaacggcaaggatctgaatttgttcaagcaaacttacttcttaccgtgactg

SEQ ID NO: 43590 - DNA, 82 bp, Homo sapiens
gcctgcagcgggagctggacggcgagcgcgagcggcgcgagaaaggtcacggagactcaccagttggcagaattaaatgaga

SEQ ID NO: 43591 - DNA, 50 bp, Homo sapiens
caaacatataagatctggagacccaataacacagaatgttcttggtgaga

SEQ ID NO: 43592 - DNA, 82 bp, Homo sapiens
cttccgcggtgtcattctgacctcggagggagccatggatttgctgcgggagctgaaggccatgcctatcacgctgcacctg

SEQ ID NO: 43593 - DNA, 100 bp, Homo sapiens
atgtctccatccccgaccgccctcttctgtcttggagcttgatcctggatagtgtttgtatgatgtgcacacgtctctgcaaatgcttgtttgaagattg

SEQ ID NO: 43594 - DNA, 74 bp, Homo sapiens
tggaaccctcaagaggaccgaggtattatagctgcaaatgtccttgtattctgtttatggagagtaccttctct

SEQ ID NO: 43595 - DNA, 74 bp, Homo sapiens
catcatccgcgagcgggagcagcgcgagagtctctgagcggcccctgatgttcctgttggacactcctggcgtg

SEQ ID NO: 43596 - DNA, 100 bp, Homo sapiens
aagcggcagagttaggtgaaatttcagacatacacaccaaattgttgagacctctgctgcgagaagttctggagaagcagccagtgctaagccagaccga

SEQ ID NO: 43597 - DNA, 82 bp, Homo sapiens
aaataggctgagatatagtgactgtaagctgtgatctcagtatacaaagacctacaacaagaaaggggcctcccgaaggaaa

SEQ ID NO: 43598 - DNA, 50 bp, Homo sapiens
gtacctgttaccactttcaaaagcattggaggtgatccttttaatggaac

SEQ ID NO: 43599 - DNA, 82 bp, Homo sapiens
tcaagcaaagaagagttgagcacaatcaggtgcgatttggtcaacaaaagcgataccaagattggttccagcgccagtacct

SEQ ID NO: 43600 - DNA, 76 bp, Homo sapiens
ttaagattctggtcagcttgttaggatgggatcttaaaccctcacgctgcctcttgcacctgtgctgcctgctgcg

SEQ ID NO: 43601 - DNA, 83 bp, Homo sapiens
tgacaaccaagggcctccgtctggatttccaaggaagaatttcctctgaagcaccggtaccccctgtaccggctgggtggccc

SEQ ID NO: 43602 - DNA, 75 bp, Homo sapiens
gtctcgccgagcgcacgccttgccgccgccccgcaggtttttcgttggaatatacgttgcacatttatggcgatt

SEQ ID NO: 43603 - DNA, 100 bp, Homo sapiens
gggatgtctacctggtaatagaggacttgaagcagaaagcaagtgaatacgagtcagaagccatcaggaaatatggccgagattttcaggcaatctcaga

SEQ ID NO: 43604 - DNA, 50 bp, Homo sapiens
cactgactttcagctatggaatcgattattttcgaaataccagtatttcg

SEQ ID NO: 43605 - DNA, 75 bp, Homo sapiens
ctatgatcgaattggtggaaaggttgaagttcaagagctcagaccctaaagggctgtttgcggggtggggtgggg

SEQ ID NO: 43606 - DNA, 90 bp, Homo sapiens
gcagcgctgcacccgcaccctgcaggccgagggacgtgccaagaagcgcaagaagatgcagcacactgtcaaaatatccggagacgccag

SEQ ID NO: 43607 - DNA, 100 bp, Homo sapiens
ctggaagtaaagatgcagaggaaagaaaagaatacattcctgattacctgccacccattgtgtcttctcaagaagtctcaggacgggcgctttggagccg

SEQ ID NO: 43608 - DNA, 83 bp, Homo sapiens
gaagctgcagccacaatgtgcctttgcaggggagcctgagagccacagtgcctttcttcctgacgtggagtgtggtgaactca

SEQ ID NO: 43609 - DNA, 75 bp, Homo sapiens
atattggtgggccagcaatcctcagacgcctcacttaggacaagtacaccaggggttggaaaaaccacactaggc

SEQ ID NO: 43610 - DNA, 96 bp, Homo sapiens
gacctgtttgctgggctgaagccactggaacaggagagtcgcatggagcttctccaggcagccaccaactaccacaacgggcacacaggccagctc

SEQ ID NO: 43611 - DNA, 101 bp, Homo sapiens
gcgaggtggacggcaaagccattcctgacctcaccgcgcccgtggccgccgtgcaggcggccgtcagcaacctcgtccggatggctctgagagattcctct

SEQ ID NO: 43612 - DNA, 83 bp, Homo sapiens
ccgattcctcctccttggtcgccgcgtccttggctggcgtctgaagaaacacttaaattctggaaatagcgactcagtatcat

SEQ ID NO: 43613 - DNA, 75 bp, Homo sapiens
acagattttgtcagcaaagcctatggcaagaatttgtctcaggaaaggcaaatgatcgccatctagaatcagcag

SEQ ID NO: 43614 - DNA, 75 bp, Homo sapiens
aaacatgaaaacatcgtggccctgtacgacttccagcgaccgtggcagccatgtattacagctactacatgctac

SEQ ID NO: 43615 - DNA, 83 bp, Homo sapiens
cgtcattgacatccctatcaatgtctacaaggttatacattggctcttcaaagacgttcacctcatcagagaaatccctgact

SEQ ID NO: 43616 - DNA, 98 bp, Homo sapiens
atttcaaagaatttttgatcaggatgcaaaccaagagaccgtttttgaaaacattgccaaaccagttgctgggagatggagtttccctcctgttgccc

SEQ ID NO: 43617 - DNA, 74 bp, Homo sapiens
ctttccttttgtatgctactggccttttctacacttgtcagcaaattgaagagttttctgatgttaatgaagga

SEQ ID NO: 43618 - DNA, 75 bp, Homo sapiens
tcgggagcgcaaggtcgccctcaaggccatgatcaaaacgcttgggcactgtttaaaggaaagttccgagaaggc

SEQ ID NO: 43619 - DNA, 100 bp, Homo sapiens
gctgctgccgccggcgaaggaggaggcgttgccggttcccagtgacctgacagcagaggagcgtcaagaactggagaacatccgacggagaaaacaggag

SEQ ID NO: 43620 - DNA, 93 bp, Homo sapiens
cggtggactccttcggcagtccacccaccgccgccgcctcccaggagtacgaccccagcaaagcgacctttgtgaaggtggtgccaaccccca

SEQ ID NO: 43621 - DNA, 83 bp, Homo sapiens
cctacctggatgagaacgtcaagtccagctgctcgcccgtctacattgaggctgggaggcggcagaatgcagccagaggaggg

SEQ ID NO: 43622 - DNA, 75 bp, Homo sapiens
attactgtaccgttagaagtttttgagtagaacgtcatgacatgaataccttaagcctgcccctgaacatacgcc

SEQ ID NO: 43623 - DNA, 100 bp, Homo sapiens
ggctgtatagctcattgtgcttttgaatacgttggtggtgttgtcatgaactattttgcaggctagcttgccacaaaatgacattgaaattttaaaacca

SEQ ID NO: 43624 - DNA, 99 bp, Homo sapiens
atcgggcaggttttctctgaaggccccaaattctcaccagtccgtctccttcaaaatccattccaattccacagcccttccgaccagcagatgaagatc

SEQ ID NO: 43625 - DNA, 82 bp, Homo sapiens
aggggtgcctcaaccacactccgtccacggactctccgttattttaggagagcactgacacggctcccgggacctcggcagg

SEQ ID NO: 43626 - DNA, 75 bp, Homo sapiens
ctgtggtccagaagcagatatcggtgagttaattggccttggtcctcacagctccaaaaagaaacaggatctcga

SEQ ID NO: 43627 - DNA, 83 bp, Homo sapiens
tgtttttctgttttgcctgaatacatgatttaaacaagagatttccacagaaggaatatgcactttctggttggaatttgaat

SEQ ID NO: 43628 - DNA, 83 bp, Homo sapiens
gtgagaattaaagtccctcgccgcttggaaagtgcagccttctacagatgcttcctgaaacttggagagtggcagctgaatct

SEQ ID NO: 43629 - DNA, 100 bp, Homo sapiens
ttccacagccaagtgcgggagtccacgctctattaccaggttttaaacttcgccatgatcgtgtcttctgcactcatgatatggaaaggcttgatcgtgc

SEQ ID NO: 43630 - DNA, 98 bp, Homo sapiens
cacccagcactgatgatattataaaccaccattggttcaggcaatcttcagcggtgatccagaggagatccggatgctcatccataaaactgaagatg

SEQ ID NO: 43631 - DNA, 51 bp, Homo sapiens
aagcatgctggattgtaatcaggttgtatctcccacttcacccttctagac

SEQ ID NO: 43632 - DNA, 124 bp, Homo sapiens
ccggctctgccgtatccaagacagtatgcaaggccacgacccacgagatcatggggcccaagaaaaagcacctggactgatgacgctgtcagtatagaaagtggtacaaacactgaacgccctg

SEQ ID NO: 43633 - DNA, 100 bp, Homo sapiens
tgccgcgccccatccgcaacctggaggtcaagttcaccaaggctgaagccgacgtagcttctctgaacagacgcatccagctggttgaggaagagttgga

SEQ ID NO: 43634 - DNA, 128 bp, Homo sapiens
aactgaatcatgattttcaagcacttgctctggagggaagagcgatgggagagctttgggacatccggaagaaagcagccatccagacatttcagaacacgtaccaggtgttagctgtgaccttcaat

SEQ ID NO: 43635 - DNA, 75 bp, Homo sapiens
ctagaagtgggggactcggcggggggcctttacaacaactaaacggacaggcattccagccccacgggaattttc

SEQ ID NO: 43636 - DNA, 98 bp, Homo sapiens
ctgggaggtgaaggacacttctcaaaggatgtgcacttgccacacaattatcatattggatatgctgcaggctgctagtcattatcgccaaaatagaa

SEQ ID NO: 43637 - DNA, 96 bp, Homo sapiens
ggcaccagaccttcgccaggacttcaacatgatggagcaaaagaagagggtgtccatgattctgcaaagccctatggagtctcgctctgtctccca

SEQ ID NO: 43638 - DNA, 98 bp, Homo sapiens
aaaattttgtgaagacattggtgttgaacctgaaaatgccctccctatcctgaagacattagctgagagtctggcaccttttaaaggtctgatcatca

SEQ ID NO: 43639 - DNA, 90 bp, Homo sapiens
ctctgctcttcctcccttcgctcgcaccatgtgcctagaaagagccatgaagtttgcctttgaggaattccacctgtggtaccagtttgc

SEQ ID NO: 43640 - DNA, 100 bp, Homo sapiens
ctcctaccccttgtcatgcagggtgtgagcagggctgagatgggcaccgcggatctggggccgtcctcaggacttccttcgctgggcatctggctgggat

SEQ ID NO: 43641 - DNA, 73 bp, Homo sapiens
ctggctgtcctgaaatattataaggtggaacactgtcatggtgagtgtgtcgccgacacccagctgtgtggtg

SEQ ID NO: 43642 - DNA, 100 bp, Homo sapiens
tgaaaagtggtcgatggaacgattgcaggcacctccgaaacccgattcaggtttgctggatggatttatgacggtgactctgacatcattagaagcatgc

SEQ ID NO: 43643 - DNA, 100 bp, Homo sapiens
tggcgctcctgctcctccaggcgctgcccagccccttgtcagccagggctgaacccccgcagcctcctgacagtgggcctccaccattgccaacatcctc

SEQ ID NO: 43644 - DNA, 80 bp, Homo sapiens
ttcctgtcctactaccgcctcacacgcttcctctccagagtgatcaagtgtgacccgccgcttacaaacacgcagatggc

SEQ ID NO: 43645 - DNA, 90 bp, Homo sapiens
caatgatcccctccattgttgtgcattgtgtaaatgagattgagcaaagaggtctgactgagcccaacagcatggtggtggaacaccccg

SEQ ID NO: 43646 - DNA, 82 bp, Homo sapiens
gaagcgagactcatacgcaacctcaatgggggatatgagactttctactcggaatatcctgagtgttgcgtggatgtaaaac

SEQ ID NO: 43647 - DNA, 118 bp, Homo sapiens
aggagctgcgctgctacagatgttaccacttctgtggctgctaccccactcctgggccgtccctgaaggatgatcggctgaatgtaacagaggaactaacgtccaacgacaagacgag

SEQ ID NO: 43648 - DNA, 51 bp, Homo sapiens
tgccactacaacaaaactgtctcagaatcattcttacagtcactctcatgg

SEQ ID NO: 43649 - DNA, 90 bp, Homo sapiens
gccaaaattatcaacaccaaaaagctttctgctaggggaaaatgtttataggaggccttagctgggacactacaaagaaagatctgaagg

SEQ ID NO: 43650 - DNA, 75 bp, Homo sapiens
ctcatgaagactgtgtaaataatatcaggtaatcacagggcctcagattcgccctggtatgaccgtgattagaac

SEQ ID NO: 43651 - DNA, 100 bp, Homo sapiens
ggtcccccgtgtcaactgaactgggaatttgctcgccctgatacatcgaatgatagagtttgttgtacgtgaagggccaatgtttgaagctatgattatg

SEQ ID NO: 43652 - DNA, 75 bp, Homo sapiens
gctctggtgatggaatgataaaagtgaagaatcagctccgcttccttgcaggtttgcctccagatattacagtgg

SEQ ID NO: 43653 - DNA, 72 bp, Homo sapiens
ggcctggactgtgggctggtgtgtggaactggaggcactggctacaattaggcttctcgacgtcctgtgcga

SEQ ID NO: 43654 - DNA, 88 bp, Homo sapiens
gacatttaattttagggtcctttatatagaagggagagtagatatttcacagttcttgccgagtgcttcactttttcactagaagtaa

SEQ ID NO: 43655 - DNA, 74 bp, Homo sapiens
acttctgccaagcatagccaccacgggctgatatgccgagcattacccagggggagtcctcattctgacctcaa

SEQ ID NO: 43656 - DNA, 74 bp, Homo sapiens
cgcccagttctaccacagccctgcggacaacaagcgggcatcagagaccccaactctacaaggcctttccttta

SEQ ID NO: 43657 - DNA, 100 bp, Homo sapiens
ccatgaagcttaccccctcaggcaggctggcagagagcaggtctgaatttcctgctgctgttcacaaagatgctttttatctttaactttttgttttccc

SEQ ID NO: 43658 - DNA, 100 bp, Homo sapiens
atcgggagcgcaaggtcgccctcaaggccatgatcaaaacgctccctgaggaggtccccagcttccagccacgactgtttgagtgctccagccacatggg

SEQ ID NO: 43659 - DNA, 101 bp, Homo sapiens
cttgctggtttctttgctggagcacttgagccacgtgcatgaaccaaacccacttcgttcaagacaggtgtttaagccgcctagaagattatcagcgtcgc

SEQ ID NO: 43660 - DNA, 100 bp, Homo sapiens
ggaatgtggtggatgggccatacgctggagtcatgacagcttatggtaactataactacccaatattgcagccatggagtccatgcttaataaattgaag

SEQ ID NO: 43661 - DNA, 50 bp, Homo sapiens
ctgcaccaatgacaaggccacccagatacatcgagatatttccaagcaga

SEQ ID NO: 43662 - DNA, 74 bp, Homo sapiens
ggacatgatggtcgagggccgcctgctcgttcctgacagaatggtttgtgtttagtgaatcagagggatctgca

SEQ ID NO: 43663 - DNA, 75 bp, Homo sapiens
gtgatttgcctcagcttgtactggtctgcggaagagggagctgctgaaggagctgctaccagtcatcgggcagaa

SEQ ID NO: 43664 - DNA, 149 bp, Homo sapiens
ctccaaggaggaaacccccaagttctgcagccagtgcggagagaggctgcctcctgcagcccccatagcagctcgcaacgccctggtggtctccttcgcagccctggttgcgtactccttcgaggtgactggataccagcctttcatcc

SEQ ID NO: 43665 - DNA, 80 bp, Homo sapiens
cgcctctgccctgcacgtggctgctgccaagggctacattgaggtgatgaggtttttagaacttcagccataaaaatggg

SEQ ID NO: 43666 - DNA, 73 bp, Homo sapiens
agccgctcgtcagactccagcagccaagatggtgaagcagatcgagagcaagtgtaaggagaggatgaggccc

SEQ ID NO: 43667 - DNA, 97 bp, Homo sapiens
tatttttcaggcctctggtgccaaatacattgtcttaacttccaaacatcatgaagacacgatgaggcgagtggtacgacagagcaagtttcggcat

SEQ ID NO: 43668 - DNA, 114 bp, Homo sapiens
gggcaggaaggtggtggtgtgcgacaacggcaccgggcacccttacccttctgaagaacagaaaaagcagttggcacaagacacgggactcaccatccttcaagtgaacaattg

SEQ ID NO: 43669 - DNA, 96 bp, Homo sapiens
gtgaggtcagcttcacattctcaggaactctccttctttgggttgaagaggagaagaggaagaagaaagaggaggcggcccggaggaaacaggaac

SEQ ID NO: 43670 - DNA, 75 bp, Homo sapiens
accgtcccctgggagcagccggccactaagtttgtcccgctggctggaagcctggcagtgacacgattaagccca

SEQ ID NO: 43671 - DNA, 75 bp, Homo sapiens
ttggggatcctctgtacgcccgttcactggccacggaaaggtatgatatatttgatccaagacagtccattccag

SEQ ID NO: 43672 - DNA, 100 bp, Homo sapiens
cgcgccgccagctgccccgccgccaaagccgggggaagcggtggcgccggcgtcactctggatgaggccagggactggagactgatgcatgagggggcta

SEQ ID NO: 43673 - DNA, 100 bp, Homo sapiens
gaggaaatggacgtaggggaaagtcttgtgaaaatgccattgtgtgctggaaacctggcaagatggaagatgatatagataaaattaaacccagtgaatc

SEQ ID NO: 43674 - DNA, 98 bp, Homo sapiens
aaagccagcaccaccaagggaggtggaggtggaatacagcactgtggggaatttggcttacggagatcatctttatattttctgaagccttcatattg

SEQ ID NO: 43675 - DNA, 83 bp, Homo sapiens
tgcagtgacatgttgataaaaaatgatggagtccaaaactacttacctggaagaccttccaccaccccctgagtatgaattgg

SEQ ID NO: 43676 - DNA, 75 bp, Homo sapiens
cactgaagaaggcaggggcccttagagtcttggttgccaaacagacatcacttagtgctcttacccagctgatga

SEQ ID NO: 43677 - DNA, 100 bp, Homo sapiens
ctttggctatgtcgagatcccctgtgtggccaagaagctggtgtgcggagatgaaggtgtcatggagaaactccagctgggcccagagattctgcagcgg

SEQ ID NO: 43678 - DNA, 90 bp, Homo sapiens
aagccccgcctctgccttcggatagagacaatggacctcagatagcctatgttcgggacttcaaagcaaaggttcagtatttccggttct

SEQ ID NO: 43679 - DNA, 101 bp, Homo sapiens
atcctccttgaagtatttggctgaggagttttcaatcccatctcacaccattttgctggtacagcctaccaagaggccagaaggcagaacttatgctgact

SEQ ID NO: 43680 - DNA, 46 bp, Homo sapiens
cgcggtggagcgggacacgaacgtgagcctggagacacaggcccca

SEQ ID NO: 43681 - DNA, 74 bp, Homo sapiens
ttgaattgaagaaaattgcacgtaatcacccaaatgccaagcacatgatggctccgctacttacttgagattca

SEQ ID NO: 43682 - DNA, 71 bp, Homo sapiens
gtctctgtttgttgggcacatggattataagtatctacgttggcaggctggaggacgtgtgccagtgttag

SEQ ID NO: 43683 - DNA, 88 bp, Homo sapiens
cagaagggaggctccaagacctcatcaacaattaagctggtggccatcgtagacccccacatcaaggtggactccggctaccgagttc

SEQ ID NO: 43684 - DNA, 74 bp, Homo sapiens
agacgcaagatggcggacagtgcggaactaaagtgtggacgaatgtggaacctcgctctgtggctgtgttccct

SEQ ID NO: 43685 - DNA, 98 bp, Homo sapiens
agaacatgctgtcccaggtcaactaccgggtccccaacatgcgcttcctccgagagcggctgacgtgtactaatggtcacttgatgtgcgctggctgt

SEQ ID NO: 43686 - DNA, 75 bp, Homo sapiens
ggagcggcgccatggaggagggggcgccgcggcaggtgcatctgcagacgcagcaggaggtgaagctgcgcatga

SEQ ID NO: 43687 - DNA, 100 bp, Homo sapiens
gtattccttgtatcgacatacacactgggtacgctgtgccaagagccggtgaaacctgaagaaggcagagatatggcaaacaggattggcgcttttgggt

SEQ ID NO: 43688 - DNA, 100 bp, Homo sapiens
tggaagtagctgatgaagataacagtgaaatatcagattcagaggatgacagttgcaatataacaagaggattgcctgatccagccaagatgcagagcac

SEQ ID NO: 43689 - DNA, 90 bp, Homo sapiens
tatccagatgtccgaggcagatggaccacccgctgagcgtcagaaatgggtattctaccttgtaaatactgttatttgtatatactgtaa

SEQ ID NO: 43690 - DNA, 78 bp, Homo sapiens
gcccggatgagtacgataccgaagcgggctgtgtgccccttctccacccagaggacccagatgatgtggtaccagttg

SEQ ID NO: 43691 - DNA, 100 bp, Homo sapiens
ggcccccggcgtggggcgggacagcggccccctggagggggcagtcccgggagaacctgcggcggccggagcgtacgaggatgtcgtccaggaaagattg

SEQ ID NO: 43692 - DNA, 75 bp, Homo sapiens
agcaagagcaagatcaccgtgacatccgaggtgcctttctccaaaaggaaaatgtttataggaggccttagctgg

SEQ ID NO: 43693 - DNA, 75 bp, Homo sapiens
cgaggaaccgcccaacatggcctcggaggatgaagatttgataaagtggaaggcactgtttgaggaagtccctga

SEQ ID NO: 43694 - DNA, 75 bp, Homo sapiens
tctgctgagatcaagcagattgtgtccgagtatgcagagaagataaagaaatgggggctccgagcagtcaagaag

SEQ ID NO: 43695 - DNA, 100 bp, Homo sapiens
cttccccttccctgcccccttcccccacccccgactcgggcttggcgcggcggccagaggaaccccgaggctgaccaactgactgaagagcagattgcag

SEQ ID NO: 43696 - DNA, 50 bp, Homo sapiens
gcgcagtatattctcacagagtcttttatgccactctggatcaaatctac

SEQ ID NO: 43697 - DNA, 100 bp, Homo sapiens
ggcacctcaaccagatgaggaagtacaactttgagggctcattgtcatccccaagccaggccagttctccaggtggaactgtagtgtagcgacctcactg

SEQ ID NO: 43698 - DNA, 100 bp, Homo sapiens
agaagcaggggcaagaggagaaggagggcaaccgagtaggagggcctataacagcccagtttgtttcgacgccggaccgcgtaagagacgatgatgttgg

SEQ ID NO: 43699 - DNA, 50 bp, Homo sapiens
ggacaagaacagcgccgtcaccagcagcgtatctggtgcaggccgtgaga

SEQ ID NO: 43700 - DNA, 97 bp, Homo sapiens
ggctttctctgagttcttcaggatgaattcgctctggtctagtctatcaggtgtttgaaagtgtggctaagaagtatgatgtgatgaatgatatgat

SEQ ID NO: 43701 - DNA, 100 bp, Homo sapiens
aagctccaaacttctttcaaaagtacaagctcattggtgggcagtattacttatgggaattgctctgatcatgctaatggctggatttattaagatatgc

SEQ ID NO: 43702 - DNA, 82 bp, Homo sapiens
ctagctccaggttaggccgagctttgcgggaaagcagcggagtccaaaactacttacctggaagaccttccaccaccccctg

SEQ ID NO: 43703 - DNA, 99 bp, Homo sapiens
ggcagtgaagctcaagttgctactcgggacgctgcacctcccgcgccgcacggtggacgagctggacccacaaaccgtggagaccaagaactggcacac

SEQ ID NO: 43704 - DNA, 51 bp, Homo sapiens
tttaccatctcatctcaagaatggaggacaggggcaagtgtccgagtggtg

SEQ ID NO: 43705 - DNA, 74 bp, Homo sapiens
agcgacgtgcgcctcgggagtcggcctgtgagagtcgacttcaatgttcctatgaagaacaaccagataacaaa

SEQ ID NO: 43706 - DNA, 75 bp, Homo sapiens
tgaaaaatgaagatgatgtagacactggactattagcttttaatctagacaacgagcaaccagattatgatatgg

SEQ ID NO: 43707 - DNA, 100 bp, Homo sapiens
gcttcccccaccaccccctcaagccccacctgaggaagaaaatgaaagtgagcctgaagaaccatcggctgaaagtacccatggcagacaagcctggtaa

SEQ ID NO: 43708 - DNA, 75 bp, Homo sapiens
caatgccggtggaggaatttgtggctggctggatctctgatggcttgaaacccctccttcctgtgtctgtgcgga

SEQ ID NO: 43709 - DNA, 100 bp, Homo sapiens
atcaaagacagctttcacagtttgcgggactcagtcccatcactccaaggagagaagcaaatgaagctcgtgaccgagaacctgaaggaggaaccaatgg

SEQ ID NO: 43710 - DNA, 97 bp, Homo sapiens
aagatttgctgggtatgaataatgactttcctccaagagcacattgcctggtaagatggagctcttgtccctggcaaagcgaaagcgcagtgactct

SEQ ID NO: 43711 - DNA, 90 bp, Homo sapiens
cttggcatccccttgctggacagtggctgtggtattgatgaagatgaccctactgctgatgataccagtgctgctgtaactgaagaaatg

SEQ ID NO: 43712 - DNA, 90 bp, Homo sapiens
tctccatccagctccctgcgtcccggccttcgctgtgctccctcaggatttcttcaagaagttcttatatgagccattgccagtagaatc

SEQ ID NO: 43713 - DNA, 98 bp, Homo sapiens
tgagaaccctacttgcctaaatgaggaatgtctttcctaccatctaaaatacgaaggtttctggctggcaaaaactgcgaggccagaactagtttatc

SEQ ID NO: 43714 - DNA, 145 bp, Homo sapiens
attcactgtctgcttttccaagttatacaggcgcagggatatctactgaaggaagctcggacttctcctggggatatggaccaggagctgcattatctattctagacaaatttcttgaagaatcctccaaactgcagtctgattc

SEQ ID NO: 43715 - DNA, 90 bp, Homo sapiens
gcagagtttcctttgaatcccatgtttgccaaaatgctgcttgaatcagctgtctgtgatcctggaaacatacgtgtgactgaagctccc

SEQ ID NO: 43716 - DNA, 100 bp, Homo sapiens
cttctgccctggcccccaagatcggccccctgggtctgctggacaagaaaaaggagcccctcacccaggcagtggggctcagcacacaggcagaagggac

SEQ ID NO: 43717 - DNA, 80 bp, Homo sapiens
gattgctgctcggccagtgcggctgatggtgggtgcatcatggcagctgccactgggcattctttagtggcaggctgaag

SEQ ID NO: 43718 - DNA, 75 bp, Homo sapiens
gcagccgcagccgcagcagcagtgtgaaatggcctttccccgggtcaagccagcacctgatgaaacttccttcag

SEQ ID NO: 43719 - DNA, 101 bp, Homo sapiens
atggaaatgaagtataataccaagaaagccccacttgtgctttgtattgaaggaggaaccttggccataatgccagttgatgactactggctgtgtttacc

SEQ ID NO: 43720 - DNA, 101 bp, Homo sapiens
tttcaagacaccaagtgagaggccaaccaggttagagcagccagcgggtacagaatggattttggaagagggagtcaccactggacctccaaggaagccac

SEQ ID NO: 43721 - DNA, 100 bp, Homo sapiens
gctgcagttcaattctgtgcccgcaaagtctctgctgtttcaggagatgttcgcaaagcactggatgtttgcagcgccatcatgaccgggtcctataaca

SEQ ID NO: 43722 - DNA, 100 bp, Homo sapiens
gctactaccggggggctcatggcatcatcgtggtgtatgacgtcactgaccagacaatcatgacatcatctccatgaagctgttccagctgatggtggag

SEQ ID NO: 43723 - DNA, 75 bp, Homo sapiens
tcccaaaatatggcaaagaaacctattctgagcccctgcctgacttctcacgagtccctggtctgacattgccca

SEQ ID NO: 43724 - DNA, 100 bp, Homo sapiens
ccggcgctgggcgctgcagctgctcccggcgcgtccccgaccaggttactttgacgcgcacgcccttgctatggactatcggagtttgggatttcgggaa

SEQ ID NO: 43725 - DNA, 97 bp, Homo sapiens
cccacttgaactctgccgaattcctgtgccacctcctcctttagaaaactgatcttaatacagcggaagatccatccaaaagctatgtgaaattacg

SEQ ID NO: 43726 - DNA, 111 bp, Homo sapiens
ctgtctgggaccttctccctgcctggacccctactattgcaacaaggtctgctgagaacagacccagtccctgaggaaggagaagatgttgctgccacgatcagtgccaca

SEQ ID NO: 43727 - DNA, 75 bp, Homo sapiens
ttgtgcagataatgtagttggaaaaaggaggagtattctgatcttttcagaataatccagaatggctactctgat

SEQ ID NO: 43728 - DNA, 90 bp, Homo sapiens
gggcgagaggcttctggcactcaggtgaatgaaaactttgccattgatttgatagcagagcagcccgtgagcgaggtggagactcgggtg

SEQ ID NO: 43729 - DNA, 90 bp, Homo sapiens
tgtcgcccgtttgcgctctcgccgaggcacaggctgctcgcggaccaccctgctccgaaaactaaggaaagaccacagcaagattctttc

SEQ ID NO: 43730 - DNA, 83 bp, Homo sapiens
ttcggcagtccacccaccgccgccgcctcccagcccatgacagacctggacacaaagatccaagaaaaggccatgaaggtgga

SEQ ID NO: 43731 - DNA, 98 bp, Homo sapiens
gaagatcctgtctgtctgcagctagatgatattagagaagaagaaggaggttcctgctgtgccagaaacccttaagaaaaagcgaaggaatttcgcag

SEQ ID NO: 43732 - DNA, 100 bp, Homo sapiens
tgagattgtaccccacgagctgccacacggcctgcactctgcgctttgagctactgggctgtgagctgaacgcccaacctgcaaatcctgtaagtctgag

SEQ ID NO: 43733 - DNA, 100 bp, Homo sapiens
acagaagggagtttgctaaatttgaaaaggagaaaatgaatgccaaatgggacacgcttagcagtgtctgcaaaaacgaatcttttcctacaacctgtta

SEQ ID NO: 43734 - DNA, 101 bp, Homo sapiens
ctgaaaacgagcccctatcctaggattacctgaaggtgaaacagattgagccagaaggaagacaatgctgtttataggcaagcaataaacagcaagatgtt

SEQ ID NO: 43735 - DNA, 100 bp, Homo sapiens
agccgcggagccggcgctgagaggggctgcggccggagcgggcggctgagacaaaggcgacgccttatgtttgatcatcggccaaggtcctggcgagaac

SEQ ID NO: 43736 - DNA, 75 bp, Homo sapiens
gggagagaatgaagcaagtttacctaacacgtctttgcaagagaacccagccaactatgaagttccttgtctttg

SEQ ID NO: 43737 - DNA, 50 bp, Homo sapiens
tcgataccaagcacctccaatagggtacagctctgccggggggggaaaaa

SEQ ID NO: 43738 - DNA, 100 bp, Homo sapiens
ttccagatgccttgttcaacaggagctaatttcgttactcgaaaaattagccggtcagtagctaagatttaccttggacaactggaatgtttcagtttgg

SEQ ID NO: 43739 - DNA, 90 bp, Homo sapiens
gtcatctacagaaagaggattgcaatctgtcagaacgtggttccagaaattttaaggaagctactccctcttgatgccctcccctttgcc

SEQ ID NO: 43740 - DNA, 83 bp, Homo sapiens
cagcaggctgcctgacacaggagagggccccagcagggccaccgggcggcaagatgaggacggggacttggttgccttttcca

SEQ ID NO: 43741 - DNA, 96 bp, Homo sapiens
aagttcctttcggacccgcaggtccacacggtgctggtggagcgctccacgctcaaaggaaggtgctcgggtcttcggggcactgggtcccatcgg

SEQ ID NO: 43742 - DNA, 85 bp, Homo sapiens
tcctgtagaggaggctggagattccacccaaatcctcttctccaagaagtttgcctatctggggcgcctggctcacgaggttggc

SEQ ID NO: 43743 - DNA, 82 bp, Homo sapiens
gaaatttatagataacaggatcatttcatctaagctccagggttccttgaaaagaaaacaggtagttaacctatctcctgcc

SEQ ID NO: 43744 - DNA, 75 bp, Homo sapiens
gtcacggcgtacgccctcatggggaaaatctccccggtgactttcaggaagagtgatcgttgccacaagtaaagg

SEQ ID NO: 43745 - DNA, 100 bp, Homo sapiens
ccttcctaacatccaggccgtgcttctgcctaagaagaccgagagtcaccacaaggccaagggcaagtgatttgacagatcccttcccactggaggcatg

SEQ ID NO: 43746 - DNA, 82 bp, Homo sapiens
acctcaggacacggcctacaacaccaagaggtcagttcaccgggacctggaggcccagattgcgatcgtgacggagaaccag

SEQ ID NO: 43747 - DNA, 101 bp, Homo sapiens
ttatctcatctggcttggcgcctgaggttctcccattaggtgctggagaatctggtaaaagcaccattgtgaagcagatgaggatcctgcatgttaatggg

SEQ ID NO: 43748 - DNA, 89 bp, Homo sapiens
acctctgggtgcggatacacttacacataacttgggcattccagtactagtagtttgcacaaagatctgggacataggaggacaacccc

SEQ ID NO: 43749 - DNA, 131 bp, Homo sapiens
atcacaacacaccaaacctcgctgcaaagaatgtgtttccaccaccctctcagacatgggcaagaagggggaaagttgctcagacagcttgcatgtcagcctgccagcatctgtcaacatccttaatgcag

SEQ ID NO: 43750 - DNA, 100 bp, Homo sapiens
cttcccggggctgcggctcttcgggcacaggcctgcggaacccgctgcagaggcgtcggatgaggccgagcggcgcgcccgtggctgccacctgcagtac

SEQ ID NO: 43751 - DNA, 82 bp, Homo sapiens
cagcagccgccacgccctggcctcagcctgcggggcaatactgaacactgcgcagcttgcagaggtctcctggcagccctca

SEQ ID NO: 43752 - DNA, 83 bp, Homo sapiens
cgggagcgcaaggtcgccctcaaggccatgatcaaaaccaggtggcctgacggagcaagagctgatggaacagctggaacact

SEQ ID NO: 43753 - DNA, 98 bp, Homo sapiens
agatttctcttcagtatggaaagaaacagaccactctttaaaaggttatcaatagtctggctgtctatcgtcatcgtgagactgactttggtgtagga

SEQ ID NO: 43754 - DNA, 98 bp, Homo sapiens
actttctggatgcttatatcaatttaggaaatgtcttgaaagaggcacgcatttttgacaggctgccagctgttggtatatccaggagcttttaatct

SEQ ID NO: 43755 - DNA, 83 bp, Homo sapiens
caatcccttagggtctctttgcagaggaatattggacctcaatacctataacgtcggttacccatgcagttgttactgtacca

SEQ ID NO: 43756 - DNA, 98 bp, Homo sapiens
gcgagatcctggagagcctgcaggacggcgcggcagagtccccgtacgcctacagtaacgtaagactttgaccccgacgcaggcttcagtgattgccg

SEQ ID NO: 43757 - DNA, 90 bp, Homo sapiens
gcgccaggtccggtgttggggtgtccgagttgccgccggagaggagtggcctcgcccgcttggcagcactgtacgcagcaccctataagt

SEQ ID NO: 43758 - DNA, 100 bp, Homo sapiens
gagaagagaaacggatcttcttagatatccagttaaatgcctccacggctgtgtacgcctgttgcaaccccatccaggagacatatttccagcagctggc

SEQ ID NO: 43759 - DNA, 96 bp, Homo sapiens
ggatgcatttgaaaaagtgagaacaaaattagaaacacagccacaagaagaatatgaaatcatcaatgtggaagttgctgttgaagaaatctggtt

SEQ ID NO: 43760 - DNA, 101 bp, Homo sapiens
ctcagggcagctcaaatgtggcacctgagtgttgcggagataggaacatgggagagaaacaatctgggtaacatgaaagtgatgctggttgctaagggaag

SEQ ID NO: 43761 - DNA, 82 bp, Homo sapiens
aacgcagttcggagttattatgagaataatcatgggccagactgggaagaaatctgagaagggaccagtttgttggcggaag

SEQ ID NO: 43762 - DNA, 100 bp, Homo sapiens
tcatcattgtccaggcctgcagaggtgaactcagcagtaggccttgcctcagatccaaggtcactcggaagaggccatgtctaccctcaatgacactcat

SEQ ID NO: 43763 - DNA, 83 bp, Homo sapiens
cccagatcaacttcactgtggccattgatttcactgcctccaatggtccgagctatacctgtggacattggtttctccattga

SEQ ID NO: 43764 - DNA, 75 bp, Homo sapiens
ggcccacggagcaatacagtgacattgggggtttggacaagcagatccaggagagcatgaataatctttcattta

SEQ ID NO: 43765 - DNA, 99 bp, Homo sapiens
ctgacagagaggatccacctccgaaacccctcggcggcgttcttctgtgtggcccgcctgcaggtgaccaagaatatggcccaggtgaccaaagccctg

SEQ ID NO: 43766 - DNA, 100 bp, Homo sapiens
ctggggcgtactccaaagttgttcaggaacgtttaattggttggggtcagataagaagaggagtgacaatcaagccaacagtagatgatgactgaagaat

SEQ ID NO: 43767 - DNA, 82 bp, Homo sapiens
cttatggcggcgctggagagggggcgctgagctgttgggaaacgcttcgttaagggactcaggcagtacgggaagaacttct

SEQ ID NO: 43768 - DNA, 82 bp, Homo sapiens
gccttttgccacctttccctttatttccggagcaaattgtggctactaatttgccccctgaagatcaagatggctctgggga

SEQ ID NO: 43769 - DNA, 100 bp, Homo sapiens
tctccgttgggtccggccgctctgcgggactctgaggaaaagctcgcaccagccttatgccagcctggaccatcttggaggcagtgtaggatcatggaag

SEQ ID NO: 43770 - DNA, 75 bp, Homo sapiens
acacggacaacataatatatcctggtcatcactccccaaaatggacgttaccaaatagattccgatgttctcctg

SEQ ID NO: 43771 - DNA, 82 bp, Homo sapiens
gcctcgcgccggctgctctttccggcaggttacgggcaggacttgagtggcttcggacagggcttctcagaccccagccagc

SEQ ID NO: 43772 - DNA, 100 bp, Homo sapiens
aataatcaggagtgaagtcccagggatattctgtgctgaaaggatctatgtttatgaaaataaaaaggaagcattgcaagctgtcaagatgatcaaaggg

SEQ ID NO: 43773 - DNA, 100 bp, Homo sapiens
gtaagaatgataatggcaaaccagattctgtgggactccgcacggatgggcagaagcctttgcaggtatcagaagttcacatatcaaatatatctgcccg

SEQ ID NO: 43774 - DNA, 74 bp, Homo sapiens
gggaagccaacgaccacacgcagttcgtgctggccgtgggcagcgccgtctttgatgccatgttcaacggggga

SEQ ID NO: 43775 - DNA, 92 bp, Homo sapiens
ccctccgagctggggttggacgctgccagtttgcacagcagcaggtcttgagtcaccacgtccgaatataattcttgggttagtaatctgcc

SEQ ID NO: 43776 - DNA, 130 bp, Homo sapiens
accttctaattaatgaattaattcgagagtatttagaattcaacaaatataagtatacagcatctgtcctcatagcaggggaccaacaaggcaccatggcgcagaagggccaactcagtgacgatgagaa

SEQ ID NO: 43777 - DNA, 100 bp, Homo sapiens
cggagtgtatgaccacaaacagccatcaagggatacttgactttcagagatgtggctatagagttctctttgctggagtggaaacgcctggaccctgcac

SEQ ID NO: 43778 - DNA, 88 bp, Homo sapiens
gcggggcctgggcctcccggtccgcaagcaggcctccggtgtggctgtctctgatggtgtcatcaaggtgttcaacgacatgaaggtg

SEQ ID NO: 43779 - DNA, 74 bp, Homo sapiens
tggaggaggaggatgaatttgatagagagaactctcttgatagagcccaagcagccaagaataaaggcaataaa

SEQ ID NO: 43780 - DNA, 82 bp, Homo sapiens
ggatgcagagagagcgatcaacacgctgaacggcttgaggctccagtcaaaaaccattaagacatccggctccgggttcgag

SEQ ID NO: 43781 - DNA, 96 bp, Homo sapiens
ttaattacggacgcactgaaccgcggctgggacagacacttcgggaacccgaggcggaccgggcgacgagcactgtatcaagaactgcctcctgag

SEQ ID NO: 43782 - DNA, 75 bp, Homo sapiens
gtttgaggcacgagagcagaagactggatctcgctcttatctcccaggttggagtgcagtggtgccatctcagct

SEQ ID NO: 43783 - DNA, 100 bp, Homo sapiens
tgatctgtacatagattttggtggaaagtttcattgtgtatgtagaagaccagaagtggatggagaatatcgagctgttgcttcttggagtagaattaaa

SEQ ID NO: 43784 - DNA, 50 bp, Homo sapiens
ggaggaactgagacgtttcgaattccagtgttctaagaacggaagcatct

SEQ ID NO: 43785 - DNA, 82 bp, Homo sapiens
gaagaagtacgaggcggacatgtgcgtgagacttcccaagtaagaagcggaagaggagccgctggaaccaagacacaatgga

SEQ ID NO: 43786 - DNA, 83 bp, Homo sapiens
attttactgtcaagacatttcttcggcattctgcaacaggtgcttttgaagatgatgatatcacgcacgttgaaggaagtgta

SEQ ID NO: 43787 - DNA, 100 bp, Homo sapiens
tgaccccttacgtggtgacacggtactaccgggcgcccgaagtcatcctgggtatgggctacaaagagaacgagtctcactgtgttgcccaggctgaagc

SEQ ID NO: 43788 - DNA, 50 bp, Homo sapiens
gagacagagtcttgctctgttgcccaggttggagtgcagtggcacgatct

SEQ ID NO: 43789 - DNA, 75 bp, Homo sapiens
ggccaacagtgttaagtataatgggaacttatagaaatgctggcaatttcaagaaaccaaaagttgttacaggct

SEQ ID NO: 43790 - DNA, 100 bp, Homo sapiens
cgcatatcctgggtagcctctaggaagcgctagacacatactgggctggcttagatgaagatgaagatgcacatgtctgggaggataattgggatgatga

SEQ ID NO: 43791 - DNA, 111 bp, Homo sapiens
ggggaaaaggcaaaaatcccatctaccgcaactctcagttcgagagtaaagacaggtgatttggcttctgcacagttaggaggagcaccaaaccgatgggaggttttgtca

SEQ ID NO: 43792 - DNA, 98 bp, Homo sapiens
tggaaccgggagctgctggacaagtactgtgtggcctacggcgtgggcatcattggcttcttcaagtttttgaagagccggaagatccaagcaacaga

SEQ ID NO: 43793 - DNA, 75 bp, Homo sapiens
aggcttggctggtcttgaaatcggcatcttaggcaattgctggctactttgatatatattttgagaagaattgcc

SEQ ID NO: 43794 - DNA, 100 bp, Homo sapiens
ggaaaatggaatctgaaccctcagcagttttataccatgttccgatttgaatttgttgaaatgagcagtcgtaaatcaaagagtaacagcttaattcaca

SEQ ID NO: 43795 - DNA, 83 bp, Homo sapiens
ctcaagactggagcccagcataaatgtggagcccctcactcattgctatggacagtgctatcaccctgtggcagttccttctt

SEQ ID NO: 43796 - DNA, 100 bp, Homo sapiens
gagcagctggaggaactgttcagtcaggtggggccggtgaagcagtgcttcgtggtgactgaaaaaggattggccatttgatgatggagctccaccccct

SEQ ID NO: 43797 - DNA, 100 bp, Homo sapiens
aaacacgaggtgcagaagatgaccttaacacagtagcagctggaaccatgacaggcatgttgtataaatgtacagacctttgaagacaatttaattgaag

SEQ ID NO: 43798 - DNA, 88 bp, Homo sapiens
ttaaggattaaggatccccaaagtctcagacttcagctactttgtccttttaaggattcaatgacttcctgacttggaggatgtggac

SEQ ID NO: 43799 - DNA, 131 bp, Homo sapiens
gcctcctgtgggacgccagtcaccagcaggagcagccaaccagcagcagccatcatggagattcttgagtatcagaacaccaccttctttggtggaacctgtatatccatgattgattacctcctctggcc

SEQ ID NO: 43800 - DNA, 82 bp, Homo sapiens
cctgaagcagaagggcatcaccgtgaagcagaagagcgctcctggttgcagccagaatgcatgacttcaggaggactgtgaa

SEQ ID NO: 43801 - DNA, 74 bp, Homo sapiens
gtcttttacactgttacttcagtcaggttttttattggcacctcagtctcaacattttcttttcggattcatga

SEQ ID NO: 43802 - DNA, 100 bp, Homo sapiens
aggcggcccgcttcctggaatggcaagcgcagcaacaacagagagcacgtggctggtggatgaccgctgtgtggtggagcccgcggccggggacctggac

SEQ ID NO: 43803 - DNA, 75 bp, Homo sapiens
tgccatccaccccagcctggagatccccaattcctggtcgggtggcttccagtggtcttcagtctgtcgtgcacc

SEQ ID NO: 43804 - DNA, 100 bp, Homo sapiens
ctttgatgcagtactccaggcagccgtctgcaaggccaatagcttcaccgtctcctctgtcgccgccccttcctggcttcaccgtttcatcattggcaag

SEQ ID NO: 43805 - DNA, 80 bp, Homo sapiens
ctccacctgaaggaccagtgtctgatcagctgctgcgtgctcagccccagagcagccagctgaggtgggtgtcctggttg

SEQ ID NO: 43806 - DNA, 82 bp, Homo sapiens
cgccttcgccctggagctggagcatgccctcagcgccatcgtgccatggtctccatgaactgatttttttgtgcagtgggca

SEQ ID NO: 43807 - DNA, 50 bp, Homo sapiens
gttggacacacctggccggtgcttcagggaaggacaccactggtaccagc

SEQ ID NO: 43808 - DNA, 98 bp, Homo sapiens
ctgcattgaaaaatgctggccaggctgtcacaattgttgcacaatatcgacctgaagaaatctcctgcaaagaagctgagccatgcaattagtaaatc

SEQ ID NO: 43809 - DNA, 100 bp, Homo sapiens
ggagtatgctgcgtttgtgctgggcgctgccttttccagtctgcgctcctcagaccaccggcaggtgaacagcctgatgcagaccgaggagtgcccacct

SEQ ID NO: 43810 - DNA, 82 bp, Homo sapiens
gcggccgcggggcccgagcgcagagtatggtgtttgcgaaaacttgcggaagctggagatcacaggcgtgtcttgtcgggac

SEQ ID NO: 43811 - DNA, 113 bp, Homo sapiens
ctactacccaggccactacccacccaacattgactgcacatggaacattgaggtctacgacgttcctccatcggtgagcaaggatgtgcccgatggcccactgctgcgtgagg

SEQ ID NO: 43812 - DNA, 99 bp, Homo sapiens
cgggaggcggtggcggcggctgcccggggccaacatgaccagattggcagtatggagttactcaggccttccctcacacagaggaggaggtggaagttg

SEQ ID NO: 43813 - DNA, 117 bp, Homo sapiens
tctcaatatctgtcttcggtggactccttcggcagtccacccaccgccgccgcctcccaggatgcctaaatcaaaggaacttgtttcttcaagctcttctggcagtgattctgacag

SEQ ID NO: 43814 - DNA, 82 bp, Homo sapiens
ctggagactggcagtgtcccaatccgaggccactgtctgcagctcccgtgaagatgtccactccagacccacccctgggcgg

SEQ ID NO: 43815 - DNA, 80 bp, Homo sapiens
ctcagcaggagtgccaaagaaagaagtaaactgaagttgcaaagcaacagtaatagatgttggcaaaggatgaactgatg

SEQ ID NO: 43816 - DNA, 100 bp, Homo sapiens
tgaagacctattttactgataagaaaacacatctttacacactaatgttctaagaacggaagcatctgggctggatggaatttagcatcaagcagagtcc

SEQ ID NO: 43817 - DNA, 96 bp, Homo sapiens
agttgagggagaaaggcgggcccgggaacagggtgttgaaagcagcaggggcctagaagacattaaaccgataccacagaaatacaaaggatcatt

SEQ ID NO: 43818 - DNA, 100 bp, Homo sapiens
accaatgtaagtctgccttatgttcctccagccaattgcaaaggtgattcgcctttgccagtctcatctcgtgtctgctttgttaagttccatgatccag

SEQ ID NO: 43819 - DNA, 100 bp, Homo sapiens
tgtacttcgtctatgtggcgcccggcatagtgagatggaagattttcgaggtatagcagaagaatcatttccaagctttctcaccaattcattatttggt

SEQ ID NO: 43820 - DNA, 100 bp, Homo sapiens
cgcaccctccccgcccgacctgcgagcgccgcccgggcatgcgaagccgtccctccccggattccaacaatgtctcacccatcttggctgccacccaaaa

SEQ ID NO: 43821 - DNA, 111 bp, Homo sapiens
ggctcgtccaactggtccctcagtcacacatgccagagattgctcaggaagcaatggagacatatctgaagagatggattaagaatgctttggattaaggattgtggagca

SEQ ID NO: 43822 - DNA, 96 bp, Homo sapiens
ccaggtgtaagcgcagaaagcaggcgaacccgcggcgcaataacgaagaaggctcaagcttggaggaaactggctttaactggggagaatatttgg

SEQ ID NO: 43823 - DNA, 99 bp, Homo sapiens
gcccagacaatgccggtggaggaatttgtggctggctggatctctgccaaagatttcatccggcacttgatggagaaggacccagagaaaagattcacc

SEQ ID NO: 43824 - DNA, 101 bp, Homo sapiens
ccgggagcgagcccaggcggcagctgactatagcactagtgaaatgctggtcaacatgggaaacttgcctctggatgagttctacccagctgtgtccatgg

SEQ ID NO: 43825 - DNA, 97 bp, Homo sapiens
ttatgccaagaggaacagcagtgtaaatgactcagagttcacccagggcatgatcttacctacaatgaatggagagtcagtagacccagtggggcag

SEQ ID NO: 43826 - DNA, 96 bp, Homo sapiens
cgggggacagctgagtttcaaaggcaagagcctcaaactcaacactgcagaagatgcccagctccatgaccttctccagctgaggcaggagaatgc

SEQ ID NO: 43827 - DNA, 100 bp, Homo sapiens
atcaagatcacctgcatcagtgtgcagaggccgttgcttttgaccagaatgctttggttaaacgaatcaaagaggggatgacagcatgggaggcaatggc

SEQ ID NO: 43828 - DNA, 82 bp, Homo sapiens
agagaccgtccgaggtaattgtctgccacgagtgcacattctgaaaacagcttcctgcctgacacagctcacttcaagaagt

SEQ ID NO: 43829 - DNA, 88 bp, Homo sapiens
cgagtctgatgctaagaagaacataaacaggatgctgagtctatatcggcacaggatgaaaacctctcaaaaacaatgtttctgcccc

SEQ ID NO: 43830 - DNA, 50 bp, Homo sapiens
gcatttttcaacaatgcttcaggagaagctaaaacttacttatgaggaaa

SEQ ID NO: 43831 - DNA, 75 bp, Homo sapiens
taagaaagcagctgatagcacatcacaggtggttggaggcaaagtaaagaagcccggtaaacgtggtcggaagcc

SEQ ID NO: 43832 - DNA, 74 bp, Homo sapiens
ccccggatttgctccaagctatggctatcagttcccagtttctgtagaaaatgtttcctgactgcaatgaggga

SEQ ID NO: 43833 - DNA, 100 bp, Homo sapiens
gaagactggaaaattataagagcactctctgaggtactggtcttcttggacattaatctttgaatacttgctgactgctaagaaatgaccagaggggaag

SEQ ID NO: 43834 - DNA, 78 bp, Homo sapiens
agggtggttaccgctgaggagctgcagtctctgtcaagtcgaggctgtctgtcaacagcgtgactgctggagactact

SEQ ID NO: 43835 - DNA, 83 bp, Homo sapiens
caatggtcccggctgccggtcgacgaccgccccgcgtcatgcggctcctcggctggtggaagctcttcgtgggcggtcttgac

SEQ ID NO: 43836 - DNA, 100 bp, Homo sapiens
ctcttgtgccctagcaccccgagaaccgtcagtttgagccagatggcatgtaatgaatttactacacatgtgatgaaccttctccgagaacagagtagaa

SEQ ID NO: 43837 - DNA, 90 bp, Homo sapiens
ttatctgtgtgacctgattgaaagctcaaagcttggattctgccgtgccactcacgaatggcgacacagaagacgatgctgacaaaatgc

SEQ ID NO: 43838 - DNA, 75 bp, Homo sapiens
aggggctggaacacctcgccaaagcagagaaatagagctgagagaagataatatcattttaattgaaaccaaggc

SEQ ID NO: 43839 - DNA, 75 bp, Homo sapiens
atttactgtcatcaagaactgtaatacttctggaatccagacagaatggtggagtctcgctctgtcacccaggct

SEQ ID NO: 43840 - DNA, 90 bp, Homo sapiens
gaacctgcaagagaacggcatccaggtgggctggatgacactttgcacacaattattgattatgcctgtgagcagaacattccctttgtg

SEQ ID NO: 43841 - DNA, 100 bp, Homo sapiens
gccttccctcaggccctgcggaggtggctgggatccgcagggctcccctccttcaggaacgaagccttatcagttgtgagtgaggaccagtcgttgtttg

SEQ ID NO: 43842 - DNA, 92 bp, Homo sapiens
cgacaagccgctggcagccgcggatctcaccgccgctcaggctctccctgtccagccgcctgcagctgaccctgtaccagtacaagacgtgt

SEQ ID NO: 43843 - DNA, 75 bp, Homo sapiens
tcaaccgggaccgtggcttcggcttcatccgcttggtaccgaggagaaggcattgtatatgggacactagaggag

SEQ ID NO: 43844 - DNA, 100 bp, Homo sapiens
ggcccgggcatggtggtctggggcaacgcggaagacacagaatgttcagcttaacaaagaaatgacacttgccagcaaccggagcctggcagaaggaaac

SEQ ID NO: 43845 - DNA, 100 bp, Homo sapiens
gaagagggactccctggggactgcgggctcagcgcacctcattatcaaggagctccacgcaggagatcggtgaggagctgatcaacggagtcatctactc

SEQ ID NO: 43846 - DNA, 83 bp, Homo sapiens
tctgagcgtgctgcggacggcgctgcggtacatccaggttttaaaatcaaagatgggaaaatcggagaaaattgcccttcccc

SEQ ID NO: 43847 - DNA, 82 bp, Homo sapiens
ttggcacttagaaccgcagcagggacgtcggtttgctatcgggactcggcgaggacgggtccatatccacgacaacatgaag

SEQ ID NO: 43848 - DNA, 89 bp, Homo sapiens
aactggattttttaactgaagatagtgcctttcagccctaccagcagaaacagtcctgctccagctgtaacagcagcatctgtgaccaa

SEQ ID NO: 43849 - DNA, 100 bp, Homo sapiens
ccatcgttgctgccttcttcgtcaagggaaaggcaaaaaagtccgcaggcatagagagtggaaagaaggaacagcatactaggctggtttgaaaaacaat

SEQ ID NO: 43850 - DNA, 82 bp, Homo sapiens
cgtagacaccagctccgaaatcaccaccaaggtgctgggcgtcctcttctttgccatagcctgcttcttatacaagcccctg

SEQ ID NO: 43851 - DNA, 75 bp, Homo sapiens
tggggccgaagcagcatgtgacaccgaccaggtgcagtagacattgttgcaatcatgatcggcaatctgaaaggc

SEQ ID NO: 43852 - DNA, 51 bp, Homo sapiens
gccctcgctcaccgccagcctgatgggtgagtcaagtgaagacatagacca

SEQ ID NO: 43853 - DNA, 100 bp, Homo sapiens
cagactgacaactgtgagacatgcacttgctacgaaacagaaatttcatgttgcaccctaaacgaggatgcagtcaatcagatggccgttactccctttc

SEQ ID NO: 43854 - DNA, 89 bp, Homo sapiens
agccggtgccgcagctgcgatggccgtggccgtggggagaccgtctaattcagcttagagaactatcaacacaggacaatgcaagccca

SEQ ID NO: 43855 - DNA, 90 bp, Homo sapiens
gcgttatgggatcgagatcctgccgttgcctgtcatgggagggcagccctcttcgcccgacctggaccgcatcgcggcgagcatgcgcgc

SEQ ID NO: 43856 - DNA, 51 bp, Homo sapiens
aaggaagaaattgttcagttcttctcaggtttgtggtaaatatgccagctc

SEQ ID NO: 43857 - DNA, 88 bp, Homo sapiens
cgccggcagaggatccagtgttcaccatcctggccccggaagctatgtgaaaacttctgagaaacttggagagtggaatgagaaagtg

SEQ ID NO: 43858 - DNA, 90 bp, Homo sapiens
tgggattacaggtgtgagccaccgcgtgtggcctctgggcaccttttgaagagagaagaagaaggaggttcctgctgtgccagaaaccct

SEQ ID NO: 43859 - DNA, 97 bp, Homo sapiens
tggatgactccagagagcattcaggagatgtacgccgcgatcaaggctgaccctgatggtgacggaacccttctctgaagcaacagctcttctccta

SEQ ID NO: 43860 - DNA, 95 bp, Homo sapiens
gatgacggagctgcagtcggcactgctactgcgaagacagctggcagtctgcgggccaggcatcgacatccgcaacgactatcagcagctgaagc

SEQ ID NO: 43861 - DNA, 98 bp, Homo sapiens
gggcagtgaggtggaaccttggcaatggatgacgatttaattcaagatttcttgtggatggactgctgctgtaaaattgcagacaaggtaaatttggt

SEQ ID NO: 43862 - DNA, 87 bp, Homo sapiens
ggacccggtgtctgctcctgtcgccttcgcctcctaatccctagccactatggtgaaatgacaatggatgctctgttggctcgattg

SEQ ID NO: 43863 - DNA, 85 bp, Homo sapiens
cagccctgcaggtggccgagggcttcatctcgcgcatgcagtacgccccgaacactcaggtgaccccaaaggagccatgataacc

SEQ ID NO: 43864 - DNA, 75 bp, Homo sapiens
caagaagcccagagactgggaggaaagcaggcttattcaaacctccttagagctaacatggatgggctgaagaag

SEQ ID NO: 43865 - DNA, 51 bp, Homo sapiens
actacagggaagtgcatcacatgtcaggtgtcagcttcctctggtgcaacc

SEQ ID NO: 43866 - DNA, 100 bp, Homo sapiens
aaaaccatcgaagaatgaaaccggcttgttgtcttcaattaaaaaatttattaaaggaagcacacctaagccaactgcacctataatatgtgaatttctt

SEQ ID NO: 43867 - DNA, 89 bp, Homo sapiens
gcgtgaagattatggacgatgaaggtcccgcagcccccggaagccaatagactccctcagggactctcggtccctcagctactcgcctg

SEQ ID NO: 43868 - DNA, 100 bp, Homo sapiens
acatttcccacaggacacgaagtttgtcggcccttgccttggcagagctgaggttggcgtgcagtggtgtgatctcagctcattgcaacctctgcctccc

SEQ ID NO: 43869 - DNA, 75 bp, Homo sapiens
atgccaaagcagcagccttctcgacagccttttactgtgaacagtgaactccatttagctactacatggcctcat

SEQ ID NO: 43870 - DNA, 90 bp, Homo sapiens
aaggatatcactgtgtgtgaacctccgaaagctcagcacacactcccgcaggatcccgccattgttcagacaaatcttcctattttcaag

SEQ ID NO: 43871 - DNA, 100 bp, Homo sapiens
gtccacgttcaggcaggaggacgtggaggaccattatgagatgggggaggagctgggcaggagtgtggccatctggggccgtgtggtatttgccactcag

SEQ ID NO: 43872 - DNA, 50 bp, Homo sapiens
aggagcagcgccggcggctggaggttatgaagacagtatggagtttccag

SEQ ID NO: 43873 - DNA, 98 bp, Homo sapiens
tggacccctcagtatatggatacggagtacaaaaacggcccttggatgatggaggactttctaaatgggtacggcagcagattcagcaccattcaacc

SEQ ID NO: 43874 - DNA, 125 bp, Homo sapiens
ggagaatatcacaaagttaaacagtgggatggcttttatgattaaacactcccagaaactttttaaggctcaaactgctttttctgcaaaccctgccaatccagcaattttgtcagaagcttctg

SEQ ID NO: 43875 - DNA, 100 bp, Homo sapiens
gaggaagaaagctatctagggacgagatctagaatcaactgagagagatgcttaaaaatcaccagttactttaatgagacaggcgacactaacaggtgaa

SEQ ID NO: 43876 - DNA, 83 bp, Homo sapiens
tcctggatccagaaggtctgccagtacaaagacctgcctagagctggaacgttacctccagagcgagccctgctatgtttcag

SEQ ID NO: 43877 - DNA, 73 bp, Homo sapiens
ccctgggtgtcgacaagggctacaagaaccaggccaaacgtaccaagaaagtcgggatcgtcggtaaatacgg

SEQ ID NO: 43878 - DNA, 100 bp, Homo sapiens
ttgtatgctggagtcaagattgcggggactaatgccgaggtcatgcctgcccagagagacgtcttcaaccagctgctgattcacgcggccttaaactgca

SEQ ID NO: 43879 - DNA, 100 bp, Homo sapiens
tgggttcatttaccctttggtcggaacgggcacctcgatttaaagatttccagcaacaggacagtcaggagcttcttcattatcttctggatgcagtgag

SEQ ID NO: 43880 - DNA, 98 bp, Homo sapiens
tccaaaggcagggcaaggaaactggccacaaccacacccactcgcccgggtctatggccacggtcggagagtggtcctgtgtgcgctgcaccttcctg

SEQ ID NO: 43881 - DNA, 76 bp, Homo sapiens
gcctccagcccacccacctccagaaggcagacggtaacaagtactccttgctggattgaacttcatctgaatggac

SEQ ID NO: 43882 - DNA, 78 bp, Homo sapiens
ccgtgcaactgctcatcctggcctacgtcatcggaggcggggtttcaccatgttgcccagactggtcttgaactcctg

SEQ ID NO: 43883 - DNA, 100 bp, Homo sapiens
ggctgccgtgttatccagaaagctcttgagtttattccttcagaccagcaggtaattgatcctggtggacctgctgaagctgaacgtggcccccctcgcc

SEQ ID NO: 43884 - DNA, 82 bp, Homo sapiens
cgcaaccattgacgccatgtcgggttattcgagtgaccgagaccgcggccgggaccgaggggttacacatcattttggaatg

SEQ ID NO: 43885 - DNA, 100 bp, Homo sapiens
catcatcgccaggccccaggcctcctgtgggacgccagtcaccagcaggagcagccaaccagcagcagccatcatggagatggagcctcgctctgtcgcc

SEQ ID NO: 43886 - DNA, 82 bp, Homo sapiens
cccaaggacagtgaggagctgggtggtcccagcctggagctgtgccagcctgacatggtgtggacgaatgtggaacctcgct

SEQ ID NO: 43887 - DNA, 83 bp, Homo sapiens
ggatattatttttcattatccttttctgggtgctatgggtgatcattccaagagaaaacgaagccccctcctgtattgacagc

SEQ ID NO: 43888 - DNA, 83 bp, Homo sapiens
gagggccgcttccgcatccccttcttcatgtctcaaggctgccgcgggcggacacgccagaggaggaggccggggaatggccg

SEQ ID NO: 43889 - DNA, 96 bp, Homo sapiens
gaggcgcagcaaggctgacgtggagcggtacatcgcctcggtgcagggctccaccccgtcgcctcgacaggcagcagtgaggatgccagagttcat

SEQ ID NO: 43890 - DNA, 99 bp, Homo sapiens
ctcagataccctttgaagtcccacagtacccacagacagatcctgataacttaagtgactctctcttttccggtgatgaagaaaatgctgggactgagg

SEQ ID NO: 43891 - DNA, 51 bp, Homo sapiens
aagctgcagcggaggaaggcgagggccatgtgaaactttctgactttggtc

SEQ ID NO: 43892 - DNA, 74 bp, Homo sapiens
ccgcaaccctatgcagagagcagatgccatggacaatattaccaggcagaaccaattctacgatacccaagtca

SEQ ID NO: 43893 - DNA, 83 bp, Homo sapiens
ggactgggatgatacaccttttccacagggaattgagttgtactggagagacccagaagtgttccatcctgagcgatttctgg

SEQ ID NO: 43894 - DNA, 75 bp, Homo sapiens
acagcatctattacctttgccttggaatacaggaggaaattttgggaacggtttattgccctgtgtcatgaaaac

SEQ ID NO: 43895 - DNA, 100 bp, Homo sapiens
ggcaggtgtgagtgcctgtataaaatattctatgtttaccttcaacttcttgttctgggctggaggctcccaggtgattttcacaaatcctttagaaatc

SEQ ID NO: 43896 - DNA, 108 bp, Homo sapiens
gaaggaggtcctgccgtccatgcggaagatcgtcgccacctggatgctggaggcttgggcactgtttaaaggaaagttccgagaaggcatcgacaagccggaccctcc

SEQ ID NO: 43897 - DNA, 75 bp, Homo sapiens
gggatcaactcttccaggaccaccaaaaataactttggctgggaccgccgggagagcctgcccacctccccaccc

SEQ ID NO: 43898 - DNA, 75 bp, Homo sapiens
cttcattcggcgctttaacaactcatctctggtatcacgaattcttcaggaggcttggacagagggccggcggtt

SEQ ID NO: 43899 - DNA, 100 bp, Homo sapiens
ccgtgggtgccctgcaccatgaccctgagcactggccaagcccggagaccttcaaccctgaaaggtacttccggaacctgtgctcagatgacacccccat

SEQ ID NO: 43900 - DNA, 100 bp, Homo sapiens
gtatgatagaagctatataaagtcaagtgtccattttctttcaactatatttgagcatacccaggctttcaacagacctcacatctttcttcttatgaaa

SEQ ID NO: 43901 - DNA, 82 bp, Homo sapiens
ctgcaagtcaccatggacgctgaagcaaattgtggctactaatttgccccctgaagatcaagatggctctggggatgactct

SEQ ID NO: 43902 - DNA, 80 bp, Homo sapiens
gtgtcatcggttcggtaaagtttctgttctctgatctccagcaccctgccggtggcactactgagagacgaggtgccagg

SEQ ID NO: 43903 - DNA, 100 bp, Homo sapiens
gagctgcagaaagggttaccagcccctcgggtggaaggagacagccggagctctcaggcagcagccaggcccagtggcagcaattgtacgtgcatttcca

SEQ ID NO: 43904 - DNA, 97 bp, Homo sapiens
cataagcctacagggtacgaagaatgaactctgagaatgtttggagcgggcctccccttcctcatcatcgagacaagcaccatcaagccttaccacc

SEQ ID NO: 43905 - DNA, 95 bp, Homo sapiens
gagaaagaattgacaatctcatagacccaggatataacgtcgaggtcaagcacattaaaatcatgacagcagaaggactgtaccggatcacagag

SEQ ID NO: 43906 - DNA, 100 bp, Homo sapiens
atgccctattctgtgggcttccgcgaagatgtacagttacccagcacgtgtacctcctcctcctcctattgctcgggctgtagtgccctcgaaacgtcag

SEQ ID NO: 43907 - DNA, 82 bp, Homo sapiens
caataaccaggtgcttggcaaaatcgagcgggccattgatgtccagctcgccgctgtccaagaaacgtcgcgtgtccgggcc

SEQ ID NO: 43908 - DNA, 96 bp, Homo sapiens
tggagccctgcatatgattggctctttagctgaaatacttctgaaggtgtcacgtcttgaaattttaaatgtcctcagtgactctctacctctggc

SEQ ID NO: 43909 - DNA, 50 bp, Homo sapiens
agtctgggatatggcatcgtcaagaggggcaacccccttcatttatctcg

SEQ ID NO: 43910 - DNA, 95 bp, Homo sapiens
catcaccttcaatccgctctactggaatgtgccccataggctccttcaatttccgtgatcctcggagtccccaggagaccaggtgatggcagcag

SEQ ID NO: 43911 - DNA, 80 bp, Homo sapiens
cactggggagtcgcacatcggcggggtgctcctgaagattgtggagcagatcaaatatggctcaagcctggaagatgacg

SEQ ID NO: 43912 - DNA, 100 bp, Homo sapiens
cgaacaatcacctccagttattacagaggagcccatggcatcatagttgtgtatgatgtgacagatcagctggtgccgacaagaaagccgaggctggggc

SEQ ID NO: 43913 - DNA, 100 bp, Homo sapiens
tgtgcgctatcattctttttattttctttccaagtacatgaaaaatccattctcttggtgtcactgactccaacctgtctgtgcacacagaaaacccgga

SEQ ID NO: 43914 - DNA, 100 bp, Homo sapiens
aaacctcaaaggccaaaaaattctcttttcaagaagtggagcgagaaatctcattcagaacagagtgtggcctgtattactcctactacaagcagatgct

SEQ ID NO: 43915 - DNA, 100 bp, Homo sapiens
gacagacaattgttcagttgcaaaaagaaactggagccaccatcaagctgtctaagtccaaagatttttacccaggctctttggtgtaacgggaaactgc

SEQ ID NO: 43916 - DNA, 101 bp, Homo sapiens
tccccaggggacttctccatctctgtcaggatcctttaggaaaaagacccaatcctccccctgtttctgtgccctacttgagtcctctagtactccgtaaa

SEQ ID NO: 43917 - DNA, 100 bp, Homo sapiens
gtggcagaggcagaaggagccccagagctcaatgggggaccacagcatgcacttccttccagcagctacacagtacctggagtagaacagaaaaattatt

SEQ ID NO: 43918 - DNA, 75 bp, Homo sapiens
ctatgaatttgctaaacttaaaagcaagctggttctctgggatataaataagggtttggaaatcccttgtctcca

SEQ ID NO: 43919 - DNA, 50 bp, Homo sapiens
cccatcacttacgaaaaaccagtcactgattggctggaggaatgttacac

SEQ ID NO: 43920 - DNA, 50 bp, Homo sapiens
cctggaagaggcctctctcccttgtggaataccaaattgacatatttttt

SEQ ID NO: 43921 - DNA, 98 bp, Homo sapiens
cgagagcgtggagcgggctgggccagggaaagcaggcaggatgggagagtcgccgatagaaccacctcttccctgcctcctgggcttgggggaagctt

SEQ ID NO: 43922 - DNA, 83 bp, Homo sapiens
ggaaaaacgtgtgggtacgaccttgtgtggccagactccactgatgatagctgccgaacaaggcaatctggaaatagtgaagg

SEQ ID NO: 43923 - DNA, 80 bp, Homo sapiens
agcacctacactggcaacattagatccacctcatacagatattgatgatgttaagaagttcaaaccgggttacctggaag

SEQ ID NO: 43924 - DNA, 82 bp, Homo sapiens
tctaggaagggctggagttgttttgaatgggcgcccgtaagagaggtgggcaagagcaggccgggctctcgccatgggtcac

SEQ ID NO: 43925 - DNA, 82 bp, Homo sapiens
agctgtggaaagaagttgcaaaacactggcagcctcccgcgacgatgcccctcaacgttagcttcaccaacaggaactatga

SEQ ID NO: 43926 - DNA, 87 bp, Homo sapiens
gacgctgcctcggcccggacgcgcccgcgcccccgcggctggagggtggctgaaggtgatgtggccgccctcaaccgacgcatccag

SEQ ID NO: 43927 - DNA, 95 bp, Homo sapiens
gactctacctggggatatacatgcatgcaccaaaacgaggacagcctggtgtgtccgtttctctggtgaatccccagccatccaatggccacttc

SEQ ID NO: 43928 - DNA, 80 bp, Homo sapiens
atttgttaaggattccaagtaactcttatttggcattgaatgccccagaggagcccgaaacctcccaggcttggtgcagg

SEQ ID NO: 43929 - DNA, 90 bp, Homo sapiens
ccagctcagcgcccggcagccttcgacgcgatgttccgccggagcttgaatcgttttaaatattgtatccacagtgaatcttggttgtaa

SEQ ID NO: 43930 - DNA, 74 bp, Homo sapiens
gaagagtgctgtcctgtgctactcaccctcggacagacagagtggccgtaacatcccgtcctgactgctactgg

SEQ ID NO: 43931 - DNA, 75 bp, Homo sapiens
cactcttcgagattggcacacccagatcagccatgcagaagctggggacagaagtatttgaagaggtctataatt

SEQ ID NO: 43932 - DNA, 100 bp, Homo sapiens
caggcgcagacgcgcgggcgggaagatggcggctgggttcaagccataggaaaaggatacagagtagagtttcatgaacctgaaacttggtggaaatttg

SEQ ID NO: 43933 - DNA, 76 bp, Homo sapiens
aattctctacatttgtgaaagtcagtttctgaggaatttcatcagatttctcacattggcaaactgagagattttc

SEQ ID NO: 43934 - DNA, 100 bp, Homo sapiens
cattttcagtgacgtttgttgatggcaacaaccctttccaagcagttcaagaaggttctcctgaaaagaaagctgaacattcatctataaatcaagaaaa

SEQ ID NO: 43935 - DNA, 51 bp, Homo sapiens
ggcggtcaccaagtacaccagctcgaaaatccacattcatctcaatggaag

SEQ ID NO: 43936 - DNA, 75 bp, Homo sapiens
aggaggtcatgaaggacctgagcctgacgcgggccgcgcgggatgctcacaactgtattcctgagctggacagtg

SEQ ID NO: 43937 - DNA, 95 bp, Homo sapiens
agtgatgatcagctccctgggagacgtcaagggcaatggcaaaggggtcaccagtcgttggcacaccaagaagctgccccgcaagacccaccgag

SEQ ID NO: 43938 - DNA, 85 bp, Homo sapiens
tggtagtcgtgcatcatcaggatacagaggtgcagtcagcctcagtttccaaagccggaaaaggatcctctagtagccacggtgt

SEQ ID NO: 43939 - DNA, 87 bp, Homo sapiens
actggcaggggccgcgctctgctgcttcctcgtcctagtgatccacgcgcagttcctcaaagaagattttaggtgatgggcaagtca

SEQ ID NO: 43940 - DNA, 98 bp, Homo sapiens
aaggcccggaagaaagaggagcggcagagcctgctggaagatgactcaagaccggcctctgcttgccgtgcaggaggcgctgaagaagtgcttccccg

SEQ ID NO: 43941 - DNA, 100 bp, Homo sapiens
aagctattccgggccagcgagccgatcctcagcgtcctgatgtggggggtgaaccacacggtgcagctctgtcatttccactctgctctgctgcacagaa

SEQ ID NO: 43942 - DNA, 100 bp, Homo sapiens
gcgggtctggctagtcaggcgaagtttgcagaaactagaaaaactgcttttggaattatctctacagtgaagaaacctcggccatcagaaggagatgaag

SEQ ID NO: 43943 - DNA, 100 bp, Homo sapiens
tggatgtcctgcgtgtcgcagagcaccgggcagatccagtgcaaagtctttgactccttgctgaatctgagcaagcctgatttgaaaaagcggatccgtg

SEQ ID NO: 43944 - DNA, 101 bp, Homo sapiens
cggacttccccgttagaactcgcgtttccacttcagagatctggacttggatgttgtgggtgatggtatgcagtgtcctccttcacctttgctttttgatc

SEQ ID NO: 43945 - DNA, 96 bp, Homo sapiens
ctggatattgagccggatagacctattggatatggagcctttggtgttgtctgagggcactaggaggaggctaagagggaccatcccactaatgaa

SEQ ID NO: 43946 - DNA, 82 bp, Homo sapiens
gtgggcctgggagctgcctctgaggaacacgccgcagggcgaactttctgaccaagtatacaactacccagagggcctagga

SEQ ID NO: 43947 - DNA, 100 bp, Homo sapiens
actgtaaaaaacccagctgaagaccactttagaaactcaattaagcaaagcgaaggctggagctaggagaaagcggtcatcagtacctctcagatggttt

SEQ ID NO: 43948 - DNA, 75 bp, Homo sapiens
caaggggattcaaacttcaacagaatgtggcaaccagtttgcctgagaatacagatcaacccacagaacaaagcg

SEQ ID NO: 43949 - DNA, 97 bp, Homo sapiens
ggcgtcaccatgggggctgtgctgggtgtcttctccctcgccagctgggtattgactgggctcccaagagcgaccgcattgtcacttgtggggcaga

SEQ ID NO: 43950 - DNA, 83 bp, Homo sapiens
ggcaaggctggaccctgagccctgggacctctgaagtgaacactgcagggccatttggtgctggagaatctggtaaaagcacc

SEQ ID NO: 43951 - DNA, 101 bp, Homo sapiens
caactgaatcgcacacctcaatctatgctgttgcagctaattgcaaaatcccagttaacttcattgagtggcgtggcacagaagaattacttcaacatttt

SEQ ID NO: 43952 - DNA, 100 bp, Homo sapiens
tggctatgaacccagaggtcgtggaggtggccgtggaggcagaggtggcatggggggtttaaagccaatttgtctctcttgaggaggcctggagagaaaa

SEQ ID NO: 43953 - DNA, 80 bp, Homo sapiens
gctcctggtcgatgaagaggatgatgtttttggtgaagtttctcttcagcaacgggtagcagaattggaaaaaattaatg

SEQ ID NO: 43954 - DNA, 84 bp, Homo sapiens
gcggaggcttcgagtgacccgggtgccgaggagcgggaagagttgctggggaatatattattcgagtgcaaagaggaatttctg

SEQ ID NO: 43955 - DNA, 98 bp, Homo sapiens
ccccccaccctgccgaccggcctagcttttcccacctggaggggctgctgcaagaggtccatgtgaaatctgaggtccttgctgtcaagttgtcacaa

SEQ ID NO: 43956 - DNA, 82 bp, Homo sapiens
gccctgggagctggaggaaccgcgggctgggttacgacccctacaaccctgagctgcccaagccccccgcgcagagggagaa

SEQ ID NO: 43957 - DNA, 76 bp, Homo sapiens
aacatcatgcagtggaatgcagttatatttggagttcgaaatttgagcaacccagccaagaagttcaagattgaag

SEQ ID NO: 43958 - DNA, 95 bp, Homo sapiens
agcggacgtagagcatcggacgcgggcgccgtggcgctgggcaggagggcgaagccatgacgtcagtcaggatctacagtctttgcagaaattca

SEQ ID NO: 43959 - DNA, 87 bp, Homo sapiens
acagactacgagggagtttgacagctattaaaaccagggctccacagttaggaggttttgagtttgatcgatggctgaatacccccg

SEQ ID NO: 43960 - DNA, 49 bp, Homo sapiens
ggtcacaccaatactgttgcagattgcctccggcctctcctcctctccg

SEQ ID NO: 43961 - DNA, 74 bp, Homo sapiens
ggacacaacaccgcggagccctgcaggcggtggctttctagaagatgaccatagaggaccttccagattttcca

SEQ ID NO: 43962 - DNA, 51 bp, Homo sapiens
ttgaacagaactatgcgaaacaattgagatggcaagattattttatcataa

SEQ ID NO: 43963 - DNA, 100 bp, Homo sapiens
gaagggatgagcaaacggaagagaaagagaagtgtccaggaggggtctctcgggtattgaggcagaagaaaactttgaagaagactcacacaggccatta

SEQ ID NO: 43964 - DNA, 100 bp, Homo sapiens
cgcgactcgagggtgacgctcgctccgctcgtcccgctcgtcatggcctacccgggatacggaggaggggaactttatattgctgttggaatatctggag

SEQ ID NO: 43965 - DNA, 75 bp, Homo sapiens
atgatagtcttcctatcacgggcactagtgtggctctcctgttccagcaattggttcccagaggtccacttgggc

SEQ ID NO: 43966 - DNA, 100 bp, Homo sapiens
ctctggagtgactgggagtgggctagaaggggaccacctgtctgacacctccacaacgtcgctggagctcgattcacgaattctcaatcacaatcctctg

SEQ ID NO: 43967 - DNA, 97 bp, Homo sapiens
aactgaaagaagaagcaggtcccaaggggccaggcgcctcctccacctcctcctcctcctaggtctcctctgagcctccggcctccataagacccaa

SEQ ID NO: 43968 - DNA, 100 bp, Homo sapiens
atggaacttgctgcatgccagcaccatttcaaagaggaaatctcccggaggtttaaggctcagcaggatcagctggtcctgatcttcgcaggcaagatcc

SEQ ID NO: 43969 - DNA, 133 bp, Homo sapiens
gccttcatcctcaccctcccacacttcctctccgagccctaccagtacaccttggccagcactgtattgactcggagacaaaaagaggccaagaccaagagtgacagtgggacagctgcccagacttctctag

SEQ ID NO: 43970 - DNA, 87 bp, Homo sapiens
cggagcctgaggacacttctctgtcgtcacagttagataagtttataccatggatagcacaaaggagaagtgtgacagttacaaaga

SEQ ID NO: 43971 - DNA, 82 bp, Homo sapiens
ggcctgaacttcggagtcagatgcagggacccaggacaagggctcgcctaggtcgaattgacataaaacagttgatagcaaa

SEQ ID NO: 43972 - DNA, 96 bp, Homo sapiens
aaatgagacaagtcaagaatccttttggcttagagatcactaatccatcttcagcttcaattacaaatgagaaaactgatttggagagatactgag

SEQ ID NO: 43973 - DNA, 98 bp, Homo sapiens
tggaccagctcaagcagttcaccaccgtggtggccgacacgggcgacttccacgatgagcgggatcgtgtgcagaagaaaaccttcaccaagtgggtc

SEQ ID NO: 43974 - DNA, 90 bp, Homo sapiens
ggcttctccccgcgggagcccccagcatggtctgagaataaaggattagaaactaccaagaacaatgtagttcagccagtttcggaagag

SEQ ID NO: 43975 - DNA, 95 bp, Homo sapiens
cgcgagcaaggagcgcggaatcggggagcgtccggagctagctggatcctctaggcagcgtgagtgcatctccatccacgttggccaggctggtg

SEQ ID NO: 43976 - DNA, 82 bp, Homo sapiens
aacacaggattcaccacagtacttcacatcgtcgttcacatggggtgagaatgagatggtgatcatgagacctggaaacaaa

SEQ ID NO: 43977 - DNA, 75 bp, Homo sapiens
cagatcgggatttacgtggagatcaagcgcagcgatggtaaagaatctcatttggacacattgagtcgggcacaa

SEQ ID NO: 43978 - DNA, 100 bp, Homo sapiens
cgcggattcgccgaggcaccgaggcactcagaggaggaactgtggctgcaccatctgtcttcatcttcccgccatctgatgagcagttgaaatctggaac

SEQ ID NO: 43979 - DNA, 86 bp, Homo sapiens
agatgaagagcatgatctagaagaggatgagagtggcactcgacgaaaaggaggttcttcagtctgccaaggaacaaattaaatgg

SEQ ID NO: 43980 - DNA, 100 bp, Homo sapiens
gactgctgtagttcagaagaggtttggctttccagagggcagtgtagagctgtcaaagctcgaaaaacagcagcagaggaaagaaaagaccagagctaag

SEQ ID NO: 43981 - DNA, 90 bp, Homo sapiens
aagacagtgcatgaagccaggggacatccgccatgctccaaacaacttggcctcagcgctcaaaactcggtgatcatagttgataagaac

SEQ ID NO: 43982 - DNA, 96 bp, Homo sapiens
caagacatttcctgctcggaaccttgtttactaattgtagctacagcaagctgggtagcaggcagatccaaaggatatcatgaagtttccagggcc

SEQ ID NO: 43983 - DNA, 74 bp, Homo sapiens
ggccaagaggcagacctaggaaatgggggtcagattcagatgatgatgatagccattcaaagaaaaaaagacag

SEQ ID NO: 43984 - DNA, 74 bp, Homo sapiens
tgcgcgaccgggagctggacctccgggacaatgcagatcttcgtgaagactctgactggtaagaccatcaccct

SEQ ID NO: 43985 - DNA, 75 bp, Homo sapiens
ctcaccgccgccgccgccaccactgccaccacggtcgcctgccacagactgctcactagaagctcagcccaaata

SEQ ID NO: 43986 - DNA, 98 bp, Homo sapiens
gaggttcgagcgctgttctcgctccggagccgctgcacatttcgatcatggaagggaagtggttgctgtgtatgttactggtgcttggaactgctatt

SEQ ID NO: 43987 - DNA, 75 bp, Homo sapiens
gtggaagaagaccaagacccatcatgccccagatgcatttgaaaatgagacggcaaagaaagttaaactacagaa

SEQ ID NO: 43988 - DNA, 100 bp, Homo sapiens
ctacagagacgtgtctgatctaaaggattatgtgctggccgtggaggcgtatcattcggttatcaagtattacccagagcaagagccccagctgctcagc

SEQ ID NO: 43989 - DNA, 100 bp, Homo sapiens
tttaagaagaaaaagaaggccctgagtcaaagaagatgcctcgaactaaacaaattcatcccagaaatctaagaggtatccgttacagcactgatgtgag

SEQ ID NO: 43990 - DNA, 97 bp, Homo sapiens
attgcaaagtctgtatctttagtaaggatgggaccttgtttgcctggggcaatggagaaaagtaagaatgattgatgttggctgatattggagtgct

SEQ ID NO: 43991 - DNA, 75 bp, Homo sapiens
gaaacaaaatgatatcagaaggactagacccagatcttcttgagtgttacagttcgagtgcctcaaacaaccaca

SEQ ID NO: 43992 - DNA, 100 bp, Homo sapiens
tgcgctgtgttcctctctagtcacaagagccttggggaagacagttggaagctcagacatgggcaactccaacaacattgccaccgtggacatctccgca

SEQ ID NO: 43993 - DNA, 98 bp, Homo sapiens
agctctgaaaaactcttcaacactgttattgtaaacaaagcagtccagagcgtgagtccattcacatcctgagtgttgatgagaagaacaagttggga

SEQ ID NO: 43994 - DNA, 90 bp, Homo sapiens
cccggcagccaccccatctgggaagtagctggtgtcacttcggtgtggttggaagaagactttctccccagctgcattcccggaggcgcc

SEQ ID NO: 43995 - DNA, 82 bp, Homo sapiens
cctcaaggagttcacgttcatgggcgagggaacagatgagaaacccggcaatgaaagctggagtgcagtggcgcaatctcgg

SEQ ID NO: 43996 - DNA, 100 bp, Homo sapiens
aaaaccttcatgccgattgcatgggcagcagcttatgaacatcgatatattgaactcttcttgaattctactcctggaggcggctctggcatgggaggtt

SEQ ID NO: 43997 - DNA, 100 bp, Homo sapiens
gacacccctgaagccgagaaatggagcctcctcaacaagcccaagagtgagatgaccccagaggagctgcagaagcgagaggaggaggaatttaacaccg

SEQ ID NO: 43998 - DNA, 90 bp, Homo sapiens
cgctcttcctctctcagctggtgttcgtgattgggatcaaccagacggaaaacccgtggagacctttggcgacttggcctttggcgacat

SEQ ID NO: 43999 - DNA, 75 bp, Homo sapiens
tccgctcggtgcccactaacaaggtgccagaaccctgtggagcatcatgaactgggaagagtagctgagccccag

SEQ ID NO: 44000 - DNA, 82 bp, Homo sapiens
tcggagacctgagagatgttaaccaaattcgagaccaagagcgcgcgggtcaaagggtacagccaaagaccggagctttgga

SEQ ID NO: 44001 - DNA, 100 bp, Homo sapiens
aagaacatgagaactgcgactcagcatgcagaaggcacgtgtggttctcaaatataggcattctgatgggaacttgtgtgttaaagtaacagatgattta

SEQ ID NO: 44002 - DNA, 100 bp, Homo sapiens
atggcgtcctacgtagataacagcttccgccaggcggtgatgaagaatccccccgaaaggaccccccagaatctgtcactgcgaaggggatgaagagagc

SEQ ID NO: 44003 - DNA, 50 bp, Homo sapiens
gaattacataacatcaaacgtgggatttttagactctgaggagcagttgg

SEQ ID NO: 44004 - DNA, 90 bp, Homo sapiens
gatccacacccaagtccgctcatcaccctggagactcaggtgctggagaatctggtaaaagcaccattgtgaagcagatgaggatcctgc

SEQ ID NO: 44005 - DNA, 83 bp, Homo sapiens
ctcgtatcggtaccccaggacagcaatggcagatgagtctggggaccagcgaagaccaccagcacttcacctgcaccatctgg

SEQ ID NO: 44006 - DNA, 100 bp, Homo sapiens
ccaagtctggggataccttactgctcctgcaccacggggacttctcagcagagatggattaccgggccttggtgcatgagcgagatgaggcagcctatgg

SEQ ID NO: 44007 - DNA, 100 bp, Homo sapiens
aaccactcaagagtcataggattagatgatccaagtcaccaagaaattactgtctcaagtgatacgggagtcctcttggtatatgatattacaaattatc

SEQ ID NO: 44008 - DNA, 83 bp, Homo sapiens
tgaaccgcgcggccgaaccctccggaaatctggcattttttaaagtttgcgccccacaaagaggaaatattccaaaggtactc

SEQ ID NO: 44009 - DNA, 100 bp, Homo sapiens
gtgcggcagcagctccagagctttgtcaaagacttcctggagatgatggaggctcgcagccgtggccatgcgtccccactggcggccaacgggcagagcc

SEQ ID NO: 44010 - DNA, 83 bp, Homo sapiens
ggttgagttctatgctccttggtgtggacactgcaaaaagaggagatgttaaagtaacccatcttgcaggacgacattgaaga

SEQ ID NO: 44011 - DNA, 100 bp, Homo sapiens
gaggcggtagggggtacgggggctggtcccagaagatggcggaggcgggggctgagtttgagaaagctgcagaggaggttaggcaccttaagaccaagcc

SEQ ID NO: 44012 - DNA, 75 bp, Homo sapiens
aactcgaagaacagctgtggaaagaagttgcaaaacactgggtatttgtggaatcgatgaatttgataagatggg

SEQ ID NO: 44013 - DNA, 95 bp, Homo sapiens
tgttcctccttagaccacccgacagaccagaaactcatcccagagttcattaagaaggcaggtaaagtgaggaaacatgcaactgaacaggaaaa

SEQ ID NO: 44014 - DNA, 75 bp, Homo sapiens
gggaaccacatggatctgcctgaattcgacaccaaattttggaacttaaaaagaagattcttaaaacttacaatc

SEQ ID NO: 44015 - DNA, 96 bp, Homo sapiens
ggtgacttcacttttgagtgcaactgccttccagctggacagtgccacatcgcttatccaggcagctaaaaacctgatgaatgctgttgtcctcac

SEQ ID NO: 44016 - DNA, 100 bp, Homo sapiens
tgccactcccaaaaaactatcaagttgggatcaggcagagtccgtgcactggagaaggcgaggtcaagtgcccaactgcagaccaactacccctcctcag

SEQ ID NO: 44017 - DNA, 98 bp, Homo sapiens
acaaggaatgacttcatgggatccctttcctttggagtttcggagctgatgaagatgccggccagtggatggtatcgtgatttccgatacccacctgg

SEQ ID NO: 44018 - DNA, 51 bp, Homo sapiens
atgcagcatgctgaagtctattacaagggcttggactgtggtcctgaaagc

SEQ ID NO: 44019 - DNA, 89 bp, Homo sapiens
ccaccaggcttctcctttccccgctgtttatgccagttattcagacagaaagtgaacacaagcctcctgtaaatggaagttactttgcc

SEQ ID NO: 44020 - DNA, 97 bp, Homo sapiens
agctggagagaacagttcattgaagctatcactgtcagtgctggaatgtatcctgtcaggtataatgtcagtgaatggcaagaaagttcttcatatg

SEQ ID NO: 44021 - DNA, 98 bp, Homo sapiens
catttacagaaagagtcaacagcagtggcaacaggtcagaatggcggcagtggagcatcgtcattcttcaggattgccctactggccctacctcacag

SEQ ID NO: 44022 - DNA, 82 bp, Homo sapiens
gcaactagcggcgggtcgtgggcacctccaggctccccttccctgcgggcatatccgctcctctcggtgatcacccgccagc

SEQ ID NO: 44023 - DNA, 111 bp, Homo sapiens
tggatactgatcacctgcgatactttgacagtaacaaggtaccttgtgggtcaacgactcgtgaactacgaacggaaatctggcaaacaaggctcatctccaccacctcca

SEQ ID NO: 44024 - DNA, 92 bp, Homo sapiens
accagtacgcccttgacctccagacgcagcacaatcactttgccatgaactccatgaggagctctacggtgactttgaagacttggaaacag

SEQ ID NO: 44025 - DNA, 98 bp, Homo sapiens
gctaatgtgtgctgtgttaaattcagcccctcttccagataccatttggctttcggctgtgcagatgcctgtgaggagccaccaacatttgaagctat

SEQ ID NO: 44026 - DNA, 76 bp, Homo sapiens
gctgcctcggcggagcagaggaaccacacgctgatcatggcaacccacaaggctgtgctggatgtcagtgaagagg

SEQ ID NO: 44027 - DNA, 90 bp, Homo sapiens
cctggcgctgctggccgcgctgctgctggccgcacgcggggctgctgcccaaggagaaaatgcagaagtctccatggacgtttccctggc

SEQ ID NO: 44028 - DNA, 98 bp, Homo sapiens
ggcctaccaggaggccaggggtgtcgccatggtgttcaagcagccctggccagggatcatgcgcacagtctatgggaaccacgaacgctttgagacaa

SEQ ID NO: 44029 - DNA, 99 bp, Homo sapiens
gggattggaactgtgtttgggagcctcatcattggttatgccagaatttatccagttggcgaaggactttgaggatttccgtaaaaagtggcagaggac

SEQ ID NO: 44030 - DNA, 90 bp, Homo sapiens
cagcggaggagcccgaccgacccgaaaggaagctgttgaagttattgaagtacctgttgctatattctaagaaattaaaatgtccagaaa

SEQ ID NO: 44031 - DNA, 75 bp, Homo sapiens
cgcaggatgccacacgaagagctgccgtcgctgcagagaccccgctatggctggtgccaagtaccggggctccat

SEQ ID NO: 44032 - DNA, 50 bp, Homo sapiens
ctggaggagccttctcaagaacagagcttcgcaaacctgggtatacttca

SEQ ID NO: 44033 - DNA, 100 bp, Homo sapiens
ccagctctcagccaggaggtccccaaccccaaggaaggaagaaactggaaattaggaactgcttcctcatttaacaagatggagtttcgctcttattgcc

SEQ ID NO: 44034 - DNA, 100 bp, Homo sapiens
tgggagcttctcagccattttccacagatcaggattgtcagtggcttcgccccgaggagagctgactgccctgggctgctgcctccggcagagctgagcc

SEQ ID NO: 44035 - DNA, 100 bp, Homo sapiens
agcaaccctaacagtaagaaatcttgttggcaaatcagatgcagctgttttaactatccctgcctgtgactttcaagtgaaactggaacgccaagctgaa

SEQ ID NO: 44036 - DNA, 100 bp, Homo sapiens
ccagaagatacaaagacagaccatcccagttgaatgctgtcttccaagaacagaagaaaatgatccaggcccagatgggactgtctagttgcaggaaaac

SEQ ID NO: 44037 - DNA, 75 bp, Homo sapiens
cgctggcagccgcggatctcaccgccgctcagggcaaatgttctgaaaaagactctgcatgggaatggcctgcct

SEQ ID NO: 44038 - DNA, 98 bp, Homo sapiens
taagatggaagatgaggaggtcgctgagagctgggaagaggcggcagacagcggggtactggttttggattaggaattgttttctcacttaccttctt

SEQ ID NO: 44039 - DNA, 100 bp, Homo sapiens
gaaaaaatcagcaaggtggagtgcggatttgcaacagttggattcagatgccgaggacacagtacttcctcagaaagaagacagaatttgcaaaagagac

SEQ ID NO: 44040 - DNA, 50 bp, Homo sapiens
gatggattttctcaaaccaactgagaggtacagaaagcagtcaacactgc

SEQ ID NO: 44041 - DNA, 100 bp, Homo sapiens
ctgaaaaagtatcgtcgagaagcctatcatcgagaatttctctgctcctcctgatgtcactacaactacctcttcctcctcatcatcttcctcaattcgc

SEQ ID NO: 44042 - DNA, 90 bp, Homo sapiens
cctggacaaggtggccgacaacctggccatccagcttgctagatggacagagacgtatgtgcgttggtctcctaagggcacctacctggc

SEQ ID NO: 44043 - DNA, 75 bp, Homo sapiens
ttgcagggtctgccgtgctggagggaaggctgctgttggaggcaaaggcagctcgagcatctcatctgacgtgag

SEQ ID NO: 44044 - DNA, 100 bp, Homo sapiens
ttctgtggccttcagcactgataagaatctattattggagagcacagaatggggattcaacacctcggcaatgcccttttagtgtgcgagcaaccacggg

SEQ ID NO: 44045 - DNA, 82 bp, Homo sapiens
agataatgtaactgtgtgcaaggataacagaaatgctgagccgattatcaggattagcaaatgttgttttgcatgaattatc

SEQ ID NO: 44046 - DNA, 75 bp, Homo sapiens
cagggatgataattgggcctccaagaactcaccccacacagaccgcgtttctctccagtgtcgacctacacactc

SEQ ID NO: 44047 - DNA, 100 bp, Homo sapiens
tcccaggaagtagaagaagactacaacccttgtgaagaggacctcttcgtgctgtgtccaccccccagggttcctgacccctgcccctggacagcgaccc

SEQ ID NO: 44048 - DNA, 82 bp, Homo sapiens
tcacagtggtggtggtgggggtagcaggagcattgggctcaggatctgaacaaagtccgtgagcggatgacaaagttcattg

SEQ ID NO: 44049 - DNA, 82 bp, Homo sapiens
agccggagctgggcgcggattcgccgaggcaccgaggcactcagaggaggtggtctttgggaagaagcttcctgcctttgcc

SEQ ID NO: 44050 - DNA, 50 bp, Homo sapiens
acttagatcgacttgcaacatatgaggtagtcactttccacatggcattt

SEQ ID NO: 44051 - DNA, 97 bp, Homo sapiens
cagagcgaggctgcgggaccccaggatgggggacaggaggctgcggggcctcaggctccagtgcgttcggggccccgcccggccgggccaggccggc

SEQ ID NO: 44052 - DNA, 88 bp, Homo sapiens
tgaagttacacccatcacagaattttcatagagctggactattggaaggctgtcattatttgtatcaaaaacaaagaatttgaaaagg

SEQ ID NO: 44053 - DNA, 50 bp, Homo sapiens
aagcgactttggtgagactctgtaggagagaagtttgctgaggaatgcct

SEQ ID NO: 44054 - DNA, 100 bp, Homo sapiens
tcctgagtcctctcggcacccagcaagatatcaatgagtgtttgagtatcagtgccccgtgccctatcgggcatacatgcatcaacacagagggctccta

SEQ ID NO: 44055 - DNA, 100 bp, Homo sapiens
attcagcgctggtttcgacaaagacgcaatcaggagaagccaagcacgctgacgaggttctgtgagagcatgtttcgtagcttaacgacagcgttcttca

SEQ ID NO: 44056 - DNA, 60 bp, Homo sapiens
gtgaatatgatcaagttctcgtggagtcagacaatgaggaagattttcagtcaatgactt

SEQ ID NO: 44057 - DNA, 96 bp, Homo sapiens
gatctacatccaccgagtcggccggacggcccgtgcaggttgttcctcaaagtcattcaagctgtactcgccgaaggagcccccgaacggcaacgc

SEQ ID NO: 44058 - DNA, 100 bp, Homo sapiens
cggctcaaccagcagaagaagctgatcgacaagatccacacgaaggagaccagcgagaagtaccgccggctccagtcagcccggtcaagcatgacagcaa

SEQ ID NO: 44059 - DNA, 100 bp, Homo sapiens
cttatttgtcgtagcatggaagtttcaacccagctggcccgtgctttcactatggactgtattactttggaaggtatccgttacagcactgatgtgagtg

SEQ ID NO: 44060 - DNA, 90 bp, Homo sapiens
ccgtttggctcgatattataagaccaagcgagtcctccctcccaattggaaataggtatgacaaggcagcaaagattgctaagacagcac

SEQ ID NO: 44061 - DNA, 49 bp, Homo sapiens
atttgatcttccatatggataaggcaggggaaatggaaggtgatgcagt

SEQ ID NO: 44062 - DNA, 98 bp, Homo sapiens
accaacaagtgttgctggacgtccggcggtcattgcggcggttccctcctgtaggacgcctcgtctaaggagcagaaaacccaagggcaggtggagag

SEQ ID NO: 44063 - DNA, 98 bp, Homo sapiens
aggaagttggttactccattcgatttgaagactgcagtagtgcaaaaaccattcttaagaagagcgccgtgtgatttatgtcggtaaaatcagacctg

SEQ ID NO: 44064 - DNA, 82 bp, Homo sapiens
gtccactgcgggccggcgaaagctgaaatgggaacagatcgagggcaactccaagctgaggcacgtgggcagcaacctgtgc

SEQ ID NO: 44065 - DNA, 51 bp, Homo sapiens
gaagctattgctgggattttgaggagaaatgcactcggtgatggaaagaga

SEQ ID NO: 44066 - DNA, 75 bp, Homo sapiens
cgagctgagtggttgtgtggtcgcgtctcggaaaccggtagcgcttgcagcatgatggaagaactggagcaaggc

SEQ ID NO: 44067 - DNA, 97 bp, Homo sapiens
gaaccgtgcttttagcaggaagaaagtccaggatctgtgtgccatggaggaccacaactgtgagcagctctgtgtgaatgtgccgggctccttcgtc

SEQ ID NO: 44068 - DNA, 75 bp, Homo sapiens
ggaagcaccgagactctagaagaaatgccctccgggtcacaggataagacatatctgaagagatggattaagaat

SEQ ID NO: 44069 - DNA, 119 bp, Homo sapiens
ggaaacttaggggccacgtgagccacggccacggccgcatagatgtctggcgataaagggatttctgccttccctgaatcagacaaccttttcaaatgggtagggaccatccatggagc

SEQ ID NO: 44070 - DNA, 88 bp, Homo sapiens
gaagtgtggtttggattccatcagtctgttcggcctgccatgtggaaaatgatgcttaatatcgatgctattgacctgaaaagtggtt

SEQ ID NO: 44071 - DNA, 100 bp, Homo sapiens
atcgaggccaacaacccattccaggctgtgcaggaagctggtgggcacggaggatgctcttctgcagcagctggcggactcgatgctcaaagaggactgc

SEQ ID NO: 44072 - DNA, 75 bp, Homo sapiens
gccatactgcgttatagcggccgtgaatatcccagaggcatccttcctggaggaagaggatgaagaccccatccc

SEQ ID NO: 44073 - DNA, 100 bp, Homo sapiens
gcaaatgttacttgttccacgtttcttccatgtcaggtcagaagaggccaagtgatggaaatagtggattaatggcaaaaaagcaaaagcgtaccccaaa

SEQ ID NO: 44074 - DNA, 101 bp, Homo sapiens
cccggtgcagaagaacatcctggcggcggccagcccgtacatcagtcacaccgaggagaagactcagtgggaacatccaaaaactggaaaaagaaaacgag

SEQ ID NO: 44075 - DNA, 101 bp, Homo sapiens
caataaaccgacgtttagccaggtggtaaataaagatgtcctggacgtttacattgagcatcggctaatgatggagcagcggagtcgggaccctgggatgg

SEQ ID NO: 44076 - DNA, 75 bp, Homo sapiens
tagtccagaccatcctatactgtgacttcttctacttgtacattacaaaagggtctcgctctgttactcaggctg

SEQ ID NO: 44077 - DNA, 82 bp, Homo sapiens
cctaccctgctggattcatggatgtcatcagcatcgagaagacaggtgaacatttccgcctggtctatgacaccaagggccg

SEQ ID NO: 44078 - DNA, 82 bp, Homo sapiens
actccggcgctcgccatggccgacgaaaagcccaagggaaagcaggcaggatgggagagtcgccgatagaaccacctcttcc

SEQ ID NO: 44079 - DNA, 83 bp, Homo sapiens
gtccggacagccgcgcgctgagggtctcggggcgggcgccgcgggacctctccgggccatggaccctacagcttggggcctgg

SEQ ID NO: 44080 - DNA, 80 bp, Homo sapiens
gtactgggagagctaggatggaaaacatatccattaaatgggtcagaggctaactgttctgccatgtttggaaaactgat

SEQ ID NO: 44081 - DNA, 75 bp, Homo sapiens
aagaacagagagagaggtggacagatctgagagatactgaggtttgctggttggctcccgagcagacagcaggaa

SEQ ID NO: 44082 - DNA, 90 bp, Homo sapiens
tgttggggaacatgatctgttaaaggtatgatctcgtgaaaccttgagagaaactgaatgacgaatgaaactattgttcctgtttcacac

SEQ ID NO: 44083 - DNA, 74 bp, Homo sapiens
agccgcaagtacccgtccatcatagtcaactgcgtggaagagaagataaacaggggtcacatgacgacagaagc

SEQ ID NO: 44084 - DNA, 100 bp, Homo sapiens
ctggaattaggcaaatatggacagagcaacaagatatggatttggatatagaatttgatgtacaccttggaatagctcatacccgttgggcaacacatgg

SEQ ID NO: 44085 - DNA, 99 bp, Homo sapiens
cggattcatttgtgactatgaacttcatgagctcttcaaggaagctaatatgccattaccaggatataaagagttggtggtgaccccgcccagttggcc

SEQ ID NO: 44086 - DNA, 87 bp, Homo sapiens
gagaaggcaactccagtcagaacagcagaaataagcgtgccgttcagggtccagaagaaacaggtaaacttatgagtgctttgctga

SEQ ID NO: 44087 - DNA, 82 bp, Homo sapiens
attgataacaccctgtaacagctgagatggtaagcggatgtttggcacctattttcgtgttggtttttatggaaccaagttc

SEQ ID NO: 44088 - DNA, 83 bp, Homo sapiens
gatatcgacgtcgtgatccagaagtccagagctgaggactgcctgtttgcaggaagctctacagaggatcatttcaactctgg

SEQ ID NO: 44089 - DNA, 86 bp, Homo sapiens
actaccactcacccgcagactccttctccagcatgggctcgcctgtcaacgcgcagagcctgatccggggatggcctctgcctcca

SEQ ID NO: 44090 - DNA, 73 bp, Homo sapiens
acgccgccaaattacactgctccgacacatttaaatcaaacggtattgagatggattgggttatgaaacataa

SEQ ID NO: 44091 - DNA, 75 bp, Homo sapiens
gagaggagcactttgaggacatggcctccgacgaggacatatatggctcgtggacagcagaaaattcagtctcag

SEQ ID NO: 44092 - DNA, 100 bp, Homo sapiens
tgcctgatggtacattttattcaactctttatctgccaattaactcacctcttcgagcctccattgttcggaccgagaaagtcgttacgaggaagaagaa

SEQ ID NO: 44093 - DNA, 100 bp, Homo sapiens
catcttatcttttaattattaaaacagagcttcctgctgctattgcagaatttttgactggagactatagtagaggcatttcatccttcatgaagccatt

SEQ ID NO: 44094 - DNA, 100 bp, Homo sapiens
gaggcggcaaaaaaaaagtctgctactactacgacgtaagactttgaccccgacgcaggcttcagtgattgccgcggatcagaagcctgagcactttggc

SEQ ID NO: 44095 - DNA, 89 bp, Homo sapiens
ctgcttttgatgtctgacaacgtggatcgttgttttgaaacgccatcatctctcagcaaggtgacatatttgtttttgacctggagacc

SEQ ID NO: 44096 - DNA, 90 bp, Homo sapiens
ctggggtttacgaggatatatagtcatagaagatttgtggaaggagaactttcaaaaggcaagcagagtgctggtagcatcccgtaattt

SEQ ID NO: 44097 - DNA, 50 bp, Homo sapiens
aaaatgagggagctggaacggaagttttgctgctttgtggtgcacaagcg

SEQ ID NO: 44098 - DNA, 100 bp, Homo sapiens
agcagcatcggcatgctctatctgtactgccggcacctcaaccagatgaggaagtacaactttgaggtacggttcctggagcagcagaacaagatgctgg

SEQ ID NO: 44099 - DNA, 101 bp, Homo sapiens
tttcaagacaaatggcaaacctgaagaaaaaaaccatgaagctggaacatcaggttatgaagacagtatggagtttccagaccatagtagacatttgctac

SEQ ID NO: 44100 - DNA, 100 bp, Homo sapiens
ctcttgctgatataagatttgatgaaattaaacttgtccagataaaaggcgcaaccatgtcgccatttcttcggattggcttgtccaactttgactgcgg

SEQ ID NO: 44101 - DNA, 75 bp, Homo sapiens
caggtgggggcggcgacctgagcaccagtgcctatgattacacaataccacctatggagaaagctgttgtgaaaa

SEQ ID NO: 44102 - DNA, 100 bp, Homo sapiens
ctgcggatccagacagtgaaatagctacaaccagcctaagggtttctctactatgtccagttcaaaccttgtactactcagctgatcacaagctgcttga

SEQ ID NO: 44103 - DNA, 75 bp, Homo sapiens
gaggcaaaacttcggacatagaggccaaccaacctttggagggtcctgatgaagaagctgttgtggatcttggca

SEQ ID NO: 44104 - DNA, 87 bp, Homo sapiens
agaatatatggctggacagctagctgcttatggctataaaattacagtgtgtggattctcatgccatataacttgtgtaaacaaagc

SEQ ID NO: 44105 - DNA, 76 bp, Homo sapiens
cttcatcaaaaatagtgatagctttgataaatggtcatccagactcagagctctctctacagagaggaaattctcc

SEQ ID NO: 44106 - DNA, 50 bp, Homo sapiens
gccactcagagtcgcccgagaatctgcagatctccaggggagcccaccag

SEQ ID NO: 44107 - DNA, 75 bp, Homo sapiens
agcctcctaagtagctgggactacaggtcttattagtaggtaagaaacagctgctcctccacctccaccccagcc

SEQ ID NO: 44108 - DNA, 76 bp, Homo sapiens
gttggaagcagccgatccagcctgcggagcctgtggggcaggggtcttgctcctcagaacaaaccagaattgcaga

SEQ ID NO: 44109 - DNA, 99 bp, Homo sapiens
ctggtggagccggacgcgggcgcagccggccaagagccactgcacaatgaggagctggcaggagcaggccgggtggcccagcctgggcccctggagcct

SEQ ID NO: 44110 - DNA, 74 bp, Homo sapiens
atctgatagtctgcagaaacaaatctcccaaaaggagaaacagctctgcactgggtgttcaacagccatcactc

SEQ ID NO: 44111 - DNA, 75 bp, Homo sapiens
ggaacctcaggggcccgcgttaggatctaccaatgtattggcacattctcttcatggagttcctcatgtgataac

SEQ ID NO: 44112 - DNA, 100 bp, Homo sapiens
tttgctacagcatcccacattaagtcaacggcgcctgtgtctggcagagctggtgtgagacgagacaatcctgccccgccgccgggataatcaagagttt

SEQ ID NO: 44113 - DNA, 100 bp, Homo sapiens
tcaagtgatggtttaaggcaaagggaagttcttcggaacctttcttcccctggatgggaaaacatctcaagtgtgaccgcaacaagggaaaacatggctt

SEQ ID NO: 44114 - DNA, 75 bp, Homo sapiens
gagaccgtgaccgagagcgtgaccgagagcgcgaatatcgtcatcgttagaaggcataatcaccagcaacacccg

SEQ ID NO: 44115 - DNA, 100 bp, Homo sapiens
ctggctacgtgggcccgcggtgcgagcagctcggtcctgaccgccagcctgtcgtacatggtggggatgatcgccagcttctacaacaccgaggcagtca

SEQ ID NO: 44116 - DNA, 100 bp, Homo sapiens
agctcgagttaaagttggatgtgctggaacaggagttaaagttcctcgtaattttcgcttgttggaagaacttgaagaaggacaaaaaggagtaggcgac

SEQ ID NO: 44117 - DNA, 88 bp, Homo sapiens
cagccacaaatgggaagcaagagaaaaagaacattactgtcttgataaggagggttcctgcccccaggtgaacattaactttccccag

SEQ ID NO: 44118 - DNA, 100 bp, Homo sapiens
tccgcgaggcttcggccaagctaaccacgctggtggatgccgacgccgaggccttcaccgcctacctgggcagtttccgtttgactttcttcagttggag

SEQ ID NO: 44119 - DNA, 98 bp, Homo sapiens
tcgctctttgcatcttaactgcagcttcagaacttgatgatgatgttccaaaagcaaactgcctctccactgaaagcactgacactccgaaggcccct

SEQ ID NO: 44120 - DNA, 100 bp, Homo sapiens
cgcgagctgctgatacagaagagatggatattgaaatggacagtggagatgaagcctaagaatatgatcagccaatggagatcttcgtggatgatgagac

SEQ ID NO: 44121 - DNA, 83 bp, Homo sapiens
cttgtttgtggatcgctgtgatcgtcacttggacaaccctccatatgataagggagccttcagaatcgaaatcaactttccag

SEQ ID NO: 44122 - DNA, 100 bp, Homo sapiens
gcctcagttggaagcagccgatccagcctgcggagcctgtggggcagacacgaatgcagagtttgagtccagatcccaaagcccagtacacaagtatcta

SEQ ID NO: 44123 - DNA, 98 bp, Homo sapiens
ccgcacgagcaccagcctagagccagcattccaggatgccttgaagattttctgtaggataaaaggtggtcgagtttcaactgatgacgtgtttgctg

SEQ ID NO: 44124 - DNA, 71 bp, Homo sapiens
ggcccacagtgggggtgtgcaaacccgagagaactggacagtacctgtaatgagaaacagtaaagaaaaca

SEQ ID NO: 44125 - DNA, 97 bp, Homo sapiens
agagccggaaccagcctttattgatgaaaaggccaatgatgaggccaatcagagtgatacaagtgtctccttgtcagaacccaagagcaaaagcagc

SEQ ID NO: 44126 - DNA, 75 bp, Homo sapiens
ctctcaagatacgccaatgcgctcaaaggcaaaaaggtttcggagcaacatcccctgtcacctggttgatatctc

SEQ ID NO: 44127 - DNA, 78 bp, Homo sapiens
aaatttggaagatggaccgactatgcaaaaagatactgtaatgcacacatcaggattggagacacaaaatcagaaatt

SEQ ID NO: 44128 - DNA, 82 bp, Homo sapiens
cgaagaactcgagcgacagagacaagctgagcttgccgcacaaaaagctagagagaataactgaagtgaagtgatggactcc

SEQ ID NO: 44129 - DNA, 100 bp, Homo sapiens
gtgggtgccagagaggcggaagaggaggcctgatggggtccctatcactgttcagtccatcgtcattcagtctctaaataaaacgctcacccgacgggag

SEQ ID NO: 44130 - DNA, 114 bp, Homo sapiens
cgcgagcacagagcctcgcctttgccgatccgccgcccgtccacacccgccgccagctcttttgaaacagatggtcaccatgtttagatattagcagtcccgtatgtgcatgtc

SEQ ID NO: 44131 - DNA, 75 bp, Homo sapiens
atggtgaactcattgtcttagggctcatcaacagagcagacgagcagaccgtttattagctgcaggcaaatacga

SEQ ID NO: 44132 - DNA, 83 bp, Homo sapiens
ctgtggcaatggaacaggcttgagaaacagtggactaaagaggatggacatagaacttccacctctgctgtccctaacctgtt

SEQ ID NO: 44133 - DNA, 90 bp, Homo sapiens
tatagccaaaattcccagagcaaagaagaaatatgtgacaagagtatgtggccttgcaacttttggtcctaggcctacttacaagcctcc

SEQ ID NO: 44134 - DNA, 74 bp, Homo sapiens
aacagccatgcaaaggcaggggaggaagccacctcgaggaaataatgaagatgtttcattttcaagaccagcag

SEQ ID NO: 44135 - DNA, 105 bp, Homo sapiens
gtggtggtgcacaagaagatgaggcccaccattaaagatcactggttgaaacacccgaaagccatggctgaaaccttttacctttctaacattgtgcctcaggat

SEQ ID NO: 44136 - DNA, 77 bp, Homo sapiens
tgctttatatttctctcagaccattcccatcagtgagcattacagatccagctccaggtcccacaggggctcttctt

SEQ ID NO: 44137 - DNA, 126 bp, Homo sapiens
tgtgggttatcagcctgttgcaggggacccctggctgaaagacaaaaatgaggcaagatccaaatggagatggagactgtttcagaatcaggaacacatgaaggcttgttcagtcatcaaacctgg

SEQ ID NO: 44138 - DNA, 73 bp, Homo sapiens
gggacgctgcacctcccgcgccgcacggtggacgagagctgcctggagttcagcctcagaatccaggagttca

SEQ ID NO: 44139 - DNA, 99 bp, Homo sapiens
aagagcttcatctgcgatggacagaataactgtcaagacaacagtgatgaggaaagctgtgaaagttctcaaggtacctcaataataatgagttgacag

SEQ ID NO: 44140 - DNA, 50 bp, Homo sapiens
cagctggctggcttcagtggaccagtagatatagttgtaggtactccggg

SEQ ID NO: 44141 - DNA, 100 bp, Homo sapiens
cagcatattgtactggcctgctgctggcccgcagggctcttcgtcagattgggcagaggacgataagcactgcttcccgcaggcattttaaaaataaagt

SEQ ID NO: 44142 - DNA, 75 bp, Homo sapiens
gtacagatgagcatgatgctatggatggagaattatcctgtcggacttcattgacttaactagagagaccagacc

SEQ ID NO: 44143 - DNA, 75 bp, Homo sapiens
ctcggtgctgcagacggcgagacctcctgcacagagctccaagagtcaggatcgcaagtcagaaagcaaagaaaa

SEQ ID NO: 44144 - DNA, 76 bp, Homo sapiens
tgggccagcagtgggcagattgaggactaccccaatggcacctggctgggcgacgagaacaaccccgagatgcggg

SEQ ID NO: 44145 - DNA, 89 bp, Homo sapiens
aacctcgtggcctggtctccattatttgagatgagttacatcttggagggtatcgggtgctgcttcggtatgaaggctttgaaaatgac

SEQ ID NO: 44146 - DNA, 74 bp, Homo sapiens
atctggaagagaaagtgcgcgagttgagggagactgtgggagacttggtgggcccatctggggcagggaagagc

SEQ ID NO: 44147 - DNA, 100 bp, Homo sapiens
cgcctccaacacccgctgctgcccgcccgctgcctgcctgcctggcatctctctctcccggtaagaatgattgatgttggctgatattggagtgctcatt

SEQ ID NO: 44148 - DNA, 82 bp, Homo sapiens
atcaactccataccttcaatgatgtgtgcaataatgaatcattagtatcggacacagaaacaatatcctccgaatcctaaat

SEQ ID NO: 44149 - DNA, 100 bp, Homo sapiens
ccgggacctgctgctggacccggcctgggagaagcagcagcgcaaggatgacgcggcatggcaagaactgcaccgcaggggccgtctacacctaccacga

SEQ ID NO: 44150 - DNA, 118 bp, Homo sapiens
gcagaggtgctgtgcaacatcgaggccgacacctactggtgcatgagcaagctgctggatggcattcaggtaaatgagctggatggtatcccgttgatcctggacaactgcaacatca

SEQ ID NO: 44151 - DNA, 74 bp, Homo sapiens
ttttggcttaacaaaacatcaaacggcatacaaatggtcagtgtgagaagaagattgtttctgagcttgagaag

SEQ ID NO: 44152 - DNA, 82 bp, Homo sapiens
cccgctacgagctggctttaatcctgaaagccatgcagcggaagcgaggaaaagccacagccccgtgaagcgtccgcggaaa

SEQ ID NO: 44153 - DNA, 74 bp, Homo sapiens
agcagtttgtgaccggagggaagaagattcttattgccaagtcccctctggctcccttcacctcatttgtctac

SEQ ID NO: 44154 - DNA, 75 bp, Homo sapiens
caaacttctcgaccgagaaacgaatgattacggacctgaagccaaagaacaagatgcgctagtggacagattgct

SEQ ID NO: 44155 - DNA, 74 bp, Homo sapiens
ttcaagcagcgccgcaccttcgggtttggaaatcccttgtctccaggttgctgggattgacttcttgctcaatt

SEQ ID NO: 44156 - DNA, 73 bp, Homo sapiens
aagagcagcttattccaagctttgctagatacagtttatgtaacttgatggaagaaaatggaattactccaaa

SEQ ID NO: 44157 - DNA, 100 bp, Homo sapiens
gaattgcaactgcatccgagaaaccattttgcagactctgatcacagtgaaacgttccatgggaacttgggccatgagaaacatccttcctaaccacgtg

SEQ ID NO: 44158 - DNA, 90 bp, Homo sapiens
gggagcatgggtgccaaggagtcacggatcggattcctcagctacgaggaggcgctgaggagagttgatgcggatgaaattaaaaggcta

SEQ ID NO: 44159 - DNA, 99 bp, Homo sapiens
gttgggctttgccgggtgcttcagatcaatgaattctgcttggtcagaatcgtgatggcattgtgttcagcactgatgactattttcaccatcaagatg

SEQ ID NO: 44160 - DNA, 75 bp, Homo sapiens
tgattactacgacaccggcgaggaacttggcaggtgatgtgccttcaggacttttttggtgatgatgacattttt

SEQ ID NO: 44161 - DNA, 100 bp, Homo sapiens
gatttggggatggctataatgggtatggaggaggacctggaggtggagcccagtgacaccatcgaaaatgtgaaggccaagatccaagataaagaaggca

SEQ ID NO: 44162 - DNA, 100 bp, Homo sapiens
agcagcctggcagggcacagtttctagagggcccgtccccagcccgggccgtccatcctcgcattgctgttgaatgacaggggcaagtgtccgagtggtg

SEQ ID NO: 44163 - DNA, 82 bp, Homo sapiens
aaaaaaaaattcatctgggcggtatctggaacttgtgaatatggctttgccgaaaaggtggtggaagggatgttcatcattg

SEQ ID NO: 44164 - DNA, 97 bp, Homo sapiens
aggtcaaggccgaggtgcagaatctcggcggggagcttgttgtctctggggagaatgaagtttctagattagaagacataatgcagcatttaaaatc

SEQ ID NO: 44165 - DNA, 75 bp, Homo sapiens
gagtgaagacagtatttgccagctcattggaggaataaacatggtgtgtctcgaaagaagattgctcagatgttg

SEQ ID NO: 44166 - DNA, 83 bp, Homo sapiens
ccgttgacaaggcactgctttttcatgacggttgaaatcacaaagattagacacctttttagataggtgttcttcagcaccac

SEQ ID NO: 44167 - DNA, 97 bp, Homo sapiens
acgcggcggcggcggcggaggatgagcctgcagagcgcgcagtacctccggagggatttgttcgtgttgaccgagattatgtgctgaagtctgcaga

SEQ ID NO: 44168 - DNA, 89 bp, Homo sapiens
gcgcttcgccccgggccccccagcatgaagaccccggcggacacagctcaccatggatgatgatatcgccgcgctcgtcgtcgacaacg

SEQ ID NO: 44169 - DNA, 100 bp, Homo sapiens
tgaagatctctatgagcttttgaaacttgttaaggctgctggaaagtacagacaacaaggcagaaattatattgttgaagatggagatattatcttcttc

SEQ ID NO: 44170 - DNA, 75 bp, Homo sapiens
cattggagagctgctgaaacaggcggatctctacatttctgaaattcctgacattcagacaactgacttgtaact

SEQ ID NO: 44171 - DNA, 51 bp, Homo sapiens
gcgatcctgggctaccggtctgtggacaaggcgcctctgtcgaagagcctt

SEQ ID NO: 44172 - DNA, 100 bp, Homo sapiens
ctacaattgagtacgtgatacagggcaccagaactagcacctctgaaaagtaaaatgatctatgcaagctccaaggatgcaattaaaaagaaatttcaag

SEQ ID NO: 44173 - DNA, 82 bp, Homo sapiens
ttcagacagcatatttgagtcatttccttcgtacccacagtgcttcatgagaggtgctggagaatctggtaaaagcaccatt

SEQ ID NO: 44174 - DNA, 74 bp, Homo sapiens
gctcgcgctactctctctttctggcctggaggctatccagcgccactcgctctggtgggaccctcgtgcttgtg

SEQ ID NO: 44175 - DNA, 97 bp, Homo sapiens
gaagaaacccagcttgatatgttggatcgaagagcagtcataaaaccacaaagtcaacgcaaacacaagactcttcatttcagggactgatactgaa

SEQ ID NO: 44176 - DNA, 89 bp, Homo sapiens
ctggacgacatcgacctgtccgccctgcggatctggtggctggacccagagctgacctatggctgcgccaagcccttcgtcttcaccca

SEQ ID NO: 44177 - DNA, 100 bp, Homo sapiens
gagatggaacaggcccagaaggccaagaacccccaggagcagaagtccttcttcgccaaatacgtcgcgtctccttcttcacctcggggtccgagaacct

SEQ ID NO: 44178 - DNA, 100 bp, Homo sapiens
taagaatgtgactttggagccagcctgctaggggctgaattctgactcagccatttactaactgtgtgaccttaggttgaaaggattgtagacaagagga

SEQ ID NO: 44179 - DNA, 82 bp, Homo sapiens
cttcgacctgctcatcttcggctctggctctgaggaggaaccaagagcggcggcgcgcgtggcaggcctcccgggagagcaa

SEQ ID NO: 44180 - DNA, 51 bp, Homo sapiens
acaccgcctgtgtggggcccaccctccgggagttgaccacatttggccatt

SEQ ID NO: 44181 - DNA, 82 bp, Homo sapiens
tgcgggcgtcgggcgcgggcaaggccatcggcgtcctgaccagcggcggcgacgcgcaagtcctggactgctcttcctgctc

SEQ ID NO: 44182 - DNA, 100 bp, Homo sapiens
tggccgtgcagaagctcatggtgcacaactggaatacaaacagaagcttgcacgagtaacccaggtccgcaaggaactgaaatcccatattcagagcttg

SEQ ID NO: 44183 - DNA, 100 bp, Homo sapiens
tgcatggctctggggaggaggaggaagaggaagaggaggatgacccacttgtttctcccgtacatcccagtccagccccagcctctggagttatctttct

SEQ ID NO: 44184 - DNA, 51 bp, Homo sapiens
gcccaagggtgcacagcccctggctacgagatcctgaaggagctagacgag

SEQ ID NO: 44185 - DNA, 100 bp, Homo sapiens
gccccatccaggttcccatggttgccggctcccctctcaggacaacccagatgtgcaacaaagtgcgatgcaggtagagcagagccggagccaggtgcag

SEQ ID NO: 44186 - DNA, 100 bp, Homo sapiens
cagcctcctgggcagccccttgcccttggacaggccctgtttgtgctcttcgtcctggcctacatccacatcgtcttctcccgctcgcccatcaactgcc

SEQ ID NO: 44187 - DNA, 75 bp, Homo sapiens
ctgcgacctgctagcctcggcggccgacccccaggcagggactggctgccaacccctccggctacgggcccctta

SEQ ID NO: 44188 - DNA, 101 bp, Homo sapiens
caaccgccagatcaacctggagctctacgcctcctacgtttacctgtccatgaggacaagaattttgggcagatttgaatgccatgaacgtgtatgaaaca

SEQ ID NO: 44189 - DNA, 74 bp, Homo sapiens
cgcgaatatcgtcatcgttagaaggttgattcctgtgttagtgaatggcatgaagtactcagacatagatatta

SEQ ID NO: 44190 - DNA, 100 bp, Homo sapiens
gtctgtgtcaagagcggcaggggctgcaggagataagagaaacgggttgaatcatgtagctgctggtctcgtttcaccaagtctgaaatcggatacctct

SEQ ID NO: 44191 - DNA, 101 bp, Homo sapiens
ggctctaatgtcagagaatttctacagatgcgaattggactgcactctggatcagtttttgctggcgtcgttggagttaaaatgccccgttactgtctttt

SEQ ID NO: 44192 - DNA, 75 bp, Homo sapiens
tcacagaggaaggacagtggagtctggcatcttattgggtggcccagttgaaatccttcccttcctctaccttgg

SEQ ID NO: 44193 - DNA, 101 bp, Homo sapiens
ggtgattgttggtgaaacaggatgtgggaagagcacacagattcctcagctcagagtcaagatctccactgaagttggcatcacaaatgttgatctttcca

SEQ ID NO: 44194 - DNA, 77 bp, Homo sapiens
aagcagccgatccagcctgcggagcctgtggggcaggttttgattcccaccatggccatcacccagtttcggttatt

SEQ ID NO: 44195 - DNA, 75 bp, Homo sapiens
cccacaagatccagtccccacaggagtgggaggcgatccaggccttgacggtgtcagcggtgcccactgtgctgg

SEQ ID NO: 44196 - DNA, 100 bp, Homo sapiens
cgggcccggttcgaggtggctgacgaggacaagcagtcccggctgcgctaccagattggaaccattgttgacaatccagctgatttctaccattcacgaa

SEQ ID NO: 44197 - DNA, 90 bp, Homo sapiens
tacaatttgatcgctgggaattctccaccttaaagaaggaattgaatgatctggcacgggaccctccagcacagtgttcagcaggtcctg

SEQ ID NO: 44198 - DNA, 90 bp, Homo sapiens
gagcaggagttgccgcagccccaggctgagacagatgaataatacggcagctagtccaatgtctactgcaacttcaagtagtggaaggag

SEQ ID NO: 44199 - DNA, 75 bp, Homo sapiens
ttggatccacttccccatctgtaacgaggtgttgagacgaggaatcaagagagacccggccaaggcttttgtgcc

SEQ ID NO: 44200 - DNA, 75 bp, Homo sapiens
agaactcttaacggccgatgcagctcttccaaagctaaggaagagcccgatgcccttggtttgactctactaaga

SEQ ID NO: 44201 - DNA, 100 bp, Homo sapiens
ctggaccgtgagagcatcaagctcgtgtccatcggtgaacgccccttccactgtaaccagtgtggagcttcttttactcagaagggcaaccttctgagac

SEQ ID NO: 44202 - DNA, 75 bp, Homo sapiens
ctggtcggtgccggctcaggagccggggtgtggacactgccagcggctgcagccgacttggaatgacctgggaga

SEQ ID NO: 44203 - DNA, 74 bp, Homo sapiens
gcttcctgttctccagggaggaggcggacacgctcagggctgaaatctctttaatgatggagggaagcaggcag

SEQ ID NO: 44204 - DNA, 100 bp, Homo sapiens
ccggagtgatcctggcagccggtggggaagacaaggaggcatcagccactatgtgattgtcatgtccatgaccatctttttggtgttcctcaatggcctg

SEQ ID NO: 44205 - DNA, 74 bp, Homo sapiens
gcgagaacctgccgctcatcgtgtggctgctggtgaaaagcttctccgagaggccttcgtcaagatggttggac

SEQ ID NO: 44206 - DNA, 100 bp, Homo sapiens
tattatcagatcaaccaccaaagtgggaaacattgaaatcaaggagtccttcaataatgttaaacagtggctgcaggaaatagatcgttatgccagtgaa

SEQ ID NO: 44207 - DNA, 74 bp, Homo sapiens
gattggtatgacttcgtgtggaaccgcacgcgtggcatacggaagttaattggccttggtcctcacagctccaa

SEQ ID NO: 44208 - DNA, 100 bp, Homo sapiens
gacttggatcctgccgatcccccgatctcgaaatgatgaccgggaaattttattggagtgtcagaaaagagggccatcatttaaaacatttgcatattta

SEQ ID NO: 44209 - DNA, 74 bp, Homo sapiens
gtggtctactctgatgtcaatcttgagggctaggtgcttgtgagtgaggattctgacagtgatggcattgtggc

SEQ ID NO: 44210 - DNA, 100 bp, Homo sapiens
aagcaggtgcacacttctgagcggcctcacaagtgtcagtctggagggcagtatgagctttttgctgtgattgcgcacgtgggaatggcagactccggtc

SEQ ID NO: 44211 - DNA, 118 bp, Homo sapiens
ctgccaactctatcgtggtcgtaggaggctgtcctgtctgcagggtgtgaacttgtatgtgaagaatctggacgactccattgatgacgacaaactgaggaaagagttctctccctat

SEQ ID NO: 44212 - DNA, 75 bp, Homo sapiens
tctggtataccatcgtcaccatgacaacactagggctctgccgacttccagttctggaacaagatggttaaactc

SEQ ID NO: 44213 - DNA, 101 bp, Homo sapiens
gaggagccttctcaagaacagaggagttgatccctgaattttattatctccctgagatgtttgtcaacttcaataattataatcttggagtgatggatgat

SEQ ID NO: 44214 - DNA, 100 bp, Homo sapiens
acagtgttctgctttcatggagttcacagaagagtcgaggaggagttagccctgcgtagccagttaccaacactggagcaggatggtgggactcaaaatc

SEQ ID NO: 44215 - DNA, 76 bp, Homo sapiens
gtaggaacgggcctgtcgaagtgcgcctgacaggtgttacacataatattgcattacttcgagaggtgataatcaa

SEQ ID NO: 44216 - DNA, 98 bp, Homo sapiens
gagcaatgcaaggctaagccggcgttgacagaaggctacgttggggccctgcacgagaatagacacggcagcgcagtgcagatccgcaggcgcaaggc

SEQ ID NO: 44217 - DNA, 101 bp, Homo sapiens
gaggagtgtgacagggatgatgaagaagacctgctggatgtgctactatatcggggccacagatgatgcagccaccaaaatcatcaatgaggtatcaaagc

SEQ ID NO: 44218 - DNA, 82 bp, Homo sapiens
ccagcccaaaggcccatgaggggatgcagttatgggctctgtcgccgtggggaacagtgttgataaagactgctgaagaatt

SEQ ID NO: 44219 - DNA, 100 bp, Homo sapiens
agagagacaaagtcaaatttacagtgcacacaaaggtaacaaatatactctggagactagaccaaaccaagaaggcattgatgtaagacaagagctactg

SEQ ID NO: 44220 - DNA, 100 bp, Homo sapiens
ccctggaattacgggattcccaggattcataggaagccgggactttctgaagaccttttcccccgatgtcttccggttcttctgcctgcggagcagctac

SEQ ID NO: 44221 - DNA, 48 bp, Homo sapiens
tttccggcctgacaacttcatctttggcaggaagaccaactgcatcca

SEQ ID NO: 44222 - DNA, 96 bp, Homo sapiens
actggataagaaatcaaaaatctggtgaaattgccggcaagagggagttaaggacattccaggcagaggcaagcccctggaggaacgcgcatagat

SEQ ID NO: 44223 - DNA, 82 bp, Homo sapiens
gcgcagtgggtggctccacctcgactgcgaattactgtttatgaggtcaaaatgcagatcttcgtgaaaacccttaccggca

SEQ ID NO: 44224 - DNA, 83 bp, Homo sapiens
gaaaacttgcggaagctggagatcacaggcgtgtcttgtcgggacgtctatgcgaagcgtactccaaagattcaggtttactc

SEQ ID NO: 44225 - DNA, 100 bp, Homo sapiens
tcctgatatgactaaaaacttccaacaggaggagatgttaaagtaacccatcttgcaggacgacattgaagattggtcttctgttgatctaagatgatta

SEQ ID NO: 44226 - DNA, 75 bp, Homo sapiens
tggctggagttgtcttccttggagtcgggctgtgggcatggagcgaaaagaaatatggctacacacacctttctg

SEQ ID NO: 44227 - DNA, 90 bp, Homo sapiens
gatgattttgaagtcatttcacatcgaagccatgatttaaatatcggcgttaaggtgaggacaccagtgatgaattctgaagcaaaagtt

SEQ ID NO: 44228 - DNA, 108 bp, Homo sapiens
atcgaccaggagcatgatgtggtgtggaccgaagcttacattgacagcactagacgggaagtggccaaaaccgtcttttgcctggtccttgtctttgccctctgctgg

SEQ ID NO: 44229 - DNA, 100 bp, Homo sapiens
ctggttagtgtgctctgagggagggtccgagccagccgctgttttgccggaggagcccctcaggccccatacacactgctgctatggatatgctgggagg

SEQ ID NO: 44230 - DNA, 83 bp, Homo sapiens
ctgggacttcccgtccgcggcgtggaggggggggccctcagcctcttggccttgaacgggctgttcatcttgattcacaaaca

SEQ ID NO: 44231 - DNA, 75 bp, Homo sapiens
gtggtggagtccaccctggctgtgtgaaggagaacgacctgctcagaatgagaagaggaaggagaaaaacataaa

SEQ ID NO: 44232 - DNA, 75 bp, Homo sapiens
aaacaagtgtctgcttatgtcgcgacatggtatgcttaagcaacaggatctaagtattgccatggtggtgacatc

SEQ ID NO: 44233 - DNA, 50 bp, Homo sapiens
cagattcagaggatgacagttgcaaggattgtcaatgaggcagatcagat

SEQ ID NO: 44234 - DNA, 100 bp, Homo sapiens
attggaagctagatttactggagttgcaagtgggagcactggaagtacgggcagttgcagtgttggagctaaaggttctgtacattggcctggcctgcaa

SEQ ID NO: 44235 - DNA, 83 bp, Homo sapiens
ctccatgcaggctgcgcggaaactgccctgtggacatcttttccacaaacttgaaactgcatctgcagagcactgattatggt

SEQ ID NO: 44236 - DNA, 83 bp, Homo sapiens
gaaacacctaggaagggagaactggtgtcagctgtgatgcatgtttaaaaggaaattttcgaggtcgcagatataagtgttta

SEQ ID NO: 44237 - DNA, 100 bp, Homo sapiens
attttccaataccaacaggctctagccaacatgcagttacaacagcatacagcatttctcccaccagattcttattgccaagtcccctctggctcccttc

SEQ ID NO: 44238 - DNA, 90 bp, Homo sapiens
caggaaatcatgactgagaaagatatggaattatttcgtgatatccaagaacaagcactgcaggaggagacatcacagctttcccagatc

SEQ ID NO: 44239 - DNA, 82 bp, Homo sapiens
aggaaataaagatcagtttggaagagcagttaaagaaagagactgctgctaaggagccggtgaaacctgaagaaggcagaga

SEQ ID NO: 44240 - DNA, 101 bp, Homo sapiens
gcctcagagtgcagttcccaaggaggcttcaagacaaagggccccttacacaccagacagaatatcctccgaatcctaaatctagagctccaaggatgctg

SEQ ID NO: 44241 - DNA, 96 bp, Homo sapiens
gagctggcagaatacatcaagaaccacaaggaaacagacattggaacgtcaaggtcgtgggaaataaaaggcagttctacacagactgcagcaacg

SEQ ID NO: 44242 - DNA, 98 bp, Homo sapiens
ccgcctgaggaggcgagctagccgggagttacaccgccaccgccagaacggccggtttgtgggcgatgctgaccttgaaagacagaaattttcagatt

SEQ ID NO: 44243 - DNA, 75 bp, Homo sapiens
cagaaatcagaaaaacatttgggaggtgtctagcccagtggaccttctgaagggatgtttcaaaaccggaaagat

SEQ ID NO: 44244 - DNA, 75 bp, Homo sapiens
ccgtacttgaagccctacgccgtggacttccagcgcagaatgcagtaatagtggccttgtcttcaaaatcatggg

SEQ ID NO: 44245 - DNA, 75 bp, Homo sapiens
ttaagctgggagaagagtttgaggaaatcacgccaggtggccacaaaacaaagatggagtctcgctctgttgtcc

SEQ ID NO: 44246 - DNA, 96 bp, Homo sapiens
gggaaacaggcagtgacggccgctagggaaggactggggctcaccatggatgatgatatcgccgcgctcgtcgtcgacaacggctccggcatgtgc

SEQ ID NO: 44247 - DNA, 100 bp, Homo sapiens
agttcaagaggtgatggaagaagagtggaatgctttgcagtcagtggagaattgtccagaagacttggctcaggccgccatggcatcagatgaaggcaaa

SEQ ID NO: 44248 - DNA, 100 bp, Homo sapiens
gggagcggggccttccacaccccctccgtgggtgtgtggctcttgtcaggatggtgaagctgttcatcggaaacctgccccgggaggctacagagcagga

SEQ ID NO: 44249 - DNA, 89 bp, Homo sapiens
gagcgttgacagggaagcagccggatggctcatgtacagtcaggaatggttccttctcatccaactgcccatgcgccaatgatgctaat

SEQ ID NO: 44250 - DNA, 74 bp, Homo sapiens
tggggataacattcatgcagaacatcagtatttaggtcagttaacgtccataccaggatacctgaatccctcca

SEQ ID NO: 44251 - DNA, 83 bp, Homo sapiens
cgcggatctcaccgccgctcaggactacatgaggaaataattgacttttataacttcatgtccccttgtcctgaagaagcagc

SEQ ID NO: 44252 - DNA, 100 bp, Homo sapiens
atgaatgaaggaaagaggtcccagaagacgcctagtacaccacgaagggtcacacaagatattgaagcacagattcgagaaattcaaggcaagaaggcag

SEQ ID NO: 44253 - DNA, 90 bp, Homo sapiens
cagtgacgggtctggagtgcgtgggggaccggctgttggcggtacatcgcggtgcacgtggtcccggaccagctcatggccttcggcggc

SEQ ID NO: 44254 - DNA, 100 bp, Homo sapiens
atggatttcagatgggcaatattgtggatattggccccgacagcttaacaattgaacccttgaatcagaaaggcaaggacctgcgcgaagtctggctcaa

SEQ ID NO: 44255 - DNA, 100 bp, Homo sapiens
ccctgcgtgtccgcgaggatgcgtgttcgcgggtgtgtgctgcgttcacaggtgtttctgcggcagccctgggcgctgcctatggcacagccaagagcgg

SEQ ID NO: 44256 - DNA, 100 bp, Homo sapiens
gtctgagtgtctgtccccagagcctcagtttgtgcaggacaccgacatggaacagggactcactggggagaccagcatgctgatgatgtcaaagaagact

SEQ ID NO: 44257 - DNA, 75 bp, Homo sapiens
ggaaggaggaggaataatatttatggagcatatattatggaacacagtaaactttaatgagcccttgtccatgct

SEQ ID NO: 44258 - DNA, 90 bp, Homo sapiens
gtggtttttcggatcatgtctggtggctccgcggattataacaggatgaagtgaagctgccggccaaactgagcatcagcaaatcgctga

SEQ ID NO: 44259 - DNA, 75 bp, Homo sapiens
tgcctcccagagaggggagccggcgaggatcaaaatcttcgaaggaggcagatataatttctacagtagaattta

SEQ ID NO: 44260 - DNA, 100 bp, Homo sapiens
gcggtaggagcagcaatttatccgtgtgcagccccaaactggaaagaagatgctaattaaagtgaaggaatagccaggccagaagaaggaaggcctgtgg

SEQ ID NO: 44261 - DNA, 98 bp, Homo sapiens
cacaggaggctgtgcgggccccgctccgcttcgaatgggtgggaaagcagtgccactctccgcttcacagatgccccctgccaagatgtcagtgatgc

SEQ ID NO: 44262 - DNA, 75 bp, Homo sapiens
gcagtggtcgcttcttctccttggagacaaagcttttgttgatttcctgagtgatgaaattaaggaggaaagaaa

SEQ ID NO: 44263 - DNA, 100 bp, Homo sapiens
catggaattatagttggtctactctgcaatgtctctatttaaaagcccaagtgaggacagacaagatgaactcccaagaggaattacaagagtactgcag

SEQ ID NO: 44264 - DNA, 98 bp, Homo sapiens
atatttgcagccagtactctatatgaacaatccgtctggatcacggatgtaggaagtgaccattcctcaagaattttgtatccaaggcccaaaagttt

SEQ ID NO: 44265 - DNA, 83 bp, Homo sapiens
ccgaagccccctgcaggaactctacaacccaatccaggtgtggacactgccagcggctgcagccgacttggaatgacctggga

SEQ ID NO: 44266 - DNA, 78 bp, Homo sapiens
ctggggctgagaggaatcttctggagtactcttattttgaaaagggtagggctctacttcactgggcctgtgatcgag

SEQ ID NO: 44267 - DNA, 101 bp, Homo sapiens
gcacgacgggcgggtgaagatcggacactacgtgctgggcgacacgctgggcgtcggcaccttcggcaaagtgaagaagaatcacattttggaagatgtga

SEQ ID NO: 44268 - DNA, 100 bp, Homo sapiens
gatggatccatttctcctattgaggagtcaacgttgggataattcttcactattccacccttgccacagtactatgggtaggagtgacagctcgaaatat

SEQ ID NO: 44269 - DNA, 75 bp, Homo sapiens
gagaaggataagtcgaaggggaaggcgcctgaagaggacgaaggacttcctcgttctgcccatcttcctaacaag

SEQ ID NO: 44270 - DNA, 84 bp, Homo sapiens
ccggaggaggcattaacgagaccgggtaagctagagacatgacctaacaccctgatgaccactctcagggaccttgagtgactg

SEQ ID NO: 44271 - DNA, 97 bp, Homo sapiens
cagagaggcggaagaggaggcctgatgggacttcaggttttgccctggctttaggaaacatagttcatggattgtctgtgtgtggacatggaaaagc

SEQ ID NO: 44272 - DNA, 100 bp, Homo sapiens
cttgcagccgccatgcaacctcctgatgcagtcagaagaagtagagcaaaccagtccagctacgggggcccagccagccagcagctgagtgggggttacg

SEQ ID NO: 44273 - DNA, 75 bp, Homo sapiens
tgggtccacgtggcgcgaaagtaggagacaatgcagatcttcgtgaagactctgactggtaagaccatcaccctc

SEQ ID NO: 44274 - DNA, 131 bp, Homo sapiens
catgctgaccatcagctggctcactctgacctgcttccctggggccacatccacaggtatgcagacctcccatgctttgttcatggcaacaacttcttagggaagggatctaaaacagaagccaacctggg

SEQ ID NO: 44275 - DNA, 98 bp, Homo sapiens
gaccgtgaccgagagcgtgaccgagagcgcgaatatcgtcatcgttagaagcacatgcagatgacaatccaggctctccaggatgaattgcggatcca

SEQ ID NO: 44276 - DNA, 74 bp, Homo sapiens
tttcaatattggaagcgctttgatttacagcagctgcagtgcagggctcgcggcctggcaagaatgtacagctg

SEQ ID NO: 44277 - DNA, 73 bp, Homo sapiens
aggacatcctggaagctgggaaagggctgctgagcttcgtgcttatctgaaatctaaaggagctgagatttca

SEQ ID NO: 44278 - DNA, 100 bp, Homo sapiens
aatactccttccttcctccccacccattcctttaaatccggagggggaaaaaatcccaaggtctgcaaaggtggaagcagggaaaggcctggagatgagg

SEQ ID NO: 44279 - DNA, 75 bp, Homo sapiens
tgctactgcaggaacagaatgcctgatggaatggggagaagatattaaagcagtttcaaaagatgaagcagtgat

SEQ ID NO: 44280 - DNA, 75 bp, Homo sapiens
ccccgcgtgacagcacagagataacggccagccctgggcgaagaaaacccgcctagtgccaagcaaccctccaag

SEQ ID NO: 44281 - DNA, 82 bp, Homo sapiens
cagcccccggccgcagcgcaggcagcccagcagaaaattgtacaagctggagataaggaccttgatgggcagctagactttg

SEQ ID NO: 44282 - DNA, 100 bp, Homo sapiens
cacgaaaaaacttccagaacatctgggagaatatttaatggaaaatcgcttggttaaaacctgacacttttaacagatgtgccgtttgggggtgctaaag

SEQ ID NO: 44283 - DNA, 90 bp, Homo sapiens
tctcggaacccgtggtcctccgcttcatgtatggctttgtaattgctgtcaccaccattgacaatattggtgctggtgtgatccagccag

SEQ ID NO: 44284 - DNA, 76 bp, Homo sapiens
aaaatgaactgagtgcctggaagtttacgcctgataggtgtaacatagcagtgatccttttgactgatctcatcat

SEQ ID NO: 44285 - DNA, 90 bp, Homo sapiens
catcaggaatatttgtgttttggctcatgttgaccatgattggccaggtgaaacaggagctgtccagaaaggacacagaactactcgccc

SEQ ID NO: 44286 - DNA, 75 bp, Homo sapiens
ctgaaggacctggaggaggaccacgcctgcatccccatcaagcatggagatatggaccaaaaggaacgagacgtg

SEQ ID NO: 44287 - DNA, 100 bp, Homo sapiens
cagcaacttgaatttgctcaccaacaattctggcatcctctggtatcacgattccaaaacccccaaagccaccagataagccgctgatgccctacatgag

SEQ ID NO: 44288 - DNA, 75 bp, Homo sapiens
ctgacgaagcaggagatcctcctagctacgaagtgaagagtgtcctcggaaaggaagtggggttgttaaattgtt

SEQ ID NO: 44289 - DNA, 90 bp, Homo sapiens
cttgaagcaagggaccttgttatagaagccttaaagaccgagacatgggtgcccggcaccgcgcccgagcccactccattcagatcatga

SEQ ID NO: 44290 - DNA, 75 bp, Homo sapiens
aacacatccgtataatcctctttgggcacagctggtgtgccatgcggagctgaatgccatcatgaacaaaaattc

SEQ ID NO: 44291 - DNA, 75 bp, Homo sapiens
gtaccgtccagcgagttgcagatctacacttggtgtatgaaaacattatagactggtattttcaattttcatttg

SEQ ID NO: 44292 - DNA, 83 bp, Homo sapiens
gagcgctcgcgagcggctgcgggacgcgaggtttccggctgctccctgcatgaggaggacacccagagacatgagacctacca

SEQ ID NO: 44293 - DNA, 96 bp, Homo sapiens
aaattcagtcccttctccatgaaatggtacacgcagaacatggtggctggctttgatctggacgggacgctcatcaccacacgctctgggaaggtc

SEQ ID NO: 44294 - DNA, 72 bp, Homo sapiens
ccacgctcgcgtgctgatccgccagcgccatatcaggtgtccattccaacttttccaccaccatcccgccca

SEQ ID NO: 44295 - DNA, 98 bp, Homo sapiens
cgttccctgagctggagcgggtgctgcaggcgccgccgccggacgtcggcaacggagaaggtggcgacatgtctaagaatgtgagccagtcacagatg

SEQ ID NO: 44296 - DNA, 95 bp, Homo sapiens
gtcacacacggtcctaagagctgggcaccaggaagcgaaggctgggagtgcatccgccccaacccttttccccctcgtctcctgtgagaattccc

SEQ ID NO: 44297 - DNA, 100 bp, Homo sapiens
tgaacttagctcgacggggctgaccgctctggcccagggtgattctggcaattaaccgtggagaaaatttgaaggtactgacggttaaggtcaatatttc

SEQ ID NO: 44298 - DNA, 83 bp, Homo sapiens
tcagctacagggtgaccaacgcaagaacatatgccagttcctcgtagagaaataatagtgtaatccttgctgatgaaatgggc

SEQ ID NO: 44299 - DNA, 89 bp, Homo sapiens
ttcaccacaaaagcgaaatgggcacaccacagagcttctggaagctgaggtctactgagaagtcgtcccagaagcagaaagtgaaatcc

SEQ ID NO: 44300 - DNA, 96 bp, Homo sapiens
ggacatgagaacttcgagttgattaaccacgacgtggtggagcccctctacatcgagggtgtcatggagaaactccagctgggcccagagattctg

SEQ ID NO: 44301 - DNA, 73 bp, Homo sapiens
gaaaaaaacctctgaccgtgaagagacatgagatgattgccaaacccccagcagggaaaaggggtcgaggccg

SEQ ID NO: 44302 - DNA, 87 bp, Homo sapiens
atgttcttaatggcatctagaatggtaacgccccccctcccaagaagatcacgtcctggtttctctccaaggggcagggaaagacgc

SEQ ID NO: 44303 - DNA, 97 bp, Homo sapiens
tagatcattcacaatatctgtgtcgttcttggcagaaattatattttccagcccgtgtctgcagttctctcctgcgctatggtggaaacctgtccct

SEQ ID NO: 44304 - DNA, 96 bp, Homo sapiens
tatcgactgggcttactacaaggccaatgtggccaaggctggcttggtggatgactttgagaagaaggtaaaataccatgaagattttgaaaaaac

SEQ ID NO: 44305 - DNA, 100 bp, Homo sapiens
tcaaggtgctggccatgtcccagctggtggaatgcgtccccaacttttcggaggggaagaaccaggagacaccaatgggaatcccaatggggaagtcgat

SEQ ID NO: 44306 - DNA, 106 bp, Homo sapiens
ggcccgacgaggaagttttctactgtaaagtcaccaacgagatcttccgccactacgatgcagagcagagcgggcggaggaccccgggcgcgggcgcggacggcac

SEQ ID NO: 44307 - DNA, 96 bp, Homo sapiens
gaacattggtctaaagtctttccaaaaggtcaaggttcacaaggtaattaataatgcttgtgctactcaagccatagtgagtgtgttactgaactg

SEQ ID NO: 44308 - DNA, 90 bp, Homo sapiens
ctgttcttgaatacattgatctggtcagcagtgatgatgaagagcctagcacctcttatactgatatgagctctctccggaacagcacaa

SEQ ID NO: 44309 - DNA, 100 bp, Homo sapiens
ttgcagcaaaacctcctgcacgaaaggctctggaaagatgtggtgatggggcattcttgctaacaacactcagattgatggacaacttttcttaattaag

SEQ ID NO: 44310 - DNA, 100 bp, Homo sapiens
agttgtggaaccatggtcaagttactcaacctctttatgcctctgtctcctggtctacgaaatgaagctgcctgccttgtgcttggctgtatgattttcc

SEQ ID NO: 44311 - DNA, 101 bp, Homo sapiens
cgctcaagtgatctttgataagaatgattcagattttgaagctaaagttaagcaggtccagcagctccagatctcggttgaccaacatggtgacaacctga

SEQ ID NO: 44312 - DNA, 100 bp, Homo sapiens
gttaagagcacaacattttcaagaaaattcaaggagtaaaccaagccaattcagcacttcctgtttacttccttgtcatatgtaccatagatggtgacag

SEQ ID NO: 44313 - DNA, 82 bp, Homo sapiens
taatggaggtctccagtttcggtgctttgcaagatatcaccttgtcacagcagaccccctccacttggaaggacacgcagct

SEQ ID NO: 44314 - DNA, 107 bp, Homo sapiens
cctctttcagctgaatgcatgctacagtataagaaaaaagctgctgcctatatgaagtctttgagaaagctaatggcagcattagccgctgttgggcctcctaatcc

SEQ ID NO: 44315 - DNA, 100 bp, Homo sapiens
tcggtgaatgatggaaagcaagcttcttggtacattcacaaatacgtacagttcacagaagaaaagcttggccaggctgagaagacagaattggatgctc

SEQ ID NO: 44316 - DNA, 100 bp, Homo sapiens
gtgcacacggcttgagatgcctgacaacctttacacctttgtgctgaagccctgggcatttccagctcgagagttccttcgaaagaagctgattgggaag

SEQ ID NO: 44317 - DNA, 50 bp, Homo sapiens
cacgacagactgcacagggcatggagtgctggagaatctggtaaaagcac

SEQ ID NO: 44318 - DNA, 82 bp, Homo sapiens
gggtgttcgactgctagagccgagcgaagcatatatagatcaaggtcgaaatccccagctctacaccaaagagtgcctggag

SEQ ID NO: 44319 - DNA, 72 bp, Homo sapiens
ctgaggcagcgcggccgcagcagccctttgttgacctcctgtactggagagacattaagaagactggagtgg

SEQ ID NO: 44320 - DNA, 75 bp, Homo sapiens
gaatggtgctatacttgaattttctaaggtgtcattaggatttgaactcagaggatcaaaaagccttcagtgttg

SEQ ID NO: 44321 - DNA, 100 bp, Homo sapiens
ctatcatcaccatggaaaaagtgacttgagcaggccagcgttaatgactgccattgatggaagacatgatgtttgtatccgtgtagaatcaaagctgata

SEQ ID NO: 44322 - DNA, 100 bp, Homo sapiens
acaaggcaacatgaagactttgtgtggctacatgacactcttattgaaacaacagactatgctgggcttattatcagacactcctctaatttacaaagca

SEQ ID NO: 44323 - DNA, 97 bp, Homo sapiens
tattcagtattccaatcacagagaacttaagactgacaatctacctaatcaagctatcagcttgaacgggtctttttacgacttggccatgctgaaa

SEQ ID NO: 44324 - DNA, 100 bp, Homo sapiens
accatttgaaggaacagcatcctgacatcgaaaacccggacctcgcttacctgcatgctgctctggccaagtattttatttcgtccctaaacattctaac

SEQ ID NO: 44325 - DNA, 83 bp, Homo sapiens
ggacgctctcagctctcggcgcacggcccaggtgatgtgtccaatctagatcccaacttctcatttgaaggcaccaaactgga

SEQ ID NO: 44326 - DNA, 100 bp, Homo sapiens
cgcacactggagctctgccaccgaggcggtccctgacgtctaccaggaaagaccacagcaagattctttcattcgtctcctcctagcctgggggaccagg

SEQ ID NO: 44327 - DNA, 100 bp, Homo sapiens
gagaggaccaacaagttcatcaaagagctcattaaggacgggaagaacctcatcgctgcgacgaaaacttctggagctatttgacagcgaagaccctcgg

SEQ ID NO: 44328 - DNA, 83 bp, Homo sapiens
ctggcgcgcatcttcggcggtgtggaggacgggcctgaagcagaggcagcagattccgaagaggctcaatctgtaaatccttc

SEQ ID NO: 44329 - DNA, 97 bp, Homo sapiens
ggaattcgccgtgcccgagaatagctccgtccagcagttgtcactcagcccagtccatcagtttctcagcccagtacttctcagagtgaagaaaaag

SEQ ID NO: 44330 - DNA, 90 bp, Homo sapiens
cgcttgcgctgacagacgcaagatggcggacagtgcggaactaaaggacctcagcagccatgtcgaagccccatagtgaagccgggactg

SEQ ID NO: 44331 - DNA, 100 bp, Homo sapiens
gctgcggcggtcggtcggtgaggctttcccggctgtggtttggctgcgggcggcttgggcagcccgcgggcgcctcaggagcaggacatcgagactttac

SEQ ID NO: 44332 - DNA, 100 bp, Homo sapiens
ttgaaagagaagctcttcctgtgagggtatatgagtgtaacaaacgctgcaaatgtgacccaaacatgtgcacaaaccggttggtgcaacatggactaca

SEQ ID NO: 44333 - DNA, 75 bp, Homo sapiens
cttcaagccaaacatcaagcagaatgtgatttgcttgaagatatgagctgcacatcattgactcctgggcccaac

SEQ ID NO: 44334 - DNA, 96 bp, Homo sapiens
ctacttctccgtcaatgtttcagaaaccagcctggacaccaagtctgtgtcagaaggccacctcaagaggaacatcgtggtgaagaccgtggagat

SEQ ID NO: 44335 - DNA, 50 bp, Homo sapiens
gcccaagaaacattatattcatgtgaccattgtgaggtagatattttgtt

SEQ ID NO: 44336 - DNA, 98 bp, Homo sapiens
ttgaccctcaactgtcaggggagtggttttgctccagtcttcttacagttcttagactgtgtacaccaggtggtctgtttttctggggggccaccaac

SEQ ID NO: 44337 - DNA, 100 bp, Homo sapiens
ctgaccaccaatcagatccgtaagggtgactatgaccagagcaggaccaaagtgctgcacatgagcctgaaccccaccagtgtggccaggcagcgcctgc

SEQ ID NO: 44338 - DNA, 82 bp, Homo sapiens
aggattaagtgaggggacagcagtgtctggcacgcctcctgcccgaaggccacctgaacctaacggctccctgcaacgctgc

SEQ ID NO: 44339 - DNA, 88 bp, Homo sapiens
ggagcaaactggaagaatcccagcccactcatctcattcccaccaggatgaaagagcagctgagctcagcagggagcagaacgagaaa

SEQ ID NO: 44340 - DNA, 96 bp, Homo sapiens
ccataccttttgggcttcagaatgcagtgttttcggtaccagctggaggatgagtctgcgcatttggatgaaatgccactaatgatgtctgaagaa

SEQ ID NO: 44341 - DNA, 75 bp, Homo sapiens
gccggccttggtgcggcgagccgagcgaggcagctctgagccgcgcgatctggtggctggacccagagctgacct

SEQ ID NO: 44342 - DNA, 75 bp, Homo sapiens
tcttgggactgggctcgatttgaggtacatggccacctctggcctagaccaccagctgaagatctttgacttgcg

SEQ ID NO: 44343 - DNA, 100 bp, Homo sapiens
gtttgccccggtagttgctccaaaacctaagtacaacccatacaaacaacctggaggtgagggtggtgaagaaggtgaagtccatgcagatgttccacat

SEQ ID NO: 44344 - DNA, 100 bp, Homo sapiens
cacggcgcgacgacgagctgcagttgtgggcaccttgtatgcgactgtgccctgtccacggtgcctcctgcatgtcctgctgccctgagctgtcccgagc

SEQ ID NO: 44345 - DNA, 100 bp, Homo sapiens
agcttgagagacaagttattgatgctgaacgtcaagcagaaaaagcttttcaacagtgggacacagcaggccaggaaagatttcgaacaatcacctccag

SEQ ID NO: 44346 - DNA, 100 bp, Homo sapiens
gcttctcaatcaggaaaaatcagaactgcttgttgaacaggaggactactgagcccagccaggctgtatgccattgctgccaaagaaaaagatattcaag

SEQ ID NO: 44347 - DNA, 98 bp, Homo sapiens
cactgtcctcctctctctgtgtaccccaaacagggtggaaggtgaaggggaatatactgatatccaaggactagaatggagtggtaactttcatttta

SEQ ID NO: 44348 - DNA, 98 bp, Homo sapiens
actttgtatctcagttaaagaagatgaagaagtcttcaggggagattgtctactgtgggcaggtgtttacagtcgagagttcagcagcttctcacaaa

SEQ ID NO: 44349 - DNA, 82 bp, Homo sapiens
gccgagtcctagcgcctggcctgcgcgccgctgcccgcgccacagcccagctcaacattggcaatgtgctccctgtgggcac

SEQ ID NO: 44350 - DNA, 100 bp, Homo sapiens
tatgcgtgcacttaaagctgccagcaaggatgactcaatcatcactgttttaacaggtataagtgtgctagcggagtgtctagattgtcctgaattgaaa

SEQ ID NO: 44351 - DNA, 75 bp, Homo sapiens
agaataagctagtccagacagctgaactaaccaaggtgttacctgcattcacatccagaatggaatgaatcttca

SEQ ID NO: 44352 - DNA, 51 bp, Homo sapiens
aggaatttgtggctggctggatctctgaacatgccgagtttttgcactgca

SEQ ID NO: 44353 - DNA, 100 bp, Homo sapiens
gtcgcccgaggcgaggaggagcgctggcgttctctcctgcgctatggtggaaacctgtccctccaaagtgccatgagtgtacgattcaacagcaacggga

SEQ ID NO: 44354 - DNA, 98 bp, Homo sapiens
gcgccatgtggctgctggggccgctgtgcctgctgctgagcagcgccgcgggtaactcgggaccaaatgaagatgtttatacagcaggaatttaagaa

SEQ ID NO: 44355 - DNA, 98 bp, Homo sapiens
ctgatggtgaatattttgctactgctggaaagggagtagaaaatgtatatacacagcatcaacctttcctacatgaaaccctggatcatctcatcaaa

SEQ ID NO: 44356 - DNA, 75 bp, Homo sapiens
gtttggccccgtttgtaaaaggccgcggcaggcgaagagagaagaggttgtctgcattcaaaagagcattctatt

SEQ ID NO: 44357 - DNA, 75 bp, Homo sapiens
tgggagcatctgcagtaactgcaagtactggtcttttgtggaagaggtcgatgaaacaggtgtagaagttaagga

SEQ ID NO: 44358 - DNA, 75 bp, Homo sapiens
ctatctccagaatgtcagcatggaggctgctgggcaggtcatgagtcaccatgtctgcgctcctcagaccaccgg

SEQ ID NO: 44359 - DNA, 87 bp, Homo sapiens
ccacgccagccatcaccctcgagagcccggacatcaagtacccgctgcggctcatcgaccgggaggccttcccacctcacagggagc

SEQ ID NO: 44360 - DNA, 100 bp, Homo sapiens
cttgtttcacatgctggtggactcacccatcgacccgagcgaggcttgcattgatgacaatgttgatatggtgaagtttctggtagaaaatggagcaaat

SEQ ID NO: 44361 - DNA, 51 bp, Homo sapiens
aagactgcaatggctgctgctaaggctggagtgcaatggcacgatctcggc

SEQ ID NO: 44362 - DNA, 78 bp, Homo sapiens
tctgtgatgtcacatctaggagcatctacccatggacagacatgtcttcccatggagttgcagaatgaagaagagtct

SEQ ID NO: 44363 - DNA, 100 bp, Homo sapiens
cgaggcagctctgagccgcgcggggttgtagaaggtgatttagctgccatagaagcatacaagtcatcaggaggagacattgcacgtcagctcaccgcag

SEQ ID NO: 44364 - DNA, 81 bp, Homo sapiens
agactcgatccgcctgcctgcgcacctgcgcccaacatgtgtagcaccagtgggtgtgacctggaagaaatccccctagat

SEQ ID NO: 44365 - DNA, 83 bp, Homo sapiens
gtggatattttggtggggtgaagaccccagttttgctgaccttattcaccatgacttatcagatttggcagctgatcggaagc

SEQ ID NO: 44366 - DNA, 100 bp, Homo sapiens
aggacagggggacagggctctgtctcgcacttcccaggcagaggtggaggagacactgaagcgactgcagagccagaagggagtgcagggaatcatcgtc

SEQ ID NO: 44367 - DNA, 89 bp, Homo sapiens
aaagaagtagtagaaggaaaaaaggaaccaggatacatccggagcaggaactcaaagcagccgctgatggcgtactatctgaagtgagg

SEQ ID NO: 44368 - DNA, 100 bp, Homo sapiens
ggggcgcgggcggcggcgccggcaggaaggtcagcccaaggccaaccccactgtcactctgttcccgccctcctctgaggagctccaagccaacaaggcc

SEQ ID NO: 44369 - DNA, 96 bp, Homo sapiens
cagagtcttgctctgttgcccagtccctcgcaatttccgactgttggaagaactcgaagaaggccagaaaggagtaggagatggcacagttagctg

SEQ ID NO: 44370 - DNA, 88 bp, Homo sapiens
ggaatgtgaagaaattctacagtttcggagcaacatcccctgtcacctggttgatatctcttgcggattaccctgcagtgccacgcta

SEQ ID NO: 44371 - DNA, 101 bp, Homo sapiens
aaagatgtcctcacctcatgctgagtctcagcccagcgtccgcacctcgacagagacgactggctttaccgccagcacctgttcagaatcacacaaataag

SEQ ID NO: 44372 - DNA, 75 bp, Homo sapiens
gagcacagagcctcgcctttgccgatccgccgcccgtccacacccgccgccaggaaagaccacagcaagattctt

SEQ ID NO: 44373 - DNA, 100 bp, Homo sapiens
gaaaattaagagttatgtgaattatgtgctaagtgaaaaatcatcaacctttctaatgaaggaaaactacatctcagacccaactatcttatggagggct

SEQ ID NO: 44374 - DNA, 106 bp, Homo sapiens
gctaaggaccaacctggggcccaagggcaccatgaagatggctcgtgcaatccgcttcagacaggatggtaacgaagccgtcggaggattcttctctcagattggg

SEQ ID NO: 44375 - DNA, 82 bp, Homo sapiens
ctggagcctcagttggaagcagccgatccagcctgcggagcctgtggggcagggctccaaacgaatcctgcggtcccatgag

SEQ ID NO: 44376 - DNA, 75 bp, Homo sapiens
tcttcggcctgacgcccaccctcaatggcgggtggacctgggctcctcgaaggaggtgacaggcatcatcaccca

SEQ ID NO: 44377 - DNA, 88 bp, Homo sapiens
ctgggcttgtccttgctggtgcatgcgtcgtcggcctctgggcagcaggtacaatgactcttcttgcttttcacctaagttgaataag

SEQ ID NO: 44378 - DNA, 75 bp, Homo sapiens
ctaagctgaaggagaagtttatgaatgagttgcataaaattccataggtatatggaggtcagtgggaacctgagg

SEQ ID NO: 44379 - DNA, 74 bp, Homo sapiens
aaattatgctgcagcatattgtactggcctgctgctggcccgcaggataaaggataggttacagttacgggtgc

SEQ ID NO: 44380 - DNA, 99 bp, Homo sapiens
cagcagcagccaataggacatgatccaggaagagcagtaagggactgagctgctggttcagccctatgtagctacaacctaaagccttctgaatacact

SEQ ID NO: 44381 - DNA, 101 bp, Homo sapiens
gtacctcccagagtggtccgcgtgggtcatcctgggcgccatctctgtgtatggtggagagacttatccaagaacgtggctgggagttcatgtggaatgag

SEQ ID NO: 44382 - DNA, 83 bp, Homo sapiens
gggaaagatctaccttctggaagctactactacgtggtgcttggaaagatgatgatgtgcctgcagatatggttgcagaagaa

SEQ ID NO: 44383 - DNA, 95 bp, Homo sapiens
aatgtccatgagaaaaagcttggagataaagttgctttttactggcagaccatgtggaccctggtgagctgggtggccttaacagcagggctggt

SEQ ID NO: 44384 - DNA, 100 bp, Homo sapiens
ggctagcaggaatgcttactgttgcgtggttcgttattaacagcttggcttgtggagatgttgaaggaaagtttgatattttattcaatagagttcaagc

SEQ ID NO: 44385 - DNA, 100 bp, Homo sapiens
ttgctgcatatactggagatgtgtctgcacttcgaaggaacggaaaacagttcttccttcaaagcatgcagtacctgaagtaatagaagactttctctgc

SEQ ID NO: 44386 - DNA, 100 bp, Homo sapiens
cagaagctgcgtcccaacatccccaactggtggcagagttatgagctctatcgtccgagctttgtgcacccaggggctgccacagtccccaccatgtcag

SEQ ID NO: 44387 - DNA, 100 bp, Homo sapiens
gccaattctgacgccctcaaggtcgccaaggaggtggacccccaggaaaccagcctggacaccaagtctgtgtcagaaggccacctcaagaggaacatcg

SEQ ID NO: 44388 - DNA, 74 bp, Homo sapiens
ttgcgttacaagctttgtctccttcgacttggagtctttgtccaggacgatgttttcacctcctgtgagcagtg

SEQ ID NO: 44389 - DNA, 90 bp, Homo sapiens
acccgcagaggaaaattcaggcaacgcctcgcgttggaaaagaccagtgccctcagtctgagcaacgttgctggagtattctacatcctt

SEQ ID NO: 44390 - DNA, 80 bp, Homo sapiens
gcggttccatcctacacttgggtctggtccgagagcaggaggctgggctgctgcagttcctccgcctggacggcttctct

SEQ ID NO: 44391 - DNA, 98 bp, Homo sapiens
attgaagcaaattgaaggcacaggaatatccatgtcggcttgtagagagattgcatttttctttaacatcagcactgatgaccaagaaggcctttaca

SEQ ID NO: 44392 - DNA, 97 bp, Homo sapiens
aaaggatgtgaccattttggcagctactaaccgtccagataggatagacaagcttttctgcaattagataaaaaaggaccacaaaaacatcactttg

SEQ ID NO: 44393 - DNA, 50 bp, Homo sapiens
gccctccatcttgcagcccagaaggtgactctgacatcattagaagcatg

SEQ ID NO: 44394 - DNA, 96 bp, Homo sapiens
ggccccctgcccccttttcctggtgcatgtgaagttatcaaaaacagccctaccacttatgtcttggatgaagatgaacctcgattccttgaagaa

SEQ ID NO: 44395 - DNA, 73 bp, Homo sapiens
agcaagatggcgtctgctagtagggtcgttcaggtgctggagaatctggtaaaagcaccattgtgaagcagat

SEQ ID NO: 44396 - DNA, 100 bp, Homo sapiens
gcctgcgacctgcccgcctggacaggaattccaggcttggactggagtgaagccctcaagatccacaaagacaaaaccagcccgagtcatcacaacccac

SEQ ID NO: 44397 - DNA, 78 bp, Homo sapiens
tgaactttctggggaacagaccagttgtggttttgaacgaagaatgtgatcagaactggtacaaggcagagcttaatg

SEQ ID NO: 44398 - DNA, 100 bp, Homo sapiens
gtggaagagctggagcgctgggtgtacgggccgggcggggcgcgcggctcacggaagtactatggactacaaattttggaaaatgtgataaaaacaaggt

SEQ ID NO: 44399 - DNA, 100 bp, Homo sapiens
ggctttgtccccttgctggctgcccctcaggacccctgctacgtggagaaaacctcggataaggtgttacagcacatgaaggccgtgcaggcagatcagg

SEQ ID NO: 44400 - DNA, 75 bp, Homo sapiens
tcgcagtggtcgcttcttctccttgctttgtccaaaagcaataaaccaatccacactattattctaaaccctcat

SEQ ID NO: 44401 - DNA, 100 bp, Homo sapiens
cgtcgggagagcgcgcctagccggctcgcgagttatgcaatggtctctgcaagatggtttattcttgaattggacctttttaagactgacaaatgctggt

SEQ ID NO: 44402 - DNA, 100 bp, Homo sapiens
gaccgggaccaaggcggagcaaagtcgccgggggtgtggggtgttccacgctatgttgggagtgttcgctttcgagatacgtaggtaacctttccagaga

SEQ ID NO: 44403 - DNA, 100 bp, Homo sapiens
cttcattcgagttattggatctgagcttgtacagaaatacgtcggtgagactgcaaaattcaaaatggggctcaaggtattcgtttcatctacaccagag

SEQ ID NO: 44404 - DNA, 100 bp, Homo sapiens
gggccggccccgcggggagcgcccccggcgcgatgcccttcaggaaagctgaacaaaaggttcatcctcagttttctccatgcccatgggaagctgttta

SEQ ID NO: 44405 - DNA, 50 bp, Homo sapiens
ccctggtacttcttcatcatgccctgggcgctgcctatggcacagccaag

SEQ ID NO: 44406 - DNA, 75 bp, Homo sapiens
cgaggatatatagtcatagaagatttgtggaaggagaactttcaaaagcttgaagaagcaaacagcatgctaacc

SEQ ID NO: 44407 - DNA, 50 bp, Homo sapiens
gtctgctccaggggcaggctgcctgattacatcaaccccagagccgtgca

SEQ ID NO: 44408 - DNA, 100 bp, Homo sapiens
agaatacagccaacctccaggtttcagtggcagttctcaggttggaagctttcttagaatctatagccttcataccaaacttcaatcaatgaattcagag

SEQ ID NO: 44409 - DNA, 75 bp, Homo sapiens
tgaagcgactgagtccgcgatggagcacttttcaggattagaagaggctgtgtatagaaacatacaagcttgcaa

SEQ ID NO: 44410 - DNA, 75 bp, Homo sapiens
tgcgcacttggaatagtagcaggcggcggcggcggaacgccaggcaggagttattcctgatgaagctaaagcttt

SEQ ID NO: 44411 - DNA, 75 bp, Homo sapiens
atagtctccagcgggcctggactgtgggctggtgtgtggaactggatctatcttgggatcccatggctttcttta

SEQ ID NO: 44412 - DNA, 150 bp, Homo sapiens
attacacatgtgttgttacatatccagaaaatggacgtacgtttcatctcaccaggactctgactgtaaaggtagtagaaccccagctcaaagggattgtgacaaggttattcagccagcagggatacttcctgcagatgcacccagatg

SEQ ID NO: 44413 - DNA, 75 bp, Homo sapiens
ccagcaggtcttgagtttggcaacacagcccaataggggcacaaaacgtccccgggatgatgaagaggaggagca

SEQ ID NO: 44414 - DNA, 92 bp, Homo sapiens
cgtaccagaggtggaagtccaagtcaaacgcagaaggactgcctcactgagcaaccaagacacccagtcagcttgaagagtttcaaatggac

SEQ ID NO: 44415 - DNA, 80 bp, Homo sapiens
cgtgcagcgcaaccacgagacggccttccaagaggcctgtgggagcaaatctgtgtatgacggcccggagcaggaggagt

SEQ ID NO: 44416 - DNA, 83 bp, Homo sapiens
ccgcggcggcctttctcctgggaagacgtattctaccttgtaaatactgttatttgtatatactgtaaatgatgacatcggtg

SEQ ID NO: 44417 - DNA, 100 bp, Homo sapiens
ggaattctttgccaaggcacgggctggctctgtgcggctcatcaaggttgtgattgaggacggtaccccaagaagctagtgcagacttattcagtgtttc

SEQ ID NO: 44418 - DNA, 100 bp, Homo sapiens
ctggctcacccacgccatggtcaacatccccgaggagatgctgcgggtgaagcatgggaaagactttgaagcgattcagaacaacattgcgctgaagtac

SEQ ID NO: 44419 - DNA, 108 bp, Homo sapiens
ctgggcgtcgctgaagctgtgtctgcggggaggcagcggaaggcggcaggttcttctgtgtggcagttcagaatgatggatcaagctagatcagcattctctaacttg

SEQ ID NO: 44420 - DNA, 123 bp, Homo sapiens
tggcgcctgcggacctaactagctccaggttaggccgagctttgcgggaaagcagcggtctcggacagcccgggagacgagccctcggagtccccatacgaaagtgcagacgaaacacaaact

SEQ ID NO: 44421 - DNA, 75 bp, Homo sapiens
aggacagtggtgaagtgcagcagaaagtggtgacagcccttgaccggacgtggcaccctgaacacttcttctgtg

SEQ ID NO: 44422 - DNA, 83 bp, Homo sapiens
agaccttagaaaggatcaggactggcgggttattcagcttctcaaggctggaaaagcgaaggaagtttcctacaatgcactag

SEQ ID NO: 44423 - DNA, 110 bp, Homo sapiens
gctcttcccgcccgccttccgccgtctcttcgagttcttcgtgctgctcaagacatgcaagaaagcacttcagccaagcagaagggagccagctggacgaggtgcgccag

SEQ ID NO: 44424 - DNA, 100 bp, Homo sapiens
gtttactcattggcactcctaaataatgtcagttacaatgtggtggagttttctaagtcccagggaacatttacggatgagaagtcaaaagcttcccacc

SEQ ID NO: 44425 - DNA, 100 bp, Homo sapiens
ctgctgttgtagcacagatttatgtaatgtcaactttactgagaattttccacctcctgacacaacaccactcaagttgcatgctgagaatttgaaaaat

SEQ ID NO: 44426 - DNA, 100 bp, Homo sapiens
ggagaccccgggagcctcttcggcttctcgctggccatgcactggcaactgcagcccgaggacaagcggctgcgtcgattagcaaggtaaaagtaacaga

SEQ ID NO: 44427 - DNA, 76 bp, Homo sapiens
gtttgacaaaacataccaattcttgaatgacatccgagcgaaagagaaagaggtgacaatctccaatagacttgtg

SEQ ID NO: 44428 - DNA, 96 bp, Homo sapiens
gcgcgaatatcgtcatcgttagaaggtgctaagtgtggtggctcacacctgtaatctcagctacttgggaggctgaggcagaagaatcacttgagg

SEQ ID NO: 44429 - DNA, 75 bp, Homo sapiens
cacccctgggagtgggcctgggtctcgtctttgtgtcctcattggggaagaggcgtcctgccaaggcctggtcag

SEQ ID NO: 44430 - DNA, 83 bp, Homo sapiens
gactgcactgctgaacggaatatctgcagcaagtattcgattatgagcctcaaacaatttgtgagcatctccagtacttgttt

SEQ ID NO: 44431 - DNA, 83 bp, Homo sapiens
aaccctggtcaccgtctcctcagcccgctgatccagttccacctgctgcactccaagttccacctgtgcagcgtccccacccg

SEQ ID NO: 44432 - DNA, 141 bp, Homo sapiens
gaggcaggcgcggctgccggcggctgggactgaagagggacgggtcccgcggcgagcgagctcctgagtgcatgcaagatatgggaaatactaaagcaagactactctatgaagccaatcttccagagaactttcgaagac

SEQ ID NO: 44433 - DNA, 75 bp, Homo sapiens
aggattctggggtgtttctcctcctttcctccctcccagatcttctcacggatgaagtgtcctcttgctagcacc

SEQ ID NO: 44434 - DNA, 100 bp, Homo sapiens
gaagagagtcccttagtggacatttctagttaccaagctgctgagattatggtgacaagctgaacatggagctgagtgagaaatacaagctggacaaaga

SEQ ID NO: 44435 - DNA, 82 bp, Homo sapiens
gaaggcaaagcaaatttatgaagaattcattcaaacggaggctcctaaagagtttttcagaagaagtgaagtcaagatgaag

SEQ ID NO: 44436 - DNA, 75 bp, Homo sapiens
aggaatattattacaccaaggaggagcagtatcttcgcaaatactgtggacaatgcccgcatcgttctgcagatt

SEQ ID NO: 44437 - DNA, 87 bp, Homo sapiens
gaagcctcctgcgccggccttgcctcggtgcctccacttctcattcagagaattcagtgcatacaaaatcagcttctgttgtatcat

SEQ ID NO: 44438 - DNA, 99 bp, Homo sapiens
gtcctgggaagtcagatgggattgaaagttatgagttgcagaaacgaattgctgaaatggaaactcaaaaggaaaaaattcatgaagataccaaagaaa

SEQ ID NO: 44439 - DNA, 86 bp, Homo sapiens
gcagaaggaggtcctgccgtccatgcggaagatcgtcgccacctggatgctggaggcaacatgagtgagaatgaggaagaggaaat

SEQ ID NO: 44440 - DNA, 82 bp, Homo sapiens
caggagcggggccggaactggagccgaggcgcaggtggcgctgggtgcagtggaggcttgcctcttgcatcagctgagacgc

SEQ ID NO: 44441 - DNA, 98 bp, Homo sapiens
ttccagtggatttccttgcggaaaggatgttggcggtccctgtgacctgtggagacacggccagatctgccctccacatctgcaaacatagagaattc

SEQ ID NO: 44442 - DNA, 96 bp, Homo sapiens
aaagcaaaatctgctagcatcagatgcctgtgaggagccaccaacatttgaagctatggagctcattggtaaaccaaaaccctactatgagattgg

SEQ ID NO: 44443 - DNA, 75 bp, Homo sapiens
agacctacatccgttggcaggagctgctgacccactgccagccccagcggagctccctgggtcctcagcagtgag

SEQ ID NO: 44444 - DNA, 51 bp, Homo sapiens
gcgcgagtgaggaaaggaggtactgtaggcagataaaacgtcactgtgcag

SEQ ID NO: 44445 - DNA, 90 bp, Homo sapiens
tcgctcacgggtcgttgaggccggtgacatgtctgtgagctgcggaggctgcggcccccagaacctaaaggcagacccagaagagctttt

SEQ ID NO: 44446 - DNA, 96 bp, Homo sapiens
gacagctgctaaagtggcatcctgggattttgttgaagccacacaaagaacaaattgcagttgtttgagggcgccctgcgtccggcagaggaggcg

SEQ ID NO: 44447 - DNA, 96 bp, Homo sapiens
gctcgcccaagccgcgtccccagagagcgccctgagagaacagggtggccgcttggtccaggctcagccgtgctgctcttcctggccatgccaatg

SEQ ID NO: 44448 - DNA, 107 bp, Homo sapiens
ggcgtcttgaagaaggcattccccacccgccaaatggcgtccatgcccccgacgcccgaggcccaggttcggactaaggatcaccgctttgaaagtgtcagtcacct

SEQ ID NO: 44449 - DNA, 135 bp, Homo sapiens
tcgctccgtggccttagctgtgctcgcgctactctctctttctggcctggaggctatccagcctcattgctatggacagtgctatcaccctgtggcagttccttcttcagctcctgcagaagcctcagaacaagc

SEQ ID NO: 44450 - DNA, 50 bp, Homo sapiens
ctcctgagtagctgggattgcagaggctctccagcagagaacccaggccc

SEQ ID NO: 44451 - DNA, 90 bp, Homo sapiens
gttctgagcaagaacatccggaccgatgacattacaagcggttttgatgtggacaatggcacatctgcgggacggagtcccttggatccc

SEQ ID NO: 44452 - DNA, 75 bp, Homo sapiens
ggggcagtatcaacggagtctccgggcagatccagagccagagctctacctcgatcctttctgccctccgggttt

SEQ ID NO: 44453 - DNA, 100 bp, Homo sapiens
gaggactttcttccagcttctgctgtccttctttgtggagagcaaggtcatttcattagagaaattgaaggattttggtgagtgtgtgattgcccttcag

SEQ ID NO: 44454 - DNA, 89 bp, Homo sapiens
ccttcccagccttcagaaattgccggtctgggagttgggggcaaggagaagatcctgggtcggcactcttcaccctcccgagccctgcc

SEQ ID NO: 44455 - DNA, 100 bp, Homo sapiens
gttttcttatgcttataagagtggaacagaaatacaggtatcaggatgaagatacacctcctcaagagcatatttccccacaaatcacaaatgaagtgat

SEQ ID NO: 44456 - DNA, 98 bp, Homo sapiens
ccggccaaaggccttgcagccgccatgcaacctcctgatgcagtcagaagaagtagagacacgctgtttaatggtcttgggcttggagcagtaattgg

SEQ ID NO: 44457 - DNA, 100 bp, Homo sapiens
gagtgtgccatattccaatggctgagccgttttgccccaaaacgagagagggcctcgattgggtggctctggctgccaggaagattccagccccattccg

SEQ ID NO: 44458 - DNA, 73 bp, Homo sapiens
gggcatcttcttcacccgggcggtgcaggcctcattgctacgatttcagagtaccctggtaatagctgagcat

SEQ ID NO: 44459 - DNA, 92 bp, Homo sapiens
ggactcaacagtttgtggcaagacaagctcagaactgagaagctgtcaccacaggagcatcagatccatgctgctgctgactcggagcccca

SEQ ID NO: 44460 - DNA, 98 bp, Homo sapiens
ggtgagccggaggagtcagtcagaggggcgagcaggagcgattccgtcgccaaacagtttggggcggaattccgaaggttctctctggaccgtcataa

SEQ ID NO: 44461 - DNA, 82 bp, Homo sapiens
agctaacccctttcaccattcagattcgggaactggagcctctcctctgtcacagtgacaatccatctcagctcatctggac

SEQ ID NO: 44462 - DNA, 88 bp, Homo sapiens
gcccgcagagagttaacttctgtttacatggaactcagacatctgcaaatcatgaatactgagaatatacttcacacattgactcagc

SEQ ID NO: 44463 - DNA, 100 bp, Homo sapiens
cacacgcgcagcatcttctgggagctccaggaggttgtggctcactggattgctgaaagccgcattgccattgagaagatccgcttgttgactctgaaag

SEQ ID NO: 44464 - DNA, 76 bp, Homo sapiens
tgagaaacaggcacacaagtgtgaggagttgctaaatgctcaggtctaacttcaaacttgtggctgttaattcaaa

SEQ ID NO: 44465 - DNA, 83 bp, Homo sapiens
gaatgctggagtcagtggaagacggagctggtcggcccgaagacctggaatggccaaatatcaaggtgaagttcaaagtttga

SEQ ID NO: 44466 - DNA, 82 bp, Homo sapiens
cgagtggcttggacgctgcctcattgactctctgggcgtcggctgtgtctcacagcaccagaataccgtagcagtaggcagg

SEQ ID NO: 44467 - DNA, 82 bp, Homo sapiens
cgagatgaatcctgcggcagaagccgagttcaacatcctcctggccaccgactcctacaagagtgcctggtgaagaatgtga

SEQ ID NO: 44468 - DNA, 100 bp, Homo sapiens
ggcgccgccaaacagcccagctcgcgcttcagcgtcccggcgccgtcgcgccactcctccgagtgaggccgcaggcggtgctctgggtccgggagcgctg

SEQ ID NO: 44469 - DNA, 75 bp, Homo sapiens
gaattaaagaaggaattagaaaaatatcaagggctgcagcagcaagattctggactctacttataatatccctaa

SEQ ID NO: 44470 - DNA, 100 bp, Homo sapiens
gattgggagtccattttgcagatctgcgacctgatccgccaaggggacacacagtggtgttcccactgatgaagagcaggcgactgggttggagagggag

SEQ ID NO: 44471 - DNA, 100 bp, Homo sapiens
gttgaaggctgcagtgagccctgtttttgccaccacactccagcctggaaacgttcctggatccgaacactgccccctgacgacctagagagatcccggc

SEQ ID NO: 44472 - DNA, 99 bp, Homo sapiens
aagggagaaaaagtaaggccaaatcaaaatcgctgcatagtaatattgcgtgaaatatctgaatctacccccgtggaaacttgcctaacgatatctcac

SEQ ID NO: 44473 - DNA, 100 bp, Homo sapiens
cgacgtcttgcctgtgtcccacttgttcgcggcctatagatgcagctgactttgcctgtagcctcatagaacccatcccatggctgcagtggaagcttgc

SEQ ID NO: 44474 - DNA, 82 bp, Homo sapiens
cctcagcacatggtgggggccacaccatttgccgtggccaggctagagaacaagttgaaatcatcgcagaaggataaagttc

SEQ ID NO: 44475 - DNA, 76 bp, Homo sapiens
gcgcccagaagcagggacagggagctggttggggaggaccagaagtcagagctccagcattgactttctagcaagc

SEQ ID NO: 44476 - DNA, 91 bp, Homo sapiens
tttgggaccgtggctgctggcatggtgttggacatcgtgcagtgtgatctgtccccttgggcagtgagccgggaccagattgaccggttca

SEQ ID NO: 44477 - DNA, 96 bp, Homo sapiens
ctcacttccccggggtgtaataatgttaactgagggccttgggtgtctccgtgactgactacacgttcgaggactgccagctggccctggcggaag

SEQ ID NO: 44478 - DNA, 119 bp, Homo sapiens
aggcaagacctgcctcctgttccgcttctcagaggacgccttcaacaccaccttcatctccaccatcggtgtggatgaggtcaccattgtcaacattttgaccaaccgcagcaatgcac

SEQ ID NO: 44479 - DNA, 75 bp, Homo sapiens
ctgcgcgctgctcgcccggctgcaggtgttgacttcaaaatcaaaactgtagagctaagaggaaagaaaattaga

SEQ ID NO: 44480 - DNA, 73 bp, Homo sapiens
cagccaagttccccaacggctccccgtcgtcctggtgctgcagcggatcaactcactatcctgaaggtccatt

SEQ ID NO: 44481 - DNA, 90 bp, Homo sapiens
gccttcgagcaaccagcaaccttactcaggaaaacattcgggaactggagcctctcctctgtcacagtgacaatccatctcagctcatct

SEQ ID NO: 44482 - DNA, 75 bp, Homo sapiens
cttgtacctgtatgccaggtacaaacaggtatctcagcgtttgagtcagccaggagtagcaataggtttggcttg

SEQ ID NO: 44483 - DNA, 100 bp, Homo sapiens
cccctttcaactctacttcaacccgcaccttgtgttccggaagttccagacctgcctagagctggaacgttacctccagagcgagccctgctatgtttca

SEQ ID NO: 44484 - DNA, 96 bp, Homo sapiens
gctgccactcatgatcaaccccactggctgtgcccgatcagagcctaaaatcctcacacactacaaacgagtgatcatcaccatgctggtcgccac

SEQ ID NO: 44485 - DNA, 100 bp, Homo sapiens
cagcattctacaaccccagaccaccgttaatccagatcgcatcaaacaatgggatggagtaggacctcttccagactgtgctgaaccaccaaaagggatc

SEQ ID NO: 44486 - DNA, 100 bp, Homo sapiens
tctgctgcctacattcctgctcacacatacgcttgcagctttgaggcaggagagggtagttgtgcttccctaggtgtggagggcgcagctttccagagcc

SEQ ID NO: 44487 - DNA, 51 bp, Homo sapiens
atgatcctgaagtacagaaagacatcatttttctggattggaggctccatt

SEQ ID NO: 44488 - DNA, 51 bp, Homo sapiens
accatactacaatgaatgatgatgccagaatatggttgagccccttatacc

SEQ ID NO: 44489 - DNA, 82 bp, Homo sapiens
ctttggtccccagcgcagtgaagtggtgagcctttttgtcactgtactggagaaaatgaaactgggattgacccatcaagat

SEQ ID NO: 44490 - DNA, 116 bp, Homo sapiens
cgcccgggaggaaggaacgaggcaaggagctaaagcagcgtgcgttcagccctgggatgatatcatcaagttgaatcgaaaggaagggaagaagcagaattttccaagactaaata

SEQ ID NO: 44491 - DNA, 82 bp, Homo sapiens
gtcgcgtctcggaaaccggtagcgcttgcagcatgccttgccttacacccagacaaaactctcgttgcaactggccaagtcg

SEQ ID NO: 44492 - DNA, 83 bp, Homo sapiens
accgccgccccctccggcgtgttcatgcccccgggggctgaagaagatgcagagcagcctgaagctggtggactgtatcatcg

SEQ ID NO: 44493 - DNA, 75 bp, Homo sapiens
aggagctgaacgtggactggcgagatgagccagaggagtcaaattgactttatcagctttaatcgatgggaagaa

SEQ ID NO: 44494 - DNA, 100 bp, Homo sapiens
gctaacctcggggaccgagatgcagccgaggcctgcctggagccccagatcaccccttcctactacaccacttctgacgctgtcatttccactgagaccg

SEQ ID NO: 44495 - DNA, 90 bp, Homo sapiens
cttggccaggctggccccgagcggaactggagaaagctgaggggcgccctgcgtccggcagaggaggcgagcatcccgctcaggtgatga

SEQ ID NO: 44496 - DNA, 75 bp, Homo sapiens
agatccagaaactggaggagtcccgctcgaagctagatgtcaagccctccaacatcctagtcaactcccgtgggg

SEQ ID NO: 44497 - DNA, 82 bp, Homo sapiens
gcccgcgattctcagggattgatcgcctcttcagctgacctgatctccagcttcctgctcatcaccatgctcttcatcatca

SEQ ID NO: 44498 - DNA, 96 bp, Homo sapiens
ggatcaccggcgtgccccaccatgtcagacgcagccgtagacaccagctccgaaatcaccaccaaggccgccatggcatcagatgaaggcaaactt

SEQ ID NO: 44499 - DNA, 97 bp, Homo sapiens
cccccccggagaaaaagttgaagcgttatacatgcacatgatggtgtccaagccagaacagtgggtaaagccaatggctgtagcaggagccaatcag

SEQ ID NO: 44500 - DNA, 99 bp, Homo sapiens
gtgctgagcgttctaaaggaaggcgtccgttggccttcgtacccgtcttgattgagggggatatgagactttctactcggaatatcctgagtgttgcgt

SEQ ID NO: 44501 - DNA, 90 bp, Homo sapiens
ctcgccgcccgtccccggcacacgcgcagccccggcctctcggcctctgccggagaaacagttcctccgtgtcacaaagcagtacctgcc

SEQ ID NO: 44502 - DNA, 84 bp, Homo sapiens
cctggacgccctgcacgtgctcgagggcctcttccgcaccgaccccgaggccaagtggatctccagcttgtagctgcatcagcc

SEQ ID NO: 44503 - DNA, 97 bp, Homo sapiens
gtcattctcatcacgccgaccccactttgtgaaacagcctgggaagaacagtgcatcatacaaggtgcaacagaaggatgtctcagatgaggatgtg

SEQ ID NO: 44504 - DNA, 100 bp, Homo sapiens
catcaaccacaagttgaatctgatgctgctggaggaggtgaagtggcatcgatgtcatctttgaaaagtttctactttgtcccttaatgccaccctaacg

SEQ ID NO: 44505 - DNA, 120 bp, Homo sapiens
ggtcagtccgccgctcaccccgcggccgcaccttcccgccttctcagatgaggtttatataactttccaagacaaggaagttgtgcaaagcctcacagctactaagaggctgggctggga

SEQ ID NO: 44506 - DNA, 75 bp, Homo sapiens
tggagatggtggagtccgtcagttgtaggaagtgtcctgtattttactaatttttgccttgataaattggggcaa

SEQ ID NO: 44507 - DNA, 100 bp, Homo sapiens
attacgccccctatcctatccgcaaacaaaactgcttggaaactccctgctgaaactggaaggtgatgaccgtctagacatgaactgcacgctgcccttc

SEQ ID NO: 44508 - DNA, 74 bp, Homo sapiens
caagactgggcttccaccgagcagccatgaagactttgaatttatttcaggaacacgaatgcgcaaacttgctc

SEQ ID NO: 44509 - DNA, 90 bp, Homo sapiens
accgtgaccgagagcgtgaccgagagcgcgaatatcgtcatcgttagaagaattcttccatctctatgacaacaagcccattttagcttt

SEQ ID NO: 44510 - DNA, 90 bp, Homo sapiens
gtgctgttttcacatcttgatgataatgagagaagcatgtcggtgcctcaggccatggagtggctaattgaacacgcagaagacccgacc

SEQ ID NO: 44511 - DNA, 83 bp, Homo sapiens
tgaagtcaccactgaggaggaattcaccctgttcgtctatggataacctagggtctcagtttagccacatgagtcttgctcgc

SEQ ID NO: 44512 - DNA, 74 bp, Homo sapiens
tgaggaaagcaggaggaggtggcggcggcgggaagatagctcccagctcctccagcagccgacaggaggcccgt

SEQ ID NO: 44513 - DNA, 100 bp, Homo sapiens
accccgtctgagaagtgaggagcccctccgcccggcagctgccccgtctgagaaccagtgtggctgtctgtggactttgataactggagagactgggaag

SEQ ID NO: 44514 - DNA, 75 bp, Homo sapiens
tttgttctctggcatggaaggggtcctcagagttactggggccataggaaaaggatacagagtagagtttcatga

SEQ ID NO: 44515 - DNA, 100 bp, Homo sapiens
gtcagaggcgaacgccactcagcttttgcggcacttggagtcccgccatggccgctctcacccgggacccccagttccagaagctgcagcaatggtaccg

SEQ ID NO: 44516 - DNA, 48 bp, Homo sapiens
gctgtaaaaggagagaggacctggaggcaccatggctgaggaaacagc

SEQ ID NO: 44517 - DNA, 60 bp, Homo sapiens
tcgctggactgcaaaccgagctcccgtctgccttgcagctcatgatggagcagtccaaga

SEQ ID NO: 44518 - DNA, 100 bp, Homo sapiens
gctaggccatctgaataactttactaagggaaaagagtgcaaattcggaaagcacctcaagctgtttcagatacagttcctgagaggaaaaggtcaaccc

SEQ ID NO: 44519 - DNA, 75 bp, Homo sapiens
aagccctcggcccccaagaagggagacagttctgtgctggacgtcattgctcctccttatacctctgacttcgtg

SEQ ID NO: 44520 - DNA, 107 bp, Homo sapiens
tgtatatcaagccacaatttccatcaaaaagtgattaagcagagaatggagaagaaggttgattccagactcatctttcaagaggactttagactaattgcagataa

SEQ ID NO: 44521 - DNA, 98 bp, Homo sapiens
cttcaccgcgggcgccaatggggagcagaaggactcggacacaggtgtcatggagaaactccagctgggcccagagattctgcagcgggaaaatccaa

SEQ ID NO: 44522 - DNA, 100 bp, Homo sapiens
cgcagatgttgtcaaggtggcctaccaggaggccaggggtgtcgccatggcaaggcatctttacatatgtgattatcataaaaacttaattcagagtgtt

SEQ ID NO: 44523 - DNA, 98 bp, Homo sapiens
gatcctctggccagctgactgcacttcttttttgagaaaggaaggaatatatcctgactgattaaggaagaggcccagcagaagggactcgctgagcc

SEQ ID NO: 44524 - DNA, 101 bp, Homo sapiens
aactgtacaaactgtcagatacaaagtgatgatgcgggtgtgctggttggtgagacaggacagccggcaccagcgaatcagacttccacatttggaagcag

SEQ ID NO: 44525 - DNA, 50 bp, Homo sapiens
gcgagaccctgtggtggcttattactggagcgcttgtgagtgccttggct

SEQ ID NO: 44526 - DNA, 82 bp, Homo sapiens
agctgatgctgctgacctccggggccgcactgccctccaccgcgggtacattgtgaagtgccatggcaacacgcttctgccc

SEQ ID NO: 44527 - DNA, 100 bp, Homo sapiens
taagagatattgatctgaaaagaggctttggttttgtggcatgagtacagtaccagaagttatcgttgcacggcactgtggacttcgagtctttggcttc

SEQ ID NO: 44528 - DNA, 100 bp, Homo sapiens
atcgcctgaaaagtggagagcatcttaatccagaccagttgtgtttctgccacccacttagcagacaaggtagaggaggcagttctggatcgtttgaagc

SEQ ID NO: 44529 - DNA, 80 bp, Homo sapiens
ctcttactcgtgttccctgccactgtcttgttccgaggcggccccagagtgtctttctcgagaagcaggtggaaacatga

SEQ ID NO: 44530 - DNA, 83 bp, Homo sapiens
ggagcgcaacactcgcttggttggggagatcggcgcttggccgcaattctgtggtgttcttggtcacacatttatggagtttc

SEQ ID NO: 44531 - DNA, 99 bp, Homo sapiens
tgactacgaggaatggcggcggctgccgcaggacctgcagcatcccagagggacaaactctgcctgggcgagtccttttcctgcgttatgtcgttcaga

SEQ ID NO: 44532 - DNA, 82 bp, Homo sapiens
agactcatttctctgaagatgggaagtcgagataacatgagtattgtactagtttgcttttcaaatgctcccaaggtctcag

SEQ ID NO: 44533 - DNA, 75 bp, Homo sapiens
cgcgtgtgcaggccgcgcgcctgctggagcagatcctggtggctgagaaccgccaaggtggtgccccagcagatc

SEQ ID NO: 44534 - DNA, 75 bp, Homo sapiens
caccaagatgcggatccgggcctttccggagatgcatcgaaggtttgagaatgctcctgattctgccaaaacaaa

SEQ ID NO: 44535 - DNA, 50 bp, Homo sapiens
gagggccacacttttcaagtgatatacatctccagatttcctctatgttc

SEQ ID NO: 44536 - DNA, 83 bp, Homo sapiens
ggctactatgctgaacggtgcagcagtgatggatgcagctcttctgttgataggtataatgggtctctcccaaatggcgatag

SEQ ID NO: 44537 - DNA, 100 bp, Homo sapiens
tcagtgactgccaccctggaggacagggcacaacaaccgtttctgggagggatataagaccttcttcaacacactctaccataacaacattccccttttc

SEQ ID NO: 44538 - DNA, 75 bp, Homo sapiens
taaggattccaagtaactcttatttggtaccaggatcatctatgaccggaaattcctgatggagtgtcggaactc

SEQ ID NO: 44539 - DNA, 88 bp, Homo sapiens
taagtcgaaggggaaggcgcctgaagaggacgaagagctcccagctcctccagcagccgacaggaggcccgtcaagatgcaggcaggc

SEQ ID NO: 44540 - DNA, 75 bp, Homo sapiens
gagctcatctggaattttgccgatttcatgactaaccagtgtcagcccaaggccaaccccactgtcactctgttc

SEQ ID NO: 44541 - DNA, 100 bp, Homo sapiens
gctcttcatgcaaggaaacataagttggaggttctggaatctcagatgcctgtgaggagccaccaacatttgaagctatggagctcattggtaaaccaaa

SEQ ID NO: 44542 - DNA, 97 bp, Homo sapiens
agcacaccagtcttccctcctgggtcacttcctatcccatcccagcctcagttttctcatttactaaaagatgtaactgaactgcagatccttggtg

SEQ ID NO: 44543 - DNA, 97 bp, Homo sapiens
aacgagttgtatcacctggaattggagagaacggagagccagtgtgctgtgtgtcacggtccctggatgaacgtttgtggaactggattgaattaaa

SEQ ID NO: 44544 - DNA, 83 bp, Homo sapiens
tgagctgcgaggaaaatggcggcgggagcatttgacattgtgcagcaaagaaatggttatggagaagcccagtccgctgcttg

SEQ ID NO: 44545 - DNA, 76 bp, Homo sapiens
atgactcagacctgggcacagcaaatgctgaggactcagaccagtctctgcaagaagcccacaggcggttttgtga

SEQ ID NO: 44546 - DNA, 100 bp, Homo sapiens
tcaggaccaaatgacagaggatctgtccctgtttctagggaacaacacaattcgattcaccgtatgggtggcatggagaaatcgttgtcaaaacagagat

SEQ ID NO: 44547 - DNA, 100 bp, Homo sapiens
cgcttctcagaggacgccttcaacaccaccttcatctccaccatcggatcttatggttggtgatgaggcaagtgaattacgatcaatgttagaagttaac

SEQ ID NO: 44548 - DNA, 75 bp, Homo sapiens
cagtcagcagcacaacagaggcggtggaatcaactatgaaattataatcatagatgatggaagcccagatggaac

SEQ ID NO: 44549 - DNA, 83 bp, Homo sapiens
ggaaggaggcgtcttggcccgggcagcagtggcggcagcgcccgagagagggagtgcatccgccccaacccttttccccctcg

SEQ ID NO: 44550 - DNA, 82 bp, Homo sapiens
gcaaggccacgccggccgcgcgcgccagcaagaagatcctgctgcccgagcccaggattttttatcaagcagaaatgcatcg

SEQ ID NO: 44551 - DNA, 90 bp, Homo sapiens
ccttgatatatataactctctacatttctgaatgtctgaagaaactgcaaaagggcccagtcatatatgcacagttagaccactccggcg

SEQ ID NO: 44552 - DNA, 100 bp, Homo sapiens
ccacaatggagctgcagggaattgtgccggaggttctgaagaagatcgtaacaacttatgacatggtgtatgagcaccaagatggcagcaaatcactgaa

SEQ ID NO: 44553 - DNA, 75 bp, Homo sapiens
gcggaggctgaggagaaggaggagcgggccgtggaggcttcgccgcctaggtggatccataaagaacccagccaa

SEQ ID NO: 44554 - DNA, 100 bp, Homo sapiens
tgaaccagtttgagaactgctgtggtctgcgggaaggtgccatcctcaccttgctgagtgacattgatgatgtgctgactaaagacgcgggtgagtgtgt

SEQ ID NO: 44555 - DNA, 75 bp, Homo sapiens
gcacctcgtcaccaaggccaaggaaagggataaagtgatgcctctgattatccaaggttttaaagacgcagctga

SEQ ID NO: 44556 - DNA, 97 bp, Homo sapiens
ctttgccgagaaggagttgtttcccattgcagcccaggtggataaggaacatctcttcccagcggctcagaccaccatcatggcagtggagtttgac

SEQ ID NO: 44557 - DNA, 74 bp, Homo sapiens
tctcaacaacattggcgatgcctcctcgctcatccgagccaccattgctgctacaggagctgagagaccctacc

SEQ ID NO: 44558 - DNA, 100 bp, Homo sapiens
gtggagtccgcgaagattcgagcgaaatatcccgacagggttccggtgatagtagaaaaggctcccaaagctcggataggagacctggacaaaaagaaat

SEQ ID NO: 44559 - DNA, 76 bp, Homo sapiens
gcatggaatatcaggaaactgagtccaacactatgctggtttgagtctaaagtagggggaaccaagcctgctggtg

SEQ ID NO: 44560 - DNA, 78 bp, Homo sapiens
agctggagcaagctgaaaataccatcaggaagctccagcaccaacaacaatgggtgtctgcttttggggcagagtttt

SEQ ID NO: 44561 - DNA, 94 bp, Homo sapiens
gctctggaagacattgaacgggaaatcggcgccatccttcagaatgcagggtcctcactgagcagcgagtcgtcccccgtgtcctctccggcca

SEQ ID NO: 44562 - DNA, 100 bp, Homo sapiens
tcggcggcagtcgggccagacccaggactctgcgactttacgccaagactaaggggctgcagagcggggtggacattggcgtcaagtactcggagaagca

SEQ ID NO: 44563 - DNA, 74 bp, Homo sapiens
tattccttttgggacgccaattaagtcctattctggtgaaaacacagctagtgccattgcccgttctgctgccg

SEQ ID NO: 44564 - DNA, 96 bp, Homo sapiens
ctcgagcgacagagacaagctgagcttgccgcacaaaaagctagagagaacgagtccctggagaggcagatgcgcgagcaggaggagcggcacgtg

SEQ ID NO: 44565 - DNA, 83 bp, Homo sapiens
cccagcccagcgcctcggccgaacccctccgcagcagtttggtgccctggttgtcagatgttggaaagcagtaggacggaaca

SEQ ID NO: 44566 - DNA, 75 bp, Homo sapiens
taaaaagtacatcaaagccctttctgaggaaaaggatgaagaacaagctgtggtactttgaatttggcacctcgg

SEQ ID NO: 44567 - DNA, 75 bp, Homo sapiens
atcatgtctgcgagccaggattcccgtaagactttgaccccgacgcaggcttcagtgattgccgcggatcagaag

SEQ ID NO: 44568 - DNA, 100 bp, Homo sapiens
gccctggccgtcccctgctgtgttcttcaggagaaacgtcaggggccttcctccaagccccccctcctctgcacctctcctctcagccacagcaccggca

SEQ ID NO: 44569 - DNA, 75 bp, Homo sapiens
tgagccgccccgcgcccccgccgcgccctcagagatttaccgcattgtttctcagaagcaaatgtcagacagacg

SEQ ID NO: 44570 - DNA, 100 bp, Homo sapiens
tgggagttcagcttttagagcaggtgtatgatcttttggaggaggaggatgaatttgatagagagacacgaagatcgattgagaagttattagaatggga

SEQ ID NO: 44571 - DNA, 100 bp, Homo sapiens
cagtgggacccgcactggcagcgggaggcagagggaggaccctggaacatcccggaagccgggaaatggcctcccagaagttcctgccgaatcgtcttcg

SEQ ID NO: 44572 - DNA, 100 bp, Homo sapiens
agcactgtggaggccgtcctcgggactggtgattgcagctggaagtgcccatgaccgagctggcgtcctccgggggcgggtcccctgcgggggacgggga

SEQ ID NO: 44573 - DNA, 75 bp, Homo sapiens
gctctcactgcggagaggtgtttggtgcagaagctgactctaaagaggatgcagttaactggctctctggcttga

SEQ ID NO: 44574 - DNA, 75 bp, Homo sapiens
gccagggaaccctggtcaccgtctcctcagcttccgccctgcgctgccagtctcctacctgcaggccgagctggc

SEQ ID NO: 44575 - DNA, 80 bp, Homo sapiens
ggaagactccaagccctactgggaggcacggagggtggcgaggcagcccaaagcagtgtccacaccagcaccagctacaa

SEQ ID NO: 44576 - DNA, 73 bp, Homo sapiens
tgcaaagcagtcctccaaaccagtggtagtctcaggacgtagacaagtttggcaacgagatcacccagctggc

SEQ ID NO: 44577 - DNA, 82 bp, Homo sapiens
ccctgaagaagtgtgagcatgacccccatgtgctcctggccgtggccaagtgacttaagagattaaaattaatttggttgct

SEQ ID NO: 44578 - DNA, 60 bp, Homo sapiens
agaaaatgtagaatgggaaactaatagagatggttgaactcccaccacctgatcttggac

SEQ ID NO: 44579 - DNA, 88 bp, Homo sapiens
caagaatgaagccgcggaccctcgcgtggatcaatcttcctgtcctacaactgacaaaggatcccctaaagacccctggaaggctgga

SEQ ID NO: 44580 - DNA, 74 bp, Homo sapiens
atttgctaaacttaaaagcaagctggttctctgggatataaataaggtccttttggtgtgaaccatggggtgga

SEQ ID NO: 44581 - DNA, 100 bp, Homo sapiens
agccactccaattgctggccgcttcactcctggaaccttcactaaccagatccaggacatcatccacgacccgggccgcggcgcgcccctcgccaaggtg

SEQ ID NO: 44582 - DNA, 101 bp, Homo sapiens
gctcctcccactcctcgcgggctccgtgctttccgcgggtctgtccgggggctccggaccctcggcgcaggcactgtgctaagttggacttacagagatga

SEQ ID NO: 44583 - DNA, 100 bp, Homo sapiens
agcacaaccatcgcagttggaagcccatggggcagttggatcgatcaacccgggaggtggagctgggcttggaatacggatccccgactatgaacctggc

SEQ ID NO: 44584 - DNA, 75 bp, Homo sapiens
cagccgatccagcctgcggagcctgtggggcaggtctccaaagcggcgtctgacctcatgagctactgtgagcaa

SEQ ID NO: 44585 - DNA, 82 bp, Homo sapiens
gaccaagaggaccagactttgttaatgaagctcttccaccaaagccacctaagccaatgacttcagcagttccaaatggaat

SEQ ID NO: 44586 - DNA, 102 bp, Homo sapiens
cctgccaaaaggaaatgcatctttatgtcagaaacacaaagcagcccaaccaaaggatggtgagaacaagaccaagattggaaagccagcttcagaggaggg

SEQ ID NO: 44587 - DNA, 75 bp, Homo sapiens
cggctgcgacagttacagcagctacagcagctgcgagacagtggcgagaaggtggggttcagtctcagccgggtt

SEQ ID NO: 44588 - DNA, 98 bp, Homo sapiens
ccttgcacctgttaacatctttaaggcaggagctgatgaagagagagcagagacagctcgtctgatacttggtgttagatgaagctgatcggatgttg

SEQ ID NO: 44589 - DNA, 75 bp, Homo sapiens
cgaagacagcggagaggagagcggtgcggaggactgagatagcagaccccacgttagctgaaatgggaaaaaact

SEQ ID NO: 44590 - DNA, 101 bp, Homo sapiens
catgagatgattgccaaacccccaggttctaacattcccatggaccagccctgctgtcgtggtctctatgactttgagccagaaaaccaaggagaattagg

SEQ ID NO: 44591 - DNA, 50 bp, Homo sapiens
ctttgaactgaggccagtggtggaaacagtgctcttaaagttccgtacag

SEQ ID NO: 44592 - DNA, 83 bp, Homo sapiens
actcctcccagtgacgggtctggagtgcgtgggggaccggctgttggcgggccccttcccagctgcctgcctgccctagccag

SEQ ID NO: 44593 - DNA, 75 bp, Homo sapiens
cggacatgtcggtacagctgtggtcgtcagcactgctgagagcacagccatgacagtgcagatcctgctgaagct

SEQ ID NO: 44594 - DNA, 100 bp, Homo sapiens
tcctggccaccgactcctacaagattgtccccagctacggaaaacaagctccggctgcattaccgtagggccctcaggaacaatacagatccctacaagc

SEQ ID NO: 44595 - DNA, 75 bp, Homo sapiens
tcgtttggtttgatcttgttgactatgaggaagttctaggtgcccttgctcgtgtgaatgaacagaggccagaga

SEQ ID NO: 44596 - DNA, 100 bp, Homo sapiens
gctccaccgtttggcatcccgactgtaagcaatctacgaagaccgaggaaaagctgcggtatctccagatgaaatggccactgcttgatgtccaggcagg

SEQ ID NO: 44597 - DNA, 97 bp, Homo sapiens
ttcttacactgaactggacttcgagctgatcaaggtagaagaccatgatggagaaggtgatgtggctggagatgatgatgatgacgatgatgattca

SEQ ID NO: 44598 - DNA, 82 bp, Homo sapiens
gcagttcttgtttgtggatcgctgtgatcgtcacttggctctgacgcccgctctgcggcttcggtgtttgaacaggccacag

SEQ ID NO: 44599 - DNA, 50 bp, Homo sapiens
ggatgtgaaaactctgttactgaaggtttttcgttggaatatacgttgca

SEQ ID NO: 44600 - DNA, 100 bp, Homo sapiens
gagctttacaggcgctgcaaactggaggaaatgggctttacagatgtgggcccagaaaacaagccagtcagaattcagaaggagctggcggacatcactt

SEQ ID NO: 44601 - DNA, 96 bp, Homo sapiens
gccgccctgcaccttcagcggatttggggattaggctcttttagggccccgagcacgacagccgcagtctccacccagaaccagagagtccccccc

SEQ ID NO: 44602 - DNA, 100 bp, Homo sapiens
cagactcacattttatgggaattggtccgagaagacacacccaaaggattaccctcttttagttactatccagcagaaaacttgatagagtacaaatggc

SEQ ID NO: 44603 - DNA, 98 bp, Homo sapiens
cacgttacaactgctagtttggacggagaaactaacctgaaggttaatgctctggataatcttggtcagacttctctacacagagctgcatattgtgg

SEQ ID NO: 44604 - DNA, 50 bp, Homo sapiens
cttggacttcccagccaccagaactgttgaacaaatcctggcagaattta

SEQ ID NO: 44605 - DNA, 51 bp, Homo sapiens
tgggggaaccgggggtagcggcagcagcaaaaagtgtgagcgctactgggc

SEQ ID NO: 44606 - DNA, 100 bp, Homo sapiens
agtctttatttcagatacagataagacgctgaacacgttttaagaggtgggacacagcaggccaggaaagatttcgaacaatcacctccagttattacag

SEQ ID NO: 44607 - DNA, 109 bp, Homo sapiens
cggcgaatcacttataaatggcgccgaagcaggacccgaagcctaaattccaggaggaacatccagtcatggataaaaatgagctggttcagaaggccaaactggccga

SEQ ID NO: 44608 - DNA, 100 bp, Homo sapiens
ctgcgggccggggacctgcatgtgtgtgcgcgcgaaggagcggaagaatggcagtgctcaaactcaccgaccaggtggacgacatccttggagaaggcag

SEQ ID NO: 44609 - DNA, 82 bp, Homo sapiens
ttagttgctttagtcagctaacctcgtcattatttgccaaataaatgcactcggtgatggaaagagagccactattctgaag

SEQ ID NO: 44610 - DNA, 100 bp, Homo sapiens
agacagtgcctggataccttcgaataggaacctagaagtcggaatccggaagaagatcgaacatgacgtggtgatgaaagccagcagcagcctgcccaag

SEQ ID NO: 44611 - DNA, 100 bp, Homo sapiens
tgcgctgtaccctgcgctggctccgtgaaccttagggacaacaccgggacacccgcgaggccggaaaatggtcttgggcgtctttggtactggctttttt

SEQ ID NO: 44612 - DNA, 83 bp, Homo sapiens
ctgtattggtctcctgctcctagaggttactcactataaacaatatccacccaacacaagcaaagtttattcctactttgaat

SEQ ID NO: 44613 - DNA, 75 bp, Homo sapiens
gcacggcggaggcagcggagccctgggccatcgctatgctaagaaggaatctgatcttaatggcgcccagatcaa

SEQ ID NO: 44614 - DNA, 82 bp, Homo sapiens
tgcagaaggtctctggagacatcttcagcagcatgagtcaagacactgaagttagaagtcgggtcgtggggggaagtcttcg

SEQ ID NO: 44615 - DNA, 90 bp, Homo sapiens
aaagactatgaagataaaattcgggaggagtatgagcaaatcctcaataccaaactagcagaacccccaaagacacacgtgacccaccac

SEQ ID NO: 44616 - DNA, 82 bp, Homo sapiens
aaatgtctgactctgactctcggactgagaaacgcaagggatgtttcagcagcccctgagaaggaagaggaggaagctgagg

SEQ ID NO: 44617 - DNA, 82 bp, Homo sapiens
gccgatttcatgactaaccagtagatagagtttcaccatgttgtccagggtggtctcaaaactcctgagctcaagcgatctg

SEQ ID NO: 44618 - DNA, 75 bp, Homo sapiens
tgtcattctgaccttgtgggtttcctgtgctaatggacaagtggcacaaatacaattatgcccacctccacctca

SEQ ID NO: 44619 - DNA, 100 bp, Homo sapiens
gatccaggataacggaggctggctcctgagtattggtgttccattgcttactttgaaatggatgttcaggtaggagagacatttaaggttccttcaagct

SEQ ID NO: 44620 - DNA, 75 bp, Homo sapiens
aacatcattgcaacacagcgccatttccgctggcacccaggtgcccatgcaatttgaatcaacccatagaagtga

SEQ ID NO: 44621 - DNA, 101 bp, Homo sapiens
atccgcccacagacctcaaattcaaagaatccagcaagctaaagtgcaaattcttcccgaatgtgtgttgccttcaaccatgtctgcagttcaattagaat

SEQ ID NO: 44622 - DNA, 75 bp, Homo sapiens
ggcaaacttggaaagagcaagatcggcagccctaaattgtgcatgcctaaagggctatctttcaggacacaaacg

SEQ ID NO: 44623 - DNA, 121 bp, Homo sapiens
gacggggcggccgggggctcagagatccaagtgcgcgccctggcgggtccggaccaagctgggagtgtccactcgccttccaccagcatggcaacgtcttcacagtaccgccagctgctca

SEQ ID NO: 44624 - DNA, 100 bp, Homo sapiens
acagtatttactgagagctcatcagggttctgagcaaggttcaaccagtcaagaacaggccttatctgctcagcaagctgctgttattaaccttactgga

SEQ ID NO: 44625 - DNA, 88 bp, Homo sapiens
ctcctactcttgttcgtctgagaaaactgaagtttgccataaaagttgatggagattacctttggggacaaaagtggctctcaatcca

SEQ ID NO: 44626 - DNA, 82 bp, Homo sapiens
atcagaagtcaattcaaaggacctgcccccagagagagtctggataaaattgagttcttacagagtcatgaaaaccaggaga

SEQ ID NO: 44627 - DNA, 50 bp, Homo sapiens
tggcaccaggagctgctacacctggggaggaggaggacggccagtggaag

SEQ ID NO: 44628 - DNA, 75 bp, Homo sapiens
gttatgcagctcagcaaggtgaaggaggctctgtcggtggtgagcgacgaccagtccctctttgactcagcgtac

SEQ ID NO: 44629 - DNA, 74 bp, Homo sapiens
ttccatctggccaagatcaaggttcggaattactggacagctgatggcatgtgttttcgcattataacaaggac

SEQ ID NO: 44630 - DNA, 82 bp, Homo sapiens
gcatgatggcctactgcgaccagatcttccaggacgagacgggcaagaaccgactgcaaaattcaaaatggggctcaaggta

SEQ ID NO: 44631 - DNA, 100 bp, Homo sapiens
ctgtggctgttggtttgtggaacagacagctccttctttattggaagcatgagtgggaaaagcatgggacctgcgccgcccaggtggatgcgctcaactc

SEQ ID NO: 44632 - DNA, 75 bp, Homo sapiens
atgctgtcaaactgggtctaccggtgtgttaccgagtggaatgggccaaattccaggaacgtgagaggaagaagg

SEQ ID NO: 44633 - DNA, 82 bp, Homo sapiens
cacccggcaactcagaaacatcaggtccaagccaaagcaatgaggacctgaagcaagagaaatcagaattggaagagaagct

SEQ ID NO: 44634 - DNA, 88 bp, Homo sapiens
acgggagctcaaagtgtgccttctcggggatatggaatattatcttgtaaaatggaaaggatggccagattctacaaatacttgggaa

SEQ ID NO: 44635 - DNA, 100 bp, Homo sapiens
gatgccttggaaaccatctcaataacatacatatgatagttgagaaagacacatattctgatcatgaagaaataaacacaagttaaatatgactaagcag

SEQ ID NO: 44636 - DNA, 80 bp, Homo sapiens
ttggtttcgggatctcggtgctgcagacggcgagacctcctgcacaggttatgaagacagtatggagtttccagaccata

SEQ ID NO: 44637 - DNA, 100 bp, Homo sapiens
ctgcgggccggggacctgcatgtgtgtgcgcgcgaaggagcggaagaatggcagtgctcaaactcaccgaccagacaagttggatggcttgaggactggt

SEQ ID NO: 44638 - DNA, 96 bp, Homo sapiens
gtcggcggctcagttgtccatgaccctgaaggtccaggagtacccgaccctcaaggccaagtcctgtatctgccatgtctgtggcgtccacctcaa

SEQ ID NO: 44639 - DNA, 100 bp, Homo sapiens
aatatcccccggcttgtgagtggatgggtaaaacctatcatcataggtcgtcatgcttatggggatcaagaatcaaagatcaactcccactgaggacaaa

SEQ ID NO: 44640 - DNA, 100 bp, Homo sapiens
cacacactcaccgagaaccgcgtcctgcagaactccaggcaccccttcctcacaatagcctgggctggaagctcttctacgtcacaggctgcctgtttgt

SEQ ID NO: 44641 - DNA, 74 bp, Homo sapiens
caggagtgaagctgcagaccttcgcgagaggcgtttccatcaaccagttttgcaaggagttcaatgagaggaca

SEQ ID NO: 44642 - DNA, 100 bp, Homo sapiens
ctggactggacagatcattgttactgaagaggaaccttcagtggcccggtaccatgtgactgtgtgcacaggtgaacttgaaggtgctgggaccgatgcc

SEQ ID NO: 44643 - DNA, 51 bp, Homo sapiens
ctttccacacggaccgcctataaaggagctagacctcatggcctatgacag

SEQ ID NO: 44644 - DNA, 96 bp, Homo sapiens
gctggtgacaagtgtgactttacagggacactgattgttgtgcctgacgtctccaagcttagcacaccaggtgatgatgaacagtctacacagatg

SEQ ID NO: 44645 - DNA, 96 bp, Homo sapiens
aggcactccaccgtatgtgatcaacctggatccagcagtacatgaagttccctttcctgccaatattgggcacctgtgctggttgcacttgctttg

SEQ ID NO: 44646 - DNA, 73 bp, Homo sapiens
cctcccccaccaacacagctgttgccaatacacaatcaggacggtctggaaaatcccgaagcagaagcccgta

SEQ ID NO: 44647 - DNA, 51 bp, Homo sapiens
ctgattcacagaaaagcagttattgctaccagtagtgcagtttcaaaggaa

SEQ ID NO: 44648 - DNA, 89 bp, Homo sapiens
ccaggactcggggctctcacgctttctgctcaagtcctgtcctcttctgaccaaagagggaggtgttcttcgccacacgccttgagcag

SEQ ID NO: 44649 - DNA, 90 bp, Homo sapiens
ctcattttctttccctgcaccaactagcagggtactgcgttcaacagatcctgatcgcttccaggtaatgttctgctactttgaggataa

SEQ ID NO: 44650 - DNA, 75 bp, Homo sapiens
caattcggtgctccgccagccccagcttggcgtcctgagaaatggcagtggatgtggtgggccaggctggcaagc

SEQ ID NO: 44651 - DNA, 90 bp, Homo sapiens
agaagttatgcttgttggaattggtgacaaaatcagaggcatactttatagccttgataaattgcacactgcactttctgagttatgctt

SEQ ID NO: 44652 - DNA, 76 bp, Homo sapiens
gtggaggatgagacgccccaggacctgactgaggaagaccaggcctcctcttcccacctgtccagcagcatgaaag

SEQ ID NO: 44653 - DNA, 82 bp, Homo sapiens
gcagccccctcctggcgacccgcaacagcctcccgcgacgatgcccctcaacgttagcttcaccaacaggaactatgacctc

SEQ ID NO: 44654 - DNA, 100 bp, Homo sapiens
ctgtattctgaagacagcgccccagcatttgccatcttcaagtttgttcaggcccgacaacaagctcaaatacgtcaccaaatggcagaggacagcaaag

SEQ ID NO: 44655 - DNA, 78 bp, Homo sapiens
cggaggaacccggactccggcgtagcgtccacaagaatcggaatgtcagttaatgctattcgcaagcagagtacagat

SEQ ID NO: 44656 - DNA, 100 bp, Homo sapiens
ccagcggtctgacatcgcgacgctgctcaaaacctcgctccggaaaggggacacctgccaaatttgtatcctactgtggggcttcaaacaccaggagaag

SEQ ID NO: 44657 - DNA, 74 bp, Homo sapiens
gtgaagttgggaaatactacagtaatctgtggagttaaagcagtggagataagtaattaacatttcgaaacagg

SEQ ID NO: 44658 - DNA, 90 bp, Homo sapiens
cttactgtactggaaacgtcaccggaatcaggaccgagctcttttggtacaccagaaggccagaatggaacgacttcaaagagaacttga

SEQ ID NO: 44659 - DNA, 75 bp, Homo sapiens
tccgggagctctcccgtctcacaggggataagaagtttcaggcttccgaagatcttctcaaggaacactacgttg

SEQ ID NO: 44660 - DNA, 80 bp, Homo sapiens
tcggccatgagccgctacatactcatcatggggctcctgtacaagccctgggcgctgcctatggcacagccaagagcggt

SEQ ID NO: 44661 - DNA, 100 bp, Homo sapiens
tggcgaagtcagtgtggtgcctccatctcgtctcatggcattgctgggacaggaaccaccaaactgttttccacagaggctgcatcaattgacattccca

SEQ ID NO: 44662 - DNA, 75 bp, Homo sapiens
gaagttcgtgctgatactggaggacttggaaggagtgcataaggcaaatccaatacgcaagtaccagggtctgga

SEQ ID NO: 44663 - DNA, 100 bp, Homo sapiens
gctgcctctgcctccctggcttctctggcccacgctgccaacaagcggagaccctgttaactactacgttgacactgctgtgcgccacgtgttgctcaga

SEQ ID NO: 44664 - DNA, 89 bp, Homo sapiens
agctgcggaacaggacgccctctgataggagaaggcagagcccccccaggctatgaatgccctgatgcggttgaaccagctgaagccag

SEQ ID NO: 44665 - DNA, 98 bp, Homo sapiens
tccggggcttgccctggtcttgctcggccgatgaagtgcagaggtttttttctgaggagggcgcacggagacggaacttgctctgaaataccttctgc

SEQ ID NO: 44666 - DNA, 83 bp, Homo sapiens
ggtgggggccacaccatttgccgtggccaggctagagaaaccgaccagagggcaaagtgttggagacagttggtgtgtttgag

SEQ ID NO: 44667 - DNA, 100 bp, Homo sapiens
ccggccgtacgcggtgctgcgagggcagaacctgggtatgttatgcataaaagtggataatttacatgataaatgaaaatggccaattctttaagaggag

SEQ ID NO: 44668 - DNA, 101 bp, Homo sapiens
tgaacggatggctgagggagccccgcggatcgtttaggaaagccggccagggctgaggcacatgtctgggtctgagctgaccgagctgctggaccaggtgg

SEQ ID NO: 44669 - DNA, 90 bp, Homo sapiens
cccgaagcgggaaaaaggctgggtgccgccgtcccccagctgcgcaaccctaggaactctcggggaggagagagcgatggcttttttcac

SEQ ID NO: 44670 - DNA, 51 bp, Homo sapiens
tgtgaagccacacagtgtccagatacgaggcctggagtactcgggtacttt

SEQ ID NO: 44671 - DNA, 96 bp, Homo sapiens
gaacaaactcgaagaacagctgtggaaagaagttgcaaaacactgggatgctttcattggatttggaggaaatgtgatcaggcaacaagtcaagga

SEQ ID NO: 44672 - DNA, 100 bp, Homo sapiens
agaagataacaatcaagatgaatatgaccctatggaagcagaagaagctgaggatgaagaagatgtcaggatggctaaaggtgaccccaagaaaccaaag

SEQ ID NO: 44673 - DNA, 101 bp, Homo sapiens
agattcaagctgaagaaaacctgtttaaactcattgtcaacaaagggttaccttccagttcaacatttaccttggaagaggggaccatctacttgaccgct

SEQ ID NO: 44674 - DNA, 100 bp, Homo sapiens
atggacacacccaaggagctctggcggatgatcactgggaacatggccctcatccagggcaggagcgcttcacctctatgacacgattgtattatcggga

SEQ ID NO: 44675 - DNA, 90 bp, Homo sapiens
cggccggacgacccaagcccgctgagcaggatgagggcgaggattaaatccaccacacagggtgaaatctatctccatgacaacattcac

SEQ ID NO: 44676 - DNA, 90 bp, Homo sapiens
caatgaacaaatatggagccattcttagtcaaaaagctcatcttgccttatcaagctcctggatttggatttggaattgcaatatctggt

SEQ ID NO: 44677 - DNA, 82 bp, Homo sapiens
aaaatacaaggagctggacatcgagcctgagggaggggaaaggcgcagggtttggtgcacctcgatttggaggaagtagggc

SEQ ID NO: 44678 - DNA, 82 bp, Homo sapiens
gggcctccgtctggatttccaaggaagaatttcctctgaagcaccgatgccgacaaaaggatcaaggtggcgaagcccgtgg

SEQ ID NO: 44679 - DNA, 100 bp, Homo sapiens
ccgccgcgaccagccccctcacctggcacctgggagagccagcccgccaggctgttttggagtcagcggaagatcaccaaggccagggagtggttccacc

SEQ ID NO: 44680 - DNA, 99 bp, Homo sapiens
gaagaaactgcaccggaaatgtgcctaccagggaatgctggcctgctggccttggcagatgttttctcagaggattcatcctcctctctctgtcagctg

SEQ ID NO: 44681 - DNA, 82 bp, Homo sapiens
tggccttagctgtgctcgcgctactctctctttctggcctggaggctatccagcgcgaagctgctctcaggggagaacccag

SEQ ID NO: 44682 - DNA, 100 bp, Homo sapiens
ttccaaaaactacaatcataaagaaatccaacttaccttgtcagctgaacaactttttaaagcaacaatgagttacctccttggagggggcatgaagcag

SEQ ID NO: 44683 - DNA, 102 bp, Homo sapiens
cagtaacatacagcactttgtggagaaagtcgtcttccacttgcacgaaagctttcctaggccaaaaagaggtgtgttctactccctcttctgggaatgaag

SEQ ID NO: 44684 - DNA, 98 bp, Homo sapiens
caggttcacctcctcctcctccagatatcaacatggcaggagagcccaaaccatacagaccaaaacctggaaacaagaggcccctttctgcactttac

SEQ ID NO: 44685 - DNA, 50 bp, Homo sapiens
agggcaggagaagaggaacctgcaaagctgtttgcagacaaggtcccaaa

SEQ ID NO: 44686 - DNA, 90 bp, Homo sapiens
gcccgctgcccgacgagcaggacttcatccaggcctacgaggaggtgcgcgagaagtacaaaggttatgaagacagtatggagtttccag

SEQ ID NO: 44687 - DNA, 88 bp, Homo sapiens
ccaggtcgtcgaggtcccgggggtccccagccgcccggccagtccggagaaggcggcttccttggagtatgactatgagaccatccgc

SEQ ID NO: 44688 - DNA, 103 bp, Homo sapiens
ctcgcttctttcggttctacctgggagaatccaccgccatccgccaccatggtgcgcgcggagccatggttatcatgtcggagttcagcgcggaccccgcggg

SEQ ID NO: 44689 - DNA, 90 bp, Homo sapiens
ctgctcagtgtccagacccttgattcccggcccaggctggcgccttcctctgttgggccagcggtacctggacctcctgaccacgtggta

SEQ ID NO: 44690 - DNA, 100 bp, Homo sapiens
gcccagtttatggcttccagtggaggcattttggggcagaatacagagatatggaatcagccaagtatcttcaagaccttctcatggagagtgtgaattt

SEQ ID NO: 44691 - DNA, 100 bp, Homo sapiens
gacccagaccctggagcctcagttggaagcagccgatccagcctgcggagcctgtggggcaggaagcgagtcacgtcccagcgctgctccctggagtttc

SEQ ID NO: 44692 - DNA, 100 bp, Homo sapiens
cgacatcatgctccagttcctggactcacaccacccggcaagaactgctcactacggctccctgccccagaagtcacacggccggacccaagatgaaaac

SEQ ID NO: 44693 - DNA, 74 bp, Homo sapiens
ctcgtctgtattcccacttccttccagatggtgagagatgagaacctcaagtttatgaagaatagagatgtata

SEQ ID NO: 44694 - DNA, 75 bp, Homo sapiens
gttaccttgaatacttcccagtacctctgtcagttggaccttgaacctgattgatcagggaccatgaaaagaaac

SEQ ID NO: 44695 - DNA, 74 bp, Homo sapiens
gacctcatggcacctcagccaggggtgtagccaagtagacatttcagaaattgggagaagtgccaagtcttact

SEQ ID NO: 44696 - DNA, 100 bp, Homo sapiens
aaggagtcacggatcggattcctcagctacgaggaggcgctgaggagaggtatctcagatgaagacatcatcaacattactcttcctactggagtcccca

SEQ ID NO: 44697 - DNA, 100 bp, Homo sapiens
gggcatcttcaccttcctctgcgagtgcttagatgagtacgaagatgatgaagcagggcagaaagagcggaaacgagaagatgcaattacacaacagaac

SEQ ID NO: 44698 - DNA, 100 bp, Homo sapiens
cggagaagaggggagagtggcgggccgctgaataagcttccaaaatgatgtctgacggttccatcctggccatcgccctgctgatcctgttcctgctcct

SEQ ID NO: 44699 - DNA, 101 bp, Homo sapiens
cagcagttatgaggcagagcctaagagaactatggcaacatcaggtgactgtcccagaagtgaatcgcagaaaacccgcctagtgccaagcaaccctccaa

SEQ ID NO: 44700 - DNA, 83 bp, Homo sapiens
ttgaactttttacaacaaaagaaaagctaggtgctgaagatccctgatgggaaagggctccttcaagtatgcctgggtcttgg

SEQ ID NO: 44701 - DNA, 90 bp, Homo sapiens
caacattcgatttattggaggcctacttgcagcatattacctatcaggagaggagcgatgtgcattttgtaagcactttggagccactat

SEQ ID NO: 44702 - DNA, 48 bp, Homo sapiens
aagagggaagacacgcggaaacagttaagtgggcagaccaacatccac

SEQ ID NO: 44703 - DNA, 82 bp, Homo sapiens
actttctcccttgatccgggagtctttccactgggtatttctgggaaaagccagcttctgtttgcactggtcttcacaactc

SEQ ID NO: 44704 - DNA, 100 bp, Homo sapiens
ctacatcccacagagatacccagacaacaggatcgtctcgtccaaggcacttttaaatcaacttagagctgtgtttgatcaaattattgaacttcagaat

SEQ ID NO: 44705 - DNA, 117 bp, Homo sapiens
ctcagttcctgcggggaacttcaccagtgacccagtcagtgcccttcagttaaagaccaccaggagcacacttaatcatgtcaaccctgccatggacttcacgcagactccacctgg

SEQ ID NO: 44706 - DNA, 50 bp, Homo sapiens
gcatcacagagagctcgctttggagaattctccactttaccaatacttac

SEQ ID NO: 44707 - DNA, 74 bp, Homo sapiens
aacaagaagggacagcaaggctggtggcgaggggagatctatggccgggctggagtacagtggtgcgatctcag

SEQ ID NO: 44708 - DNA, 75 bp, Homo sapiens
gctgctgccccggacccgggcggacgagcacgaacacacggaagcattcaaagctgtggaagatattcacgggct

SEQ ID NO: 44709 - DNA, 73 bp, Homo sapiens
acaaacaaagggctgcaactacggtttacaaaagatactgcaaggttcaaggatgagttagatatcatgaagt

SEQ ID NO: 44710 - DNA, 83 bp, Homo sapiens
gagagccaaaatgaaccagatggagaaaacccacaaagaagtcacagaacaactgcaggctgaactcacgggaatcaaatggc

SEQ ID NO: 44711 - DNA, 98 bp, Homo sapiens
gggggtgtcctggtgcacccccagtgggtgctcacagctgcccattgcctaaagaagtgcttgaagtttctgggaagtcggcatccaaccctggtgct

SEQ ID NO: 44712 - DNA, 75 bp, Homo sapiens
acccaaactttgcaaggaattcggtccagaggattacggcgaagagagacgagttgtactgctgtcacaggaaat

SEQ ID NO: 44713 - DNA, 100 bp, Homo sapiens
agaatatgaaaaagcagagcgactcggttaagggaaagcgccgagatgacgggctttctgctgccgcccgcaagcagagtttccaggttaactaaggtct

SEQ ID NO: 44714 - DNA, 50 bp, Homo sapiens
ctaaaatacgaaggtttctggctggaaaaactgcttaaggttgaaaagag

SEQ ID NO: 44715 - DNA, 98 bp, Homo sapiens
taaccaactctcagaggtggccaataagttcgccaaagcgacaggagctctggatgaactgcagctttgcaagaattgcttttacttgtcaaatgctc

SEQ ID NO: 44716 - DNA, 99 bp, Homo sapiens
gggagatgaagttatcagtattctgaaacaggaacacacacaactgcacatatggattgctttggcgcttttggaaaagaagaagagagtccaactcaa

SEQ ID NO: 44717 - DNA, 83 bp, Homo sapiens
gccggccggaagtcttctcccctgcacttcgctgcagtgcctccggagccagcgtggtggccatagacaacaagatcgaacag

SEQ ID NO: 44718 - DNA, 100 bp, Homo sapiens
gatgctgatggtgatggagattttgatgtggatgatgccaaagttttattagaagccctacaggtggcaactactagcccaactgccaatactactggta

SEQ ID NO: 44719 - DNA, 144 bp, Homo sapiens
gggcctggggccgcccgcacctctctcacctcaccttctggagcctcctagagctgcgtagagtcttcaccaagggtcaaaatgcagatcttcgtgaaaacccttaccggcaagaccatcacccttgaggtggagcccagtgac

SEQ ID NO: 44720 - DNA, 80 bp, Homo sapiens
ggccagggaaccctggtcaccgtctcctcagccatccgggtgacctgcataggttcctgcggggtctccaacaaggctaa

SEQ ID NO: 44721 - DNA, 50 bp, Homo sapiens
ggcaggaccggtggcagttggtgttgaaggggaccagctgcctccaggac

SEQ ID NO: 44722 - DNA, 82 bp, Homo sapiens
gccacccgagacgcggcgcgcacgctccggcctgcgattcagagcattcttcactccagaataatgagcaaccctctttggc

SEQ ID NO: 44723 - DNA, 75 bp, Homo sapiens
tccctgtcctagctctgtaactgtttacacctcagaaggggaagtttactcccagtcccgtggacttcacgatta

SEQ ID NO: 44724 - DNA, 90 bp, Homo sapiens
aaaggccaagatccaggataaggaagtcccccgatggtgttatacattaaatatccaggatggagaagccacatgctactcaccgaaggg

SEQ ID NO: 44725 - DNA, 96 bp, Homo sapiens
ggcggagagaccgtccgaggtaattgtctgccacgagtgcacattctgaaaacagagctaatccagacagagctgcaccatgtgaggacactgaag

SEQ ID NO: 44726 - DNA, 75 bp, Homo sapiens
aggaaaaaaaccttcgactatgcagagacatgagatggtagccaacccctcagatcttgcttctgaaatatctac

SEQ ID NO: 44727 - DNA, 50 bp, Homo sapiens
cccgcccggctcaggcccgctgggaagaaggagaaagggccaacccctga

SEQ ID NO: 44728 - DNA, 75 bp, Homo sapiens
ccagacagccatccaggaccaaccttccagttctgtctgtgaacgaggttccaattgtggacaagataaggacca

SEQ ID NO: 44729 - DNA, 100 bp, Homo sapiens
agcggtcccgcccaacgcccgactctgcctatgaaaggaggttccctacatgtcctttgattccgatgttcgtgggcagtgacactgtgaatgaattcaa

SEQ ID NO: 44730 - DNA, 98 bp, Homo sapiens
gggaataggagctggggagcccttctgcgccacaggtgctccatacttgcttgcagtgcctacgtggctctggctttgggtgataacctcatggcttt

SEQ ID NO: 44731 - DNA, 100 bp, Homo sapiens
gggacctattgttcagttacaagagaaactttatgtgcctgtaaaagaatacccagatgtcatgtttactggtgaaaatattcctgttcatcctcatgtt

SEQ ID NO: 44732 - DNA, 100 bp, Homo sapiens
cgtctccagcgagcggcgcggagctggacgccgcgatcgtggggcccgcgaggcgggcagccggggcgtccaggttattcagcttctcaaggctggaaaa

SEQ ID NO: 44733 - DNA, 100 bp, Homo sapiens
agagaaaaggagccagaaaagccggcaaaaccacttacagctgaaaaggcccagaccttctctttccctttccagcagccggagaagtgcgacaacaacc

SEQ ID NO: 44734 - DNA, 99 bp, Homo sapiens
cacaaatgtttttctgttttgcctgaatacatgatttaaacaagagatttccacagaaggcatcaagcatgatggaaccatgtgtgatacctgccgcca

SEQ ID NO: 44735 - DNA, 98 bp, Homo sapiens
ctatggaagcagaagaagctgaggatgaagaagatggttgcctttttcctctacaatggggtgtcactaggtcaatttgtactgcaggtaactcatcc

SEQ ID NO: 44736 - DNA, 75 bp, Homo sapiens
tccactgcgggccggcgaaagctgtggtggtcgtggtgacaggactggccgctatggagccactgaccgctcgca

SEQ ID NO: 44737 - DNA, 100 bp, Homo sapiens
tcggtggcaatatccagtgccctgcacaagaagggcaagctggacatggagcaatttacagcaatgagggatttatacatgaaaaatggacaaggatttg

SEQ ID NO: 44738 - DNA, 99 bp, Homo sapiens
ggacgtcacatgtcattataccttcacccagcatttcatccctcgtcgaaaggattggattggcatctttagagtgctgagctgtgaggagagcatcag

SEQ ID NO: 44739 - DNA, 74 bp, Homo sapiens
tctgggccgccgaatctccggccgaagagcggcggcggcagcggcgtcttccgtgtgtgctaagatcgtgcagc

SEQ ID NO: 44740 - DNA, 90 bp, Homo sapiens
gggtgtcgctgggctgtcggcctggaccttgcagccgcaatgattgctcgctgtaagcagctcatctgtgaccccagctacgtaaaagat

SEQ ID NO: 44741 - DNA, 90 bp, Homo sapiens
ggcaggcgccttcgcggaccgagcctgacggagccggaggctgggagccgcggcggcctgggacaaatttacatgtattggagaccagac

SEQ ID NO: 44742 - DNA, 98 bp, Homo sapiens
ccgcggcgcggccatcggccagtgcagggaattccaatgcccactttcggaggcctcttcccctacccctacacctacatggcagcagcagccgcagc

SEQ ID NO: 44743 - DNA, 90 bp, Homo sapiens
ccaccagctgcaggctgagcgcgcgcagggcttccgccgactggaggagtgaccgaagaggcctatgtcccagtgagtgacatgaacggc

SEQ ID NO: 44744 - DNA, 80 bp, Homo sapiens
accagctcagcaactgttcagcatgggtgaaaatggcatgtaaagttgaagatctgggcaaagtggattttgaagatgaa

SEQ ID NO: 44745 - DNA, 100 bp, Homo sapiens
gatttattaacacctcttgccactcagctgacatatgaaggactcattgatgaaatttatggcattcagaacaggccggtgcataaacttctcccgagtt

SEQ ID NO: 44746 - DNA, 90 bp, Homo sapiens
ggccatcttcaccgtgtacctgggctcgagcctgcacatgaagattcttggtgccaccattgagaactccaggattgtcctgcagatcga

SEQ ID NO: 44747 - DNA, 100 bp, Homo sapiens
catcagtgggaacaagactacctcctcctttaccccagaacctcctttacacagtatcagaacatgttttctggcaaaggccttcctgcatttatgaatt

SEQ ID NO: 44748 - DNA, 100 bp, Homo sapiens
caggtttctccagggaaagaaacagatcttatgcttgatacatggaatgagtcaatcttttcaaacataaaaaacagactccaagatagtgcaatgaagc

SEQ ID NO: 44749 - DNA, 100 bp, Homo sapiens
ggaagcaaaagtagtatgcttttatagacgacgtgatatttccaacacacttataatgctcgcagataagcatgctagtggtcttactctgcagcagctg

SEQ ID NO: 44750 - DNA, 75 bp, Homo sapiens
aaaaggaggaattcgccgtgcccgagaatagctccgtccagcagaaatgctgctcatggattctcccttattcag

SEQ ID NO: 44751 - DNA, 75 bp, Homo sapiens
caacatcctctctgtcacttccgccatcgtgacagctcagcagctcctcctcctatagtggggacatcagcaggc

SEQ ID NO: 44752 - DNA, 95 bp, Homo sapiens
atgctcttttaccgatgctttaacatacagccactagccccccaggttcgcctaatagtcttggctacttccctacagctgctaatcttagcggt

SEQ ID NO: 44753 - DNA, 136 bp, Homo sapiens
aaagccgagatactggctactgatgtgtctgtggaggatgaggaagggactggaagccccaaggcttttctgggaaagtgaggccaccatggctctggagaagtctcttgtccggctccttctgcttgtcctgata

SEQ ID NO: 44754 - DNA, 104 bp, Homo sapiens
atcgccggcaccacgagagcccggcccgcctgtgtggacgggactttgaacatgtcggggatcgccctcagcagactcgcccaggagaggaaagcatggaggaa

SEQ ID NO: 44755 - DNA, 50 bp, Homo sapiens
agcggggccgcttgatgcgacgcctgggcggcaaggagtacctgatgcgg

SEQ ID NO: 44756 - DNA, 83 bp, Homo sapiens
gccagtggatcggaatggtggagaacttcaaccaggcactcaaggacaaggccttgaaggaacgcagccttagacatcaggtg

SEQ ID NO: 44757 - DNA, 95 bp, Homo sapiens
ggtctacaagatattgacactattattgatcatgctagtgttgattcgccatgaagtcagcgtaaataatgtaacacataaactgtgcagtaacc

SEQ ID NO: 44758 - DNA, 74 bp, Homo sapiens
caaagggatgtgcccaagtcaggccataggaaaaggatacagagtagagtttcatgaacctgaaacttggtgga

SEQ ID NO: 44759 - DNA, 104 bp, Homo sapiens
ggaacttttggcagagctcccactaggaccaccaagctcaccgcagagcgcagcctccgcggacccgaggaccgccctgcgcgcagtctcgagcagcaaccagg

SEQ ID NO: 44760 - DNA, 75 bp, Homo sapiens
agaaagagaatattgttcagttgattatgccagccagatgcagaagtctggaacgttttttcttagagttccaga

SEQ ID NO: 44761 - DNA, 75 bp, Homo sapiens
catcaggatgaatgatgacccaagtatggaattggttgaatctggcgatgtggaacccatggatatggagggctg

SEQ ID NO: 44762 - DNA, 96 bp, Homo sapiens
cgtcgatgagcttcaggaatgccaggagcaggatctgcagaagacgcagggctcaagaacgctgccaagaagagagaccaggagcaagtggagctg

SEQ ID NO: 44763 - DNA, 100 bp, Homo sapiens
gcgctgcagccagctggcccccagggccctgcaggaaacaaagcttagcaggagaggagagccagagaagtgacagggaagctacaggttacaacagatt

SEQ ID NO: 44764 - DNA, 83 bp, Homo sapiens
ccgagatgccgggggagcggggccttccacaccccctccgtgggtgtgtgggaaagcaggcaggatgggagagtcgccgatag

SEQ ID NO: 44765 - DNA, 75 bp, Homo sapiens
gcaagaggagctattctgatcttggagatacaactcgtcaacgaatcaaattcagtgatgacagagtatgcaaga

SEQ ID NO: 44766 - DNA, 100 bp, Homo sapiens
ttcggctagcagccgtgtggctagaactacctctgatcatctttgcaagacactaagggcgactaccagaaagcgctgctgtacctgtgtggtggagatg

SEQ ID NO: 44767 - DNA, 100 bp, Homo sapiens
atagtctctcgccacagcggcctcggcctccccttggattcagacgccgattcgcccaggtttcaagtgccccatttgctccaagtctgtggcttctgac

SEQ ID NO: 44768 - DNA, 101 bp, Homo sapiens
ggaaggaggccgagccgggatctcaggtcctcgggggcggcggccacgccaaggacgggtaatggggagagtgccaacaatttccattaataagacagaag

SEQ ID NO: 44769 - DNA, 100 bp, Homo sapiens
cgcgtctctctgctgcggcgcggggaccgctgtgctctcgtgttcagcctgcaggacctctgctgccgggccatcgtctcctgcacccccgtgcacctca

SEQ ID NO: 44770 - DNA, 75 bp, Homo sapiens
aaaataccagaaacatacccatttaatccccctaagttacggcagtcccagtcctactgcacagacacagagtgt

SEQ ID NO: 44771 - DNA, 100 bp, Homo sapiens
gtgaagtcctgggacaccatgcagttgcgggctgctagatctcggtgcacaaacttgttggcagcaagcttcactaccaccaccaaggagtcccactccc

SEQ ID NO: 44772 - DNA, 109 bp, Homo sapiens
ggagttcttacaacatggcagacattgacaagtactaggttttgacaagcttgcatcatgcgtgagtataagctagtcgttcttggctcaggaggcgttggaaagtctg

SEQ ID NO: 44773 - DNA, 75 bp, Homo sapiens
ggcaccgcaaccgaatggacagggacataagcagctctatgaccaatagcacagctgccagtagacccccggtca

SEQ ID NO: 44774 - DNA, 76 bp, Homo sapiens
tggcactaagggagcacgccgcggtcaaccagggtggcaattttaagcccagccagaaaggttttgcaggaggaac

SEQ ID NO: 44775 - DNA, 98 bp, Homo sapiens
tgcccccgcaggcagcgcgcgaacgtgggcgtggggatggccaccagtttccggacagcttcgtgctggctttctgaaacaaaggtcttcactgcctc

SEQ ID NO: 44776 - DNA, 75 bp, Homo sapiens
atacgacacatccaggagtttattggagcgcagactgatggcgcaaaggaaatcttacaggctggtgttaaagga

SEQ ID NO: 44777 - DNA, 98 bp, Homo sapiens
gtcctgcgaaggagccgcagccgccgcgggaggccacaggctccgagctctgtccagtggtgggagtattacatcccctcctctttctccagcattgc

SEQ ID NO: 44778 - DNA, 83 bp, Homo sapiens
ctaccactcacccgcagactccttctccagcatgggctcgcctgtcaacgcgcagatactggctttggcactactagtggagg

SEQ ID NO: 44779 - DNA, 50 bp, Homo sapiens
ccgctttctcggtcggcaccgccatggtgtccctggccagtgtccttcca

SEQ ID NO: 44780 - DNA, 100 bp, Homo sapiens
aaactgctcatcactgtctggtacctgagctgcagagagaagtcagaggtgtggaccactacaacgaggtgaagagcgtcaccatctgcgattacctgcc

SEQ ID NO: 44781 - DNA, 99 bp, Homo sapiens
gccaaagaagctaaacgactaaaagaattcttagaagactatgatgatgatagagatgaccccaaatattacagatttgttcccgacaaggagttttct

SEQ ID NO: 44782 - DNA, 103 bp, Homo sapiens
ccagaggtaatcgcgcagttggagctagaggaagaatgggtgatagaaagagacagcctgctggatactcatccaggtctctaattaacagaagatggcaaag

SEQ ID NO: 44783 - DNA, 90 bp, Homo sapiens
gatgttgacgaagatcttatctgccctatttgcagtggagtcttggaggagccagtacaggcagcctgcttctgcaaagtggtacgatcg

SEQ ID NO: 44784 - DNA, 80 bp, Homo sapiens
gtatcattggccttgaggaagaagacatgctctacagtgctcagtctttgaggaactgtggctgcaccatctgtcttcat

SEQ ID NO: 44785 - DNA, 74 bp, Homo sapiens
gagaacggtgcttctatggcaggatatgagagctaaacaaaagggcgtgatccacatccgagttgtggtgaaag

SEQ ID NO: 44786 - DNA, 90 bp, Homo sapiens
tgtggtccttgatccagtatgcttatacagtttcaccagtgatcattaaagaatgggcagcttacaaaggaaagtctcctcaaaccccgg

SEQ ID NO: 44787 - DNA, 75 bp, Homo sapiens
tgaaggtccaggagtacccgaccctcaagtacgaggatgtcgtccaggaaagattgtgcagatgactgaagcaga

SEQ ID NO: 44788 - DNA, 100 bp, Homo sapiens
ttgccagccccagttctccttgacggagcccatgaaggtaaatccatcagataggtatcatctcatgcccataatcacccctgcctacccacaacagaat

SEQ ID NO: 44789 - DNA, 75 bp, Homo sapiens
ggaggagccgcgagcgctgagggtgagtgccgggagctctgaggggatatgtcctcagcaccaactactcctcca

SEQ ID NO: 44790 - DNA, 50 bp, Homo sapiens
ccttgatcctcctcctaattgcagaagctccaccatgaggcgaggtggat

SEQ ID NO: 44791 - DNA, 100 bp, Homo sapiens
ccacaagatcaaccacctgggctgcctggtcttcagcagagctttgcttggtcatcatgttctgagtggtccattggcctccgtgtcccttttgtggtgg

SEQ ID NO: 44792 - DNA, 75 bp, Homo sapiens
aaacgagagccttaatttcaagtgaccccagttttgcccgtctgggtcagatggtcttggagtatgaccaccctc

SEQ ID NO: 44793 - DNA, 96 bp, Homo sapiens
actctgttttctacaattggtgcgcatggaactttattacagcattcaacctggcacactgttatctggaagccggtctccctcacccctccaagc

SEQ ID NO: 44794 - DNA, 83 bp, Homo sapiens
ccagcttggccaagcagagctgggggggcggtggccggcaccgcagactttccttatcccagttgattgtgcagaatacactg

SEQ ID NO: 44795 - DNA, 83 bp, Homo sapiens
ggaccacaggccctcgttgcccagatgctctgacgcccgctctgcggcttcggtgtttgaacaggccacagtccaggagcgct

SEQ ID NO: 44796 - DNA, 100 bp, Homo sapiens
ctggatttacctgtgagacaggcagataacaacgaacttgatgcaagtgataggtttgccaaggtcagacctctcatcatccggatgaactgcaatttcc

SEQ ID NO: 44797 - DNA, 95 bp, Homo sapiens
agccggacccaggatgaagaggttggagatgggaccacatcagtaattattcttggtgtgatccctcacatccacaaatctctgattggaaagaa

SEQ ID NO: 44798 - DNA, 100 bp, Homo sapiens
actttaacagaactcaacaaatgctgtggcctttgtgtctgcccatgtaatagtgcatttgcccagtataacatggatcagttcacgcctgtgaagatag

SEQ ID NO: 44799 - DNA, 100 bp, Homo sapiens
actcatgagaccagtgcccatgaaggtcagactgaggctctaagtatgcagtcatctccaaatggccagtttgtagcgccaagtgatattcagttgaaat

SEQ ID NO: 44800 - DNA, 75 bp, Homo sapiens
ccgggcctaccccctggactccctggagaagcagatggaaaagcggatagacatgggtcgatttgaccttattgg

SEQ ID NO: 44801 - DNA, 101 bp, Homo sapiens
tgcctgctgttggcaaccctcctggactaggctgctcttgttaatcacatggatgtttgaacagagtatctgtcaggcaagagctgctgtgatggtttatg

SEQ ID NO: 44802 - DNA, 83 bp, Homo sapiens
tacaacgaactagcacaacgagggtatagcaggctttgtgactgtggtgtcctgtggtctttacaagctaaagtacagaagag

SEQ ID NO: 44803 - DNA, 51 bp, Homo sapiens
gagtcaaagctgccccagatggaaacagatcctgtttgaccaaactcagag

SEQ ID NO: 44804 - DNA, 82 bp, Homo sapiens
ggaggcagaagcatgctaagaacaacagtcaggccaagccttctgcctgtgatgaatttgaggaagccaggaagtgggtgtc

SEQ ID NO: 44805 - DNA, 100 bp, Homo sapiens
ttcgtttttttcagtgcatggaaagaagacttgtgaatctgatacccttgaggctcttctactgacagcctctgaaagcatcatggccagcccaagaacc

SEQ ID NO: 44806 - DNA, 88 bp, Homo sapiens
tattttactaagcccctaaaatgtcgagatttgtacaagggaagaggaagaacgtctgagaaataaaattcgagctgatcatgagaag

SEQ ID NO: 44807 - DNA, 100 bp, Homo sapiens
ttctgcgaaaaagccatggaactgatccgcgagctgcatcgcgcgcccgaagggcaactgcctgccttcaacgaagatattcctcgtcagcttgtctaca

SEQ ID NO: 44808 - DNA, 75 bp, Homo sapiens
tccttcttaactggcctggtattctacctgcccacagactcaggtctgtttgaggtccgagcccaagagtatctg

SEQ ID NO: 44809 - DNA, 82 bp, Homo sapiens
ccagttcctgccgtctgctcttctgcctcttgatctccgccaccgtcttcaggccaggtccaagcatctcattttgaaggcc

SEQ ID NO: 44810 - DNA, 83 bp, Homo sapiens
atatctgtcttcggtggactccttcggcagtccacccaccgccgccgcctcccaggaccgtagcctgacgggcaagctggaac

SEQ ID NO: 44811 - DNA, 100 bp, Homo sapiens
ggggaccctgtacgtgtacatcatttacggcatgtacttctgcatgaacatctccagccaggtgggctcccaggacagcttgctggagatcaccttccgc

SEQ ID NO: 44812 - DNA, 100 bp, Homo sapiens
cgcagcctggccgcgctctcccaaacttgatggagagtttggattcattgctttgtgcagaaggttctgaaagtctgaagagtttatgtctgaaacttct

SEQ ID NO: 44813 - DNA, 82 bp, Homo sapiens
tggggccagggaaccctggtcaccgtctcctcagatgcctgaggaaacccagacccaagaccaaccgatggaggaggaggag

SEQ ID NO: 44814 - DNA, 99 bp, Homo sapiens
aagaatgaagctgagaccacatccatggtttctatgcccctctatgcagtcatgtatcctgtgtttaatgaggagcttcaggatggttcgtactaagac

SEQ ID NO: 44815 - DNA, 88 bp, Homo sapiens
ccgttggccttcgtacccgtcttgattgaggtaggtgagctcgtgaaacaatatgaagaggagaaaatagccttttaaggaaattggc

SEQ ID NO: 44816 - DNA, 90 bp, Homo sapiens
ctctatagattctgctggtatacagctacatccaggagagaatgctgacagtcctgcagaaatgtatgtcccagaaccaaccaatatacc

SEQ ID NO: 44817 - DNA, 98 bp, Homo sapiens
gccgccgcagcttgggaggtgctgccaccacagacaatgcagatcttcgtgaagactctgactggtaagaccatcaccctcgaggttgagcccagtga

SEQ ID NO: 44818 - DNA, 51 bp, Homo sapiens
acaagctgcaccagcttctaaccgagtatctcagatgaagacatcatcaac

SEQ ID NO: 44819 - DNA, 82 bp, Homo sapiens
tctgctgtatgcaagttttcacttatctcgaaagcctatcagcatagttaaggctactgcagcactggggtgtcagttgttg

SEQ ID NO: 44820 - DNA, 75 bp, Homo sapiens
tgagaatttgaaaaatgaagatgatgtagacactggactattagatccttccgctgaggaattgagaaaactaat

SEQ ID NO: 44821 - DNA, 100 bp, Homo sapiens
gtccctacttcaagaccatcgaggatctgaggaacaagcacacactcacgggacacagtgggaaagtgctgtctgctaagttcctgctggacaatgcgcg

SEQ ID NO: 44822 - DNA, 96 bp, Homo sapiens
cggcagagtacatcattcagcaaggtggctgggcatttccggagagttcttttgaagtcacttcagaaggatctacatgaggaaatgaactacatc

SEQ ID NO: 44823 - DNA, 101 bp, Homo sapiens
ggaggattcagggaataggagctggggagcccttctgcgccacagcgttgacagaaggctacgttggggccctgcacgagaatagacacggcagcgcagtg

SEQ ID NO: 44824 - DNA, 100 bp, Homo sapiens
catccacgcacctgcagctctgctgagagagtgcaagccgtggggagttgatccccctcatattgtgtacagcatgtctacatcctgagcctaaagagcg

SEQ ID NO: 44825 - DNA, 82 bp, Homo sapiens
cgtgataagaagcacctggatgagacatttgctacagcatcccacattaagtcaacgttttcggctttgtgagaaaccttac

SEQ ID NO: 44826 - DNA, 98 bp, Homo sapiens
gagcccgggcctgaagggggggacaaacctgggtgcccgcaggagcccggcaggctcttgggaccagaactgagtacaaggagttgacttcacaggag

SEQ ID NO: 44827 - DNA, 75 bp, Homo sapiens
ccattggatttaaaagacagtcctcgtcagcactgactttcagctatggaatcgtctcgctctgtcgcccatgct

SEQ ID NO: 44828 - DNA, 106 bp, Homo sapiens
cgcggccctgcgcagctgccccatgtgccagaaggagttcgcccccagacttcccaagtaagaagcggaagaggagccgctggaaccaagacacaatggaacagaa

SEQ ID NO: 44829 - DNA, 85 bp, Homo sapiens
aaaatgattggagtattaacattgaacacattggaaggaaatgtcacatttggtgaagttgtattcaactatcccacccgaccgg

SEQ ID NO: 44830 - DNA, 75 bp, Homo sapiens
ttttgaaagagaaagatgagcagatccgagggttaatggaagaaggctgctggcaaaggggacgtcccaacgaag

SEQ ID NO: 44831 - DNA, 50 bp, Homo sapiens
ctttgaatcacaacatgagattttatgcttgggctcgggatgagtttgaa

SEQ ID NO: 44832 - DNA, 82 bp, Homo sapiens
tggccctgacggaggggaggaagtcaaaatgcagatcttcgtgaaaacccttaccggcaagaccatcacccttgaggtggag

SEQ ID NO: 44833 - DNA, 102 bp, Homo sapiens
cgttgcttgcttgcctgtgcgcgcgtgcgcggacatggcctcaaacgctgagcgggctttggacaccatgaactttgatgtgattaagggaaagccaatccg

SEQ ID NO: 44834 - DNA, 90 bp, Homo sapiens
ctctgacacgtattgtctcaagattaaagggacgtccagatcggtgacatcgtcacagtgggcgagtgccggcctctgagcaagacagtg

SEQ ID NO: 44835 - DNA, 82 bp, Homo sapiens
aggacgcaaagttctccggcgagatgccatggacaatattaccaggcagaaccaattctacgatacccaagtcatcaaacaa

SEQ ID NO: 44836 - DNA, 101 bp, Homo sapiens
ctccctttgacctcggaaactgaagatgaggttgccatgggaactgctggtactgcaatcattcattttgtgccttgcagctacttcagaatcttggttca

SEQ ID NO: 44837 - DNA, 75 bp, Homo sapiens
gctgaaggcatcagtgcaactgtatttcgcacagtgctgactgtacaatttgttcaaggaatttttgtagaaaaa

SEQ ID NO: 44838 - DNA, 84 bp, Homo sapiens
taggccccttcctgcccctgtcgtcagcagatatgtcacagatctaagcagcagggatttaattactgtacatcagccatttcc

SEQ ID NO: 44839 - DNA, 74 bp, Homo sapiens
tcttggcctcggaggatgcagcctttggactcaaggttagcatggcctcattgaaagaactagatcaaagactc

SEQ ID NO: 44840 - DNA, 100 bp, Homo sapiens
tagaagaaaaggtgtacttgcaagaaacctcaggacttgagtaacagcaacatgaatttcacggtccctcatggtgtctcactccagcagacagaggatt

SEQ ID NO: 44841 - DNA, 83 bp, Homo sapiens
gtattggacacaggaagattcatctaagcaggcagaaacatatttaaccagtcatcatcagatttgaaatatttaaagtggat

SEQ ID NO: 44842 - DNA, 76 bp, Homo sapiens
gtccgaagagccaaaaatgaccaagtccctggtattagaaaagttctacagagacacagattatcaggaaattgcc

SEQ ID NO: 44843 - DNA, 88 bp, Homo sapiens
cttagcgcactggaggagcggcgggcttcagacagggcctgccttaagtgtgaaagtaatgactgatgaaagtggaaaatccaaagga

SEQ ID NO: 44844 - DNA, 75 bp, Homo sapiens
tttctctattaaaggaacttcgtcatccaaatatagtcaggtatctgtaatgcgtgatgaggataaattactgag

SEQ ID NO: 44845 - DNA, 82 bp, Homo sapiens
cgagcactaatatttaagaaagaagatgttaactttcagatctcataggaaatgttcaacaattctgtgaaaggtcacagga

SEQ ID NO: 44846 - DNA, 153 bp, Homo sapiens
aaaaaaattattagaaattccgcgggcggtgtagaggcggcggacgggccggagggaggatgttaaagccccgcgattgcagagggaatggcatacatcgagcggaagaactacattcaccgggacctgcgagcagctaatgttctggtctcc

SEQ ID NO: 44847 - DNA, 99 bp, Homo sapiens
cacggcagaagtgagctggaaggtcttggagcgaagagctcggaccaagcgctcagagtatctttagaagatctgtataatggcaagacaaccaaacta

SEQ ID NO: 44848 - DNA, 75 bp, Homo sapiens
ctgctgcccatggtggccccagatgcccaggagagataatagaagctcgggttcatgacgctctcgatattcctg

SEQ ID NO: 44849 - DNA, 50 bp, Homo sapiens
ctcccaaagcactaggattacagaaaaatgtgatgagccacttgtctctg

SEQ ID NO: 44850 - DNA, 100 bp, Homo sapiens
ttggaggagctggtcttcggcgacgtcgagaacgacgaggacgcgttgctgcggcgtctgcgaggcccgaggactctttggtgggaagcctaccaagcaa

SEQ ID NO: 44851 - DNA, 100 bp, Homo sapiens
gcccgggcgtccgctcctcagcggatgtggcagccccgagccatggctctcgccgtccgagtcgtttattgtcattggcagaggaggtgaacaaattaac

SEQ ID NO: 44852 - DNA, 74 bp, Homo sapiens
gaagcgactgagtccgcgatggagcaaattcaacacccaacagcttccttaatagcaaaggtagcaacagccca

SEQ ID NO: 44853 - DNA, 74 bp, Homo sapiens
gcagaatgatgtcgtccgaattctcccctgcaactatgctaagaaggaatctgatcttaatggcgcccagatca

SEQ ID NO: 44854 - DNA, 100 bp, Homo sapiens
gaaaaagctgccctgagacggtgtcccgccgaaaggggctttgttatgcacctaaagccatattggaagctccagaagaaagagcaccccccggaagtca

SEQ ID NO: 44855 - DNA, 75 bp, Homo sapiens
ggcggcgcgcgagctggagcactcgcttgagaagctgatgtctcctcgacttccaactggaaccttgaaccccca

SEQ ID NO: 44856 - DNA, 76 bp, Homo sapiens
agcgtttccagtcaccgcttctttggacccaatgctgaaataagggtctccttggcagctgtattctggagtctgg

SEQ ID NO: 44857 - DNA, 50 bp, Homo sapiens
gaacaggagacccccaaaaggggctacatccagaagatcaagtcgggaga

SEQ ID NO: 44858 - DNA, 100 bp, Homo sapiens
tcgaaggtttcctttaagatcacgctgacgtcggacccacggctgccgtacaaagtgtgctgtgattctcttgggaagaaccaatatgtttcgctttaac

SEQ ID NO: 44859 - DNA, 129 bp, Homo sapiens
cgctgtgtggttgcaacggagataaattcccggaaccgcgattcggcgtgtcagattctggaacttttcaaagcctgactctcttcttgaaacagtggagcatcatacagagtttacttgtggtttaga

SEQ ID NO: 44860 - DNA, 83 bp, Homo sapiens
tgattaacaccttaataaccagcggagctgacacagccaagaacatcatcttcagcgggctatttcagcacagcaggtgtatg

SEQ ID NO: 44861 - DNA, 100 bp, Homo sapiens
ttcaaagaatgactagcattcctaaggaagaactaccacactgtcctgcaggacagtcattttgtttactcattcagccctgttgcaggtcccaataaac

SEQ ID NO: 44862 - DNA, 75 bp, Homo sapiens
gccgcctttccagcatgcaggggctgctcagggtttggacagaggagccaaaggccaaatttccactttcagcag

SEQ ID NO: 44863 - DNA, 50 bp, Homo sapiens
gaccattttcttcagcctccttgtcctagtatgaatgacccatattaaat

SEQ ID NO: 44864 - DNA, 75 bp, Homo sapiens
ccgactcggtgattgaggacaagaccatcgagctcatgacccatcctcatgccaacaaactacccttgaaggatt

SEQ ID NO: 44865 - DNA, 100 bp, Homo sapiens
gcttctcgctggccatgcactggcaactgcagcccgaggacaagcggctgttggtacaggtcttgggcctacactggagttttatgcgcttgtatctcag

SEQ ID NO: 44866 - DNA, 96 bp, Homo sapiens
ttcacctccgcgctcttcttcgccagcaccgtgctctccaccacagctggtgcaactattatctcagccactggagcctctgcactgccactctgc

SEQ ID NO: 44867 - DNA, 75 bp, Homo sapiens
ccaggatgctatagcattgtcagtgccagaagcggactcctagaagaggggagcagcaaggatggaatgacagcc

SEQ ID NO: 44868 - DNA, 75 bp, Homo sapiens
agacagtggccggcagggcagccgggggacagctgtagtgaagattgtggtggtgccatgcagcaagaatcagag

SEQ ID NO: 44869 - DNA, 75 bp, Homo sapiens
attttgtcgaagaaactgtggaagtcattaggaacaatggtgcaaggtgcttaatttacccatttctgatgcgag

SEQ ID NO: 44870 - DNA, 96 bp, Homo sapiens
aatgggcgtgagaatgtggggatttataacctctccaaaggagtcaaccgattctgcctgtccaagcctgaatttcgctaaggagtttgtgatcag

SEQ ID NO: 44871 - DNA, 98 bp, Homo sapiens
cagcggagatgcctctttttgccaccaatcccttcgatcaggatgttgacatttaaagttctacaatgaactcactggagatgcaaagaaaagtgtgg

SEQ ID NO: 44872 - DNA, 100 bp, Homo sapiens
tgggaagaagcatatacttttgaaggtgcaagatactatataaatgagaaagatcagtctaaagaaaaggagaagaaagtgaaaaaaacaattccttcct

SEQ ID NO: 44873 - DNA, 80 bp, Homo sapiens
ttcccacgctgctactgcctgggggctgaggatgacaaaaaagccttcataggtgtgggcccatcgctggatggatctgt

SEQ ID NO: 44874 - DNA, 74 bp, Homo sapiens
tttctgcatttgacagataaagatggtgaacaacctcaaatactgctgtcacccacaaaagctgtatataatgc

SEQ ID NO: 44875 - DNA, 100 bp, Homo sapiens
atgttaactgtggggtgctgaatggcaatggcacaaagttctctcgatcagggcatacatctttcttcgacaaagggctttcagataaacttctgtgaaa

SEQ ID NO: 44876 - DNA, 98 bp, Homo sapiens
tgaggaaacagactggggcagtggaaaaggtggaagagcagtgccatccattgaatgggttgaacttttcacaggtgctggagaatctggtaaaagca

SEQ ID NO: 44877 - DNA, 75 bp, Homo sapiens
gctttccccgcaagatggacggtttcgccggcagtctcggaatccagacgctctgcagtgtcccatcgtcttatg

SEQ ID NO: 44878 - DNA, 75 bp, Homo sapiens
cagatgtgggacaccaagacgctggggctaagacaaattttgcaggactgtccagaagagcctgaagctattaat

SEQ ID NO: 44879 - DNA, 100 bp, Homo sapiens
gatgtggtggaatatgccaaggaaaaactggagagcttcatcaaaaatagtgatagctttgataagcatcaagcatgatggaaccatgtgtgatacctgc

SEQ ID NO: 44880 - DNA, 83 bp, Homo sapiens
tacagtctccccatttgcagtgcaaaaactttccagtgaatctgcatgtcggttttatagtcagcaaatgaaggggaaacaac

SEQ ID NO: 44881 - DNA, 98 bp, Homo sapiens
gagagaaccaccagcattgccaccaccaccaccaccaccacagagtctgtggaagaggtggttcgagtgttctggacttggtgcctctttctgttata

SEQ ID NO: 44882 - DNA, 88 bp, Homo sapiens
cttcttcccctaccgcctggtggggcttgccgtgggctccagcaggagaagacagacacggtccgctgcatcaagtcctgccgcccca

SEQ ID NO: 44883 - DNA, 79 bp, Homo sapiens
cgcccagccaggagcaccgccgaggactccagcacaccgagggtgcagaggccaagaccgttttgcccaagaaggagaa

SEQ ID NO: 44884 - DNA, 100 bp, Homo sapiens
gcttgcattcagtcgtgatcttttagcaagtcagaatgaagatttgtggaatttctgtggagccacacgacggagagcatgtgtgtcggatatatgtcag

SEQ ID NO: 44885 - DNA, 74 bp, Homo sapiens
aggctctgggcagagtggaccacggggagccccacgaggttaacacagaaatctgcctcctgggccatgccgct

SEQ ID NO: 44886 - DNA, 51 bp, Homo sapiens
cctggacaggctcaaggtgctcatgcaggaactagccagctgtggatggag

SEQ ID NO: 44887 - DNA, 98 bp, Homo sapiens
acatgatcaaagccatcaaccagggcaactatggatggcagtggcagcaccatgatgcaaaccaagaccttctcctcttcctcctcatccaagaagat

SEQ ID NO: 44888 - DNA, 82 bp, Homo sapiens
atattctggtggggagatgaacccaacctagtgggtgtaatacatcatgaactgcagggttcgaaaacatggccaaaagaaa

SEQ ID NO: 44889 - DNA, 50 bp, Homo sapiens
gacaaatcaaattagtggttttggtgtaaattttgataccaccattgccg

SEQ ID NO: 44890 - DNA, 75 bp, Homo sapiens
accatgtactcgggagccggccccgaagagaagctgaatttggacgacagccagtgggaggacatccacgttgtc

SEQ ID NO: 44891 - DNA, 88 bp, Homo sapiens
tcacattcaagctgataggctgcgctaccggaatgtcatccagcgagtgattagtgccctgcaggagtcattaaatcaaaacttcatg

SEQ ID NO: 44892 - DNA, 50 bp, Homo sapiens
cgtggaggcagaggtggcatggggccagtccctgagacgaataggacctt

SEQ ID NO: 44893 - DNA, 75 bp, Homo sapiens
gacagtgacgacaaaacaccagatgatgaccctgagcaaggaaaatctgaggacagcaaatcacccaccttgagg

SEQ ID NO: 44894 - DNA, 83 bp, Homo sapiens
caagttcgaggatccgggcgtggagccgagtgaggccgcagcccagcgggcctcgggcgcattccacgcctacgggaaggcag

SEQ ID NO: 44895 - DNA, 82 bp, Homo sapiens
cttaagtcagcccacgggatttttagcccagcccatgaaggaactgtggctgcaccatctgtcttcatcttcccgccatctg

SEQ ID NO: 44896 - DNA, 98 bp, Homo sapiens
ccattagacacatcagtggagtccatgctacctgattgcccccgggtctcagcagattctggctgtgactcagtcactgacactgagcctgaggacga

SEQ ID NO: 44897 - DNA, 82 bp, Homo sapiens
gcgacctacctgaggatgatcaagcggagttcgatgcggttgcctgtggctggagaaaggaatgtgctcatcaccagtgccc

SEQ ID NO: 44898 - DNA, 75 bp, Homo sapiens
gctgcatcatgcggcagtgcatcgcggcagcctggcatcctcgctacaacctcattgttgtgggccgatacccag

SEQ ID NO: 44899 - DNA, 75 bp, Homo sapiens
acatcaaagaggtctagcaaagggagtggagcttggtttcgggatctcggtgctgcagacggcgagacctcctgc

SEQ ID NO: 44900 - DNA, 101 bp, Homo sapiens
cgggactgccacgtccaagcaaaccgggaaaggagaggatcccggagccgggcctgacacatttagggaagggcacccttaccctctgcccctaccacagc

SEQ ID NO: 44901 - DNA, 98 bp, Homo sapiens
cagtgaccctgagcgcaccctggaccccaactcagccttcctgcataccctggaccagcagaaacctagagtgtattattccacagtaatggaacagc

SEQ ID NO: 44902 - DNA, 75 bp, Homo sapiens
aggcggaggaactgagacgtttcgaattccagattgggaaaatgaggtacgttagtgttcgcgattttaaaggca

SEQ ID NO: 44903 - DNA, 100 bp, Homo sapiens
agccggctgggctcggtattccccttcctgctagtcctggtggatctgcagtacgaagggtaaaatggtgcagaaggggacttacactgagttcctaaaa

SEQ ID NO: 44904 - DNA, 82 bp, Homo sapiens
ctgtcgctcttgatactcggctcagcacttttctgtagaaggtcagttggaattcagggcattgctatttattcctcgtcgg

SEQ ID NO: 44905 - DNA, 75 bp, Homo sapiens
gcgacgcctgcaaggactggttccacggcaggtggacacctgcgcaggtgtgtgccctccggcccctgaagcatg

SEQ ID NO: 44906 - DNA, 100 bp, Homo sapiens
cgggacctcctggaagccaaaaatgagataattgacgaccttgccaacctagtggagaacacagatgaaaaacttcgcaatgaaaccaggcgggtaaaca

SEQ ID NO: 44907 - DNA, 75 bp, Homo sapiens
ctacgaacaatggggaaagcttacagactgtgtggcaaatcctgatcctaactgttgtcttggagtatttgggct

SEQ ID NO: 44908 - DNA, 90 bp, Homo sapiens
aaaattatcatctggaagtaaaagatgttctgaagactttagtcctctctcacctgatgtgcctatgcttcaagagatagaggaattcaa

SEQ ID NO: 44909 - DNA, 90 bp, Homo sapiens
ctcatcacagaggcacacacgggcgagctgaggatcagtgtcctgcctgcctacctgtcctatgatgccccatggcctgtcaggaagatc

SEQ ID NO: 44910 - DNA, 82 bp, Homo sapiens
gtttgatgaaggtggaggcagcgcggctctcaggttttaaaatcaaagatgggaaaatcggagaaaattgcccttccccatg

SEQ ID NO: 44911 - DNA, 74 bp, Homo sapiens
gatgttctagaggcatggttgaaattgaattgtttttggattcaaagcataaaaaccattacaagatatacaat

SEQ ID NO: 44912 - DNA, 100 bp, Homo sapiens
tggatctcagcaatggggataccattctggaagacttgcccatccaatctgatgaccactgagcagtttacaggagatcatactcagcactttttggatg

SEQ ID NO: 44913 - DNA, 100 bp, Homo sapiens
ttgacttggaagcaatgtttgaacaaactcgaagaacagctgtggaaagaagttgcaaaacactgggaagatgataagatcagatgggcgtctagatggg

SEQ ID NO: 44914 - DNA, 75 bp, Homo sapiens
ggcatcacaagatggcctaccctcctgtacttgttccaactcaactacaggccaaatttgagcaccttaagagac

SEQ ID NO: 44915 - DNA, 98 bp, Homo sapiens
tgggaggccggccggtgccagcacctttcggcttctgagacggcggcagcagcggcattcagatacactactgctgcagctcacaaacacctctgcat

SEQ ID NO: 44916 - DNA, 80 bp, Homo sapiens
tcgtccccggcgagcagggagcggagtaccagcacttcatccagcagtgcacaggtctcctctgagcctccggcctccat

SEQ ID NO: 44917 - DNA, 100 bp, Homo sapiens
tgaagcagaagtacccccaccacgcctctgcaatcatgggtcaccaagagaggctgagagaccagataagtaatggaacatcatctgtgatcgtctccag

SEQ ID NO: 44918 - DNA, 100 bp, Homo sapiens
tctcagaagacagagggttttcttttgagaggtcctgctgtactagccaccaaagcagctgctggtactaagaaatatgatcttagtaaatggaaatatg

SEQ ID NO: 44919 - DNA, 50 bp, Homo sapiens
atgtccggcaagatcgagaaagcaggtcgcaatggaagaagagatcgccg

SEQ ID NO: 44920 - DNA, 99 bp, Homo sapiens
tggggtccagccgtccccagaacgcagatcagaggtagtcggacctttcccgctggcgcgcagcctcagctagaaaggatgatatgatgaacctagcct

SEQ ID NO: 44921 - DNA, 78 bp, Homo sapiens
acaggtgctgtctctagcatcacctctcagcacgattttcccgagagttcacaggagcatcagatccatgctgctgct

SEQ ID NO: 44922 - DNA, 72 bp, Homo sapiens
tgggcgagggagtcagcgaccgcaaggctttcagtccagtgtaaagctgttggagcgcgggagcaaaggtaa

SEQ ID NO: 44923 - DNA, 100 bp, Homo sapiens
cccggctctcggtccgggacgtgcgcttccccacgtcgcttgggggccacggcgcggacgccatggctactgcagcactggggtgtcagttgttggtccg

SEQ ID NO: 44924 - DNA, 100 bp, Homo sapiens
gccccgctccgcttcgaatggacaagttggatggcttgaggactggtactaaaaggaaacgtgactgggaggccattgccagcagaatggaggattatct

SEQ ID NO: 44925 - DNA, 100 bp, Homo sapiens
aaagtattctgtctcatgcatctaatactttacttgtgaatgaagattcattatgaggaaccaacgtccaagaggcccagaagatactcaacaacagcgg

SEQ ID NO: 44926 - DNA, 50 bp, Homo sapiens
agagctccgtgcgggtggctgtcagccacagcatgttccgaagagatgat

SEQ ID NO: 44927 - DNA, 83 bp, Homo sapiens
gatggtccttaaaaccgaagaggaggacggggtgagcccctccagactccgaataggagatcaagagtttgattcattgcctg

SEQ ID NO: 44928 - DNA, 75 bp, Homo sapiens
tgcagcatttgccaaggagacatccctcttaggcaattaagttggaatatgcaaggttggttaagttggcccaag

SEQ ID NO: 44929 - DNA, 74 bp, Homo sapiens
aaaaaaaaattcatctgggcggtatctggaacttgatgttttactgtgcctggctaactatagtcgagggggtg

SEQ ID NO: 44930 - DNA, 74 bp, Homo sapiens
cgcaagccgtccccggccacgcgggacgggttaatttggagtggcccctggagtcagtttcctacaccatccga

SEQ ID NO: 44931 - DNA, 80 bp, Homo sapiens
gccgctcgcggagggagaggctgcagagcgagggcaggaggatgaccgagtgggagacagcagcaccagcggtggcagag

SEQ ID NO: 44932 - DNA, 81 bp, Homo sapiens
gttgaggcatctggacaccacacacatcatcagtctgctattgacctgaaaagtggttctggaaaagtgtaccaaggccct

SEQ ID NO: 44933 - DNA, 50 bp, Homo sapiens
ggcattcggggaatctgcagggcagaatctacctgttactcgtattttgg

SEQ ID NO: 44934 - DNA, 75 bp, Homo sapiens
cgagagcactgacacggcctgcatcgggcccacgctcaggtactttagattgattgccgagcggggcagttttgt

SEQ ID NO: 44935 - DNA, 100 bp, Homo sapiens
gtgagaagcaagaaggccctggacacagcaatatctctgggctttcacagaagaagctcattcacacagaagacccatttaatgatgaacatcaggagag

SEQ ID NO: 44936 - DNA, 100 bp, Homo sapiens
aagaaatgcttctttgtgaaattttttggaacagaagatcaggacatgggcggctttgccatctggtgcaagaaggccaaggccccgaggccagtgccca

SEQ ID NO: 44937 - DNA, 100 bp, Homo sapiens
aactgtagccactgctttagcatttatcacttccttccttactttgtcttggtatactacatggcaaaatgggaaagaagccgctggagttctggagtgg

SEQ ID NO: 44938 - DNA, 117 bp, Homo sapiens
tttaaagatagttctcagaaagacctgctgaattttactggcacaattcctgtgatgtatcaggatagctaactcatccagaatttgagtataagtggatcttgaggtcctcagagc

SEQ ID NO: 44939 - DNA, 96 bp, Homo sapiens
acctcgtgaagatccgcttcgccgagtctgatcactgcgcatgagcagttcaaggccacgctgcccgaggcggacggagagcggcagtccatcatg

SEQ ID NO: 44940 - DNA, 75 bp, Homo sapiens
ggaaaggccaacatcagcagaactattaagggatgagctttctgatgttagccaaggcggatctaaagctaccac

SEQ ID NO: 44941 - DNA, 83 bp, Homo sapiens
gtctgaactgaagaagcttgggctcacttccacaaataggcagtaatgaaccaggaaaaaagaagcagcatatctgtcatatt

SEQ ID NO: 44942 - DNA, 50 bp, Homo sapiens
cagagcaagttttctgaaacgtatccagagacaatggccccgatgggatg

SEQ ID NO: 44943 - DNA, 100 bp, Homo sapiens
ggccgccatcaaccgccagatcaacctggagctctacgcctcctacgtttacctgtccatgaaaccgaaacttcattgccccttcaatgtgggaatccag

SEQ ID NO: 44944 - DNA, 90 bp, Homo sapiens
ggtaacaccgttcacagagctagccggacgtcctccgactcaagccaccagctgaacaggccaaagccagactacagctggttcttgaag

SEQ ID NO: 44945 - DNA, 50 bp, Homo sapiens
attatgctgtcacagcttcctcaagactggagttgatcaaggatgatgaa

SEQ ID NO: 44946 - DNA, 51 bp, Homo sapiens
aaagtatttgatggagttgatgcaaggatgcctggtgtgcaggagtatata

SEQ ID NO: 44947 - DNA, 90 bp, Homo sapiens
cctcaatttgctggatttaagcactgctgcactttatgagttagagatgtttatgattacttccgagctgtcctgcagcgtgatgaaaga

SEQ ID NO: 44948 - DNA, 75 bp, Homo sapiens
gcacttgaatttggacagtgaaaaggcccttaaaaagaaaaattggaagctccaccacccaccccaggacagctg

SEQ ID NO: 44949 - DNA, 87 bp, Homo sapiens
gaccctggagcctcagttggaagcagccgatccagcctgcggagcctgtggggcaggcgggcgctaatattgacacctgctcagaag

SEQ ID NO: 44950 - DNA, 83 bp, Homo sapiens
tactgtggggccgcggccggaccgagcgcctcgacctcggtctgagcagccattgtttgatgtcctgtgactgagaaaccagg

SEQ ID NO: 44951 - DNA, 74 bp, Homo sapiens
taccagcgtgtgtaccagtccctctgccccacatcctgggtattcgtggacaccgtagggatgccagagacata

SEQ ID NO: 44952 - DNA, 98 bp, Homo sapiens
agattcactgagttcaaagccttttatggagacacattagttacaggaattcgaatttagagtttaatttctcagagcattctctccaggaagaattt

SEQ ID NO: 44953 - DNA, 76 bp, Homo sapiens
ggatctcaggtcctcgggggcggcggccacgccaaggacgggagaggccccctttcatccctgaaggagtggtggc

SEQ ID NO: 44954 - DNA, 92 bp, Homo sapiens
cgattaacaggtggtccgcaggcctgaccagcagaaacatggaagttttctttccgaagttcaagctagatcagaagtatgagatgcatgag

SEQ ID NO: 44955 - DNA, 100 bp, Homo sapiens
agagtgaaagccagaatggcatccagagagaggctctttgaactttggatgctttattgtacaaagtaaaataaaacagggtctgttacctagcttggaa

SEQ ID NO: 44956 - DNA, 100 bp, Homo sapiens
ggatcacggatgtaggaagtggggaaagctctggcaatttaaatgacccaaataaggaggcactggctaagacggaagtgtctctcaccctgaccaacaa

SEQ ID NO: 44957 - DNA, 100 bp, Homo sapiens
gatgatcgagaggatctggtgtaccaggcgaagctggccgagcaggctgagcgatacgacgaaaaggattatagcagtctttgtgacaagcaaccgatag

SEQ ID NO: 44958 - DNA, 83 bp, Homo sapiens
aggcccttgttggggcacaaggtggcaggaacatcatttacagcgagcaatttcagcacagcaagtgtttagagaaaaaaaag

SEQ ID NO: 44959 - DNA, 74 bp, Homo sapiens
ggagtccgaccaggcatgcctcctcagcctcaggggcctgcagtttctaagcatgaattgaggaacagaagaag

SEQ ID NO: 44960 - DNA, 98 bp, Homo sapiens
cggcttcctagtgagtcggcggctgatttagaaggaggttcaggctacggtgagccgaaggaccctgatgctcccataagacagaaaatgccccttga

SEQ ID NO: 44961 - DNA, 95 bp, Homo sapiens
gccctgggccagcgcaccatctgccactacatcgtggaggccggggcctcgctcatgaagacagaccagcagcttcagaggatgattccgaagaa

SEQ ID NO: 44962 - DNA, 99 bp, Homo sapiens
tggaatatgccaaggaaaaactggagagcttcatcaaaaatagtgatagctttgataatgggccggtcaggctggggcctgggtcagagcggtgctgcc

SEQ ID NO: 44963 - DNA, 75 bp, Homo sapiens
aggacgatactctgaccgttttagtagtcgcagacctcgaaatgatagacgatgtgttcagagcaacattgtttt

SEQ ID NO: 44964 - DNA, 75 bp, Homo sapiens
agccctttctgaggcagatacccaggaactaacccaggtgtatactcttgatgtaccagatgcattctattactg

SEQ ID NO: 44965 - DNA, 74 bp, Homo sapiens
ctgatgaagttcgagcactaatatttaagaaagaagatgttaactttcagctttcttcgggaagtatcttaatg

SEQ ID NO: 44966 - DNA, 98 bp, Homo sapiens
cccagcaccccatacggaagggtctgcatcacaagatcctcaccaagacaggggagctgcccaggcagcccaccacccaccctgaggagacagaggag

SEQ ID NO: 44967 - DNA, 108 bp, Homo sapiens
ccagaccctggagcctcagttggaagcagccgatccagcctgcggagcctgtggggcagtgacttttttgaacgaaccattctgtgcaacagccttgtgtggagttgt

SEQ ID NO: 44968 - DNA, 83 bp, Homo sapiens
ctgaaggcctgcatggattccatgttcatgagtttggagataatacagcagtaaatacaatcaagtggcatcttaaatttttg

SEQ ID NO: 44969 - DNA, 75 bp, Homo sapiens
tccaacacatttctttacacaggtagttgtttatgaaaagcctttctttgaaggaaaatgtgtggaactagaaac

SEQ ID NO: 44970 - DNA, 100 bp, Homo sapiens
ggagtgatgaatcagcccatggcttacgctgcacttccatcccacggtcaggcgggtgccacgtctatgtgggcttcgtgctgtgggctgctgaatgaag

SEQ ID NO: 44971 - DNA, 101 bp, Homo sapiens
aaacttaagagaaaacaaatgataggacacagggtggtggaagatctcaaagagaatgggtaccacagaccatgtcatcgtcctggcgtccacgaaccgag

SEQ ID NO: 44972 - DNA, 76 bp, Homo sapiens
taagaacaccatggagaccatagactggaagggttatgtggtccgaatcagtggtgggaacgacaaacaaggtttc

SEQ ID NO: 44973 - DNA, 74 bp, Homo sapiens
tggcagccccgctctctgcagtaaatcgggtccttcctcgctccaacatggtctacaatctctatgagtattca

SEQ ID NO: 44974 - DNA, 100 bp, Homo sapiens
agacagacagcatactgaagtggtttgcaacatccttcttctggataacactgtacaagctttcaaagtcaatatccagaagtggggcaacattgagtgg

SEQ ID NO: 44975 - DNA, 95 bp, Homo sapiens
actggcagctgtccagaagtttactattttgatagatgttactttgctgaaaatagaactggaggaagagctgcgcaaaggtggagaccccaaat

SEQ ID NO: 44976 - DNA, 87 bp, Homo sapiens
accctctcctttccctttgagaccgtgaagagaaagatgcagaaaagtcctccatacattttctccccaattccattccttgggcat

SEQ ID NO: 44977 - DNA, 90 bp, Homo sapiens
tcttgaagtttgtggatgaaaattgggaaggttccctcaagtccaaggtacatggactatatcgcacaacaggtgctagttttgagaagg

SEQ ID NO: 44978 - DNA, 106 bp, Homo sapiens
atactttcatttgaaggcacttccccggcttttgaagttgaagtggttgaagccattgatcgcagtgccttcatcaactctgacctgccaatcatcatatcgattg

SEQ ID NO: 44979 - DNA, 75 bp, Homo sapiens
cctcgacgtcttgcctgtgtcccacttgttcgcggcctatagtcctggaaggtgggaatgatctggagaccagga

SEQ ID NO: 44980 - DNA, 82 bp, Homo sapiens
gagactgctgagcccgtccgtccgccgccaccacccactccggacacagtgcctccggagccagcgtggtggccatagacaa

SEQ ID NO: 44981 - DNA, 51 bp, Homo sapiens
gcactgttgctggaatatttccggtcacacatcccgggtcctgagtctgac

SEQ ID NO: 44982 - DNA, 105 bp, Homo sapiens
gtgttgtcgtggccggagcggcccgcgcctgggctgccggcacttcgcggcaggttttaaaatcaaagatgggaaaatcggagaaaattgcccttccccatggcc

SEQ ID NO: 44983 - DNA, 100 bp, Homo sapiens
tggagatgggcagacggattcatttagagctgcggaacaggacgccctctgatggggagctgatcaccttctattactattggaagaagacccccgaagc

SEQ ID NO: 44984 - DNA, 74 bp, Homo sapiens
ttcataatgaataacacaggagaatggataaggcaaaacggaggctggctaaggagagagtgttgaaaaaagga

SEQ ID NO: 44985 - DNA, 98 bp, Homo sapiens
taaatggtaaacccatgctaggagttatacataagccattttccgaatatacaggttactataacaacagtaccaaggtggctgtgaaaaccctgaag

SEQ ID NO: 44986 - DNA, 100 bp, Homo sapiens
cgtgaaccactgcacccggcgaggtagtagattccatggatgcattagataaagttgtccaggaaagagaagatgccctaaggcttcttcagactggtca

SEQ ID NO: 44987 - DNA, 100 bp, Homo sapiens
ctgagtcactgcctgcgcagctccggccgcctggctccccatactagtcgccgcccgccggggtcagcttggtcagcgtccattccagccccaacgacca

SEQ ID NO: 44988 - DNA, 102 bp, Homo sapiens
tttcttacctactgaagaaggaagcattgaaagttccttatttattaatacctcttcgtatggagtcctttcctatcatttgtctgagggaagtcaaaagca

SEQ ID NO: 44989 - DNA, 127 bp, Homo sapiens
gaaagtggaggtgagggccgcccgccctagaggtgcccgtccgagaggcagctaaaagaactgtacaccctcctgaatgagaactatgtggaagatgatgacaacatgttccgatttgattattccc

SEQ ID NO: 44990 - DNA, 100 bp, Homo sapiens
gcgagctgcatcgcgcgcccgaagggcaactgcctgccttcaacgtttgatctgtggatgaaatgaatcatgattttcaagctcttgcattagaatctcg

SEQ ID NO: 44991 - DNA, 100 bp, Homo sapiens
ccatgaagacttgaacttaatacagcaagaaagaccatcaagtttaccagacaatcatatcctgattcagcccttcctccacaaaggcaagacagatttt

SEQ ID NO: 44992 - DNA, 51 bp, Homo sapiens
ctgacttccagttccagcgtacgagttcccagaaatgaatgctatgatcat

SEQ ID NO: 44993 - DNA, 75 bp, Homo sapiens
tggtgaccctgccgctggcgagcgccaccgcatggagttgcatgctgagaatttgaaaaatgaagatgatgtaga

SEQ ID NO: 44994 - DNA, 100 bp, Homo sapiens
tgggggcggtttccagggtccggagtgtcccctgaccccgggaaagctggactggtgaattttcagctcgtttccttttgaagctgcccgtagatttcag

SEQ ID NO: 44995 - DNA, 90 bp, Homo sapiens
agctatctcaggagagaatgccggccttgtcaggcacatctcctcctttgtggttccacttcccctgtgcagatcgtgggatgaaacgca

SEQ ID NO: 44996 - DNA, 90 bp, Homo sapiens
aacaaccaggagctccgcacgcaggcagagatcctacaagaatccaggatgatgatcccagattgccagcgcaggttggaagccgcatat

SEQ ID NO: 44997 - DNA, 89 bp, Homo sapiens
caagcttagagcgtctggccaagaatcagaggaagtgggaactgcaagcacatgttgaccagataactgaaatggcagcagtaatgagg

SEQ ID NO: 44998 - DNA, 75 bp, Homo sapiens
gggacagtttgtgccagctctccagagagaaaagcggacaaggcaaaatctcagcaagttcggacctctagtaca

SEQ ID NO: 44999 - DNA, 89 bp, Homo sapiens
ttctttggcaagtggacattttactggctcaacacaacattctgaaattttttggttattgtaatgatgttgatcgggagttgagaaaa

SEQ ID NO: 45000 - DNA, 82 bp, Homo sapiens
ttgcagagccatacaaagttaggctacgggcgcacctacttcagctgcacgtctgcccacaccagcactggcgacggcacgg

SEQ ID NO: 45001 - DNA, 51 bp, Homo sapiens
gagcagccggggtcggagcggggggaaatttgcagtggtgagaaaatgtat

SEQ ID NO: 45002 - DNA, 100 bp, Homo sapiens
gaatcaagctgcaaagtaactagagatggggtctcattctgtcacctaggctggagtgcagtgtgacttgatcatagctctctgcagcatcaaattcttg

SEQ ID NO: 45003 - DNA, 100 bp, Homo sapiens
gttcccaacatgatgattgatgcagctaagctgctttctgctctttgtattctaccgcagccagaggacatgatgtaagagcacacctaaaatgacaaag

SEQ ID NO: 45004 - DNA, 78 bp, Homo sapiens
caggtgacagtctgcatgtgcagttttcagttaaaagaagatggatgcacagtgttcagccaaggtcaatgcaaggaa

SEQ ID NO: 45005 - DNA, 100 bp, Homo sapiens
ccagagccacttctcaccgagatgattcatgaaggtgaagtgatgaacctcctgatgttcctgtcgacgtgggatgggaaggtcccacagccggccatcc

SEQ ID NO: 45006 - DNA, 75 bp, Homo sapiens
agtggctgcggcgcgggccgagaaggaagtttcagctgtgagttcaacatggaggcaaatcagtgccccctggtt

SEQ ID NO: 45007 - DNA, 101 bp, Homo sapiens
gaaaatgaagacgacattcagtttgtcagtgtacaggtttgcagattccgccagcagcacagcaagctctacagatgagtggctctttggcatttggtgct

SEQ ID NO: 45008 - DNA, 100 bp, Homo sapiens
tcaccgccgcagaccccttcaagttctagtcatgctgctggagccagttctgcttctcggcaaggagcgatttgctggtgtagacatccgtgtccgtgta

SEQ ID NO: 45009 - DNA, 50 bp, Homo sapiens
cggggtcctgaaccgcatcaaggcaatggacctcatcatgaccgttgctg

SEQ ID NO: 45010 - DNA, 100 bp, Homo sapiens
gggccttcgagagctaccgcgccagacagggactttgaacatgtcggggatcgccctcagcagactcgcccaggagaggaaagcatggaggaaagaccac

SEQ ID NO: 45011 - DNA, 74 bp, Homo sapiens
ggacgatgacgaggaggaaaaggcccctgtgacctaattcagcttagagaactatcaacacaggacaatgcaag

SEQ ID NO: 45012 - DNA, 74 bp, Homo sapiens
gtccggcggttccttagtgaggaggggggacatgtggcggtgctgatccgcagtggccgggtgcccattgtgtc

SEQ ID NO: 45013 - DNA, 100 bp, Homo sapiens
ctgcggaagtgcagctgcctcagttcttagcgcagggtcaagcctttggggctgtgaggggtgccactcagtgtgttcaaggagaaggattgttgtaatg

SEQ ID NO: 45014 - DNA, 100 bp, Homo sapiens
agaagatcggcttgaaattaccaactgctttcctttccctcagcacacagaggatgatgctgactttgatgaagggccacccagtgctcctgcagaagat

SEQ ID NO: 45015 - DNA, 74 bp, Homo sapiens
tcatttgttgatcccggcaccgccagaacccttaggagaaatcttgagagtggacagcaattgtgaagatcgcc

SEQ ID NO: 45016 - DNA, 48 bp, Homo sapiens
ccaagaagccagtcaagcggccagaggagcccaaggtgggcatcaaga

SEQ ID NO: 45017 - DNA, 83 bp, Homo sapiens
ccgacctcgggcggccccggcccgcgcccttgcccctcggccgggcggacggacctatatccagactttgcctgacactgcag

SEQ ID NO: 45018 - DNA, 100 bp, Homo sapiens
ggaagcaggactgcgccgcgtcttcctcaaggtcgcctgcgaggccgctggccaggcctgagcctctgccaccatggccattgtgcagactctgccagtg

SEQ ID NO: 45019 - DNA, 51 bp, Homo sapiens
tgtctggcatggagaccagatggcaaacgaattggtccagatggtcatatc

SEQ ID NO: 45020 - DNA, 90 bp, Homo sapiens
gccacttcgacatcgagatcaaccgggagccggccatccagtccaatggatcagatgggcaagatgagacctcagccatatggcgggact

SEQ ID NO: 45021 - DNA, 50 bp, Homo sapiens
aggggattttgtcagcttgtcgtcaagttaattggccttggtcctcacag

SEQ ID NO: 45022 - DNA, 100 bp, Homo sapiens
ctgcgggatggccataacctgatctctctgttggaggtcctctcaggcatcaaactggtctgcgcaggcatggcactaagtgtcccatggcacatttggc

SEQ ID NO: 45023 - DNA, 101 bp, Homo sapiens
aacggagtgtgcgacggattgggaggttttgacctgtagcagagaaccaattctggagaacagcctcacttctttgattgaatacttacataatgcattgg

SEQ ID NO: 45024 - DNA, 75 bp, Homo sapiens
accatgatgtgatgctggagaccttgacacttatatcctccctggctgcatcttcctcccgtgaggctggccgag

SEQ ID NO: 45025 - DNA, 51 bp, Homo sapiens
aacacagggatctgaccgccctatgcaagatttaccggaacattccaggat

SEQ ID NO: 45026 - DNA, 90 bp, Homo sapiens
catggccgatggggttcctggtgtgcagaacattctcaaaattggcttcctgaatgacaagatctcagtgaatatcttccggactctgcc

SEQ ID NO: 45027 - DNA, 100 bp, Homo sapiens
ctccggttggggctgctgtttctcttcgccgacgaaagtgaagtcactgcttttgctgtcttggatcaagaccagaaagaaattattgataccaatggag

SEQ ID NO: 45028 - DNA, 98 bp, Homo sapiens
gataaaatcttttgtgaaagtgtataactacaatcacctaatgcccacaaggaagataaggctttcaagcagaaacaaaaagaggagcagaagaaact

SEQ ID NO: 45029 - DNA, 100 bp, Homo sapiens
cttgtcctcccctttcatccctatgtggaaaacggtgctgggactctggtgcccccaaccctgggcatcctcaggctttgaggagaatacacaggatttg

SEQ ID NO: 45030 - DNA, 75 bp, Homo sapiens
ggagccctcctggctgggggcaaggtgccatggatgtagctttgggatcaggtgccactggggtctttaccaatt

SEQ ID NO: 45031 - DNA, 90 bp, Homo sapiens
ccggaggattaccatcaccggaactttcctgctctgggaccctaccaaggtgcccccacgactgcaggctgtgactgatgaccacatccg

SEQ ID NO: 45032 - DNA, 74 bp, Homo sapiens
tataaagttatccaggagccacaaagtgaggctttggtgaagcacgtgcagtctaaaggatacccaaatgaacg

SEQ ID NO: 45033 - DNA, 82 bp, Homo sapiens
agaaacttggcttgttcagaagatactgtgcataagacatgagagtggagagatctacagaccaagtaatcaagccagtcaa

SEQ ID NO: 45034 - DNA, 75 bp, Homo sapiens
tagcgaaagaaaccctctctgagttcttgggcacgttcatcttgattcctcacttctaaacttctggaacccgcc

SEQ ID NO: 45035 - DNA, 83 bp, Homo sapiens
caaccatctgaacaaaaagctgctttccccccacctgaacagaaaactgcatttgacaagattacaccaccaccttcactgtc

SEQ ID NO: 45036 - DNA, 95 bp, Homo sapiens
aaagtgaagaagaaatttgattggacatttgaacagacagtggaatggggttgcccagactctcaagaaaggagaagtttttttgtatgaaattg

SEQ ID NO: 45037 - DNA, 74 bp, Homo sapiens
ggagattccacccaaatcctcttctccaagaagatgaaaagtctggctactagagaacagaatcagaaaaatgc

SEQ ID NO: 45038 - DNA, 97 bp, Homo sapiens
caaattttcgaattaccgtggttgatgatgcagacactgttgaactctgtggtgcgcttaagcctccagggtcgtatagacctccccctcctatggg

SEQ ID NO: 45039 - DNA, 75 bp, Homo sapiens
catgcaagttggacagacgggaaaaatagtagcaccaatgcttgggatggaagaagtttgagtgacctatcctgt

SEQ ID NO: 45040 - DNA, 100 bp, Homo sapiens
ctatcgctaatgagtatagcgaccgctgcacgcccatcttcatgatacagttaagaggaatcttgacagcgccacttcccctcagaatggcgatcaacag

SEQ ID NO: 45041 - DNA, 50 bp, Homo sapiens
gttggcctttcaggaagagtgcttaaggggcgcattctggggtctctgcg

SEQ ID NO: 45042 - DNA, 100 bp, Homo sapiens
ggcccgtttctacactgtcaccgagccccagcgacacccgaggggctacacagtatataaggtcaccgcccgggtcaactttgtagtgtgccaactcttt

SEQ ID NO: 45043 - DNA, 100 bp, Homo sapiens
gaggcccctcttctcctccaacccagaactggacaatctgttgcctgtgtccctggagtgttacacagtgcctcctgaagacaacctggccctccttcag

SEQ ID NO: 45044 - DNA, 75 bp, Homo sapiens
atcgggctcatctgctggcagtatacaagcgaaggacgggagccgaagctcaagcatgtaatgaatttactacac

SEQ ID NO: 45045 - DNA, 100 bp, Homo sapiens
tgtctttctccgcggcgaaggtgaagagttgtcccagctcggcccgcgggggagccccgggagccgcacggcacggaatgttaacactggtgaattagca

SEQ ID NO: 45046 - DNA, 50 bp, Homo sapiens
ctggctaatggcatttacaggagttgtgcagaagattctgaccttatttg

SEQ ID NO: 45047 - DNA, 76 bp, Homo sapiens
acaccctcagctccacattgagagcaaaatctacaagatgatgcagggaggaggtcacagggattatggacccaga

SEQ ID NO: 45048 - DNA, 74 bp, Homo sapiens
ggggaatttagcatggatcttcgtaccaagagcaccggtgtcgtgaaaactacccctaaaagccaaaatgggaa

SEQ ID NO: 45049 - DNA, 98 bp, Homo sapiens
cgcttctggtggacagattgagcaaaggggcccttccgagatatcaccgaagtattagaacaacgctacaggcctttggagccaacgttgcgggtggc

SEQ ID NO: 45050 - DNA, 98 bp, Homo sapiens
gaaactccaggccatggtgattgagatatcaaacaaaaccagcagcagcagcacctgcatcttgtgaggccctggcctgggccagtgcccaaatccac

SEQ ID NO: 45051 - DNA, 74 bp, Homo sapiens
tgaaagttttgaaattagagacgcagacaggtgtcagctgtgatgcatgtttaaaaggaaattttcgaggtcgc

SEQ ID NO: 45052 - DNA, 75 bp, Homo sapiens
tccagattgaagctattcctttggccttacaagaggacaagaattttgggcagatttgaatgccatgaacgtgta

SEQ ID NO: 45053 - DNA, 98 bp, Homo sapiens
cattcctatctttctcccggaagtcaccattggagctcatcagactgaccgtgtcttacatcagttcagagagacctctggtgccccggggagccccc

SEQ ID NO: 45054 - DNA, 74 bp, Homo sapiens
gaagatgtccgctccatctcatcgtcccgaaggacgaaggggaggaccaggctggcgatgaagatgaagatgat

SEQ ID NO: 45055 - DNA, 100 bp, Homo sapiens
cgcagggcctgcagcgggagctggacggcgagcgcgagcggcgcgagaaagctgacccgggagcctgtggctgagagccctaagaagaagcggtgggagg

SEQ ID NO: 45056 - DNA, 82 bp, Homo sapiens
gtgacctggggatcgctacggaccttaaaatacccgcaacagccccttcgtcccaaagtgttgcggagataggaacatggga

SEQ ID NO: 45057 - DNA, 75 bp, Homo sapiens
attgagtgtaggtataaagaagctcgagcattctttcagaagagcgtgttgtccccattgaagtttgccggtcca

SEQ ID NO: 45058 - DNA, 98 bp, Homo sapiens
tgtctgccatctacctggagaaacttggcaagatgacccagttcctgccgcccaaccttctggccctctttgccccccgtgaccctattccatacctg

SEQ ID NO: 45059 - DNA, 100 bp, Homo sapiens
agaattaaatgccgagaaggccagtacgtttggaaattttagcattcaggtgccaggaatgcagatgggacagccagtgccagaaacaggcccagctata

SEQ ID NO: 45060 - DNA, 98 bp, Homo sapiens
gaatgagtataaaggatgggttttaactacagacccagtctctgccaactgtcaccactgactaaagaagagaaaactgcggcagagcaattcaaatt

SEQ ID NO: 45061 - DNA, 100 bp, Homo sapiens
cggccggctgcggtccgtgcggaggctgagccggccgcgggcgcgaccggaggcaggtcagtcccttgttccaaaaattggaaaatgaccagattgaaag

SEQ ID NO: 45062 - DNA, 101 bp, Homo sapiens
ctgcgcgggacggctctgtaggaaggaacttggttccccctccctcagcttccgccccaaaagtgctgcattcttacaaccctaaaatccatctgctctta

SEQ ID NO: 45063 - DNA, 82 bp, Homo sapiens
tctttcactatcccctccttatccaagccttcaatataccatgaaacacacgatagtaaggagcatttagcaatgatggaaa

SEQ ID NO: 45064 - DNA, 80 bp, Homo sapiens
tagttggcaacctcactgagttagaatcagagtgggctcgggatgagtttgaaggcctcttcaagcagccagcagaaaat

SEQ ID NO: 45065 - DNA, 100 bp, Homo sapiens
aagagccctggaatatgaagcaacatgagatggtggatgaacccacagtggtctcacgtgtgaaacatggctacagattggctgggaagtattgtgtcca

SEQ ID NO: 45066 - DNA, 51 bp, Homo sapiens
cgcacctgccttcgctcccgcaccgagccatccaaaactctgtttgtcaaa

SEQ ID NO: 45067 - DNA, 82 bp, Homo sapiens
ggaaacaaaattcgatttgcaaatcattcagtgaatcccaactgttatgccaaagatcaccgaagtggccttggagtacaac

SEQ ID NO: 45068 - DNA, 75 bp, Homo sapiens
gaagccaagttggaccgttctgatgtgactgagagagaagtgcgtaaattcacagagaaacacgaatgggtaaca

SEQ ID NO: 45069 - DNA, 90 bp, Homo sapiens
ctcccctctgagactggagtgagagggtcttctgcaaagccttctagacaagctcagtggaatctgaagggcccaccccatggaggaatg

SEQ ID NO: 45070 - DNA, 82 bp, Homo sapiens
gatgatgcctgagttcagccctcagcaggtgacctacggctccttcgactacacctcgctgctgtacctctccaactacctg

SEQ ID NO: 45071 - DNA, 100 bp, Homo sapiens
gggctgtgtactagtagggtaggagtttttgttcagggaccagcggaacgaggctttctgtcgttaatagggtggtcgtcggttttctgagggtacttca

SEQ ID NO: 45072 - DNA, 75 bp, Homo sapiens
tcatggggaaaatctccccggtgactttcagcactgtgacttctgccgtgttcaccgtgggagacaacgtggttt

SEQ ID NO: 45073 - DNA, 82 bp, Homo sapiens
tatgcctgccgtgtgaaccatgtgactttgtcacagcccaagatagttaagtgggctctgtcagatggtgaggttggtccct

SEQ ID NO: 45074 - DNA, 101 bp, Homo sapiens
cgctactgcgagaacaagtttaacgacaagcacatcaccactctgcagacaatgcagatcttcgtgaagactctgactggtaagaccatcaccctcgaggt

SEQ ID NO: 45075 - DNA, 100 bp, Homo sapiens
gaaaggaggcatgctggtgaacgcagtcttctaccttggaatagtgaatgagtgacttgtggtctttgggtatcaccgccattgaaatggcagaaggtgc

SEQ ID NO: 45076 - DNA, 75 bp, Homo sapiens
acagcttggtgaagagttactagctcaaggaatggcggcgctagatagtaaggcatcagggaagatgggaatgcg

SEQ ID NO: 45077 - DNA, 88 bp, Homo sapiens
ccgagcggaactggagaaagctgagggtacctgcacatgttgttctttgtcagtgctgtcaagtgtgtgccagggtgatccatggtca

SEQ ID NO: 45078 - DNA, 88 bp, Homo sapiens
aggaaagaaagtattgggaataatgctgccctcccatcctcaagggccagtgggaactctaatattgtattctaccttgtaaatactg

SEQ ID NO: 45079 - DNA, 100 bp, Homo sapiens
taagactccaggacacccctgaagccgagaaatgggagttctcgctcttctgaaccagctaaccaaagttttgagagctgtgttaagataaattcacaca

SEQ ID NO: 45080 - DNA, 100 bp, Homo sapiens
cgctgaagcccggggacacgattatcgagccgacatccgggaacaccgagtcaggcctcctgaccacccactccacgtggtgcacagacagctgccagcc

SEQ ID NO: 45081 - DNA, 75 bp, Homo sapiens
ctacgagtttgtcctgggagattgtatggaggtatatgaatggcacctgcccagaaggaaacagctgtaaatttg

SEQ ID NO: 45082 - DNA, 50 bp, Homo sapiens
tacctccctctccactcccatcttcagggaaacatgccctgaactgtcac

SEQ ID NO: 45083 - DNA, 74 bp, Homo sapiens
gctcatgtacgtgaaagtgctcatccagggatcatagacggtatttctatgtaaacgaacagtcgggcgagtct

SEQ ID NO: 45084 - DNA, 116 bp, Homo sapiens
cagatggcggatgccctgcagtacctgcagaaggtctctggagacatcttcagcaggtgagaagccctaccactgcaactgggacggctgcggctggaagtttgcgcgctcagacg

SEQ ID NO: 45085 - DNA, 90 bp, Homo sapiens
cgcggaagcagcagccgccgcctgaccgcagctctaacactccaagaaaggctgtgtttgcgggaagcatgcagttgctggccggagtca

SEQ ID NO: 45086 - DNA, 101 bp, Homo sapiens
ggccgtgcggctcttctccaagcatgaggtccatggaattgtacggcggtccagttcatttaatacgggtcgaattgagcatctgtataagaatccccagg

SEQ ID NO: 45087 - DNA, 51 bp, Homo sapiens
tctccttttccctctccctttccctaagaccctacagcttggggcctgggc

SEQ ID NO: 45088 - DNA, 82 bp, Homo sapiens
ccggtgcccgaggaggcagccaagctcgtggcctgcctctgcgtgcatgatgataattccgaagaaggcttccacactattc

SEQ ID NO: 45089 - DNA, 50 bp, Homo sapiens
cagcctggcttcacctcggggactgagcctgctcagcctgccggtctggg

SEQ ID NO: 45090 - DNA, 99 bp, Homo sapiens
atggaaacaccatggctgcggcggcccagctctctctgacacagggagctgtgattggtatagacgatgaggacgacagcaccttcacaataactgttg

SEQ ID NO: 45091 - DNA, 100 bp, Homo sapiens
tagcgctagccctgcagacagaggtgtgctgacgacctgctacaacagaagctgtgagaagacatttatcacagtgagtgccctgttttcccataaccga

SEQ ID NO: 45092 - DNA, 83 bp, Homo sapiens
ctatgtcccactaaaggatcaacgtaacgtgagcatgaggttttccaatcaggatttttcaagccacattcaattgataggat

SEQ ID NO: 45093 - DNA, 96 bp, Homo sapiens
cgggagctcatgatccacgcgccaactgtcagtgggtggcggtcacctaggagaagatgtatggtcttatgcaaagggacttcctcacatgtttca

SEQ ID NO: 45094 - DNA, 75 bp, Homo sapiens
ctcaattgcattggaaaagctgcgggaactcagctttagtgcctgatgaccgtggtacaatcaatgacatctctg

SEQ ID NO: 45095 - DNA, 74 bp, Homo sapiens
ttccctgtgtcctgctggaattcgaaacagactcagcagttcagccgcccggcggcccgcgcttcctcgaaggc

SEQ ID NO: 45096 - DNA, 157 bp, Homo sapiens
cgtctggcgcgctgggacctgcacaggccggagagagccgtaggcaggaccccgggacaccctggaagccaggaaatgggagtgtttgccattgtggagatgggggacgtgggtgctcgagaggctgtcttgtcacagtcccagcacagcctgggag

SEQ ID NO: 45097 - DNA, 75 bp, Homo sapiens
cctccgccaaatcgtgacaccatgaaagtcctctttggacatctaactaagttatcttgacgaatcagattacaa

SEQ ID NO: 45098 - DNA, 83 bp, Homo sapiens
gggagcagccgccgccgcctcctcgggagtcggagccgccgcttctccagagaactacgatgacccgcacaaaacccctgcct

SEQ ID NO: 45099 - DNA, 100 bp, Homo sapiens
ttgagcgatccctctccccggggcctggccgcgcgctgctgtgttctggaagggctcattgtacagtcaaggcggcagagagatggaaaacttgatgact

SEQ ID NO: 45100 - DNA, 75 bp, Homo sapiens
gaagccgtgtccggtgcccagccggtgggtagagaggaagtattgactcggagacaaaaagaggccaagaccaag

SEQ ID NO: 45101 - DNA, 75 bp, Homo sapiens
agctttatgctgaaaaggtggccactagaggtctgtggcccctctcgcaccaaccccagcatgatgattgatgac

SEQ ID NO: 45102 - DNA, 80 bp, Homo sapiens
gaaaaacagttttcaaaggatacatattctaagccttcagtgccagatgcaattaaaaagtgtcagagggctggaattac

SEQ ID NO: 45103 - DNA, 75 bp, Homo sapiens
tctttacatgttgaatccttgcagcactaaaatttgggagaagaaaatggctttccagatagcactggagatcct

SEQ ID NO: 45104 - DNA, 100 bp, Homo sapiens
ctggcctggcgtgcactccgcacctcggggacattattgcgcgtggaacggctgcttttggaagtaagagatgctaaaaaccttgtacctatggacccca

SEQ ID NO: 45105 - DNA, 100 bp, Homo sapiens
tttgccttccacaaaggctcctacttgaggaatggctggaatgtcatggactttgtggtggtgctaacgggaacctagaagtcggaatccggaagaagat

SEQ ID NO: 45106 - DNA, 75 bp, Homo sapiens
aattaattgcttggaaagtctgccttgcttttaaggctgtatatgtatcggatttcttcaaagaaagaacttctt

SEQ ID NO: 45107 - DNA, 87 bp, Homo sapiens
gatcctgcgggatgagaattactaccagctagaagagctggcttttagacctggcagcctgggtgtcatggagtactacctgatgga

SEQ ID NO: 45108 - DNA, 100 bp, Homo sapiens
acgtacctgaacgccgccttggacctcctgggaggcgaggacggtctctgccagtataaatgcagtgacgtaccttccactggaagaatctcaaacagcg

SEQ ID NO: 45109 - DNA, 83 bp, Homo sapiens
ttcacatgccatggcctttttgggaaagacatttctcttgggaagttgtgcatctgacaggaatatagtactgtacgatatga

SEQ ID NO: 45110 - DNA, 75 bp, Homo sapiens
ccttactttgtcttggtatactacatggcaaaatgggaaaggattggagacacaaaatcagaaattaagattcta

SEQ ID NO: 45111 - DNA, 89 bp, Homo sapiens
aagaaaatacaaatcacacgcataatggatgaaaggaaccgacaggtatgggctacgtgagttcgtggtgattgcccctgctgcacaca

SEQ ID NO: 45112 - DNA, 100 bp, Homo sapiens
agaaaccacctctgccatcctcgcctcagtcaaagaacagcacctgtgaaactggaaaaacatctgcacagtgctagatctgaagagggaagactatatt

SEQ ID NO: 45113 - DNA, 100 bp, Homo sapiens
gtggttgtctatcccgtctacctggccatcctctttctcttccggatgtcccggagcaaggtggttatcactaggctaaaactggacaaagaccgcaaaa

SEQ ID NO: 45114 - DNA, 93 bp, Homo sapiens
gctccaggaatgggacctcgagtcactgtgcctctaaagagagcaatcactacacttatggctgggattttgcgcttagtagttcaatggccc

SEQ ID NO: 45115 - DNA, 83 bp, Homo sapiens
gccggagcaggcgaggtggccggagccgtgtggaccaggaggagcgctgaacagtaagaggaccttgtgcatgaataatttgt

SEQ ID NO: 45116 - DNA, 75 bp, Homo sapiens
agctttgagtaacattgccagagagagtgaaccagaggaaatgcctccagaagcaaagatgaggatgaagaatat

SEQ ID NO: 45117 - DNA, 106 bp, Homo sapiens
tggaatccaagggggccagttcctgccgtctgctcttctgcctcttgatctccgccaccgtcttcaggccaggtcagatgtaccaacagtaccagcaacaggccgg

SEQ ID NO: 45118 - DNA, 75 bp, Homo sapiens
gatacagttgataaaattgttgattctcttcctggacattctgttgccctctgtttagctgttgcctttaaaagt

SEQ ID NO: 45119 - DNA, 74 bp, Homo sapiens
catgatgcagtcactaagccagaatcctgaccttgctgcacagatgtctttggtggacttgggaaagaggttgc

SEQ ID NO: 45120 - DNA, 97 bp, Homo sapiens
tggtgtcctccgggacggagatggagccgtggtccttcccaatgagctctctggcctgacaaccaatgttgtggacattattttggctcatcacttt

SEQ ID NO: 45121 - DNA, 90 bp, Homo sapiens
ggctgagccaggccccttctcagattgcaaacagtggttctgctggattgataaacccagctgctacagcatgaatacaactttgtctga

SEQ ID NO: 45122 - DNA, 90 bp, Homo sapiens
gcgagggcgcggagttccaggtcgagcagttaggccgcgagcgactgcggcgccgagccggtgctggagaatctggtaaaagcaccattg

SEQ ID NO: 45123 - DNA, 75 bp, Homo sapiens
ccccgcacctccactccatcctgaaggctaccaactacaatgggaaatcctcattgacgattcaatttgttgaag

SEQ ID NO: 45124 - DNA, 98 bp, Homo sapiens
aagtcatggcttccttcaagatcctggctggggacaagagcccttctgcctggcaaactatccatcagcctttcatagtgtcatgtttaaccctgtgg

SEQ ID NO: 45125 - DNA, 50 bp, Homo sapiens
caccagcgtgcctttgggtgataaggggtaatgagaggccctaagatccc

SEQ ID NO: 45126 - DNA, 90 bp, Homo sapiens
tgctgggagataagaccatctgatttatccgtgtacatacagcagctagcacaaaatcttcttgacagagacacattttctaaatctgat

SEQ ID NO: 45127 - DNA, 82 bp, Homo sapiens
cgaggaaaggtgtgctgtgcctgaggccaggaaaaggggaagatagtgatgtactcagtataaatgcagatgcttatgacag

SEQ ID NO: 45128 - DNA, 96 bp, Homo sapiens
ggccggaaggaggagaggtgctgtgctgtgtatgaagaggcagtgaagactctgccaacaggtagagttggctttgtgggacacagctgggcagga

SEQ ID NO: 45129 - DNA, 89 bp, Homo sapiens
ctggaagcggatcgcgtggagtgacggtcacaccgcggcgtgcaccgtccaggtgaggttagagctggggcatcgcgcccaactgcgca

SEQ ID NO: 45130 - DNA, 90 bp, Homo sapiens
gagaaagttcatctagaaatctcaaagccatgtctcaggtttggggcaagatggaaagacactgctaattacgaatattgacatggagcc

SEQ ID NO: 45131 - DNA, 98 bp, Homo sapiens
tttttttcgtaaacatctgggtgtatatcaaacggcaagatgtccagtaatgtcccggcggatatggaatgggacaacaaccagatccagcctttggt

SEQ ID NO: 45132 - DNA, 97 bp, Homo sapiens
ggacatgatcctcatcttttatacactcttagtgctgtccagagagcagcacttgaggcatgtcacaagggctggggcgtcagcgtcgtggttggag

SEQ ID NO: 45133 - DNA, 101 bp, Homo sapiens
cagattttggtttaatatctgattgggacaacattcagacccatttccagtcatgatggtgccaccgaacatcgcagaactgaagaatttggaggtgctca

SEQ ID NO: 45134 - DNA, 90 bp, Homo sapiens
cccgacccaccagtactatatgggttagcatgctggcaagaggaggacagggaatccctggagatagagaaagtcaggctgtggttgacc

SEQ ID NO: 45135 - DNA, 50 bp, Homo sapiens
cactcattatctgatacttgtaatcagagagctgcttttgcacattttcc

SEQ ID NO: 45136 - DNA, 100 bp, Homo sapiens
cctcagcttccaccgtggggacctcatcaagctgctgccggtggccaccctggagccagtgtactatgaggggctgcaggacaagctggcacagatccgc

SEQ ID NO: 45137 - DNA, 100 bp, Homo sapiens
tttcagtcctgatgagcatttctgggtgacactcaataggattccagctctagaggacaaaatcccagtccttggcacaaactcaggaaatggaagccgg

SEQ ID NO: 45138 - DNA, 114 bp, Homo sapiens
aggagatcgcctacaagttcacgcccaagtacatcctgcgcgccggccagatggtcacgctctggcaggctgccctgagcacgctcaaccccaaccccacggacagctgtcccc

SEQ ID NO: 45139 - DNA, 100 bp, Homo sapiens
gctggtggtgcaggcgctgcgccgcaacgccgagcgcaccgacatctgcctgctcaaagtctttgaagagcctgaggaccccagtaaccgctcattcttc

SEQ ID NO: 45140 - DNA, 93 bp, Homo sapiens
agaaggaggtcctgccgtccatgcggaagatcgtcgccacctggatgctggagggtttccaggcctgaggtgcccgccctggccccaggagaa

SEQ ID NO: 45141 - DNA, 74 bp, Homo sapiens
gccaacagttctgatgcccttgtggaacgtgctggggtttgcactggatgccaacgtccggcggtacctccagc

SEQ ID NO: 45142 - DNA, 100 bp, Homo sapiens
attaattttaggaatcctgatgacatccttctttttagagatcgttttgatggatatatcttccttgacagcaaagctaatgttctctatgggccactcc

SEQ ID NO: 45143 - DNA, 75 bp, Homo sapiens
ctcgtgcctcagcctctccagcagctgggattacaggcaatgtcccctgatggggaggccatcgtcactggtgct

SEQ ID NO: 45144 - DNA, 100 bp, Homo sapiens
ggactaccaaggagaagctatagactacttctactccaccaggaagctggaagctctttgacatcctttggaacagaaacatcaaacagtggtaccttac

SEQ ID NO: 45145 - DNA, 100 bp, Homo sapiens
agaatacattgctgattatctcatgcagaccaagatcactccatggatgaaatgacagctgtggtgaaaattgaaaaaggagttggtggcaataatgggg

SEQ ID NO: 45146 - DNA, 50 bp, Homo sapiens
gaaccatcaaacaaggctgcagagtgacgccaatgccccctttgcccagt

SEQ ID NO: 45147 - DNA, 100 bp, Homo sapiens
ggaacggctgaaggccctacgggagaaaaccgggcgcaaggccaagtacctggcccagatcattgtgatgggcgtgcaggtggtgggcagggcctttgca

SEQ ID NO: 45148 - DNA, 75 bp, Homo sapiens
gaacaagctgtggtacaagcccgtggaacaattcatcttaccagagagaggtacagaaagcagtcaacactgccc

SEQ ID NO: 45149 - DNA, 98 bp, Homo sapiens
aagaggcctgcaaagctgtacaagagatcatgcaggtggagccttacaaagtaaacctctctcaagatttagagcatcagctgcaaaacatcattcaa

SEQ ID NO: 45150 - DNA, 75 bp, Homo sapiens
tggcgggcctcaaagagctttaggacatgctccaaagaagaggtgcagatgctaatttcagtgtctggattaaaa

SEQ ID NO: 45151 - DNA, 100 bp, Homo sapiens
gctgcctgcaccatgtccgccagagaaggtagaagatagcaccatgccgattcgtcgaactgtgaattctacccgggaaactcctcccaaaagcaagctt

SEQ ID NO: 45152 - DNA, 83 bp, Homo sapiens
tctgccgctattgtagcgaactgcggtcgctggaatgtgtgtctcacgagaaatcatttctaccagttcggagagatccggac

SEQ ID NO: 45153 - DNA, 90 bp, Homo sapiens
gagaacgaagtaggccgtctcgctctgggtctccaggcccgcgaccgtccgccagtcgtcccgagcctctgacctgtccaggtgccctgt

SEQ ID NO: 45154 - DNA, 98 bp, Homo sapiens
tcacgacccattcaggagcctccaggagcccagacaccagccccccaccatgctcatgatggagcagtccaagaagtcctccctcatggtggcccgca

SEQ ID NO: 45155 - DNA, 80 bp, Homo sapiens
cgactgcatctttgacaagtttgagtgttgctggaacggttcggatagagttgcatgctgagaatttgaaaaatgaagat

SEQ ID NO: 45156 - DNA, 100 bp, Homo sapiens
ggcatgacggctacaggatgggcgcgaacaatggcaaacagtacggcagtgaggctcactccatcactcgatgagataatatgagatttctacttcggag

SEQ ID NO: 45157 - DNA, 75 bp, Homo sapiens
gcagccggaaggacaccaagatgcggatccgggcctttccggcccaaatattgagaaatcagtgaaggatttgca

SEQ ID NO: 45158 - DNA, 75 bp, Homo sapiens
gcttgctcacttccgttatttgtgccagtcggcatgtgcgtcaacaaatgaagagaaggcaaaaaatgctaagtt

SEQ ID NO: 45159 - DNA, 100 bp, Homo sapiens
acgtggcctgccttgaccttgggtttcaacattacatggacacagaacagtatgaagaagcagtacgagactatgaaaaagtataccagacagagaaaac

SEQ ID NO: 45160 - DNA, 50 bp, Homo sapiens
aggacactatgcaatcacccgaaaggtttattcagtcaccatgaagctgc

SEQ ID NO: 45161 - DNA, 75 bp, Homo sapiens
cggcgagagatggtcaggtctggagctcgaccgggccagcttgccatcgagacatttataaaggagttgatatga

SEQ ID NO: 45162 - DNA, 74 bp, Homo sapiens
aagggcatcgactcagacgcttcctatccctacaaagccatggaagagagttgtatgtacaacccaacaggcaa

SEQ ID NO: 45163 - DNA, 101 bp, Homo sapiens
ctgtgaaagaccgattttctgcagaagatgaagctttgagtaacattgccagagagctgctgaaatgggttgcggattgaacaagttagagaaacgtgatg

SEQ ID NO: 45164 - DNA, 100 bp, Homo sapiens
gaactctttccagcttgtgtctggtacttgttttggctccaacaagggaactggcaaaccaagtagccaaagacttcaaagatataactaggaaactcag

SEQ ID NO: 45165 - DNA, 83 bp, Homo sapiens
ctgcccgttgccctgtgatgaagaaagttggtcatcattttatccaagcttgactgtggtacagcatggcattccatgttgtg

SEQ ID NO: 45166 - DNA, 73 bp, Homo sapiens
tctccaatcttatggctgtcaacaactgtggtgctacagatgaagcatggcgactattatccacttacctgga

SEQ ID NO: 45167 - DNA, 100 bp, Homo sapiens
ggatcatgtctgcgagccaggattcccgatggtcatcatgggccagtgctactacaacgagaccatcggcttcttctataacaacagtggcaaagagctc

SEQ ID NO: 45168 - DNA, 50 bp, Homo sapiens
gcggcggcgggagtcctggcgctctgcagcagtgcctgatttgagatggg

SEQ ID NO: 45169 - DNA, 74 bp, Homo sapiens
ttgctgtcgctttcacagagtcaatgaaggaaatggcacaagcgcagtggaatctgaattatccagaacagaaa

SEQ ID NO: 45170 - DNA, 87 bp, Homo sapiens
gaaaagaaagatgcagaggaagaggaaagcgaactggagcctgcagacagggggatttgcctgggaaggagaagtagaaaacaacgt

SEQ ID NO: 45171 - DNA, 75 bp, Homo sapiens
ctactcttctcattacatgactttagtggttcaatccaaagttggtcgaattgtcttagaattgtttgcagatat

SEQ ID NO: 45172 - DNA, 75 bp, Homo sapiens
ccttttggtgctttgcctcttacatggaccaaatgagcaattgggtgccacgccgaggggatcagggtcccaaga

SEQ ID NO: 45173 - DNA, 100 bp, Homo sapiens
gaattcgacctggagaacgcagtgctcttcgaagtggcctgggaggtggctaacaagggtatcgagaaccttccctgcgaacttcagaggaacttccagc

SEQ ID NO: 45174 - DNA, 82 bp, Homo sapiens
caacagaataaaataaaagatcttcaaaaggagcagaaaactttacagagtgctgatggcagagattggtgaggatttggat

SEQ ID NO: 45175 - DNA, 74 bp, Homo sapiens
tggggagtggcagagagtatgcattaaagctgcatcttcctcccgtgaggctggccgagctccacgctgatctg

SEQ ID NO: 45176 - DNA, 94 bp, Homo sapiens
gccggcgccgcggcctcttcggctgcggaccctgccattccggaggagggtcctgtagcatccacagtatcagcgttttctgtcctctcctctg

SEQ ID NO: 45177 - DNA, 83 bp, Homo sapiens
gagaggagcaatagaagacatgggatttgatgctaccttgtcaggtcgctttggtcatcttggcttagccatcaacttgatca

SEQ ID NO: 45178 - DNA, 100 bp, Homo sapiens
cctgaatacatgatttaaacaagagatttccacagaaggttatcaatactctggctgaccatcatcatcgtgggactgactttggtggaagtccttggtt

SEQ ID NO: 45179 - DNA, 73 bp, Homo sapiens
cttgaccatgtgacatctgatgctgtggaacttgcaaatcgaaggagtggtaaaatttcagccttccctttgg

SEQ ID NO: 45180 - DNA, 50 bp, Homo sapiens
tgcccatgaaggtcagactgaggatctgtggttgtggttccggagaatct

SEQ ID NO: 45181 - DNA, 75 bp, Homo sapiens
tgcataaaaactgcaatcatttttcttcagctttatcagagcacgactgaaaatgtagctgtttatatctgggac

SEQ ID NO: 45182 - DNA, 90 bp, Homo sapiens
caccagctccagatactgaaaggagtactttttcttcattcatagtcaagctgaaagtagtgatggcatccacataattttgaagtgatg

SEQ ID NO: 45183 - DNA, 90 bp, Homo sapiens
ccagggcagagggcacctgagcggctggagagcctgttggagaaacacaaagagggttctgagcaaggttcaaccagtcaagaacaggcc

SEQ ID NO: 45184 - DNA, 82 bp, Homo sapiens
gcggggcgcgggcggcggacagattgaccttcagagcgagttccagggtctccctccactgctgtagtaacccgggtccggg

SEQ ID NO: 45185 - DNA, 75 bp, Homo sapiens
tgacaatgtcaagaaagaaaactcctccttgtacctaggcagccttaagtgccttgaaacaattttctgaacaag

SEQ ID NO: 45186 - DNA, 51 bp, Homo sapiens
gaatatggagactgttcaatcaccaggctgtttttggaaggaagaaagatg

SEQ ID NO: 45187 - DNA, 100 bp, Homo sapiens
ggagcagttcgtgaacagtgtccgacagctctcagctcaaggtggagccgccaccaaaatgcagattttcgtgaaaacccttacggggaagaccatcacc

SEQ ID NO: 45188 - DNA, 60 bp, Homo sapiens
gaaaggagaacaccttatttcaggcaaaagatgtgattgaagagcatggtccttcagaaa

SEQ ID NO: 45189 - DNA, 100 bp, Homo sapiens
gagtttcctcttttgtgctgattcctgaggactaggaaggtgccccgaaaagaattcagagctgatttggagcaatataaaaaagctttaactgatgcag

SEQ ID NO: 45190 - DNA, 74 bp, Homo sapiens
cgccgtctacccgtggccgctgccggtctacgttctgcggggagtgtctccagccctgcctgcaggtgccatcc

SEQ ID NO: 45191 - DNA, 142 bp, Homo sapiens
agcaaactccagaccgatatgaagactaccaacctggaagagatgcggatcgccatggagacatactacgaggagtcggagtctcaggaccaggtcttcctacgctggagcagcggggagacagccaccatgcacatcctcg

SEQ ID NO: 45192 - DNA, 74 bp, Homo sapiens
gtgaagcacccctccgtggagtccgtggtccagtgtgagatcgacgagcctatgaaagagacaaccagcaccaa

SEQ ID NO: 45193 - DNA, 100 bp, Homo sapiens
aggagccttcatagggacagccgcccctggtgcacacaccctcgtattctcctgcccttccccaggaatgttttaaaggaagttgggctactcacaagtt

SEQ ID NO: 45194 - DNA, 50 bp, Homo sapiens
catccacttctaccccaccttccggataaacaacccagacatgcgagtgc

SEQ ID NO: 45195 - DNA, 97 bp, Homo sapiens
cacttctctacatcccatctcaatcagaattactagattttctctcaaactacgagcacacggaccctgactactcggctgcctatgtcgtcataga

SEQ ID NO: 45196 - DNA, 101 bp, Homo sapiens
gagattctgatgaagaagttattcaagatgatacactgcctctaggactgggacagatagccactgagtacctgcttcaaatcaccctgcacgttttctct

SEQ ID NO: 45197 - DNA, 100 bp, Homo sapiens
agaacatgcagtccctgcttcctgccgaggagatgttaaagtaacccatcttgcaggacgacattgaagattggtcttctgttgatctaagatgattatt

SEQ ID NO: 45198 - DNA, 51 bp, Homo sapiens
aatctttacaagcttgtaaaatctcagagacggggtttcgccatgttggcc

SEQ ID NO: 45199 - DNA, 74 bp, Homo sapiens
ggcgagaaggtggtgccccggagactccgggcactggggagcccagaggatataattgatacagcatgtgaagt

SEQ ID NO: 45200 - DNA, 100 bp, Homo sapiens
attacatggcctcacctgacctggagatccaggagatcaatggatcagtgaagtggagcccaaatactatgcagatggggaggacgcctatgccatgaag

SEQ ID NO: 45201 - DNA, 68 bp, Homo sapiens
aggagtttggcaacgagacgtggggcgtaacaaagatcgtgcagaatggacgtctcatcgtttccaca

SEQ ID NO: 45202 - DNA, 75 bp, Homo sapiens
tagaccactgcctgtgtctcgtcttgtatctctaattggaagcactatgttcaatggccagctgctatttgatag

SEQ ID NO: 45203 - DNA, 82 bp, Homo sapiens
cacctgtgcctcttcaccatgttcggaatgctgctgttcgctggtgggaaggcgccatgtcagaaccggctggggatgtccg

SEQ ID NO: 45204 - DNA, 90 bp, Homo sapiens
gcgagttcctgcgcggctgcggggcttccctgcggctggagtgccggtggtggtgtgcacattgagccccggtatagacagttcccccag

SEQ ID NO: 45205 - DNA, 88 bp, Homo sapiens
ctttctgcttgttgcactttctccattcgttcctttgctttttgcaggctctgactcagggaagatggtcagtaggacagaaggtaac

SEQ ID NO: 45206 - DNA, 136 bp, Homo sapiens
gtgatcatgtccattgaggagaagatggaggctgatgcccgttccatctatgttggcaattcttccacctggaagccctctctggctaaggacaggcaggtgcccctctctccatcagaggacacctgtactggag

SEQ ID NO: 45207 - DNA, 100 bp, Homo sapiens
ctgaaactaaaagatgtcacaaaggaaaacgaggaaagtcccaggatgactactgtgtcaatttggtaactctcattcgacatccatctgaactaatgaa

SEQ ID NO: 45208 - DNA, 75 bp, Homo sapiens
ggctcgacaagttcaagcagctgcttgccggccccaacacggaccttgatgctgtctttgcatttcaactacgca

SEQ ID NO: 45209 - DNA, 98 bp, Homo sapiens
agaagtacagggagcgagagctggagaagctgggattggagattccacccaaacttgctggtcactgggagagctggactggccattatggaggagga

SEQ ID NO: 45210 - DNA, 100 bp, Homo sapiens
ctgagactttctccttcaagtacttggcagatcactctcttagcagaacaggacgcaggccttgatgccctttcctctatcataagtcgccaaaaacaaa

SEQ ID NO: 45211 - DNA, 100 bp, Homo sapiens
cgccgcgctgcgcgctggggaccgcctggtcgaggtcaacggcgtcaacgtggagggcgagacgcaccaccaggacactcatgaggaccatgatacttcc

SEQ ID NO: 45212 - DNA, 50 bp, Homo sapiens
cagaggttggtccgagaagccaacaattcttactactttgaccgcgatga

SEQ ID NO: 45213 - DNA, 98 bp, Homo sapiens
aagatgatgcagaacttgccacacgtgcaatccctgaactgacaaaactgctaaatgacgaggaccaggtggtggggaccagggctatgggagtggca

SEQ ID NO: 45214 - DNA, 75 bp, Homo sapiens
aggagcaagtccgatggagaggctaagcgcccgtggcaggattgtgcagaggcccgccaggcaggccatgaacag

SEQ ID NO: 45215 - DNA, 118 bp, Homo sapiens
gtttctttgtctaccacgaggatcatcaggtgcccctccccctgggcagtcaggagaagtttcggtgtccgacatccctgtctgttgttaaagacagaaacctaactgagaaccaaga

SEQ ID NO: 45216 - DNA, 98 bp, Homo sapiens
gtagccagccagctggagcgatgcaagctcggatccgagactggcagcatgagcagcatgaggccttgaaccggggcattgctgctgtcaaggaggat

SEQ ID NO: 45217 - DNA, 100 bp, Homo sapiens
ctgccctgaggcccgggagaagctgcaggagttgtgtcgccacatgcctgaagaagtcagtgatttatagttcactaaaactgcacaaaatgtggaaagg

SEQ ID NO: 45218 - DNA, 75 bp, Homo sapiens
ggaccatctgttcggaaccccagagcacgagtagtagtcttaagaactaggactcaatgaaattgctgcccccat

SEQ ID NO: 45219 - DNA, 82 bp, Homo sapiens
cgcgggatcccagcctcaggcgtgcgcggacggtgtgcggcttctggtagatgaattgagagatgcagtgctgctacttttt

SEQ ID NO: 45220 - DNA, 97 bp, Homo sapiens
agaggcgaaaggaagcaagcagttcagaagagccaaggaataaacatgcaatgaacccaaaaggaaaaatgttaaggatctcatggattcaaatgga

SEQ ID NO: 45221 - DNA, 96 bp, Homo sapiens
cagcaatagaaatttcctgcttaccatgagaccatttttaaaaagggccattttggtcctaagttatggtatccaagggttgtatcgaggctataa

SEQ ID NO: 45222 - DNA, 83 bp, Homo sapiens
cctggctctactctcctggactgcctcccataaagcccaagttggaaagggcaaagaaattacaagaacagcgagaaaaggaa

SEQ ID NO: 45223 - DNA, 101 bp, Homo sapiens
ataacttcgaaggattttgcaacaaattcgagctgtccgactctgagaatgactgtacaatttgttcaaggaatttttgtagaaaaatacgatcctacgat

SEQ ID NO: 45224 - DNA, 74 bp, Homo sapiens
aatgggagaagaggaatgttccctgacaatttcgttaagtaccctcttatatatggactgattcttattccctg

SEQ ID NO: 45225 - DNA, 100 bp, Homo sapiens
ctcttcactttcctcggcaagaaatgtgtgtatgatgaattagttcccgcttctctaacaacaaaatatggaggcttttatatcaacactggcactctac

SEQ ID NO: 45226 - DNA, 80 bp, Homo sapiens
ctggagcctcagttggaagcagccgatccagcctgcggagcctgtggggcagcactgctccgtgtggagatggcgccctc

SEQ ID NO: 45227 - DNA, 97 bp, Homo sapiens
ttgatgatataattggaactcttcagccaagccatatctaacagaactatcttcaacttttcagggtcctgtattaataggaagttcacatggtggt

SEQ ID NO: 45228 - DNA, 83 bp, Homo sapiens
ccgaactggaatctggatgagcagctcaagcagcgcaatgtccctgctcttctctcgatgcaactctatcgtcacagtcaaga

SEQ ID NO: 45229 - DNA, 75 bp, Homo sapiens
cggatgccctgcagtacctgcagaaggtctctggagacatcttcagcaggttaatttggagtggcccctggagtc

SEQ ID NO: 45230 - DNA, 92 bp, Homo sapiens
cccaggcctcggactccgcggccggcccggcgcggcccagcgccctcagggctttgttcgcgggggtcacagctctcatggctgcagctagc

SEQ ID NO: 45231 - DNA, 97 bp, Homo sapiens
aaaatgaatgccaaatgggacacgcctgtgcctactacactggcacaagtggatagagaaaagatctatcagtggatcaatgagctgtccagtcctg

SEQ ID NO: 45232 - DNA, 50 bp, Homo sapiens
ggacattccaggcagaggcaaggttcgagaacttgtcttggacaattgca

SEQ ID NO: 45233 - DNA, 82 bp, Homo sapiens
cgaggcagctgtcccatgctctgctgagcacggtggtgaaatggcatttcaatatcaaccaaaaaagattttccaaggcaca

SEQ ID NO: 45234 - DNA, 82 bp, Homo sapiens
atcgctgccagggcagaaattgagcaagcagcaagtcggctttcagatcagcttagcctgcgacgcttatgattagagccaa

SEQ ID NO: 45235 - DNA, 80 bp, Homo sapiens
ccgcgccgccaccgtctgaactaggatgtcccgacatgaagaacccagtgacttgattgtaaaaatttacagagcggaat

SEQ ID NO: 45236 - DNA, 90 bp, Homo sapiens
ttcgcattcagaatttgaccatcttggtgagaaacattaagacctactaccaggctactgcagcactggggtgtcagttgttggtccgac

SEQ ID NO: 45237 - DNA, 75 bp, Homo sapiens
tttgttgagtcgaaagtgaaattttcctttggccaacgtgacaggaaactttgagcattcagctgaggggccaag

SEQ ID NO: 45238 - DNA, 98 bp, Homo sapiens
tggaaactgattggaaactctttgggaaagccactcgaaaagattccatgcaagcatgttttttgctatgactgtgctattttacatgaaaaaaaggg

SEQ ID NO: 45239 - DNA, 101 bp, Homo sapiens
ctgcaacctctgcctccccagttcaagtggttctcctgcctcagcctcccgagtagctgagattacagttggtagctggcagtgttgtgatggcttttgaa

SEQ ID NO: 45240 - DNA, 88 bp, Homo sapiens
gaccgggagatgatcctggcggattttcagttctaggtctcgttccagatcatattctccagctcataacagagaaagaaaccaccca

SEQ ID NO: 45241 - DNA, 98 bp, Homo sapiens
atccagagcctgctctttcatcccaagcaagaggactgggtgctggcctacagtttggatcaaaaggggtattccctcagcggatactacacccatcc

SEQ ID NO: 45242 - DNA, 97 bp, Homo sapiens
cctccgcagcagctccccagggcccacgggccagccccgccgccctcgcaacctggcagccgccgccgtggaagaaatctcctgcaaagaagctgag

SEQ ID NO: 45243 - DNA, 51 bp, Homo sapiens
gggatccttcacccgtgtctgatgaagatgtgtgtgtctttaagtgctcag

SEQ ID NO: 45244 - DNA, 75 bp, Homo sapiens
agaagttcttcgatgtatctaaacttggcaccaagtatgcttggttctacagccattgggatccagacatcagag

SEQ ID NO: 45245 - DNA, 90 bp, Homo sapiens
ctgggttcaagcaaatctcctgcctcagcctcttgagtagcctgagtagctgggactaaaggtgaccaaaagccagccccactgtgagtt

SEQ ID NO: 45246 - DNA, 82 bp, Homo sapiens
caaagaggagctgatagcggagctgcagaggacaaaagcatgtcttcccttcctgggtgcattggtttggatgcagcaacag

SEQ ID NO: 45247 - DNA, 98 bp, Homo sapiens
ttctgtctgatatccttcaggagtctgtcaaagagaaagtaacaagaatcattcttgcagcatttcgtgtgaatcttggaagcaaccagtaccttttc

SEQ ID NO: 45248 - DNA, 75 bp, Homo sapiens
gtggagctccgccgccccgaaactttcaccgcgagcgggcacgtgtggttctcaaatataggcattctgatggga

SEQ ID NO: 45249 - DNA, 97 bp, Homo sapiens
ccagtgaccctgagcgcaccctggaccccaactcagccttcctgcataccctggaccagcagaaacctagagtggctattttggcattctgctggat

SEQ ID NO: 45250 - DNA, 75 bp, Homo sapiens
tgtttgtggatcgctgtgatcgtcacttgaaagcctgacaggtttcttcggaaaagtggccatccatggaatgaa

SEQ ID NO: 45251 - DNA, 100 bp, Homo sapiens
ccgggggtggaggtggtgcctctggcagtgacgaggacgaagtgtccgagagacagaagagatgggtgatgaagaagttttctcctggttgaagtgtgca

SEQ ID NO: 45252 - DNA, 82 bp, Homo sapiens
ccgcgtttcagccctagggaagatcatggggaatttcagaggtcatgccctccctggaaccttcttttttattattggtctt

SEQ ID NO: 45253 - DNA, 100 bp, Homo sapiens
gtcccccagcttcctcaatggctccaccgccacctcgcccttcgccagcgctgagatgcgtctggagagccagagggcctgcctgaaggaatcacctgag

SEQ ID NO: 45254 - DNA, 75 bp, Homo sapiens
ctcagcctcccgaggagctgggactacagagaggaaaatatgatgttcccaagtggctctctcccagtagcattc

SEQ ID NO: 45255 - DNA, 100 bp, Homo sapiens
ggaacgctctggtcagccttttcctgtgaggatgaggtcggaaggtgcgggagtatgagttaagaaaaaacaacttctcagatactggaaactttggttt

SEQ ID NO: 45256 - DNA, 100 bp, Homo sapiens
gagagatggagatgggcagacggattcatttagagctgcggaacaggacgccctctgatataaccagcccgagtcatgcagtcttttcgagaaaggtgtg

SEQ ID NO: 45257 - DNA, 100 bp, Homo sapiens
cagcaatctcagggtaaccagaactagagctgctcaaagaaaaactggggccatttgctacctttaagatgcagtatgatcgaacttgtgagtggacagg

SEQ ID NO: 45258 - DNA, 83 bp, Homo sapiens
aatgcagtcggcttgtcctggctcttgccctcatcctggttctggaatcctcagttcaagatattgcaggagaagaggctggg

SEQ ID NO: 45259 - DNA, 75 bp, Homo sapiens
gaagagggaagacacgcggaaacagtcctcatcaccgggggcatcgtggccacagctgggcgcttcacccagtgg

SEQ ID NO: 45260 - DNA, 75 bp, Homo sapiens
tctaactatttcaagatgatatttattcaccaaacaaggtatttgaaccagaccatacaggatgatgcatccaca

SEQ ID NO: 45261 - DNA, 83 bp, Homo sapiens
tgccagtgagagcactaaatgaagtcttcattggggagagtctgtcatccagctttagcgtcacctccctcactgggcagcat

SEQ ID NO: 45262 - DNA, 100 bp, Homo sapiens
gtttctctccctctgcccccccttccccacgcaaccccagatccatttacactttacaaggaactgtgagagtgacactgaggaggacatcgccaggagg

SEQ ID NO: 45263 - DNA, 85 bp, Homo sapiens
gacacggcttcccccaaggaatatacaggtgtgtgtaactggtgtgtgcaccgtttcgaccatcactgtgtttgggtgaacaact

SEQ ID NO: 45264 - DNA, 100 bp, Homo sapiens
ctaaaagatgacagacttggacaacatgtcccaacattacatcccaaacttaaggcatacagaacgatggagtatatggcagaatccaccgaccgcagcc

SEQ ID NO: 45265 - DNA, 100 bp, Homo sapiens
ccgggacccggttccccggcccacagtgggggtgtgcaaacccgagagaactgggtgcgagcccctatggttaatccaacattaggtgttcatgaagctg

SEQ ID NO: 45266 - DNA, 107 bp, Homo sapiens
ctcctccgaaccccttcatgcccaaatcccggaaactccagcgtgtctccagccgtggtgaaatgacaatggatgctctgttggctcgattgaaacttctgaatcca

SEQ ID NO: 45267 - DNA, 95 bp, Homo sapiens
agtggcggcgcttcccattcgccatgcgccgggggtgggtgcccgaaggatgaccatgaaagctgtggttctaattctaccaaccgtagtactgc

SEQ ID NO: 45268 - DNA, 100 bp, Homo sapiens
tttgctcgaaggaattcctgcaatcagtgcaatgagcctagaccagaggactctcgtccctcaggaggagttccagaaagctgagtctgatctggattac

SEQ ID NO: 45269 - DNA, 75 bp, Homo sapiens
gaaaggactgaggaacggtgcctggaaaagaattcatctcctcctgctagcagccgcgtcctggaggagcagcgg

SEQ ID NO: 45270 - DNA, 100 bp, Homo sapiens
tatctgtggcaggagcttttcgtaaagggaagtcatttctactggacttcatgcttagatacatgtataacaagcatcctggtggggaagaagttttaag

SEQ ID NO: 45271 - DNA, 75 bp, Homo sapiens
cggtgctcgggccagcccttctctgccgtccctgggagggcagcacagactatttcttgagcagtggtgacaaga

SEQ ID NO: 45272 - DNA, 80 bp, Homo sapiens
agccggaggaagctgatggtcatcttttccaacaattctgtggtgttcttggtcacacatttatggagtttctgaagggc

SEQ ID NO: 45273 - DNA, 83 bp, Homo sapiens
gctgtgctgcgcgacccccgcgcatgtgatcagggccaaagcggtcagtgagaaggaagtggactctggaaacgacatttatg

SEQ ID NO: 45274 - DNA, 94 bp, Homo sapiens
gaggcagaagatttctggccagtggagagaggaattcctcaagacaccattccaggctgaaggtgatgtggccgccctcaaccgacgcatccag

SEQ ID NO: 45275 - DNA, 75 bp, Homo sapiens
ccaaggagtcacggatcggattcctcagctacgaggaggcgctgaggagaggactttgcctcccgggccaaactg

SEQ ID NO: 45276 - DNA, 100 bp, Homo sapiens
tggatgtcaatatttctgcttcctgcttccacttccgtgaccgttagggacaagacaggtggagtggctgaaacttctcagcaggcgcatctacactagt

SEQ ID NO: 45277 - DNA, 100 bp, Homo sapiens
gtggagttgctgcccttccggagtccgccccgtgaggagaatgcttcgggctcagaatcaggttctgaaaaaaggtgttgtggatgaacaagcaaattct

SEQ ID NO: 45278 - DNA, 82 bp, Homo sapiens
cgacgcgcaagggctgcggagccgcgggccggcgagcgcgtcgccaccatggtacatgtcccagagcaagcacacggaggcc

SEQ ID NO: 45279 - DNA, 100 bp, Homo sapiens
ccgacgccgcctggacggccgcactctccctgcccgagacccggtgatggcttggacaacagtgtagcttcccccagcacaggtgacgatgatgaccctg

SEQ ID NO: 45280 - DNA, 87 bp, Homo sapiens
aacatcggctgttttagtgctttttatttttccccaattcagcagagaatattttcaaggggggcgatcagtgggtgaccgcggctg

SEQ ID NO: 45281 - DNA, 82 bp, Homo sapiens
cagccaaccatgctcaacttcggtgcctctctccagcagactgcggtgctcttacagcctgttccaagtgtggcttaatccg

SEQ ID NO: 45282 - DNA, 75 bp, Homo sapiens
tcttacagaaatgtgtcttgttgcatttggtaatttagcagaacttgacaggggcaagtgtccgagtggtgaatc

SEQ ID NO: 45283 - DNA, 97 bp, Homo sapiens
tgaggctacaccccggagccaggagggacgtggcccagtggaacatcgggagcctccggaccatcctggacatggtggagcgcgagtgcggcaccat

SEQ ID NO: 45284 - DNA, 100 bp, Homo sapiens
ctaaaatcatgatgatgggaactcgtgaggagagcttgactttgagaatcactacaagaaaaactccttgtggtgaaggttctaagacgtgggatcgttt

SEQ ID NO: 45285 - DNA, 75 bp, Homo sapiens
cgacgtggtgcagggcagagaagcgctcgtccacatcatctatttggccacaggcaattcgaagttttcaagtag

SEQ ID NO: 45286 - DNA, 82 bp, Homo sapiens
cagggcctgcagcgggagctggacggcgagcgcgagcggcgcgagaaacttgatcctctcccagaaaaggttttacagcaaa

SEQ ID NO: 45287 - DNA, 100 bp, Homo sapiens
tgcacaacctctcccccggctccatcgacctcaaggacatcaacttccggccgcagatgtcccaggtccctcgtctgagctggctcactcgcccaccaac

SEQ ID NO: 45288 - DNA, 100 bp, Homo sapiens
agggaggtagcatccgttggatatccacaccatccttctcgctgcaggagaactggaccccatcctgactgaggtcaccctgatgaatgcccgcagtgag

SEQ ID NO: 45289 - DNA, 100 bp, Homo sapiens
ccagatatggctgaacatgagtggagtatggcccctgtgtggtagctagtgactgctggagtctgctgctcgagttcctacagagttttctaggcagcca

SEQ ID NO: 45290 - DNA, 90 bp, Homo sapiens
tgtgaattctgccccgtgacccggtggaaaatggcgatttgtgggaagacatgtaaggaatttgcataagacagttatgcaaaatggagc

SEQ ID NO: 45291 - DNA, 114 bp, Homo sapiens
gtggaggagctgtgcagccgcgaggaggcgcgggaggtgttcgagaacgaccccgagacgacttcccaagtaagaagcggaagaggagccgctggaaccaagacacaatggaac

SEQ ID NO: 45292 - DNA, 100 bp, Homo sapiens
cgagggcgatgaagaagcagaggaagaacaagaagagaaccttgaagcaagtggaggtgcagaggggactccaagaccgtggccagaaccagacccagag

SEQ ID NO: 45293 - DNA, 74 bp, Homo sapiens
ggaatgtacacgataattaaagagtaaagttgtgctcaacgggcaccattcccaaactcacagctaaatccaac

SEQ ID NO: 45294 - DNA, 76 bp, Homo sapiens
ctgtgggcgctgacgaccgaagagagaagagagacccccaacccttagtgcttccttcagaacaatggctgaattc

SEQ ID NO: 45295 - DNA, 98 bp, Homo sapiens
ttaggttcatgggtgtatgtgttcatcaaggacaattgcatgcacttacagagaatgatatggaacctagcaaagctgttccactgaatgcatctaag

SEQ ID NO: 45296 - DNA, 98 bp, Homo sapiens
aaggaagcaaagcaaatggagaatggcatgctggtgacggacagtgcagggaagcaactgcagaggtatctagagatcaggttctggacaatgctgca

SEQ ID NO: 45297 - DNA, 78 bp, Homo sapiens
tggagaatgtcatcaagcagcacattcaagacttaattcagtgcacaaatgagatgaatgtgaacatcccacagttgg

SEQ ID NO: 45298 - DNA, 100 bp, Homo sapiens
aaacgtagggaccacatcaaagacagctttcacagtttgcgggactcagtcccatcactccaaggagagaagcaacatggccaacgccctggccagcgcc

SEQ ID NO: 45299 - DNA, 100 bp, Homo sapiens
gcaatgaccgcaatgtcttctctcgtctcaccagtaatcagagccaggggtcagcgctggacaatgtggtccccggaccagcagcattgacatcacctgg

SEQ ID NO: 45300 - DNA, 83 bp, Homo sapiens
ctgtcacccagctgggcagccagctcagtgctatgcaaatcaacagctatggcacagatgaggagagcatcctgactctgttg

SEQ ID NO: 45301 - DNA, 98 bp, Homo sapiens
gcagactccaaccagaacatgcagtccctgcttcctgccaacaagaatgtggtggtggctgacttcgggctggcgcgtctcatggtggacgagaagac

SEQ ID NO: 45302 - DNA, 97 bp, Homo sapiens
aggcacagcgtttcttgcaagaatgggaggctgaccggttccctgatgtgttacctgcttctgctactgatccaaactgcagaacttctcattcatc

SEQ ID NO: 45303 - DNA, 80 bp, Homo sapiens
gatcccaggaacagccccgtgccccccacaaagaaagatgtgaagttcatttccaatccgccctccatggtggcagcggg

SEQ ID NO: 45304 - DNA, 51 bp, Homo sapiens
cgtctggccaagaatcagaggaagtggacacgatgaggcgagtggtacgac

SEQ ID NO: 45305 - DNA, 83 bp, Homo sapiens
gtcacggagcaggacaaggccatcctgggactttgaacatgtcggggatcgccctcagcagactcgcccaggagaggaaagca

SEQ ID NO: 45306 - DNA, 90 bp, Homo sapiens
gcacccctctccacccctcgcctgctcatcaacaaggagaaagctggccagccctgggcgctgcctatggcacagccaagagcggtaccg

SEQ ID NO: 45307 - DNA, 90 bp, Homo sapiens
caggacttctcctggcggcgctgcggatccagggggtcggctgccaggtacagccgttcttggaacacctcacagcttgccacatctgat

SEQ ID NO: 45308 - DNA, 100 bp, Homo sapiens
ggagaagcaaagtttgtttgctaccaaacctggaggcctatgagagctacaagaagaaggactacacccaggtggactacttaatcaacgggatgtatgc

SEQ ID NO: 45309 - DNA, 90 bp, Homo sapiens
cagggagagtgaatacagctagggacgtgaaaggaatccataacactggaggatgtggctgtggacttcacttgggaggagtggcaactc

SEQ ID NO: 45310 - DNA, 80 bp, Homo sapiens
gctgtaaccacctcacagattccagcttcggaacaagagaccctgggtactggaagatgaaagagactatacaagggacc

SEQ ID NO: 45311 - DNA, 96 bp, Homo sapiens
catagtggaaactgggaagcttttaggcatctgatcagagcgggagccagccgggggaccacagtgctggacaggaagaggggatggagcgccagc

SEQ ID NO: 45312 - DNA, 96 bp, Homo sapiens
ggacgctgagggcccatgtgctgaaaatccgaagtgccgcggaaagtggaggcaccccccgagcccagctccacacaccgttcctggatctcctct

SEQ ID NO: 45313 - DNA, 90 bp, Homo sapiens
aatgatttgctgatggtgctgtctccacggttggatcacactcgtgcagtcaattatttcagcaaggtgggtcatgataactgggtacgt

SEQ ID NO: 45314 - DNA, 100 bp, Homo sapiens
ccaagtacgctgaggccgagaacaccattgaccagctacgcctcggggccaagtgcctccggagccagcgtggtggccatagacaacaagatcgaacagg

SEQ ID NO: 45315 - DNA, 50 bp, Homo sapiens
atgcaccattttgaacgtgaattttcgaatctcacaaactatgatctctg

SEQ ID NO: 45316 - DNA, 75 bp, Homo sapiens
gaagcaagaaggccctggacacagcaatatctctgggctttcacaggtatgatctcgtgaaatcttgagagaaac

SEQ ID NO: 45317 - DNA, 75 bp, Homo sapiens
gatctccgccctggggtcattgtcagcaatggctgccatccggaagaaactggtgattgttggtgatggagcctg

SEQ ID NO: 45318 - DNA, 82 bp, Homo sapiens
cggtaaagtttctgttctctgcctcggtgtctggatgcccagcctaaccaagtcagcttcccatctttggctgagacaagga

SEQ ID NO: 45319 - DNA, 100 bp, Homo sapiens
ttgagggggactggcctggcgtgcactccgcacctcggggacattattgcgcgtggaacggctgcttttggaaggtcaccgacgatgagggcgcacctgc

SEQ ID NO: 45320 - DNA, 95 bp, Homo sapiens
gcccaccacagcagaggatgcagcctcccaaccccaagagtcccagattggagtccctgagagaagctgggaagtttccaagggtcacttgtgtc

SEQ ID NO: 45321 - DNA, 83 bp, Homo sapiens
tgactgagtacctgaaccggcacctgcacacctggatccaggataacggaggctggcaatggctgccatccggaagaaactgg

SEQ ID NO: 45322 - DNA, 74 bp, Homo sapiens
aacactttccagccttgtttttcagcagctttgaggaaaagtatagaatgaaatttttggttcgacggtggcat

SEQ ID NO: 45323 - DNA, 100 bp, Homo sapiens
tcgagttagtggcaatctggcaacaatacagaagttaagatttattgtcaaccaaggtgcaccctgaagaccacaaattaaataaatatcatgactggct

SEQ ID NO: 45324 - DNA, 101 bp, Homo sapiens
ggaaaagtggcactgaggctctggaacttctgcccagctctccttggtcttggtggatgtcagtgcttactccccatgaaattaaattttacttcatcctt

SEQ ID NO: 45325 - DNA, 83 bp, Homo sapiens
cagggcttctcctatgactacgtctttgactggaacatgctgaaattcgactgggcgttcatcaacaccaacatctttgccag

SEQ ID NO: 45326 - DNA, 99 bp, Homo sapiens
cgctgggccgaccccagagcggcgctggacagacaccattcgcttttcacccaagatgatttgatgtcttataaaactctgatgaaccatgatggctac

SEQ ID NO: 45327 - DNA, 76 bp, Homo sapiens
gaaacaaaattcgatttgcaaatcattcagtgaatcccaactgttatgccaaagatgtacctttaagagaagggac

SEQ ID NO: 45328 - DNA, 74 bp, Homo sapiens
gaatccctacgcgtccctttgggtttagcacgatgagctcaatcggcactgggttctagcgactgcgaagatag

SEQ ID NO: 45329 - DNA, 90 bp, Homo sapiens
tgttcctgagtgtcaactatctgggggggacattcccagcttcccacatcacaaactttgaggttgatcaatctgtgtttgaaattcccg

SEQ ID NO: 45330 - DNA, 144 bp, Homo sapiens
tcttcctcctcctcctccccaccaccaccatctccatcacccaccaacaacaccacaataatccacagccaaggtcaactttgtagtgtgccaactctttgccttgctagcagccatttggtttcgaacttatctacattcaag

SEQ ID NO: 45331 - DNA, 90 bp, Homo sapiens
gtaattcgaccagaatggattgtggaaagcaccaaggatgacattgatcttgatgccttggctgcagaaatagaaggagctggtgctgcc

SEQ ID NO: 45332 - DNA, 98 bp, Homo sapiens
gaatgctgctaaaaacaagactggggctgctcccatcattgatgtggtgcgatcggtttggagcaggtatgttaagaagttaggggattttgctaagc

SEQ ID NO: 45333 - DNA, 101 bp, Homo sapiens
cacagcatgtggttttgtgcaggaagacaatggtgtaaaattggttgatcctttgggtgaaatgttggcaccatcctgggaggaacatgccacctgtttag

SEQ ID NO: 45334 - DNA, 101 bp, Homo sapiens
cggctactcttgatcctctccggctgcttggtctacggcacaggggtcgctgtgatgaaattcaagaaccccccagtgaacagcctgagcctggagtttct

SEQ ID NO: 45335 - DNA, 98 bp, Homo sapiens
cactgtggtctgttgtaccccactgctggggtggtggttccaatgagacagggcacaccaaactccatctggccaagactaaggggctgcagagcggg

SEQ ID NO: 45336 - DNA, 100 bp, Homo sapiens
cgtggtcgtgcggcaagtgagcgatttggtgaacagacactcccttctgtagattgcttgttttcagagggaaaaacgtgatgtccccctcctgaatctt

SEQ ID NO: 45337 - DNA, 88 bp, Homo sapiens
ccggatgagtacgataccgaagcgggctgtgtgccccttctccacccagagtctgttcggcacttgaagtactccttgtttaagaaat

SEQ ID NO: 45338 - DNA, 76 bp, Homo sapiens
aaggacaaactggtaggagcaattgtctactatgacgagccatcatcaaccactttaaccccaaaattgagtccta

SEQ ID NO: 45339 - DNA, 73 bp, Homo sapiens
gaccttccggagcttctcagaagacagagggttttcttttgagcctcctccaaaactgcccagtggagtgttc

SEQ ID NO: 45340 - DNA, 75 bp, Homo sapiens
caagttgctactcgggacgctgcacctcccgcgccgcacggtggacgagatcaatgtccgagttaccaccatgga

SEQ ID NO: 45341 - DNA, 51 bp, Homo sapiens
ccgagctggacccggaccggttttgggaatgaatgtgatttgaactcattc

SEQ ID NO: 45342 - DNA, 96 bp, Homo sapiens
gcggaggcttttatatgccagagaaccctgagtgtgcccctgacatgacaaggagccgtcgtcgttagctcaaactggaggattataaggatcgcc

SEQ ID NO: 45343 - DNA, 80 bp, Homo sapiens
cccctctgagactggagtgagagggtcttctggtgttggagcgggccggagagaagtagagtgggctgcgaggagaagga

SEQ ID NO: 45344 - DNA, 89 bp, Homo sapiens
agcggtttcaaacggcttagagcaggccgcttggttctgacccagctgaggattttttatcaagcagaaatgcatcgaacaacgagaat

SEQ ID NO: 45345 - DNA, 140 bp, Homo sapiens
ccgggatcgtgaccgagaccgtgaccgagagcgtgaccgagagcgcgaatatcgtcatcgttagaaggttcactaccttatggttctgtctgccaactgggcctatgtgaaagacgcctgccggatgcagaagtatgaag

SEQ ID NO: 45346 - DNA, 74 bp, Homo sapiens
cagtgcccttgtggcgaatggggctcacgtcgaaaaacatccagtacagacctttctgatatccctgctctccc

SEQ ID NO: 45347 - DNA, 50 bp, Homo sapiens
gagcagccggggtcggagcggtaaaggcatgacttcctggcaccacaggg

SEQ ID NO: 45348 - DNA, 99 bp, Homo sapiens
ccccaagctccccgtcctcgggcctcaggagtgcaagtagctgatgaagtatgtcgcattttttatgacatgaaagttcgtaaatgctccacaccagaa

SEQ ID NO: 45349 - DNA, 76 bp, Homo sapiens
cagggctccttcttaactaaagtcctcatcaccgggggcatcgtggccacagctgggcgcttcacccagtggtact

SEQ ID NO: 45350 - DNA, 101 bp, Homo sapiens
ctgcaggccccacgagtgggaggtgctgagccgctcaggacttgagagagacaagtttgataataaaacggtttcatttgaggagcacattaagtcagaac

SEQ ID NO: 45351 - DNA, 101 bp, Homo sapiens
tatttggagttcttacaacatggcagacattgacaacacccttacccttctgaagaacagaaaaagcagttggcacaagacacgggactcaccatccttca

SEQ ID NO: 45352 - DNA, 98 bp, Homo sapiens
aggacaccgaagaaaccatcacgtacacggtgtccaccccccagggttcctgacccctgcccctggacagcgaccccttctcagactccagttgggcc

SEQ ID NO: 45353 - DNA, 74 bp, Homo sapiens
ctttgacaatacaggaaatgtttgtggttctgctgggcatggacatcctgtccgccctggtgacccggctgcag

SEQ ID NO: 45354 - DNA, 74 bp, Homo sapiens
gcagacgttagcgtgagtgatcactctcaatcccggccccatggctgggggttatggagtgatgggtgacgatg

SEQ ID NO: 45355 - DNA, 121 bp, Homo sapiens
ccattgacgccatgtcgggttattcgagtgaccgagaccgcggccgggaccgagggttgcttatggaaccacagagaacagtcccgtgacattcgcgcacttccctgaggacactgtggag

SEQ ID NO: 45356 - DNA, 83 bp, Homo sapiens
accccaaagccgcgcgagcagtgggaggagcaatgagaggcaatcctgattttttatcaagcagaaatgcatcgaacaacgag

SEQ ID NO: 45357 - DNA, 88 bp, Homo sapiens
ttgggaaatcatctctaaatcccatcctctttcgaggtgttggtttccaggcacttgggctggttggcctgcaggagtctgtaaggta

SEQ ID NO: 45358 - DNA, 98 bp, Homo sapiens
gaccattttctactgtccctgcgcgagtccagaaaaggctttgaaagactcactacaaccctatgaggctgcttatctatcaaaatccttatctcgac

SEQ ID NO: 45359 - DNA, 100 bp, Homo sapiens
cgggaacatggccctggagcggctctgctcggtcctcaaaggaggcctagaaggagagccagagtgcgatcagaaaaccagccgtgcgctggaagacagg

SEQ ID NO: 45360 - DNA, 82 bp, Homo sapiens
ccgcgaggaggcgcgggaggtgttcgagaacgaccccgagacgacccaacatgagtgaagtttcctgcaagaaacgggacga

SEQ ID NO: 45361 - DNA, 75 bp, Homo sapiens
ctctcaaacaacatggagcagagaccaagccgaaatactggaagggaatcagagatcattgatttcttcctgggg

SEQ ID NO: 45362 - DNA, 101 bp, Homo sapiens
gggacaaggagcggcagattatcaaggagcgttttaagagacaagtggaggtaaacgtccgtaacaagatcctgtacctgatccaggcctgggcgcatgcc

SEQ ID NO: 45363 - DNA, 77 bp, Homo sapiens
tctctgtttttgaatgataaagagccaacaccactatctgaggaaaccttctggcgaattccagccaagctgagtcc

SEQ ID NO: 45364 - DNA, 50 bp, Homo sapiens
ctggtgatggcctacgggagcctgagcgtctctacagccaacttgagcga

SEQ ID NO: 45365 - DNA, 96 bp, Homo sapiens
ccggagcccttgggtgaaattgttaggcgtggagagggagtgatgtcttccagactcggtgctgtacccgcctgcaagagaagcctgagccagtgc

SEQ ID NO: 45366 - DNA, 100 bp, Homo sapiens
cggtatcagcgccctgcaccaggttatctaccttgcctgctcctatgccacagtgtacctgatctacctgaaatttaaggcaacctacgatggaaatcat

SEQ ID NO: 45367 - DNA, 82 bp, Homo sapiens
cgcggggaccgctgtgctctcggatgatcggctgaatgtaacagaggaactaacgtccaacgacaagacgaggattctcaac

SEQ ID NO: 45368 - DNA, 97 bp, Homo sapiens
tcaggttccaatgatgtccccaaatggttctgtgcctcctatctatgtgcctcctggatatgccccacagggaaatgaggcaagttatcctttggaa

SEQ ID NO: 45369 - DNA, 98 bp, Homo sapiens
ctgcaggtcctggatttatttctcgattcgctgtcggaggagaatgagaccctggtggagtttgctattgttgggacccctgattttagcaggatggc

SEQ ID NO: 45370 - DNA, 100 bp, Homo sapiens
tgctgctggtgactacaagaggaagaaaccgactgcccaaggatgtagacaggacccgtttagagtggacaaactacattcatgggtggcaggatcgttg

SEQ ID NO: 45371 - DNA, 82 bp, Homo sapiens
gtatgatcttcccaagaaagaggacgctttactctaccagagcaagggtgagaatgagatggtgatcatgagacctggaaac

SEQ ID NO: 45372 - DNA, 97 bp, Homo sapiens
gtttatgctcattacgaggaggggccctgcagagagcaaatgatgacagcctcgaagcggaggatccctgtgtcccagccgggcatggccgaccccc

SEQ ID NO: 45373 - DNA, 50 bp, Homo sapiens
accgaggccccctcttcgcctcctccagacaagttggatggcttgaggac

SEQ ID NO: 45374 - DNA, 75 bp, Homo sapiens
cagcaagtatttcttcactgggagtcgagacaaaaagctggttatattctgggcactaaatgaaggcgtttctag

SEQ ID NO: 45375 - DNA, 150 bp, Homo sapiens
ttcagcttcaatgtgcccttcatcccagtcacccaggcctccgcttctccggcctccctgctcttaccgggagatctttaatctcatgaagtacgacagctacagccgcttcttaaagtctgacttgtttttaaaacacaagcgaaccga

SEQ ID NO: 45376 - DNA, 75 bp, Homo sapiens
gcccacgctgttccggttggcgagtgacaccactgatgacgatgatgcactcggagtccttcaataatgttaaac

SEQ ID NO: 45377 - DNA, 75 bp, Homo sapiens
agagagagaggtggacagatctgagagatactgaggagctggatggcctgttggaaatcaaccgcatgacccaca

SEQ ID NO: 45378 - DNA, 98 bp, Homo sapiens
ccgagatgccgggggagcggggccttccacaccccctccgtgggtgtgtggaatactcccccagttgcaagaggcgcaggaccgtggaagacttcaac

SEQ ID NO: 45379 - DNA, 100 bp, Homo sapiens
ggcccggccaggttcggcgttccgtgagtgaacggttcgggaggccttgaggaaagcagagaaggagctagaatctcacagctcatggtatgctccagag

SEQ ID NO: 45380 - DNA, 101 bp, Homo sapiens
ccaggcctggctcgcgcctctcccaggacccgcctggctgcgagatatgtggatagatacttctcaagacatcacacagcgtgagtcaatcaaggagggaa

SEQ ID NO: 45381 - DNA, 82 bp, Homo sapiens
ccaaagacccctggagacatggaatactcccccagttgcaagaggcgcaggaccgtggaagacttcaacaaattctgcacct

SEQ ID NO: 45382 - DNA, 100 bp, Homo sapiens
ttcgtactgggacgttggggagggggctgtgccgggcggagagaactcagcgaggattctgaggagaggagctgcctttctcttcgagacatcacgtcca

SEQ ID NO: 45383 - DNA, 82 bp, Homo sapiens
ctggcgtgcactccgcacctcggggacattattgcgcgtggaacggctgcttttggaagtgccctctggtggtcagaagatg

SEQ ID NO: 45384 - DNA, 83 bp, Homo sapiens
agccagtagcttggatccttgtgggcatgatccataatcggtttcaagcacttttctgtagaaggtcagttggaattcagggc

SEQ ID NO: 45385 - DNA, 75 bp, Homo sapiens
gggacacgcaggatgagccccgcgaccactggcacattcttgctgacaggtgtgatgaatgcagactctgctacc

SEQ ID NO: 45386 - DNA, 75 bp, Homo sapiens
gcattgatttcccggatctggtaacatggcaaaagatacggagctaatagatctgtctacagtagatgtgattct

SEQ ID NO: 45387 - DNA, 82 bp, Homo sapiens
ccgcagcgacggcggcgacagcagttggaaaatggatataccttatttgattatgatgttggactgaatgatataattcagc

SEQ ID NO: 45388 - DNA, 98 bp, Homo sapiens
cgatcatggcggatggcccccggtgcaagaggcgcaaacaagccaatcccaggaggaaaaacgacttcagtgaagttccttatgacttcccctgaaat

SEQ ID NO: 45389 - DNA, 50 bp, Homo sapiens
actttagaccctccacctaattgcagatttgaaagaagccaacactaaac

SEQ ID NO: 45390 - DNA, 75 bp, Homo sapiens
ccatccagggccaccatgtctgcctcctggtgaaaaagagatggacagagacgtatgtgcgttggtctcctaagg

SEQ ID NO: 45391 - DNA, 100 bp, Homo sapiens
cgacgtgctttcccattttgctcagcgactgtttgatgacgtcccgcagactaaatgtgttaaatgggcttgccaacaatatggatgatttgaagataaa

SEQ ID NO: 45392 - DNA, 82 bp, Homo sapiens
cctgaacccatccttccatccctccaaaaaatttacccactcgagctaatccaagatatggggttccatgtcatttactgaa

SEQ ID NO: 45393 - DNA, 74 bp, Homo sapiens
ctggatatgtgcatggatctgaaagttcatcctgaacaggaaaaggttgcagggagagtagctgaagaaagggg

SEQ ID NO: 45394 - DNA, 73 bp, Homo sapiens
tctatgcctatgataactttggcgtgctgggcctggacctctggcaggggacacccgttccagtgagatgccc

SEQ ID NO: 45395 - DNA, 100 bp, Homo sapiens
atctacaaccttggagcccagagccacgtcaaagttagcatggcctcattgaaagaactagatcaaagactctttgaaaattacatcgagttgaaagcag

SEQ ID NO: 45396 - DNA, 82 bp, Homo sapiens
ggccgtcggagacatgggagacccggggtcggagacaaatttacatgtattggagaccagaccagaagcccttctgaattaa

SEQ ID NO: 45397 - DNA, 100 bp, Homo sapiens
aagcacaaagagcttgctccctacgatgagaactggttctacacgcgagctgttcgatcctttggtacagaagacagaccgacagatcgtccaataccac

SEQ ID NO: 45398 - DNA, 88 bp, Homo sapiens
ctcaaaaactgacactcgattcagctattggaaagtttttttaatgtggttggaacaactgaggaaccactcgttttgactattattt

SEQ ID NO: 45399 - DNA, 75 bp, Homo sapiens
gacgacgaggaggaggaggaggaggaaaaagggaagtatggccacggctgcattaccggaaagcgggtcttccct

SEQ ID NO: 45400 - DNA, 74 bp, Homo sapiens
cgtactttgtctgactacaatattcaaaaggcgttcaatgtcatcaatggcggttctcatgctggcaacaagct

SEQ ID NO: 45401 - DNA, 100 bp, Homo sapiens
cgactcgctacgcgggtcttgcgagatatctggccgcctctgccgcagctggagctcgccctcccctacctgcggaagagtcaagggaatgtcatcaaca

SEQ ID NO: 45402 - DNA, 75 bp, Homo sapiens
ccgctgtattgtggagtatcagaacaagggccgcgggaacgagtgcgtgcaagcagcccgacggccatggaggct

SEQ ID NO: 45403 - DNA, 100 bp, Homo sapiens
gtgatccagcaaggtcggcagagcaaggggcttacgcagaaggacctggccacggccttcctggatgctctgcagaaccaggctgaggccagcagcaaga

SEQ ID NO: 45404 - DNA, 74 bp, Homo sapiens
cagaacccaggcgagggacagctccggacagttgggccatatggtgctcttcccagtctggttcctgtacagtc

SEQ ID NO: 45405 - DNA, 74 bp, Homo sapiens
ctgcactaccagaccaccaagcagaacctctggtgtattccgaacttaagtaccacccagagatgagattcttc

SEQ ID NO: 45406 - DNA, 97 bp, Homo sapiens
ctgagacactggagcagcccagcaagcccagaggaattaaacaaccaccatgtcgagcaaaaaggcaaagaccaagaccaccaagaagcgccctcag

SEQ ID NO: 45407 - DNA, 82 bp, Homo sapiens
catatgatgaaaaccccatgaagtgctgggattacaagcgtgagctaccacacccagcgaggaagccaagtttaacgtgtgt

SEQ ID NO: 45408 - DNA, 118 bp, Homo sapiens
agagcagcacctccatcaggtacaacctcgaggagctctaccagctgatgtagcccagcagttccagtatgctgtgcgggtgattggcagcaacttcgccccaactgttgaaagagat

SEQ ID NO: 45409 - DNA, 120 bp, Homo sapiens
tcggggcagggcaagcacgggaagaagcagctggacccgctcaccatctacggcatccggttgtactaatggtcacttgatgtgcgctggctgttttatccacctactagcagatgcccg

SEQ ID NO: 45410 - DNA, 98 bp, Homo sapiens
tggtctctgaggtctggcataagaaacggtggcttctggcacagcagcttaattgaccggaacctcattgattattttgttcccttcctccccctgga

SEQ ID NO: 45411 - DNA, 78 bp, Homo sapiens
catgaccaagatgcccgagtgctacttctactccaagttcggcatcgactgggcccccgagagtaaccgtattgtgac

SEQ ID NO: 45412 - DNA, 114 bp, Homo sapiens
ctgcagtcctcggcgtgtgctggcagcttcggagcccaccgagccgggcggctaggatgatgaaccggacgacccccgaccaggagctggtgccggcgtcggagcccgtgtggg

SEQ ID NO: 45413 - DNA, 101 bp, Homo sapiens
agacttggccaaatggacgggactattaagtgcagtaagagcttgcctggcctgtgtgcagagctgcctcatcctgaaattctgggagttgaaagccccag

SEQ ID NO: 45414 - DNA, 100 bp, Homo sapiens
gaagcccctgccaaggaggagcccgcttctcagtgggacaccgggaaggtgtcatggagaaactccagctgggcccagagattctgcagcgggaaaatcc

SEQ ID NO: 45415 - DNA, 76 bp, Homo sapiens
tgctaatccagtggaaatcaggagagcaaaactcatcagatttatctgccaaacccaaattctcaaagcctttcaa

SEQ ID NO: 45416 - DNA, 75 bp, Homo sapiens
ctcgcgggcgcaatgaatccgcggcaggtagaaacgttgaagcacaatgatccttttgctcctggtggaacagtt

SEQ ID NO: 45417 - DNA, 75 bp, Homo sapiens
cacttcaaacattcgtctcggaaaccccgcctcttacagtcacgaggactcagaattcatgattgaagaaatgca

SEQ ID NO: 45418 - DNA, 98 bp, Homo sapiens
cctggtggaggtgttaaatgaaaaacaactctgctcatggtgattacatgcaaaataacgagagcagcttaatagagcaagctccaatacctcaggac

SEQ ID NO: 45419 - DNA, 100 bp, Homo sapiens
tgaaagctggcaacgtgctgatgaccctcgagggagacatcaggctggatcctgctctctctcagccgcctgtggacatgcgcaaagggccctctcctga

SEQ ID NO: 45420 - DNA, 75 bp, Homo sapiens
aaatcagagtgaagaggaagccagaagatgggagagacatttttgaaatgggcttaggtcacgagcaaggatttg

SEQ ID NO: 45421 - DNA, 82 bp, Homo sapiens
ggaaccacgcgagctgcagccaggtgtctgcttttggggcagagttttcatcggaggcatgcagagagttaggcttttctag

SEQ ID NO: 45422 - DNA, 82 bp, Homo sapiens
ctgcctcagcctcccgagtggctgggactacaggctgcagccacaggtccgcacggaaaaccaggagctccaagactgccgc

SEQ ID NO: 45423 - DNA, 95 bp, Homo sapiens
ggagatttttcgtaagttgaactcctctggtggaggtgactctgatatgggaaattaaggatgcagacactcagggcgtgtgtcttgcacagcca

SEQ ID NO: 45424 - DNA, 75 bp, Homo sapiens
gggaagatcctggaggtggatctgaagaacgggaaacacatatcatgcataccttcaaagaggacttctatgggg

SEQ ID NO: 45425 - DNA, 100 bp, Homo sapiens
attccacctaagaacggagatgttgttcttgcagaacatgccagcagaagcattcaccaactgacatgtgccctgaaagaaggcgatgtcactattggag

SEQ ID NO: 45426 - DNA, 83 bp, Homo sapiens
cgaaggggcgtctgcggctctccgccgtccccagccctgcctctccctgggctctgaaatgcatcgtgattcctgtccattgg

SEQ ID NO: 45427 - DNA, 51 bp, Homo sapiens
ggagacacggccagatctgccctccagtaaactaacattatggatttttcc

SEQ ID NO: 45428 - DNA, 90 bp, Homo sapiens
ggaaaaaccgctatgtggtgctgaaaggggaccagctctacatctctgagaaggaggtggaggcctgaattttgatctatgttctaccta

SEQ ID NO: 45429 - DNA, 100 bp, Homo sapiens
gcggaacctgcgcggctactacaaccagagcgaggacgacttcccagactcccggccagccatcgaggacctcaagtactgcctggagaggacggaccag

SEQ ID NO: 45430 - DNA, 50 bp, Homo sapiens
gcgggcggctgagacaaaggcgacggtcattatccagctcaggaaaacct

SEQ ID NO: 45431 - DNA, 75 bp, Homo sapiens
ctagcaggaatgcttactgttgcgtggttcgttattaacagggagtggtacgggtatcactttccggagctggtg

SEQ ID NO: 45432 - DNA, 99 bp, Homo sapiens
gacggacgtcagcaaagaggccgccaacatgatcctggtggatgatgacttctcagccatcatgtgatgtgtccaatctagatcccaacttctcatttg

SEQ ID NO: 45433 - DNA, 98 bp, Homo sapiens
aggaactgggctcatccacaaatgccttgagacagctacaaggatttccattttatggtaaaccaatggttttaaaatcaaagatgggaaaatcggag

SEQ ID NO: 45434 - DNA, 98 bp, Homo sapiens
ttagataaacttgtggatggacttgctacctcttgggtgaactctagcaattacaagattcatctgaaaactacattaagatgaagacctttgaaggt

SEQ ID NO: 45435 - DNA, 100 bp, Homo sapiens
tgagaagcccaactaaagccccacatttgcagctcattgaaggaaagaaacattgctgaggctcttgtcagcaaaggtctagccacagtgatcagatacc

SEQ ID NO: 45436 - DNA, 100 bp, Homo sapiens
tctcaaaaacaaaattctgaactcaggacttggcaataatggcaatgcagatgcagcttgaagcaaatgcagatacttcagtggaagaagaaagctttgg

SEQ ID NO: 45437 - DNA, 80 bp, Homo sapiens
gaaatcctcccccacaaccggtggactggaataacgactactgcagtagtgggtgcatggctgcctcctaatcccatagt

SEQ ID NO: 45438 - DNA, 100 bp, Homo sapiens
gcaaaccgggaaaggagaggatcccggagccggccggctgcgtgcacttttcctacaaagcatcgtgtgagatccgcgtgcttatgctcctgtactcttc

SEQ ID NO: 45439 - DNA, 100 bp, Homo sapiens
ggaggcggaggggagcggagcccggagcgtcgtggaaagcaaacctcggacagccaacaattcagagttttgaacaggtgggaacaaaagtgaatgtgac

SEQ ID NO: 45440 - DNA, 108 bp, Homo sapiens
gactgcggcgcgctgctggacgaagagctctcctccttcttcctcaactatctcgctgacacgcaggctttctcctgtttctcagaggatttatcaattatgcaaaag

SEQ ID NO: 45441 - DNA, 83 bp, Homo sapiens
agggcaccaaggcggtcaccaagtacaccagctcgaagctgtctgtccccagaccccagagcacgtccggcaccaccatgact

SEQ ID NO: 45442 - DNA, 75 bp, Homo sapiens
ctgcggctctccgccgtccccagccctgcctctccctgggctctggtcatcatcagatttgaaatatttaaagtg

SEQ ID NO: 45443 - DNA, 100 bp, Homo sapiens
gttggaccctcgtcaatctctttcgaagccattcagtcctcaatctccttttccttggctaccctgaacagcagagaatttcaaaggaccttgctaatat

SEQ ID NO: 45444 - DNA, 75 bp, Homo sapiens
cgagcgcgccccaagcccgggcgccaccgctgccacctccgcgagaaggatatggccctgaagccacatgagcgg

SEQ ID NO: 45445 - DNA, 74 bp, Homo sapiens
cggggagaggcctgtcctcaaaggttctcctgaaaagaaagctgaacattcatctataaatcaagaaaatggca

SEQ ID NO: 45446 - DNA, 74 bp, Homo sapiens
acgcagtgacgagcggccgaagcagctttgcgtacacctccagcatgagagccaaatacctcgccacgagccag

SEQ ID NO: 45447 - DNA, 100 bp, Homo sapiens
ctggggaacccgttcagctctccagtgggacagcgcatcggagctgctgctcttcctccagaacctgcccacagcccactgggatgatgaggacatcagc

SEQ ID NO: 45448 - DNA, 98 bp, Homo sapiens
caggccgagccggagctgcagcccgagcgcggtggtgccctcagccccgtcctcttgtcctcctcagcctcgtttcatgatcaacatgggagactccc

SEQ ID NO: 45449 - DNA, 100 bp, Homo sapiens
cccgaggggagacgccgtgacaactttcgtttccctctgagggaattgggaggtcggcggccccaaaaatatgaattgagaattcgttatttgccaaaag

SEQ ID NO: 45450 - DNA, 95 bp, Homo sapiens
atgtccgaggcagatggaccacccgctgagcgtcagaaatgggagacctgtcggccatggagcctaatgatagtaccagtaccgctgtggaggag

SEQ ID NO: 45451 - DNA, 100 bp, Homo sapiens
gcagagcaccaggcccaccgtgaaagaaggtgcttcctggaggggcctgccccactgttcctgtgctgagttccaggacagcctcaacttcagctaccat

SEQ ID NO: 45452 - DNA, 136 bp, Homo sapiens
acaagtgacaagaaatgttccaccaggacttgatgaatataatccattctcggattctagaacagtcattgctagaatcgtggatggaagcagattcactgagttcaaagccttttatggagacacattagttaca

SEQ ID NO: 45453 - DNA, 75 bp, Homo sapiens
ggcagatagtgtgtaatgatgcctcctgggagactcgatttgaacatggaattcaatccttcagatcatcctcgg

SEQ ID NO: 45454 - DNA, 90 bp, Homo sapiens
ggagaatcgcgaggcagagcgggagcgcgcagccagatccagctccaggtcccacaggggctcttcttccccacgaaaaagatcttattc

SEQ ID NO: 45455 - DNA, 100 bp, Homo sapiens
tcctggaagcagagtaaataaagctcatggcccaccagctagaaaggcatgtggagaccccaaggcaaaaccatcctatcttatcgacaaaaacctggaa

SEQ ID NO: 45456 - DNA, 74 bp, Homo sapiens
gcctggctcggagcagcagcctctgagtgacaaagcataaatcatggacaccagagaataaggtggacctcagg

SEQ ID NO: 45457 - DNA, 90 bp, Homo sapiens
agcagctccacgaaaggcagccgcggatcgccgcgctcagcgacaaacaagtatccgcccccagatcatgaacggccccctgcacccccg

SEQ ID NO: 45458 - DNA, 100 bp, Homo sapiens
ggaaaattactgatacagagacgatggtcggaatcagatttgaaaatgaaagtgacacagagtctgggatctaataattcagtcattttggatggactaa

SEQ ID NO: 45459 - DNA, 99 bp, Homo sapiens
cccggacttctcccccaggacctaccaccctctgtccttattcaagtcaaacaacgttgaaatggattgggtgttgaagcatactggtccaaatagtcc

SEQ ID NO: 45460 - DNA, 75 bp, Homo sapiens
tgatgagaggatgtggtggtctactctgatgtcaatcttgagggctagcttctcctcttaagaacaatgatgaag

SEQ ID NO: 45461 - DNA, 74 bp, Homo sapiens
gttacctgaaagagcaatattacaggatagagggaggaatcagcagcttggaaattcaagcacgtgatctggcg

SEQ ID NO: 45462 - DNA, 82 bp, Homo sapiens
tggggccgccggcggcccggcttcagtcctcctgcatatgcccaagaggattgggagtggaatggacaccagcagaagcacc

SEQ ID NO: 45463 - DNA, 75 bp, Homo sapiens
caggagcccgcggccggccagccgaagatggtggcggctactcctcctgaactgaagcgctgcggcatggcgcgc

SEQ ID NO: 45464 - DNA, 100 bp, Homo sapiens
ggaaactttagagaagttaagagaagaattagctatcaaatccggccaggcgagaaccactgtctctgatcaacgtgcggaagaggaacgtggaatctgg

SEQ ID NO: 45465 - DNA, 74 bp, Homo sapiens
aggttgcttcctgggtgcactttgataatttgaaagaaccttccagtctgggaacagatacagatataccaatg

SEQ ID NO: 45466 - DNA, 74 bp, Homo sapiens
tcgctgaggggcttgcctgaagcgaggggtgagatgagtgagagccgagcaaagagagttagaataaaagaggt

SEQ ID NO: 45467 - DNA, 100 bp, Homo sapiens
gcggggaagtcatgctcgcttcacggaggcaatagctagccggtccgtaaaagccctgggctcagccagagcagggcagaggatgacgggatgaccagct

SEQ ID NO: 45468 - DNA, 82 bp, Homo sapiens
ccaaagaaacaagccgtggaataggtgtatcaagtaatggtgcaaagcctgaacttcttggacacttaatgattgttggcaa

SEQ ID NO: 45469 - DNA, 75 bp, Homo sapiens
gagcccgcggccggggacctggacaacccccctaagaagttccgtgggggggccctcagcctcttggccttgaac

SEQ ID NO: 45470 - DNA, 100 bp, Homo sapiens
gtgataaaagaggaaatcaaagcctttcttgccaatcggaggatttcccaagcagttgttgcacaggtaacaggagtcgatagcagcagttggtgacgag

SEQ ID NO: 45471 - DNA, 95 bp, Homo sapiens
aaagaaataaggcgagtacacaagcgaagactttccagctcagagagtgaagatgggatggaggtggataccacaccaacagttgctggacagtt

SEQ ID NO: 45472 - DNA, 90 bp, Homo sapiens
caaaggaaggggagcccgggacccccgggggcgcagatataattggtgattacaactttcctctataaattaactcttgacactccttgg

SEQ ID NO: 45473 - DNA, 100 bp, Homo sapiens
cttgcgactcgtgaccaacatgctgtgatgtgtgccgagggaggaattggtgactattatatggttaaaaagattttggaggaaaacagttcaggtgact

SEQ ID NO: 45474 - DNA, 83 bp, Homo sapiens
ggtcatggcgtatttcgtcgagaatttttggcggagctggagtttgttcagatcatcatcatcgtggtggtgatgatggtgat

SEQ ID NO: 45475 - DNA, 88 bp, Homo sapiens
ttcccatcaccatcacagagagcgatgctagagtaccgtggcacaatctcagctcattgcaacctctgcttcctgggctcaagcactc

SEQ ID NO: 45476 - DNA, 75 bp, Homo sapiens
aaaacatttttcagggacgtagccatccagaggcaatgaatcgctccctggctaatgtgattcttggaggctatg

SEQ ID NO: 45477 - DNA, 74 bp, Homo sapiens
tcacccttgtagagtcattcctgcctttgagcggactcccttttaaggaagcattgatggcagctgaaattagc

SEQ ID NO: 45478 - DNA, 83 bp, Homo sapiens
cgcgggacggctctgtaggaaggaacttggttccccctccctcagcttccgccccaaaagggtttggtgcaattctccattaa

SEQ ID NO: 45479 - DNA, 100 bp, Homo sapiens
gacgtgttctccaaataccagctcgacaaagatggggttgtcctctttaagaaggatatgtttgccttcatgggcagcctggataccaagggtaccagct

SEQ ID NO: 45480 - DNA, 100 bp, Homo sapiens
tgcaagggcatccggacctgtctgatctgcgagcggcagcgcggcagtgacccgccctgggagctgcccccagcgagacgagttgtactgctgtcacagg

SEQ ID NO: 45481 - DNA, 75 bp, Homo sapiens
gccttgccgggccggaaggaacagacccctgtagcggataagctgtcattggaaggaatagtggtacaaagagct

SEQ ID NO: 45482 - DNA, 50 bp, Homo sapiens
tcgcaagctggactccactggttgcgtggaagaggagcaggacttggatg

SEQ ID NO: 45483 - DNA, 75 bp, Homo sapiens
agccgcaactgcgagggctggaggaaagatgaatgggagggctgattttcgagagccgaatgcagaggttccaag

SEQ ID NO: 45484 - DNA, 89 bp, Homo sapiens
cgaaaggaagcaagcagttcagaagagccaaggaataaacatgcaatgaacccaaaagggcagttgctatccctgcccagaaaccgtag

SEQ ID NO: 45485 - DNA, 100 bp, Homo sapiens
tttaatattggccaatcatcaagacaagccagcagctcgctcagtacaagagagggtctcgctgttggagttggatttggggctatagaaaagacggcat

SEQ ID NO: 45486 - DNA, 74 bp, Homo sapiens
caactctgtagaatgtttgcaaatgttaattaatgcagcgttttgctgctgacatcatctccgttttggccatg

SEQ ID NO: 45487 - DNA, 75 bp, Homo sapiens
ggctggcttcgcttcccgccagccctactctcgattcctgctcaggtcttcgatgccaagaacatgatggctgcc

SEQ ID NO: 45488 - DNA, 100 bp, Homo sapiens
cagctgtcacaagaccaatatttggtatactgggcacaatccatctggtggcagccgtcctgggccgccggacacccccgctggggccgatgcccaacag

SEQ ID NO: 45489 - DNA, 83 bp, Homo sapiens
ctcggctgcgggaaatcgggctgaagcgactgagtccgcgatggagtgacaaccatgagtggaaaaaactaattatggttcag

SEQ ID NO: 45490 - DNA, 83 bp, Homo sapiens
catggtgagtaggttggtccgaagtttgaaccggacagaagcgctggtcggcgtctggcgtgcataactcctcctcagagccc

SEQ ID NO: 45491 - DNA, 143 bp, Homo sapiens
cgccgcagaggaaaagcaggtgccggtgcctgtccccgggggcgccatggcgaccggagcgaacgccacgccgttggggccaagggccccatctcctactaagcctctgcggaggtcccagcggaaatcaggctctgaactcc

SEQ ID NO: 45492 - DNA, 105 bp, Homo sapiens
cgagctgcgccgccgccgctacgaatacgatcactgggacgcgacaatgcagatcttcgtgaagactctgactggtaagaccatcaccctcgaggttgagcccag

SEQ ID NO: 45493 - DNA, 126 bp, Homo sapiens
gcccagcaaagcctacagtcgttctggcctcgggtcatggaagaaatccggaatttaacagtgattgtagaaggcatgaaacaaaaaatgtggagtattgaaaatattgccttcggttctggtgga

SEQ ID NO: 45494 - DNA, 75 bp, Homo sapiens
aaacaaatggggcaggaaattgggaatgaattggatgaacaaaatgaatgccgggacattctgcttcctgtcatc

SEQ ID NO: 45495 - DNA, 96 bp, Homo sapiens
atctacaaccctgaagtgcttgatatcacagaggaaactctgcattctcgcttcctggagggtgagctggagcggcagctgcttcaggccaacccc

SEQ ID NO: 45496 - DNA, 82 bp, Homo sapiens
tgcattacggtctctataagaagatgatcgacagagcgggatgccaccagcttgtccaaagggaagttccaggagctcctgg

SEQ ID NO: 45497 - DNA, 88 bp, Homo sapiens
aggactgtttacagcaggatgagcatgccaatttaactgaggtctgtgagctttacttctctatataatttgctgaagacaaaacttt

SEQ ID NO: 45498 - DNA, 100 bp, Homo sapiens
tgttaaatttgaatggtgctggtgacccactcactccaggctatccagcaaaagattgtgaaagtgttgaatttgtatactccagttaatgagtttgaag

SEQ ID NO: 45499 - DNA, 74 bp, Homo sapiens
gtcaccgttgcccaagtgaattattctgccgtggctgatggagaggactcatctgatgatgtgagaagagttca

SEQ ID NO: 45500 - DNA, 100 bp, Homo sapiens
cggaagatccaggagctgttccacgtggagccaggcctgcagaggctgttctacaggggcaaacagggttctgagcaaggttcaaccagtcaagaacagg

SEQ ID NO: 45501 - DNA, 101 bp, Homo sapiens
gaaacatatactgcttacctcattgaaacaaggaaaatgtttataggaggccttagctgggacactacaaagaaagatctgaaggactacttttccaaatt

SEQ ID NO: 45502 - DNA, 80 bp, Homo sapiens
catgtgtcccgggcgctgtgcatccacactggacgcgagctgcgctgcaagtttttggtgttgagccagacttgaccagg

SEQ ID NO: 45503 - DNA, 83 bp, Homo sapiens
cctgccctgccctgcgcccggggcgcgcccaccgcgccgcatccatgttcgagctgtaacagaagacaagtacgaaatactgc

SEQ ID NO: 45504 - DNA, 82 bp, Homo sapiens
aaaggcattgaggaactcaatcaaaccagtattcttttcacacagggctgaaaacacagttaaatcactttcaaagttaaaa

SEQ ID NO: 45505 - DNA, 101 bp, Homo sapiens
ctgccttgtacccacatctcccgccagggctgaaaaactgggtggtagctgaagacgtggtgtttaaacctgtggctgccccctggaacccggagcactgg

SEQ ID NO: 45506 - DNA, 51 bp, Homo sapiens
tgcctgacctgctgctgccactggacacagaagacttagatcactatgaaa

SEQ ID NO: 45507 - DNA, 76 bp, Homo sapiens
ctgccttggactatctacattccggaaagattgtgtaccgtgatctcaagactgtagactccactccactttcagt

SEQ ID NO: 45508 - DNA, 100 bp, Homo sapiens
ggcgagtctacgatgtcacccgcttcctcaacgagcacaacattctgaaattttttggttattgtaatgatgttgatcgggagttgagaaaatgcctgaa

SEQ ID NO: 45509 - DNA, 75 bp, Homo sapiens
gaagaagtccgcggccaggacacagttccggaaagcacagccaggtttgtggagaagtacactgagctacagaaa

SEQ ID NO: 45510 - DNA, 101 bp, Homo sapiens
cgaacatgatgcacgtgaataattttccctttagaaggcattcctggatatggactcacaccacccggcaagaactgctcactacggctccctgccccaga

SEQ ID NO: 45511 - DNA, 97 bp, Homo sapiens
ggaaattcatctccacccggatcacctactcttcagaaatttgatgaggtttatataactttccaagacaaggaagttgtgcaaagcctcacagcta

SEQ ID NO: 45512 - DNA, 83 bp, Homo sapiens
tgagaactggttctacacgcgagctgttccacaggcgcatgggccacgtttccagtgcttggtggccatgtggggctgacgtg

SEQ ID NO: 45513 - DNA, 100 bp, Homo sapiens
cggaggtttgcaggggtgcagtgtgtctggtcttatgagggcttaaaagacaaccttcttgcttctgggacatccagcctgacagccaccaaacagttgc

SEQ ID NO: 45514 - DNA, 75 bp, Homo sapiens
gttggaccttccggagcttctcagaagacagagggttttcttttgaggagtgtggccatctggggccgtgtggta

SEQ ID NO: 45515 - DNA, 75 bp, Homo sapiens
tgctgcataagaccttgtcagagagccttgcttcctgttttacatcacaaatctaaaaaaggacccccccgtcaa

SEQ ID NO: 45516 - DNA, 75 bp, Homo sapiens
ctgatatagaagggaccttattcgtatatcgaaggtgcagctcagtggaagatgatgacaaccagaagacatgag

SEQ ID NO: 45517 - DNA, 83 bp, Homo sapiens
atcacattcattttaattttgccggaatatttcaagacaccgaaaggggacctacttctctcgggaatctcaatacttggaac

SEQ ID NO: 45518 - DNA, 87 bp, Homo sapiens
acccagaggtcgtggaggtggccgtggaggcagaggtggcatgggagaggcgtttccatcaaccagttttgcaaggagttcaatgag

SEQ ID NO: 45519 - DNA, 51 bp, Homo sapiens
agtcccggggtaggggtctcccgcgagacaggggcaagtgtccgagtggtg

SEQ ID NO: 45520 - DNA, 82 bp, Homo sapiens
cgggcctcctggaggcagcacgggcgaccccccggcgcagcagcatcatcaaggttttaaaatcaaagatgggaaaatcgga

SEQ ID NO: 45521 - DNA, 100 bp, Homo sapiens
tccagcttcggaacaagagaccctgagtttgtggtggattgtcgaaaatttttggattcaaatgctctgggcctaactgtcacagccctcagcagctatg

SEQ ID NO: 45522 - DNA, 51 bp, Homo sapiens
tctcaaggaagcaacaagatcctaagattctcagagagagttcaacagcag

SEQ ID NO: 45523 - DNA, 100 bp, Homo sapiens
gggaaagctattctggtgttactttggatcctaggggtatttatgatagaatgagtccatttaagtcccaggacggtggaaactagctagtagattgcag

SEQ ID NO: 45524 - DNA, 99 bp, Homo sapiens
tcatggcggcagcagccgctctgagggcgcctgctcaggaaacttggctgtaacttcaaaagaagatttgattctttatttctggactgcatatatata

SEQ ID NO: 45525 - DNA, 74 bp, Homo sapiens
caactgtggccttaatgagcatgttgacagcatcgatgctagacagacacatgtagagcgcatgaagtacagga

SEQ ID NO: 45526 - DNA, 100 bp, Homo sapiens
cgggccgtcaccctgcctcccctgcgtcccgccaccggccgcttctgtcctcgagctttcagcagaggccaaggcagcattgcttgaatttgaagaaagg

SEQ ID NO: 45527 - DNA, 101 bp, Homo sapiens
aatgactaatcaagagtctgccgtacatgtgaaaatgagagacaagagagacacctccaacttcgacaaagagttcaccagacagcctgtggaactgaccc

SEQ ID NO: 45528 - DNA, 75 bp, Homo sapiens
ctggattctcactgaagccctgtgccctttcagaaattggatcacagaagaactgcagcttcctggggagcagtt

SEQ ID NO: 45529 - DNA, 87 bp, Homo sapiens
gtagaacagctttatgaaacagcttgcttcctacagattttcagctgaactctcatctctcaacactggcaaatattcataagatct

SEQ ID NO: 45530 - DNA, 82 bp, Homo sapiens
aatatgttggaggcatgctaaggtgcttgaggaatccaaagccctcgtgcgctgcaacatgaagatggagctggagcaggcc

SEQ ID NO: 45531 - DNA, 120 bp, Homo sapiens
tcagcggggaccgagcctgggaggccggccggtgccagcacctttcggcttctgagacggcggcagcagcggcattcagttccagggtctccctccactgctgtagtaacccgggtccgg

SEQ ID NO: 45532 - DNA, 75 bp, Homo sapiens
ctcaggtcctgcagctgggagacggcacaggacactaaaccaggtgctggagaatctggtaaaagcaccattgtg

SEQ ID NO: 45533 - DNA, 100 bp, Homo sapiens
ccgagctctggggcgtcttgcagccctatgagcatctcatctgcggcaagaacgccaatgacctgatggccaaaagaaaggaagaaaatttttcctctcc

SEQ ID NO: 45534 - DNA, 96 bp, Homo sapiens
ttctagtatctgcaaagacaatgcagttcttccctgtggaacagtagagacctagtctgccttctttcacaagataatccttcaattatttgaagg

SEQ ID NO: 45535 - DNA, 51 bp, Homo sapiens
ctgttctagaaacagaggtactaaggacttaagtgagtttaaagagatgac

SEQ ID NO: 45536 - DNA, 100 bp, Homo sapiens
caaccctgcagccagcgccctgatcatgaaaatggaactgggactaacacctatgcggccttaaacagtgtctatctcatgatgaacaaccaaatgcgac

SEQ ID NO: 45537 - DNA, 108 bp, Homo sapiens
tcgccttgtatctcaacaccctgagtgcggatttctgctatgatgacaggtagaacgtcatgacatgaataccttaagcctgcccctgaacatacgccgaggggggtc

SEQ ID NO: 45538 - DNA, 75 bp, Homo sapiens
tcctaccttatgagctcggttttcttatgcttataagagtggaacaggtggccctcatgacactgacgctcttcc

SEQ ID NO: 45539 - DNA, 100 bp, Homo sapiens
ctggacccactaatgccatcttcaaagcctttgctatgatcattgacaaactggaagaggtggtgttcccactgatgaagagcaggcgactgggttggag

SEQ ID NO: 45540 - DNA, 100 bp, Homo sapiens
atggccacaggcttagctgttaacgggaaaggtccacagaactcgaccctggaagagagagtcggggtcaggtcttcgggaggtggagggatcgaatgag

SEQ ID NO: 45541 - DNA, 82 bp, Homo sapiens
gccgctggagcgcgaggacagtgggaccttcagggtgtccgcaatgttgccagtgtctgtctgcagattggctacccaactg

SEQ ID NO: 45542 - DNA, 100 bp, Homo sapiens
gactctggccgcggctactacctggagatgctgatcgggacccccccgcagaagtgatgatgatgatgattttgatgatgaggaagctgaagaaaaagcg

SEQ ID NO: 45543 - DNA, 74 bp, Homo sapiens
ggagccccggctcgcccgtgtgcagagctctgtcagattcagggagttttgtatcttctcgagcccggcgagaa

SEQ ID NO: 45544 - DNA, 75 bp, Homo sapiens
aaccgttcgcggaggaaaggcgaactactatacctgcaggcccgcttcacttggcgaggagcccgcctgctccgg

SEQ ID NO: 45545 - DNA, 74 bp, Homo sapiens
gttccagggaggtgggattgagttataagcacatgtccttggccctgaataggactggcagaagcattgtgtac

SEQ ID NO: 45546 - DNA, 78 bp, Homo sapiens
gcggtcccgccggatcccgaagacgagggcctggaggaaacagctgtgagaaacgaccgaaacaagaagaagaaggag

SEQ ID NO: 45547 - DNA, 82 bp, Homo sapiens
cggaaaaccgaagttggaagtgtctcttagcagcgcgcggagaagaacggggagccaggtgtctttcctgaagactatcttc

SEQ ID NO: 45548 - DNA, 100 bp, Homo sapiens
gcatttgctctgagcatcagtcacgggatgttgacaatgcgtctctggcacgtcttgaccttgaacgcaaagtggaatctttgcaagaagagattgcctt

SEQ ID NO: 45549 - DNA, 51 bp, Homo sapiens
ggggacaggaggctgcggggcctcagagcggattcaccaagcacaagcagc

SEQ ID NO: 45550 - DNA, 80 bp, Homo sapiens
catgaaaacctctcaccccgtcgttgcctccacttggcccgtccatagagccagagcagccatcagcagggaccctttct

SEQ ID NO: 45551 - DNA, 100 bp, Homo sapiens
acgctgctactgcctgggggctgaggatgacaaaaaagccttcatagcaggttcaggagaagtggcacctggtggaggacctgtcgcgactgctgccgga

SEQ ID NO: 45552 - DNA, 50 bp, Homo sapiens
acagggtctcactatgttgcccaggctggtcttgaactcctggactcaag

SEQ ID NO: 45553 - DNA, 100 bp, Homo sapiens
caagacggccgtggttgtggggaccataactgatgatgtgcgggttcaggaggtacccaaactgaagatgaaccggacgacccccgaccaggagctggtg

SEQ ID NO: 45554 - DNA, 75 bp, Homo sapiens
ctctgtccgggggcctggctaaggaaaccctattacctccagtctttcttctgagaacacccgatgtgtgtggat

SEQ ID NO: 45555 - DNA, 90 bp, Homo sapiens
gaagcctgtgatttggactccacagtgtctgctcttgccctggctttttacctagcaaagctgcaagctttcttcctggtggcagatgac

SEQ ID NO: 45556 - DNA, 76 bp, Homo sapiens
tcgccatggagtaccagatgaaatgtcttgcagcccgtgggagtgataccaggagcaacacagagctcagcagcgg

SEQ ID NO: 45557 - DNA, 99 bp, Homo sapiens
tgaagacaggagcagaaatatattttgtggtgccaccaagagagttcagcaaatccacttatcggttttatggagaacctgtaataaaagcatgtattg

SEQ ID NO: 45558 - DNA, 90 bp, Homo sapiens
ccgacatggaacagggactcactgggggaaatgcttccagactgcacacttttacttagaggacagtacatcccctagagttatatccac

SEQ ID NO: 45559 - DNA, 75 bp, Homo sapiens
ctagaggcatggttgaaattgaatttttgcagaaaaaacttcagcatgtgccaggaacacaacctcaccttgatc

SEQ ID NO: 45560 - DNA, 75 bp, Homo sapiens
gcacctgatctgcgggaagaacgccagcgaaatgggacgtcggtcatcagatactgaagaagaaagcagaagcaa

SEQ ID NO: 45561 - DNA, 50 bp, Homo sapiens
ttgtgcagattgtggcagtagtgaaaaagcgtgaagtcatactaaataag

SEQ ID NO: 45562 - DNA, 82 bp, Homo sapiens
agtcatgcccgcctgtctgctgatgttcagacttggttccttcaacctagagaaagttgaaaacccagctgaagtcattaga

SEQ ID NO: 45563 - DNA, 90 bp, Homo sapiens
tggattagttgtactgttacaagcatcctcaggaaaagggagcgatgttgatctcaggaagcacaaagggaccttcctagctctgactga

SEQ ID NO: 45564 - DNA, 50 bp, Homo sapiens
ctgggcttcccgggcgagcggtgggatgccgaggaatgtgacagggctgg

SEQ ID NO: 45565 - DNA, 75 bp, Homo sapiens
tcgggaatttgtcactgaaatggtgacaggaggaactgtggctgcaccatctgtcttcatcttcccgccatctga

SEQ ID NO: 45566 - DNA, 102 bp, Homo sapiens
gactgtcttgggcagcatgcagtgctttctggcaccctggaggagaagaggttctgctggaacaagctggtgtagatgcaagtgaaagctttgaagatgtag

SEQ ID NO: 45567 - DNA, 75 bp, Homo sapiens
aagagtggagacaaagagatgagcaggagtctccccaggacagtgctatcacccgggatattaaccgaacattcc

SEQ ID NO: 45568 - DNA, 73 bp, Homo sapiens
ttcaggttgtccgagcatctgggaagaaatctgaaatagagtactatgctatgttggctaaaactggtgtcca

SEQ ID NO: 45569 - DNA, 95 bp, Homo sapiens
caagagagacatttctggctctgaaggcgaacgcttcgctggccatttaggagctctgctcaaagccagacgatagaagaagtcagagatgccat

SEQ ID NO: 45570 - DNA, 50 bp, Homo sapiens
tggtcatcttctatttccaaagctcttgtcaggatggtgaagctgttcat

SEQ ID NO: 45571 - DNA, 82 bp, Homo sapiens
gatcttatgcttgatgtggatctgcctgaggatgcacctcttgaaaatgaaatggcaaaatgctgacctgaatgggaaattt

SEQ ID NO: 45572 - DNA, 76 bp, Homo sapiens
ggcttccaaggacagccactgggtctttgtgaatgagtgccgtggaggtcccagcccccgctgcggttctcggagg

SEQ ID NO: 45573 - DNA, 90 bp, Homo sapiens
cttgacgcggaaaaatctgctatattaggtctcattcaggaacgtcgcctgataacactgcaccaccacctccccctccaaggccacagc

SEQ ID NO: 45574 - DNA, 80 bp, Homo sapiens
ctcactttcgtccaggacagtatgtggatgtcacagccaaaactcccttcagtctgaatatgttcattactaaggccttg

SEQ ID NO: 45575 - DNA, 84 bp, Homo sapiens
cccaaagacgctaaacgtgccctactctgccccgggggagaggcttgggcactgtttaaaggaaagttccgagaaggcatcgac

SEQ ID NO: 45576 - DNA, 100 bp, Homo sapiens
tgcacttcgcattttggcattgacatttaattttagggtcctttatatagaagggagagtaggacttaaccaccaccatgtcgagcaaaagaacaaagac

SEQ ID NO: 45577 - DNA, 82 bp, Homo sapiens
tggctccacgcatttcccttcgtgtgtttgagcaacactgcaccactgactgactactttctcaaagatgagtatgaagccg

SEQ ID NO: 45578 - DNA, 83 bp, Homo sapiens
gttcgccccgggcggcgtcggcgactcgggccccggagagagatagggtttcatcatgttggctcggctggtctcgaactcct

SEQ ID NO: 45579 - DNA, 50 bp, Homo sapiens
cccgagtcggtcagcgccggaggattttttatcaagcagaaatgcatcga

SEQ ID NO: 45580 - DNA, 82 bp, Homo sapiens
ttcgggccccccaacacctactacgagggcggctacttcaaggtggtctttgggaagaagcttcctgcctttgccaccatcc

SEQ ID NO: 45581 - DNA, 100 bp, Homo sapiens
atcttgctgggatgatgttttaattccaaaccggatgagtggtgaatgccaatccccacactgccctgggactagtgcacctccgggaggagttcctggg

SEQ ID NO: 45582 - DNA, 73 bp, Homo sapiens
gagaccctgggagaagaacagcacaaccttgccaagatgcacaagcgagagagaacttgtaaggattatatca

SEQ ID NO: 45583 - DNA, 99 bp, Homo sapiens
ggctctggctggcgttgctgcgctccgtggccggggagcaagcgccaggcctagttccccgagagcgttcagacagtgggggctcaagctcagagccat

SEQ ID NO: 45584 - DNA, 100 bp, Homo sapiens
tcatggtatatttgcagccagtactctatatgaacaatccgtctggatcacggatgtaggaagtggtactactgagcgagtgtgcttgatccagggaacg

SEQ ID NO: 45585 - DNA, 100 bp, Homo sapiens
acagacatccggagaaacatattctgcacaataatgacaagtgaagattttttggatgcttttgaaaagcttctgaagaaacctatgagaatatcccagg

SEQ ID NO: 45586 - DNA, 100 bp, Homo sapiens
tctgtaaactctctgtttccaaacaaagccggcttgagcaggccttaaaacaatcggtaacctctattgaagaacgaacaaggccaaatctctccaaaac

SEQ ID NO: 45587 - DNA, 96 bp, Homo sapiens
ttttataagttaggggatttcccctatgtttccatattggacccacggacagaggagaaggcagagcccccccaggctatgaatgccctgatgcgg

SEQ ID NO: 45588 - DNA, 74 bp, Homo sapiens
gccagaaggctagaagaatcagacgtgctccaggaggccagaaggaaatacggagccatttgtgcaggccaagc

SEQ ID NO: 45589 - DNA, 82 bp, Homo sapiens
ggacagctagctgcttatggctataaaattacaggtgtctgacttccagcaactgctggcctgtgccagggtgcaagctgag

SEQ ID NO: 45590 - DNA, 70 bp, Homo sapiens
gcagtggtggccctggagcagtatgccagcaagctttgctctggtgagtgacaagctgtaccagcggaaa

SEQ ID NO: 45591 - DNA, 83 bp, Homo sapiens
aaaaaaacatcacgttgggagaaccgcctgggtttttgcactcgtggtggtgtgaaggagaacgacctgctcagaatgagaag

SEQ ID NO: 45592 - DNA, 100 bp, Homo sapiens
gcagcttccagaagagcagagctttggtatcctactcacagcgccaaaactgcaggggccaaggcctagttccccgagagcgttcagacagtgggggctc

SEQ ID NO: 45593 - DNA, 74 bp, Homo sapiens
ttggaagatgcagatgagaaggttcagttggcaaaccagatatatgacttgcttagcagtgtctgcaaaaacga

SEQ ID NO: 45594 - DNA, 50 bp, Homo sapiens
tgctattcaggatatttcggttgaaggcacgtgtggttctcaaatatagg

SEQ ID NO: 45595 - DNA, 75 bp, Homo sapiens
agaattatgactcatcggtcagcagaaaagttccatcttagcccacatccagaagcaaaagcacttcaatgagcg

SEQ ID NO: 45596 - DNA, 51 bp, Homo sapiens
caacgtcaccctggacctgggccagagtgctgccctgcccaggaggtacat

SEQ ID NO: 45597 - DNA, 101 bp, Homo sapiens
tctggaggcacctgttgcaagtgacagggtgaaggttgccgaactgtccccctggctggacatgtggggtttgacagcttgcctgaccagctggtgaataa

SEQ ID NO: 45598 - DNA, 89 bp, Homo sapiens
ggactgtcttgggcagcatgcagtgctttctgggtcccgttgtaacacaggacattaccacgtatcacacggtgtttcttttggccatt

SEQ ID NO: 45599 - DNA, 82 bp, Homo sapiens
ttcgcgtcccctgcaccatgagctggggcaccgagctctgggctgaaggggatgctaagggagataaagcaaaggtgaagga

SEQ ID NO: 45600 - DNA, 80 bp, Homo sapiens
agcccaggcacagccgacgccgcgggggttgtgagtcccggcccagcccctccacccccctgcccccccgatgcgaccat

SEQ ID NO: 45601 - DNA, 100 bp, Homo sapiens
cgcagactggagggaggtgatgatgccctattcgacagaactgatattttatattgaaatggatcctccaggtacggacattgctgcaggagaagaggtt

SEQ ID NO: 45602 - DNA, 100 bp, Homo sapiens
gtggaattcgcgctgctcgccgacaaggctgcacaacagatcccagctctcctgttggcttcgtgcttggggtagatcttcttcacatattccccctgga

SEQ ID NO: 45603 - DNA, 75 bp, Homo sapiens
acaaaaagacctgctagagccattattgccccgctggatctccagaactgttctctggaggaccctggtccaaac

SEQ ID NO: 45604 - DNA, 79 bp, Homo sapiens
gaaaaagacgacaggggagacaaagagacccgcagcgacaaggtgtcgtgaaaactacccctaaaagccaaaatgggaa

SEQ ID NO: 45605 - DNA, 98 bp, Homo sapiens
ccaacattccagttttttaagaagggacaaaaggtacccggaaattaaagaggagctggaggagctggaccgcatcacagagcagacgctctttgacc

SEQ ID NO: 45606 - DNA, 98 bp, Homo sapiens
gcctctttctctcaggctttcctacaactcatgcccagcagcagcaagcagaaccgcctctatcaggccattcagagagctgatgacatcttggacct

SEQ ID NO: 45607 - DNA, 100 bp, Homo sapiens
cctgttggaggaactggcccggaaacaggaggacgcaacatgagtgagaatgaggaagaggaaatttctcagcaagaaggcagtggggactatgaagtcg

SEQ ID NO: 45608 - DNA, 76 bp, Homo sapiens
aaaaagcggccaaagaagtgaagctgctgctactcggttaattatagaaaatgccaagtaggaaatttgccgatgg

SEQ ID NO: 45609 - DNA, 100 bp, Homo sapiens
gaagaacatccaggtggtggtgagatgcaggaataatgtatttgtggccttggacatgaggcagtcagtcctctgttgctgttaacataaggtcagggac

SEQ ID NO: 45610 - DNA, 50 bp, Homo sapiens
cttccggatgtcccggagcaaggtttgaaggtctctttgctaaactggag

SEQ ID NO: 45611 - DNA, 75 bp, Homo sapiens
gtcctcagcagggggatcattcacagtgaggacagacacagttatcaggaactgttgccgttattacatcagatg

SEQ ID NO: 45612 - DNA, 74 bp, Homo sapiens
gaaagattaagcaaatttcaagatggagatatcaatgatgtcaaacggctgaaacctggctacttagaagctac

SEQ ID NO: 45613 - DNA, 101 bp, Homo sapiens
aggtgaagccacggaagataaggcgccatgtcagaaccggctggggatgtccgtcagaacccatgcggcagcaaggcctgccgccgcctcttcggcccagt

SEQ ID NO: 45614 - DNA, 97 bp, Homo sapiens
ggtaccggccgtggaagcggccaccgactactgtcagcagctgtgccaggaagatattttcgattcagataaagaagttcctatcgaatccactttt

SEQ ID NO: 45615 - DNA, 101 bp, Homo sapiens
ctgtgacctgcatgtactgggggattcgcagggaggatgtcgggacaccccggaagctgggaaatgagagagcaagctcgccatgttgctgcgggagtctc

SEQ ID NO: 45616 - DNA, 75 bp, Homo sapiens
gacgggcaaccaatcaatgaaacagacacacctgcacagagataaaagcaacagtgtttgatgactgcaagaaag

SEQ ID NO: 45617 - DNA, 78 bp, Homo sapiens
gtggccttagctgtgctcgcgctactctctctttctggcctggaggctatccagcagttttgattcatcatggataat

SEQ ID NO: 45618 - DNA, 50 bp, Homo sapiens
gagtatctgaggatggagaactcagcagagttgataccaagttgaaattc

SEQ ID NO: 45619 - DNA, 83 bp, Homo sapiens
agaaatatttcaaatacagtaatgaaagtaaagcagatcctgggcagaagagaaaaaatgatccctatgctcttgcatccctg

SEQ ID NO: 45620 - DNA, 50 bp, Homo sapiens
gcagaatggctggcaccacctcaggaaccctaaggactctgcaatatgaa

SEQ ID NO: 45621 - DNA, 100 bp, Homo sapiens
gagcctctgagctcaacggaggattgtgcctgagaagaacccacagagtgcacctggtggacatatggaatgtcatagaagcattgcgggaaaatgctct

SEQ ID NO: 45622 - DNA, 50 bp, Homo sapiens
ccctaacagagcctcaacaactacctgccaatggagatcttcgtggatga

SEQ ID NO: 45623 - DNA, 98 bp, Homo sapiens
cctgcagaagtccagggacctcaaattcctcacaggctttgaaaccaagcttcggaaccaaaaagaagcttcccagagccggggccaggagccccaag

SEQ ID NO: 45624 - DNA, 100 bp, Homo sapiens
gctgtctggattgaagaccagaactgtggacatcctcatcatggatgatgacgacgtccccagctggcctcccaccaagctgtccccgccccagtctgcg

SEQ ID NO: 45625 - DNA, 75 bp, Homo sapiens
cccaagcggcctcggaagtcccagggagtggaggaggccccgtgtgggccgcggcccggccctcaccatggagtc

SEQ ID NO: 45626 - DNA, 100 bp, Homo sapiens
ctgatctctttttcatgctcctccttgctccaaagaaaagccggatggcaaaagagcccagaacctattggacgagcggggttccgcagctgactccgag

SEQ ID NO: 45627 - DNA, 100 bp, Homo sapiens
ggtccgagatccgaggcaacggtggctcctcgaggtccacggtcccgggcccgggaggtcaagcgggaggccctggagtgcagcctcaagttcgtcggct

SEQ ID NO: 45628 - DNA, 82 bp, Homo sapiens
tcacgcggccttaaactgcacctccagcgtccataagaacgtagcccggacaagaggaccctgccttggtgtgagagtgagg

SEQ ID NO: 45629 - DNA, 100 bp, Homo sapiens
tttagtttcaaaaagttgctggatcagtgcgagaaccaggagctcgaggctaaagaattacctccaaagccattgtcaagaccacagcagtcatctgcac

SEQ ID NO: 45630 - DNA, 100 bp, Homo sapiens
aaacagtgatcgctaagaactttgccgataccttaggatacaacatagaacctattatgctctatcaggccaagaagcttgagagaagaaaaatttcaga

SEQ ID NO: 45631 - DNA, 75 bp, Homo sapiens
catgagtgttcctgtggtctctgcacctcctttctgtgtatgcaacagcgttattgcaacaggctaacgaaaaca

SEQ ID NO: 45632 - DNA, 82 bp, Homo sapiens
atcgagaggatctggtgtaccaggcgaagctggccgagcaggctgagcgatacgacggttcacctccatttctcaatgtgaa

SEQ ID NO: 45633 - DNA, 100 bp, Homo sapiens
gtttggatgattgtctctcggcggcggagtcgagaattcagcctcagcccccagatgaagatggggatcacagtgacaaagaagatgaacagcctcaagt

SEQ ID NO: 45634 - DNA, 83 bp, Homo sapiens
caaattgtagctgacgaagcattttgcaacgcagttcggagttattatgaggagcgtgaggatcatccccggagaggacggga

SEQ ID NO: 45635 - DNA, 75 bp, Homo sapiens
actctcagctggaacggcaggcctggaatgttgtaccatctttgggtaggcagacttccctgacgacatcagtga

SEQ ID NO: 45636 - DNA, 73 bp, Homo sapiens
tgatgctgtggaacttgcaaatcgaagtgctgtcactgatgggatcccagctgcttctgaggggaagatccag

SEQ ID NO: 45637 - DNA, 83 bp, Homo sapiens
cttagctgtgctcgcgctactctctctttctggcctggaggctatccagcaaatgctttgtggtctacagccacaccacccca

SEQ ID NO: 45638 - DNA, 51 bp, Homo sapiens
ggtgctgcaggacctgctgcggctcttgagcaataacaagatcacggggct

SEQ ID NO: 45639 - DNA, 100 bp, Homo sapiens
cggccaggcgattcggtgaagcgattcctgcaggcgttggttcccctctttgacctgtactatactggcaattgctggagaagattttgcaattgttgct

SEQ ID NO: 45640 - DNA, 90 bp, Homo sapiens
gctgaaggccttcagagtccttggggtgattgacaaggtgctacaaagtacacagataaagacaatggagggatgcttgtatggtctcca

SEQ ID NO: 45641 - DNA, 80 bp, Homo sapiens
cgtagacaccagctccgaaatcaccaccaaggcacattcaggaccccgcgagccagcggctgacgtggaacaagtcccca

SEQ ID NO: 45642 - DNA, 100 bp, Homo sapiens
cctgtctggtgcatccttggcagaaagtgaggaggaaaacacccccattgaattggagaatgatgcagcttttcagcaagctgtgaggactagtcatggc

SEQ ID NO: 45643 - DNA, 100 bp, Homo sapiens
tgagactttgagactagttcaggccttccagttcactgacaaacatggggaaggttgcctgcggacacgctgggcctctgtcctgatgctgctgagctcc

SEQ ID NO: 45644 - DNA, 122 bp, Homo sapiens
aagaaagtggtgaatcccctgtttgagaaaaggcctaagaattttggcattggcttcagtgtcatttgaggacgtgactgtggacttcagcaaggaggagtggcagcacttggaccctgccc

SEQ ID NO: 45645 - DNA, 90 bp, Homo sapiens
attacccacctgcatcatctggggttccaatgcaggggacaactgtgggaaggctgggaaggttaagaaacaacagaggtggacctccaa

SEQ ID NO: 45646 - DNA, 75 bp, Homo sapiens
tggaagaatcctccagttttagctcctacttcaacagcatttccttaggccaggaaaagctgcttataagactca

SEQ ID NO: 45647 - DNA, 100 bp, Homo sapiens
cgagctgagtggttgtgtggtcgcgtctcggaaaccggtagcgcttgcagcatgagttgcatgctgagaatttgaaaaatgaagatgatgtagacactgg

SEQ ID NO: 45648 - DNA, 100 bp, Homo sapiens
cggaacagcaggcccgagcccaccgcgccgggccccggacgccgcgcggaaaagagaaatggtcaatgcatggtttgctgagagagttcacaccatccct

SEQ ID NO: 45649 - DNA, 107 bp, Homo sapiens
cctcgccgcccgtccccggcacacgcgcagccccggcctctcggcctctgccggagaaacagacaatgcagatcttcgtgaagactctgactggtaagaccatcacc

SEQ ID NO: 45650 - DNA, 100 bp, Homo sapiens
ggaaaacttcaatatctctcgggtcagggctcatcttctaccggaaaggggtgaaggctgtggaccccaagactggccgggagatcccttacacatttga

SEQ ID NO: 45651 - DNA, 90 bp, Homo sapiens
cagatggcgtcttccgtgggcaacgtggccgacagcacagcattcccatggtttggcatggacatcggtggaacgctggttaaattggtg

SEQ ID NO: 45652 - DNA, 50 bp, Homo sapiens
ctgtgcgacagcctcatgatctggaacggtggcagccgaagttaggaagc

SEQ ID NO: 45653 - DNA, 90 bp, Homo sapiens
gaaaaaaacatgtcggatgaagagaaacagacaaaattgcttacccagtacatattaaatctcggcaagtatgatcaaaactacgacatc

SEQ ID NO: 45654 - DNA, 100 bp, Homo sapiens
gtgtgtggcaaggggctctacggatcctacagctcccaggagccccactgacttccttttggtagtactgcgtgatgttgttcaggcttatcctgaagtt

SEQ ID NO: 45655 - DNA, 90 bp, Homo sapiens
atttatttctcgattcgctgtcggaggagaatgagaccctggtggagtttgctattggtgacggccacccacggactctgtcacttgctg

SEQ ID NO: 45656 - DNA, 83 bp, Homo sapiens
ccgccctgccctgggcatccaggggggtcagtccgagtgcctcagcctggccagaggagaagacaatgcagatcttcgtgaag

SEQ ID NO: 45657 - DNA, 50 bp, Homo sapiens
tctcgggctcggaacgagactgcacgtaaaggcatgacttcctggcacca

SEQ ID NO: 45658 - DNA, 75 bp, Homo sapiens
gctattgtctgctgcatccaaatcttctccctggacctcgtgcatacggacaaagcccacaaacgctatctgcta

SEQ ID NO: 45659 - DNA, 100 bp, Homo sapiens
agtggtcgcttcttctccttggtattggtggcatggatggaacacaacagcagatttttaaaatgttagcagaggtactaggaggaatcaattgtgtaaa

SEQ ID NO: 45660 - DNA, 100 bp, Homo sapiens
cgggtcatctccagatgctagggttatgggttttataggatcacattgacaaaagtaccatggagttttatgagtcagcatattttattgttcttattcc

SEQ ID NO: 45661 - DNA, 100 bp, Homo sapiens
cacttccgggtttcgtcttcttggcttctgatatttatgaccatgcagttctattcaataagtctggcagtactacgagatgctttacaacacagctgac

SEQ ID NO: 45662 - DNA, 75 bp, Homo sapiens
ggcttcgggaagcagggattccagtgccaagatgttttctggcaaaggccttcctgcatttatgaattctctctc

SEQ ID NO: 45663 - DNA, 50 bp, Homo sapiens
cagttagtcacccacctacatgttgagtgaacagagtatctgtcaggcaa

SEQ ID NO: 45664 - DNA, 100 bp, Homo sapiens
cacttacacttcctgttctctgcaaggcagccagagtgacctttcactaatgctgctgacttgagtaaaccaatagataaaaggatatacaaaggaacac

SEQ ID NO: 45665 - DNA, 74 bp, Homo sapiens
acacaatgcgggacagcctcagccaggttctccagagatggattaatgaaaatcaagttccatcctcagacaag

SEQ ID NO: 45666 - DNA, 137 bp, Homo sapiens
caatagggaaagtgaggcagctgcaaggagggcggcgggactgcactcgagtgtccagacctgctcgatggtttttcgttggaatatacgttgcacatttatggcgattctgagtgtgagggcagacttctgccagg

SEQ ID NO: 45667 - DNA, 100 bp, Homo sapiens
cgagccacccgcccgcccaaggtctctcgcgggcgggagaacggaaaactcccaacttcctgtactatactggcaattgctggagaagattttgcaattg

SEQ ID NO: 45668 - DNA, 75 bp, Homo sapiens
tccctctgcccccccttccccacgcaaccccagatccatttacactttacagggctttgaccacgacctttgaag

SEQ ID NO: 45669 - DNA, 98 bp, Homo sapiens
tgacgggcctgcgagggttgaagattgtgaagcaatagcctaaggtctcggcgcggaagatggccggcggcgtggacggccccatcgggatcccgttc

SEQ ID NO: 45670 - DNA, 95 bp, Homo sapiens
agaacttgtgccccagttgctgtgctccaaggacacacaggatcaattacatctttacagttatgatatgactctgacaaatgcttgtattgcct

SEQ ID NO: 45671 - DNA, 75 bp, Homo sapiens
agaaggccgtgtgcgaggagtgcctcaaagtctacctgagcgcccagaatttcacggtccctcatggtgtctcac

SEQ ID NO: 45672 - DNA, 101 bp, Homo sapiens
tacacggcgcccgccgcctcctgcctctgctctggctctttgtgctgttcaagattcagaatggacagtttagaagaacctcagaaaaaagtctttaaggc

SEQ ID NO: 45673 - DNA, 100 bp, Homo sapiens
ctcagagttcctcaaagttgcagagaatacagatatggtccagaaatcagtcagcaaaaccttgccctctacttggtctgaccccagtgtaaacatcagc

SEQ ID NO: 45674 - DNA, 83 bp, Homo sapiens
acgcgctgcacctctacctgtggctctttctgctgggcctgcccttcaccctctacatgtgtgccgtgcaggtgaagctggag

SEQ ID NO: 45675 - DNA, 50 bp, Homo sapiens
gaaagaaggaggaatctgaagccttggtgatgatggccaaagagaagcca

SEQ ID NO: 45676 - DNA, 83 bp, Homo sapiens
gttccaatgagacagggcacaccaaactccatctggtggatccataaagaacccagccaacccgcagagggaggggaggggct

SEQ ID NO: 45677 - DNA, 98 bp, Homo sapiens
gggagctggagcgcatggctgaggtcttggtcaccggggaacagctacgagtcgacttcaatgttcctatgaagaacaaccagataacaaacaaccag

SEQ ID NO: 45678 - DNA, 83 bp, Homo sapiens
ttgtcattactgtgacggctatcaaacagtgtctccagaacgctatagctatggcacctccagctcttcaaagaggacagagg

SEQ ID NO: 45679 - DNA, 97 bp, Homo sapiens
aggtcaaagattatctgaagaacatgaaatccagcatctgtcaatggttcaccatctgccacttctgaaagtgatgggtctagtacaggctctctgc

SEQ ID NO: 45680 - DNA, 90 bp, Homo sapiens
cacccgaatgctgcccgggtgagctacaatcaacctaaattcagccaatgatagctggtttggcagcttaaaggacactattcagcatca

SEQ ID NO: 45681 - DNA, 74 bp, Homo sapiens
ccagagccaaggaggaagggttgtccggttgccattacccagggaggagcaatacagctggctaacaatggtac

SEQ ID NO: 45682 - DNA, 100 bp, Homo sapiens
aaagactgttgtgaacagggatgtacctaatgaaacatgatgaaagtattgagggggcatcagaattgggtgtacagctgtgcattctctcctgactctt

SEQ ID NO: 45683 - DNA, 75 bp, Homo sapiens
tctgctgccacaccagcaccagcaagcggcattggctgcgatggagacccagacgcagaggcggggctggcccct

SEQ ID NO: 45684 - DNA, 50 bp, Homo sapiens
gtggatttctctcttctggctaacagggaatgggtactgttcaaaaagga

SEQ ID NO: 45685 - DNA, 82 bp, Homo sapiens
atatccttaccttactcaacagcaccaacaagaacgctgtaaatgtaagcctattagagctacacagaagacctatttccgg

SEQ ID NO: 45686 - DNA, 87 bp, Homo sapiens
gtcaacgacaaatccctggcccgggtgacccacgcggaggccgtcaaggttgatgataattagaagcatgctttccactgaacttcc

SEQ ID NO: 45687 - DNA, 100 bp, Homo sapiens
gaaagactgggaggagctcggagagatctcagtgaccagctgctggaggtggtcggcttggaaggagccatggagatggggcaaatatacacaggcctga

SEQ ID NO: 45688 - DNA, 100 bp, Homo sapiens
tggaattggcccaggatgacagctggagaatggagtcaggtcaggttagtgtggtgcaagtgaccatcccagacggtttcgtgaacgtgactgttggatc

SEQ ID NO: 45689 - DNA, 100 bp, Homo sapiens
tgccagggtccctgaagagggaagacacgcggaaacagcaaccttggccatggaccagccggctggcctgcaggtggactacgtcttccggggtgtggag

SEQ ID NO: 45690 - DNA, 80 bp, Homo sapiens
gttgtgtggtcgcgtctcggaaaccggtagcgcttgcagcatgtggacaggttgctggaccccgccaacagagcccacct

SEQ ID NO: 45691 - DNA, 89 bp, Homo sapiens
atggcccctctcctgatgagatggacatccagagaagatgcatcaaattgcaatttggaggagaggcagcacaagcagaagcctgggcc

SEQ ID NO: 45692 - DNA, 100 bp, Homo sapiens
gagattcctgcatcttttgcgctctcaaggaccagtcctgcctctgttgtagaagacatgtggtgtatataaagtttgtgatcgttggcggacattttgg

SEQ ID NO: 45693 - DNA, 100 bp, Homo sapiens
aagcccacgggatcctagcacggcgcccatcttacagtgtatttgccggctgccagattccataccccaaacgagaattccttaatgaagatgatcctga

SEQ ID NO: 45694 - DNA, 75 bp, Homo sapiens
atgtagccgactcattattgcgggtttgtgtttagtgaatcagagggatctgcattagaacagtttgaaggtggc

SEQ ID NO: 45695 - DNA, 75 bp, Homo sapiens
acgtgcgtgtcacccacgcagacatcttcagccgctgccagagatctgttggtaatctgaggatttttattctac

SEQ ID NO: 45696 - DNA, 83 bp, Homo sapiens
accgccgaatcgctcctgcagcagagaactccatccggcacaacctgtcactgcatagtcgattcatgcgggtccagaatgag

SEQ ID NO: 45697 - DNA, 80 bp, Homo sapiens
catccagccttagcaaaccagaggaagaaatagaaccatttccagaagaaagggagaactttcttcagcaattgtacaaa

SEQ ID NO: 45698 - DNA, 90 bp, Homo sapiens
cggcttctcccctacgcgctacacaagtggagctccttttcctccacctaccttcccgaaatgcaggctcaacagtaccagcagcagcgt

SEQ ID NO: 45699 - DNA, 50 bp, Homo sapiens
cgccgccccgaaactttcaccgcgagcggttacagaatgtctgaagggga

SEQ ID NO: 45700 - DNA, 101 bp, Homo sapiens
ccaacgaggtggccgaatcttccttcaggatatcaagaatcctgcaaaaatgtctctctatccatctctcgaagacttgaaggtagacaaagtaattcagg

SEQ ID NO: 45701 - DNA, 95 bp, Homo sapiens
gcccctcgcgtccggagtccccgtggccagatacgtaggtaacctttccagagatgtgacagaagtccttatacttcagttgttcagtcagattg

SEQ ID NO: 45702 - DNA, 75 bp, Homo sapiens
gttcaagcgaaaacatgaccgctgagcccatgagaaccttctgataacttaagagagattctccaaaatgtggcc

SEQ ID NO: 45703 - DNA, 100 bp, Homo sapiens
atatcctgctctttgcctcctataagtggaatgtctcccggccctcattgctggctgactccaaacttcacagagaatgcagttgtcttgacttcaggtc

SEQ ID NO: 45704 - DNA, 98 bp, Homo sapiens
cggagtatacaccatgagcaaagctcaccctcccgagttgaaaaaatgatgatgtgcctgcagatatggttgcagaagaatcaggtcctggtgcacaa

SEQ ID NO: 45705 - DNA, 82 bp, Homo sapiens
aagcagctatgaagaccagggggttcagctttccaagacaaaggctttggaagtgataaagcagttaaaagagaaaatgaag

SEQ ID NO: 45706 - DNA, 83 bp, Homo sapiens
catggtggtggtcgaagtcagcagacactagacagacgactgggtttggattcagaagaggattattatacaccacaaaaggt

SEQ ID NO: 45707 - DNA, 75 bp, Homo sapiens
gcagcagctgccgctcgagtcacttgggcaaaccagtccagctacgggggcccagccagccagcagctgagtggg

SEQ ID NO: 45708 - DNA, 75 bp, Homo sapiens
cctgagcaagaaattaaaacactggaagaagatgaagaggaactttttaaaatgctaaagtaaataatgccagcc

SEQ ID NO: 45709 - DNA, 75 bp, Homo sapiens
ttgtggaaaaaatgaaaaacatcagcaatcaccttgtgattgtagagaaggctccaaaagccagggtgcctgatc

SEQ ID NO: 45710 - DNA, 75 bp, Homo sapiens
taacacgccctcaagagctggatttgacacatcaagggcagccaattactgagaataacaagcctttgtattcat

SEQ ID NO: 45711 - DNA, 75 bp, Homo sapiens
aaaagagacatgaagaattggtatttcaaatgaccaccatgttgcaaaagagcattggggagtcagcaatgtccg

SEQ ID NO: 45712 - DNA, 122 bp, Homo sapiens
ggcgagcgactccccggctcgaagcctggatgaaatagatctctcggctctgagggatcagctcagctactatttaataaaacaaaatctgtagaattcacgttttgtaatgacactgtcgt

SEQ ID NO: 45713 - DNA, 75 bp, Homo sapiens
gtacatgaggacctggagggttcatcccgagggccggtgtcggagaaggaggatttgacagctaaggatattgaa

SEQ ID NO: 45714 - DNA, 75 bp, Homo sapiens
gaggaactggcccggaaacaggaggacgaccaagaatcgccttcagccctgtctggtgcatccttggcagaaagt

SEQ ID NO: 45715 - DNA, 75 bp, Homo sapiens
tggggtactacggctacagcaagggatatcagtatgaacaacattactcagttgccagaagatgcatttaagaac

SEQ ID NO: 45716 - DNA, 99 bp, Homo sapiens
tctcatttggaacagattacggatgctgcattgtggaacttggaaaaacaaggattcaagatggattcatcatttttcggtggtggaaaatgtataacc

SEQ ID NO: 45717 - DNA, 74 bp, Homo sapiens
taacagtatttactgagagctcatcaggagcgagaacccgagcagcgccatgagcaacactaccgtcgtcccca

SEQ ID NO: 45718 - DNA, 96 bp, Homo sapiens
ctcttcccgtctcccagcgtggatgagggcgcctgcagatcccggctagggcacggaccgcctaggccgagcttctcaataggtttggcatggaca

SEQ ID NO: 45719 - DNA, 98 bp, Homo sapiens
cgcagatcgccgtggtgggcggccagagcgccggcaagagctcggtgctcgagaacttcgtgggcagttcctagaatcttctacctccacagcggatc

SEQ ID NO: 45720 - DNA, 83 bp, Homo sapiens
ccggccgctctgcgggactctgaggaaaagctcgcaccagggagtttgagcctttgctgaagccacacgtggctgtgaagaag

SEQ ID NO: 45721 - DNA, 100 bp, Homo sapiens
gctcaagacccaggagtggggcctcatgatcctggatgaagtgcacaccataccagtgccgcagaatggaattcggcattgttcctacacagcttctcgg

SEQ ID NO: 45722 - DNA, 100 bp, Homo sapiens
ctttcaggaaggagccattatttatgtcatcaagaagaatgacgatggaatgggtaccacagaccatgtcatcgtcctggcgtccacgaaccgagctgac

SEQ ID NO: 45723 - DNA, 139 bp, Homo sapiens
gacagttgtggcaaaggagaaatggccacagggaatgggcggcggctccacctggggattcctgaggccgtgtttgtgcttgcaaaccatactgggtacatcaaagttgactggcaacgagtggagaaggacatgaaga

SEQ ID NO: 45724 - DNA, 100 bp, Homo sapiens
ttctggcggccatggtgttgctgctgtactccttctccggtgtcaagctagggatgcggtccattcccattgccactgcttgcaccatttaccataagtt

SEQ ID NO: 45725 - DNA, 100 bp, Homo sapiens
aacagcagccgcaagacattgtttctctccctctgcccccccttccccacgcaaccccagatccatttacactttacagatcccattgaagataccacgc

SEQ ID NO: 45726 - DNA, 80 bp, Homo sapiens
agagatgcctttatcatgacgtgatgctggagaacctgacacttatatcttctctagtggctacagcaaaccaaacagcc

SEQ ID NO: 45727 - DNA, 97 bp, Homo sapiens
atttcttctgacttgagcctgcagtgtgctgtgagagatctaccactaggtgttggtaaatcatgcttattgctacagtttacagacaagaggtttc

SEQ ID NO: 45728 - DNA, 88 bp, Homo sapiens
gcagctgtatgttctcatgtcctggacactaccacgttgatggctttctaaatccaggatgtcagctattgaaaacatggcagaaaag

SEQ ID NO: 45729 - DNA, 96 bp, Homo sapiens
ctgtcgcttcagggagacacgagcaccatgacaggggcaagtgtccgagtggtgaatcagctacttacagagatggatggtctggaagcacgccag

SEQ ID NO: 45730 - DNA, 51 bp, Homo sapiens
cctcaatctccttttccttggctacccgagttcatgatcaagtgttgccca

SEQ ID NO: 45731 - DNA, 100 bp, Homo sapiens
gcacctacggtcacgtctacaaggcgaggcggaaagatggcaaatgcagccctgaggatttggctactgcatataacaacagggggcaaatcaagtactt

SEQ ID NO: 45732 - DNA, 100 bp, Homo sapiens
gtctgcgagccaggattcccgcagaatggaagtgaggaaaggcaaccagctgacacaggagccagagtgagaccagcagactctcacactcaacctacac

SEQ ID NO: 45733 - DNA, 100 bp, Homo sapiens
acactgtgggggtgtcctggtgcacccccagtgggtgctcacagctgcccattgcctaaagaagtcatttgaaccaattctccgcctccttccccaggga

SEQ ID NO: 45734 - DNA, 100 bp, Homo sapiens
acgttcacggtgccccggcgccacctggagagaggccgcgtcctgggcagagtgcacgatctgattttctggagagatgtgaagaagactgggtttgtct

SEQ ID NO: 45735 - DNA, 75 bp, Homo sapiens
atttggaacattatctggacatcctcctccgcctcctcctctctgcatgcgcgtcagagcccgtgccaagaacaa

SEQ ID NO: 45736 - DNA, 75 bp, Homo sapiens
cggatgtcggcgaagagttcaaccagttactccacaggatccgctgaacataggatgttgccacaaaatctacct

SEQ ID NO: 45737 - DNA, 98 bp, Homo sapiens
tgaggccggacggggcggacggcgacgcagcccgcggcagaagatttcaacactacacttgcacaatgtctttgaaaccaagagtagtagattttgat

SEQ ID NO: 45738 - DNA, 75 bp, Homo sapiens
caaccttcttttggacagcaagtggccatataaagggcgtcctgaaaacaaaagcttcctttatgagatagtatc

SEQ ID NO: 45739 - DNA, 75 bp, Homo sapiens
agggaagaatggagtctgtcagtacaggtgccgatatgtatttgctggccgttggttaatgtcgttttggacggg

SEQ ID NO: 45740 - DNA, 104 bp, Homo sapiens
ctacaatgtcagtctccgggctctgtcttcggaacttcctgtggtcatctccctgacaacccagataacaggtgctgttccagaattcaaagaagagaaactgc

SEQ ID NO: 45741 - DNA, 74 bp, Homo sapiens
caccttgtctggaggaattggcatccttgtgccattcacgtcccatgagaaaggtggtggcgccctcctgcact

SEQ ID NO: 45742 - DNA, 82 bp, Homo sapiens
ctggagagcctgcaggacggcgcggcagagtccccgtacgcctacagtaacgattcttcgctgctgctgccttaccgccgag

SEQ ID NO: 45743 - DNA, 90 bp, Homo sapiens
cgattttgtcaccgttatgtgggaagcgaatccagaagaaggtagataatgactataatgcccttcgagaaagactcagcaccttgcctg

SEQ ID NO: 45744 - DNA, 75 bp, Homo sapiens
ccccacctgaacagaaaactgcatttgacaagattcatagtgaccacttagtagctagtgagaaacagcatatgc

SEQ ID NO: 45745 - DNA, 100 bp, Homo sapiens
caggtggcggcgaccggcggcgtccgaggaggttgtaggaagtgtcctgtattttactaatttttgccttgataaattggggcaaccgcttctaaatgaa

SEQ ID NO: 45746 - DNA, 75 bp, Homo sapiens
tggcttggagcacttcctattccactggattgggaaagaccatggcagcatgaatgtcagcatcatcattcaaag

SEQ ID NO: 45747 - DNA, 100 bp, Homo sapiens
ctccttacagctaggcagcttctttcattagatatgttcatactggcatatctcagagacatcgttcttgggtgtctctggggagtccctgggccagacc

SEQ ID NO: 45748 - DNA, 50 bp, Homo sapiens
gagtcaacaaccgcttcgagctgcagttggaattgatcacaccttttcag

SEQ ID NO: 45749 - DNA, 98 bp, Homo sapiens
ccggccagtcagtcaccattgtggcccagtacagacctgaagaggaattcagaaaagcagctcagcaacaggaagaacaagaagaaaaggaggaagag

SEQ ID NO: 45750 - DNA, 100 bp, Homo sapiens
ccgggacaccctggaagccaggaaatgtgtgtcccggcatggatatccggaacaacctcactaggttgcatgagctggagaattgctctgtcatcgaagg

SEQ ID NO: 45751 - DNA, 74 bp, Homo sapiens
taaatgcagattccagaaaaattacagcacatctcagtgaatttgcaagtgagactgtctcgctctgtcaccca

SEQ ID NO: 45752 - DNA, 100 bp, Homo sapiens
gacggtcgcgcggcggcaggcacaggagatgcagaaactaccagaggccgttcagctaattgagaaggccagcatgatgtatctagaaaacggcacccca

SEQ ID NO: 45753 - DNA, 100 bp, Homo sapiens
ggaatgtgctttagaagttaaaaagggaggctgagaagacaaaactccttatagctgcacagaaacaaaaggttgtggaaaaagaagctgagacagagag

SEQ ID NO: 45754 - DNA, 82 bp, Homo sapiens
cacacccacacgtgttcaatacacctcccacctgtcctcaggcatatcaaagattttgttggcccccatttgaccaaaaaag

SEQ ID NO: 45755 - DNA, 100 bp, Homo sapiens
aagaaccgggacgaacaatagaagatctaaaaatgtatgaacaccttttccctgagcttgttgatgattttcagcatgttacaccagacagctatattcc

SEQ ID NO: 45756 - DNA, 100 bp, Homo sapiens
ctcatggagggagcaccccagggccctgtggcatgaggaagctgggggcatcttctccccaggtgacgcatccaaagaagacattgacactgctatgaaa

SEQ ID NO: 45757 - DNA, 96 bp, Homo sapiens
agggctacgagcgtctcctgaagatgcaaaaccagcgtggcggccgcgctctcttccaggacatcaaggacctgaacccagacccaatcttagagg

SEQ ID NO: 45758 - DNA, 50 bp, Homo sapiens
caccaagtcttggtctagggccaagacacaggttgaacatcacggcggag

SEQ ID NO: 45759 - DNA, 98 bp, Homo sapiens
caccgtccagcctccgtgcagccgtggcgtgcaggactcgggtggctctgaggtcgcctggggaccccagaagggtcctccaccagcagcctggcccc

SEQ ID NO: 45760 - DNA, 100 bp, Homo sapiens
gccctctcgaaggcaggacagcggtggcggcaggtaatggggagagtgccaacaatttccattaataagacagaaggttgccacatatacctcagtgaag

SEQ ID NO: 45761 - DNA, 75 bp, Homo sapiens
tggatgtgtccagcaagatggcagaggctgactgtgctgtcctgattgttgctgctggtgttggtgaatttgaag

SEQ ID NO: 45762 - DNA, 99 bp, Homo sapiens
gaactctttgttaaagaagagaataagatttttggaagaaaaggctttggaagtgataaagcagttaaaagagaaaatgaagatagaacgtgctcacat

SEQ ID NO: 45763 - DNA, 74 bp, Homo sapiens
cagacgacaagcacacactatggcgctgaaacggattaataagaactcctctttcctaaaatggagtcgagtaa

SEQ ID NO: 45764 - DNA, 82 bp, Homo sapiens
gactcctcgcctggctcggaaggtttacccaaggtccagcctagcccctaggcaccatgtcggacagtgatctaggtgagga

SEQ ID NO: 45765 - DNA, 98 bp, Homo sapiens
aatgtgtttggatcagtattccatgttaccggctactccatggggtgtgtgggaaataatcaagcgaactgattgtctacaaagcctggctctgttcc

SEQ ID NO: 45766 - DNA, 139 bp, Homo sapiens
ccgcagcagtggtggctatgaacccagaggtcgtggaggtggccgtggaggcagaggtggcatggggatcaggcaaaaatgatcatgccgaaaaagtggcggaaaagctagaagctctctcggtgaaggaggagaccaa

SEQ ID NO: 45767 - DNA, 100 bp, Homo sapiens
attgaaaatggtatttcagatccagatcagtaggattgaaacatccaatgtcatctgggtggacagttttagaagacgacagaaagaaaaaagaaagaga

SEQ ID NO: 45768 - DNA, 121 bp, Homo sapiens
agaaggccatcaccacgcagaacgtcaacaccaagtgcatcaccatccccagatatccttggaacagaagatcttattgtggaagtgacttccaatgatgctgtgagattttatccctgga

SEQ ID NO: 45769 - DNA, 100 bp, Homo sapiens
gtgccagaagactcgggaggaccagggaagcagtgaaaatgatgagagattttaccaaacgagaaccagaagatacgaaaagtgcagattctgatcgaga

SEQ ID NO: 45770 - DNA, 80 bp, Homo sapiens
ggattccaagtaactcttatttgcttaaagcttttcaagccaggccaagaagctgtgaagtaccagggtcctcgggactt

SEQ ID NO: 45771 - DNA, 50 bp, Homo sapiens
tcgctacacagcaatgcatcgaggtagttatgcttgtcctagcttggaaa

SEQ ID NO: 45772 - DNA, 75 bp, Homo sapiens
ggctgagctcagagtccagccgcaaaaccaaggtgctggagaatctggtaaaagcaccattgtgaagcagatgag

SEQ ID NO: 45773 - DNA, 83 bp, Homo sapiens
cgccgcccatcgagtcgaagcaccgcagcctggtgcagatcatctacgacgagaaccggctgagcgggctttggacaccatga

SEQ ID NO: 45774 - DNA, 100 bp, Homo sapiens
atcagctgaaaaatgaaattcttacaagtggaaatatacccccaaattatcaatacaaacaccttgcacagaatatatctaaatcgcatctggaaacctg

SEQ ID NO: 45775 - DNA, 88 bp, Homo sapiens
tttcgacgcctccgccgccgcctgaggaggcgagctagccgggagttacaccgccaccgccaggtatctggccaggaacagtcttcac

SEQ ID NO: 45776 - DNA, 100 bp, Homo sapiens
ctctttcaggaggcatcaaggtcaatgggcctcggatgataccggggactctccagagccatgactagatccaatggattctgcgatgctgtctggactt

SEQ ID NO: 45777 - DNA, 100 bp, Homo sapiens
aaggaggaggagctgcaggcggccctggccaggcggtgcctcgggaggagctgtttgtgacatccaagctgtggaacaccaagcaccaccccgaggatgt

SEQ ID NO: 45778 - DNA, 82 bp, Homo sapiens
agcccgggtccccgcgttcacagccccagcgcagaggacgggaggggcaagctgcggccaaccaaggccaagagcgagcgga

SEQ ID NO: 45779 - DNA, 80 bp, Homo sapiens
cgaagtgcgcaaacttgacactcaccctgaccgatatggaatgtgcagatgtcccactattaactccaagcagcaaagaa

SEQ ID NO: 45780 - DNA, 90 bp, Homo sapiens
gcctgaagctcttctctccagtgtttctacaatcagctagggactacttaatagggctctttgtgatggatgaggacgccaccctccagg

SEQ ID NO: 45781 - DNA, 82 bp, Homo sapiens
cggggctgctggtgggccgcgtcgaagacatggaccagggctacggagaattcagaaggagctggcggacatcactttagac

SEQ ID NO: 45782 - DNA, 50 bp, Homo sapiens
gccggcctccggggagaaacggttacagtatagccaggatatacccagtc

SEQ ID NO: 45783 - DNA, 100 bp, Homo sapiens
gaatcagaaacctgaagttagaaaggctcaacgagaacaagctatcagaccagcatctcagacatgtcgaaaaagatgttttgatccctaaaataatgag

SEQ ID NO: 45784 - DNA, 75 bp, Homo sapiens
agtggacaacagaacaatattggaatggtgagagcaccctccacgcccagatgcctgcgtagtttttgtgaccag

SEQ ID NO: 45785 - DNA, 50 bp, Homo sapiens
caaatgaagcagcgctttgaaagtgtgaaataaaagtagccatgtcgaag

SEQ ID NO: 45786 - DNA, 75 bp, Homo sapiens
acagaatatgccaaaaatggagaaatttttggaatacggggtgctttgcattcaggaatacagaaaaaacagcaa

SEQ ID NO: 45787 - DNA, 110 bp, Homo sapiens
cctgcaggacggcgcggcagagtccccgtacgcctacagtaacgacaatgcagatcttcgtgaagactctgactggtaagaccatcaccctcgaggttgagcccagtgac

SEQ ID NO: 45788 - DNA, 100 bp, Homo sapiens
attcaaaggtattagaagccttgaaattaaagggaatgagttggaaagggaattcttgaagctaattaattacaatatcagcgttactggcagtgtttat

SEQ ID NO: 45789 - DNA, 75 bp, Homo sapiens
agtcaaggttgcccccaggcggtccttcctggggctccagcaccaccaggacctgagcaccccagtcctgcggtc

SEQ ID NO: 45790 - DNA, 50 bp, Homo sapiens
tatccaccggcactgccaagatcaggtatcatgatattagctggtttgac

SEQ ID NO: 45791 - DNA, 100 bp, Homo sapiens
cgacgccgcgtggcaggcgctgcgcacccgggagttctgggaaatcgttcattcatttacagatgaacagaaaagactcttcttgcagtttacaacgggc

SEQ ID NO: 45792 - DNA, 98 bp, Homo sapiens
tgcccgtggaccacaggccctcgttgcccagatcacttttcaggattagaagaggctgtgtatagaaacatacaagcttgcaaggagcttgcccaaac

SEQ ID NO: 45793 - DNA, 75 bp, Homo sapiens
gtgcctcttcatattggcgatcctgttgtagagctagcaatctagagaatagtacctatgacctgtacaccatcc

SEQ ID NO: 45794 - DNA, 75 bp, Homo sapiens
ggacccgcagcttgcggtcaccatgggcttcacggggttcgcactattcctgatcagagaactccagttgcttca

SEQ ID NO: 45795 - DNA, 75 bp, Homo sapiens
gtttgagaaaaatttttatgtggaacatccggaagtagcaaggctgacaccaacacctgaaagaccccgccgtgg

SEQ ID NO: 45796 - DNA, 80 bp, Homo sapiens
cctttgacaacgcttccaagcattgctattacaactgtaagccaggagtgcgcttctctgaagtagctttggaaagtaga

SEQ ID NO: 45797 - DNA, 98 bp, Homo sapiens
ggagactacttgtgtgtgaaagtagataggactccgaaaggcacccagatcccagctctcctgttggcttcgtgcttggggtagatcttcttcacata

SEQ ID NO: 45798 - DNA, 85 bp, Homo sapiens
taaaacctctagacaaagtaaccaaatctccagccaatctggtgctctcatgaaaatctacatcaggaggacctagaaaaggaag

SEQ ID NO: 45799 - DNA, 74 bp, Homo sapiens
atcaccgacctcatcagtgagctgtccctgctggaggagcgcttccgggccaggagacaagcttctcaagtctt

SEQ ID NO: 45800 - DNA, 74 bp, Homo sapiens
gactcagtccccacaggtgcggaggagaatgacaaccacctggagaagttcttcaccctctgccactccctgga

SEQ ID NO: 45801 - DNA, 82 bp, Homo sapiens
atccgttctattactaaaaaagccttcactggtttggatgcattggagcatctgtttaccgacaagactgtgaaactttcgg

SEQ ID NO: 45802 - DNA, 100 bp, Homo sapiens
catacagctaataggtggcagtctgactccaagtctgtgcttttcactgctgtgctatgccactaaaggcatcattcttaacaaagaagttaaatattgg

SEQ ID NO: 45803 - DNA, 98 bp, Homo sapiens
ctgaaccgactctgagaaatttggttcaacagagtttggaaaagatttctaaactggagcaggaaaaagaacattggatgttggaagcacaattagcc

SEQ ID NO: 45804 - DNA, 100 bp, Homo sapiens
ctctcatgttctgcacctcaggagggaattcagcctcagtgatgtccatgaggctatggccactcggacgcagatgttctgcaccagtcattacttgaag

SEQ ID NO: 45805 - DNA, 75 bp, Homo sapiens
gctaggagcgccgaccgcagggcctctacggtgaattttgtggcgaaaatctaagcaagcagaaatttactcgag

SEQ ID NO: 45806 - DNA, 101 bp, Homo sapiens
gctttggttggaagacctattatcagatcaaccaccaaagtgggaaacattgaaatcaagatgagtgaccgaggaggtggcgttcctttgaggaaaattga

SEQ ID NO: 45807 - DNA, 83 bp, Homo sapiens
ctgaaggagcggatcagagagtatttaaagggcgagaaccactgtctctgatcaacgtgcggaagaggaacgtggaatctggg

SEQ ID NO: 45808 - DNA, 75 bp, Homo sapiens
tcgagtacctcaacgctgtgaccgagaggtcccctctgagccctctcaccttgtcctgtggaagaagcacaggct

SEQ ID NO: 45809 - DNA, 90 bp, Homo sapiens
tttaggtctcaaggcaagcctattgagttaacacctctgccgctgctaaaagacattcacggcatggtgtaactcccacctccggaaggc

SEQ ID NO: 45810 - DNA, 83 bp, Homo sapiens
gtggccctgacggaggggaggaagagtcagtggatcggtggggaaaatgctgcttaccctgggccctgggctgtagaaagaag

SEQ ID NO: 45811 - DNA, 100 bp, Homo sapiens
cacacgaggagcctgaaatatggaaaatttcttaaacaattaggtctacatcctaactggcaattcgttgatgtatatggaatggatcctgaactcctta

SEQ ID NO: 45812 - DNA, 75 bp, Homo sapiens
aacatcatgcagtggaatgcagttatatttggtgatgatgatgatgattttgatgatgaggaagctgaagaaaaa

SEQ ID NO: 45813 - DNA, 50 bp, Homo sapiens
actcggagccggcacggctcggcggggcttgcttctgacatgtctgatga

SEQ ID NO: 45814 - DNA, 90 bp, Homo sapiens
cttatttttgaaaatctgatcgacctgaagcgccgctataattttcctgtagaagttgagaaccgggagaagtacctgctgcccttcctg

SEQ ID NO: 45815 - DNA, 74 bp, Homo sapiens
gcaaactgttgcaaagaaattcgacttcagtaatttgagtagtagcgtgaagcctctgcgggccttcttttcgt

SEQ ID NO: 45816 - DNA, 83 bp, Homo sapiens
ctggaaggcacggggcggcaggcggtactcaagggcatgggcagcggccagttgcatgccggtggccgtgggtccctacggac

SEQ ID NO: 45817 - DNA, 83 bp, Homo sapiens
catgggttcctgaccaatgtcatccttgcagacctcaacctctcagacacatcttcggcctctgaggatgagggctctctgag

SEQ ID NO: 45818 - DNA, 97 bp, Homo sapiens
gtgagggagagaaccagcacttctgggacgcacagagaccgtgaagattccaagttcaggagaactcgaccgatggcccactgcgtgaccttggttc

SEQ ID NO: 45819 - DNA, 100 bp, Homo sapiens
gaactttgcacttgtggctacactaggtcccagcatgccttctgagaccccccaggcagaagtggggcccacaggctgcccccaccgctcagggccacac

SEQ ID NO: 45820 - DNA, 98 bp, Homo sapiens
tctctttagtaaattaacttcaaaactcacaaggaggatgaaacaagtgaagatgctaactgtcttgctttgagtggacatgataaaacagaagcaaa

SEQ ID NO: 45821 - DNA, 98 bp, Homo sapiens
tcagcgacatgtcatgattgcagagcgcatcgaggataacgttctccagtccagcgtcccagtgtttcaggctgcatgtaccaagtagttcagacgat

SEQ ID NO: 45822 - DNA, 75 bp, Homo sapiens
gcttgctggcatggttccccttgcaagattgatatcagtaaatgccattatttagtggatttggacaccatgaga

SEQ ID NO: 45823 - DNA, 98 bp, Homo sapiens
tcatcggtttcaccgcgctcgttatcatgtggcagaagcactatggtcacagatgtgacattgatgtgtccactgaagccatgtatgctgcaaccaga

SEQ ID NO: 45824 - DNA, 51 bp, Homo sapiens
cgccggtggagacgcaggcgaggaagcaaaatgtggattcagcaaacaaat

SEQ ID NO: 45825 - DNA, 83 bp, Homo sapiens
agaaagaaccacaaacttgaagatggatatcagctacagactttcctgagtcaggagagctcaaaggatggctactgacatgc

SEQ ID NO: 45826 - DNA, 100 bp, Homo sapiens
gcaaggtgcacagtggaagagagcagaagtgtttttaggcattcgttcacatacacaggtttcatatacactggagaagtcgtacatcgaatgctaacag

SEQ ID NO: 45827 - DNA, 83 bp, Homo sapiens
gaaccctgaagtcggtgtctgctgcgttcacggcaggattcggttagatgaagattatggaagagattcgggccctcccacta

SEQ ID NO: 45828 - DNA, 83 bp, Homo sapiens
cttgggagatgggcatttggcgagaaggctggcgttagtgaagcgcgcccggcgtcacggcatgccagatttcctggagaagc

SEQ ID NO: 45829 - DNA, 76 bp, Homo sapiens
ccaggtgtaagcgcagaaagcaggcgaacccgcggcgcaataacgcactggcctgtgtttgtggaggtgaaagacc

SEQ ID NO: 45830 - DNA, 113 bp, Homo sapiens
tcttgaacaaaacctgcatactttagatagtctccgtatattcaatgacaaggttccaatgattcttgttggtaataagtgtgacttggaagatgaaagagttgtagggaagg

SEQ ID NO: 45831 - DNA, 88 bp, Homo sapiens
acagctgggccggagcagccgcgggcgcccgaggggccgagcgagattccttacatggcttgacagatggagtattcatctttgaagc

SEQ ID NO: 45832 - DNA, 76 bp, Homo sapiens
caggagaccgtcgttgccttgtatttccagagaacaggttctaaatggcttctaagaagttgggtgcagattttca

SEQ ID NO: 45833 - DNA, 100 bp, Homo sapiens
gggagctccctcgcctggctctcggcggcctgatggagtaagaggggttggctgtgaatgttcctctcctggctgaaatttatggtatagaaggaaacat

SEQ ID NO: 45834 - DNA, 51 bp, Homo sapiens
ggaatgtcacacacattgatcaggctgtaaaagccagcacggaggccaccg

SEQ ID NO: 45835 - DNA, 97 bp, Homo sapiens
gtctgagtggatggggacctgcctgctggactgatcctttgaaatactccagccatgactaaaagagaagcagaggagctgatagaaattgagattg

SEQ ID NO: 45836 - DNA, 100 bp, Homo sapiens
gagaaattgaggccgttgtacaaccatccagcaggtcgagtctatgctgtcttgtcaaagagagaaggtcgggtacttcaagaagaaatgaaagaaggga

SEQ ID NO: 45837 - DNA, 98 bp, Homo sapiens
caagttcatgccaccaccgacttatactgaggtgaatccccagtacgatagcaccttcctgtttgacaacgacttcccagctctgcagcctgatgccc

SEQ ID NO: 45838 - DNA, 75 bp, Homo sapiens
gaaggggaaagcctggagtcctggctcagaatcatgttcgttcaggaggaggccctggccagcagcctctcgtcc

SEQ ID NO: 45839 - DNA, 100 bp, Homo sapiens
ttcccaagtggctctcccacccagtgccctgtgagcaacctgcactcctccgtgagatcatgtttgagaccttcaacaccccagccatgtacgttgctat

SEQ ID NO: 45840 - DNA, 75 bp, Homo sapiens
atcatattatagatggagtaaaggccaaacgtaccaagaaagtcgggatcgtcggtaaatacgggacccgctatg

SEQ ID NO: 45841 - DNA, 90 bp, Homo sapiens
gaagtcttcactaacatctacgtgaccagttttggccctgtctcagatacagatatggcatcagtgtcattcaaggacgtgactatagaa

SEQ ID NO: 45842 - DNA, 51 bp, Homo sapiens
aatcgattgcattggcaatgagacagtttcccgtcaccaattttccttgga

SEQ ID NO: 45843 - DNA, 100 bp, Homo sapiens
cctggcacaacaacgagattctacaagcctctgtagatggtccaggacttctcccacgtggaaggccttctttctcaatctcttcgcctgtggaagtcct

SEQ ID NO: 45844 - DNA, 101 bp, Homo sapiens
aagtgtggttccaaggacaatattaagcatgtccctggaggtggtaatactctttggcagttgcactgggtactggctgagttctggaaaacaggaatgtg

SEQ ID NO: 45845 - DNA, 100 bp, Homo sapiens
gatattccaatttatgcagataagtcaactgaaccatcttcttggagtactcatgaagatggaagtctacatggagaatacaggatgaatccactctgtc

SEQ ID NO: 45846 - DNA, 101 bp, Homo sapiens
gggatgactgattctcctccgccaggctcacagaacatttcctgcctgttgctcacactctgttgtccacagcatacccgcaccctagatggctgactctt

SEQ ID NO: 45847 - DNA, 88 bp, Homo sapiens
agatctctacagagatgtgatgttggagaactacaagaatctcattatactagtcgcagtctagcagaagcttgttcagatggggatg

SEQ ID NO: 45848 - DNA, 83 bp, Homo sapiens
ggaagacgcgctcctgcgccggtggacgcggatctgtcaacatgggtaaaggagaccccaacaagccgcggggcaaaatgtcc

SEQ ID NO: 45849 - DNA, 74 bp, Homo sapiens
cccatgaagcggctaccaaagctgttctccaggagtttggtagaggaagtcgagacaacatgagtgtgattttg

SEQ ID NO: 45850 - DNA, 75 bp, Homo sapiens
ggaacatctcttcccagcggctcagcgacctggcatgtcaccagggaaccggatgcccatggctggcttgcaggt

SEQ ID NO: 45851 - DNA, 82 bp, Homo sapiens
ctggctctgctgctgccgccggcgaaggaggaggcgttgccggtacctggagtagaacagaaaaattattatgtctgtgttc

SEQ ID NO: 45852 - DNA, 75 bp, Homo sapiens
atattaactttttactagaagaatatggaatcatggttaataatgattgatcagggaccatgaaaagaaacttgt

SEQ ID NO: 45853 - DNA, 100 bp, Homo sapiens
ctgagacaaccacttctggtggttgccactcacctgaggatccagaacatttgttgaacacaagtgataatgttacagtgcagtgtcacacaccaagagt

SEQ ID NO: 45854 - DNA, 83 bp, Homo sapiens
ctgcaggaagcctaagtgcagacgccggcttctcccgcagtgacttgagaaggcttctcttttaaaaggactaaaacatgcta

SEQ ID NO: 45855 - DNA, 100 bp, Homo sapiens
cggcttctcccctacgcgctacacaagtggagctccttttcctccacctaccttcccgagtcctcagaatggttggaatgaccctccagctttgaacaga

SEQ ID NO: 45856 - DNA, 100 bp, Homo sapiens
ccgaggagctctgcagtgggggcgtaaaggctggcagcctccccgggtgcctccgcggtgaaaacagctactattgccactgaaaggaatgggaaaccag

SEQ ID NO: 45857 - DNA, 96 bp, Homo sapiens
ggcctatggtggttccatgtgtgctaaatgtgttcgtgacagtgaagcctggtgttcggtacagagaattgggaaacattatccagaagcatgccc

SEQ ID NO: 45858 - DNA, 83 bp, Homo sapiens
gggattgctggctacagcttcagaagaccgaagcgttcgtatctggaagatcatggaagggaagtggttgctgtgtatgttac

SEQ ID NO: 45859 - DNA, 82 bp, Homo sapiens
gcagcgggagctggacggcgagcgcgagcggcgcgagaaagtacacggtcctcttctcgcacggcaatgccgtggacctggg

SEQ ID NO: 45860 - DNA, 100 bp, Homo sapiens
cagggctgtgaggcccgccgctcgcatgagcacctcatacggctgcttctggagaaggtggtgttcccactgatgaagagcaggcgactgggttggagag

SEQ ID NO: 45861 - DNA, 75 bp, Homo sapiens
ttccagttgcggcttattgcatcacagtaattgctgtacgaagatcaggatcctcatgaccagccaaagagaaga

SEQ ID NO: 45862 - DNA, 101 bp, Homo sapiens
aagctgcaatcgtggtttacgacattactaatcaggttcctaagtggtagcagagatggaacagcacggatttggagatttgagcagttagaatggaggag

SEQ ID NO: 45863 - DNA, 75 bp, Homo sapiens
ctgatcttgaaggtttacacttgtcaacttcctcttcagtcatcagtgaagagtctaacctgtctctgcaagctc

SEQ ID NO: 45864 - DNA, 103 bp, Homo sapiens
aaattttttgctgatggagagctggaatctatgggattttcagctcgatacaatttcacacctggtgaccaagaatatggcccaggtgaccaaagccctggac

SEQ ID NO: 45865 - DNA, 101 bp, Homo sapiens
tactggattcaaggaccctgatgaagaccttgaacaagtctcgagagtggaaacaactctcacagttcgttttctagccaaggaaaatgtaacccaggacg

SEQ ID NO: 45866 - DNA, 50 bp, Homo sapiens
gtttcacctaccttcccgccaacgggtaacaagatgctcaactatagtgc

SEQ ID NO: 45867 - DNA, 75 bp, Homo sapiens
gcccagcgcccgacaccgccggccgcggcggcggccgccaccggctctaggaatcaagtactggaaatgtttgat

SEQ ID NO: 45868 - DNA, 100 bp, Homo sapiens
gaggagagcgtggagctacaagaccttcccaagggctctgaaagatcaagcgtttcctggaggacaccacggatgatggagaactgagcaagttcgtgaa

SEQ ID NO: 45869 - DNA, 98 bp, Homo sapiens
cgccgttttgccgcgatttggcgttaacttattgacccatggggaggagggtcacttcccgtgaaaagtaaggttcgtgatcctcgggccaattttga

SEQ ID NO: 45870 - DNA, 82 bp, Homo sapiens
gctcgcccttcccaggcgccggctgcagcagagggcgtgatggtgggcatgggtcagaaggattcctatgtgggcgacgagg

SEQ ID NO: 45871 - DNA, 88 bp, Homo sapiens
gcacgggatggcggaggcgcctcctgtctcaggcgtggtgtccctcgtggccgttcacccctccaccgtcaacccgctcgggaagcag

SEQ ID NO: 45872 - DNA, 80 bp, Homo sapiens
caccatccctcccaccagtgctaccatgggccaactgtatgaggttgacctgacagttcaagaaaaggagaaatatctta

SEQ ID NO: 45873 - DNA, 101 bp, Homo sapiens
atattcccctgaacagcattctatcatggaaggaggagatgaagggcaagggccaaaatgatggtggagtattgctcctggaaaatccaaaaggtgacaat

SEQ ID NO: 45874 - DNA, 74 bp, Homo sapiens
aacattgttccatggcttaagaagtacgggaccaaccccagcaatggagagaagtttgcctgcaatggtactgt

SEQ ID NO: 45875 - DNA, 82 bp, Homo sapiens
gtccgcccaggcgcagatgcgggccctgctggaccagctcatgggcacggctcgggacggtcacaccgacaaatctgaagcg

SEQ ID NO: 45876 - DNA, 75 bp, Homo sapiens
cgatagagacgttttccggagggattccatcatagagagccttctccatggacgaccgcattgcctggacccaca

SEQ ID NO: 45877 - DNA, 108 bp, Homo sapiens
agagctgagcggcgcgggctccagactcgccgtggtcaagttcaccatgagaggtatgaaaacccatggacaatcccgaatatgttgtcaatgacgagaattggcttg

SEQ ID NO: 45878 - DNA, 100 bp, Homo sapiens
ttccttggccatcccaaagctattctgggggcaacagagaagcatcggctgcgcctggtggccactgatggggccttttccatggatggcgacatcgcac

SEQ ID NO: 45879 - DNA, 101 bp, Homo sapiens
tccaggtcgaggttctgcagaaggttgtgactttagtatacagtggccagcatcgaaatgttcagccttttagtgatgaagatgcatcaattgaaacaatg

SEQ ID NO: 45880 - DNA, 90 bp, Homo sapiens
aaacatcaaagaggtctagcaaaggacagtcattttgtttactcattcagccctgttgcaggtcccaataaactcttcataaggttgaca

SEQ ID NO: 45881 - DNA, 75 bp, Homo sapiens
gccgccgccgagagagaggagaaggagatctctggaaacatggctacagaacatgttaatggaaatggtactgaa

SEQ ID NO: 45882 - DNA, 75 bp, Homo sapiens
agaggaggttgcccagaagaaaaagggcagcaggatgggtgtggaagcagtgatggcacttttggaggggacccc

SEQ ID NO: 45883 - DNA, 83 bp, Homo sapiens
cgagatactggtgccatgaaccaaggtgggaaagaagaagaagatggagtgtgggagaatggactttcctatgaatgccgtac

SEQ ID NO: 45884 - DNA, 100 bp, Homo sapiens
agcacgttgttgttaagtttgtggtgaaattctttccgcctgaccacacacaactccaagaagaactcacaaggttttgacctgtagcagagaaccaatt

SEQ ID NO: 45885 - DNA, 73 bp, Homo sapiens
ctctggctgctgctgctggcccggccggcctcgtgcgccccagagcacaatcattgtggagaagacagttcaa

SEQ ID NO: 45886 - DNA, 74 bp, Homo sapiens
gacggcaaaggtgtcgtggtggtcattaagcggagatccgccatagagccccagaaggaggaagctgatgagaa

SEQ ID NO: 45887 - DNA, 90 bp, Homo sapiens
caaactcgaagaacagctgtggaaagaagttgcaaaacactgggtcctgcatgccagtaaaactactcatgtcagctgttctgcaggatc

SEQ ID NO: 45888 - DNA, 82 bp, Homo sapiens
gggcctgcccgcccagcccgagcccggcctaggagaccccgagaggagacggctgaaggtgatgtggccgccctcaaccgac

SEQ ID NO: 45889 - DNA, 80 bp, Homo sapiens
ctgaacttcagaataaacagtagaaacttgagtggtcaaaatgcagatcttcgtgaaaacccttaccggcaagaccatca

SEQ ID NO: 45890 - DNA, 98 bp, Homo sapiens
gccggagaagagagctctggggtcgacacgagctctcaacgaaatgtggaagtgtcagaacatgcttcggagccatgtacgcgaactattggatttgc

SEQ ID NO: 45891 - DNA, 98 bp, Homo sapiens
aagagagacatttctggctctgaaggcgaacgcttcgctggccatttaggagctctgctcaaagccagacgacaaatcttcctattttcaagctgaaa

SEQ ID NO: 45892 - DNA, 100 bp, Homo sapiens
agcccttctggcaccttaagaaattatccactcacctgcaaagttgtttattcctacaagaaaaagcttgtggtgaaggggggcaaaaaaaagaagcaag

SEQ ID NO: 45893 - DNA, 90 bp, Homo sapiens
gcataaaatcatctccatattctcaggcacagagaaaggtgtgttgaggctcctggaacacggggaggagtacgtattcaccctgcctag

SEQ ID NO: 45894 - DNA, 90 bp, Homo sapiens
cccagacctacccgggcgaagcgggcgagcggtggtttggacgccggcggagacgcgggcgaggacgctgtgcagagctgcaagtccgta

SEQ ID NO: 45895 - DNA, 82 bp, Homo sapiens
agcgcggggaaggcggttggggttctgacagctgcgcgcggtcgcgtggggcaggcagtggcgctgcgggccaaggccttcg

SEQ ID NO: 45896 - DNA, 96 bp, Homo sapiens
ctatacgctaagagaacttaaactttcaaaggttggacaacaacttccctgggagagggaaagatttgtgcccatgtgatcaagtgtgagcaactc

SEQ ID NO: 45897 - DNA, 85 bp, Homo sapiens
cagaagaaggctgctattgaaagagagtatgcacagaaggacagaataacgggctcccagattcacaagccccaccaagaggatc

SEQ ID NO: 45898 - DNA, 73 bp, Homo sapiens
cgctggcggcggtcgagccggcctgcggcagccggtaccagcagctggagagatttaccagcatgagaattaa

SEQ ID NO: 45899 - DNA, 50 bp, Homo sapiens
caggaaccgggaccgccagcgcaggagaccatggtgaatccgggcagcag

SEQ ID NO: 45900 - DNA, 89 bp, Homo sapiens
ggcggggaccttgccttgcccggggcagaggtggaggagacactgaagcgactgcagagccagaagggagtgcagggaatcatcgtcgt

SEQ ID NO: 45901 - DNA, 50 bp, Homo sapiens
cagcggcagcgacgagaacctggatcaggaaatgggcctgagtttacagt

SEQ ID NO: 45902 - DNA, 74 bp, Homo sapiens
ctgcaagctcatgaaagaaatcttagataagaaggttgagaaggcacaaatggctgccaaactggaacgtttgc

SEQ ID NO: 45903 - DNA, 75 bp, Homo sapiens
tctcgggaagagatagatcatgcagagtattacctttacaaaatgttggctcaattaagaaacatcagggagata

SEQ ID NO: 45904 - DNA, 100 bp, Homo sapiens
gctggagcctcaggcggcagcgcttctagcactttctgcagctagagctgattaatgggcgcttgagtgcctccttgctgcactcccatgacacagagac

SEQ ID NO: 45905 - DNA, 51 bp, Homo sapiens
cttgggtcctccgagagcagcagcgcatgcatatgcgctagaacttctatt

SEQ ID NO: 45906 - DNA, 75 bp, Homo sapiens
cagaatatgacggtggctataccagggactctgttctgattaggttttgagagattacctgaagttgcactcaaa

SEQ ID NO: 45907 - DNA, 75 bp, Homo sapiens
accaaggacagcttttttcctgcaaggttcatcctaagttccactataaacaggctcatgactcgggcacagaca

SEQ ID NO: 45908 - DNA, 100 bp, Homo sapiens
cggagcctcccctgcagcgactcggaagattcgaggcggcgggggacaagtcggcgccccagagcggacgaggtgatcatggaggaagcactttactccc

SEQ ID NO: 45909 - DNA, 51 bp, Homo sapiens
tgagatccatctgcaccacggtgctggaaggccaacagctcaggagaagcc

SEQ ID NO: 45910 - DNA, 123 bp, Homo sapiens
caggaacaagatgtgaactgtttctcttctgcagaaaaagaggctcttcctcctcctcccgcgacgtctgttctctggggaggcagtaaggggccgtggagctggcctcggcctcggcatcgg

SEQ ID NO: 45911 - DNA, 75 bp, Homo sapiens
atccgtaaagacccatttctctatgagaaaagaatggtttgtcattcattgaaacttcggccctagactctacaa

SEQ ID NO: 45912 - DNA, 97 bp, Homo sapiens
ctcagaactgttccttcagccaaagaaacaagccgtggaataggtgtatcaagtaatggtgcaaagcctgaatctctaggtaacaggagaattcgag

SEQ ID NO: 45913 - DNA, 89 bp, Homo sapiens
tatttgtgtgacttgactcttcaaacacaaagacaatgcagatcttcgtgaagactctgactggtaagaccatcaccctcgaggttgag

SEQ ID NO: 45914 - DNA, 118 bp, Homo sapiens
catcagggacgtgctggccgtgatcaaacactgcaaggaccccctccggctcaagtgtgtcaagcaagaatctgatgttccagcagaaatccaggtgttaaaagaacccctacaacag

SEQ ID NO: 45915 - DNA, 75 bp, Homo sapiens
ggcattggactcatggtgctgcatgcagagatgctgtggttcggggggtgctcgataagaccatcatcatgtgga

SEQ ID NO: 45916 - DNA, 75 bp, Homo sapiens
tgtttgcgacatcccagagagcttccagacggccctccaggcactgaagcgtaagaagaggtatgagaagcagct

SEQ ID NO: 45917 - DNA, 75 bp, Homo sapiens
aggaccaggatgctgccttcttcaaggtatcgaaggatgatcgcagtgatgtggagagcagctcagaggaagaag

SEQ ID NO: 45918 - DNA, 116 bp, Homo sapiens
ctcggctgcgccgcgtgtcctcggagcgcggtccctgtattggtctcctgctcctagagttccagggtctccctccactgctgtagtaacccgggtccggggcctcggtggtgctc

SEQ ID NO: 45919 - DNA, 78 bp, Homo sapiens
ctaagcccaggtgttggagaccagcctgagcaacacaacaggccgacggtcgcaaggtcctacggtcaagcatccggg

SEQ ID NO: 45920 - DNA, 96 bp, Homo sapiens
tacagataccatctcaaagggtaatcttccaggatggtctgcttgtccttcattatggtcttgtggtttctcctctgaagataacttgaagattct

SEQ ID NO: 45921 - DNA, 50 bp, Homo sapiens
gttatgaggcttaataaagaagttgaaagatgcatgagtgtgatgcagtc

SEQ ID NO: 45922 - DNA, 100 bp, Homo sapiens
cttaggaccacccaccatgcctatccaggtatcttctcagtcctcagcttggcctctgagtgcacaacccttgccgctgagcttcccaaagtttcctatg

SEQ ID NO: 45923 - DNA, 100 bp, Homo sapiens
atgaagaacatggccacggagctgggcatcatcctcatcggctacttcaccctagtgcccgccatccagcagaatggggaaatggagagagaacctgaaa

SEQ ID NO: 45924 - DNA, 100 bp, Homo sapiens
aatggtaggtgggggtcctcctgcaccgcacatgcagaaccagatgaacggccagatgcctgcttatatcaaaggtgggtggatccttaggaaagcctgg

SEQ ID NO: 45925 - DNA, 75 bp, Homo sapiens
aggatgggggcccagggcctgacaccctctcaggttacaggaaatacaggaggcagaggaacaaataaaagacac

SEQ ID NO: 45926 - DNA, 75 bp, Homo sapiens
tttcttctctggcagctgcaaacgggcgctgacctcaaccagcagaagggtgggagagaatcaagctcctgtggc

SEQ ID NO: 45927 - DNA, 100 bp, Homo sapiens
tgtgctcaagcatttcaacgtgcgtgtcacccacgcagacatcttcagccgctgccagctctccctgtccagccgcctgcagctgaccctgtaccagtac

SEQ ID NO: 45928 - DNA, 105 bp, Homo sapiens
ggacagccgcgcgctgagggtctcggggcgggcgccgcgggacctctccgggccatggatcatgatgctgccgccaccgccgccaccacggagcgagaagcccag

SEQ ID NO: 45929 - DNA, 100 bp, Homo sapiens
gcgagccgctggtcatcaccaaggcccctggccccaacatggcccgtcgctctcagagctcctcgcagggggacaacccactggcacccgggtacctgcc

SEQ ID NO: 45930 - DNA, 82 bp, Homo sapiens
cagaaacgggtcctgctgctcaccaaggtgaatgtaaaagctttaaagagaaattcatgaagtgtcttcataacaataattt

SEQ ID NO: 45931 - DNA, 100 bp, Homo sapiens
gagccggagagggtgctggctgccgcgcggccgagcccaatagaatcctgccagaatttctacaaagatttcacattacagatcgacatggctttcaacg

SEQ ID NO: 45932 - DNA, 50 bp, Homo sapiens
gtccaagctttcagtgttggagcagcagtgggagacatttagtgaacgct

SEQ ID NO: 45933 - DNA, 50 bp, Homo sapiens
ctggaccattattttgcatttccagggattaatgaaaatcaagttccatc

SEQ ID NO: 45934 - DNA, 75 bp, Homo sapiens
actggaagaagatgaagaggaactttttaaaatattggtgctgaagacatggacggcttccaggcagacacggag

SEQ ID NO: 45935 - DNA, 101 bp, Homo sapiens
accccggaatcccgcgcgctgcccacgattcgcttctgagtgctggtaaaccacagaagtcatctttgattttggcattctttgctggcagctgacaccag

SEQ ID NO: 45936 - DNA, 99 bp, Homo sapiens
ggatctcgaggagagtcagcccgaggccaaggtgatctgcaactctttcaccatctgtaatgcggagatgcaggaagttggtgttggcctatatcccag

SEQ ID NO: 45937 - DNA, 100 bp, Homo sapiens
agaactgatcacctgtctggagcaaggaaaaaaacctctgaccgtgaagagacatgagatgattgccaaacccccagaacactcgtgaaactgctcaggc

SEQ ID NO: 45938 - DNA, 95 bp, Homo sapiens
caccaagcccatgacgacgctgctggccagggtccagaacggcgcgcagtgtacatcggggcactgtttcccatgagcgggggctggccaggggg

SEQ ID NO: 45939 - DNA, 114 bp, Homo sapiens
cccggagcaagcggagctcccccaagagccggaaaggtgttttcacagtcctgtgtttggtatggagagtgtggaattgcatatggggacaagaggtacaattgcgaatattct

SEQ ID NO: 45940 - DNA, 82 bp, Homo sapiens
agaagttctcccagctggcagaagcctatgaggagccagcaccgctctttgaccttgccatgcttgccttagatagtccaga

SEQ ID NO: 45941 - DNA, 113 bp, Homo sapiens
acctggccaagctgctgtggctgaaaagccccagctccgagtatttgagaacacagtggctacggtgatggctctgcgcagggagaagatgttcgtggaagaggtgtccacag

SEQ ID NO: 45942 - DNA, 83 bp, Homo sapiens
ggaaatcgtgcacatccaggctggtcagtgtggcaaccagatcggtgccaagccaggcccagacatgtccgtccttgtaagtt

SEQ ID NO: 45943 - DNA, 82 bp, Homo sapiens
atggaagtctccaagcctgtgccatccacctgccaaggaaaagcacaaggttgctccttgagggcaggacagttcttatggc

SEQ ID NO: 45944 - DNA, 74 bp, Homo sapiens
gaaggtggtctaccggcgcttcaccgagatctacgagttccatctctgcttatgataatgtcaacaaagttcga

SEQ ID NO: 45945 - DNA, 50 bp, Homo sapiens
cgcggtcctcccgccggcgctgggagcctgtgtgaaatgcagcaaagggg

SEQ ID NO: 45946 - DNA, 80 bp, Homo sapiens
aaagaaatgttgcagtatatgagaccatggtgagagcaccagcaagctggccagtgtgacccgcagcgtggacaaggacc

SEQ ID NO: 45947 - DNA, 111 bp, Homo sapiens
aagcctggaggacctcttcaacttctgctccaggaaattcagcctcaaaaccgtcctgctgcttgctgaccaaatgcgccgtgccgtccctgcagtgacaccgaggtgctc

SEQ ID NO: 45948 - DNA, 100 bp, Homo sapiens
acgatcgctcggtggtgcagtggaaaatcaccttaaggtggatggggaaggatttaagaacactttggaaacttcatcgttgaacttcaaagtaactccg

SEQ ID NO: 45949 - DNA, 100 bp, Homo sapiens
ttaaccagagccatccttcgggagaggatatgtagcgaggaggaacgcgctaaggcaaagcacctggtatgtacaagctgtgaggacaacgcagaagcca

SEQ ID NO: 45950 - DNA, 74 bp, Homo sapiens
gagggcgtcaagcagcatgtgaaggagaccaaggaggcctgtgcaacctgtgcccagacagggccaacaaggag

SEQ ID NO: 45951 - DNA, 100 bp, Homo sapiens
ttacctggtggtgaagagattcttaaccgctgacacaattaaacactgcagtgggcatggtgctgatgtgaaatgtgtagactggcatccaaccaaaggg

SEQ ID NO: 45952 - DNA, 75 bp, Homo sapiens
ggagagagaggtggagtccggcccccgaaagaggaattgaagatgttcctgctccttctacatctgcagataaag

SEQ ID NO: 45953 - DNA, 100 bp, Homo sapiens
gttcgttgtgccagcgactaaaaagagccactgaggcggctcccagctgcgttggcgacatggccgacacccccagagatgccgggctcaagcaggcgcc

SEQ ID NO: 45954 - DNA, 74 bp, Homo sapiens
aagccatccattcttgggtcctttggaggtaatgtgaggctacaggagatgatggcaacaatgtgccaggaacg

SEQ ID NO: 45955 - DNA, 100 bp, Homo sapiens
gaagctgggccagggattgggaaaatctcttcaggagagaactcgatgccaccgcaacggtattggcgaaccggcaggatgaaagtgagcagtccagaaa

SEQ ID NO: 45956 - DNA, 96 bp, Homo sapiens
tctgcaactcatgagagcgaaagagttatgtttaaatcacaaaagagctgaaattcagggaaagtcccaaagacacctgtcgagatccccaggaat

SEQ ID NO: 45957 - DNA, 100 bp, Homo sapiens
acgaacagcgggcggtgttcccggctccgtggggccgtcttcccggcgagtccgcgacggtcgccgcccacggcgaggttatcaatagtctggctgtcta

SEQ ID NO: 45958 - DNA, 82 bp, Homo sapiens
gaagaagcggatggacagcaggccccgcgccggacaatgcagatcttcgtgaagactctgactggtaagaccatcaccctcg

SEQ ID NO: 45959 - DNA, 75 bp, Homo sapiens
caggactgaggagctgccgctgggccgggagctgcggttctaggcctgattcttcactacctgagacgtctaaaa

SEQ ID NO: 45960 - DNA, 85 bp, Homo sapiens
cactcaggtttttcctaagctcaactctagccagctaggttcctggtgctttggggtacgaattggagcaatgttggcttataca

SEQ ID NO: 45961 - DNA, 103 bp, Homo sapiens
tgtgcagccgcgaggaggcgcgggaggtgttcgagaacgaccccgagacggccctgggctgcatcttgtacctgctgtgcttccggcagcacccttttgagga

SEQ ID NO: 45962 - DNA, 51 bp, Homo sapiens
aaatcacaagcttctttgcagcttccagttttgattacgaagatgcaggct

SEQ ID NO: 45963 - DNA, 50 bp, Homo sapiens
ttgacaagattttcaatcagaaaattggtcgtccctgatggcccctggag

SEQ ID NO: 45964 - DNA, 80 bp, Homo sapiens
aagcagccgatccagcctgcggagcctgtggggcaggagcaggccgggctctcgccatgggtcactgtcgcctctgccac

SEQ ID NO: 45965 - DNA, 83 bp, Homo sapiens
gtctcttagcagcgcgcggagaagaacggggagccaggattttttatcaagcagaaatgcatcgaacaacgagaatcaagatc

SEQ ID NO: 45966 - DNA, 90 bp, Homo sapiens
ctgctgagtcacacacaacgcttgttatgttttcatcacttctctccagaaggaaagaccacagcaagattctttcattcgtctcctcct

SEQ ID NO: 45967 - DNA, 97 bp, Homo sapiens
gggcatcatcctgaccggctggcagagatctggcagtgtggtggggttctggaaacacacccatgttcccatgttggccatgttttccccaagcaag

SEQ ID NO: 45968 - DNA, 100 bp, Homo sapiens
atatttccttcattccacatgaatctcagcaacttcttcaaatagtgaagcagaaaaccaatcaaaattcagtggacactacattgaaatttactttgag

SEQ ID NO: 45969 - DNA, 90 bp, Homo sapiens
ggcagctgaactgagcgtatgtgccacgccgcccaggagacccctctgctgcaccacttcatgggtgtcaaattgagaaccaggtagatc

SEQ ID NO: 45970 - DNA, 102 bp, Homo sapiens
gatcacctgcatcagtgtgcagaggccgttgcttttgaccagaatgctttggttaaacgaatcaaagaggagctgatgcagcagaatgggattggttatgtg

SEQ ID NO: 45971 - DNA, 83 bp, Homo sapiens
ctcaccttggacacctcgcttggggagcaccccatcggagacaagagcttccagaactacatccggcagcagtccgagacctc

SEQ ID NO: 45972 - DNA, 101 bp, Homo sapiens
cagtgagtggcagagtcggggacaatgttcttcacctggcccagcgccacggggtggacctggaagatccgggaaacaggggagaggcccagcaatgagga

SEQ ID NO: 45973 - DNA, 75 bp, Homo sapiens
atatttggagttcttacaacatggcagacattgacaaccctgccaaggtaaccctgctggggtcagttatcttca

SEQ ID NO: 45974 - DNA, 101 bp, Homo sapiens
agcggctgctgctgctgctgctgctgctggtggcccctttgcagcaacccagactactacggactcatctaacaaaacagcaccgactccagcatccagtg

SEQ ID NO: 45975 - DNA, 100 bp, Homo sapiens
gttagagagattcttcatgctcaaacattaaaaattagagcagaagttttgagccactatattaaaactgctaaggatgcctcattgatggacatgaact

SEQ ID NO: 45976 - DNA, 74 bp, Homo sapiens
cgactggactgtgtcccaccggcgccacttcccaggtgatctgtgaaaatggttcgctattcacttgacccgga

SEQ ID NO: 45977 - DNA, 75 bp, Homo sapiens
gggaagatcctggaggtggatctgaagaacggtgtgcaacttgctttggtgtttgctgttttattgccacagatg

SEQ ID NO: 45978 - DNA, 50 bp, Homo sapiens
ctaccaagaagccagtcaagcggccaggatcctgatggtgaacatgccag

SEQ ID NO: 45979 - DNA, 98 bp, Homo sapiens
tgacgccctcaaggtcgccaaggaggtggacccccagggtctgaatttcctgctgctgttcacaaagatgctttttatctttaactttttgttttccc

SEQ ID NO: 45980 - DNA, 75 bp, Homo sapiens
ccagagcccattatccctgtcactcagccccggccataaaattttgagtagaaaaatccagaaatttgaaaatca

SEQ ID NO: 45981 - DNA, 75 bp, Homo sapiens
tgcagtacgccacggggccgctgctcaagttccagatttggtatcaatataagtgatgaggattttcttttgctg

SEQ ID NO: 45982 - DNA, 101 bp, Homo sapiens
aagaagcaggaggctaagaaagtggtgaatcccctgtttgagaaaaggcctaagaattttggcattggagaataaaggcagccccgttgatgactgaaaat

SEQ ID NO: 45983 - DNA, 100 bp, Homo sapiens
cttggttacagtcaaaaccccagcgtttgcagaatctgtcacagagggagatgtcaggtgggagaaaggtcagcgcattgtgaataggctgagaacttca

SEQ ID NO: 45984 - DNA, 83 bp, Homo sapiens
cccaacatcctgctcctgctcatggacgacgttacttcttgctgcagattctgcgcaggatcggagctgtgggccaggctgtg

SEQ ID NO: 45985 - DNA, 95 bp, Homo sapiens
ttgtcaggagggatttatttgcacatggggaaggcctggtaaagtggtgtttcaggcctcacctgaagatcatgaaaaatacggtggggatccac

SEQ ID NO: 45986 - DNA, 73 bp, Homo sapiens
ttgccctggtcttgctcggccgatgaagtgcagaggtttttttctggtctaaaacaggctttggaaactgtga

SEQ ID NO: 45987 - DNA, 98 bp, Homo sapiens
aggcgtccgttggccttcgtacccgtcttgattgaggcagcttgaaatccactctccagatgctaagcacacggtgatcctaaggagcaaggactcag

SEQ ID NO: 45988 - DNA, 83 bp, Homo sapiens
tggagacagtgatgaagataccacaccatccctgaaagtggatctcttcagcctgggaattatcttctttgagatgtcctatc

SEQ ID NO: 45989 - DNA, 75 bp, Homo sapiens
ctcacatcaacttctaccagctgctctctgatgtaaaggatggagtaaatcaagcagcacctgcatttggatttg

SEQ ID NO: 45990 - DNA, 95 bp, Homo sapiens
ttggagcaagagtcgaatggcgagattgagcacgtgaccaagcgggccatcagcacccccgagaccagtttcaagcgcccggtagtgatcctggg

SEQ ID NO: 45991 - DNA, 100 bp, Homo sapiens
ttgtcaattttgcagccattttagagcagatcctcagccaccgcttcaaagctcctgggcaacgtgctggtctgtgtgctggcccatcactttggcaaag

SEQ ID NO: 45992 - DNA, 114 bp, Homo sapiens
tggaaatagtcctaagaaacaagcttctagaccacctatccaaaatgcatgtgttgcagataagcacaggctacggaaacaggccgagaagaacgtggagaagaaaattgacaa

SEQ ID NO: 45993 - DNA, 99 bp, Homo sapiens
tgccaagaagatgagaccgggggaggcgacgctaagttgctgatcgtggcggagtccaaaactacttacctggaagaccttccaccaccccctgagtat

SEQ ID NO: 45994 - DNA, 75 bp, Homo sapiens
ggggaagttgctgcgctctgctcggtgtcgtggcctcgcagatggtgtcagttgtacccgaggcgttctcagcag

SEQ ID NO: 45995 - DNA, 90 bp, Homo sapiens
gcgaccgagggaatgatccttactaaccacgaccatcaaatccgtgtcggagtccttacagtgcaaggatgatgctgaaaggaataacaa

SEQ ID NO: 45996 - DNA, 97 bp, Homo sapiens
accaaactggaggatgcctatgtattccctggggatggcgcatcacacaccaaaggtcttctttgtgatccgcctcattgctggccctgctgccaac

SEQ ID NO: 45997 - DNA, 97 bp, Homo sapiens
gggccccacggtgctgcgaggcagccggcacccacagccccagggcctcgaagtcactggggacagaagattacgtgtgaaaatgaacttgtgcaaa

SEQ ID NO: 45998 - DNA, 75 bp, Homo sapiens
ctcatctggaattttgccgatttcatgactaaccagtttccaaaagctgagacaagatcttgaaatggtactgtc

SEQ ID NO: 45999 - DNA, 100 bp, Homo sapiens
tgttatgcagctcagcaaggtgaagtgtttcagctgaaccatccgttcatcttcaagccatcatgagctgtaagaagcagaggtcacggaagcactcagt

SEQ ID NO: 46000 - DNA, 51 bp, Homo sapiens
aggtggcagaaggcagcgagccagtcaccaggagactaaagtccatcaaaa

SEQ ID NO: 46001 - DNA, 100 bp, Homo sapiens
ccccaagctccgagaagaccggcggccaatcacagtccactttggacaggtggagccgccaccaaaatgcagattttcgtgaaaacccttacggggaaga

SEQ ID NO: 46002 - DNA, 100 bp, Homo sapiens
atacaaggacagttggctcctaagggagggactaaatggccattatgctgtgatgaacaaccccaccagacagcctttggccctaaacgttgcatacagg

SEQ ID NO: 46003 - DNA, 96 bp, Homo sapiens
gccgccgaacgacaggacgttggggcggcctggctccctcagatcttactgtgccgagatcgctcacaatgtttcctccaagaaccgcaaagccat

SEQ ID NO: 46004 - DNA, 75 bp, Homo sapiens
ggcggggaccgtccagcccagcgattctcagtcagtgtttcaggagccgtagagccagatcgtcatcatgtctgc

SEQ ID NO: 46005 - DNA, 83 bp, Homo sapiens
cgcggggttagccactgctggctgcttccagtgttcgccgagagcaaaatgatgcttcaacacccaggccaggtctctgcctc

SEQ ID NO: 46006 - DNA, 73 bp, Homo sapiens
tcttgtgaaatcgcgtggactgcaacacccagcagcgcgataatggcgtttctcctgaggaagaaggcctctc

SEQ ID NO: 46007 - DNA, 98 bp, Homo sapiens
atgggtcgaggcggacgcgcggctgcgtcaggaccctgatgctcccataagacagaaaatgccccttgatgatctggatagagaagatgaagttagat

SEQ ID NO: 46008 - DNA, 100 bp, Homo sapiens
ttgaagatgttcctgctccttctacatctgcagataaagtggagagccgccaagctgagccaccaaagaaggaggctgccaccacggggccgcaggtgaa

SEQ ID NO: 46009 - DNA, 83 bp, Homo sapiens
cgaccggatcctgaggaggcagctgcggtggcagctgctgagttctcggtgaaggtgtcgtgaaaactacccctaaaagccaa

SEQ ID NO: 46010 - DNA, 51 bp, Homo sapiens
gcctgtaccatgatattgcccagcaaggatctagtttgaagcactaagaag

SEQ ID NO: 46011 - DNA, 133 bp, Homo sapiens
cttcattcccgaatggatctggtaggagtggcatcgcctgagcccgggacggcagcggcctggggacccagcaaggtgagacaggcattggcaaatccacgttaatggacactttgttcaacaccaaatttga

SEQ ID NO: 46012 - DNA, 100 bp, Homo sapiens
agtgaagagaggcgtctacaagagcgattgctacacatggacagtgatgatgaaattcctatcagtaccggataccagtttatttactattcacctgaaa

SEQ ID NO: 46013 - DNA, 100 bp, Homo sapiens
atattgatagtacattggccaacttcctagcgctggcacagtgatgtttgagtatggaatgcggcttggcagagaagttcgaactctccggggacttgag

SEQ ID NO: 46014 - DNA, 74 bp, Homo sapiens
tggcccggcaccgttccgcggacgtgctcgatctttgatggaaaacagattccacagagaatggttgatggatg

SEQ ID NO: 46015 - DNA, 75 bp, Homo sapiens
gtgtcctgcgcagactgtggacgctctggtgtcatagagacgtcagatcgactggaccgtgaatcgacctcccat

SEQ ID NO: 46016 - DNA, 50 bp, Homo sapiens
gccatcctcaccttgctgagtgacattgccaatggagatcttcgtggatg

SEQ ID NO: 46017 - DNA, 100 bp, Homo sapiens
ggtgacccaagatggcgacatgatctttctgtcagaaaacatcagcaagttcatgggacttacacaggtgtggtgtggaacctataggccagagtatgcg

SEQ ID NO: 46018 - DNA, 97 bp, Homo sapiens
agaaaccaggcggtccagtttatcagaaagttactgtggcccatgtcctaaaaactggatatgttacaaaaataactgctaccaattttttgatgag

SEQ ID NO: 46019 - DNA, 83 bp, Homo sapiens
caagaaaggagaggaagctttatttacaaccagggagtctgtggttgactactgcaacagctgaagaagaggctgctaagaga

SEQ ID NO: 46020 - DNA, 55 bp, Homo sapiens
ctctggtgcatgctgatgacgaaaaacggagattcttcaagcaatcactatgtca

SEQ ID NO: 46021 - DNA, 83 bp, Homo sapiens
aaatcaatgctgtccaaacttaaacatggaattacatgaatgacagtcttcgaaccaatgtgtttgttcgatttcaaccagag

SEQ ID NO: 46022 - DNA, 100 bp, Homo sapiens
ctgggttcgatgtattgctgtggaacctggaaatcagtggtttgttactggatctgctgacagaactataaaggaaaactaggtgtctgtgttcactcca

SEQ ID NO: 46023 - DNA, 98 bp, Homo sapiens
gcgcatggacgaggctcgggataacgcctgcaacgacatgggtcttcgatgccaagaacatgatggctgcctgtgacccccgccacggccgatacctc

SEQ ID NO: 46024 - DNA, 100 bp, Homo sapiens
ctcttatcaaggctaccatagctgggggtgattccttcgcctcagaaaccaatctagattttagaagtgggctggctatagtgagccaacatgatttaga

SEQ ID NO: 46025 - DNA, 95 bp, Homo sapiens
agattgtccgcaccttcaggattgagacccggaaggcttcaaaggctgtcgcaaggaggaagggtgaagatgtcccccttacggagcagaccgtg

SEQ ID NO: 46026 - DNA, 80 bp, Homo sapiens
ttaaatctttctacaatatgtgtcgcaaccattagaaaggtgggaacatccagttgcaggaaaacaagcttaacacgccc

SEQ ID NO: 46027 - DNA, 98 bp, Homo sapiens
cccagctacgaaggatggaatcttcaatcaatcatatttcacaactttgtaggcagccaatcccagagaagcagacgggatggctagttcagcccggg

SEQ ID NO: 46028 - DNA, 100 bp, Homo sapiens
ccaagctccctgcggggaagaacgtgctactgctgggtcttgctcagtgtgcagaactctgctggcagctgagaggggaagccggaaagaggcaagttcc

SEQ ID NO: 46029 - DNA, 51 bp, Homo sapiens
caaacaaaacttatctcctgaggagaaggagtatgctaccagtggttggaa

SEQ ID NO: 46030 - DNA, 101 bp, Homo sapiens
acatcattttccacatcacgttggtgagccttgaagctcaacatcgtattgcacctggctacaactaccagcatctcagacatgtcgaaaaagatgttttg

SEQ ID NO: 46031 - DNA, 95 bp, Homo sapiens
ctgagaccatgcagtcagctacgggaattcagtactctgtaacacccagctaccagtgcctgatttgagatggggtcccaggtctcggtggaatc

SEQ ID NO: 46032 - DNA, 50 bp, Homo sapiens
agagataggaactcttggttgggataaatgtgcagagcagctagttcaca

SEQ ID NO: 46033 - DNA, 98 bp, Homo sapiens
agaagtagcagaagcaatcactcagtttcttcctaactgtgatccagatgatcctcacaggttacttcctcagaatgttggcctcctgtatgttggag

SEQ ID NO: 46034 - DNA, 98 bp, Homo sapiens
gtcctcagtgcaatgctgaatacctaatagtttttccaaaattgggaaactctgatgaggaagaaagtgcttcagaatctgaactttggaagggtcca

SEQ ID NO: 46035 - DNA, 50 bp, Homo sapiens
cgagggatgctctactaccagacagagaaagtctcactcttgttgcccag

SEQ ID NO: 46036 - DNA, 106 bp, Homo sapiens
tggggctggcctgcggcgcctgggcgctctgagcatgttggcagataaattgaacatgactccagaagaagctgaaaggtggattgtaaatttgattagaaatgca

SEQ ID NO: 46037 - DNA, 98 bp, Homo sapiens
gccctgcctgcgctcctcctggctgcagagtaccccaccagcgcacctgcgaccgcatcaagcagtccgccagcggaaccaagcggcgcgtgttcatc

SEQ ID NO: 46038 - DNA, 100 bp, Homo sapiens
atctccttaaaactggatttagcatgttcatgaaggagttatggtacagcacctgtaaatcttaacatcaagacagggggaagagtttatggaactacag

SEQ ID NO: 46039 - DNA, 98 bp, Homo sapiens
tggaaagaagttcttcgtcggcgcctagcgacgcccaacacctgtccaaacaggtctggtcgccagcaacctgaatctcaaacctggagagtgccttc

SEQ ID NO: 46040 - DNA, 87 bp, Homo sapiens
aaaggaagaaaaggagaaaagcacagctttgacgtggctctccaaagatgtgagggccccaaggctgttgcagctcctcgacctgat

SEQ ID NO: 46041 - DNA, 95 bp, Homo sapiens
gggaactcaaacagcagatgcaggttcctatatgatagtggactcttcagatcacgaccctggagaaaaagccagacttcagctgcctacaatga

SEQ ID NO: 46042 - DNA, 101 bp, Homo sapiens
tcaagatgctgcttactggtgggaaatcaagtcgtaaaaacaggtcaagtgaaaatttcccaggaacgagaaaaatttgctgatgaaggcagtatatttta

SEQ ID NO: 46043 - DNA, 100 bp, Homo sapiens
gcatgtttccagggccagcatggcaccgatgccgagaggagacacgtcctttcccataacctgtgcacggtgctgaaggttcctcatgacccagttgccc

SEQ ID NO: 46044 - DNA, 90 bp, Homo sapiens
caaatgcatgccaacattccagttttttaagaagggacaaaagtcggtcctgaccgccagcctgtcgtacatggtggggatgatcgccag

SEQ ID NO: 46045 - DNA, 100 bp, Homo sapiens
ctacgatgtcacccgcttcctcaacgagtttaattagacacttcagaattttgatcacctaatgttgatttcagatgtaaaagtcaagagaagactctaa

SEQ ID NO: 46046 - DNA, 98 bp, Homo sapiens
cttcctcaaattcatattcacagcaacaaaggagagagcgggaagctagaaggcagcaggaacgtgaacagcgaaggagagaacaagaagaaaagagg

SEQ ID NO: 46047 - DNA, 75 bp, Homo sapiens
cgactgttccaagagccagttttggaattgtaggcacaaacacagacaaatgctgtgcttcatgaagttaaaaga

SEQ ID NO: 46048 - DNA, 75 bp, Homo sapiens
agatcagctatgccattaagaacatccatggagtcaggtaactaggatttctacctcaaccgcgagacctatgca

SEQ ID NO: 46049 - DNA, 100 bp, Homo sapiens
gtcagacgcagccgtagacaccagctccgaaatcaccaccaaggagccttcacgtaaatgggtccagtcatgcctcccagtaagaagccagaaagctcag

SEQ ID NO: 46050 - DNA, 83 bp, Homo sapiens
ccattgaggcccgcacagcccagtccaccagccgtgtcggtgacaccaagcatggcatgatgaagttccgtgaggaccgcagc

SEQ ID NO: 46051 - DNA, 74 bp, Homo sapiens
gcagcatctcagcccaagagaaggctgcaaattattatacaaacaggattttgccagacgtttaggattgagat

SEQ ID NO: 46052 - DNA, 100 bp, Homo sapiens
tgttttggcctaggatcatccagggaccatgcctggccggatgctgccgcctggcttcagtgccatctgcatgtcctcagggatgacaaaggactcattg

SEQ ID NO: 46053 - DNA, 82 bp, Homo sapiens
ctcggagtcccagcttgcgtccctgccgccctcctaccaggactccctgcagaacgagccttcacgtaaatgggtccagtca

SEQ ID NO: 46054 - DNA, 83 bp, Homo sapiens
gctgcctgggtccccgacgagagccagaagtttgcctgcaatggtactgtaattgagcatccggaatatggagaagtaattca

SEQ ID NO: 46055 - DNA, 101 bp, Homo sapiens
ccacggggctgccctcccctgcgcactcccctcgctgcccgggcccggagcgcagcgcggccgcacagatatggatgctaacaggcgataaactcgagaca

SEQ ID NO: 46056 - DNA, 95 bp, Homo sapiens
ctcaccggatttataacgacagaagtgctaaactgtgaaaatgcagtcctcaaagagaatttgaaagtgaaaacagaagaaattaaaatgctgaa

SEQ ID NO: 46057 - DNA, 99 bp, Homo sapiens
gtcccccgggggcccgtactgcacatcgtggtggtcggatttcaccacaagaagggctgccagatccctaaagaagtggctgacatctttaacgccccc

SEQ ID NO: 46058 - DNA, 83 bp, Homo sapiens
ctggaacacacatcagtcacgttttaaaatcaaagatgggaaaatcggagaaaattgcccttccccatggccagcttgttcat

SEQ ID NO: 46059 - DNA, 83 bp, Homo sapiens
ctcgcggccccttagcgcggtcaggccgccctccttttccaggtcagaatggcggcagcggagcatcgtcattcttcaggatt

SEQ ID NO: 46060 - DNA, 100 bp, Homo sapiens
ccccatctgtcgagatcacaagttgcatgttgactttagggtactggagattgagagcagttggcttctggaggtggctccccattattataaggccaag

SEQ ID NO: 46061 - DNA, 74 bp, Homo sapiens
cgctttttgcatacaagcaggaaaatgagatgttatccagccctcggaaggctcggtcacactctccgagcaca

SEQ ID NO: 46062 - DNA, 98 bp, Homo sapiens
caaaggacggagcaccatcaacccgtccaaggccagcacaaacccaggtgtaattgaaaagtgatcctctcttcagagatgtcaaaaacaaacaaatc

SEQ ID NO: 46063 - DNA, 80 bp, Homo sapiens
aggagaagatgtgccgccgctgccaacgtcgagcggcgacggctgggctgctcttcacctatcgtggtgaagtttgctga

SEQ ID NO: 46064 - DNA, 83 bp, Homo sapiens
ggcacacttgagcttggggagccaacttccatgatggaagaagagggaggggccttggacaagttgttactgactatgttcat

SEQ ID NO: 46065 - DNA, 75 bp, Homo sapiens
gtaagaagcggaggcttgttcgacccaacagcatcgttcctctttccaagaaggattggaatacttttctgctac

SEQ ID NO: 46066 - DNA, 75 bp, Homo sapiens
gggggtttgggaaacaaggcttccagtgccaaggaacatcatcttcagcgggctatttcagcacagcaggtgtat

SEQ ID NO: 46067 - DNA, 97 bp, Homo sapiens
ccagggcggatggtggtgatggaagcaggtggaattatgccctgttggttccaatgctgggattggctgcttttcctgagatctgtatctgtggacc

SEQ ID NO: 46068 - DNA, 50 bp, Homo sapiens
tggaatcagagggtgcattcaaattgattgatattacaggcaagaaccag

SEQ ID NO: 46069 - DNA, 80 bp, Homo sapiens
tccctggaatatgaagggacacagtacggtagtcaaacccccaggttaaccccaaagattggctttccttggagtgaaat

SEQ ID NO: 46070 - DNA, 85 bp, Homo sapiens
gaaaaggaacatgaattacatctggatcagtcccttgaaatcagggtaaaatccagtacaaggaatatatcattgaaggatttga

SEQ ID NO: 46071 - DNA, 50 bp, Homo sapiens
tatgagaaggacaacacctacttagatccacctccgacccttaagccaga

SEQ ID NO: 46072 - DNA, 75 bp, Homo sapiens
ggcacctccgagcgcaaggacagcgcgaggtccgcgcagcccagcgcagccataaacgcttcgttaagggactca

SEQ ID NO: 46073 - DNA, 75 bp, Homo sapiens
gctatccagaacctccactctttcggtctccataacccctcggacaaacgccgccctgggctttgctcagatgct

SEQ ID NO: 46074 - DNA, 75 bp, Homo sapiens
gggaaaacttgctgcggttgctcaagttggattggatgctgctggcaagacaaccattctgtataaactgaagtt

SEQ ID NO: 46075 - DNA, 75 bp, Homo sapiens
gcggcggcggcggcggcggcgcaggccaggtgtggtgtcttacacctgtaatcccagcactgtgggaagccaggg

SEQ ID NO: 46076 - DNA, 75 bp, Homo sapiens
ctggcaacaattggaattgactatggagtcacaaaggagaagatggtgagtgcagcattcatgaagaagtacatc

SEQ ID NO: 46077 - DNA, 90 bp, Homo sapiens
tttttattctgctgatacaaaaagcccagattacgtttcacaagaaatggactcaactattgttactccaattattttgaggactgaccc

SEQ ID NO: 46078 - DNA, 100 bp, Homo sapiens
ccggtatggcccatcgctcatgccaggagggaacaaagaagcgtgggtctccatctgttgtccaaggctggagtgtagtagtgctatcacagctgactgc

SEQ ID NO: 46079 - DNA, 75 bp, Homo sapiens
ctacaagaagcgggccgcatgcctgtgtttccgcagcgagagcgaggaggagatcgtcagtatttaaacagatca

SEQ ID NO: 46080 - DNA, 100 bp, Homo sapiens
gaattgccgcttccttttagttactaactttgcagaaaacaccatgaatgaactccttggctggtatggctatgataaggttgaattaaaagatggtgag

SEQ ID NO: 46081 - DNA, 80 bp, Homo sapiens
tgaagatcatctgcctgggagacagcgcagtgggcaaatccaaatgaagactggcccatttgcagagcactccaaccagc

SEQ ID NO: 46082 - DNA, 100 bp, Homo sapiens
cgagggggagtctcctccagtgactgctcaagaaactacccttcacagtacagagccagttgtccaggagaatggggacgaagctggggaggggagagag

SEQ ID NO: 46083 - DNA, 98 bp, Homo sapiens
acccggtctggacacagaaagagaagtggttgtggaggcagagaatcaggttataccttgaagggactggcataaaccctgtacctgtggaccttcac

SEQ ID NO: 46084 - DNA, 98 bp, Homo sapiens
atcccggcaagtaacatgactaaaaagaagcgggagaatctgggcgtcgctctagaggtccagcaagactatgaatctctgttccaaatgctttgctg

SEQ ID NO: 46085 - DNA, 100 bp, Homo sapiens
cagccccccgccccgccatgagccccccgctctgagggccccggcccctggatgcacagccccggcgctgcgtgagtgcatctccatccacgttggccag

SEQ ID NO: 46086 - DNA, 132 bp, Homo sapiens
ggaggaactcaggaacaaacattctgcacgcttcaagctctggtacacgctggacagagcccctgaagggcagccgatgaagtgcaaccttcacatgaatgggaatgttatcacctcagaccagcccatcct

SEQ ID NO: 46087 - DNA, 100 bp, Homo sapiens
tgttcaacaccctcttcttgaactggtgctgtctgggcttcatagcattcgcctactccgtgaaggcataatcaccagcaacacccgggacaataatacg

SEQ ID NO: 46088 - DNA, 100 bp, Homo sapiens
caactccgagcggcggtgatgctccgactccgggggtgccgaccggctcccccagcccaggactggccgtttgacgatggggcgcccccgcccggcaagg

SEQ ID NO: 46089 - DNA, 100 bp, Homo sapiens
ggaggatggggtgtctcatcggaatactcgaaacaaagggtcatcctttctagaaagagaaccgctgtgctatcaggagggaaataatccaagtgccaaa

SEQ ID NO: 46090 - DNA, 100 bp, Homo sapiens
ggacgggctgcaggcgggggtgctgcagaggacacgaggcggcgggctggagacatggaccgcggcgagcaaggttcatgtgtgcccagctgcccaaccc

SEQ ID NO: 46091 - DNA, 101 bp, Homo sapiens
agctgattactatatcattgctggagtgatctatcaggcaccagacttgggatcagttataaactctagagtggtaatcaaatgcaaagcagctgtgctat

SEQ ID NO: 46092 - DNA, 90 bp, Homo sapiens
ccctggacatggaggagaaggtccgcttcaagtgaccatgctccctgccaaacaggcagaactgacccggcggagccaagcagagccccc

SEQ ID NO: 46093 - DNA, 82 bp, Homo sapiens
ccagatctggtggcagagcagtttacactgatggatgcgaaacgggtatgcaggagattagaagccagtgggcatgagcgtg

SEQ ID NO: 46094 - DNA, 100 bp, Homo sapiens
tggaaacgggtcaggattggcctggaggatatttggaatagcctctcttcagtgttcacagagatgcaaccaggttttggccaaattgggcgagggcaca

SEQ ID NO: 46095 - DNA, 96 bp, Homo sapiens
gctgtggaaagaagttgcaaaacactggtgaaagctggtggaatgcgaattgtgcagaaacacccacatacaggagacaccaaagaagagaaagac

SEQ ID NO: 46096 - DNA, 98 bp, Homo sapiens
ctgcacatgcgtttaatcacacaccaaaaactatgaatggagacatgagggtctctaattaacagaagatggcaaagcccagccacagcagctatgtc

SEQ ID NO: 46097 - DNA, 104 bp, Homo sapiens
cggaccggaagtggaagtggtccccgaaggctatttcgccgctggcgtcaggactattttcacgttttaatgccgagagatggcccactgcgtgaccttggttc

SEQ ID NO: 46098 - DNA, 118 bp, Homo sapiens
ttcttgaagaaagacagatcctgtgtcacccggcaactcagaaacatcaggtccaagacaatgcagatcttcgtgaagactctgactggtaagaccatcaccctcgaggttgagccca

SEQ ID NO: 46099 - DNA, 100 bp, Homo sapiens
gcggccccggccccgccaacgctgccgccggctgctggagccagttctgcttctcggcaaggagcgatttgctggtgtagacatccgtgtccgtgtaaag

SEQ ID NO: 46100 - DNA, 80 bp, Homo sapiens
agaagacgaagaagcagaagcgtctgctcaggttgcagcaggagagaggtcaaaatgcagatcttcgtgaaaacccttac

SEQ ID NO: 46101 - DNA, 100 bp, Homo sapiens
cggatcggagctgcgcgcggaaccgtgctgccccgccccgctccacccgtgaggatctcacattcttgaaggtggcattgaagagcactaagatcggaag

SEQ ID NO: 46102 - DNA, 113 bp, Homo sapiens
gttgtctgtgtgatgatagtattggcatttataatactgaactatggacctatgagcctgaagcaggacattctaaatgaaaagactgaattggaagcaacacttaaggaagc

SEQ ID NO: 46103 - DNA, 100 bp, Homo sapiens
gcaggagctggggccacgctggtctgggatagttgggcagggagtcttggaggaggaactttttttggtctctgctgtcttcttactggctgtaccactt

SEQ ID NO: 46104 - DNA, 100 bp, Homo sapiens
cactcaggagaccaggaaaatggccacagggctcctgagagccaaaaaagagtgagttattctccccacctcagaagtaccagcttttggtgtatcatgc

SEQ ID NO: 46105 - DNA, 114 bp, Homo sapiens
aagcgtcacaaaaagcgtggcatctttcccaaagtagccacaaatatcatgagggcgtggctgttccagcatctaacatttgctggaacattatcagatggcttagggaagacg

SEQ ID NO: 46106 - DNA, 101 bp, Homo sapiens
ctggaacagccagaattggacccgaaaccatgcctcactgtcctaggcaagtgcctggaaaccttggctgctacaaggatcatggaaacccacctcctcta

SEQ ID NO: 46107 - DNA, 100 bp, Homo sapiens
ctcagtcagctcggcacccagcacccacccaggagagatccacctcactgtagctgtgctggcatacaggactcaggccgctcctgccagaatccccgga

SEQ ID NO: 46108 - DNA, 50 bp, Homo sapiens
atccgcgtggcaacaggctcctacaggcacaccgtccctgcagtctggtg

SEQ ID NO: 46109 - DNA, 83 bp, Homo sapiens
gggcgggcgccgcgggacctctccgggccatgggggacggcaaaacagaacagaaaggcggagataaaaagaggggtgttaaa

SEQ ID NO: 46110 - DNA, 101 bp, Homo sapiens
gctaactttgcacatttcaacagtcatgcaggtacttcatagacagcagtctcagccagccaaggagagttcccctcccagagaagaagcgcctcccccac

SEQ ID NO: 46111 - DNA, 75 bp, Homo sapiens
acccggtttctaatccctgctctgtcactaacaagctgcgtgatcttcggtctggtgagctgtaccttctttctg

SEQ ID NO: 46112 - DNA, 98 bp, Homo sapiens
ggttggaaagcattgggctacctcagtacgagaaccacctgatggctaatggatttgacaatgtgcagtttatggcttatcaggagggcagacttcaa

SEQ ID NO: 46113 - DNA, 75 bp, Homo sapiens
cagtattccaaagaactcggagatgcctggaatacagtaagacctgcctagagctggaacgttacctccagagcg

SEQ ID NO: 46114 - DNA, 82 bp, Homo sapiens
gggatctgcaccgcgaccagggccgcaggaagacgcagtcaaaatgcagatcttcgtgaaaacccttaccggcaagaccatc

SEQ ID NO: 46115 - DNA, 90 bp, Homo sapiens
gacacggcctgtaccatcgcagccacggccagcgtggtcaaggagaagctggctatcccaaagagaagattgatattgggctgcctccac

SEQ ID NO: 46116 - DNA, 74 bp, Homo sapiens
cggctttagactggaccccacaatgtttgcagagatgttcaggcctgcacccccatgttccgggagtactccct

SEQ ID NO: 46117 - DNA, 82 bp, Homo sapiens
cgacaagccgctggcagccgcggatctcaccgccgctcaggatgtccagctcgccgctgtccaagaaacgtcgcgtgtccgg

SEQ ID NO: 46118 - DNA, 100 bp, Homo sapiens
cttgcatcaagctgggcatccagggctcgtacttctgctcgcagtttgggacccactctggaacctgaggaagtggtaaacaggctgatgcatgggattc

SEQ ID NO: 46119 - DNA, 92 bp, Homo sapiens
caggctttgtgtcaagacgtggcacgtgtcagagaatttgacggtttttcacgactgaaaacaacatagcaaaataagccaagatgtctgtg

SEQ ID NO: 46120 - DNA, 82 bp, Homo sapiens
tctgctgcggcgcggggaccgctgtgctctcgatgagcagcaccagcagtaagagggctccgaccacggcaacccagaggct

SEQ ID NO: 46121 - DNA, 73 bp, Homo sapiens
agcctctctcctctgcaacctgataggatttggctacccagcctacatctctgccttgctttccatgacattt

SEQ ID NO: 46122 - DNA, 98 bp, Homo sapiens
aagaaacagttaatcgtgatatcccaccccttacagttattaccccattcaagttgacaactgaggcaacgcagactccagtctccaataagaaacca

SEQ ID NO: 46123 - DNA, 74 bp, Homo sapiens
gaatctagacagacaggcctttctagggtttgaaaggtgacttgggtcctcatggtccacctggcccaaaagga

SEQ ID NO: 46124 - DNA, 100 bp, Homo sapiens
gcaaaggcaccgtgacaggccaagtgcaggggccagaagacaaagtcaattccatatgccttcaattaagttgcagagttctgatggagagatatttgaa

SEQ ID NO: 46125 - DNA, 100 bp, Homo sapiens
aagcacttaaaagtggaaagatgacggatgaaaagaatgaacactgtccttcaaaacgaaaatcatgaccaccccaggaaaagagaactttcgcctgaaa

SEQ ID NO: 46126 - DNA, 99 bp, Homo sapiens
aatagtatgttctcctgttcctatgttaagggatctgacacagaacactgtagtcagtactatactggcaattgctggagaagattttgcaattgttgc

SEQ ID NO: 46127 - DNA, 50 bp, Homo sapiens
catttcatccaccacattacttagactctgctaacaccagatagtggaaa

SEQ ID NO: 46128 - DNA, 75 bp, Homo sapiens
cagagcctcagcaggagcctgttctcatcaccatggcaacaggtgcccagtcccctggaaggcagtgaaggggac

SEQ ID NO: 46129 - DNA, 75 bp, Homo sapiens
cagaccctaatggagactcacctgctaatgttgatgctgcgaagatgaacaagtttctgctgtttgaggcacaga

SEQ ID NO: 46130 - DNA, 98 bp, Homo sapiens
ggatattgggcttgacagctgcaaggagttactgaaggtcatacttacctggttgcttgcgcatctagtaatgttggatcatattctggatgttttga

SEQ ID NO: 46131 - DNA, 96 bp, Homo sapiens
ccacagtcttcaagagcccacggacaccacctcaacggcacggatgggcagaagcctttgcaggtatcagaagttcacatatcaaatatatctgcc

SEQ ID NO: 46132 - DNA, 97 bp, Homo sapiens
cgccggagccgaggcgagcgccgcgcgcaccactggccaagactaaggggctgcagagcggggtggacattggcgtcaagtactcggagaagcagga

SEQ ID NO: 46133 - DNA, 87 bp, Homo sapiens
aagaaagagatatgaagatcttcctataaatagcaatccagctacacagtctcaccagtggtattcttggggcccacctaatatgca

SEQ ID NO: 46134 - DNA, 82 bp, Homo sapiens
tgatgtgaaaaataccacgacaaaaccaccctactgttagcgtgctggactctgcggacatagaggtcacagacagtcgcct

SEQ ID NO: 46135 - DNA, 100 bp, Homo sapiens
ttgtcttctcgggcttctcgccccggccgcggccgggtcctcagacaatgcagatcttcgtgaagactctgactggtaagaccatcaccctcgaggttga

SEQ ID NO: 46136 - DNA, 101 bp, Homo sapiens
gccggggccgcctagagaagaggctgtgcttcggcgctccggctcctcagagagcctcggctaggattttttatcaagcagaaatgcatcgaacaacgaga

SEQ ID NO: 46137 - DNA, 82 bp, Homo sapiens
cgctgtgcacgagggtctcggcctcgcggtgcagctgaagacagttccccagggataagcctgtccagcagcagaggccccg

SEQ ID NO: 46138 - DNA, 76 bp, Homo sapiens
attggactcagagtttccattgacactgatatgtctcgctctgtcgtccaggctggagtccaatgctgcgatcttg

SEQ ID NO: 46139 - DNA, 98 bp, Homo sapiens
cagcagtggcagaaacgtcaggccgtagccgaagcctcggaaggagcggcccacggcaaaggacctgaaggagaagaaggagaaggtggaggagaagg

SEQ ID NO: 46140 - DNA, 100 bp, Homo sapiens
gcgagagatggtcaggtctggagctcgaccgggccagaatccttgcagcctttcctggaagcctgtagcaactctttattttttcgtacttgctctgtgc

SEQ ID NO: 46141 - DNA, 75 bp, Homo sapiens
ggcagcagctgggattgaaaagggggcccggcaaacaggactcatctgatgatgtgagaagagttcagaggaggg

SEQ ID NO: 46142 - DNA, 100 bp, Homo sapiens
ctccttcaggcaccatgaaagctgtgctgcgcaaggctggaggcacgggccctggggaagagaagcagttcctggaggggtagaagataaggagtcttgg

SEQ ID NO: 46143 - DNA, 98 bp, Homo sapiens
gacccctctgctcgcggccgcgcctttgagagggcgatgagacaggtgtgatggacagtcttctagaagccctgcagtcaggggcagcattccgacgg

SEQ ID NO: 46144 - DNA, 71 bp, Homo sapiens
acagttcgctacacagcaatgcatcgagggagaggctagtggtaacaggccgagctggatggatgggtatg

SEQ ID NO: 46145 - DNA, 105 bp, Homo sapiens
cacaatgtgatcttcaccttggattctttgttaaaaggagacctaaagggagtcaaaggagagtatgctgctgctgttccgctttgcgtcctcgctacaaacgcc

SEQ ID NO: 46146 - DNA, 89 bp, Homo sapiens
gaaagtgattgcatcgatgaccgtgggcaaagatgtcagaccgcaggatggaaacaagcccactgagactagtcaacctcaatctagca

SEQ ID NO: 46147 - DNA, 50 bp, Homo sapiens
tggctggcttcagtggaccactcgggttcatgacgctctcgatattcctg

SEQ ID NO: 46148 - DNA, 74 bp, Homo sapiens
agagagggaagagattcagccagcacactcctcgcgagcaagggccctcatctttgtgtcccatggagccggag

SEQ ID NO: 46149 - DNA, 75 bp, Homo sapiens
gtcataacaatgaccacctggtagagaaataccgcattcttatcacaaagatctccagatcacactaagtttgtg

SEQ ID NO: 46150 - DNA, 90 bp, Homo sapiens
cggtgccggaggccgtgggcggcgacatgcagcagctgaaccagctgggcgcgcaggcagccttaagtgccttgaaacaattttctgaac

SEQ ID NO: 46151 - DNA, 87 bp, Homo sapiens
actattcgcggagctggaatgactggcaacccagatgacgtccggttgtttgccttcgtgcgcttcaccaccggggatgccatgagc

SEQ ID NO: 46152 - DNA, 100 bp, Homo sapiens
ggaaattgacagaattctctttgaaattacagcagaaagatcatacggtggtgaaacttcgacaagatcacagcccatcacgttcaggccttgacaaccc

SEQ ID NO: 46153 - DNA, 88 bp, Homo sapiens
gcagacagattgaggacactgtattatacggttactatagttcgagaaagtgatcccagtgacccaaacaaagacatggtggtccagc

SEQ ID NO: 46154 - DNA, 98 bp, Homo sapiens
ctggagcccgcgcagcgccccgcagggcgatggacggccgaaccccgcgcccgcaggacgccccagccaggtgcaatggatgagcttcatagtctgga

SEQ ID NO: 46155 - DNA, 85 bp, Homo sapiens
agacaatggtttattaagacaaccgcttatgcaaagactcaagagatggtgtccaactttgacctgaacagccccctaaacaacg

SEQ ID NO: 46156 - DNA, 75 bp, Homo sapiens
gacctctcggacacggtgcaggcaggaaaccactgattgcttgtgtggagaaacagctattaggagaacatttaa

SEQ ID NO: 46157 - DNA, 100 bp, Homo sapiens
cctgatgcctgcaaagagtttcaagatgcaggtgaacagtgcacttacatttcaatcgaccaagttccaaggacctatgccataatgataagcagacccg

SEQ ID NO: 46158 - DNA, 75 bp, Homo sapiens
gtcagtggaaggcacggcaatctatttaccagctccgacagttagttaatatgtgcatcaacccagatccagaga

SEQ ID NO: 46159 - DNA, 101 bp, Homo sapiens
ctcgcgtattctgaggaggcggggttggcctaggcgaagatccggactctgggtgttttgctaccgtgaccgtttagctgggagtgtccactcgccttcca

SEQ ID NO: 46160 - DNA, 75 bp, Homo sapiens
tcgccagcaaggaggaggacgcttgccacctcatcatacccctgagggagtgagatggaagattttcgaggtata

SEQ ID NO: 46161 - DNA, 100 bp, Homo sapiens
gccccagacatggggaacgcggcgaccgccaagaaaggcagcgaggtggagagcgatatgaagatcaatgatgcagactgatggttttgatgaagctggg

SEQ ID NO: 46162 - DNA, 90 bp, Homo sapiens
aggccaggaagaaggttctcaaacaaggggctactgttcccgtagacaaagacgtcttcgaaaaacactcaacttcaagatgggtaacag

SEQ ID NO: 46163 - DNA, 88 bp, Homo sapiens
ccctgttggagactatgcaaaacaagtttatcaacagcccacctgaggatattgaccataaggactcatatctcattacaagaagcat

SEQ ID NO: 46164 - DNA, 82 bp, Homo sapiens
ctaccagcccatgcccctgaaggcctcgctggagatcgagtaccaaggccctgaaaaaaactctcttcctgtgtctggccag

SEQ ID NO: 46165 - DNA, 87 bp, Homo sapiens
gaagttcacgactactagaaggggaggggagtggaaaggctctcagtgaaaaaggtcacacagcggcagtgataaagagcacaggga

SEQ ID NO: 46166 - DNA, 75 bp, Homo sapiens
cggctgcccttcaagtaccagccataggaaaaggatacagagtagagtttcatgaacctgaaacttggtggaaat

SEQ ID NO: 46167 - DNA, 95 bp, Homo sapiens
ctcgttggaggctgtgcagcagaagcaggatacagacgtccctcaccagtgccagcttggggtctgcagatgagaactccgtggcccaggctgac

SEQ ID NO: 46168 - DNA, 95 bp, Homo sapiens
cggagagctggaggagaggttcaaccgcgccctggtactccaaagattcaggtttactcacgtcatccagcagagaatggaaagtcaaatttcct

SEQ ID NO: 46169 - DNA, 100 bp, Homo sapiens
cttgatgaaggcgtggatagcctgaaggcagccattcagatgcaggccctgacttcctgtgagtgcaccatctgtcctgactgcttccgccagcacttca

SEQ ID NO: 46170 - DNA, 75 bp, Homo sapiens
acaaccagcagctaatcacattttctcacaggggccacctacagatgctcctgcagtggacacagcagaacaagt

SEQ ID NO: 46171 - DNA, 75 bp, Homo sapiens
actaccagggccggaggattaccatcaccggaatccccgcatcagagacttctcctgggcctcccccaatggggc

SEQ ID NO: 46172 - DNA, 100 bp, Homo sapiens
ggggtggagacgtggtactcagcaagctcgagttaaagttggatgtgctggaacagctatgtgatgatgatgccatttaaacgacaggctctagtggaat

SEQ ID NO: 46173 - DNA, 78 bp, Homo sapiens
caagcccaggctttggtcaccagtgagctggagaagttccaggcagtgaaatcaactgtgcagaccatcactgttgga

SEQ ID NO: 46174 - DNA, 75 bp, Homo sapiens
ctttatatagaagggagagtagtttcagaagctatctcctgagcagtgtgtaattctctcctggctgtttgatgg

SEQ ID NO: 46175 - DNA, 98 bp, Homo sapiens
cgacaaggaagtgaagaaggcgcatcactcccagctgcgcaaagcttgcgaggtggcgttagtttttggctttcacccccaaccagtgaccaaagact

SEQ ID NO: 46176 - DNA, 82 bp, Homo sapiens
ccaaggcccctccggccagggccgggagccgggccggcctagccaggtatcacctcttctgggctcaagatggacaacaaga

SEQ ID NO: 46177 - DNA, 100 bp, Homo sapiens
cacctgtgcaaccccagggacctggaaagacagacaggatggggaggaggttcttcagtgtatgcctggaacaaactggttggctgagattctctgcctg

SEQ ID NO: 46178 - DNA, 75 bp, Homo sapiens
ctctctctcagttgtcgtttctctcctgctaattcctgaagacaacactaagcagttgagatttgaagatgtagt

SEQ ID NO: 46179 - DNA, 50 bp, Homo sapiens
tgaagagaaaggcccggagactgaatcaaagatcaactcccactgaggac

SEQ ID NO: 46180 - DNA, 100 bp, Homo sapiens
aaaagattttgcatctagaggaattgaaatattttcatctcagcctagtgacgatgaatcaagtagtgatgaaaccagtaatcagcccagtcctgccttt

SEQ ID NO: 46181 - DNA, 83 bp, Homo sapiens
gaggaactggcccggaaacaggaggacgtgcgcgcggagccatggttatcatgtcggagttcagcgcggaccccgcgggccag

SEQ ID NO: 46182 - DNA, 99 bp, Homo sapiens
ttcctgatatttttggtatcacaaatgaatccaaccagccacagatactattaggagggatagagactcttaatggaacaatgattctgaaaagaacgg

SEQ ID NO: 46183 - DNA, 101 bp, Homo sapiens
tggatcctaaactcttggcttcaggttctgatgatgcaaaagactcaagaatgaacaatccgtcagaaaccagtaaaccatctatggagagtggagatggc

SEQ ID NO: 46184 - DNA, 75 bp, Homo sapiens
agacctcaccaagaatttggcatttcaaggtattgttgcagcatctggcagtgagactgaggatgaggacagcat

SEQ ID NO: 46185 - DNA, 74 bp, Homo sapiens
ataaaagaatctgttcgtggccaagatattttcattatacagacaatacccagacggggtctcactctgtcgcc

SEQ ID NO: 46186 - DNA, 83 bp, Homo sapiens
ggtctgtcagtgagatggcttctaacaaggtaacttacgacctatttctccgtggcgttggctgttttctgttgttgttcctg

SEQ ID NO: 46187 - DNA, 100 bp, Homo sapiens
atgtaggacactcttctgatgccagagaaatgctaaagcagtactacattggtgatatccatccggtagtggctctttatgactacacagcgaatcgatc

SEQ ID NO: 46188 - DNA, 83 bp, Homo sapiens
agagagtttcaaggaaaagttcgttcgcaagacccgcgagaacccggtggtacccatagcctctgctgcgagaagttctggag

SEQ ID NO: 46189 - DNA, 75 bp, Homo sapiens
cggacgggcaccagcacgtgcacgtgctcccagatgcgagccacccctctggctgctcctgcgggttccctgtcc

SEQ ID NO: 46190 - DNA, 100 bp, Homo sapiens
gaatgggtccaggccgtggtcagccgcttcgacgagcaggtggcagtagagaagagcatcacagaagttgctcaggagctgacagagctggtggaacatc

SEQ ID NO: 46191 - DNA, 75 bp, Homo sapiens
cgtaactttctcccttgatccgggagtctttccactgggtgctggagaatctggtaaaagcaccattgtgaagca

SEQ ID NO: 46192 - DNA, 101 bp, Homo sapiens
ccccgggctgctgttcctggggttgctgctcctgccacttgtggtcgccttcgccagcggaatgaatctgaagtctgctgcagtaaaacacagaaggcttt

SEQ ID NO: 46193 - DNA, 83 bp, Homo sapiens
cccgggaggaaggaacgaggcaaggagctaaagcagcgtgcgttcagccctgggatttgacaagatcaaagctgcaggaaaat

SEQ ID NO: 46194 - DNA, 80 bp, Homo sapiens
tttggtgaaactgaggatgaatcatttccagaagcagaagtctgcagatctccaggggagcccaccagcctagtcaacat

SEQ ID NO: 46195 - DNA, 98 bp, Homo sapiens
gaagcagttcggttatacctggaaactaatctggattcactccctctggttgatacccactcaaaaaggacacttctgattaagacggttgaaactag

SEQ ID NO: 46196 - DNA, 90 bp, Homo sapiens
gataaaaagagatgtggggggattctcgacctgctaacagaactggaccttttcggctgactgtgctgtcctgattgttgctgctggtgt

SEQ ID NO: 46197 - DNA, 81 bp, Homo sapiens
gggggccacaaatgctccttctcctggagacgcaactcaaggatatacgtggcatttcaagtgatcagttgcatagagtac

SEQ ID NO: 46198 - DNA, 82 bp, Homo sapiens
agaaccatcctgggctacaagacgctggccgcgggctccatcagcatggctgaggatgccggctccaggagcagcagtggag

SEQ ID NO: 46199 - DNA, 82 bp, Homo sapiens
ttccatctcgaaaaagaaccgcgcgggaagccccagcccgcagccctcgggggtttacccaaggtccagcctagcccctagg

SEQ ID NO: 46200 - DNA, 97 bp, Homo sapiens
ggggggcacgcagctgaagctcatcatgaccttccagaattacgggcaagcgctgttcaaacccatgaagtcaaaatgcagatcttcgtgaaaaccc

SEQ ID NO: 46201 - DNA, 100 bp, Homo sapiens
aacaaaggcacgcaaaacggaaaagcgtgtgtaggggagcggaaaaggaagtcaccaccgtggcctgcgacgaattgtcaacatcacactgctggtgact

SEQ ID NO: 46202 - DNA, 90 bp, Homo sapiens
gacctacaaggaatctgagggtgccctcaatgagcacatgaccagcttagcttctgtcctaaagttactccacaggatccgctgaacata

SEQ ID NO: 46203 - DNA, 75 bp, Homo sapiens
tgcctgtctgtcgcaggctgaggagcgccagttcatccagagcagcttcctccgaggccatggattacattaaaa

SEQ ID NO: 46204 - DNA, 97 bp, Homo sapiens
ggagctttcgtcacctgtccttctacattttcgatagagacgttttccggagggattccatcatagtgcctacaccaactaatgttacaattgaatc

SEQ ID NO: 46205 - DNA, 100 bp, Homo sapiens
cggcggggcctccgcggtctgctcatggcgcacagccagcggctgctcttccgaatcggtgccatctgggattgacagctcagcctgaactctatcttct

SEQ ID NO: 46206 - DNA, 100 bp, Homo sapiens
ctttatccaatcaagtgcccttggacaaagcctgaaaccaggatgctggcacgtgtgtcctggtcctcaacaaccttctgtgagcctagggacccatttc

SEQ ID NO: 46207 - DNA, 129 bp, Homo sapiens
tgggtctttcttgtcaactgctcacgacagaaggcgtctcatggcgttggaataccggctctcagcggctgaagaggagcaggacttggatggtgagaaggggccatcatcggaagggcctgaggagga

SEQ ID NO: 46208 - DNA, 75 bp, Homo sapiens
gtgaagcaagtgcagatagatggccttgtaaattcaactggaagggaactattaaagcaattctgaaacaggccc

SEQ ID NO: 46209 - DNA, 74 bp, Homo sapiens
aaacctcaagatgtggatttaccttatcccctcaacaacttttcagtggcaagcatgaacaaccgggaggtgct

SEQ ID NO: 46210 - DNA, 101 bp, Homo sapiens
ctcccgagtagctgtgattacagggtactgccagggggatggttaccgcatcggctttggccagtgtgctggaaaagtgctgcctgctctcctgccatcat

SEQ ID NO: 46211 - DNA, 80 bp, Homo sapiens
gagtgaagaagaacagctcgagagagcattacaagccagcctctgggaccgaggacttggatgttgtgggtgatggtatg

SEQ ID NO: 46212 - DNA, 97 bp, Homo sapiens
ccatatgaaggcggagtatggaaagttagagtggacctacctgataaataccctttcaaatctccatctataggtcctgtgggaatggccgctgctg

SEQ ID NO: 46213 - DNA, 75 bp, Homo sapiens
cctggtaaaatcgcacaccaacaccagccacgtcatgcagtatggaaacaaatcttgctggaggtttgttaaatt

SEQ ID NO: 46214 - DNA, 75 bp, Homo sapiens
gtagcctctcactgaatgagcctgaagacaaggatgtgactgggaagctggtggcagactccgccaagcacctgg

SEQ ID NO: 46215 - DNA, 82 bp, Homo sapiens
tgtcgccttcgcctcctaatccctagccactatgggatcgcttacacctgagacgaactacagaacagcacgtaccagaggt

SEQ ID NO: 46216 - DNA, 95 bp, Homo sapiens
aaggacttctttatccgagcgctggattgcatgagaaggatatgaacgagactgccaaacaagaagatattttggaatccacaacagatgctgca

SEQ ID NO: 46217 - DNA, 100 bp, Homo sapiens
gggcgcgggcggcggcgccggcaggaaggaactgtggaaggtgcatcagtgaagaaatggaccaatgtgtataatcatggaatctccttgctaaccatca

SEQ ID NO: 46218 - DNA, 100 bp, Homo sapiens
ctgccttctactccatcgtgggactcagcagccttggtgctcaggtgccagatgcaaagaaggacagaataacgggctcccagattcacaagccccacca

SEQ ID NO: 46219 - DNA, 106 bp, Homo sapiens
ctggcgctgccggagctgtcgacccggcctggcgccggactaggtaggcgaaaaccaagagtacatcggcctcgttctcctatattggaagaaaaagacatcccgc

SEQ ID NO: 46220 - DNA, 75 bp, Homo sapiens
cagactcagtggagaaggagttggaccagtcaacatctgtgacaacatccgggaattcttgctgagcctcagata

SEQ ID NO: 46221 - DNA, 74 bp, Homo sapiens
gagagatggtcaggtctggagctcgaccgggccagctggccatgactcatccaagtcatcatttaaattttgga

SEQ ID NO: 46222 - DNA, 77 bp, Homo sapiens
catgtgttttggaggcaccgtctctccctgggaccagaaataagcgggttttgaaaacaaaaaaaagaaggagtgga

SEQ ID NO: 46223 - DNA, 100 bp, Homo sapiens
aggtgaagtccacaatcaagttccaaatgaagaagactcaagataacatcactgtcaggtgggacctgggccttaacaagaagagaatcgcctacttcac

SEQ ID NO: 46224 - DNA, 88 bp, Homo sapiens
aggattccaagtaactcttatttggtcatactccctgtcacaaactccagctgaactaacttggaggaggatcttccctgacagctct

SEQ ID NO: 46225 - DNA, 75 bp, Homo sapiens
agaagacaagttcacagcctgaaatatgtgccgtatcacgaatttctaagaaagaaattggtcggtgttttaaac

SEQ ID NO: 46226 - DNA, 75 bp, Homo sapiens
gggccggtaaccccctctccctccttgcgcgttccgggtctctagaccaaattttggtacaattgaatcacactg

SEQ ID NO: 46227 - DNA, 96 bp, Homo sapiens
cgggacacctggaagccgagaaatgattgccacggcagtgaagtttctacagaattcccgggtccgccagagcccacttgcaaccaggagagcatt

SEQ ID NO: 46228 - DNA, 74 bp, Homo sapiens
aggaaccggaccccggcagctacctcctgccccccgaggtctgcagtctcctgaacccagcagccatctacgcc

SEQ ID NO: 46229 - DNA, 82 bp, Homo sapiens
gacgaaaacatgtactacagccagtcttctatgtttccacatcggtcagaaaaagataaggccaatgatgaggccaatcaga

SEQ ID NO: 46230 - DNA, 90 bp, Homo sapiens
gcgcgcaaccgcgggagcagccaagtggactggactcttttcttgacttagctaccaggctgaagctcagggccctgtctgctctgtgga

SEQ ID NO: 46231 - DNA, 83 bp, Homo sapiens
tgacatctattccatctgtgagtgactctttgacatggagagaatttcactatattcagggacagtatggaaattaccagcag

SEQ ID NO: 46232 - DNA, 100 bp, Homo sapiens
ctgaccttcttcctcgaggacgacgacaagctcgagcagatcaggaaggtttaccaagattcaaaacacgaagctgaccatgaagcgggacggcattggg

SEQ ID NO: 46233 - DNA, 100 bp, Homo sapiens
gcccggccagccgccccgtccgggagagaaatcacagtgtcccaagcccaaggcggcacggagtggcccctggaaggacagcgcctacaggcagtgtctg

SEQ ID NO: 46234 - DNA, 98 bp, Homo sapiens
cctgacccgaagtaccgacccgagttatgcccaccctccaactttgcgacggaaatgtgtcatcgaaagccagcactattcctgatcagagaactcca

SEQ ID NO: 46235 - DNA, 90 bp, Homo sapiens
tcgttgtcgccggagcctggagccgtgaacccagccgcgccaggttgcacactgggccacagaggatccagcaaggatgaagaaatggag

SEQ ID NO: 46236 - DNA, 90 bp, Homo sapiens
gtcatcctcaggcacgccagacttacctgtcctactcaccgatttgaagattcaatatactaaggctatttgatcactccatggaaggat

SEQ ID NO: 46237 - DNA, 74 bp, Homo sapiens
gccgtggtggaaactttggtggaagaggaaacgtgcccaacgagaagatcgcgatatggctcaaggactgccgg

SEQ ID NO: 46238 - DNA, 103 bp, Homo sapiens
aagaactctgagagaatatactcaactgtcctgctgtgattaaacaagactgctgtattttatttagctttggagtcaaacccttctgaccatccaagggcaa

SEQ ID NO: 46239 - DNA, 89 bp, Homo sapiens
aggcagtaaattcttcagctgctcggacagatgaagctccccaaggagctgcagagaagatggcgaattagaagatggtgaaatagacg

SEQ ID NO: 46240 - DNA, 83 bp, Homo sapiens
gagagctctcactgtggtggacgttcggccaagggaccaaggtggaaatcaaacaaaaagcttgtggtgaaggggggcaaaaa

SEQ ID NO: 46241 - DNA, 110 bp, Homo sapiens
ctgagcaacatccgcgagttcctgcgcggctgcggggcttccctgcggctggagatggagaaggatgaaactgtgagtgactgctccccacacatagccaacatcgggcg

SEQ ID NO: 46242 - DNA, 100 bp, Homo sapiens
tacagaatcttgaatcagaaattgagaagctggcaaccacacctccaaatcaaggaaggccagattctcctgtctatgctaaccttcaagaactgaaaat

SEQ ID NO: 46243 - DNA, 51 bp, Homo sapiens
cgtgggtgcagttgcgggactgtgagggggacacttgacattcagggacgt

SEQ ID NO: 46244 - DNA, 75 bp, Homo sapiens
atttgttaaggattccaagtaactcttatttgagcagttgaagacatctcttcatcgaggactaacccctacagt

SEQ ID NO: 46245 - DNA, 100 bp, Homo sapiens
aaatgaggcaagttatcctttggaaatgtgctcacactccaaaacctattgatgtacaagtcattacacaccacatgcagcgatatgcagtttggtttgg

SEQ ID NO: 46246 - DNA, 151 bp, Homo sapiens
gaagaagagcagaacaatgcagcaaatactcagaaacatccttccagaaggagcgaactgaagaggttctacacaattgcttgagaattacattgtggaaaacatgaagtcggagatggcccagatacagcagaatgcagttcagaaccac

SEQ ID NO: 46247 - DNA, 73 bp, Homo sapiens
ggatggtaaagtcccagatacactcaggaagtgtttctcagagttccagaaagctgagtctgatctggattac

SEQ ID NO: 46248 - DNA, 82 bp, Homo sapiens
gccacctactattacccccagtatctgcaagccaagtgaataaccctataccttccaatttgaaatcagaagcaaaaaaggc

SEQ ID NO: 46249 - DNA, 90 bp, Homo sapiens
atagataaagataccagcagtagtcgcctctctttcagcagttacccagtaagtacaaggtggactgtgcatgcctcaaagaaaacccag

SEQ ID NO: 46250 - DNA, 80 bp, Homo sapiens
ctgcagacttggccaaatggacgggactattaagttgcagagtgggcaggatcttaagacccgataggtgcagaacccat

SEQ ID NO: 46251 - DNA, 100 bp, Homo sapiens
aatggcacttcattggccacctacagaaacaaaatgtcaacaaattgatggctatgatagtagtggagcttccaaagatgaaattaaggagagatttgct

SEQ ID NO: 46252 - DNA, 98 bp, Homo sapiens
aaaggatgcttttgaaactcggcaggacttaaatgaggtatactgcaacatccagatggcacagttttgaaacagttacaaccacctccaaggggccc

SEQ ID NO: 46253 - DNA, 73 bp, Homo sapiens
tgtgaagttcagggataaagtcagggagaagagaagtttacctttattgagaaatgtaacaaccctcgttctg

SEQ ID NO: 46254 - DNA, 100 bp, Homo sapiens
attgactatggaaaagttgccaaattgagcttagaaaccaagatagccaagtggaacctgcaatcaagaatgaataagaatgaggctatagtgatgaaag

SEQ ID NO: 46255 - DNA, 101 bp, Homo sapiens
gtggacttgattgatatatatgctgacgaggagttcaaccaggatttacttaaatccattgtttcaagaatgaaaaaggcagtagaagatgatgtttttat

SEQ ID NO: 46256 - DNA, 75 bp, Homo sapiens
gccaggaagcaattctggaagcgcagcaacagcaagctcccgggcagatccccagctcaagggtatagtgaccag

SEQ ID NO: 46257 - DNA, 82 bp, Homo sapiens
ctgggcgactctgtgcctcgctgagggtgtggacactgccagcggctgcagccgacttggaatgacctgggagacaaataca

SEQ ID NO: 46258 - DNA, 100 bp, Homo sapiens
ggactacacggcctataggtggcacctgactcacaggcccaagactggctacatcaggtctcaaagttgaggtgacccactgtggacagatgaaacgaaa

SEQ ID NO: 46259 - DNA, 100 bp, Homo sapiens
atccagaacatggaccgcgtggaccgagagatcaccatggtagagcagcagatctctaagctgaagaagaagcaggaggactcggaggagagtgaaattg

SEQ ID NO: 46260 - DNA, 95 bp, Homo sapiens
attggctgcctcatccgcttctatgcaggtgtgggccatgtttgaggattgccccagcattcagttctatgagtaataaatatccacaggctgtt

SEQ ID NO: 46261 - DNA, 90 bp, Homo sapiens
gctgacagccccagatagcaatgatgatgtgaaaacagaagctgtggctgcattgaacctggccacatcccaggtaccgtgaacatcccc

SEQ ID NO: 46262 - DNA, 75 bp, Homo sapiens
tgaccatggctccctgcagtaccctttaacgttcactgattaccaaagctatgtcatccatggctgcctggagaa

SEQ ID NO: 46263 - DNA, 100 bp, Homo sapiens
gaggcgagctcgcgatgagtggtctcggcaggctcttcgggaaggatcccacgtgtggacggcgagtatgatctgaaagtgccccgagacatggcttacg

SEQ ID NO: 46264 - DNA, 89 bp, Homo sapiens
ccggactgcggttggggcgggaagagccggggccgtggctgacatggagcaggtggagcgatttagccaagaagttcagattacagaag

SEQ ID NO: 46265 - DNA, 95 bp, Homo sapiens
atctgctcctcatggcgcaggagcatctggagttccgcctgccggtgtgagcgccactttgaagggcatccaacccgcggctatccatgtggaat

SEQ ID NO: 46266 - DNA, 75 bp, Homo sapiens
tgagcaactggattatactgtactgcccatgaaaaaggatgttgaccggacagattgcttcacctgtggtatcag

SEQ ID NO: 46267 - DNA, 82 bp, Homo sapiens
gagattggcctggagtaaaagctgatgatcggaatgattacagaaaataatgttgagtttccatgaagaacaggaagtactg

SEQ ID NO: 46268 - DNA, 82 bp, Homo sapiens
ctgacgagtagaaatggcagcgggaaggcagcagatggactgcgactcccgtcagatggtcagtaggacagaaggtaacatt

SEQ ID NO: 46269 - DNA, 83 bp, Homo sapiens
gtctgcggaagtgcagctgcctcagttcttagcgcaggtgtctttaaaggattgccatttaatgccattcaagatctactaag

SEQ ID NO: 46270 - DNA, 100 bp, Homo sapiens
gattcaaacggtcagatgggagcacgtcctcggataccacatccaacagctttgtccgccagatcttcgggccagtgatgcagatcctgaagttcaagac

SEQ ID NO: 46271 - DNA, 126 bp, Homo sapiens
ggaaaaccccaggaagaagaccagcccttgcctgcccgacggctctcctctgactgcagcgtcactcagtgttcctctgaacaacagggagaatatctctgatcccacctcaccattgagaaccag

SEQ ID NO: 46272 - DNA, 107 bp, Homo sapiens
acacggccagttttgaaatcgacacacaaagaatagagttgagcctgtgggacacttcggcgtccgtctccaagagagtatgaagagagtgcgtctgtagggcaggg

SEQ ID NO: 46273 - DNA, 100 bp, Homo sapiens
ctcgcgtacttccgcgttccggcatcgtcgcctggtgcgtgctgcagctaactcgggtcgggaaaatgcgacagcgactgcccactcgaggtcgtcatgg

SEQ ID NO: 46274 - DNA, 100 bp, Homo sapiens
cgggacggccggtcaggctcgccgccgagctggatcccgctgcacaagttcacgtccatccgccggaccatgtcggaggttgggggctctgtggaggacc

SEQ ID NO: 46275 - DNA, 74 bp, Homo sapiens
atttcctggcccaatagacaactctgggctattttcaggtgaatttttcctgaaaaatctagtggctaaaagaa

SEQ ID NO: 46276 - DNA, 100 bp, Homo sapiens
atgagattagattggtttaggttacagggtatatttacttctggcacatgggaagagaaatcagatgaaatttcctttgctgacttcaagttctcagtca

SEQ ID NO: 46277 - DNA, 128 bp, Homo sapiens
tttcatgccgctctctccaccccatcttgggacggccagctctaagaattcctgctacgacactgaattcaaccaggagagagacaagagagacacctccaacttcgacaaagagttcaccagacagc

SEQ ID NO: 46278 - DNA, 98 bp, Homo sapiens
cgacaggactttgggtctgggtgagccttctcgtggcggcggggaccgtccagcccagcgattctcagtcagatcctgtgaagccacctggcagctct

SEQ ID NO: 46279 - DNA, 89 bp, Homo sapiens
caagacctgcctcctgttccgcttctcagaggacgccttcaacaccaccttcatctccaccatcggtcagtatgggaatcctttaaata

SEQ ID NO: 46280 - DNA, 88 bp, Homo sapiens
ggcgaagctggccgagcaggctgagcgatacgacgcagacggttgatgatgaagcgccggccgtgtaaatgaagatcgggtgaggagc

SEQ ID NO: 46281 - DNA, 50 bp, Homo sapiens
ctagaagcattgctagaagcagcagctcctgttggatcaccaggatgcca

SEQ ID NO: 46282 - DNA, 90 bp, Homo sapiens
ccctcctggactggatggaaatcctatgtcatggcacccccagtaccggagctccaagttccgtcatgtctttggcaaaccagccagcaa

SEQ ID NO: 46283 - DNA, 100 bp, Homo sapiens
agcccttcgtcatgaatgggatctgcagagttcgggcgagaggaggcgagaggcgcaaagtacctggagtagaacagaaaaattattatgtctgtgttcc

SEQ ID NO: 46284 - DNA, 100 bp, Homo sapiens
gacaggaaaacgtgtgagcgcgcggctgaaagcgactgggacctgggagtgtgaggaagaggctgtctgtgtcattatgtgtgcgtcggtcaagtataat

SEQ ID NO: 46285 - DNA, 82 bp, Homo sapiens
gtaggaacatggcggatcggctcacgcagcttcaggacgctgtgaattcgtaatgttgcaggtcagtggaatccagttttta

SEQ ID NO: 46286 - DNA, 75 bp, Homo sapiens
aataacaggcggagggtcggcgtagcaagtgcagccgcggagccctgtacacaggcttttccatcctggtgactc

SEQ ID NO: 46287 - DNA, 82 bp, Homo sapiens
gtagagcggagcctggcgggcgtgggaacccaggccccgccgaggcggccagcatcatcggctggttcgtgcgaagcttcaa

SEQ ID NO: 46288 - DNA, 96 bp, Homo sapiens
acggcgcagacgcgggcgagctgcggctcggacgccagcggacacgcgggcgagattgcaggcgagaagaaatctgctcagtggcgcacagtggag

SEQ ID NO: 46289 - DNA, 74 bp, Homo sapiens
aagatcacccggaccaaggaggaggccctggagctgatcaacggctctgagttccttggatgaagacgatccca

SEQ ID NO: 46290 - DNA, 82 bp, Homo sapiens
acgacaggcctacactctattcaaacagtttctgtagaaaatgtttcctgactgcaatgagggaaagcggagcacattgtcc

SEQ ID NO: 46291 - DNA, 83 bp, Homo sapiens
gtcccgggagaacctgcggcggccggagcggacctgatcccaaccttgaagaaagtcctaaaagaaaaaatattacatatgag

SEQ ID NO: 46292 - DNA, 83 bp, Homo sapiens
cagcaggcacccaagcgggcggcaggtcaaaatgcagatcttcgtgaaaacccttaccggcaagaccatcacccttgaggtgg

SEQ ID NO: 46293 - DNA, 75 bp, Homo sapiens
acgacagaaggagaatgcagaccctcgacctccagtgcagttcccaaagcttgggaaagtcgaggtgacggtgtt

SEQ ID NO: 46294 - DNA, 51 bp, Homo sapiens
cacagctttgagtgagaaacagattccaggagggcttcgtgtatggacctc

SEQ ID NO: 46295 - DNA, 49 bp, Homo sapiens
ctgcaagcaggcaacctgaatacagctcatgatggagcagtccaagaag

SEQ ID NO: 46296 - DNA, 75 bp, Homo sapiens
aaactgtgtggggcgcggatgggatccagctgttagtcgggtttatcttgcagattatggactttcctacagata

SEQ ID NO: 46297 - DNA, 97 bp, Homo sapiens
ctcctgactgattagcattcacaccagtaactctcaggagccttctccgcagttggcttcctcggtagcttccacacggagcatgcccgagagcctg

SEQ ID NO: 46298 - DNA, 100 bp, Homo sapiens
cttcgagccaggcccggcaaccattgcctgcggaaagatcgtgtcgcacacgcacctcggagtgggttctgaaggaacattaaatgactgcaagataata

SEQ ID NO: 46299 - DNA, 90 bp, Homo sapiens
acccggacgacccccattgctgagccagcggagctgcttgggtagatacaacaagaattgaatactccattcctttaagagaaaactggg

SEQ ID NO: 46300 - DNA, 95 bp, Homo sapiens
acccaagtgcattgcctttggaaacgagtggagaagagtttttcccaacatccaatagtcttcttcatggaacacatgtgccttccacagaggaa

SEQ ID NO: 46301 - DNA, 73 bp, Homo sapiens
cccctacggctctttctgatcattgccaacacaatggcattccaggtcccaaagttgtttctaaagaaattcc

SEQ ID NO: 46302 - DNA, 100 bp, Homo sapiens
gataatgcaatagaagctgtggatgaatttgcttttctggaaggtctgtttctgtcgactgtggaccacttatgtgcgatccgtggaccacttgcgtgcg

SEQ ID NO: 46303 - DNA, 96 bp, Homo sapiens
gtttctcagacttttgttcttgaggagtactgatcagggctgtgtgttccagaaggctgataccatggaagacatcaccttggcttcctggctgtc

SEQ ID NO: 46304 - DNA, 87 bp, Homo sapiens
ctcttgtagcacctgccaatagtttagtccatggtcgcaatgatgatgtcaaatgcttttgttgtgatggtggcttgaggtgttggg

SEQ ID NO: 46305 - DNA, 99 bp, Homo sapiens
agttgcatttggagacctgcaactgaagtatgtcaaaatccaggaaacagctacgaaaataattcaaagctcggaagatggagtcttgccctgtcaccc

SEQ ID NO: 46306 - DNA, 82 bp, Homo sapiens
cggagctgggcgcggattcgccgaggcaccgaggcactcagaggagaattggctgtgaaaggactgaggcagccatctgggg

SEQ ID NO: 46307 - DNA, 100 bp, Homo sapiens
ctgaccccttcttgccatcgccccagacatggggaacgcggcgaccgccaagaaaggcagcgaggtggagagcgagtttcgctcttgtcacccaggctgg

SEQ ID NO: 46308 - DNA, 96 bp, Homo sapiens
gtttaaaattttacataagaagttacctttttcagcctgcctagggtagttaaaagacgagtgaatgctctcaaaaacctgcaagttaaatgtgca

SEQ ID NO: 46309 - DNA, 82 bp, Homo sapiens
tttctgcttttctgtggactcctcttctacatcaacttggctgaccattggaaagcacctgaactcctggggggaccgtcag

SEQ ID NO: 46310 - DNA, 82 bp, Homo sapiens
cggacagtgaaccggacagtcatcaccatgggccgggatcacattctgatttgccttgctttccatgacatttcccctcaag

SEQ ID NO: 46311 - DNA, 101 bp, Homo sapiens
aatatgtgttaaattcactcgtggtgtggacttcaattggcaagcccaggccctattggccctacaagaggcagcagctaccaagaaaccagcccctgaaa

SEQ ID NO: 46312 - DNA, 100 bp, Homo sapiens
gctgcctctgcagagcctggacggctccctccacgtcccggaatttgaagtactgccttgtaattcttaatcagcctttggacaactattttcgtcatct

SEQ ID NO: 46313 - DNA, 96 bp, Homo sapiens
tcgccatctacccgccctgtggcaggcgcaaaatcatcctgtcggacgagggcaagatgtatgacaactcgagagatgatcgctcgttctgctgct

SEQ ID NO: 46314 - DNA, 74 bp, Homo sapiens
gcaggaagagctgcagtctttgtgggacaaggtattggcaagcttgccagtgtacctgctggtggggctgtagc

SEQ ID NO: 46315 - DNA, 100 bp, Homo sapiens
tttctttccagaattatacaatatttggcttcaacggaccacaccaaaatgccatctcaaatggaacacgccatggaaaccatgatgtttacatttcaca

SEQ ID NO: 46316 - DNA, 90 bp, Homo sapiens
atcgctcagttgtctccagctgttagccagaagcctcccttccagtcagggtgctgcattagacgtggaactatctgatgattccttccc

SEQ ID NO: 46317 - DNA, 100 bp, Homo sapiens
attctggaaatccctgcactcactgaagccgtaaggtggtaccggatgaacatggaaacgctgcagcagtgctgtgacctttcgcagctgtggttccgag

SEQ ID NO: 46318 - DNA, 75 bp, Homo sapiens
agagaacgcattacccatgatgcttgctgaacctgaacgagataattgggagagacatgtcccagatttctgttt

SEQ ID NO: 46319 - DNA, 111 bp, Homo sapiens
agcagaagccggcgtcgtcggatgttgtgttgcccgccaccatgagctacacagacaatgcagatcttcgtgaagactctgactggtaagaccatcaccctcgaggttgag

SEQ ID NO: 46320 - DNA, 74 bp, Homo sapiens
gggtcgcagttcttgtttgtggatcgctgtgatcgtcacttgcagaaaaatatggctcaggagactaaccagac

SEQ ID NO: 46321 - DNA, 80 bp, Homo sapiens
cgcgtttggctgcaatgagctcggcctcggggctccgcagggggcacccggcagggccggtgcataaacttctcccgagt

SEQ ID NO: 46322 - DNA, 100 bp, Homo sapiens
agggtgttgatttctccaaggatctgctgaaacatgcagcagattggaataaatatgatgaccgattgatgaaagcagcagaaaggggggatgtagaaaa

SEQ ID NO: 46323 - DNA, 74 bp, Homo sapiens
cttctctgttttgggattttgtaaatcttctcagatggaccaatcttacaaaccagatgaaaatgaagttcgaa

SEQ ID NO: 46324 - DNA, 100 bp, Homo sapiens
ctcggagaagatgtggtggcttccgtttgttggtggaggaggtggcaggcctcggcgacccttctcaggtgcagccagagagacactagcccactgatgg

SEQ ID NO: 46325 - DNA, 100 bp, Homo sapiens
cgagcaggcgaagccgcggaggacggggtgaagatggcggccttctccgatgatgaccactggatcgtcgacacagactacgacacgtatgccgtgcagt

SEQ ID NO: 46326 - DNA, 83 bp, Homo sapiens
cgctatgcctgcggcggagactgcatcaggctctcgacaatgcagatcttcgtgaagactctgactggtaagaccatcaccct

SEQ ID NO: 46327 - DNA, 100 bp, Homo sapiens
acatgagcgaccacttccggaaaggaggcatgctggtgaacgcagtcttctaccttggaatagtgaatgccttgccttacacccagacaaaactctcgtt

SEQ ID NO: 46328 - DNA, 105 bp, Homo sapiens
cgcactgcgggcgcatccctgccccggcgccgtccgtgcccgcgggacctgacagccgggtcagagggaaccttctgaccagcctcatgggctcctcagagcagg

SEQ ID NO: 46329 - DNA, 100 bp, Homo sapiens
cttgttgctcttcggggactccatcacccaggtgctctggggccaggtgccaccggccattgtccaggcagctgtgtgcaagccaaagaagcatgaggac

SEQ ID NO: 46330 - DNA, 88 bp, Homo sapiens
gctcgacaaagatggggttgtcctctttaagaagaggtacttggaaggctccatcgcccctgaagacaaaggaagctgctcattgctg

SEQ ID NO: 46331 - DNA, 95 bp, Homo sapiens
cggcgaggccctcatgtaccacacgatctaattatcatggacctgcgacagtttcttatgtgcctgtccctgtgcacagcctttgccttgagcaa

SEQ ID NO: 46332 - DNA, 100 bp, Homo sapiens
caatgtttagccaacccaaattaccttaattaaggacttcacggtgcgcgaggagctgcagcagcaggacgtggagcgctggctgggcttcatcaccttc

SEQ ID NO: 46333 - DNA, 75 bp, Homo sapiens
ttaatggaagatttcgatcagttagggttttgaacgaagaatgtgatcagaactggtacaaggcagagcttaatg

SEQ ID NO: 46334 - DNA, 98 bp, Homo sapiens
ctcaccatgccgacagtagaggagctttaccgcaattatggcatcctggccgatgccacggagcaagtgggccagatgtggaaacaacttctgtgcat

SEQ ID NO: 46335 - DNA, 74 bp, Homo sapiens
gagaagttccaacgtgtcctacaaatactcaaagacctgcactggttaaacatcataatcatgtgtgttggccg

SEQ ID NO: 46336 - DNA, 75 bp, Homo sapiens
aaggagctcattaaggacggctctctgctcattggggcgttgaggagtgggagctgctatttctatgacgtacat

SEQ ID NO: 46337 - DNA, 83 bp, Homo sapiens
ctcggggcgggcgccgcgggacctctccgggccatgggtgattgaattactcagatatgaagatcatcatctaggttttgtgt

SEQ ID NO: 46338 - DNA, 87 bp, Homo sapiens
aaggacaacaatgagatcgtggacaagatcatgggcaaaggacagatccaggatctcccagccatccagccccggctagtggcggtc

SEQ ID NO: 46339 - DNA, 72 bp, Homo sapiens
tcgagatggagcgggcgcactgggaggtggaacgggccgaactgcagctctttgccgagggcgtgtggtgag

SEQ ID NO: 46340 - DNA, 75 bp, Homo sapiens
tcatcatgatctcttcacccgcaccatgatcgttatgaatgatcaggtgccaagtcctgccctgccaacttcttg

SEQ ID NO: 46341 - DNA, 100 bp, Homo sapiens
ttgttaaggattccaagtaactcttatttggtcttcccagagtttgctgctgcccattcaaatttagcaagtgtactgcagcagcagggaaaactgcagg

SEQ ID NO: 46342 - DNA, 50 bp, Homo sapiens
tgctcttcgcccagcagatctgcgagcgccctgcccacccttggagccag

SEQ ID NO: 46343 - DNA, 118 bp, Homo sapiens
tggtgtaccaggcgaagctggccgagcaggctgagcgatacgacggtgcagtggaggcttgcctcttgcatcagctgagacgccgtgccgctggcttcctgcgcagtgacaagatggc

SEQ ID NO: 46344 - DNA, 103 bp, Homo sapiens
ctttcaggagactagacctcgtaattacattctctcggccagcgcctccgcggtatagtcgtctccccctccaccacggcaagtcctgcagagggaaccagct

SEQ ID NO: 46345 - DNA, 100 bp, Homo sapiens
ctcagcatcttcctcctctcagtcggagacccccgagccaggctgaggttcaactatgctacctggaagcacaaagagatgctgttgagcagatgtccct

SEQ ID NO: 46346 - DNA, 75 bp, Homo sapiens
ttcttcaccgcctggttcttcgttggcctggacaatgctggaaagacaaccatcctgaagaagttcaatggggag

SEQ ID NO: 46347 - DNA, 100 bp, Homo sapiens
tgcgttttcatcctcagaagcaggtataccggacactacttcataaccactttactctactccttcttcctgggatgttttggtgtggatcgattctgtt

SEQ ID NO: 46348 - DNA, 82 bp, Homo sapiens
gccatgtaagatcgtcgagatgtctacttcgaagactggcaagcacggccacgccaagggcagtaaacggctttgaccccgc

SEQ ID NO: 46349 - DNA, 51 bp, Homo sapiens
ttccagcaggctgcagatacgagtggacaattgccaccttccagagaagag

SEQ ID NO: 46350 - DNA, 75 bp, Homo sapiens
aacatgttttatcaatgcagctaagaggaatgttacggcatccggagtcatccctcagatttctctgatcatggg

SEQ ID NO: 46351 - DNA, 100 bp, Homo sapiens
ataaacaagggatccattgtctggcaggaggtttttgatgataaagcaaaggaagttggaaatctgtatgacatgttccacactcgcaactctttacacc

SEQ ID NO: 46352 - DNA, 90 bp, Homo sapiens
cccgcccaccagttcgcccgtccccctgccccgttcacaatcgtgagtgcatctccatccacgttggccaggctggtgtccagattggca

SEQ ID NO: 46353 - DNA, 75 bp, Homo sapiens
aggaggagcttgctgcagagtgatcttttgccagaaatgagggcatactggcctgacgtaattcactcgtttccc

SEQ ID NO: 46354 - DNA, 90 bp, Homo sapiens
gatcgtgtgtcggatgaggagaaggtgctgggactctggtgcccccaaccctgggcatcctcaggctttgaggagaatacacaggatttg

SEQ ID NO: 46355 - DNA, 82 bp, Homo sapiens
ctttattcttcaaatggctttaccctcccagtagctccaggtggctgctacaccccatgtaaaaagcggaaaataaaatgaa

SEQ ID NO: 46356 - DNA, 74 bp, Homo sapiens
cagaatcgatctggtcggcttaccataaagagtctctgtctgtcaaatggagaccccaccaacaactgaacgct

SEQ ID NO: 46357 - DNA, 74 bp, Homo sapiens
gggcaattcaagctggcgaagagctcttctttgattacaggtggcatttttctgaagttgttcattaagacttc

SEQ ID NO: 46358 - DNA, 83 bp, Homo sapiens
aagtcgagtatctggtgaagtggaaaggatggcccccaaagtctcctctgagcctccggcctccataagacccaaaacagatg

SEQ ID NO: 46359 - DNA, 100 bp, Homo sapiens
cccaaatatcctcggaagagcgctcccaggagaaacaataaatgggggatcttggtctggcgaacctccgaggcggaacagccataccttcaattgtcgg

SEQ ID NO: 46360 - DNA, 97 bp, Homo sapiens
ttccttacctgtttttccagctcacccactgccagcagaggcctccggtgtggctgtctctgatggtgtcatcaaggtgttcaacgacatgaaggtg

SEQ ID NO: 46361 - DNA, 83 bp, Homo sapiens
aattccccccgaagaagactcccccacatctggcggacaaggcaaaatctcagcaagttcggacctctagtacaataaggcga

SEQ ID NO: 46362 - DNA, 75 bp, Homo sapiens
agtgaggagccagacgacaagcacacactatggcgctgaaacggattaataagtcagccataatggcaggtgaag

SEQ ID NO: 46363 - DNA, 96 bp, Homo sapiens
agagcgtggagcgctgcgcggcgcggcggccgggccctcgagacggggacgatgaggacggggacttggttgccttttccagtgacgaggaattga

SEQ ID NO: 46364 - DNA, 75 bp, Homo sapiens
ccttcatcgagtacgaacacgagcgagacatgcactttgtcgccgtgatcctgaaggcgctgacctacgacgaga

SEQ ID NO: 46365 - DNA, 82 bp, Homo sapiens
acaaaacttcaagccaaacatcaagcagaatgtgatttgcttgaagatatgagccccagcatgagaccagatgtaagctctc

SEQ ID NO: 46366 - DNA, 87 bp, Homo sapiens
tagcttcagagttctttgtggatggacttgattctgatgagagtgtcacttatgagccagacttcaattctgcagaactattagcca

SEQ ID NO: 46367 - DNA, 100 bp, Homo sapiens
gacggctctgacgaggaggactgcagcatcgaccccccaaagacacacgtgacccaccaccccatctctgaccatgaggccaccctgaggtgctgggccc

SEQ ID NO: 46368 - DNA, 75 bp, Homo sapiens
taagccgatcccagaggctctttgctgctgtcagtatcaccactggtcaagcagagcaacctgcaagcaatcaag

SEQ ID NO: 46369 - DNA, 100 bp, Homo sapiens
gcgatcctaaagagattgaatggtgccacacctccctggatgatccaagatgaagaatacattgctgggaaccaagaaataggaccatcctatgaagaat

SEQ ID NO: 46370 - DNA, 50 bp, Homo sapiens
agtgctccgtcgcccttgcctccagatggggtcgaggatttggtcttttg

SEQ ID NO: 46371 - DNA, 50 bp, Homo sapiens
cacattttatgttgtgtcatttcgaaggataacaacgaacttgatgcaag

SEQ ID NO: 46372 - DNA, 75 bp, Homo sapiens
actgctttccactcggctcctgtcgtccgttctctcaggctcccgttcaggattaagcatgaaaatattgttgcc

SEQ ID NO: 46373 - DNA, 101 bp, Homo sapiens
attggaagtgaatggccccatggtgacggtggccctgtcagtggctctcttggccctcctgaaatggtaacaccatgttgttgagagtgttacctgctgtg

SEQ ID NO: 46374 - DNA, 100 bp, Homo sapiens
gctggacccggaccggttttggtttctcgtgaactgtaacagcattcagaatctgcccagcttgaccttcatcatcaatggtgtggagttccctctgcca

SEQ ID NO: 46375 - DNA, 100 bp, Homo sapiens
catggggccctggggctggaaattgcgctggaccgtcgccttgctcctcgccgcggcggggactgcaggaatgaatctgaagtctgctgcagtaaaacac

SEQ ID NO: 46376 - DNA, 97 bp, Homo sapiens
agaaaaagaaggccctgagtcaaagaagatgcctcgaactaaacaaattcatcccagaaatctaagagccaactgggtacatggaaaactcagtctc

SEQ ID NO: 46377 - DNA, 83 bp, Homo sapiens
aagaaaccatctgttgttgtgcctctggaggttccagcaacagatagaaatgctttaagttcactctggggaaagctggcctc

SEQ ID NO: 46378 - DNA, 100 bp, Homo sapiens
ttcgttatggacagcatccaaacattatcactctaaaggattgcacagccagaggacaacacatcacacacaagaaacagttgtgctcatgtgatggggg

SEQ ID NO: 46379 - DNA, 100 bp, Homo sapiens
gcactggagctgtcctgaaggtactctcgcaggaaatgggaattctacttgtgtggcttcctgcagatttcacaaaactgcatcttactgacagtctcca

SEQ ID NO: 46380 - DNA, 75 bp, Homo sapiens
acgaggtcaccccgcggatctacgtgggcaacgcatatggtgtaagatacttcttcaagattggacagctgggga

SEQ ID NO: 46381 - DNA, 83 bp, Homo sapiens
gttctatgaaacagtgtatcaaagtgtggactgaggttatggaggttttgatgactatggtggctataataattacggctatg

SEQ ID NO: 46382 - DNA, 75 bp, Homo sapiens
tggatatcttcggggacctgaagaagatgaacaagcgccaggtggatggaagtttgcttagttgaagaattgcca

SEQ ID NO: 46383 - DNA, 82 bp, Homo sapiens
tggaaatcaaagtccaccatgtgcttttgcacatccaacaatgcagatcttcgtgaagactctgactggtaagaccatcacc

SEQ ID NO: 46384 - DNA, 75 bp, Homo sapiens
ctcaagatggagactttgactttatttggaggccaatcactgccaccttttatttccctgtgggtccaggaactg

SEQ ID NO: 46385 - DNA, 90 bp, Homo sapiens
ctacaggaatcaggaatacttgacccacaggattattctacaggtgaaaaggccatgtggaagtgttacatcaccttttgcttggaaaga

SEQ ID NO: 46386 - DNA, 83 bp, Homo sapiens
gaggccggcatcgtctttccgtcctctgaggcgacggccgcggctgcacaggaatcaaagatcaactcccactgaggacaaat

SEQ ID NO: 46387 - DNA, 101 bp, Homo sapiens
cgcaggcccccccgcgccgaccgcgttcctatggacagacgcacagacacctgcagggaccactgacatttagggatgtggccatagaattctctctggag

SEQ ID NO: 46388 - DNA, 82 bp, Homo sapiens
gatccagcctgcggagcctgtggggcagactgtgagctgcttgtccccatcctgcggccgtcctggggacacagagccctcc

SEQ ID NO: 46389 - DNA, 122 bp, Homo sapiens
gttctttgtacgacttaccttacccagcagctccaaactgcaagtgtatattgttcttgcaggtggtccattatggctgacatgcaaaatctggtagaaagattggagagggcagtgggccg

SEQ ID NO: 46390 - DNA, 90 bp, Homo sapiens
gcctttgccgtggccggctgcagcgtgcagccctgggagagcctttcctccaacagccacaccagaattaaagctatagagagtcccaac

SEQ ID NO: 46391 - DNA, 100 bp, Homo sapiens
tggactgaaacgatcctctcatctcagcctccaaaagtgctggcattacagcttgaggcagccctaggtgaggccaagaagcaacttcaggatgagatgc

SEQ ID NO: 46392 - DNA, 100 bp, Homo sapiens
cgttgctggtgacagcaaaaatgacccaccaatggaagcagctggcttcactgctcagctggcccgagataacttcttccgctgtggtgtgctgtatgag

SEQ ID NO: 46393 - DNA, 100 bp, Homo sapiens
tccagatggcagccagtcagtggtggaggtggatgaaactcagtttaagaagatcctcggctacatcaacacggggaagcaagagggggcgaagctgctg

SEQ ID NO: 46394 - DNA, 100 bp, Homo sapiens
gcagtccagaccatgtgttaaagaacaccatttctgtcaaggctgtctgtgactacaggcagatcgaggatcgtagggcatcagaaaaacaaaaagaaat

SEQ ID NO: 46395 - DNA, 75 bp, Homo sapiens
aagtgcccggacccaaaacaggaatgcagtcattggagaaatcgatgaagaaacagattctgcgcttgatttggg

SEQ ID NO: 46396 - DNA, 100 bp, Homo sapiens
cggctactgccgcttcagttctcccggtgtggccacgagtcgggctcatcagattcaagagatgtttccccaggttccataccatctggtactgcaggac

SEQ ID NO: 46397 - DNA, 80 bp, Homo sapiens
agcgcttcatgtgcaaccttgactgccaggaagagccagattcctgcatcaggcctctctgctgatggtggtgccaagcg

SEQ ID NO: 46398 - DNA, 90 bp, Homo sapiens
gagtaatgctccttcaacaaggtcttaatgacagatcaggtaggataattgcggactgaaccctcgggctgcggtcatatatgagaactt

SEQ ID NO: 46399 - DNA, 82 bp, Homo sapiens
cgcggtcggtcggcgcctgttctcgggctgtttggcgggatgcagcaccgaggcttcctcctcctcaccctcctcgccctgc

SEQ ID NO: 46400 - DNA, 50 bp, Homo sapiens
atgatgtgggccatggtgtcaaggaatgtatcctgtcaggtataatgtca

SEQ ID NO: 46401 - DNA, 93 bp, Homo sapiens
tcagttggaagcagccgatccagcctgcggagcctgtggggcagattacctaggaacagtacgatttggggttatcacaaataaacatcttgc

SEQ ID NO: 46402 - DNA, 82 bp, Homo sapiens
gctgcttcaatgtccgcatcgcaaccaccgccctggccatctaccatgtggaatactcccccagttgcaagaggcgcaggac

SEQ ID NO: 46403 - DNA, 90 bp, Homo sapiens
ctggcagttttgccaggtgtttgttaccttggaattgaatgatctggcacgggaccctccagcacagtgttcagcaggtcctgttggaga

SEQ ID NO: 46404 - DNA, 90 bp, Homo sapiens
agtcggtgtttggagaaaaggactcaggtgtcatggagaaactccagctgggcccagagattctgcagcgggaaaatccaaggcttattt

SEQ ID NO: 46405 - DNA, 100 bp, Homo sapiens
gtccctgccaaggccattgccagtgccctacatgggctttgtgcccagatcatgtttgagaccttcaacaccccagccatgtacgttgctatccaggctg

SEQ ID NO: 46406 - DNA, 90 bp, Homo sapiens
cagtataacataaacgtagcagcctcacctttccgctgtgcccattgccattactcctgcaacatatctggctctctgaagcggcactac

SEQ ID NO: 46407 - DNA, 101 bp, Homo sapiens
cgccgccgggtgcctcgagggcgcgaggccagcccgcctgcccagcccgggaccagcctccccgcgcagcctggcagagtgatcagcagctggactgtgcc

SEQ ID NO: 46408 - DNA, 100 bp, Homo sapiens
cagcacattgccagtgtccgggaggccctgggggtggagtctcactactcaagaattctgcttggtcagaatcgtgatggcattgtgttcagcactgatg

SEQ ID NO: 46409 - DNA, 90 bp, Homo sapiens
aggagctggtgtcttcatccagaagggacagtttgtgccagctctccagagagaaaagatgacatcatggattcatcccttacccgccgg

SEQ ID NO: 46410 - DNA, 82 bp, Homo sapiens
gaggactacgaccgtctccggccgctctcctatccacagacggcaccatatctggaaatcaagaagcaaatggataaacagg

SEQ ID NO: 46411 - DNA, 98 bp, Homo sapiens
tcgctgctccgcgcgcgcgcccggcggcgctccaggtgctgacagcgcgagagagcgcggccctcaggagcaaggcgtttatcatctggacttcaagc

SEQ ID NO: 46412 - DNA, 101 bp, Homo sapiens
ccttacctaccacgatgtgggactcaactgcacacaagaattgtgggcagatgagtgagattgaggccaaggtccgctacgtgaagctagcccgttctctc

SEQ ID NO: 46413 - DNA, 75 bp, Homo sapiens
gaagaaactgaggttcagagaggttaagagactccactgaggtcacacagccgaacatccagtcatggataaaaa

SEQ ID NO: 46414 - DNA, 100 bp, Homo sapiens
ggacttcgtggtagaatccattggctctgaagtggggtctctggattttgaagatgtaactgagtttctggaagaggtcattgaagccttgatattggat

SEQ ID NO: 46415 - DNA, 75 bp, Homo sapiens
ccgctgctggcaggccagctggatcgaacagaggctgcaaatagaataatatgtactatcagaagtaggagacct

SEQ ID NO: 46416 - DNA, 82 bp, Homo sapiens
cacatgttcctagcaaagaacagacacattcaaaaactttacctgattactgacagccctgtcctaggagcacaacgtccga

SEQ ID NO: 46417 - DNA, 98 bp, Homo sapiens
aaaggatcaacgtaacgtgagcatgaggttttccaatcaggagaagatgtatggtcttatgcaaagggacttcctcacatgtttcagcagggtggtgt

SEQ ID NO: 46418 - DNA, 98 bp, Homo sapiens
atgggtacggaggcaactcggcgacagcaggctacagtactgaggacaaatcagttctctgtgaccagacatgagaaggttgccaatgggctgttggg

SEQ ID NO: 46419 - DNA, 100 bp, Homo sapiens
tcatgggcaaaggacagatccaggaagttgaccagcagattgtaatctacacgaaaggctgtgtgccccagtttgagaagtggttgcaggacaatttaac

SEQ ID NO: 46420 - DNA, 100 bp, Homo sapiens
caggcagtggctgctcaaagccctccagcagttcccgtgccctccctcccactggctcttcgggcacatccaggaggagttaagtatgacattgacctgc

SEQ ID NO: 46421 - DNA, 75 bp, Homo sapiens
ggcggcgcggcagcggagggacggcagtctcgcgcggaggaggaagccaagaatctggtgagcgaagccatcgca

SEQ ID NO: 46422 - DNA, 75 bp, Homo sapiens
cgcaaaatcccaaagcaaaattaccagggttgagcaatgtttaaagcgtttgaaaaacatgaatttggagggctc

SEQ ID NO: 46423 - DNA, 104 bp, Homo sapiens
atgactacccagggagaggaattacgggaacagaaagaaaagtccgaaagagctgatgttgttattcatgaggaccaatggattggcgagacagtactacaatc

SEQ ID NO: 46424 - DNA, 90 bp, Homo sapiens
cccctgttccgaggtcaggaggatgcaagtcctgacagattcagcaacactgtacccgcaagatggagtacaagggcagcagctggcatg

SEQ ID NO: 46425 - DNA, 90 bp, Homo sapiens
agtctactgtccaattctgtttactctgaattaccatcagctgaagggaaaatgaaggcgcctccttggcattataacaaaaaaagatat

SEQ ID NO: 46426 - DNA, 98 bp, Homo sapiens
ggacatcctggagatgaccgtgagacacctgcggagcctgcgtcgcgtgcaggtgacggaatgtggccccgtcccagagcaccacccgagacatcagg

SEQ ID NO: 46427 - DNA, 75 bp, Homo sapiens
atccgtaggaatggagagggaccggatctcagtccctgaagaggaaggagaaggaatatgagcatgaaatggagc

SEQ ID NO: 46428 - DNA, 100 bp, Homo sapiens
ccctgttcttcttgttatctttccttggctactgtaaagcatttagagaaaactcctcatcgacatggtgccgagggtgaggcagacacgtcactacgag

SEQ ID NO: 46429 - DNA, 96 bp, Homo sapiens
caatcaccatggcaccatgcaaggggggcactacacaggtggttccatcaaggtcctaatccctacaatggagcacaggactggatttactctggc

SEQ ID NO: 46430 - DNA, 90 bp, Homo sapiens
aactggggctgcgagttcgcaaggcgtataagaggccccagaggcatttcatccttcatgaagccattcaggattttgaattgcatatga

SEQ ID NO: 46431 - DNA, 75 bp, Homo sapiens
ttggcagatcactctcttagcaggcaggatggggaagcagaatagcaaactggcccctgaagtgatggaggacct

SEQ ID NO: 46432 - DNA, 90 bp, Homo sapiens
caaggacccggacgcgaccaggggaggcagaagctgaaaatgtgtgtctgacatgcaagctcagtggggcagagacccgtggattgctgt

SEQ ID NO: 46433 - DNA, 82 bp, Homo sapiens
ctgcgatggactattccctggctgcagccctcactcttcatggtcactgtttccaacatggctagatccatcagaaactgaa

SEQ ID NO: 46434 - DNA, 101 bp, Homo sapiens
aatgaagacaggtaatgtggaggaaagagagcttgtcatgaacaatatgatgcgtttgtgaagtttacgcatgatcaaataatgcgacgatatggagaaca

SEQ ID NO: 46435 - DNA, 100 bp, Homo sapiens
agctggagctggagctgtcggaagatcctgatgcagctcaagctaataagaaccatcaggatgtccggagttatgtacggcaattaaatgtgattgacaa

SEQ ID NO: 46436 - DNA, 87 bp, Homo sapiens
acttcgggacccacaacctttaagcagcagaggagcacgaggatcgtgggagctaagaattttagaaagagcgttttcgctacgtaa

SEQ ID NO: 46437 - DNA, 83 bp, Homo sapiens
ctaatttctgaccagaagccctccctctaccctaaggaagcttgctgtcttcgatacgtggagctccttggcggtccacattg

SEQ ID NO: 46438 - DNA, 97 bp, Homo sapiens
tcaagtacaactcccggcacgaggctgcctctaagaatcaaacttcactcttgggagaaccaccaaaagaaattcggctcagtaaaaatccatactt

SEQ ID NO: 46439 - DNA, 75 bp, Homo sapiens
acgagctcaaaggacactatgcaatcacccgaaaggggttggctgtgttccggccgcagagcaccgtctgcgtga

SEQ ID NO: 46440 - DNA, 73 bp, Homo sapiens
tcctgggtagctgggattacaggctgttaaaagacataatctgactaaaagatggcttatgaaaatcgtcgat

SEQ ID NO: 46441 - DNA, 82 bp, Homo sapiens
tgggacgtccaaggatgatgggcactgacttcctccagtgttcagcagcaaaatgatgctcacttgcacagcttcagcatga

SEQ ID NO: 46442 - DNA, 100 bp, Homo sapiens
agtgcagaatgggattgatgcagacgtcaaagattttagacactctcgaaagcgatgggaacgctttgtccacagtgaaaatcagcaccttgtcagccct

SEQ ID NO: 46443 - DNA, 100 bp, Homo sapiens
acacatttccagcaggctgcagatacgagtggacaaatacctttgtctggatatggaggaacaagcaatcttattttggaaggcgttaaaaaattatctg

SEQ ID NO: 46444 - DNA, 50 bp, Homo sapiens
cgagcacaacaggagctacgaggagttggcaacctcccgacttctagtaa

SEQ ID NO: 46445 - DNA, 87 bp, Homo sapiens
ccctagcaccttctccagtcgacactctcgcgcccggagattgttgccagcaaaggaggttttgaaatggtcaccaaagagaagaaa

SEQ ID NO: 46446 - DNA, 75 bp, Homo sapiens
gtcttcctgcccaacaaacagaggacagtggtggataagattgtggaccagctgcagcagttaatgcaggtgtat

SEQ ID NO: 46447 - DNA, 100 bp, Homo sapiens
tggagctattaccctgttggaggaagccatacacctgcctgtggccctttctcagccctgactccgagcatatggccccaggagatcttggccaagtaca

SEQ ID NO: 46448 - DNA, 100 bp, Homo sapiens
cacacgggagaattactagcgacaggggacaaggggggtcgggttgtaatatttcaacgagagcaggagatgatgattcagatctgtactctcccagata

SEQ ID NO: 46449 - DNA, 76 bp, Homo sapiens
aacttttcgaggcatttgacttgtttgatgttcgtgactttggaaaggctctgccgacttccagttctggaacaag

SEQ ID NO: 46450 - DNA, 95 bp, Homo sapiens
cgagaccctggaggccgtgcagcgggagagccggaggctgccgcccatccagaagatgcaagtgctgctggaccaggcgggctgctgtatcgtgg

SEQ ID NO: 46451 - DNA, 100 bp, Homo sapiens
ggaaatcttcaaaattgcctcaatggcccccggggcgctgctcctggaggctcagaaggagtatgaggtcctggttgtgtgggacgaaacctctaacaaa

SEQ ID NO: 46452 - DNA, 100 bp, Homo sapiens
gaacattataagaatttcaagcaggcctgaaggattaacatcaacagggaagatcagttttcctgccatccaggctgctccctccttcagcaactcattc

SEQ ID NO: 46453 - DNA, 82 bp, Homo sapiens
cgccctggggccggcgatgtgccaccgaggctgaggatgatggtagattgccagacctgcctagagctggaacgttacctcc

SEQ ID NO: 46454 - DNA, 100 bp, Homo sapiens
agcagatggtgtatctcaggagctcttctctgctggcttggtggatggtcacgatgtagttataggtgcttttgaagatgatgatatcacgcacgttgaa

SEQ ID NO: 46455 - DNA, 73 bp, Homo sapiens
ttggattatgatgaagatgctagtgcaatgctgaaagaagttcaacctaggggcatacggagtggtgtccatg

SEQ ID NO: 46456 - DNA, 100 bp, Homo sapiens
ttgaggagtgatccctgtcccagcccctggaaaggggcaggaacgacaaactcaaagtccaggctcatatctggtgttagtcggccagatgaggtgctcg

SEQ ID NO: 46457 - DNA, 93 bp, Homo sapiens
acaaacagcccgcccgaccccgtcccgaccctggccgccccgagcggagcctggaggaacaagatcactcaaggtgaaggataatctactaat

SEQ ID NO: 46458 - DNA, 89 bp, Homo sapiens
agagtttggagccccggagtggggtgtcggcgcctcattcgggtggagctgagccggagacaggtgaagcggaggctggacctggaaac

SEQ ID NO: 46459 - DNA, 90 bp, Homo sapiens
cagccatggccgaagcggcgcctgcccgggacaagcatgctaaaggcacaccaagtgactacaagaaatttaagccttgcagtatcagac

SEQ ID NO: 46460 - DNA, 83 bp, Homo sapiens
cttcaacaagccagatatagatgcctgggaattgcgtaaaggtgagcgagtgctgtgctttcatgggcctcttctttatgaag

SEQ ID NO: 46461 - DNA, 58 bp, Homo sapiens
gactgagagatggctattatatccaagaaaagcacttggttctgcttcgagatggaag

SEQ ID NO: 46462 - DNA, 100 bp, Homo sapiens
gtctgccaccatcctgggttgacaattctacacaaggagagctaagcttgtctgctggatccctgcagctggagcgcaaaaggagagatttcacctcttc

SEQ ID NO: 46463 - DNA, 75 bp, Homo sapiens
cccccttataagccaaaagctcgtccagaggaccagaggttaatttattctgggaagctgttgttggatcaccaa

SEQ ID NO: 46464 - DNA, 100 bp, Homo sapiens
tgcctgttgtcttctccctcaggaccttctgagcttctcactcaaggatgaatgaccagtcaacaggggacataaaagtaattggtggagatgatctctc

SEQ ID NO: 46465 - DNA, 90 bp, Homo sapiens
aaaatgtggcatctgcaaccgttttcactctgctactttttctcaacacctgccttctgaatgataagctgtcggcctcttccccgtgaa

SEQ ID NO: 46466 - DNA, 100 bp, Homo sapiens
gagcgctcccaggagaaacaagtgaataagtctgatgacacagcagaacatcttctggagttgggctggtttaccatgaacaacctcctccccaatgctg

SEQ ID NO: 46467 - DNA, 100 bp, Homo sapiens
gaaggaattgtcaatgggcatactttgttggttgcatctgctaaagaggatcctgccaacattttacagccagtcagaaatcttccaacttggaagggag

SEQ ID NO: 46468 - DNA, 75 bp, Homo sapiens
cctcctgccagccccagcccctggagaggatgcaggtgggagatgccatcccagcagtggaggtgtttgaagggg

SEQ ID NO: 46469 - DNA, 115 bp, Homo sapiens
ggccctgaagaccggatttcagtggacagtgatggcagtgatagctttgtgatgctcttggagtctgcatgtggagagggccaaatgtgaactgtgttgacagcactggctacac

SEQ ID NO: 46470 - DNA, 80 bp, Homo sapiens
gattacccgttaagtcccccaaagatgagatttacctgtgagatgtttcatcccaacactggtgcaactattatctcagc

SEQ ID NO: 46471 - DNA, 100 bp, Homo sapiens
cagacatatgaagaagttggagatgatgcattggaaggcagcggaggaggagaaagagatggacctcccggactcggcctcgagggtcttctgcggccgc

SEQ ID NO: 46472 - DNA, 90 bp, Homo sapiens
ggaaaatgtccttccagcgctgcgcccggacagacaaggacctgcttcacaccaccaagcatcaggatgtgttgctcagtgagcagaccc

SEQ ID NO: 46473 - DNA, 100 bp, Homo sapiens
ggccagtcgcctccaggccaagagggatccttcacccgtgtctggtcgaggccgaagccgtgaatcgtgccatcaccatcgccaaccagaccaactgccc

SEQ ID NO: 46474 - DNA, 100 bp, Homo sapiens
agcaaattctgaaaaacaccagtgatctgcataagattttcaattccctctggaacttggaccaaactaaagtggagcccagtgacaccatcgaaaatgt

SEQ ID NO: 46475 - DNA, 125 bp, Homo sapiens
gccgccgccgccgcccagagactgctgagcccgtccgtccgccgccaccacccactccggacacagccacttccggctcctgcgtcgctccggaagcctgcgagttccggaagccttggtaatcc

SEQ ID NO: 46476 - DNA, 90 bp, Homo sapiens
ctgaactgtacatgctcttcatcaactgcctggagcataccataaagtctccaaaggatggcacagtaaagaaagtgttctacagagaag

SEQ ID NO: 46477 - DNA, 100 bp, Homo sapiens
agaagtggtggcggcgggcggcgggcggcaaaggagcagccatgagggccgggcccagtcaccgaccgacatgtcctcatagagatttcaagtacccaca

SEQ ID NO: 46478 - DNA, 90 bp, Homo sapiens
gagggcggcttcgatgccatcctgcagacagctgtgtgcacgattcttggtgccaccattgagaactccaggattgtcctgcagatcgac

SEQ ID NO: 46479 - DNA, 51 bp, Homo sapiens
ctccaagacctcatcaacaattaaggctattcaagatctctggcagtggag

SEQ ID NO: 46480 - DNA, 75 bp, Homo sapiens
gagtcggcacctgaaggacatggagatggcagttgaattcctgcatgaactgaatgttccatttttcaaagttgg

SEQ ID NO: 46481 - DNA, 126 bp, Homo sapiens
ggccggcctgcggcggagggaaaaaggaagaggagaaggaaattgtcccgaatccctgcaggaatagggtttggtggtctggaagcaatgaatagcatgggaggatttggaggagttggccgaatg

SEQ ID NO: 46482 - DNA, 88 bp, Homo sapiens
agatacctctcgcatgtccacctcacagccttgaaaagatcttttgaggtcgaggaggtcgagacacccaactccaccccaccccgga

SEQ ID NO: 46483 - DNA, 90 bp, Homo sapiens
ggcaagcgagcccggggtagagatgagcggggctgacaccgttggggatgatgacgaagcctcccggaagagaaagagcaaaaacctgta

SEQ ID NO: 46484 - DNA, 100 bp, Homo sapiens
cgctctttggactaatgggagttgcttttggaatgaatttggaatcttcccttgaagaggctaatgtataccatgctagcacagcaaatggagagagcag

SEQ ID NO: 46485 - DNA, 50 bp, Homo sapiens
gaagaggatgatgtttttggtgaagatggaatcagtgtgagtggctttcc

SEQ ID NO: 46486 - DNA, 75 bp, Homo sapiens
gttgtatcgaggctataaaagcacagttttaagagagaaaggaatttatgatgaggcaataagcagcttctttag

SEQ ID NO: 46487 - DNA, 82 bp, Homo sapiens
cctcctgtacttgttccaactcaagtgctttgtaacagagccagactggtttcctatctcccaggattttgctctttagtta

SEQ ID NO: 46488 - DNA, 98 bp, Homo sapiens
tgtgttgacatcaaggatctaccagacaccatcatccgagcagtattgatttttgcagaaggaatttttacaggtgaaagccacgtggtacatcccag

SEQ ID NO: 46489 - DNA, 100 bp, Homo sapiens
ctcaatgtctgcagcagcgaagaggtggagaaagtggtggagattgtccgctcgagcctgaaggaccctgagaaagatgagctccttcaggagcagcgtg

SEQ ID NO: 46490 - DNA, 82 bp, Homo sapiens
ggcagtttgtcgaacgatgttggactcatagtcactgccagaaaggggacggcaaaacagaacagaaaggcggagataaaaa

SEQ ID NO: 46491 - DNA, 100 bp, Homo sapiens
cccggggagctgcaaggctcgcccctgcccggcgtggagggcgcggggggcgcggaggaatgaatctgaagtctgctgcagtaaaacacagaaggcttta

SEQ ID NO: 46492 - DNA, 75 bp, Homo sapiens
atgtagattgtgtgatgaaggacatggatatgggccctcacattttccaaacctgtccatctgctaactattttg

SEQ ID NO: 46493 - DNA, 90 bp, Homo sapiens
atttgatgcataaaggcagctttgaaacagaaaacgggccttactatacatcatatcccccatcaccagatttgtgacctgccatctttc

SEQ ID NO: 46494 - DNA, 96 bp, Homo sapiens
tgcagccggtgacccggcgagaggcggcgccgctcccaagatgtcgcagacggccatgtccgaaacctacgccacaatggtgcgcatgaatgtcct

SEQ ID NO: 46495 - DNA, 100 bp, Homo sapiens
tgcggacgcagggcacggcacgggggcgagaaggcgaaggctgcaggcgtgagctatgctaagaaggaatctgatcttaatggcgcccagatcaagcttc

SEQ ID NO: 46496 - DNA, 75 bp, Homo sapiens
tgtgtttcaactgctgtattgcagaacagcctcagcctgtcaaaatgcagatcttcgtgaaaacccttaccggca

SEQ ID NO: 46497 - DNA, 100 bp, Homo sapiens
atgaatgaaccttgccctggggttaacactccagtgggatgaacagacaaaccccacaagcactgcatacgggctctccaatgtcagatgtggtcagtag

SEQ ID NO: 46498 - DNA, 75 bp, Homo sapiens
cggcggctgcggcccaatataggagattacctggggcaattgatgttatcggtcagactataactatcagccgag

SEQ ID NO: 46499 - DNA, 100 bp, Homo sapiens
ggtgcggacccagcacgcctgggccgggggctgcagcatgggccaattcctgtccccccagcagcatggcatcgtgtgctgaaccctctgagccctctgc

SEQ ID NO: 46500 - DNA, 100 bp, Homo sapiens
cagaggcgctggagctgggtcagtccgccgctcaccccgcggccgcaccttcccgccttctcagaaccccatgcatcccagctcaaggtggtcagagcta

SEQ ID NO: 46501 - DNA, 100 bp, Homo sapiens
taagggtcttcatataccacgattaacagaggattttgtgattgggaagctccatgaagattactttgaacaaactgtctgaaacttgaaacttccaata

SEQ ID NO: 46502 - DNA, 100 bp, Homo sapiens
gacctgattacttatctggagcaaggaaaagagccctggaatatgaagcaacatgagatggtggatgaacccacaggtgtcatagagacgtcagatcgac

SEQ ID NO: 46503 - DNA, 88 bp, Homo sapiens
atattatacagtgcgacagctagaattggaaaaccttacagaaacttttgagaagaactttgaaagagaaacccataaaataagtgag

SEQ ID NO: 46504 - DNA, 74 bp, Homo sapiens
ggatcctgaagcctgcgaggaaagggcaattgaaggaacagactaaaaatcgtgtcctggaaggaaactacagg

SEQ ID NO: 46505 - DNA, 51 bp, Homo sapiens
cttggagtgaaggctgttagtcgccgcatatctcttccaaacgcatgatga

SEQ ID NO: 46506 - DNA, 59 bp, Homo sapiens
ggcccggagcccccagcgcagcggccgcgagtgatgacagacctaatgctctattaagt

SEQ ID NO: 46507 - DNA, 50 bp, Homo sapiens
actccctggagaagcagatggaaaaggcagaaaacattgtgctgttagag

SEQ ID NO: 46508 - DNA, 73 bp, Homo sapiens
tgttaatatccttttcttctgattgttattaacagttttccacctatttccctggatattttgatggtcagta

SEQ ID NO: 46509 - DNA, 74 bp, Homo sapiens
aggcggtcaccaagtacaccagctcgaagggccagtgtcattcaaagatgtggctgtggatttcacccaggagg

SEQ ID NO: 46510 - DNA, 76 bp, Homo sapiens
tgcaatgttctttgcatgttactgtgcactccggactaacgtgaagacatcaattttcattccagcctttgaatca

SEQ ID NO: 46511 - DNA, 88 bp, Homo sapiens
acccagagctattgccttagatccttcaagtggatttctggtgttcagcaaattcagttttcatgatctgaagaaatgatggaatggg

SEQ ID NO: 46512 - DNA, 75 bp, Homo sapiens
cgagccctaacatccagccgtccccagctcacggaagatcccagtgtctgagtgaactaacagtcctgctttcag

SEQ ID NO: 46513 - DNA, 88 bp, Homo sapiens
ggatcttctggggttccctatgcaaatgccaaaggaattggttatccaggaagctaaactccaaggtggaaaggagtcagagctgtag

SEQ ID NO: 46514 - DNA, 100 bp, Homo sapiens
gttctctactccagagctccgacttatttctgtgggcagacattaacattcaggttattcagcttctcaaggctggaaaagcgaaggaagtttcctacaa

SEQ ID NO: 46515 - DNA, 76 bp, Homo sapiens
gagagcagggggatggggcagaggacgaggagtgggtgctgaagggcctgaccatcactcattaagaacagaggag

SEQ ID NO: 46516 - DNA, 75 bp, Homo sapiens
ctggagccccatattttgcagcaatctcagctctcaaagtgcagaaaaatatggctcaggagactaaccagaccc

SEQ ID NO: 46517 - DNA, 99 bp, Homo sapiens
aaatagctagtgccacccacaacatctatgcctacaggatctgcaatcagaactattgaacttctccattcagaccgccactcacacctatgggaaaag

SEQ ID NO: 46518 - DNA, 96 bp, Homo sapiens
gagtaaagtcagcatgagcaaaaactccaaactcctctccaccagcgccaagagaattccagtgctgaccatcgagtccgactggacctgggcctc

SEQ ID NO: 46519 - DNA, 99 bp, Homo sapiens
aactgaacaaacattgaacaagaacataaagtactaacattatgcacaagcaaaggggggaaagtggagatgacattggaaatcctcaacgagaaggag

SEQ ID NO: 46520 - DNA, 75 bp, Homo sapiens
tgacattgggggcctgtggaaattttcatacctggagtagaacagaaaaattattatgtctgtgttcccttggga

SEQ ID NO: 46521 - DNA, 100 bp, Homo sapiens
ctagagatcaaacttcgacattttgaagagctggaaactatcatggacagagagaaagaagctatccaagaaaacattcttggccaaaatctaggggaag

SEQ ID NO: 46522 - DNA, 100 bp, Homo sapiens
ctgacagatgccagcgtagctgaatccagtaccaaaaacgtcaacaacagttttacggcatgcccaagagaatcgtaaatgcaaaaattgcttgccttga

SEQ ID NO: 46523 - DNA, 74 bp, Homo sapiens
gtggactacttccccgagttcgatgacaatgcagatcttcgtgaagactctgactggtaagaccatcaccctcg

SEQ ID NO: 46524 - DNA, 98 bp, Homo sapiens
gcctgcccagacggctcacctgtgcgggatggaacaaaagagtcaacacagactgtccaagctctgcagtattcaactgttgatggtccactaacagc

SEQ ID NO: 46525 - DNA, 75 bp, Homo sapiens
gtgtcgcacacgcacctcggagtcttgtagaccctggagttaaggcatggacacccactaaaggaaaacaaaatg

SEQ ID NO: 46526 - DNA, 100 bp, Homo sapiens
ctggaggagatggacttcgagagggataatcatgatgtcatttccttgaagttgtttgaactgacagtggagagaaccccagaagaggaaaagctccatc

SEQ ID NO: 46527 - DNA, 100 bp, Homo sapiens
actgacctgtaaatcatcctttaggttgacaatggtctccaggatggtctctaccatgctatctggcctactgttttggctggcatctggatggactcca

SEQ ID NO: 46528 - DNA, 100 bp, Homo sapiens
ctggagcacttgagccacgtgcatgaaccaaacccacttcgttcaagacaggtgtttaagctggaatcccccaaagaaggtaaagggagcaagccttccc

SEQ ID NO: 46529 - DNA, 98 bp, Homo sapiens
atgactccaaggagaaggtggtcatttcctagagtctggcttgtcagttatatctcagtgagcctgctgacccttgtggtcactgcctgtggtctcgc

SEQ ID NO: 46530 - DNA, 87 bp, Homo sapiens
gaggagcggccggagtcagcgatggtgcccggcgaggagaaccaactggtcccgaaagagttgtgattccaaagaatccctatcctg

SEQ ID NO: 46531 - DNA, 144 bp, Homo sapiens
ggacattccagcaaccgctatggatttctccatgagagatgatgttcctcccttagaccgagaagtaggagaatcagcatgattcttcagaggctcttcaggttctcctctgtcattcggtcagccgtctcagtccatttgcgg

SEQ ID NO: 46532 - DNA, 80 bp, Homo sapiens
gtctggagcctggactggcagcaggccctgcagggtggcccagttgaaatccttcccttcctctaccttggaagtgccta

SEQ ID NO: 46533 - DNA, 100 bp, Homo sapiens
tgggcccgagccaggccggagctgaggagaacgactgggttcgcctgcccagcaaatgcgaagaaagctgtatgtgatggcttctgtgtttgtctgtcta

SEQ ID NO: 46534 - DNA, 101 bp, Homo sapiens
agactctggagccagactgcctgggtttgaattgtgcggtttcaggttacctagggtatgaattaatacagacttggaaactctgaaagaacttagaatca

SEQ ID NO: 46535 - DNA, 83 bp, Homo sapiens
caacggctcaagaatttcaagaacaaaggccgcgacttggagcaaaatgatgcttcaacacccaggccaggtctctgcctcgg

SEQ ID NO: 46536 - DNA, 100 bp, Homo sapiens
gcctcccaagtagctgggagtacaggtccggtgtctaaaagactatggagaatttgaagttgatgatggcacttcagtcctattaaaaaaaaatagccag

SEQ ID NO: 46537 - DNA, 75 bp, Homo sapiens
ccggggcttgccctggtcttgctcggccgatgaagtgcagaggtttttttctgagtgaacctctgtatgtgcctg

SEQ ID NO: 46538 - DNA, 75 bp, Homo sapiens
gcagaaaccccgttgacaaggcactgctttttcatgacgaagccccatgtgccactcccctgatctgcagcttcg

SEQ ID NO: 46539 - DNA, 98 bp, Homo sapiens
ttattgataacctgtatcctgaagagaagttggactgtgttatagtagtcttcataggagagttgggcatcgatgggctgattgttacgaacaccacc

SEQ ID NO: 46540 - DNA, 75 bp, Homo sapiens
accaaccttgcctcctacctttcatccggaagaagagagaattcctctaatattattccacaacagatggccgcc

SEQ ID NO: 46541 - DNA, 75 bp, Homo sapiens
cgaagctgccggagccctctgtcctgatgattgccgccgtggacacagactccccccgagaggtctttttccgag

SEQ ID NO: 46542 - DNA, 75 bp, Homo sapiens
ctgcggagggccagtggactcaggaatcagttgattgggttggagactacaatgaaccattgactggtttttcat

SEQ ID NO: 46543 - DNA, 100 bp, Homo sapiens
ctgctgtttctcttcgccgacgctcctacagaagaagggaaaaaagagctgctgttcctaagtaacgcgaacccctcgctgctggagcggcactgtgcct

SEQ ID NO: 46544 - DNA, 76 bp, Homo sapiens
aaagaatgtcctttcagagtcaacaaggtggtcaccatgggccttttccgcactattgctttgttttaccttggaa

SEQ ID NO: 46545 - DNA, 75 bp, Homo sapiens
tcgaccccaacagcaggaatagctcccgatcaccctgagactataatggaagaagtgaaaataaagccacctaaa

SEQ ID NO: 46546 - DNA, 75 bp, Homo sapiens
tcagttggaagcagccgatccagcctgcggagcctgtggggcaggaatacatgcaccacctgctcgccctggagc

SEQ ID NO: 46547 - DNA, 101 bp, Homo sapiens
gagacgccattggatgttttgtccagggcagcatctctggtgcatgctgatgacgaaaaacgtagttacttttggtgacgctgtccagttcccacaatgta

SEQ ID NO: 46548 - DNA, 100 bp, Homo sapiens
gccacgtgcagacatctacaaccttcgatctcctgacgagttgtgccatgagtgggctaattgctgatgctaagactttaattgataaagccagagtgga

SEQ ID NO: 46549 - DNA, 50 bp, Homo sapiens
ctcacagcccgacgaaaggatgccaaattttccctgaaacctgggctctt

SEQ ID NO: 46550 - DNA, 101 bp, Homo sapiens
cggcggccgaagacactgcgactccggagacagcccaaatatcctcggaagagcgctcccaggagaaacaagccaggtgtggtgtcttacacctgtaatcc

SEQ ID NO: 46551 - DNA, 76 bp, Homo sapiens
gaaatacttcctgtttggcttcaacattgtcttctgggtacaaggattccttgaaagaagacattcagaaagcaga

SEQ ID NO: 46552 - DNA, 80 bp, Homo sapiens
agtttaagaaagcaaagagcaggttcttcatcttcaaaaatgaacagtttggccctgggaggagcggggacactgaggac

SEQ ID NO: 46553 - DNA, 82 bp, Homo sapiens
ccctatgagcagtggaacctagggttgtgaactaaaggccgacaaagattatcactttaaggtggataatgatgaaaatgag

SEQ ID NO: 46554 - DNA, 100 bp, Homo sapiens
accacgctacgggcctttacctgcgacgacctgttccgcttcaacaacatggactaggccctggccaggcccccgaggtggcccccacgcggacagcccc

SEQ ID NO: 46555 - DNA, 100 bp, Homo sapiens
tggttacctatgtacctgttaccactttcaaaaagggaatctggaaaaattgcaatcaaaacatcatttctctaagaaaattttgggtaaccgaagttct

SEQ ID NO: 46556 - DNA, 82 bp, Homo sapiens
cggaggctatgctgatggagagagaaagttcgtcgctgcttcctgtgctccaggagaggacatctcctgtattcctgtccag

SEQ ID NO: 46557 - DNA, 98 bp, Homo sapiens
caatgccatccagagctgtgcctcccagcaccacagtccttctgcagtccctcgtccagccacccccagacctccttgaggcccgccgcccgcgggcc

SEQ ID NO: 46558 - DNA, 82 bp, Homo sapiens
tgggagcagctggctctgggccttgaacattccgaaactgtcaagattggcaagtactgccaaatctgtcgaaagggagata

SEQ ID NO: 46559 - DNA, 75 bp, Homo sapiens
tccgccatgcaaggctggcgcgtctccatggagacagcttatctcctgtgctgcacccttctgatttgatcctga

SEQ ID NO: 46560 - DNA, 51 bp, Homo sapiens
tcatccctaagggtcctaaccgggggtggttatcaccaggctaaaactgga

SEQ ID NO: 46561 - DNA, 100 bp, Homo sapiens
gtcccgcacacctggcagcaaaagagggttgtggacttcctgctgaaggccatcatgcgcaccatgtggttcgccggcggcttccaccgggtggccgtga

SEQ ID NO: 46562 - DNA, 82 bp, Homo sapiens
tcgtcagcactgactttcagctatggaatcggaacaagatcactcaaggtgaaggataatctactaataccagcactttgaa

SEQ ID NO: 46563 - DNA, 74 bp, Homo sapiens
ttaaaaaatttattaaaggaagcacacctaaggaccttgcctcatagtattcgatcagattcagaagatatctg

SEQ ID NO: 46564 - DNA, 98 bp, Homo sapiens
tgactgggcggtgccggcgccggagacgatgccgttctcttcctgctgcccacattcctgcaccccctcatgagggtagtcccagagaccaggcgatg

SEQ ID NO: 46565 - DNA, 74 bp, Homo sapiens
ggcatcgtgtggcaggaaacagaagatggagttgttcctttggccacatatatgcgaatctataagaaaggtga

SEQ ID NO: 46566 - DNA, 74 bp, Homo sapiens
gtccctgaagagggaagacacgcggaaacagaatggagatgagaaggcagagccatcgcctcagtcttggtctt

SEQ ID NO: 46567 - DNA, 75 bp, Homo sapiens
tgaatcccagtccctgttacggaaggacagaataacgggctcccagattcacaagccccaccaagaggatcaccc

SEQ ID NO: 46568 - DNA, 74 bp, Homo sapiens
gagaccatattctacggggctttcagcaaatcaaagccaggacttacaaagtacccaagcatctagtctggaac

SEQ ID NO: 46569 - DNA, 100 bp, Homo sapiens
acctccttgttgaaccgtggacaagggatggtatataagaatgtgattctacaagttccagtgggactgactgtacatacctctctagtatgttctgtga

SEQ ID NO: 46570 - DNA, 100 bp, Homo sapiens
caaggaggagaatgtgagaaaagggggaaaatgcccaggaggaagcaggagcagcccaagcgccttccctcactggaagcatcagttcacagcagtaatg

SEQ ID NO: 46571 - DNA, 75 bp, Homo sapiens
gtacgactcagtgccagagaaccgagcatccagtcatctcctataaagtgacagaaatgttggtaaatgttctga

SEQ ID NO: 46572 - DNA, 101 bp, Homo sapiens
gggcgggcaggcccagctgagaggtgcgcgggcgaggacagcggcagcgatgggaaatcctcattgacgattcaatttgttgaaggccaatttgtggactc

SEQ ID NO: 46573 - DNA, 100 bp, Homo sapiens
taaaggatcatttgctggtgtctacagagctgagtccattcacactggtttggaagttgcaatcaaaatgacagattctttcaaaatgggacaagagttt

SEQ ID NO: 46574 - DNA, 75 bp, Homo sapiens
ggcttaaaagaagactcacagattttgaaaattagattactacctggctattcaagatctctggcagtggaggaa

SEQ ID NO: 46575 - DNA, 89 bp, Homo sapiens
gggccagcgggtcatcgggcactacgctggagaagatgcaacggctcttgtcaggatggtgaagctgttcatcggaaacctgccccggg

SEQ ID NO: 46576 - DNA, 100 bp, Homo sapiens
ctcctgagtagctgggattgcaggccctggttcccagacatcatctctgaacctgctgggggaatttgccaccctgaaaggaaggacacaagcccagctg

SEQ ID NO: 46577 - DNA, 90 bp, Homo sapiens
atcaagtaaaaacaatagctcaaggaaacctttccaacacagatgtccaagctgccaaatgttttgaacagagataaggatgaggagcca

SEQ ID NO: 46578 - DNA, 75 bp, Homo sapiens
accccaaggaccaatgggtatccctggaatcgggagtcaaggggaacaggtcccgaagatggcatattcataaag

SEQ ID NO: 46579 - DNA, 80 bp, Homo sapiens
cacttcttctgggcccacgaggcagctgtcccatgctctgctgagcacggtgactcagattgatggacaacttttcttaa

SEQ ID NO: 46580 - DNA, 60 bp, Homo sapiens
gctcggcccgcgggggagccccgggagccgcacgatgagattgtggggaacctgggtgaa

SEQ ID NO: 46581 - DNA, 75 bp, Homo sapiens
tgttggcggtccctgtgacctgtggagacacggccagatctgccctccagctaaaagagatgctaagagaatgcc

SEQ ID NO: 46582 - DNA, 51 bp, Homo sapiens
attctcagcaaggaacgtcatcggcaattcatgatgttaaagccacagatc

SEQ ID NO: 46583 - DNA, 100 bp, Homo sapiens
cttgagcagccttgcccagaagtatgctgagaaagcaacccagttcatccagcgtgcaagtgaagttattgccagtggactgtgagagaaaaacagatga

SEQ ID NO: 46584 - DNA, 75 bp, Homo sapiens
gctggacgtccggcggtcattgcggcggttccctcctggctgtgggtgagcgtggaggatgctcagatgcacacc

SEQ ID NO: 46585 - DNA, 100 bp, Homo sapiens
ggaccagaatgatctacggaagatgcagcttcgggagttggctcgcttaaatgggacccttcgggaagacgataacaggacaggtttcattaatcttgac

SEQ ID NO: 46586 - DNA, 74 bp, Homo sapiens
ctgcagaatctgttcagtcaaataactccagctcatttctgaattttgtgagaaagatcagtctaaagaaaagg

SEQ ID NO: 46587 - DNA, 75 bp, Homo sapiens
catggaggagatccggcggcagggcaagctgtgcgacgtgaccctcaagcaacacagtcactcctggcggcaaac

SEQ ID NO: 46588 - DNA, 75 bp, Homo sapiens
gtggaacagattcagaaggagcaggattaccaaagggctgttcggctcttgaatcccagcgatgaaaccaggaac

SEQ ID NO: 46589 - DNA, 80 bp, Homo sapiens
cttggactgagtcctgcaggacacagttactccacaggatccgctgaacataggatgttgccacaaaatctacctcgtgt

SEQ ID NO: 46590 - DNA, 100 bp, Homo sapiens
cgccactccacctggcctgcacctacggccacgaggacgcaacaagattgacctggctgaaaggagagaggtttcccagcagcgagctgaagaattctca

SEQ ID NO: 46591 - DNA, 75 bp, Homo sapiens
gtctcagccccatggggtatatccaccctcaagtgtgagcaacacctaccaagccatcctctccacggacgggag

SEQ ID NO: 46592 - DNA, 115 bp, Homo sapiens
gccatgtcgggttattcgagtgaccgagaccgcggccgggaccgagggaaggcaacagcccccaggggagcaaccagggagtcaaaatcacaccggaccagcagaagaggagcag

SEQ ID NO: 46593 - DNA, 75 bp, Homo sapiens
agtaatgcaatggtctcaatctctggaaaaacttcttgccaaccaaaaccaccatcatggcagtggagtttgacg

SEQ ID NO: 46594 - DNA, 82 bp, Homo sapiens
cgtcgccgctcccgaagcttttccagatagcctgggctggaagctcttctacgtcacaggctgcctgtttgtggctgtgcag

SEQ ID NO: 46595 - DNA, 100 bp, Homo sapiens
ctctgccctgtctgacagaactcattctcaccaataatagtctcgtggaactggatgatgatgctgaagctatccttgctgcagacttcgaaattggtca

SEQ ID NO: 46596 - DNA, 75 bp, Homo sapiens
caggccctgaggttgctcctcccggggcccttcccgggcaagatggcccactgcgtgaccttggttcagctgtcc

SEQ ID NO: 46597 - DNA, 100 bp, Homo sapiens
tccattggccagtatgaagtggtgaaggagtgtgtgcagcggtttgggtacccagaccccacctacctgacccgggtgcaagaggagctgagagcgaagg

SEQ ID NO: 46598 - DNA, 82 bp, Homo sapiens
ccgattcctcctccttggtcgccgcgtccttggctggcgtgttcttttttcgatcggggaaacagacctagatccaaggcca

SEQ ID NO: 46599 - DNA, 75 bp, Homo sapiens
cagcgcggcgcggggctgcggagtcgtccggagccgctgcgcgcaatcatcctcttccagtggtagcgtgtttgg

SEQ ID NO: 46600 - DNA, 82 bp, Homo sapiens
gcttgcagtgttgatggtggtggtgctggtcatcaatgttactcaggtagagccaaaagaatgcaatggtgtaaagattcca

SEQ ID NO: 46601 - DNA, 75 bp, Homo sapiens
gggttggcgacggcagcccgagggcggcgcaaggcctgaggcccagcacagctgaactttgacctggaccggggc

SEQ ID NO: 46602 - DNA, 99 bp, Homo sapiens
gcccgtaacccttctggacatctatacacactggcaacagtacgtttgcgggagcacatgggtgaaaagtatacaacttacagtgtgaaagctcgccag

SEQ ID NO: 46603 - DNA, 100 bp, Homo sapiens
tggaacactggctacctcttccaggtggaatttgacgatgccaccgaggcatcagaggactaccccaatggcacctggctgggcgacgagaacaaccccg

SEQ ID NO: 46604 - DNA, 75 bp, Homo sapiens
cagcccgccagcatgccccagtccaaagccaaaacagagtggagtacgagaaaagggtccgagcacaagccaaga

SEQ ID NO: 46605 - DNA, 100 bp, Homo sapiens
aacatgatgcacgtgaataattttccctttagaaggcattcctggatatgggcatcttctctgcattcagtttcatccaagtcattccgggatttcttac

SEQ ID NO: 46606 - DNA, 98 bp, Homo sapiens
gggggtcaagatcgccgaagtagactgcactgctgaacggaatatctgcagcaagtattcggcaccgtccacattttccaaattgaagatggagatca

SEQ ID NO: 46607 - DNA, 96 bp, Homo sapiens
ggaagaccgcgcgcagggcctgcagcgggagctggacggcgagcgcgagcggcgcgagaaacggaaggagagttttacatggaagtggcttacaga

SEQ ID NO: 46608 - DNA, 74 bp, Homo sapiens
tgagaagtccaaggtccaggggcataacaggagaagtttgcaggctgtttcctgaggtctgggccagcagcacc

SEQ ID NO: 46609 - DNA, 90 bp, Homo sapiens
gccggcgccggcgccggcgccgcggcctcttcggctgcggaccctgccattccggaggagagctcagagttctacagagtcaccactgaa

SEQ ID NO: 46610 - DNA, 82 bp, Homo sapiens
cttagctgtgctcgcgctactctctctttctggcctggaggctatccagcgccgggctctcgccatgggtcactgtcgcctc

SEQ ID NO: 46611 - DNA, 50 bp, Homo sapiens
aagaccctttgcacaaatcaagaaaatgcttggacagaagagatgagtac

SEQ ID NO: 46612 - DNA, 90 bp, Homo sapiens
gcttcagattgacatacctgatgcgctcagtgagagagacaaagtcaaatttacagtgcacacaaagaccccccaccccctggattttcc

SEQ ID NO: 46613 - DNA, 83 bp, Homo sapiens
ccagtgctgtgtctcgcaacatgacaaggtccaggagagaaggggatacgggtgggctcgatccatatacgagcgtgctttag

SEQ ID NO: 46614 - DNA, 100 bp, Homo sapiens
gtcagatcagaaagaggcctccctcgtgagttgggcttggtaccgtgctgcccagaatgcccttcgggaggtgtaaatgcagacaaagttggaattgaag

SEQ ID NO: 46615 - DNA, 51 bp, Homo sapiens
gctcaacacggcacttccacaggcgttcccacagctgtgcagaacttagcg

SEQ ID NO: 46616 - DNA, 111 bp, Homo sapiens
gtaaaatcttactcacagaacctcctatgaacccaaccaaaaacagagagaagattgtagaggactgatcctttgaaatactccagccatgactaaaagagaagcagagga

SEQ ID NO: 46617 - DNA, 83 bp, Homo sapiens
ggagcagccgccgccgcagcgcgaacatggacgccgtcaacgccttcaaccaggaggtcacagttacctggagaggctcctga

SEQ ID NO: 46618 - DNA, 100 bp, Homo sapiens
agcatagagaacacgctgtgggctggcactgtggtcgcatcagtggaatcaactatgaaattataatcatagatgatggaagcccagatggaacaaggga

SEQ ID NO: 46619 - DNA, 100 bp, Homo sapiens
cgtggtctgtgttccacacactgcggccctcagacatcctgcaggggctgctggggaactgctgacgctgaccggaaaggagattgagattgacattgaa

SEQ ID NO: 46620 - DNA, 98 bp, Homo sapiens
tgcccacgaattgggtcgatctgtgacagataaccttctgaggaaaggaggccatacagaaattgaacctcagcacttctgtcaagctttccacagag

SEQ ID NO: 46621 - DNA, 74 bp, Homo sapiens
gcagcctgcaagattgtggtgcacacgccctgcatcgagcagctggagaagggtggtgacttcacacgccataa

SEQ ID NO: 46622 - DNA, 74 bp, Homo sapiens
gcagccctagtgtttgccggagccatggaatttgctgaaggcgcagtcatgtcgggattcgacgatcctggcat

SEQ ID NO: 46623 - DNA, 100 bp, Homo sapiens
attgccgatacttgacctacgcaagagacaatgtcatgtgattcagcctaatatctcatgcctgatttgagatggggtcccaggtctcggtggaatcggg

SEQ ID NO: 46624 - DNA, 75 bp, Homo sapiens
agtctgcggacagcccagaagactgcgctgctgcaggacggtgtggatgaggtcaccattgtcaacattttgacc

SEQ ID NO: 46625 - DNA, 75 bp, Homo sapiens
gatgtcgagtttcaaaaggaggtggcgcaggttcgcaagcgcataacccagaggttttaaaagactacatcaagc

SEQ ID NO: 46626 - DNA, 73 bp, Homo sapiens
atgtgcagccagtgggccatgattatgtggaagagggcatacggagtggtgtccatgtgcatcgggactggaa

SEQ ID NO: 46627 - DNA, 100 bp, Homo sapiens
ccagaatgaaatccatgctcagagatgccaagaagaatctagacagacaggcctttctagccacagacccctttgcttctgtttttgggaatgaatcatt

SEQ ID NO: 46628 - DNA, 95 bp, Homo sapiens
gacgatctgcacttcgcattttggcattgacatttaattttagggtcctttatatagaagggagagtaggaaacctctgtgctatcctcagagag

SEQ ID NO: 46629 - DNA, 83 bp, Homo sapiens
gttggaagcagccgatccagcctgcggagcctgtggggcagaagtctggaacgttttttcttagagttccagaattgagactg

SEQ ID NO: 46630 - DNA, 83 bp, Homo sapiens
tgttcgggccctttaccaggaattactatgttcgggccgtcctgcatctcctctgtttgcagacaaggtcccaaagacagcag

SEQ ID NO: 46631 - DNA, 83 bp, Homo sapiens
agagaagtgcccgaggagagttaacagctgtcccctttcctccaacccaacggcttactttcaaggaagtatttgagaatggg

SEQ ID NO: 46632 - DNA, 75 bp, Homo sapiens
gacgacatgttgcttttcgtggaggctttcttctagtcaagatgagtgataaaccagacttgtcggaagtggaga

SEQ ID NO: 46633 - DNA, 51 bp, Homo sapiens
tctttctggcctggaggctatccagcgcaaaacaacgagtggatgagaaac

SEQ ID NO: 46634 - DNA, 90 bp, Homo sapiens
cccagccctacctcaactggaacaccaagtcctggaccccgagggaatcagcttccagtgtgctaggtctacctctaaaaggcctaaggc

SEQ ID NO: 46635 - DNA, 75 bp, Homo sapiens
ccgaagtgtcagaattggagacccgtctggaaaagtgaatggataccacgcatcagggaccccagcgcaccctcc

SEQ ID NO: 46636 - DNA, 75 bp, Homo sapiens
gctgatcaagacttttcctttaaagctggccagtgatgtggagagattatccccaaaagagaacagtttaatgac

SEQ ID NO: 46637 - DNA, 83 bp, Homo sapiens
ccgcctccctcccgcgcgtgctgcgggtctgctcgggggtctacttcgaggccatcgtcagccagtggcagcaggagtccaaa

SEQ ID NO: 46638 - DNA, 75 bp, Homo sapiens
aaacaggaataacgtgggctgaggtgctgtatatattgaccagtactgcaatcctctctccgacatcagcctcaa

SEQ ID NO: 46639 - DNA, 83 bp, Homo sapiens
tcttccaatggaagtgtttaagatctattccagaggggagcttcaccacttcattgacggctttaatgaagagaaaagcaact

SEQ ID NO: 46640 - DNA, 74 bp, Homo sapiens
catgaggaaaatgtccttccagcgctgcgcccggacagacaaggaccctgatgctcccataagacagaaaatgc

SEQ ID NO: 46641 - DNA, 83 bp, Homo sapiens
ttgggacccaccgctgccctcagctccgagtccagggcgaggttggagcaaaacgtcccactcactggaggcacctgaggacg

SEQ ID NO: 46642 - DNA, 83 bp, Homo sapiens
ctccggggacaagaaactagagcaaataaccgttttgaaattatacaaggcagatccaaccatccccaccgtggtcctacgat

SEQ ID NO: 46643 - DNA, 100 bp, Homo sapiens
gaacaaaggcagtctgttgaggcatctggacaccacacacatcatcagtctggcaggcaatccatggaccttgtggaacttgtgtctctttttcccacgc

SEQ ID NO: 46644 - DNA, 90 bp, Homo sapiens
gaagtcctttcaagtctctaggactggactcttcctaagcaagtccgctaatggcagcattagccgctgttgggcctcctaatcctcggg

SEQ ID NO: 46645 - DNA, 89 bp, Homo sapiens
atgagaagatgggaatcagagtggatcagcttcagaaactgccattcaccatccctgagctggttcatgcctctccctgccgcagctct

SEQ ID NO: 46646 - DNA, 50 bp, Homo sapiens
caggacccggagctcatgctgggtttcgaaaaaacgatgaaatgaaagct

SEQ ID NO: 46647 - DNA, 83 bp, Homo sapiens
cttgccttgagtcagtgcgccgctctccagcccgcttgaacgatgtccagaaggcttcttgggggaatattgtcaacatcgag

SEQ ID NO: 46648 - DNA, 75 bp, Homo sapiens
aaggaagccacgtgcagacatctacaaccttcgatctcctgacgacctgctcaacctgctgatgaacctgcagaa

SEQ ID NO: 46649 - DNA, 100 bp, Homo sapiens
gctccgtggtttccacgaggaaagaagagctgattgcaattcttgatcattttaacatccaggagtttgggctttgcaaaactgagaacaaagccaagtc

SEQ ID NO: 46650 - DNA, 139 bp, Homo sapiens
cggagagcagcagccgcccgcttcaaccccaggggaccagaggaactcagccctgattgcgattttcgacaatgaagccaaagacgtggagagagaagtttgctttattgatattgcctgcgatgaaattccagagcgc

SEQ ID NO: 46651 - DNA, 74 bp, Homo sapiens
ccaaattgtccccaagagaggaggaagaactggatcctagaatacaggagtgtttctcaggagctatcagaaac

SEQ ID NO: 46652 - DNA, 90 bp, Homo sapiens
ggggcctcaattaatgtatctgttaatgaaattatcaggaaggagttttcaggacctcctgccagaaatcagacgtaaaagaagccatta

SEQ ID NO: 46653 - DNA, 95 bp, Homo sapiens
gttaaagagacccgttcagagtcctacagtggcagagagtgcctgcctggaatgcccagcgggccagcacgcggggaccacccagccgcaaaggc

SEQ ID NO: 46654 - DNA, 100 bp, Homo sapiens
cctaggcgaagatccggactctgggtgttttgctaccgtgaccgtttaggatgaaactgttgcttgcatggctgcagccattgatactgcggtggagcaa

SEQ ID NO: 46655 - DNA, 90 bp, Homo sapiens
ttccatcaaggtgtcggcggagctgctcagagctgccttgaaggacggccactcagccccacaggagacaggatccgaagcaaagttgag

SEQ ID NO: 46656 - DNA, 100 bp, Homo sapiens
tgggaaggaattcaggctggaaacagcaagaaggctgggaccccagccaagggcaaagtcggcgggcgctggaagtagagaggccagaaaggcccctcga

SEQ ID NO: 46657 - DNA, 90 bp, Homo sapiens
atgaaccactccagctcatccagcctcagtttgagacgccgctgccaacccttcagcctgcgggaagtcttctgaccaactggccctccg

SEQ ID NO: 46658 - DNA, 83 bp, Homo sapiens
ttggattcagacgccgattcgcccaggttctctacttaaaagacaatgactactgatgaaggtgccaagaacaatgaagaaag

SEQ ID NO: 46659 - DNA, 125 bp, Homo sapiens
cctgctaacatggataagcatgccctgaaaaagtatcgtcgagaagcctatcatcgtaagactttgaccccgacgcaggcttcagtgattgccgcggatcagaagcctgagcactttggctcgag

SEQ ID NO: 46660 - DNA, 75 bp, Homo sapiens
tggacgcccaggcggacgaggccgtgttaggatctgccactgtgaaggagatgatgagagccccctgatcacccc

SEQ ID NO: 46661 - DNA, 83 bp, Homo sapiens
ggatttgggtcgcagttcttgtttgtggatcgctgtgatcgtcacttgccatgccagtgacggtaacccgcaccaccatcaca

SEQ ID NO: 46662 - DNA, 100 bp, Homo sapiens
ccacgacgaggccggggtcacactgaggagctcgggttttcctgtccacctgctcccagacatcgccgagcctggcagtgtggcgggcagaacttcccac

SEQ ID NO: 46663 - DNA, 50 bp, Homo sapiens
tggagaagaggcaccgaggcccaggacgcagtggcctttgaggatgtggc

SEQ ID NO: 46664 - DNA, 82 bp, Homo sapiens
ctggaaggaaccgctctcgcttcgtcctacacttgcgcaaatgtctccggtcatcatcagatttgaaatatttaaagtggat

SEQ ID NO: 46665 - DNA, 100 bp, Homo sapiens
taatgcttttagatgaatttaccactaagcttttggcatcgtgttgcaaaatgacagatcttctagaagaagaggtcctgtaataaagagggatccgaac

SEQ ID NO: 46666 - DNA, 100 bp, Homo sapiens
cggagacacgggaagcacgcgaggctgcccggagtccggataagccgggcgggagcccctcggccaggcctggtgatcctcagtcagctcaggataaagc

SEQ ID NO: 46667 - DNA, 73 bp, Homo sapiens
ggcacaagggcccaactggaattccacttacggggaagctatgcgaaattatttaaaagagcgaggggatcaa

SEQ ID NO: 46668 - DNA, 75 bp, Homo sapiens
cctgcagccctaccagcacctgatctgcgggaagaacgccagcggttctgcttggattctgctagacagacccga

SEQ ID NO: 46669 - DNA, 74 bp, Homo sapiens
ctttggttacctatgtacctgttaccactttcaaaatttactgtaaacacaccacctactccagaagacctgat

SEQ ID NO: 46670 - DNA, 90 bp, Homo sapiens
ttgcagactgcggagtcagacggcgctatgtacgccctcttcctcctggccagcctcctgggcgcggagagaagaagaaggaggttcctg

SEQ ID NO: 46671 - DNA, 75 bp, Homo sapiens
ctggctcccaatacaccgggcaaagcacgtaaggacgtggccgctttggagagtcagcctttattaggattcact

SEQ ID NO: 46672 - DNA, 75 bp, Homo sapiens
tacgccacctgggaggtggaccggagctcgtccagctgcgtgcctaggtgaagcgacttccagtcatttggaaag

SEQ ID NO: 46673 - DNA, 50 bp, Homo sapiens
gagcgatttgccatcgtgctggttcatctgcagaagccagcggacgcctc

SEQ ID NO: 46674 - DNA, 75 bp, Homo sapiens
atacatgtatgttggagcatcagaggaaagcagctcctggtggagaattactgtggaaccatgattattgatgga

SEQ ID NO: 46675 - DNA, 96 bp, Homo sapiens
gtgggctctgtagaattcgacagtatgtgcatagtatgggactgggactccaatggcaagcatgacttcattggagaattcacctcgacattcaag

SEQ ID NO: 46676 - DNA, 98 bp, Homo sapiens
tcgggcctcaatgatctgctcaacgtgctgcagagcctgctgcagaccagagaggaccgttctgctggacgcctacagtgaacatctggcagcggccc

SEQ ID NO: 46677 - DNA, 95 bp, Homo sapiens
agcttgacattacagccaagatggtgctgtcccagagacaacgagatgaacttcaccaccaagtaagcgaagaaaattagagaaaccgagaaaac

SEQ ID NO: 46678 - DNA, 74 bp, Homo sapiens
gtaatctagctgcagttttgatgcacagagagtgcgcgcgcaggatgaagaagtgcatcaggtgccaggtggtc

SEQ ID NO: 46679 - DNA, 75 bp, Homo sapiens
tcttgtcctggcattgcatccacaggaggggcaggaaattctttgaagggaagctatgcgaaattatttaaaaga

SEQ ID NO: 46680 - DNA, 100 bp, Homo sapiens
tgctgggagatgggcctactcgcccgccaccctgcgctgccgccgctctgaggagttaaagggtcccgggattcttgagctgtgcccagctgacgagctt

SEQ ID NO: 46681 - DNA, 74 bp, Homo sapiens
ttgaatcagaaattgagaagctgcttttgccttatgaacagtcctctcttttggaactcataaagactgaaaac

SEQ ID NO: 46682 - DNA, 50 bp, Homo sapiens
tgcacctgcgggccccaggaaggaaacggatgtgttcgaaatgcgctttg

SEQ ID NO: 46683 - DNA, 90 bp, Homo sapiens
gtccggttctgggacagctggagacagtggtggtgactggatgcttctatggcatggttccaggatgagtaactgggtgggaatcttgag

SEQ ID NO: 46684 - DNA, 83 bp, Homo sapiens
cgaccctggccgccccgagcggagcctggaggttttggctacgggcctccacctccaccgccagatcagtttgcccctccggg

SEQ ID NO: 46685 - DNA, 78 bp, Homo sapiens
tatcacagaggaaactctgcattctcgcttcctggagggacgtccagatcggtgacatcgtcacagtgggcgagtgcc

SEQ ID NO: 46686 - DNA, 100 bp, Homo sapiens
cccagaggtccaaggaagcaccaaatctgcatacaaccagtaccatgcggagaccatcaagaatgtgcgcacagccacggaaagctttgcttctgacccc

SEQ ID NO: 46687 - DNA, 98 bp, Homo sapiens
tttgacaagacgcggctgccgtacgtggccctcgatgtgctctgcgtgttgctgggaacatgagagaatttcaagaatccatgaagagtttaagaaaa

SEQ ID NO: 46688 - DNA, 100 bp, Homo sapiens
tctgggaaaggtggaaaccagctgcgctgtcctaaatgtggcgacttgtgcacacatgtagagacctttgtatgcagtacttaattttcctaaatattgt

SEQ ID NO: 46689 - DNA, 100 bp, Homo sapiens
caaagagatacagggcagaggaaaatgcaagaagactgatggagcaggcttgcaatattaaaaacaaaatccagtctcatagcagaggagaatataatgt

SEQ ID NO: 46690 - DNA, 100 bp, Homo sapiens
ggacaatcaggaagtccaagccacaatgatcctgccaagaatcctccaggtgcagtagacattgttgcaatcatgatcggcaatctgaaaggcacaaaaa

SEQ ID NO: 46691 - DNA, 100 bp, Homo sapiens
ttaaagtctctcttcaccctgccgtcatgtctaagtcagaggatgtccccgagcagcggagcatggagtaccctaagctgtatgagccgggccagctgaa

SEQ ID NO: 46692 - DNA, 78 bp, Homo sapiens
aagttttacaagatttaacctgtcatcaagacctgggattttggtggacaatcatatcctgattcagcccttcctcca

SEQ ID NO: 46693 - DNA, 82 bp, Homo sapiens
caagatgtctgacatggaggatgatttcatgtgcgatgatgaggaggactacgacctgaatggctgttgatggtgggtgtgg

SEQ ID NO: 46694 - DNA, 100 bp, Homo sapiens
gatgaaaatgaaatggcaacaccgtgcagatggcaaagcgtaggcctcacaaacatcctggccgtgaagggtctttttggagttcctgagctgagtgccc

SEQ ID NO: 46695 - DNA, 100 bp, Homo sapiens
cggaggcgttggagcgcggaaatctggaaccgggatggcgacgtctacactgagtcggaggcgaaggagctgggaatcccaagtgcaaaattgcaattgt

SEQ ID NO: 46696 - DNA, 98 bp, Homo sapiens
ttctttctcgctgatcgcctaacttctactgacgaagcttggaagttgcagaaggcaccaccttccatggtcaataatgaacaacgccagcatgcaga

SEQ ID NO: 46697 - DNA, 101 bp, Homo sapiens
ccgagactgtgagaactacacagaagctgcctacacgcttctcttgcacgctgagcttctgcagtggtgaagcagcgcttgcagatgtacaactcgcagca

SEQ ID NO: 46698 - DNA, 100 bp, Homo sapiens
agcgtggacgccggatgagttgcttttaggcttgctggcccgcggggctgtccaggcacgcgaggcccctcagagtcatttgccctggctccatagttcc

SEQ ID NO: 46699 - DNA, 83 bp, Homo sapiens
ccgggaccctcgcgcgcgaccgccgaatcgctcctgcagcagagaacacaccacagccatcagcactggaatgcaaagaccag

SEQ ID NO: 46700 - DNA, 100 bp, Homo sapiens
ctatcctcactctgtggttcacgacagacttcgctgtgagtgcccaaggtttcaaagcattatatgaaggacgctgtgcagagctgcaagtccgtatcac

SEQ ID NO: 46701 - DNA, 50 bp, Homo sapiens
ctggatattgatgcgccagtcactggagaaagttctgccactaatgaacc

SEQ ID NO: 46702 - DNA, 51 bp, Homo sapiens
tcgcagtgagtgttacagctcttaagacaggggcaagtgtccgagtggtga

SEQ ID NO: 46703 - DNA, 100 bp, Homo sapiens
actaccgccgctccgcagccacgtgacagagctgaatgaacctctctccaatgaagatcgaaatctcctctctgtggcctacaagaatgtggttggtgcc

SEQ ID NO: 46704 - DNA, 90 bp, Homo sapiens
gcctcctacgtttacaacggctacagcgtggtttttgtggggactaagagtggcaagctgaaaaaggattaccttgactgcatcagggac

SEQ ID NO: 46705 - DNA, 75 bp, Homo sapiens
cgcggcagccgcgctcggggctctaagcactgatagccattgggcgatacagcatgacaatagagactgtggatg

SEQ ID NO: 46706 - DNA, 100 bp, Homo sapiens
ctctcaatacataaagaacagcgtaactccagacatgaggaggagtatgatgaagatgctcaggtagtggaagacgaggaggacgaggatgaggaggagg

SEQ ID NO: 46707 - DNA, 83 bp, Homo sapiens
atcggggcctttatttctcgtcggcggcgccctgcaccgcgcctcgcaaacgggctgacgcacgaggcacacaggaaggaggt

SEQ ID NO: 46708 - DNA, 82 bp, Homo sapiens
gaagcagccgatccagcctgcggagcctgtggggcaggaatgggccttgacgaaggagaagtcggtgaagcacatggatttg

SEQ ID NO: 46709 - DNA, 100 bp, Homo sapiens
gacctatgttcaagatcaaaatgaagactgcctttacttaaacatctatgtgcccatggaagatgttaataacgacatgatagtcactgacaacaacggt

SEQ ID NO: 46710 - DNA, 100 bp, Homo sapiens
caagagcacctggctgatcctgcaccacaaggtgtacgatttgaccaaatttctggaagaggactcacaccacccggcaagaactgctcactacggctcc

SEQ ID NO: 46711 - DNA, 83 bp, Homo sapiens
ctcccagaccggccgctctcccctcctctcacggcacctcccaccatgaagggagtgcatccgccccaacccttttccccctc

SEQ ID NO: 46712 - DNA, 100 bp, Homo sapiens
cgctccaggggctgctgagcgcccagcggacaccggcagcgcgcggtcgacgcgggcctgagctccctccaggtgaaagaactcttttcttctttgggag

SEQ ID NO: 46713 - DNA, 74 bp, Homo sapiens
ctttggcgcggattagggggtctcggcgagggacaagaatccttcaagaaacaggaaaaaactcctaaaacacc

SEQ ID NO: 46714 - DNA, 51 bp, Homo sapiens
gtcctgttctacctactgccaattggaaagaaaaggtcacggatcgcctac

SEQ ID NO: 46715 - DNA, 100 bp, Homo sapiens
ataagtcgaaggggaaggcgcctgaagaggacgaaggagaactgtgtttatgaaactgtagttttgcctttggatgaaagggcatttgagaagactttaa

SEQ ID NO: 46716 - DNA, 100 bp, Homo sapiens
ttacaggcctgagccaccgtgcccggcagtgcttggtcttattaaacgctttatgaaaggtacagcagggaagaactggaaactcagagaaagaaactgc

SEQ ID NO: 46717 - DNA, 90 bp, Homo sapiens
cagaggaggcgggggcagccgctgagacggtttttcacaagacaacgactgaaagacctttcattcagaagctgtttcgtcctgtggctg

SEQ ID NO: 46718 - DNA, 73 bp, Homo sapiens
tcccggaaggagaagctgagatgtggcctggattcctccgtgtccttcgtgtctcaggtccttgggaaagcct

SEQ ID NO: 46719 - DNA, 98 bp, Homo sapiens
aagttacagtcaaaaagcaaatggacaaaattgaggagcttcagaaaaacctgttaaatgcaaatttggcagcttccgatgatttaagggacgtgcca

SEQ ID NO: 46720 - DNA, 75 bp, Homo sapiens
cagccctgtccggcatctgtcttgagctcccagcaagcctggtccgacccccagtggcactaacgtgggatcctc

SEQ ID NO: 46721 - DNA, 75 bp, Homo sapiens
aataagctatatactttggttacctatgtacctgttaccactttcaaaaaaactggcgatggaatatgagaggag

SEQ ID NO: 46722 - DNA, 100 bp, Homo sapiens
gggccaagtacgagcgacaggagttcatctacccggagaagcaggagccctactcggcaggactccagaagacctttccagattcgtggttgagctgcag

SEQ ID NO: 46723 - DNA, 82 bp, Homo sapiens
agagcacgacgagcgcggaggaccgggaggctcccgggcttgcgtgggcctaatgggattgtttgaaaaacgtcgcttcagg

SEQ ID NO: 46724 - DNA, 129 bp, Homo sapiens
ccacacccctgtattctcctccgaaccccttcatgcccaaatcccggaaactccagcgtgtctccagccgtggtacgaagatgccctggtgctcctgctcacagaggtgttgaatcgaatccagttcag

SEQ ID NO: 46725 - DNA, 82 bp, Homo sapiens
acataacggggttcgggtgtctcgtgtgtgaacatcacaggataacaaagccattgacctttgccgattgtgttggggacga

SEQ ID NO: 46726 - DNA, 90 bp, Homo sapiens
agacagatgaagatgatctttattccggctataatgactacaatccaatctatgatatcgaggaagaaggtagataatgactataatgcc

SEQ ID NO: 46727 - DNA, 82 bp, Homo sapiens
aagaagctggtgtgcggagatgaaggctcagaagtgacaaaagagaattatcaggatggcagtccttataaccagatgctta

SEQ ID NO: 46728 - DNA, 98 bp, Homo sapiens
cccgaaaacggaagcgcagggagaaggaagaggtgtttgaaaaggttctgaagaaagtctccaaatacattcaagagcagaatgagaagatctatgct

SEQ ID NO: 46729 - DNA, 100 bp, Homo sapiens
ctttcttgcctctcgcccatatgtttgagagagttgtagagtaattaccagctagaccagcttatgtgccccaaatccctatcagaaaagaattctaaca

SEQ ID NO: 46730 - DNA, 90 bp, Homo sapiens
agtccagctcctctgacagcgaagactccgaaacaggtggagccccctgagctgcccgctgatctgcagcactggatctcctacaacgag

SEQ ID NO: 46731 - DNA, 100 bp, Homo sapiens
cgcctgagtaaggacttctgcgcgcgggagttcgaggccctgcggagctgcttcgccgctgcggtgtcgtgaaaactacccctaaaagccaaaatgggaa

SEQ ID NO: 46732 - DNA, 100 bp, Homo sapiens
ctctgaaagctagaagaaaaggtgtacttgcaagaaacctcaggacttgagtaacagcaacatggcagacctcaacaccaacatcgaggatgaaggcagc

SEQ ID NO: 46733 - DNA, 100 bp, Homo sapiens
tgaacttcgaggaagatgaagaagacacctattacacgaaggacctccccatacacgcctgcagggtgataaaagaaaatgtggctgaagttacccgaag

SEQ ID NO: 46734 - DNA, 80 bp, Homo sapiens
ggaagaaattagaccagatgagaagtcaagaaggcactgatcctgaaactgaagaccccaaccacctccctccagacagg

SEQ ID NO: 46735 - DNA, 100 bp, Homo sapiens
ggcgatatgatgatcctgaagtacagaaagacatggtgtccgcaatgttgccagtgtctgtctgcagattggctacccaactgttgcatcagtaccccat

SEQ ID NO: 46736 - DNA, 50 bp, Homo sapiens
ggattccagactcgtgggggaaaggctgcctccatccctgtgagatcact

SEQ ID NO: 46737 - DNA, 101 bp, Homo sapiens
acagaattacactgaagaagtagagtatttcaaccataaagacatcttaattgggcacgaaagagacaatgcagatcttcgtgaagactctgactggtaag

SEQ ID NO: 46738 - DNA, 101 bp, Homo sapiens
gaaaattttccttgacctttaggtgcttttatattcatctcaaaaacaaaattctgaactcaggacttggcaagtgttatatgaacttcccaccaacacac

SEQ ID NO: 46739 - DNA, 75 bp, Homo sapiens
ggaaagcgcatacaggaccctaaacagatatgtgcagcgggggctacagcgagtggggctagatccccagctgcc

SEQ ID NO: 46740 - DNA, 100 bp, Homo sapiens
cagcctcccaggttcaagtgattctcctacctcagcctcccgagtagctgggactacaggcgtgcaccaccatccccagacaaatttacatgtattggag

SEQ ID NO: 46741 - DNA, 73 bp, Homo sapiens
agagatcccgtccgccccagccgcgtctgggccaggagaaaaggaatgtttacccttgcggaagttgcatcac

SEQ ID NO: 46742 - DNA, 100 bp, Homo sapiens
aacagattcagtggcctgcattggtttctgtggatcccttctgaagttctatctgaaaattgcgcttaagtgaattttctgttagaagaacttggttgct

SEQ ID NO: 46743 - DNA, 93 bp, Homo sapiens
atgggagattccacgatccgccagtggatggaatacttcaaagccagtatcaacagatggcacctggagagacatctatagcaggaaatcagg

SEQ ID NO: 46744 - DNA, 75 bp, Homo sapiens
aagaagatcgaaaattaaacctcaggctaccacatactgttgattgtgatgaaatgccagttgaagcacctgtcc

SEQ ID NO: 46745 - DNA, 96 bp, Homo sapiens
ttttgcctacatgaagaagagagaagaggagatgcgtgataccaacgaagggacaatggagaacattgcagcccaggctctggagcacattcactc

SEQ ID NO: 46746 - DNA, 50 bp, Homo sapiens
cgtcctcccacgtaccatttagaaggtaaagtaccttttattcatgtggg

SEQ ID NO: 46747 - DNA, 100 bp, Homo sapiens
ccttgcaacaaaggcagactgagcgccagagaggacgtttccaactcaaagaaattttcggaactgaaggagtagatatcgttcttcatgtgatgaaaac

SEQ ID NO: 46748 - DNA, 82 bp, Homo sapiens
agctatgtgtatccatggagacaagagtcaaccagaaagagattgggtacttaatgggttttcagagaaagatgctgatgag

SEQ ID NO: 46749 - DNA, 82 bp, Homo sapiens
gttcctttaaatgagccgaggtcatggtggttcggagggacagtatgatttggtgaaatgcctggctcctattcgagacccc

SEQ ID NO: 46750 - DNA, 74 bp, Homo sapiens
gaggaggcggatcccccggcgtcaggtcaccttccgcaaccctgtcattgagaggattcctcggctccgacggc

SEQ ID NO: 46751 - DNA, 97 bp, Homo sapiens
tactcttccatttgacaacggaattctgctgcccatgttcaacttacgatccagtaaattagggctgatggagttatgagaacaatgaacacagaaa

SEQ ID NO: 46752 - DNA, 135 bp, Homo sapiens
tcccccatacctgcggaacctgtccagcgatgatgccaatgtcctggtgtggcacgctctcctcctaccctttcccaggcggcaagtgcgacccggctgaccaagatgtggtgcacacggccctgcgggaaaccc

SEQ ID NO: 46753 - DNA, 95 bp, Homo sapiens
gcatcgactggaccaagatcgagcccagcgtcaacttcctcaagtcgcccaaagataagtatgctgtgcgcttcatccctcgggagaatggcgtt

SEQ ID NO: 46754 - DNA, 75 bp, Homo sapiens
aaaagtgggactgaagtacactgaagcaggggactcattctcacagttccggtttgctgaggagaaagaatggga

SEQ ID NO: 46755 - DNA, 90 bp, Homo sapiens
gaagcaggcagaagattgcatcacacgagttgttgcctgcaatctctatccctttgtaaagacagtggcttctccaggtgtaactgttga

SEQ ID NO: 46756 - DNA, 100 bp, Homo sapiens
gccaacctgtgtctcttcatctccgtgagaaaggtgcccccgaagtgaaagagatggcctggtggaaagcctggtggatgaggatcgcagtacggaacct

SEQ ID NO: 46757 - DNA, 96 bp, Homo sapiens
ggataagcaggaccagatgataccatgaagagaagtttacaggccctctattgccaactgttaacatgctacaagtgaaaactgatgagaaactga

SEQ ID NO: 46758 - DNA, 100 bp, Homo sapiens
gaccggttcgtcgcctccttgcccgtgaccgtcgctagaactcagttgtgcgttgcggccagtcgccactgcttttcaccagtgatcattaaagaatggg

SEQ ID NO: 46759 - DNA, 90 bp, Homo sapiens
ctcgcagacaacccaaccggtatacaatggcattgggatcccgtggcagttgcagcactgaagtggagaaggagacccaggagaagatga

SEQ ID NO: 46760 - DNA, 100 bp, Homo sapiens
ttatgcccaccctccaactttgcgacggaaatgtgtcatcgaaagccaggcccgatgagagaaagggaaagttaaggatgctggagcagaacaatggatt

SEQ ID NO: 46761 - DNA, 75 bp, Homo sapiens
agaagctgacccctgaaggaaacaaagacttcaacactgacaacttcatctgcaaggaggacctggagctgacgc

SEQ ID NO: 46762 - DNA, 90 bp, Homo sapiens
cgcggggcgacgctggctgcagggacccggtgacagcgtgagaggaaacctcgacctgtctcccagttggttgcacagcaggttactcag

SEQ ID NO: 46763 - DNA, 100 bp, Homo sapiens
ggaaaacagagaaagaagtgataggagggctctgtaggcacttccgttccggcgcccctccggtcatcaacccgctgggcaccagcttcccggacgacac

SEQ ID NO: 46764 - DNA, 80 bp, Homo sapiens
gtgacactctctagtgcaccaactgcaatcaaggctgctggcaaaggggacgtcccaacgaagagaccacctgtccttcg

SEQ ID NO: 46765 - DNA, 100 bp, Homo sapiens
gagctgacaggccgctctgtggagtttgaggagatggacattttggaccagggagccctacagcgtctcttcaaaaagagacgtctcccacaacctgctc

SEQ ID NO: 46766 - DNA, 76 bp, Homo sapiens
aggacgagggccagctgacggagatggtgcagaagatggaggaggtgtcgtgaaaactacccctaaaagccaaaat

SEQ ID NO: 46767 - DNA, 87 bp, Homo sapiens
cagctcaaacaggaagatgggagcctctgccttgtacagttcccatcacttgatattcactgatggactccaaagaatcattaactc

SEQ ID NO: 46768 - DNA, 83 bp, Homo sapiens
cacggatcatggccgcagccgctctggggcagaggaagtatcattctgcaaaggaggcatatgaacaacttttgcagacagaa

SEQ ID NO: 46769 - DNA, 100 bp, Homo sapiens
acgaggagatgccacagagcatcgtggaggccacctctaggcttaagaccttcaacttgatcccggctgttgacgagggaactgagctgtcaaaactaag

SEQ ID NO: 46770 - DNA, 113 bp, Homo sapiens
cagggccgagtcctcgccatgccggcccggcggctgctgctgctgctgacgctgctgctgcccggcctcgggaaagtttcctacactactgaggtttaggggcactgtgaagc

SEQ ID NO: 46771 - DNA, 95 bp, Homo sapiens
cgggactctgacaggctccagctccacacagatctgccgacaccccaggccatcgagccccaggccatcgtgcagcaggtcccagcccccagtcg

SEQ ID NO: 46772 - DNA, 102 bp, Homo sapiens
ggcgtgaagcccccccagaatctctgggaatataaggaaaatgctgctatttgtgatgaaattgctcgtcttgaggaaaaatttcttaaagcaaaagaagaa

SEQ ID NO: 46773 - DNA, 100 bp, Homo sapiens
gggaacaaccgcctcccgctcctagcaggttgctactgccccgaacccgcgctgcagggaacagcggggcaaacattccaggaaggatgttacctttgac

SEQ ID NO: 46774 - DNA, 101 bp, Homo sapiens
aaaatgcaagaagactgatggagcaggcttgcaatattaaagaggcaagtgaggcctatctggttggcctttttgaagacaccaacctgtgtgctatccat

SEQ ID NO: 46775 - DNA, 100 bp, Homo sapiens
agcgcagcgccctcagcagctccctgcgggacctctcggaagccggtatcatgatattagctggtttgacatcaagtcatttgtgagtcatcagatcttc

SEQ ID NO: 46776 - DNA, 122 bp, Homo sapiens
tgatgaagaagatccttcaaaattaaaagaggagcagcatggcatttcagtcactggtttgcagagtccagctggtttattgcagcctcctgttcgtatagtttcacagccacaaccggcac

SEQ ID NO: 46777 - DNA, 74 bp, Homo sapiens
acagctgaccctacatgatgagaggtttgagaagacatgaagaggagcatcggcggcgtgaggaagaaatgatc

SEQ ID NO: 46778 - DNA, 100 bp, Homo sapiens
ggagagttgccggagcctctgctgacacataaacacttcaatgcacacctcaaaatcgctggacctgacatgaaacgcagatctagtggcagagaggaag

SEQ ID NO: 46779 - DNA, 83 bp, Homo sapiens
gaccacaggccctcgttgcccagatgggttgtagaaggtgatttagctgccatagaagcatacaagtcatcaggaggagacat

SEQ ID NO: 46780 - DNA, 97 bp, Homo sapiens
catccactcaggacatctgcagggtgaaaatgggatggaggattgtgtcatggccctagaaaccttgtttagtgttctgctttctctttgcagactt

SEQ ID NO: 46781 - DNA, 75 bp, Homo sapiens
gtttccacctgtctggatggacaggtcattggctctgccaagctgagatctgtatctgtggacctgaatgttgat

SEQ ID NO: 46782 - DNA, 102 bp, Homo sapiens
gtatctactcgcgcatcaggcatgaagaagaatatctatggcaatatcgaggacctgatcagtcgcatcgaatacattcattcaaagaacttcatccaccgg

SEQ ID NO: 46783 - DNA, 83 bp, Homo sapiens
atggacatgagccccctgaggccccagaactatcttttcgggttacacatcattttggaatgactgtatatcatctggattac

SEQ ID NO: 46784 - DNA, 93 bp, Homo sapiens
ctcctcccggggcccttcccgggcaaggtagaattagaagatcatgtgatgttggagtaggagggtttatcttggtgactttgggatgctggt

SEQ ID NO: 46785 - DNA, 75 bp, Homo sapiens
cttgccaatcccagaaggtttttagttcaacaagtgtcacggcatacaagcagcattgcattactttccagaata

SEQ ID NO: 46786 - DNA, 50 bp, Homo sapiens
acttcgagtcctttattgtggaggcccgatgagagaaagggaaagttaag

SEQ ID NO: 46787 - DNA, 100 bp, Homo sapiens
taagaagaatcctttgtatgtgccccttgaaggtgaaattttccaaagttttaacaaaaggaacaagatcactcaaggtgaaggataatctactaatacc

SEQ ID NO: 46788 - DNA, 100 bp, Homo sapiens
tcactatgacacactggttaaaagtggcatgtatgaatattatgccagtgaaggacaaaatcctttgcgtcagaatggcggcagcggagcatcgtcattc

SEQ ID NO: 46789 - DNA, 82 bp, Homo sapiens
aaaagaagcaagaaagtacattttcaactgtttagatgatatggcccagcacctgaactcctggggggaccgtcagtcttcc

SEQ ID NO: 46790 - DNA, 100 bp, Homo sapiens
gcttcaggattcaatgccatggaagatgcccagaccctgaggaaggccatgaaagggctcggaagaagaggaggggtcagaagacgatagcaatgtgaag

SEQ ID NO: 46791 - DNA, 100 bp, Homo sapiens
ggcaattgctcctgctgtaaggagtgcatgctgtgtcttggggccctttgggacgagtgctgtgactgtgttggtcaaaacgtgagcaggaggtgaacat

SEQ ID NO: 46792 - DNA, 93 bp, Homo sapiens
tggctccctatgaggtccttgggggagccctggagggcgggcttccagtggggggagagcccctggcagccctgcacctcctcgtcctcgtcc

SEQ ID NO: 46793 - DNA, 83 bp, Homo sapiens
cccaccgccgccccctccggcgtgttcatgcccccggggtaaggctggcctctctgcagtcagaggtctgagctctgccatgg

SEQ ID NO: 46794 - DNA, 90 bp, Homo sapiens
ccggtttctcccacatcgacctgagttatgcccagccaagtcttcagtatatccaggggcaacagattttcacagctcatccacaaggag

SEQ ID NO: 46795 - DNA, 100 bp, Homo sapiens
ctcctgcttcccatcgaagctctagaaatgaatgtttccatctcttcagagatgaaccaggaatgtatacaaagactatcgcttccttgagctggcatgt

SEQ ID NO: 46796 - DNA, 74 bp, Homo sapiens
ccagaaagacatcctgagaggacttggcagatggctgcggctctgcattcaatccaagtgggaggacgcaattc

SEQ ID NO: 46797 - DNA, 75 bp, Homo sapiens
ggtagagagaccaaagatcttgatgagaggaggaaggaagagacttgagctgttgtgtagcttctcttgttcaag

SEQ ID NO: 46798 - DNA, 80 bp, Homo sapiens
gtggaaaagcagaaccttagcaaagaggagctgatagcggagctgcagtttttggtgttgagccagacttgaccagggaa

SEQ ID NO: 46799 - DNA, 75 bp, Homo sapiens
ttcacaatgcctccataatgaatgctgtaggctgctgtggtttacagcaggtattaatctctggagaagacacat

SEQ ID NO: 46800 - DNA, 100 bp, Homo sapiens
gcgttacggagcatgtgtagcctcaggagagattaaacagattctagaaaatgaacttcagatacctgtgtccaaaatgctgttaaaaggctggaagacg

SEQ ID NO: 46801 - DNA, 75 bp, Homo sapiens
gcgagtggagcgagtggagcccggaggccatgggcacgccttggacaggaactgtggctgcaccatctgtcttca

SEQ ID NO: 46802 - DNA, 75 bp, Homo sapiens
ctcaggatgcaggaatcaagaccatcactatgctggatgaacaaaagggggaccctcacaatgatcccaatgctc

SEQ ID NO: 46803 - DNA, 75 bp, Homo sapiens
gtacaagtggagcaaaaagcgaataacctgggtatcttgtggtctgaaagagaagaaattgaaactgcacaggct

SEQ ID NO: 46804 - DNA, 100 bp, Homo sapiens
caagaacctgaccgagagggaggctgaagccgacgtagcttctctgaacagacgcatccagctggttgaggaagagttggatcgtgcccaggagcgtctg

SEQ ID NO: 46805 - DNA, 75 bp, Homo sapiens
gcgattggcatcgatctctccatcccttccgaggcccgacttcgattttaccaaatgttgcaagaactctggagt

SEQ ID NO: 46806 - DNA, 75 bp, Homo sapiens
gcagaaatcacattggaccctcctcccaactgtaggttaatggcagaaacctcctttcagttgactttgatcgaa

SEQ ID NO: 46807 - DNA, 75 bp, Homo sapiens
gccggagatggacttgccatggtcctggtgcttgatggtcgaggccatctcctgggccgcctggcggccatcgtg

SEQ ID NO: 46808 - DNA, 100 bp, Homo sapiens
tgacctgcctgtcgtcgtggtggccaacaagcagggcgacctgaggtctggagtgtatcctctcaagggagcaagtggatccctggggcagagaggaagc

SEQ ID NO: 46809 - DNA, 97 bp, Homo sapiens
caagccctgtggcaaactgaccaagcccaaacctcaagttctactcagtgaatgtggattacagcaagctgaagaaggaacgtccagatttctaaat

SEQ ID NO: 46810 - DNA, 100 bp, Homo sapiens
accggaatgtcatccagcgagtgattagatcatggaagggaagtggttgctgtgtatgttactggtgcttggaactgctattgttgaggctcatgatgga

SEQ ID NO: 46811 - DNA, 90 bp, Homo sapiens
tttcgatcagagatcggcggagaccctcgaagtgcgcaaacttgacactcaccctgaccgcggttgctgatgctattagaacaagccttg

SEQ ID NO: 46812 - DNA, 74 bp, Homo sapiens
aggagcgggaagagttgctgggaaaccacccaccttcaccatgtctgacgaggaagtgtgagtacccagctggt

SEQ ID NO: 46813 - DNA, 75 bp, Homo sapiens
gtctgttgacgcggccgactacaatcccgagagtacccaaaggcaagtggaacagctctaatggggttgaagaaa

SEQ ID NO: 46814 - DNA, 77 bp, Homo sapiens
ggctggacgcttgcatggcgcttgaggcagaagaagagttcaacatagagaaaggtcggcttgtgcaaacccaaaga

SEQ ID NO: 46815 - DNA, 88 bp, Homo sapiens
ggtgaaactgaccacagtgctcaccacccaccaccactggtataaagaaatatgaggccccaattggaacagcagcatggagggtccc

SEQ ID NO: 46816 - DNA, 50 bp, Homo sapiens
agctggtgcctgtgcaagttgttgagccttccttgaatccagaagctggc

SEQ ID NO: 46817 - DNA, 100 bp, Homo sapiens
ttccaaatcatcgcctttctggtgggaggcttgattggtgaagctcgtgtgtggagtgccacggtacaatcagacgacagatggacagtgtgacaaaagt

SEQ ID NO: 46818 - DNA, 82 bp, Homo sapiens
acgacgcggacatggtcatgagctttgtgaacctgggtgacttaagagattaaaattaatttggttgctgttggttctgaac

SEQ ID NO: 46819 - DNA, 82 bp, Homo sapiens
cagaggcccccgacggagacaaggacgtcaggatggctaaaggtgaccccaagaaaccaaagggcaagatgtccgcttatgc

SEQ ID NO: 46820 - DNA, 100 bp, Homo sapiens
aataaaacttcaccaagacctaaaaaaccccaacaacagctcccttaggcctttgaactggccacaggtgactatttgtttgaacctcattcaggggaag

SEQ ID NO: 46821 - DNA, 82 bp, Homo sapiens
agatcaaaactcgctcggtggagcagacgctactcccgctggtttctcagggggatatgagactttctactcggaatatcct

SEQ ID NO: 46822 - DNA, 83 bp, Homo sapiens
cccgggactacgaccacctcttcaagctgctcatcatcggcgacagcgagccagccccagtgcctgctgagccgtttgacaac

SEQ ID NO: 46823 - DNA, 80 bp, Homo sapiens
cacccccaggatgtcatcgagggaagtattgatgaagatgttgtggtgatagaagcttcctccactccccaggttactgc

SEQ ID NO: 46824 - DNA, 100 bp, Homo sapiens
aaacaccactgaagcattgccaaggttctttcagagcacggcttcggccccatcactaccgacatccgggagggacagactttctactatgcggaagact

SEQ ID NO: 46825 - DNA, 75 bp, Homo sapiens
gccacagctattggatttcccacccagaatctttaggtaaatgaggttctgtggacaatcacaatgggaatccaa

SEQ ID NO: 46826 - DNA, 80 bp, Homo sapiens
cagccaccagctcgaccacagcaagctcctgggatcctgcagctcctgaaaggcaagctggtggtgggtcatgacctgaa

SEQ ID NO: 46827 - DNA, 100 bp, Homo sapiens
caaagatggaatcacaaacggcgcacattggtatgatgtggaagaacaggccgcccgcctgaagaaactacaagagcaagagaaacaacagaaagtggag

SEQ ID NO: 46828 - DNA, 101 bp, Homo sapiens
attggctgtggaagatggagctacagaaatcgacgtggtaattaacagaagcttggtgctgacaggccagtgggaagaatctgtctatgatcttctcccaa

SEQ ID NO: 46829 - DNA, 100 bp, Homo sapiens
ctgctggagcattctgtgaagaaggcagtacattttgggttaccgctaaacctattcgtcccgggcaacatccagcagcttctccaactcacccaagtgc

SEQ ID NO: 46830 - DNA, 75 bp, Homo sapiens
gtcggcagaggagaccgaaaagtggatggaggaggcgatgcacatgcaaggacacccaggcccattattttcctc

SEQ ID NO: 46831 - DNA, 75 bp, Homo sapiens
gaaatttggagtgtgcgtgcgcgccgagcgatccagagacaatggccccgatgggatggagcccgaaggcgtcat

SEQ ID NO: 46832 - DNA, 50 bp, Homo sapiens
acccggccttcaccaaactccctgtcatactccctgtcacaaactccagc

SEQ ID NO: 46833 - DNA, 100 bp, Homo sapiens
tactgtctttttcttcaatgggcagcatatgaaagtggattatggattcgacctcacattactactttgcgcaaatacacatacgggaagcatatactgg

SEQ ID NO: 46834 - DNA, 100 bp, Homo sapiens
gtgaactggaggagcgatttgccatcgtgctgagagaagaggtactcccttatagggactcgtaaagacatagagcatctggaaattaactgcctccatt

SEQ ID NO: 46835 - DNA, 100 bp, Homo sapiens
gcactggactcatggaggctgagcatttattcaggttgcaaagacagttgcacagaggctcaacacagatccaatgttgctgcagtttttcaagtctcaa

SEQ ID NO: 46836 - DNA, 74 bp, Homo sapiens
ggtgcggaagctggtgggcactcagcaccctctgcttaccacagccaggtagttcgaggacactacaaaggtca

SEQ ID NO: 46837 - DNA, 75 bp, Homo sapiens
gaggatgatggtagattgccaggtgaaatgacaatggatgctctgttggctcgattgaaacttctgaatccagat

SEQ ID NO: 46838 - DNA, 101 bp, Homo sapiens
atggccgagtggtctaaggcgccagactcaaggtggctggtcattgaccgcaaggtttacaacatcaccaaatggtccatccagcacccggggggccagcg

SEQ ID NO: 46839 - DNA, 51 bp, Homo sapiens
ccgagggagaagggagggcatttgagattctggacaatcaggaagtccaag

SEQ ID NO: 46840 - DNA, 90 bp, Homo sapiens
gatttctgcatttccatctgaggttgcttttaactttgacagaggaagaattttccaagacgccctataccatagaaaacagcagccaca

SEQ ID NO: 46841 - DNA, 100 bp, Homo sapiens
cgaacagtctctcctcctcacagaagcctgaaaatatttacaccagcagctccagttcataccaataaagaagatcctgctacccaaactaatttgggat

SEQ ID NO: 46842 - DNA, 113 bp, Homo sapiens
gcatgatgtggaacacgtgctcatcgatgtgggaactgggtactatgtagagaagacagcgacagctgtggcgcactgcaaacgcggcaatggtctcatcaaggtgaacgggc

SEQ ID NO: 46843 - DNA, 114 bp, Homo sapiens
ccaatcctctcatcttgtcctacctgaagtatgccattagttcccaggttccctggttgtgaaaatacatgagataaatcatgaaggccactatcatcctccttctgcttgcac

SEQ ID NO: 46844 - DNA, 100 bp, Homo sapiens
ctgctgacagtcctcctggaggggatctctggccaaggagtgtacggtggaatacatgttggtatcttttgatcatgaaaataaaaaagtccggttggtc

SEQ ID NO: 46845 - DNA, 92 bp, Homo sapiens
tgaggccggtgacatgtctgtgagctgcggaggctgcggcccccagatctgttacctaaagcaataaaaaatggccagaggatcagtgtccg

SEQ ID NO: 46846 - DNA, 98 bp, Homo sapiens
aggcatcctgactttggccatgattgcatttttcttcatcatcatttacctgggaccaatggttttgatgataatcctgagatctgtatctgtggacc

SEQ ID NO: 46847 - DNA, 100 bp, Homo sapiens
ggaagcttaacttcttatccatcccatctcttggacagatgatgccagttaattactttgaatgagtgcccgtgcgcagcggagatgccaccttccccaa

SEQ ID NO: 46848 - DNA, 105 bp, Homo sapiens
cgcaccgactggaccgggaaggagcatcccaggacctaccagaatctggtgtcgtgaaaactacccctaaaagccaaaatgggaaaggaaaagactcatatcaac

SEQ ID NO: 46849 - DNA, 74 bp, Homo sapiens
tcagcttcctgaggtctcctcagccatgctgaactgagccaaaaacctgtatatcatctccgtgaaggggatca

SEQ ID NO: 46850 - DNA, 115 bp, Homo sapiens
cttctgtcattgctgctgactgctctggcttcctccaccaaaggacaaactaagagaaacttggcgaaaggcaaaggtgctggagaatctggtaaaagcaccattgtgaagcaga

SEQ ID NO: 46851 - DNA, 100 bp, Homo sapiens
cagaggcccaaattgaggcgcaatgatgagaggatgtggtggtctactctgatgtcaatcttgagggctagatggtgatggaatttcctgataatgtgtt

SEQ ID NO: 46852 - DNA, 100 bp, Homo sapiens
acttcctggtgcaggaggctcactccgatttaaggtgcccgagtccacgctgatggactgccgtagactgtggcccagagttgctcagaattggagcaga

SEQ ID NO: 46853 - DNA, 100 bp, Homo sapiens
tcctcaggtgtccagcctgctcaggcagcagaagatgtcgttttcattggacctgacacacatgctattcaagccatgggcgacaagattgaaagcaaat

SEQ ID NO: 46854 - DNA, 100 bp, Homo sapiens
gttggggaggtggagaatatgccaccgccacagccacgatcatggggttgatagttcttggggaggtacctcccccagagcatacaacagacttatttct

SEQ ID NO: 46855 - DNA, 74 bp, Homo sapiens
gacagatcgctgtcaaaaccctaggcaagccggtatattcggggcccaggagcaaggaaaagtggccttttgcg

SEQ ID NO: 46856 - DNA, 90 bp, Homo sapiens
ccaactcccgccctccctcaccgccaaggtcctgcttcaccgaacagcacctcaggagcaggatctcactggcatcgaatctatggatca

SEQ ID NO: 46857 - DNA, 100 bp, Homo sapiens
catcagggaggctttcagccggagaagcgagtttcagctgtttcaggcgacctccaagaagggtatcagtcgactggataaacagatgagaaagttcaca

SEQ ID NO: 46858 - DNA, 74 bp, Homo sapiens
ggacgccgatgcccggggctgcgacggctgcagagttcaaggaggccttccagctgtttgaccgaacaggtgat

SEQ ID NO: 46859 - DNA, 80 bp, Homo sapiens
ctttactcagctgagtgtgccacacaggtagccctggacggcattcagtgttttggaagctcagcccggagccagaaacg

SEQ ID NO: 46860 - DNA, 50 bp, Homo sapiens
tctcgagtagctgggattacagcatacgatgaggcctatgctgaattcca

SEQ ID NO: 46861 - DNA, 90 bp, Homo sapiens
ggcccagtttatggcttccagtggaggcattttggggcagaatacagagatatggaatcagtgagggtcgctgtctgcccattgatagag

SEQ ID NO: 46862 - DNA, 75 bp, Homo sapiens
ctgggcctgcaggaagcccttccgcggaccgaaaggtacaatgactcttcttgcttttcacctaagttgaataag

SEQ ID NO: 46863 - DNA, 100 bp, Homo sapiens
agcaagcccagtacctgggcatgtcctgtgatggccccttcaagccggatcactaccgctactgagagccaggttgagaacttgttgcttagtaaccaag

SEQ ID NO: 46864 - DNA, 90 bp, Homo sapiens
atctactcctacgtcaggccagagagttgctgaacctgtttgcatgagttgctcctgacggccctttaggatacttccatgtctgtaggg

SEQ ID NO: 46865 - DNA, 133 bp, Homo sapiens
agaagatacccgccctgcgccccgctctgctgtgggcgctgctggcgctctggctgtgctgcgcgacccccgcgcatgagttactggaggtgaactgtttgaagacatagtggcaagagaatactacagtgaa

SEQ ID NO: 46866 - DNA, 100 bp, Homo sapiens
tgaaaatggacgagtaatcgcctgctttgattcattgaaaaaaaacacaccttgactttagtcagatacatcactgtctgttaaaggaaaccaagcgtga

SEQ ID NO: 46867 - DNA, 75 bp, Homo sapiens
gccagcaaggatgactcaatcatcactgttttaacagggatctgctgaattggtgtaataggattgcccatagct

SEQ ID NO: 46868 - DNA, 50 bp, Homo sapiens
gtccgtttcgtgagcagcgccaaggtggtggtgaagtttattaagaagga

SEQ ID NO: 46869 - DNA, 109 bp, Homo sapiens
gcccagtatgggaaagatctaccttctggaagctactactacgtggtgcttggaaagttaaaatgcgcacaatactggccacaaaaagaagaaaaagagatgatctttg

SEQ ID NO: 46870 - DNA, 85 bp, Homo sapiens
tccgccgccgcctgaggaggcgagctagccgggagttacaccgccaccgccaggcctgtcatctttacttcagagtgttactggg

SEQ ID NO: 46871 - DNA, 59 bp, Homo sapiens
gcctcccgagtagctgggactatagaacatatttattggtggatcccaatgaacgagaa

SEQ ID NO: 46872 - DNA, 100 bp, Homo sapiens
gacttctctgcacagcatccctgtgacagaattcagtttgcctgttctgtatgcaagttccgtagctttgatgacgaagagatccagaagcatctgcaaa

SEQ ID NO: 46873 - DNA, 75 bp, Homo sapiens
tgatatcttcactgtcacagaggatgaaattaagattgaccctcttgctggaatgacatctcttagtataggtgg

SEQ ID NO: 46874 - DNA, 90 bp, Homo sapiens
atgactcagacctgggcacagcaaatgctgaggactcagaccagtctctgcaagagtcagtcattggcaccatgaactggaataaaggtg

SEQ ID NO: 46875 - DNA, 100 bp, Homo sapiens
taatttcaaagcttttcccatggagctgaagagtctgctgcttctggagcaaagggagatctggctgctagtgaccgatgtcactctgcaaacgaaggag

SEQ ID NO: 46876 - DNA, 88 bp, Homo sapiens
ggccccagagctggcgggagggagaggccaccagcagcgcgcgcgggagcccggggaacagcggactttccttatcccagttgattgt

SEQ ID NO: 46877 - DNA, 100 bp, Homo sapiens
caagcggaacgccgtccacgtgaaggggcccttctcggtggaggccgacccatccagtaaaacgatgtttgcagaaatggaaatcattggtcagtttaac

SEQ ID NO: 46878 - DNA, 82 bp, Homo sapiens
ccggcacacgggtgagaagcccttcgcctgcacctggccaggctgcggctggagaataccctctaccatctgctttggtcag

SEQ ID NO: 46879 - DNA, 100 bp, Homo sapiens
caagaataagctgcaagtccttccagaattgcttttccagagcacgccgaagctcaccagactgtatattacagctaatactgacacagaagaacagagt

SEQ ID NO: 46880 - DNA, 110 bp, Homo sapiens
ggggagtcggcgccgctcccggggagctgcaaggctcgcccctgcccggcgtggagggcgcggggggcgcggagctataatggatttccagttcttaggaacaatttatt

SEQ ID NO: 46881 - DNA, 83 bp, Homo sapiens
ctcgcccgccaccctgcgctgccgccgctctgaggagttaaaggacaactacacctttgcccaacctgggattcaaatgaaag

SEQ ID NO: 46882 - DNA, 75 bp, Homo sapiens
taattagtgcacacatccatccagtgtgttctttatggaagtggacgttgtggtagcaccatgccaaggcctccg

SEQ ID NO: 46883 - DNA, 75 bp, Homo sapiens
attgtcgtcatcctagaaggcattgtggaaacaactgagcacaaagttatcattgttgggctggataatgcaggg

SEQ ID NO: 46884 - DNA, 82 bp, Homo sapiens
tcttgctcacagagctctgtaaaggtgtccctggccagtgtccttccacctgtccacaagcatggggaacatcttcgccaac

SEQ ID NO: 46885 - DNA, 125 bp, Homo sapiens
ctgttgtattgcaatcatggtgcagaaataccagtccccagtgagggtgtacaaatacccctttgaattaattatggctcatgaacaggctgaacactttgccacgaggcttcggctccctgcca

SEQ ID NO: 46886 - DNA, 100 bp, Homo sapiens
caaaagtccattcagaaaagacaagagccctgtgagacctgaaggaaaagattatgcccttcattggctagtgctggggactcatacgtctgatgagcag

SEQ ID NO: 46887 - DNA, 75 bp, Homo sapiens
ctgtggtggacgttcggccaagggaccaaggtggaaatcaaaccctgtcctgggagctggagaggatgtcagcga

SEQ ID NO: 46888 - DNA, 100 bp, Homo sapiens
cgactcgcttctttcggttctacctgggagaatccaccgccatccgccaccatggcgatccggcggcggaacgtgcgtggtgaggacagcggccgcaagc

SEQ ID NO: 46889 - DNA, 100 bp, Homo sapiens
agaaaattatcaacattctcacagacaagcatggagcctggggaaattctgcagtgagatatgaagaagctgaagtccggaaaaaacttgaggaaaaaga

SEQ ID NO: 46890 - DNA, 89 bp, Homo sapiens
ggatatctaacatcgtaaccagagaagaaaggagactcacttatgtgcacaatggttatgatgtgattgctcaagcccaatctgggact

SEQ ID NO: 46891 - DNA, 101 bp, Homo sapiens
aggtgcagctcgtgagcgtcatgaaggaggccataggggctgttatccactacctgctgcaggcaaacactacggggtttacagctgtgagggttgcaagg

SEQ ID NO: 46892 - DNA, 100 bp, Homo sapiens
tcgggagaaacaacaactgctacatctgttggaggagccaactagcatggaagtgcaggtggcacaagaatggctcaactctccaaatagagagaatttc

SEQ ID NO: 46893 - DNA, 101 bp, Homo sapiens
cgtgaccgagagcgcgaatatcgtcatcgttagaagtgtgtgcaagatgaagaagccaacacagatgaccttacgactctggataggaaagccatcttaca

SEQ ID NO: 46894 - DNA, 100 bp, Homo sapiens
tgaagaggaggtgcagatggcactttccaaagtggatgcctccggggaggttcaacagagtttggaaaagatttctaaactggagcaggaaaaagaacat

SEQ ID NO: 46895 - DNA, 75 bp, Homo sapiens
ccatcacctggatttacctgttttctgggagcttcgaaggaaagttgactcatactggtgtccagtgaagaaacc

SEQ ID NO: 46896 - DNA, 82 bp, Homo sapiens
ggtcctcgcttgcagttcagcgaccacggaccaagaatcgccttcagccctgtctggtgcatccttggcagaaagtgaggag

SEQ ID NO: 46897 - DNA, 100 bp, Homo sapiens
gtgattaccatggcgaggagtctctgtccgggggcctggctaaggaaaccctattacctccaggtgcacacatcttgaccaactcagcagcaaggtggat

SEQ ID NO: 46898 - DNA, 82 bp, Homo sapiens
ttacctattaccagaacacactgacatactgccaaatctgtcgaaagggagataatgaagaactgcttcttctttgtgatgg

SEQ ID NO: 46899 - DNA, 75 bp, Homo sapiens
caacgcggtgcgcgaccgggagctggacctccgggcaccttctagccaccatggcaacctcatctgaagaagttt

SEQ ID NO: 46900 - DNA, 100 bp, Homo sapiens
tacagaacagctgggctcctgcattcctcccagaccctgtcttcagtaggacaacaggcaacaaacttaaatttgtttgtgatggacgcctctgacccca

SEQ ID NO: 46901 - DNA, 101 bp, Homo sapiens
ccgaggtagaggcagtggcgcttgagttggtcgggggcagcggcaggtgctggagaatctggtaaaagcaccattgtgaagcagatgaggatcctgcatgt

SEQ ID NO: 46902 - DNA, 100 bp, Homo sapiens
cctatgtttttcatcctgtctccaggggtggacccactgaaggatgtagaaagtcaagtggatggcattcccaatgacagtagtgatagtgaaatggagg

SEQ ID NO: 46903 - DNA, 124 bp, Homo sapiens
cctccccaagggcactctcttcctggaagaagggggatgtgagcgtgcaggagcatgaaaggaatccaaatgagactcagaacaatagcacaagctggcctgtcttcaaaagcactgaacaaaa

SEQ ID NO: 46904 - DNA, 131 bp, Homo sapiens
gcagcgtccctgtgacctggccgatgaggaagtactgagcctgttggaggaactggcccggaaacaggaggacagctgagctcaatgtgcagcaatggatgacgacagcctggatgagcttgtggcccgga

SEQ ID NO: 46905 - DNA, 98 bp, Homo sapiens
cgccgagccgcaggagagacacgctgggccgaccccagagcggcgctggacaggtgactcctgcacctgcgccggctcctgcaaatgcaaagagtgca

SEQ ID NO: 46906 - DNA, 100 bp, Homo sapiens
agccggaggacctgctgatctaagtggagagctcagaaaaggagatcgtattatatcgcaaatcaatgaggacacgggaacagcacgtgccattcagaga

SEQ ID NO: 46907 - DNA, 100 bp, Homo sapiens
ttagtcaagtgacggtgctgaaatacttttctcattacatggaggagaacctcatggatgattaaagcaaggagagccaatcatgactggcaaaacacag

SEQ ID NO: 46908 - DNA, 100 bp, Homo sapiens
cacacaaacttggtataccttgctacaatagcagattctaatcaaaatatgcagtctcttttaccagcagacttctgccatgggcaagtgatgtggccac

SEQ ID NO: 46909 - DNA, 83 bp, Homo sapiens
ttcgagatctcgtgggtcgaaatcaaggtcgttccaggggtagaggaggcatgaaggatgaccgtcgggacagatactctgcg

SEQ ID NO: 46910 - DNA, 100 bp, Homo sapiens
gctggaggaggataacaagttttgtgcagattgccagtctaaaggtatccaagcccaccaatgggatctgtctcagcacccaacctgcctacagcagaag

SEQ ID NO: 46911 - DNA, 100 bp, Homo sapiens
cctggacacagcaatatctctgggctttcacaggcatttgttgctatcggggactacaatggccacgtcggtctgggtgttaagtgctccaaggaggtgg

SEQ ID NO: 46912 - DNA, 112 bp, Homo sapiens
tccaccctggcaggaatcccaatttgcctccacttagtgagcggaagaatggcatagaatgtcaagctaaccaggcgtccgctacttcagaagagtgtactgtcgcatgggg

SEQ ID NO: 46913 - DNA, 74 bp, Homo sapiens
cgatccgggacggccggtcaggctcgccgccgagctgggcgaccattgacgaggtggagacggacgtggtggag

SEQ ID NO: 46914 - DNA, 96 bp, Homo sapiens
aaggggaggcctggctgagctgtcatcccccaggctccatctactctttgaagcttctgcccagcttgcattgtttctaggagaacctgcgtcata

SEQ ID NO: 46915 - DNA, 75 bp, Homo sapiens
aggatcaacagaacttctttgtcttcgggtgccactgtaagaagcaagttggaattgacagaggtgatataccag

SEQ ID NO: 46916 - DNA, 90 bp, Homo sapiens
gagtgctcggcctggctgcacaagctctaccaggagaagtgatcctgccatgaagcagtttctgctgtacttggatgagtccaatgccct

SEQ ID NO: 46917 - DNA, 82 bp, Homo sapiens
agaaatacagtgaggagcttaaaagcagtcaggatgaatcttatggcaagggccttatatgacaatgtcccagagtgtgccg

SEQ ID NO: 46918 - DNA, 74 bp, Homo sapiens
ctgactgccccgcatcaccggagcgtcccagctgcgaggaggatcttagaaatgaagttgaaaaattacgcaat

SEQ ID NO: 46919 - DNA, 100 bp, Homo sapiens
gccggtggcatgttggatcggatccttctggagtccgtgtgccagcaacagagctgggtccgggtgtacggtcaatgatgccttccttcatgtgatacag

SEQ ID NO: 46920 - DNA, 87 bp, Homo sapiens
ggatctgggaacagtacaattatagtaaaaccaggggcagatgtgaggtggtgatcatggaagacgcccctgactattatgcagtgg

SEQ ID NO: 46921 - DNA, 100 bp, Homo sapiens
ctcaaggtgcccctggtggtccggcttgaaggttatgatgtgattgctcaagcccaatctgggactgggaaaacggccacatttgccatatcgattctgc

SEQ ID NO: 46922 - DNA, 100 bp, Homo sapiens
ctgcatcatgatgtcaacaaccgtggctcacaagatgaaagagcacgaaacggtggacatgctcaagagtcacattaaagaggaactgatgcacggggag

SEQ ID NO: 46923 - DNA, 75 bp, Homo sapiens
cggcgatcggccgcggccgctctctgaagaacctccgagtacgagatttgcatctgctggtgatgatggaattgt

SEQ ID NO: 46924 - DNA, 75 bp, Homo sapiens
ccctggcgaccactgcttctccgtgggcagcattggcgaccagcgcttcacggagaactgcgacacatcaccaag

SEQ ID NO: 46925 - DNA, 75 bp, Homo sapiens
ctgcgatctctgtggtaggcccagtttctgccactgccttctacaaagcacaacctgtaattcagttcatgtgtg

SEQ ID NO: 46926 - DNA, 83 bp, Homo sapiens
ggaatctcactctgttaaagctggtctgttctaactgaggttatgaagacagtatggagtttccagaccatagtagacatttg

SEQ ID NO: 46927 - DNA, 98 bp, Homo sapiens
ccctgggagcgggttcaggaccgcggatcggaattactcgggaggctgaggcaggagaatcgcttgaaccggagaggcggacgttgcagtgagccgag

SEQ ID NO: 46928 - DNA, 75 bp, Homo sapiens
caatcaaactgctacaagacaacaccctgatctggcatggacatggttttgacccaccacatcagagtgacacaa

SEQ ID NO: 46929 - DNA, 100 bp, Homo sapiens
gagtcccccggagtccgactcgctacgcgggtcttgcgagatatctggccgcctctgccgcagctggaggtactatcgtggtgcagtgggggccctcctg

SEQ ID NO: 46930 - DNA, 100 bp, Homo sapiens
aagactgagtcgcagttaccaccaaacccaggaggagactctccctggaaaacttcccttccctttcggtggggtcctggatcggtttcgccatcatgac

SEQ ID NO: 46931 - DNA, 83 bp, Homo sapiens
aaacaagctcagaacgctcgccgattctaccattatggtttttagaacttcagccataaaaatgggcagaattttccttgatc

SEQ ID NO: 46932 - DNA, 100 bp, Homo sapiens
tgccccacgggtgtgcagctgcaggacaacggcaggacgtgtaaggcagacttcccaagtaagaagcggaagaggagccgctggaaccaagacacaatgg

SEQ ID NO: 46933 - DNA, 83 bp, Homo sapiens
gaggagctgggtggtcccagcctggagctgtgccagcctgacatggtttggtgccctggttgtcagatgttggaaagcagtag

SEQ ID NO: 46934 - DNA, 82 bp, Homo sapiens
ccaaagacccctggagacatggcaaaatacatatctcagtgcattgatgagatcaagcaggagctgaagcaggacaacatag

SEQ ID NO: 46935 - DNA, 100 bp, Homo sapiens
gcccgacttgaagtggaaaatcaagctaagcgcctactagagcagggtttggagactcaggagcatattaatgaaaagtgccataaactgaaaaaccaaa

SEQ ID NO: 46936 - DNA, 100 bp, Homo sapiens
atagaaaagactgggccgttactgattgagctacgaggaccaagggtctcctatggacagaagtgcgggcaaggagctttgttcctccccgatgtcaccc

SEQ ID NO: 46937 - DNA, 51 bp, Homo sapiens
gacagaccaacctgtcagtgctgcaactcaaccatccagagcttgtggaag

SEQ ID NO: 46938 - DNA, 75 bp, Homo sapiens
ttgaggcccttcttgtgtatctggagaaaatagaggttcttgggtgtctctggggagtccctgggccagaccttc

SEQ ID NO: 46939 - DNA, 101 bp, Homo sapiens
cagaatgtcacaggtccagggcagaggaccaacatgggcattttgtttatgagcaaggtggtagcgttgtgatggtggggagctttagatggggaaactga

SEQ ID NO: 46940 - DNA, 97 bp, Homo sapiens
tggccccacagcaacagaggcgcagcctcaaggaggaggagtgtccagcagaattgacttctctttgaaagataacgaaaagcagatcatcctggac

SEQ ID NO: 46941 - DNA, 75 bp, Homo sapiens
tgacagtccatatgtaaccaaatattatggatcctatctgaaggtgtggatgaggtcaccattgtcaacattttg

SEQ ID NO: 46942 - DNA, 98 bp, Homo sapiens
ccggacaatatagtggttctccccaactgctcaaaaaccttaatattgttggcaatatatcccatcacaccacaatataattggtgattacaactttc

SEQ ID NO: 46943 - DNA, 100 bp, Homo sapiens
gtgggtggtcctggggcactcagagagaaggcatttgttgctatcggggactacaatggccacgtcggtctgggtgttaagtgctccaaggaggtggcca

SEQ ID NO: 46944 - DNA, 100 bp, Homo sapiens
tgttctcaaatctttggatgccattgtagccagtgtgatggagcaccggcagctgctgaaggacagcttcatggtggagctggtggagggggcccgcaag

SEQ ID NO: 46945 - DNA, 75 bp, Homo sapiens
gacttcgatgatttactgaaatttgatgacctagatggaacacatgctctgatgtggagacggggtttcactgtg

SEQ ID NO: 46946 - DNA, 75 bp, Homo sapiens
gataaagttggtcagtctcgcactgggaatgtatcctgtcaggtataatgtcagtgaatggcaagaaagttcttc

SEQ ID NO: 46947 - DNA, 98 bp, Homo sapiens
atggcggcttgtccctgtttcgccacagttcctaccttatgagctcggttttcttatgcttataagagtggaacagcatacagtttgaacatttattc

SEQ ID NO: 46948 - DNA, 82 bp, Homo sapiens
tgtctagttgcaggaaaacaagctcagggcttccactgattctacattatgagcgttgagggtgagcagcatgagaaggcgg

SEQ ID NO: 46949 - DNA, 101 bp, Homo sapiens
gaaacaggactgttgctatgacaacagggagaaccccatctccagctggaacgtgaaggatagtaatgatgacactgaagatgtttcactgtttgatgcgg

SEQ ID NO: 46950 - DNA, 80 bp, Homo sapiens
acagactgacagactcgctaacaatgcagatcttcgtgaagactctgactggtaagaccatcaccctcgaggttgagccc

SEQ ID NO: 46951 - DNA, 100 bp, Homo sapiens
cgagaagagcagagcggagggagccccagacacgatgagcagcaccagcagtaagagggctccgaccacggcaacccagaggctgaagcaggactacctt

SEQ ID NO: 46952 - DNA, 75 bp, Homo sapiens
ccaccccccactcgcagtccccaagttcaatgttaaaaagtccacggaacctgttcagccccgtgccctcctcaa

SEQ ID NO: 46953 - DNA, 75 bp, Homo sapiens
ggaccctgcggactactgcaaagattaacgtcttcaaggacccagttgctgatcccaacaaaaggtccaaaaagg

SEQ ID NO: 46954 - DNA, 100 bp, Homo sapiens
ccgggacccggttccccggcccacagtgggggtgtgcaaacccgagagaactgggtaatactcagctggccttacagatcatcaaaaggaatcagctgct

SEQ ID NO: 46955 - DNA, 80 bp, Homo sapiens
cacaggccgacaagatacctctcgcatgtccacctcacagagatgccctgtatccaagcccaatatgggacaccagcacc

SEQ ID NO: 46956 - DNA, 98 bp, Homo sapiens
tttcacagcactctgggcgaaaattggatgtgaaaatgaagccagaccgagaccattcctcaagaattttgtatccaaggcccaaaagtttgttaccc

SEQ ID NO: 46957 - DNA, 100 bp, Homo sapiens
cgagcccaaaccccgccaccatcataggtttcagtgttgactggtgggctcttggagtgctcatgtttgagatgatggcaggaaggtctccatttgatat

SEQ ID NO: 46958 - DNA, 89 bp, Homo sapiens
catacacaagaagatcgtcctgcagggtccatcttgctgggatgatgttttaattccaaaccggatgagtggtgaatgccaatccccac

SEQ ID NO: 46959 - DNA, 100 bp, Homo sapiens
cgctgcaccctcccttgtgcatttcaacaggtgccctttcccaccatggtggctctgctgtgcatgtggttcgggatctccctgcccctcgtctacttgg

SEQ ID NO: 46960 - DNA, 96 bp, Homo sapiens
gtttgacggcaaactcttcctccgcgtactttaaaagggatgaagacatggatggagaatgggaggctcctcagattgccaaccctagatgtgagt

SEQ ID NO: 46961 - DNA, 75 bp, Homo sapiens
gagaacgactgcatctttgacaagtttgagtgttgctggaacggttcggatagccctgcctctttcttgtcgcag

SEQ ID NO: 46962 - DNA, 96 bp, Homo sapiens
atctttggatatagaggtcgatggtggagtaggtcctgacactgtccataaatgtgcagaggttctggcccagactcgcctgggaaatggatggtg

SEQ ID NO: 46963 - DNA, 51 bp, Homo sapiens
caagggtttccgcaatgcccctgttgtgacatttgctctgaactggatgat

SEQ ID NO: 46964 - DNA, 82 bp, Homo sapiens
gggatttctacgacccggagcacccgacccctgagcattttttactgtctacagaaacttattgtaattcatttttcctcac

SEQ ID NO: 46965 - DNA, 83 bp, Homo sapiens
ggatgagtcatgtggcagtggaaaatgcgctcgggctggaccagcagtgttatagttttgccgctggactcttccctcccttc

SEQ ID NO: 46966 - DNA, 97 bp, Homo sapiens
gcccctcgggcagtgacaccacctacttctccgtcaatgtttcaggtggctgtggcgtgggaaacctgacagagccagtggccgtttcgctgcggca

SEQ ID NO: 46967 - DNA, 104 bp, Homo sapiens
ctttgactactggggccagggaaccctggtcaccgtctcctcaggtcagaaaaagagtgcacgccagtatcacgtacagttctttggtgacgccccagaaagag

SEQ ID NO: 46968 - DNA, 100 bp, Homo sapiens
aaggaaataccagccaaaatcatttttgaggatgaccggcaaaccagtccagctacgggggcccagccagccagcagctgagtgggggttacggaggcgg

SEQ ID NO: 46969 - DNA, 100 bp, Homo sapiens
gaaatctcgaaggggacctcatgtccctgtgggacacaatgcccccaaggagtctcaggagcaggggctgcggcagaggctgctggacgagcagttcgca

SEQ ID NO: 46970 - DNA, 101 bp, Homo sapiens
caagatgttccctgccctgggcttcggggccaagctgcccccggatggcagagtgtcccacgagttcccactggaatgaatctgaagtctgctgcagtaaa

SEQ ID NO: 46971 - DNA, 98 bp, Homo sapiens
gagatatcatgctctggaattttggcatcaaggacaaacccaccttcatcaaagggacttcgattttcagaattcctcctgggaatgctgactccttg

SEQ ID NO: 46972 - DNA, 83 bp, Homo sapiens
ctggacagggacagtgggcagtgctcccggaacacaagctgtgaaacactagtggaatggatatgaaagcatacctgagatct

SEQ ID NO: 46973 - DNA, 98 bp, Homo sapiens
gaaaattgagacggagctaagagatatctgcaatgatgtactgtcggcagaaccaattgaaagaccaacagcaacagcaagtggtatcgttatgtcct

SEQ ID NO: 46974 - DNA, 75 bp, Homo sapiens
ccgagcgcggccctgcaggcgatgtcgccgaaaccgggctgcaggcgggactgacaggctccaactacccgggac

SEQ ID NO: 46975 - DNA, 82 bp, Homo sapiens
gctctgcgcgtaccgcgctctttggaaacgaattaccatggtgaatccgggcagcagctcgcagccgcccccggtgacggcc

SEQ ID NO: 46976 - DNA, 101 bp, Homo sapiens
ggagaggagaagagatgctggcgtgaagggctgtcaaagctcgaaaaacagcagcagaggaaagaaaagaccagagctaagggaccttctgaatcaagcaa

SEQ ID NO: 46977 - DNA, 82 bp, Homo sapiens
gagacccgttcagagtcctacagtggcaggccatctggctgctgtgcacaggcgctcgtgaggctgccttccggaacattaa

SEQ ID NO: 46978 - DNA, 83 bp, Homo sapiens
aaaggcttcactacccttatcccggagagctgacaatgatgaatctcaatgatgataattccgaagaaggcttccacactatt

SEQ ID NO: 46979 - DNA, 100 bp, Homo sapiens
agcatcaaatacttgccactccacttcaaaatttacaggatcagttccatgacaagaccccttatacgattatgtttggtccagataaatgtggagagga

SEQ ID NO: 46980 - DNA, 95 bp, Homo sapiens
ttcgcagtggtcgcttcttctccttggtgatggaagctgttttattgtccagcaagacttagactatgtcactgagctcactggggctgactgtg

SEQ ID NO: 46981 - DNA, 100 bp, Homo sapiens
agccagctgggtccggggagcgccgccgccgcctcgatggggtaaatcagaagactgaagcacggcatatactcaccttagtccataaacacttctgtac

SEQ ID NO: 46982 - DNA, 95 bp, Homo sapiens
gcaaggccacattgtcgccatcagcagcatccagggcaagatgagcattccttttcgatcagcattcctgtgcctcctgattgctgagtgttcac

SEQ ID NO: 46983 - DNA, 96 bp, Homo sapiens
gattgaagacagtgaagtttaatgccaaacctggagtgattgattcgaaaggggtggatgaaaatactaggaaaagtttatttaagttacgttcta

SEQ ID NO: 46984 - DNA, 100 bp, Homo sapiens
aggcaggtggtgctgaccctgtaacccaaaggaggaaacagctggctaagctcatcattgttactgctatggagccaaaatccgggcccctcacgcgctg

SEQ ID NO: 46985 - DNA, 74 bp, Homo sapiens
atgtatataaagcaaagaagtaagtttatgacactgtcgtgatgagaggagatggattgaaaagcagaacagag

SEQ ID NO: 46986 - DNA, 97 bp, Homo sapiens
gagggccagctgacggagatggtgcagaagatggaggaggtgtgaatgaggcaggatgaactggacaggtttgtacaccttgctcagtggcgtgaac

SEQ ID NO: 46987 - DNA, 74 bp, Homo sapiens
gggttcgggtgtctcgtgtgtgaacatcacagggtggcccagttgaaatccttcccttcctctaccttggaagt

SEQ ID NO: 46988 - DNA, 115 bp, Homo sapiens
tatgtagaggaagaaaacattcctgctctgaaagctcttcttgaaaaatgcaaagatgtagatgagagaaatgaggtacccgaggattaataaagaatctttacttcctgtagca

SEQ ID NO: 46989 - DNA, 75 bp, Homo sapiens
ccgagaccgcggccgggaccgagggtggtctttgggaagaagcttcctgcctttgccaccatccccatccaccag

SEQ ID NO: 46990 - DNA, 100 bp, Homo sapiens
taaacaagctcggagcgggagtagacagtggccggcagggcagccgggggacagctgtagtgaagtttgtgggcatcacctatgccctgaccgttgtgtg

SEQ ID NO: 46991 - DNA, 88 bp, Homo sapiens
gaaaaggaacgggagctgagagcagtctgagctatcagctgaagaaagtccagaaaaattaggaacctcccagctacatcgccggaaa

SEQ ID NO: 46992 - DNA, 88 bp, Homo sapiens
aaattcttcgttctgtgcggcgacctcatccacgccatgccagctgtgagtaccagagtgcccactggttccaacagttcttctcaga

SEQ ID NO: 46993 - DNA, 76 bp, Homo sapiens
ctttgggctggtgaccagatattagagttgatgacagtgcaattttggattgccagttcagtgagttttatcatac

SEQ ID NO: 46994 - DNA, 75 bp, Homo sapiens
gacgacatgtatgggccagaaaaggttgcgtaggaggctctgtctggtatcttgaaagaagaactatacaggact

SEQ ID NO: 46995 - DNA, 75 bp, Homo sapiens
cacagaaaagccaccgagggctacagcctcgggaaaagtaaccaaaatatccactgaggatgatggattggtgcg

SEQ ID NO: 46996 - DNA, 100 bp, Homo sapiens
ttttggcattgacatttaattttagggtcctttatatagaagggagagtagctggctctgaagcaccgacaaggcaagaatcacaagatgcgcatcattg

SEQ ID NO: 46997 - DNA, 59 bp, Homo sapiens
gtatcgcctcccgtcctggtagcctttccaccagcggccagtgacgaggagctcaccag

SEQ ID NO: 46998 - DNA, 100 bp, Homo sapiens
ttccagcccctgcatattatgcccggcttgtagcatttagggcaaggtatcatctggtggataaagatcatgacagaatttaaatgtgcctgattcatct

SEQ ID NO: 46999 - DNA, 78 bp, Homo sapiens
aagaatgtagaatgaggatagaagagaggaaatcccaacatttaacaggtgaggaagaggatggagatgaagatgagg

SEQ ID NO: 47000 - DNA, 100 bp, Homo sapiens
gtcgacttcggcggggcccaggtgagaaaggcccacctgtgtcctggttgagggtctccagggttctttggggcccgagccagaaaaccttgctcagaag

SEQ ID NO: 47001 - DNA, 75 bp, Homo sapiens
ttgaccggcagaaactgaacttgctggagacaaaactgcaagaccgtcaatgtgcccgcgtgctggccgacgaga

SEQ ID NO: 47002 - DNA, 88 bp, Homo sapiens
ggagctgacggtggaggttcgcggctctaacggggctttctacaagtgcagaatacagaaactgcagccatgaccacgcacgtcaccc

SEQ ID NO: 47003 - DNA, 83 bp, Homo sapiens
gacgccagttactgcacggaaagcagcgtcaggagccatagtacctacagcagcactccagtttttgaatcagagccgacagg

SEQ ID NO: 47004 - DNA, 100 bp, Homo sapiens
ggactccgtcggcgcacatccccgtcccagcgcagagattacaaggcttcctcggagatggcactttaccagaaaaaacatggtattaaactctataaac

SEQ ID NO: 47005 - DNA, 101 bp, Homo sapiens
ggaccgggaacaggatgtcatcacctgttatgagaaagcaggggacatcgcactcctgtatctccaagagatagaaaggagatcccaggcccacaaatcaa

SEQ ID NO: 47006 - DNA, 82 bp, Homo sapiens
aaaattcactgagtaatctttttaccagagtggtgaaaggacataggaaggagtctggggaactgtactacagcattgaaaa

SEQ ID NO: 47007 - DNA, 100 bp, Homo sapiens
gtgcaggacaccgacatggaacagggactcactggggtgaaactggaacgccaagctgaagaagaacgaatacggaagcacaaagcagctgctgagaaag

SEQ ID NO: 47008 - DNA, 75 bp, Homo sapiens
gcccccggcgcgatgcccttcaggaaaggtatgaacgctgccgtccgtgccgtggtgcgcatgggtatctacgtg

SEQ ID NO: 47009 - DNA, 110 bp, Homo sapiens
gtgggaaaggctcggctcatgttctgggacttaggagggcaggaagagctgcagtctttgtgggacaagccaggacggcaaccttcccaccctcatatccagcgtccacc

SEQ ID NO: 47010 - DNA, 75 bp, Homo sapiens
ctggaccaatcagcttcatctaaaaattacctctctagtgacccttcagctgttaaccctggttggccatgacga

SEQ ID NO: 47011 - DNA, 75 bp, Homo sapiens
agttgctggtgctgctgaagtccctagggaaccaccaattcttcccagagctgtaggtaaaacttgcctactgat

SEQ ID NO: 47012 - DNA, 75 bp, Homo sapiens
gaactccgcgacccgagcgcaagatccctgcatgtcactgagtccaccatgctttacagaagaagacagatttag

SEQ ID NO: 47013 - DNA, 80 bp, Homo sapiens
gtttggaaagacccaggagaagccgcccaaagaactggttggggtgactcagtgggaacgccatctgagcggggcatgac

SEQ ID NO: 47014 - DNA, 80 bp, Homo sapiens
gcccgactcctccgacgccgatccggacagcggcacagaggagggagcaaaatgatgcttcaacacccaggccaggtctc

SEQ ID NO: 47015 - DNA, 100 bp, Homo sapiens
agagcactgcagccagtgaaaccactgagtgtactaatggtcacttgatgtgcgctggctgttttatccacctactagcagatgcccggctgaaggagga

SEQ ID NO: 47016 - DNA, 50 bp, Homo sapiens
gtgacggaggagcttgtaccaccggtaagttctcttctacgctgtatgag

SEQ ID NO: 47017 - DNA, 103 bp, Homo sapiens
tcggactgatgcgtgcttcattcgagttattggatctgagcttgtacagaaatacgtcggtgaggtttttgaatctgaaaattcaagaaggtgaagctcacaa

SEQ ID NO: 47018 - DNA, 90 bp, Homo sapiens
cctgttccaccttcagagcgtcacggcgtacgccctcatggggaaaatctccccggtgactttcaggttgtccttctattcaggccactc

SEQ ID NO: 47019 - DNA, 90 bp, Homo sapiens
agctgcgggcgtcgggcgcgggcaaggccatcggcgtcctgaccagcggcggcgacgcgcaagaaatgcactcggtgatggaaagagagc

SEQ ID NO: 47020 - DNA, 75 bp, Homo sapiens
cgggtgaggccggccacgccccgcacggagtgtggccatctggggccgtgtggtatttgccactcaggagacatg

SEQ ID NO: 47021 - DNA, 74 bp, Homo sapiens
ccatctcatgactttatacaggaatcggaggtttgcctgcaatgagatttcattctctacatttaaaggacatc

SEQ ID NO: 47022 - DNA, 83 bp, Homo sapiens
aaaatgaacagttttgtggaatagatgaccaaatgattacagtttaaagacaatttctgtgatcaagttgtcatttggaagat

SEQ ID NO: 47023 - DNA, 82 bp, Homo sapiens
aaaggaacaggcgccttcaaaagcccacttggcgatgggttacagtaagaggagagctcaaaggatggctactgacatgcag

SEQ ID NO: 47024 - DNA, 101 bp, Homo sapiens
agggaaggagggcgtccgagtcaacaaccgcttcgagctggacaaattattggattccagcacagtgactcacttattcaagataactgaaaacattggtt

SEQ ID NO: 47025 - DNA, 102 bp, Homo sapiens
cgccgagtgacagagacgctcaggctgtgttctcaggatgatcggctgaatgtaacagaggaactaacgtccaacgacaagacgaggattctcaacgtccag

SEQ ID NO: 47026 - DNA, 90 bp, Homo sapiens
gccaaggaaagatgggacctcccggcccaggtatatttgcgtgctctcgtgagaaatctttttaatgaaggaaatgacgtttatcgggaa

SEQ ID NO: 47027 - DNA, 75 bp, Homo sapiens
cgtgaacatccagtttcctgataaggacgatgggaaccaggtatcgagaaccttccctgcgaacttcagaggaac

SEQ ID NO: 47028 - DNA, 100 bp, Homo sapiens
ccgccgcccacggcacggcagccaccatggcgctcctgctgtgcttcgtgctcctgtgcggagtagtggaggtgtgctctgaacaagccgagacggggcc

SEQ ID NO: 47029 - DNA, 75 bp, Homo sapiens
agtcatatggcatggacaatcacagtggtggtggtgggggtagcaggagaaagaccatttatctgcgaattatgt

SEQ ID NO: 47030 - DNA, 82 bp, Homo sapiens
aactccatcaagcctcaggagctgctggtctcctctgagcctccggcctccataagacccaaaacagatgacacctcttccc

SEQ ID NO: 47031 - DNA, 100 bp, Homo sapiens
tgctgagctggttggccctgtgatccctcaagactggtccacggagtgtatgaccacaaacagccatcaaggactccctggaggaaaagcggaagcggca

SEQ ID NO: 47032 - DNA, 75 bp, Homo sapiens
aggaataagatcagagccattgggaagatggcacgggtcttttcaattcttcgtctgcgctcctcagaccaccgg

SEQ ID NO: 47033 - DNA, 98 bp, Homo sapiens
cggttagacttctcaagtgcaattcaagatatccgaaggttcaattatgtggtcaaaatcaagatgaatgccatgctggagactcccgaactcccagc

SEQ ID NO: 47034 - DNA, 100 bp, Homo sapiens
gccgccgccgccgcagagctgcagctcggggccgaggatcgaaggtgccttggaatatggaatcacaagtgatgacatcttctggctgaaggaatcccct

SEQ ID NO: 47035 - DNA, 82 bp, Homo sapiens
ccgtccttctccactttcgccagcccgtgccgcgagcgcggcctgcaggagctctggcaggctgccctgagcacgctcaacc

SEQ ID NO: 47036 - DNA, 74 bp, Homo sapiens
acgcacctcgtcaccaaggccaagttgatgattttctgcagaaaaacaactgcgaaaaagaacctatttcattt

SEQ ID NO: 47037 - DNA, 100 bp, Homo sapiens
cctgtcttcagatcttcacagcacagttcctgggaaggtggagccaccagcctctccctgggttgaagctttgagagaagcagcaactgctgttgagcaa

SEQ ID NO: 47038 - DNA, 51 bp, Homo sapiens
aagggaagtgtcttcacaaagatgagagctccctctttgcccactagcagg

SEQ ID NO: 47039 - DNA, 75 bp, Homo sapiens
cagctactccagcaacatcttgtccataaggctgaaccggcaaatgtgcactcccagcaacacccctgccacgcc

SEQ ID NO: 47040 - DNA, 80 bp, Homo sapiens
gcggaagctgcccttcaccgcgggcgccaatggggagcagaaggactcggacacaggaggcatacacggaatacctgagg

SEQ ID NO: 47041 - DNA, 100 bp, Homo sapiens
cccaatttgtccgtaaccttgtggagaagaccccggcgctggtgaacgggtcaagaaagtgactcatcagagacctctgtgcgaggaccccggattaaac

SEQ ID NO: 47042 - DNA, 100 bp, Homo sapiens
tgattatgaggcatgggcaaaacttgatgtggtcattgagactgcctcttctcaaagggacactgtcctcagcactttatacagcagtttaaataaagtc

SEQ ID NO: 47043 - DNA, 83 bp, Homo sapiens
attttttgaaatttttaagacacgctgcaacaaagcagctggaagacctgaacttccctgagatcaaacgaaggaagatggct

SEQ ID NO: 47044 - DNA, 101 bp, Homo sapiens
gcccggtcgggcagggaccctctggcacatctgggcatgtgcagtggtttttagatcgtatggctgatgacgactggtggccaatgcagatactaattaag

SEQ ID NO: 47045 - DNA, 75 bp, Homo sapiens
gaacagggttcctggggcatcgacgatctccatatttcattgcaaggtgtatgcaacagcgttattgcaacaggc

SEQ ID NO: 47046 - DNA, 87 bp, Homo sapiens
ttcagtcaggtggcaaaaacattgaacttgctgtcatgaggcgagatcaatccctcaaggcacctggaacacctatcattgcacggc

SEQ ID NO: 47047 - DNA, 100 bp, Homo sapiens
gacatgtttgcagactctaatgaaaatgagactgtctttgctcctgtcatccaggctggcatggaagcactaaagattggaactagatggaaagatgttg

SEQ ID NO: 47048 - DNA, 75 bp, Homo sapiens
aacagataccctcacttcaagactaagattgaagctcatctttgggtgaaaaattgtcgggatcttctgcagtcc

SEQ ID NO: 47049 - DNA, 100 bp, Homo sapiens
gtggatttaccttatcccctcaacaacttttcagtggcaattcacagaagaaaagcttggccaggctgagaagacagaattggatgctcacttagagaac

SEQ ID NO: 47050 - DNA, 95 bp, Homo sapiens
gtgtttttaaagtaggagagcctacatattcttgcagatctgagtgggacatacttttgaaggatgtgcaatgttcaatcataagtgtgacaaaa

SEQ ID NO: 47051 - DNA, 90 bp, Homo sapiens
gagaggcgatgcagaagcagtgaagggcataggatccggcaaagtcctgaagaggacaatctctatgggaagcagaaggcaaggaccccg

SEQ ID NO: 47052 - DNA, 82 bp, Homo sapiens
aaactgcagaagagcagcctctggactttgaacatgtcggggatcgccctcagcagactcgcccaggagaggaaagcatgga

SEQ ID NO: 47053 - DNA, 87 bp, Homo sapiens
tcagagttgctcatggaggtgcacggaaatgggaagaggcccagtccagagaggtgcgttaagaattgaaatactgaataaaaaagg

SEQ ID NO: 47054 - DNA, 98 bp, Homo sapiens
tctgatatacaagaacatgaccaccccagtgtatacaactttgaaggggtatgagaataatgttatcactattgatctggttcaaaattcttctcaaa

SEQ ID NO: 47055 - DNA, 75 bp, Homo sapiens
aaatggcacttcattggccacctacagaaacaaaatgtcaacaaattgatgggtggcaattttggaggtagcccc

SEQ ID NO: 47056 - DNA, 100 bp, Homo sapiens
ttgggaggtgtctagcccagtggaccttctgaaggtggagatacactacgccttgacacacttatagaatggtggagagaaaagaatggttccttttgtt

SEQ ID NO: 47057 - DNA, 102 bp, Homo sapiens
gcaagggaaagaggcctggagtatgaagagacatgagatcatggtggccaaacccacagctcttttggtacaccagaaggccagaatggaacgacttcaaag

SEQ ID NO: 47058 - DNA, 88 bp, Homo sapiens
acttgcggctttgactccgtgttggcctctctgccgtggattttaaatgaggaaggcttatccctgtcaagatgattattccatagtc

SEQ ID NO: 47059 - DNA, 100 bp, Homo sapiens
ccaaagttgcatttcctcgtcgagcgcaacccaagagtaagaaacaggatattcctcgtgaagatcagggaccaaccaccaagaatttggatttttggcc

SEQ ID NO: 47060 - DNA, 90 bp, Homo sapiens
cagacgctgctgatcatcctcttcatcatcgtgcctatcttcctgctgctggacaagaggctggaagacggcagccgccggactgggcag

SEQ ID NO: 47061 - DNA, 74 bp, Homo sapiens
caaaaagctaccacctgccagtctgaagcaccgagatggttgattgcactgccaacactaacacctgtaataaa

SEQ ID NO: 47062 - DNA, 82 bp, Homo sapiens
gcagatcctggtcctcgatccgcccacagacctcaaattcaaaggtggatcagtacaagggaaagcgggatttggagtcact

SEQ ID NO: 47063 - DNA, 74 bp, Homo sapiens
acccaggagcagacagagaagctgctgcagtttcaggtttgtctgccattgtggatttcctgggcagagtggag

SEQ ID NO: 47064 - DNA, 100 bp, Homo sapiens
tggaaatggagggcatcttcaaccacaaaggggtggggctcgagttgccctgaagatcattaagaatgtggagaagtacaaggaagcagctcgacttgag

SEQ ID NO: 47065 - DNA, 101 bp, Homo sapiens
tggagaaatccttcgcaatgtcaccatcctacgagcattatgccagtacatacaggcttctaaagccagggatggtgccagccctttcatttcaagtacga

SEQ ID NO: 47066 - DNA, 90 bp, Homo sapiens
gaagcatgtgttgaacctctacctgttagaccctcgagtcttccatccagggcctccggataatgtgaagctgagtgagcctccgccatc

SEQ ID NO: 47067 - DNA, 90 bp, Homo sapiens
tgcagctagtaatttgccttctggattgccactttggagttgtctaccacggagaatacatagaccaggcccagaatcgaatccaatgtg

SEQ ID NO: 47068 - DNA, 100 bp, Homo sapiens
aggcagcgtctggcagaggatgaggatgaagaggaggaccagattaagatgttctacgaggagcatttgcacttggacgatgagatccgctacatcctgg

SEQ ID NO: 47069 - DNA, 100 bp, Homo sapiens
gtttgctggcttggtccatgtgaagcaatgcatcgtggctcatcctgaccaagaatcgccttcagccctgtctggtgcatccttggcagaaagtgaggag

SEQ ID NO: 47070 - DNA, 83 bp, Homo sapiens
ggagcctggcgcagcctccctctattaccagatgaagactggcccatttgcagagcactccaaccagctgtggaacatcagcg

SEQ ID NO: 47071 - DNA, 98 bp, Homo sapiens
cgatcctgggctgcgggcaaggcgaatgatgacaacttcttaaatataatctatgaagcctatctcttcagcatgactcaagcagccatgaaaaagac

SEQ ID NO: 47072 - DNA, 83 bp, Homo sapiens
ggcaaggagctaaagcagcgtgcgttcagccctgggacggttgatgatgaagcgccggccgtgtaaatgaagatcgggtgagg

SEQ ID NO: 47073 - DNA, 98 bp, Homo sapiens
agaagcccacccgtgaggagccagctgccgcgacgatcagctgtttcatgtattagccttgcacatgcggctttatagcattgactctgagtataatc

SEQ ID NO: 47074 - DNA, 100 bp, Homo sapiens
catcagccgtctgctggccatcgtggcagacctctacgagcaggagcagtacaggatgtacagttacccagcacgtgtacctcctcctcctcctattgct

SEQ ID NO: 47075 - DNA, 87 bp, Homo sapiens
gggcggtgccggcgccggagacgatgccgttatatctcttccaaacgcatgatgaaggaggtcttgtcaacagggcaaggcaataca

SEQ ID NO: 47076 - DNA, 100 bp, Homo sapiens
gttcaagaacgccctggagaagtacggacccctgaagcccctggtgagcacgcacggctactcacagaaccagatccttgtctggaagtacccctccctg

SEQ ID NO: 47077 - DNA, 75 bp, Homo sapiens
agaagcagatggattcgtccttttagattgggaaaatgaggtacgttagtgttcgcgattttaaaggcaaagtgc

SEQ ID NO: 47078 - DNA, 75 bp, Homo sapiens
ccaaggaagaagagaccactagaatctggaattgagactgctgcagtaagaatgtcttttccacctcatttgaat

SEQ ID NO: 47079 - DNA, 90 bp, Homo sapiens
gcaatggaaaagataaagtgttttggttttgatatggattatacccttgctgggactatgttcggagtgaactggagtttgcctatgagg

SEQ ID NO: 47080 - DNA, 75 bp, Homo sapiens
atagcagtctgccagacaatagagcatatggttcattcggctcctaaagaagtagcagtgtccaaggaacaagaa

SEQ ID NO: 47081 - DNA, 88 bp, Homo sapiens
ccagggaaccctggtcaccgtctcctcagagcctggcagagagcaggtgtgtgatacacgtcgtcaggtgactgaccgaggaattcag

SEQ ID NO: 47082 - DNA, 82 bp, Homo sapiens
agcagatgaagatccattggtaaattgatcaggatttttggcctaccctccaaagaaaagagctgacttttttgaagatgag

SEQ ID NO: 47083 - DNA, 100 bp, Homo sapiens
gaaaaatcctggatctgtatgctttgagcaaggtggacccccaaaagtacaagggcatatttaacggattctcagttacacttaaagaggatggtgttcg

SEQ ID NO: 47084 - DNA, 75 bp, Homo sapiens
agcggcggccgctcacaacatgcacagcctggcgacggctgcgatgttgctatcggagctccacaagaagatgac

SEQ ID NO: 47085 - DNA, 50 bp, Homo sapiens
tgttaaagtaacagatgatttagttcccttgtgggaacacatttttcagc

SEQ ID NO: 47086 - DNA, 101 bp, Homo sapiens
gggcgacaccccagggagtagggctgaggaccgcaaaaatcaatcgatgctgtatgattatgttgaaaggaaacgaaaagaaaattcaggagcccaactgc

SEQ ID NO: 47087 - DNA, 74 bp, Homo sapiens
aggggaaaggtggtacacaagttgatacagaaattgaaggttcctcatgccatgcacctgctgtcacccagcat

SEQ ID NO: 47088 - DNA, 94 bp, Homo sapiens
acgccatgtcgggttattcgagtgaccgagaccgcggccgggaccgaggaggctgggaggcggcagaatgcagccagaggagggcacaggctgg

SEQ ID NO: 47089 - DNA, 100 bp, Homo sapiens
ccggccgcggcggcggccgccaccggctctagattagtgatgatgaaccaggttatgaccttgatttattttgcatacctaatcattatgctgaggattt

SEQ ID NO: 47090 - DNA, 100 bp, Homo sapiens
ctgtgcgcccacacacggtcgaggcacaggattcccaaagaacagtggtggctcaagctacggcccctcatgaaaatcctggccaagtacaaggccagct

SEQ ID NO: 47091 - DNA, 85 bp, Homo sapiens
agccgcgagcgctgagggtgagtgccgggagctctgagggcagcaaaagagaccttggccaaagctgtgctggcggagctgcccc

SEQ ID NO: 47092 - DNA, 100 bp, Homo sapiens
tccccacgcaaccccagatccatttacactttacagatctgtctggctccattgatgacctccccacgggaacggaagcaactttgagctcagcagtcag

SEQ ID NO: 47093 - DNA, 100 bp, Homo sapiens
gggaaaggctgctgcctcctgctctgtcctcatccccggcttagccctggtacctgacagtgtaaagaaggagctcctacaaagaataagaacattcctt

SEQ ID NO: 47094 - DNA, 96 bp, Homo sapiens
caggccccccaacatggactgtctctgtatagtgacaaccaagcctctagccctgcccctctcagggacgaccctggggtcaggcccctcagccct

SEQ ID NO: 47095 - DNA, 50 bp, Homo sapiens
aaagctttaggagttcacagtcctaaattaacaatggcgaaatgcaggcg

SEQ ID NO: 47096 - DNA, 98 bp, Homo sapiens
gaggaggggccccagcagcccccgaaggccctatcaggacatggagtatgaaagacggttcttgggtgtctctggggagtccctgggccagaccttcc

SEQ ID NO: 47097 - DNA, 100 bp, Homo sapiens
cggcggcggcggcagcgacagcagcagcagcagccagtattcgggaaaggcagacaggtgcaccttcgctctgccaggcgtctctgtgagctctgctgtg

SEQ ID NO: 47098 - DNA, 78 bp, Homo sapiens
ctcccgtgtctgctcgccctccgacgctgctcagcagcctcccgcgacgatgcccctcaacgttagcttcaccaacag

SEQ ID NO: 47099 - DNA, 100 bp, Homo sapiens
gtctgcaccagccatggactgctacacggcgaactggaacccactcggggactctgccttttaccggagttaagtatgacattgacctgcccaacaagaa

SEQ ID NO: 47100 - DNA, 100 bp, Homo sapiens
ggagatccttgttgccgtcccttcgcctccttcaccgccgcagaccccttcaagttctagtcatggaatggaagttggatacactttgtgacttgtacga

SEQ ID NO: 47101 - DNA, 100 bp, Homo sapiens
ctgtggccttcatgtcctgtgccccagagatctgcccctcccacccgaggtgaactaccgaggccaggtggtgagcctgatccggatgcggaacccctgg

SEQ ID NO: 47102 - DNA, 98 bp, Homo sapiens
ggcctggtcttgtggaactgaacttagctcgacggggctgaccgctctggcccagggtgaggatgaaagtcctggacagacttatcacagagagagaa

SEQ ID NO: 47103 - DNA, 96 bp, Homo sapiens
ttaccaccaacgttttacctctgcttcaacaatttggccttgtcaaagacacctgctcatatgtaaatgtgacaggtgctctagttcacagctata

SEQ ID NO: 47104 - DNA, 90 bp, Homo sapiens
cagtggaagatgatcacatcccagaaagaatgctttgtggaacttggcttaaatataggacaactgggtatagatgattctacacaagtg

SEQ ID NO: 47105 - DNA, 82 bp, Homo sapiens
tgagattgacgcggtgaactctgtccagttttcaaaccacacaggtgtgggcaagagcagtttactgttgcgttttgcagac

SEQ ID NO: 47106 - DNA, 101 bp, Homo sapiens
taaagtgattttttgcctttgttgattaactggacaaattcaggcctcattgctacgatttcagagtaccctggtaatagctgagcatgcaaatgattccc

SEQ ID NO: 47107 - DNA, 98 bp, Homo sapiens
cggagaagcaggagccctactcggcaggagtacgagagggcctccaaagtggaccagtttgtgacgcgcttcctgctgcgggagacggtgagccagct

SEQ ID NO: 47108 - DNA, 83 bp, Homo sapiens
ccagttttgaaatcgacacacaaagaatagagttgagcctgtgggacacttcggcccctgtcaaagggaacaggaagcagtcc

SEQ ID NO: 47109 - DNA, 100 bp, Homo sapiens
ggattcagggaataggagctggggagcccttctgcgccacagatctcagaaaactgatcttcacaatgaaggctacatcttggaattagattgctgttcc

SEQ ID NO: 47110 - DNA, 75 bp, Homo sapiens
accggatcctgaggaggcagctgcggtggcagctgctgagttctcggtgaaggttgggagtcctcctcttgatcc

SEQ ID NO: 47111 - DNA, 122 bp, Homo sapiens
acaagcacacaccagagaccagaatgaaagtcggggaagtccttatgcgaatcgtcagggcattagatggtttcacccaaatatcactggtgtggaggcagaaaacctactgttgacaagag

SEQ ID NO: 47112 - DNA, 100 bp, Homo sapiens
gctgagtgtggaccctaacacctggcagactctgctccatgagaggcctgggttcctattctccagccccgccgggctgcggcccacactttgtttacag

SEQ ID NO: 47113 - DNA, 51 bp, Homo sapiens
tggctctcttggccctcctgaaatggaatttatgcaaatattctcatgagg

SEQ ID NO: 47114 - DNA, 100 bp, Homo sapiens
agggacttggaaaacctgggtgaacgagcgcttccttataggatctctgcccacagtcagcagcacaacagaggcggtcattgaaattatgagactatca

SEQ ID NO: 47115 - DNA, 100 bp, Homo sapiens
catttggcggcataccaccctgcactgtgagatgcctttgagtaatggacagatgggccagcctctcaggcctcaggcaaattatagtcaaatacatcac

SEQ ID NO: 47116 - DNA, 100 bp, Homo sapiens
tcactaacgccttcaggaggaacccacacatgtgtccaccccccagggttcctgacccctgcccctggacagcgaccccttctcagactccagttgggcc

SEQ ID NO: 47117 - DNA, 82 bp, Homo sapiens
gaaactgagtccaacactatgctggtttgagggcttccgttacaagatgaggtctgtgtatgctcacttccccatcaacgtt

SEQ ID NO: 47118 - DNA, 83 bp, Homo sapiens
cccagacgaggctcgggactttgcagccggccttagtgctcgcgcagcaggtcaatggccagcaaggaggggggtccgagccg

SEQ ID NO: 47119 - DNA, 73 bp, Homo sapiens
gaccgaggaaagtgtgtgggaggcgttgacctgccccttgtcctggccccggagcaggccgggctctcgccat

SEQ ID NO: 47120 - DNA, 98 bp, Homo sapiens
ctgggatcggttcctccaggagaagttagcttcagagttctttgtggatggacttgattctgatgagaggttcgtgctgtaagacctaaagttcttat

SEQ ID NO: 47121 - DNA, 100 bp, Homo sapiens
cgcgactcgagggtgacgctcgctccgctcgtcccgctcgtcatggcctacccgggatacggaggagggccattgagacccagagcagcagttctgaaga

SEQ ID NO: 47122 - DNA, 98 bp, Homo sapiens
aagtaaggaagaaattgagaaagaatgtgaagataccagtttgcgtcaggagacacaggccctgtctctgcccctggtggtcatcgtccatggcaacc

SEQ ID NO: 47123 - DNA, 95 bp, Homo sapiens
gaagatcgcgatcctgggctaccggtctgtgggtgtcgtgaaaactacccctaaaagccaaaatgggaaaggaaaagactcatatcaacattgtc

SEQ ID NO: 47124 - DNA, 75 bp, Homo sapiens
acacaactccagtgctaactcaacagggtccccttctgcttgttatagccccagtagtcctgtccaggttctaga

SEQ ID NO: 47125 - DNA, 99 bp, Homo sapiens
gcgcctgcgacctgcccgcctggaatgtcgtactctcaggaggctccaccatgttcagggatttcggacgccgactgcagagggatttgaagagagtgg

SEQ ID NO: 47126 - DNA, 100 bp, Homo sapiens
ttgttgaagaagaaggacccccgcatttatcagaaagatgccaccttctataacagaacaggcctgtagtggtggagacacgcccagtggatgatcctac

SEQ ID NO: 47127 - DNA, 75 bp, Homo sapiens
gagaccaaaaacccaccaattctggacacattgggattaaaggcctatgaaaggaggttccctacatgtcctttg

SEQ ID NO: 47128 - DNA, 100 bp, Homo sapiens
ttattactcagaacatctgttatacaaggtattcacacagaccacaatacactgaagcaacgacatgccctttgatgagctgcttgcgctctatggctac

SEQ ID NO: 47129 - DNA, 96 bp, Homo sapiens
cagctgatccccatgactgctctgcttatactggctggacagcactgtgattgccaccaacattctcttggttgatgagatcatgcgagctggaat

SEQ ID NO: 47130 - DNA, 83 bp, Homo sapiens
ggcggcgggtgggaaatggcggagtatctggcctccatcttcggcaccgagaaagacaacaatggctgccatccggaagaaac

SEQ ID NO: 47131 - DNA, 75 bp, Homo sapiens
cccaatgggaccctggaggaatgtcagcaccagaccaacgtggtgatggtggatgaggcacacgaaaggacccta

SEQ ID NO: 47132 - DNA, 90 bp, Homo sapiens
gctgccttttggatatctctcccaggatgttctcaagttgagtcagcagatactggagttatttgaaacatgtcagcagcaaataagtga

SEQ ID NO: 47133 - DNA, 83 bp, Homo sapiens
ctaccttctggaagctactactacgtggtgcttggaaagacaacattcccaatgccgtctgggtctgggacattcagaagctg

SEQ ID NO: 47134 - DNA, 98 bp, Homo sapiens
gaacctaaggagccctgccgaggagctgaaggccttcagagtccttggggtgattgacaaggcatgtggagaccccaaggcaaaaccatcctatctta

SEQ ID NO: 47135 - DNA, 51 bp, Homo sapiens
tgggaatgaagcgatgtagccttttaaggcgccctgcgtccggcagaggag

SEQ ID NO: 47136 - DNA, 85 bp, Homo sapiens
aatatcagtttatgtgggcatgagactgggaccattggtgatgagaaggcaaacatgttcagaagtcaagtaactggaaaaataa

SEQ ID NO: 47137 - DNA, 82 bp, Homo sapiens
gacagtaaagcaccgctacagcgacttccatgacctgcatgaaaagaatccaaaggccctattgtgcctttaaatgtagctg

SEQ ID NO: 47138 - DNA, 51 bp, Homo sapiens
caatggccggcaaccagctgtaagcgaggaagcacaagcctatgcagacga

SEQ ID NO: 47139 - DNA, 82 bp, Homo sapiens
tatagagacaacgactatgtccaattttcatgctcagggggaaatttgcagtggtgagaaaatgtataaagaaagattctgg

SEQ ID NO: 47140 - DNA, 75 bp, Homo sapiens
ggccagcttcacgaagtcagagagcttggatttacactgggcaacgtggttggaatgtatctggctcagaactat

SEQ ID NO: 47141 - DNA, 51 bp, Homo sapiens
ggccacattattactggaatccaggacaggctgcgggaggagctgcaggac

SEQ ID NO: 47142 - DNA, 85 bp, Homo sapiens
gatttggggatggctataatgggtatggaggaggacctggaggtggacattgatattaagatccgatcttgtcgagggtcatgca

SEQ ID NO: 47143 - DNA, 82 bp, Homo sapiens
agcagggccaccgggcggcaagcagttggaattgatcacaccttttcagttgtacttcaatcctgaattaatctttaaacac

SEQ ID NO: 47144 - DNA, 100 bp, Homo sapiens
cggcgcgggatgctcctggcgcggcaagtggttcttcctcagctctctcctgcagctccctgggctctgtcagctagcagagcatttggtggaagaaaga

SEQ ID NO: 47145 - DNA, 97 bp, Homo sapiens
gagacatgagcaagaaaagcctctgggagcagaagggaggctccaagacctcatcaacaattaaggcagcaaatatgaagtctatggaccctgcctc

SEQ ID NO: 47146 - DNA, 88 bp, Homo sapiens
agatgtgatgttggagaactacagaaacctggtctccctagtatctggagtccatctttcaccatcttctcctgagattgtactggac

SEQ ID NO: 47147 - DNA, 100 bp, Homo sapiens
tcccccctcatccctcaccacagatcccagccagtctctactcagcctggagcaagaagctgtgaataaggtgaaaattcaggccatgtcagaagtacag

SEQ ID NO: 47148 - DNA, 83 bp, Homo sapiens
cctggaggctcaacggcagaagcttcaccacaaaagcgaaatgggcacaccacaggaaagtggagaatgaggacatgaataaa

SEQ ID NO: 47149 - DNA, 100 bp, Homo sapiens
ggaggaagcccccaccgaggccccccggcaccgcgcctgctgccgggttgcgctccgtgcacctcttgcggggtgagttctgcatcctggtacttcctca

SEQ ID NO: 47150 - DNA, 100 bp, Homo sapiens
cgactagcggcggcgggagcggcgccgagaggccgtgcgggacgcgggcgccaggaccggccgaacgcagagcttatatcaaaggtgggtggatccttag

SEQ ID NO: 47151 - DNA, 98 bp, Homo sapiens
cccggggatgggcccgcggctgcgaggaatctacttatgggacccatatccatgagaaacgtgaagagcgagaagcaagattctgtaacactgtccac

SEQ ID NO: 47152 - DNA, 98 bp, Homo sapiens
ctacaaggatctgcagccatttatattgcttaggctactggggcctttatcatctgctggactcctggattggttttgttacttctagacgtgtgctg

SEQ ID NO: 47153 - DNA, 100 bp, Homo sapiens
cactgtcagggatccaaacagctggctgtggatcaacttttttcagagaccttggcgataaagcttgggtgatggttgcagttttccaactcgccttgtg

SEQ ID NO: 47154 - DNA, 83 bp, Homo sapiens
gtcaaagaagatgcctcgaactaaacaaattcatcccagaaatctaagagaaatttattgtccagcaccaccacaaattgaca

SEQ ID NO: 47155 - DNA, 75 bp, Homo sapiens
aggcgccatctatcaccgagagcagcacctttgatctgtttacccgaggtattgatatacaagctgtgaatgtgg

SEQ ID NO: 47156 - DNA, 96 bp, Homo sapiens
cgacaagggtgttcccgaactagagtggatcctcagacagattctaagcctcctgagggattgttaggattccacacagactggctgacattaaat

SEQ ID NO: 47157 - DNA, 75 bp, Homo sapiens
ttcggcaagaactggattcgtggcgccacaagctcattcactgtgtaggtcatcatcagatttgaaatatttaaa

SEQ ID NO: 47158 - DNA, 98 bp, Homo sapiens
gggacgtcctcattgtcctcggagaaaagccatatgtttgtacagttcctgggtgtgacaaaaggtttacagaatattccagtttgtacaaacatcat

SEQ ID NO: 47159 - DNA, 75 bp, Homo sapiens
cagcgtaaactgcagcatgatgttctgaagcttgagggtcctaaaaaggtggggacgctgtggcgagaagccggg

SEQ ID NO: 47160 - DNA, 82 bp, Homo sapiens
cgttgcagcctcccttccccacgacggggcgcctctgcaactcacaatgctgagctttttataccaccaaagatcaacagaa

SEQ ID NO: 47161 - DNA, 75 bp, Homo sapiens
ggtgtccagctccagactgtggctgaagtgagtagtgaatatagtatggacaaggcaatggttgaatttgctaca

SEQ ID NO: 47162 - DNA, 75 bp, Homo sapiens
caagggcgtgttcgtgctgaataagaagaacaaactgacgcagagtaagctggtggccaaggaattgggccagac

SEQ ID NO: 47163 - DNA, 98 bp, Homo sapiens
aatggcttcgatgttagccgggacccgactcaggaagggaaaaggccgaggcatcagcgtgtgaagaccgcaaagacgatcccgagtacagttgtgaa

SEQ ID NO: 47164 - DNA, 83 bp, Homo sapiens
tggccactgcgcagaccagacttcgctcgtactcgtgcgcctcgcttcggttcagaacctcatggcccgagctgaatacttga

SEQ ID NO: 47165 - DNA, 100 bp, Homo sapiens
cagaagtagctgaatgtgttactccattgctgaggagtggtttatcttgcagattatggactttcctacagatattgtcccaatgggaaccacaaacagt

SEQ ID NO: 47166 - DNA, 101 bp, Homo sapiens
tgaggcacagagtgaaggggaggtgccagcccgcgaatccggccggagcttagaccatgctcagcctccaagcagccttgtcatcgacaaagaatctgaag

SEQ ID NO: 47167 - DNA, 100 bp, Homo sapiens
agaccagccagtggagctgctgaatcctgcccgcgtgaaccacatgcccagcacggtccggttccagttgttggcaaaggagaggaagaggaagaggaag

SEQ ID NO: 47168 - DNA, 101 bp, Homo sapiens
ccggccgcgggagcctcgtggctgcgtcaccgccgcccccccagacaagatggacaccgcggaggaaggatctgcatctccaatggatactgaggggtttg

SEQ ID NO: 47169 - DNA, 83 bp, Homo sapiens
gcgctctggctctggctgtgcgcgctggcgctgagcctgcagccggccctgccggacgccaacaaggagagcagcaagacctc

SEQ ID NO: 47170 - DNA, 96 bp, Homo sapiens
ttctggtataccatcgtcaccatgacaacactagggttatggccacaccgtgcccttgtcagatggaggtaaggccttctgcatcatctactccgt

SEQ ID NO: 47171 - DNA, 80 bp, Homo sapiens
tcttgacattaccttttcaccagactatccgtttaaaccccctaaggaactgtggctgcaccatctgtcttcatcttccc

SEQ ID NO: 47172 - DNA, 72 bp, Homo sapiens
acgtcttgcctgtgtcccacttgttcgcggcctatagatgttgcttgttggagagatggtggtaaggctgct

SEQ ID NO: 47173 - DNA, 73 bp, Homo sapiens
tgacaatgggcagaacgaattcagtgatatcattaagtccagatctgggcgtctctggccgagcctctttttg

SEQ ID NO: 47174 - DNA, 100 bp, Homo sapiens
ctggcggccaacgactttttccggcggctgctcatggaagatgggttcaaaatcaaaggaagcccagaagggaggtcatttttacagtgcaaagcctgaa

SEQ ID NO: 47175 - DNA, 83 bp, Homo sapiens
cagcactttgtggagaaagtcgtcttccacttgcacgaaagctttcctaggccaaaaagagaaatacacatggcttgataaaa

SEQ ID NO: 47176 - DNA, 75 bp, Homo sapiens
tgaacaatccgtctggatcacggatgtaggaagtggcattttttactgtctacagaaacttattgtaattcattt

SEQ ID NO: 47177 - DNA, 75 bp, Homo sapiens
cacctcggcccgcgtccgccactcctgccccttctgggcaggcttctcgagcacagcaatggaggaaacagctat

SEQ ID NO: 47178 - DNA, 90 bp, Homo sapiens
ctatgagagacagagccaggatttgaaaccagccctggtattgatgtcaccacagagctggacagctggattgacaagttttgtctggat

SEQ ID NO: 47179 - DNA, 100 bp, Homo sapiens
gacaaggcctaccatcgtttcttcctgcctttgggccgtcaggcagttggttgggacccgctccaaccctcggtctcggcgcggaagatggccggcggcg

SEQ ID NO: 47180 - DNA, 75 bp, Homo sapiens
cccgcttgggcgcccggacggcgaatggagcaggggcgcgcagggaattccgaaatgactttctagaacttctca

SEQ ID NO: 47181 - DNA, 91 bp, Homo sapiens
gaagctgccaattccaagcccccagagagcattcaccctccagacagcacccaagaaaacctcatttggctcgctgaaggatgaagaccgg

SEQ ID NO: 47182 - DNA, 100 bp, Homo sapiens
tgtggccaccgggcatgggaagtatgagaaggtgcttgtggaagggggcccggctccctaggcgtcccatctcgcaggtttggatgcatctgctcagact

SEQ ID NO: 47183 - DNA, 97 bp, Homo sapiens
ataaccgttgtaacatcagtcacagcataacaaaatccagtctcatagcagaggagaatataatgtttacagcaccttccagagccatgaaccagag

SEQ ID NO: 47184 - DNA, 127 bp, Homo sapiens
gatgggaaaccacgcaggcaaacgagaattaaatgccgagaaggccagtacggtgctggctgccagctgctgcgccccccatgtagaaggtgcacctcctgggagcaggcacgtcttttggctcttc

SEQ ID NO: 47185 - DNA, 82 bp, Homo sapiens
catccaggaagaggagccgagcatctgggccgagaccattccgtatggagagccggcacatgtataattttttggcccagcc

SEQ ID NO: 47186 - DNA, 75 bp, Homo sapiens
caacatgcctctgacaatctctagtggctcatcgttggggtgatcctgaggtatggtacccctgctaccagtggc

SEQ ID NO: 47187 - DNA, 100 bp, Homo sapiens
tctgcctttgacaggagaggctgcttcttgtagagcacaatcctggaggaagagaaggctcagcaagaagagcgcatgaggatggagtccagaagacagg

SEQ ID NO: 47188 - DNA, 75 bp, Homo sapiens
agcctctggaatcacccgggtcgctgttcctgagccgagattcgggccctccaccctctacagtgagtgaagccg

SEQ ID NO: 47189 - DNA, 109 bp, Homo sapiens
gccgtggctcctacccattcattgacttccgcctacttaacagtagtggctctttatgactacacagcgaatcgatcagatgaactaaccatccatcgcggagacatta

SEQ ID NO: 47190 - DNA, 80 bp, Homo sapiens
gcctacgtatcagctccatccaggccaccactgcggcgggctctgggtgtcgtgaaaactacccctaaaagccaaaatgg

SEQ ID NO: 47191 - DNA, 83 bp, Homo sapiens
acacctctacctcctgcgaggcctcccgggctccgggaaaactacactggccagaaacctccacagctgttgagaaaaaggag

SEQ ID NO: 47192 - DNA, 75 bp, Homo sapiens
tgcgcgcccgcctcggcccgcacgccaagcacgtggtgggctatggccaccttgcccaggatccggttgtggccg

SEQ ID NO: 47193 - DNA, 75 bp, Homo sapiens
tccttacccaggtcctgctcggaatgggtaccacagaccatgtcatcgtcctggcgtccacgaaccgagctgaca

SEQ ID NO: 47194 - DNA, 98 bp, Homo sapiens
tcaccgttacccggggcaacagctgagccgtctgggaagggatgcatctatagaatgagtccatttaagtcccaggacggtggaaactagctagtaga

SEQ ID NO: 47195 - DNA, 100 bp, Homo sapiens
gggattaacaccttgataaatatcatgtcacgccttggccaagatgacccaactccctcgaggtttatggctacaaatgatttgatgacggaactgcaga

SEQ ID NO: 47196 - DNA, 101 bp, Homo sapiens
gcaggatggtctggaggctggtcctgctggctctgtgggtgtggcccagcacgcaagctacttttccaggtatgtgggagagaacaataacaataggaagt

SEQ ID NO: 47197 - DNA, 100 bp, Homo sapiens
ctccagcgcgtggtgggggaactgctggggaaggcgattggcatcgatctctccatcccttccgaggcccgacttcggaaaaggccaaagttgttgagcc

SEQ ID NO: 47198 - DNA, 74 bp, Homo sapiens
gacgacgtttcttttctcatgatcaaagccatcggccagacagagttgaatgcaagcaatccagaagaagtgtt

SEQ ID NO: 47199 - DNA, 100 bp, Homo sapiens
cctcttcttagttgatgatttagttgattctctgaagccaggcggcactccagggtccggcccaaggtgactgtcctgaactatgcctccccgataaccg

SEQ ID NO: 47200 - DNA, 76 bp, Homo sapiens
ccccggccacgcgagcgggaacagtctcctccactcggagcgaataatgcatatactgccatgtcagattcctact

SEQ ID NO: 47201 - DNA, 101 bp, Homo sapiens
gatgggaaagagagttgtgagtctctttcctgtttacctccagtgtcccttcttccacatgaaaaggataaggaaatggctagtgatgagctgaaagagat

SEQ ID NO: 47202 - DNA, 100 bp, Homo sapiens
ggaggcagaagcatgctaagaacaacagtcaggccaagccttctgcctgtgatgagacgagttgtactgctgtcacaggaaatggacgctggattacaag

SEQ ID NO: 47203 - DNA, 100 bp, Homo sapiens
caaaaggaccaaatgggactgaaggggcatctcggacagtttgcaatagaactggaagatgatccctatgatcttgaagatgtttctgcacagaaatgag

SEQ ID NO: 47204 - DNA, 100 bp, Homo sapiens
cctgtttgaatctgttgacaagattctgaaagctgaacagagaattctggcactgcactgggtaggaaaaagacagcagcgaggagtcggacagctcaga

SEQ ID NO: 47205 - DNA, 80 bp, Homo sapiens
ctgagcgagcgccggggccagcggagccggagccgccgggacatggagatgaggatgacatcaatgatgtgacttctatg

SEQ ID NO: 47206 - DNA, 89 bp, Homo sapiens
cggcgttcttccgctggctcagccgcaagtacccgtccatcatagtcaactgcgtggaagagaaggttccgaggattctgaagacgacg

SEQ ID NO: 47207 - DNA, 50 bp, Homo sapiens
gaggtggagtcggagctgggacgtgtttaactgctgaagagatcttttcc

SEQ ID NO: 47208 - DNA, 90 bp, Homo sapiens
tagccaaattgctcaactaagaccaagtcctcgctggactgctcagggtgccagacctcatcggaccagttactctccacaagaaaattc

SEQ ID NO: 47209 - DNA, 51 bp, Homo sapiens
tcgccagtcttggggacagtgtcagcccctcccaggcccaatacttcaaag

SEQ ID NO: 47210 - DNA, 50 bp, Homo sapiens
cactttagcaccatgactaagcataagaatccagggcctgaaaacccaga

SEQ ID NO: 47211 - DNA, 97 bp, Homo sapiens
cggccgcgcggcgctggactggagcagaaccccaggactgcgcccccgggagcgggcgcccagaggaagctctacagaggatcatttcaactctggc

SEQ ID NO: 47212 - DNA, 74 bp, Homo sapiens
ctactacgcctacgccatccagctgtgcatagatgaaccagaaactcgagatgcatggtgggcagaaatcagac

SEQ ID NO: 47213 - DNA, 87 bp, Homo sapiens
ttttgggactgctcttcattaaaagtgttcccagctgttagatgaaaatctaaaggatgaatactttgaggaaatcatggaagaata

SEQ ID NO: 47214 - DNA, 75 bp, Homo sapiens
cggagcctggccagctgcacttcaaccagctccttcgagaactcatagaacggaagaccagctccttggatccca

SEQ ID NO: 47215 - DNA, 74 bp, Homo sapiens
cagaaggagtggacttgattgatatatatgctgacgaggagttcaaccagatgttggccgatgatgcagaagca

SEQ ID NO: 47216 - DNA, 75 bp, Homo sapiens
acagcactttgtgagactgtctaaagagaggaaagcccctgaaatcaacagagcacctgtggaatcctctcaaga

SEQ ID NO: 47217 - DNA, 75 bp, Homo sapiens
gctctaggagctgaaaccagtgggtagatgtcgttctgaaacgcagaattccctgaccaggagcgcacccctccc

SEQ ID NO: 47218 - DNA, 101 bp, Homo sapiens
ttggatttatgcaaacttgggccaaaggacagttagaagacagtagctcccaaaatggcgatgacaccggcacctggcccaacaaccagtttgacacagag

SEQ ID NO: 47219 - DNA, 82 bp, Homo sapiens
aaaggccctggaggtggaggagtccaactcagaggacgaggcctccttcaagtccgagcgctcctggttgcagccagaatgc

SEQ ID NO: 47220 - DNA, 100 bp, Homo sapiens
tatcaagtgccaatgctggcccagctctccgtgttccggtgtgaacccacctggctttcaaccaacttgggtattttgacctgtatagaatgttctggca

SEQ ID NO: 47221 - DNA, 75 bp, Homo sapiens
acatgtctgatcccttgctcccatccctgcagcatgaacaagggaccacttaatagtgagtcttccaaccagagc

SEQ ID NO: 47222 - DNA, 100 bp, Homo sapiens
agctcgacagtacgcctacttctataaagtcatccaggattctaacattttcagagaaccttttggaaagaacaagcctacttcaataaatgaaggagaa

SEQ ID NO: 47223 - DNA, 80 bp, Homo sapiens
gcccttcctgacgatctggggcagctgactgccctccaggtatctcaggagattacatttcagcttgaaaaagggtcggt

SEQ ID NO: 47224 - DNA, 80 bp, Homo sapiens
caaacgatccagacggcagggagtgcatcaaaggtgtgaacacaggcagtctttagctctcatggattgggagctgggaa

SEQ ID NO: 47225 - DNA, 97 bp, Homo sapiens
gctgcgggctcggagccggagacgccgagctggggccggattctggggagcaggtcctggtggatgtggagaccaagagcaataaggagatcatgga

SEQ ID NO: 47226 - DNA, 83 bp, Homo sapiens
atttcttcggcattctgcaacagattgacgtgagtgaattcagatataactcaagcttgttagagggctttttaaaaataaaa

SEQ ID NO: 47227 - DNA, 87 bp, Homo sapiens
gtggtggagcggctgctggaaacgcaagacggtgccgagaagcagctgcgagaaacccaccttgtcccatccacatcaggacatccc

SEQ ID NO: 47228 - DNA, 75 bp, Homo sapiens
caaatcagtcaacctagaccaatggacagcagaacagatacagctttggctagatcagagtctaagagagatgga

SEQ ID NO: 47229 - DNA, 99 bp, Homo sapiens
gatgtctgacatggaggatgatttcatgtgcgatgatgaggaggactacgacctgcaatcccacagagtattgatgaggaaactgaagtttggagcgat

SEQ ID NO: 47230 - DNA, 100 bp, Homo sapiens
ctgcgaggcctgtgacagcaagttccacagcaccatgcattatgatgggcatgtccgcttcgaccttcccccacaaggacacaactcagatgggaagttc

SEQ ID NO: 47231 - DNA, 75 bp, Homo sapiens
cagatgtttgccatgaaagaaataaggcttcccaagctctcaaaggtctatggccctgtgttcactctgtatttt

SEQ ID NO: 47232 - DNA, 75 bp, Homo sapiens
cagaccccctcctgcaagatccagaagctgagataaggccttttatgaaagcgcacctaaatcgtgataaagaca

SEQ ID NO: 47233 - DNA, 90 bp, Homo sapiens
gggaaggagcacccaggagctgaaggaacgtcaaggtcgtgggaaataaaaggcagttctacacagactgcagcaacggttgcatctgca

SEQ ID NO: 47234 - DNA, 97 bp, Homo sapiens
gggctgccgagggtgttcttgacgattaatcaacagaacccacaatacattatatgcaccagaaatgctagccaaaatggcagagcctttcaccaag

SEQ ID NO: 47235 - DNA, 75 bp, Homo sapiens
cacctcttcaagctgctcatcatcggcgacagcgggtgtccgcaatgttgccagtgtctgtctgcagattggcta

SEQ ID NO: 47236 - DNA, 100 bp, Homo sapiens
tgaaaagagggagtgattactgcattatattacgaatcacaagtgaatggaataagcttagcagtgtctgcaaaaacgaatcttttcctacaacctgtta

SEQ ID NO: 47237 - DNA, 100 bp, Homo sapiens
aaaacctgtatgtggaaccacctaccatgctcgacagctgaccaaggccatgatgcgaaaggccacggccagccgcctggtcacgcagcgcgatgcggac

SEQ ID NO: 47238 - DNA, 50 bp, Homo sapiens
ctttcctctgctgccgctcggtcacgcttgaactgataaatttcaaacgg

SEQ ID NO: 47239 - DNA, 88 bp, Homo sapiens
ttttggattacataaaccagtcacccaagtgcattgcctttggaaacgagggtaaaatccagtacaaggaatatatcattgaaggatt

SEQ ID NO: 47240 - DNA, 100 bp, Homo sapiens
ctggacctccaaggaagccacgtgcagacatctacaaccttcgatctcctgacgataggagagaagtttgctgaggaatgccttcaagcacaaagtgatg

SEQ ID NO: 47241 - DNA, 89 bp, Homo sapiens
gaccagatgcagcactggaaggagcagcgggccgcgcaggaaccagcagcacaaacactgttggggcaacagtgaacagccaagccgcc

SEQ ID NO: 47242 - DNA, 90 bp, Homo sapiens
gtttggatatgacttgctcgggcaaaagttgtgcattggcccgatcaagcctgacttctagccaagccccatggctgggggttatggagt

SEQ ID NO: 47243 - DNA, 88 bp, Homo sapiens
ccggaatatcaagattcatctttttcactaattgtggcattcacagttgatgataattagaagcatgctttccactgaacttcccgac

SEQ ID NO: 47244 - DNA, 82 bp, Homo sapiens
ccattccagaaggacaaaaactctttgagtttcggagaggagtaaagaggtctgtgcagacttttgcagacaaatcaaaaca

SEQ ID NO: 47245 - DNA, 101 bp, Homo sapiens
gagaggggaaaccccgtaaagtggttggttgcagttgtgtagtagttaaggacactcgtgaagtggtagccataaagtgtgtagccaagaaaagtctgaac

SEQ ID NO: 47246 - DNA, 102 bp, Homo sapiens
tcgacctggagaacgcagtgctcttcgaagtggcctgggaggtggctaacaaggattaaccggatggactatgtggagatcaacatcgaccacaagttccac

SEQ ID NO: 47247 - DNA, 100 bp, Homo sapiens
gggaaacgatccgctcccaaaacgtattcaagtcaaacaacgttgaaatggattgggtgttgaagcatactggtccaaatagtcctgacacggccaatga

SEQ ID NO: 47248 - DNA, 100 bp, Homo sapiens
aaaaagatatttgatattgatgaagctgaagaaggtgtaaaggtcggctcaatgacatgtatggagactacaaatacacatactgggcatgtggcgtcgt

SEQ ID NO: 47249 - DNA, 82 bp, Homo sapiens
cggcctcggggcagccatggactcgcaggaattgaaggcagcctgcttctgcaaagtggtacgatcgaagggactatgtctt

SEQ ID NO: 47250 - DNA, 74 bp, Homo sapiens
caaaaccagtcatgaccactagacccacagctgttaaagcaacagcttctgtaaacagccgcaaagacaagtct

SEQ ID NO: 47251 - DNA, 100 bp, Homo sapiens
gtgtggggactgtgggcagtgaatgcgttgggaacaatatggaaaactgggagctgccttggaatctacagggccgggttaacacagaaatctgcctcct

SEQ ID NO: 47252 - DNA, 50 bp, Homo sapiens
tgccgacacattccttcgagatggtacaggtttgcagattccgccagcag

SEQ ID NO: 47253 - DNA, 100 bp, Homo sapiens
cctgtctggacatgatggctcgatacgtcttctccaacttcacggctgtcccgaagaggtgaatatgtttacaaaccaaggaacagtgatccactttaac

SEQ ID NO: 47254 - DNA, 95 bp, Homo sapiens
ggtgaccgaggcctgggccccgggtttattgggcacttcctagcaccaggcactgcaataagaaatggaggttaaaccatgaagaaacatggctc

SEQ ID NO: 47255 - DNA, 90 bp, Homo sapiens
agtccctaggtatccgcactgctcagggggctgtcttcatcggtggaatacaacataatggagttggaacaagaacttgaaaatgtaaag

SEQ ID NO: 47256 - DNA, 75 bp, Homo sapiens
tgggaaacccggagaccaaatccttgaggagaaatgtgatgctcagagggtgtggctgacaagctccaggacaca

SEQ ID NO: 47257 - DNA, 75 bp, Homo sapiens
ccgacgcgcagatagcagagccatccttgggaaagctgacttcatgagaccgaggatctcgttcgttgatcgatg

SEQ ID NO: 47258 - DNA, 122 bp, Homo sapiens
tttcttctggcatcattaacggaccttttaccatgaatagttctactccttctacaggtgtgtatgccgattacacctcaacaagaaggcaactgacaaacagccttatagcaagctcccag

SEQ ID NO: 47259 - DNA, 73 bp, Homo sapiens
agaggaggacagttcgctacacagcaatgcatcgagtgtcagagatggctttggattccccgttctgtgtgct

SEQ ID NO: 47260 - DNA, 75 bp, Homo sapiens
ttcaccaacaaagatgcctatacttgtgcaaggatcgcttacacctgagacgaactacagaacagcacgtaccag

SEQ ID NO: 47261 - DNA, 105 bp, Homo sapiens
acaaactcgaagaacagctgtggaaagaagttgcaaaacactgggtgaaatgacaatggatgctctgttggctcgattgaaacttctgaatccagatgaccttag

SEQ ID NO: 47262 - DNA, 100 bp, Homo sapiens
cccgcgagcatctataacataggccaactgacgccatccttcaaaaacaactgaatgctgtctctgcaatttgagaggaggtgctcttaagcaaacgaag

SEQ ID NO: 47263 - DNA, 100 bp, Homo sapiens
cttgaactcgctttctccatcttgtatgactcaaactgccaactgaacttcatcgctcctgacaagcatgaggaaggttatagagatggaatagatgctg

SEQ ID NO: 47264 - DNA, 99 bp, Homo sapiens
gcaagacatccccaggagcaaccactctggtaatctagaattcagtggcagcttatttgcactaatcttgatgaactcagggaattaatcacaaaaatc

SEQ ID NO: 47265 - DNA, 90 bp, Homo sapiens
atccagagctgtgcctcccagcaccacagtccttctgcagtccctcgtccagccacccccagctcacctccgcctccaggaagaccagac

SEQ ID NO: 47266 - DNA, 83 bp, Homo sapiens
caacaaactcgaagactggcatgagtgcccgaaggaggaaacagtgacagacctggagactgcagttctctatccttcacaca

SEQ ID NO: 47267 - DNA, 75 bp, Homo sapiens
tggccgtgccctggggctgagccctcagtcttgctatgttgctcaggctggtcttgaacccctgagctcaagtga

SEQ ID NO: 47268 - DNA, 100 bp, Homo sapiens
acatcgtcgtgcaggtcgagaccccaggcacagagaccccatcctacaaggtcaaaatgcagatcttcgtgaaaacccttaccggcaagaccatcaccct

SEQ ID NO: 47269 - DNA, 75 bp, Homo sapiens
gggagctttgggcctggtctggtggctgcacaggaggagaatgaagtcactgagttctttgtgaccctggagaag

SEQ ID NO: 47270 - DNA, 87 bp, Homo sapiens
gtgatgcggatttttggaggcgtccagcagctccgtgagcagttggaattgatcacaccttttcagttgtacttcaatcctgaatta

SEQ ID NO: 47271 - DNA, 100 bp, Homo sapiens
aagtgtgtgcatctggctgttagaagaattcatgctcatccggcggaagatccatccaaaagctatgtgaaattacgagactttgtgcttgtgaagcttt

SEQ ID NO: 47272 - DNA, 130 bp, Homo sapiens
ccctgtttcgccacagttcctaccttatgagctcggttttcttatgcttataagagtggaacagatgatatcatcaagttgaatcgaaaggaagggaagaagcagaattttccaagactaaatagaagac

SEQ ID NO: 47273 - DNA, 99 bp, Homo sapiens
ccacgaccctggctactagcacagccagaagaggaaagcccccgacaaaagaacccattagccaggtgactacacttgtcaacacaagcaacaaaggcc

SEQ ID NO: 47274 - DNA, 100 bp, Homo sapiens
aagaatccagtatctaaaccatataacaagaactacgcaatgggagcgcccaacacggattatattccatcacaacaagatattctgcttgccagaagac

SEQ ID NO: 47275 - DNA, 117 bp, Homo sapiens
aactgagtgaaaatacagccaagatcttggcaaagcttctccctcagtatttagaccagctggccaaatttcgcagtctcctgtgcacagcggagggtgaagcagcagcttttctgg

SEQ ID NO: 47276 - DNA, 82 bp, Homo sapiens
gtccgcaaggccggagaaggccgccgggcccgggcatggtggtctggggcaacgcggaaggagaacgtatttaccgggcagt

SEQ ID NO: 47277 - DNA, 101 bp, Homo sapiens
cggcagatggcatccctgagaggtggtgactgagactagatgcgggtgcagaaaagttgccagacggccagcattgccactgccagtgcatccgcccaggc

SEQ ID NO: 47278 - DNA, 76 bp, Homo sapiens
aacaaaattctgaactcaggacttggcaaagctcagccggtctatcagtgtcgatttagcagaaagcaaacggctt

SEQ ID NO: 47279 - DNA, 82 bp, Homo sapiens
ctggacaagaatatgctgccaaaattatcaacaccaaaaagctttctgctagggatgatggtggtgctaccccagtacagga

SEQ ID NO: 47280 - DNA, 83 bp, Homo sapiens
cgcgaggcgggcagccggggcgtccaggtgtccctacctgcaccggacgacgggggacacagaacgcaagtaccacctgcgtt

SEQ ID NO: 47281 - DNA, 75 bp, Homo sapiens
ctcctggagcagtacgtggtggccaagaaccccaagctgatgctgcgcaggatcccgctgcacaagttcacgtcc

SEQ ID NO: 47282 - DNA, 74 bp, Homo sapiens
ctgcccttcacgctccaggagctagagctgtctgaggtgctttggaccatggtgatccacatcggcctgagcgt

SEQ ID NO: 47283 - DNA, 90 bp, Homo sapiens
tggtggagagagtggtgtctggaggcctgtgtccagaattcatctgtgccttattccagttcactcttgtaagggtgatgcttgtgatcc

SEQ ID NO: 47284 - DNA, 100 bp, Homo sapiens
aacaagagagacatttctggctctgaaggcgaacgcttcgctggccatttaggagctctgctcaaagccagacgtcattgaagtcaacaagagagacata

SEQ ID NO: 47285 - DNA, 75 bp, Homo sapiens
ctggactccctggagaagcagatggaaaagaaaagttgccagacggccagcattgccactgccagtgcatccgcc

SEQ ID NO: 47286 - DNA, 83 bp, Homo sapiens
aaccggcacctgcacacctggatccaggataacggaggctggagctggaagtcgagtgtgctactcaactcaggagatttgga

SEQ ID NO: 47287 - DNA, 98 bp, Homo sapiens
ttatttattaatacatctaatcatggggtatttacttaccaggtggcacaagatctctgtaaagtagcaggcatagcaaaagttctggtggctcagca

SEQ ID NO: 47288 - DNA, 100 bp, Homo sapiens
atcgaaggctaccgggcccagcacagccagcaccgcacgccctgcaagggaggacagaatctggatagtatgcttcatggcactgggatgaaatcagact

SEQ ID NO: 47289 - DNA, 82 bp, Homo sapiens
cataagtgaaactagcagtcaggagtcagtggatcggtggggaaaatgctgcttaccctgggccctgggctgtagaaagaag

SEQ ID NO: 47290 - DNA, 83 bp, Homo sapiens
aggtctaccatttggcaaagtaactaatcttttgatgttgaaaggaaaaagccagggctacttctacaagtccgaacagccag

SEQ ID NO: 47291 - DNA, 100 bp, Homo sapiens
caagcatgtacggcaaaggcaagagtaacagcagcgccgtcccgtccgacagccaggcccgggagaactcctacagaagaatggtcagctgtccaccatc

SEQ ID NO: 47292 - DNA, 100 bp, Homo sapiens
gtccgccgattcctcctccttggtcgccgcgtccttggctggcgtgtgaggcggaaccaaccctcctggccatgggaggggccgtggtggacgagggccc

SEQ ID NO: 47293 - DNA, 100 bp, Homo sapiens
aaggagaacatcaatgtgctggtgaaggcttccataattaccatcacacctttccctttgactactctgcgagtgaatttggcttaaattttaacccaac

SEQ ID NO: 47294 - DNA, 75 bp, Homo sapiens
accaggaggaggttttcaggaccaaaattgtggaaaagtcactctggtgaacaacaacgggatcatctccttcct

SEQ ID NO: 47295 - DNA, 100 bp, Homo sapiens
ggagtgcaggcgcttcaccacagacgggaagacactgatcaaggtggcagaagctgaaaagcaactgggagccgcggagagggattttatccacacggcc

SEQ ID NO: 47296 - DNA, 74 bp, Homo sapiens
cagccggcacctgacggcgtgaccgacccgagccgctccagggtttgagccacaatgtgatcttcaccttggat

SEQ ID NO: 47297 - DNA, 83 bp, Homo sapiens
gccgatccagcctgcggagcctgtggggcaggtgtctcaatgcttgtacctactgcaaaactaaacacgccagaggaaatttg

SEQ ID NO: 47298 - DNA, 129 bp, Homo sapiens
ggaagaggcattgaggactttccttacctgtttttccagctcacccactgccagcagaggtgtcatggagaaactccagctgggcccagagattctgcagcgggaaaatccaaggcttatttatgccag

SEQ ID NO: 47299 - DNA, 74 bp, Homo sapiens
tcacagtcgtcgatgccagcttcttcttgaaatatggtgataccagtgcaactgagagtggtgatgaggttcct

SEQ ID NO: 47300 - DNA, 100 bp, Homo sapiens
caagttttgacagtttcaactgaaaaaatgcagcgcctctctcgatttttaggtgctggagaatctggtaaaagcaccattgtgaagcagatgaggatcc

SEQ ID NO: 47301 - DNA, 75 bp, Homo sapiens
ttggtcttcagcctaatcattgcatcctatgatgccaacaagaaagcaggcttatggctatgggccatacggtgg

SEQ ID NO: 47302 - DNA, 83 bp, Homo sapiens
tgaagggctacctgaagatggcaccctctaccgaataaacaggcgtgtgctcgcccactgatatcggtgtactccgaaaaggg

SEQ ID NO: 47303 - DNA, 90 bp, Homo sapiens
ggagggccgggcgcggcggcggcggcggtggaggagccggagcataatgattctgcttctcagaagatgcactattatagatactctaac

SEQ ID NO: 47304 - DNA, 103 bp, Homo sapiens
attactgcgagaacaactacatacagtgtgtaaatatgttgctgtggagctgaagtcagcctttgaggaaaccggcaagaccaaggaggtgattggcacgggc

SEQ ID NO: 47305 - DNA, 83 bp, Homo sapiens
cggggccgcactgtggtattcgccggcacgcgaagtggccgcatccgcaaggtgaaaggtgtagcagtcactcggcctacacc

SEQ ID NO: 47306 - DNA, 101 bp, Homo sapiens
gagatggtggacaacctgaggggcaagtcggggcagggctactacgtggagatgaccgtgggcagccccccgcagacgttttagaaagagcgttttcgcta

SEQ ID NO: 47307 - DNA, 50 bp, Homo sapiens
agctaggacatggagatgtcaactccaggctgccaaacgagggattcttt

SEQ ID NO: 47308 - DNA, 83 bp, Homo sapiens
agcagtactttgagaaaatggacgctgacatcaatgtcacaaaagcggatgttgaaaagatggagtcttgctctgttgccagg

SEQ ID NO: 47309 - DNA, 100 bp, Homo sapiens
caaggcaccgggtccctcgcccaggtccccttggacaaatggcactttcatttggacccgtggatacccattgaacagatgcttgaaacctgcaagtaat

SEQ ID NO: 47310 - DNA, 98 bp, Homo sapiens
cagtgatttcttccaaggtcaaaggacgaagcttgcaagtagaagtctcaggcaacagattaaaccagcagtgactataaagctacaccttaatcaaa

SEQ ID NO: 47311 - DNA, 95 bp, Homo sapiens
agaagaggcagctgttcatagaaatgcaggactactgagcccagccaggctgtatgccattgctgccaaagaaaaagatattcaagaggagtcca

SEQ ID NO: 47312 - DNA, 100 bp, Homo sapiens
ctcctgaatctggactctaaactgaaatgcttccagactgcacacttttacttagaggacagtacatcccctagagttatatccacacctccaacaccta

SEQ ID NO: 47313 - DNA, 100 bp, Homo sapiens
ccgcggccaacatgagcttcttgttggtatgagtattatagaacaattagaccctgtatcttttagcaattacttgaagaaataccataatactatatgt

SEQ ID NO: 47314 - DNA, 100 bp, Homo sapiens
gaattggtggctcggatcctagccctcgtgcctccatggactcgagtgtaccgagtacagagagcctggcccaactagagaatctgtgcaaacagctgta

SEQ ID NO: 47315 - DNA, 75 bp, Homo sapiens
aatgacaaacaaccagctcttcaggacttggatgttgtgggtgatggtatgcagtgtcctccttcacctttgctt

SEQ ID NO: 47316 - DNA, 51 bp, Homo sapiens
gttctgatgtgactgagagagaagttgttcaccgtggtaagactacgctgg

SEQ ID NO: 47317 - DNA, 75 bp, Homo sapiens
gatcgctgtgatcgtcacttgaatgcaggctcaacagtaccagcagcagcgtcgaaaatttgcagctgccttctt

SEQ ID NO: 47318 - DNA, 98 bp, Homo sapiens
tggcacccagtgcaactacctacatcggccttaatcctgaccccccggtgattgtggagatgaactcctcggtggaggccatcgagggctcccacgtg

SEQ ID NO: 47319 - DNA, 75 bp, Homo sapiens
ctggtggtgattgcacacgacgtggatcccatcgaggtattggcaagcttgccagtgtacctgctggtggggctg

SEQ ID NO: 47320 - DNA, 106 bp, Homo sapiens
cgggaggaaggaacgaggcaaggagctaaagcagcgtgcgttcagccctgggtattaaaggtggaagaaggtccatatctttttctgtgggtgcttcaagtgttgt

SEQ ID NO: 47321 - DNA, 90 bp, Homo sapiens
agtgaagattggcaatccagtgccctataatgaagcctactttggggataaaggattatttggtcttctggatttggaggcaatcagcgg

SEQ ID NO: 47322 - DNA, 98 bp, Homo sapiens
tcctaagtgctggagtagacaaggtgcagattcactttataggaacagcttcagcttcagtgatgaaaaactgaattctccaacagactctaccccag

SEQ ID NO: 47323 - DNA, 100 bp, Homo sapiens
tgcagagctggagtttgccatccagcccaacaccaccgggaagcagctatttgaccagattgactttgaagatgtgattgcagaaccagaagggacacac

SEQ ID NO: 47324 - DNA, 75 bp, Homo sapiens
cagagcctcgcctttgccgatccgccgcccgtccacacccgccgccagctcactgataaccttgttgagccggtc

SEQ ID NO: 47325 - DNA, 100 bp, Homo sapiens
gtgcgccgcagcccgggcccaggccccggcagcgcctgggacaagctttggtgtcatccccagcactcctctggccatccatacaccactgatgccaaac

SEQ ID NO: 47326 - DNA, 50 bp, Homo sapiens
aggacaagaccatcgagctcatgtgcatgcaagatatgggaaatactaaa

SEQ ID NO: 47327 - DNA, 75 bp, Homo sapiens
caaagttcttccagtcctcctaggcatcttattgatcctccagtcgagatccccaggggagaactgccagcacct

SEQ ID NO: 47328 - DNA, 100 bp, Homo sapiens
tgaatacacctctgattttaatcagttctgcgtttgaaaggaaacccgaccttgtgccggagccgactactggagatgacagtgatgctgccacctttaa

SEQ ID NO: 47329 - DNA, 90 bp, Homo sapiens
agtgcaagcttagagcgtctggccaagaatcagaggaagtggagtctccgggaccattatggcagtcaagtggacgggtgggcattcttc

SEQ ID NO: 47330 - DNA, 87 bp, Homo sapiens
ccctgttggcaaaggaacggagaacacttttccttcaccgaaagcaaagccttctagacaagctcagtggaatctgaagggcccacc

SEQ ID NO: 47331 - DNA, 73 bp, Homo sapiens
aaagaagaggctgcagaatatgctaaacttttggccaagagaatgaaggtatgtgcactgcgcgtgaccagcc

SEQ ID NO: 47332 - DNA, 50 bp, Homo sapiens
ggaagttcatttaagtcaccagacacagtcaacggcagagacttatccag

SEQ ID NO: 47333 - DNA, 100 bp, Homo sapiens
aataacctgtcgaagttatctgatgacaaattacgaaagtgctcccccatccccacagtataaaaagtcatccgtccttggctcaggatttggagagctt

SEQ ID NO: 47334 - DNA, 100 bp, Homo sapiens
ccacttgtaagtgaaaaaggggaagaaagagaatattgttcagttgattatgccagccagatgcagacctgtgaccgcatcaagcagtcagcagctggca

SEQ ID NO: 47335 - DNA, 100 bp, Homo sapiens
aagttgagaaaatgggagcagttttcatggatgcccctgtttctggtgaggtccagttccggccgtaccgcacagacgacttcatcacgcgcctgtacta

SEQ ID NO: 47336 - DNA, 126 bp, Homo sapiens
cggaaaggatgttggcggtccctgtgacctgtggagacacggccagatctgccctccacctcccgcgacgatgcccctcaacgttagcttcaccaacaggaactatgacctcgactacgactcggt

SEQ ID NO: 47337 - DNA, 101 bp, Homo sapiens
gaaggaaattagtgatgatgaggcagaggaagagcaagaggtagcaagtgcttccttctgactagtaatgctggtgtaattgaaaaagaacaaataaacat

SEQ ID NO: 47338 - DNA, 100 bp, Homo sapiens
tttcagcctgcccttgccagtgcctgggccgctgggagccgttattggctgccgttaaggaccgttacgtttcccggtgaagtaagaactctgctagaga

SEQ ID NO: 47339 - DNA, 83 bp, Homo sapiens
gccctgccctgggctggaacgaccctgatagcctgggctggaagctcttctacgtcacaggctgcctgtttgtggctgtgcag

SEQ ID NO: 47340 - DNA, 83 bp, Homo sapiens
ggaaatcgtgcacatccaggctggtcagtgtggcaaccagatcggtgccaaggtatgtcgagagtaccaacgtggcaattgca

SEQ ID NO: 47341 - DNA, 100 bp, Homo sapiens
atgaaaatatcactacgattcagtgctactcccttagtaactatgcagttttaatggatcaccattcccgtgcagaccttctccaacctgcagattcgag

SEQ ID NO: 47342 - DNA, 100 bp, Homo sapiens
ggacatcccagagatccctcagcggtcagcggcgtccctgggaaggacagcagagacggcagtgagagtgtggacaacagtgagtatatgcggaatggag

SEQ ID NO: 47343 - DNA, 98 bp, Homo sapiens
accaacgtgtctgcctccgaccgcttcgccgcctccaactttggggagaacaagaacctggttcatggtaatgtgtgtggccggaacatcctgctggc

SEQ ID NO: 47344 - DNA, 82 bp, Homo sapiens
attggcaggagattatagctctgtatgagaaggacaacacctacttaggttctatgaatttgaatgctgtgtgtgtcgcggg

SEQ ID NO: 47345 - DNA, 100 bp, Homo sapiens
gggtgaaagagactcggtgacagatacagagttgagaattatggctgcaggaaaatttgcaagccttcccagaaacatgccggtgaatcaccagttcccc

SEQ ID NO: 47346 - DNA, 100 bp, Homo sapiens
ggcccgtactgcacatcgtggtggtcggatttcaccacaagaagggctgccaggagcccagtttcctccaattgcagcacaagaccttccttttgttcta

SEQ ID NO: 47347 - DNA, 82 bp, Homo sapiens
cacccccggcggcggcacgatgccctttgacttcaggaggttggatggcaagcatgtggtgtttggcaaagtgaaagaaggc

SEQ ID NO: 47348 - DNA, 100 bp, Homo sapiens
gaaacatggatttgatccacaaagtcccctttgtgttcacataatgctgtcaggaactgtgaccaaggaaagaccggcagagaccaatgccaatgtggac

SEQ ID NO: 47349 - DNA, 73 bp, Homo sapiens
cgtcgtgacaacagagagagagctaatatgttagaacggctaaaaatttatgaggaagcctggactaaatatc

SEQ ID NO: 47350 - DNA, 100 bp, Homo sapiens
ataaaattgctatcctgagtggagactttcttctagcaaatgcctgcaatggactagctctgctacagaacaccaagtgtttgaaagatgtatggtgatc

SEQ ID NO: 47351 - DNA, 51 bp, Homo sapiens
caccaaggaccagcaattcaatgaagctgtggtctaccaatctagacaact

SEQ ID NO: 47352 - DNA, 83 bp, Homo sapiens
tatttggtgatttcaacttccggctggattccaagtccgtcgtggagaacccagtgacttgattgtaaaaatttacagagcgg

SEQ ID NO: 47353 - DNA, 100 bp, Homo sapiens
ataaaatcttatgattatgaggcatgggcaaaacttgatgtggcgttggagaccagggccagccctggccacaccccaggctgtgtcaccttcgtcctga

SEQ ID NO: 47354 - DNA, 136 bp, Homo sapiens
gagatgaaaacacacccacctcacaggctgttgtgaggactaagggtgcggcagtgcctggtacatgagtcttcttcaagatcaaaagccgaaatgcacacatgaaaactcacaggcagcaggaggaacaacagag

SEQ ID NO: 47355 - DNA, 96 bp, Homo sapiens
aagaaagcaaaccccagctcacttgttctggaaaggagagaggtggagaatgtgacagtgatgataacatgggtgccaaaaatacttcaataggag

SEQ ID NO: 47356 - DNA, 50 bp, Homo sapiens
cttacattgaaagacccttctccaaagggtcagttaaatgaaagcatgga

SEQ ID NO: 47357 - DNA, 88 bp, Homo sapiens
gtttgtcccagattttcagtctgataaccaataactgaagtgaagtgatggactccgatttggagagtagtaagacgtgaaaggaata

SEQ ID NO: 47358 - DNA, 75 bp, Homo sapiens
cgatggtgctgatgaagtagatgctgatctcaatctcatcaagggtggcggaaactagaaaaactgcttttggaa

SEQ ID NO: 47359 - DNA, 100 bp, Homo sapiens
gaggattgaagagtatttgaagtctgtgtcaaacatccatatcataagtggaattttggagatattcaaagtgtggcttgatctaagaacccagtctacc

SEQ ID NO: 47360 - DNA, 97 bp, Homo sapiens
ctttgtgacgggatcgctttctcccatcgaaccttctagttgcttattgcagatttgataatgggctgcattaaaagtaaagaaaacaaaagtccag

SEQ ID NO: 47361 - DNA, 100 bp, Homo sapiens
tccgttggcctgttggatgaaggaacaaaccttggaaatgttattgataactatgtttatgaacataccctggactccctggaggaaaagcggaagcggc

SEQ ID NO: 47362 - DNA, 100 bp, Homo sapiens
gaagggagtcgttacgctgcagatcggcgccgttacagacgtggctactatggaaggcgccgtggccctccccggaatatacagtttatgtaacttgatg

SEQ ID NO: 47363 - DNA, 98 bp, Homo sapiens
aagacgataccgatgatgaaattgccaaatatgatggtgtggatgtggaagcagccaagcgggcagaagaggaattgctccttcatgacacgaggtgc

SEQ ID NO: 47364 - DNA, 100 bp, Homo sapiens
aatcgcaaggcacctctgagaacttcagctcgcatgtggaagactctcaccttcttcgtcgcgctccccggggtggcagtcagcatgctgaatgtgtacc

SEQ ID NO: 47365 - DNA, 75 bp, Homo sapiens
ggcccctccggccagggccgggagccgggccggcctagccagggccaattcctgtccccccagcagcatggcatc

SEQ ID NO: 47366 - DNA, 100 bp, Homo sapiens
cttggagatgtatcaaaaaatgcagtcccctcatgccaaggtgactgaaaactcctgaggcatttcctggactagaatgggtagtgaagacccatgtcag

SEQ ID NO: 47367 - DNA, 100 bp, Homo sapiens
aagctatgtttagcatcttctgtcatgagaagtggcgatcaaaattgatttttgatcaccatactgaagaggatatagataaaagtgctaacagtgtatt

SEQ ID NO: 47368 - DNA, 83 bp, Homo sapiens
ctcaggagtgaagctacagaccttcgcggactggtaccatcagtcctatgactgcgtctgtgtcatgtttgcctccgtgccgg

SEQ ID NO: 47369 - DNA, 51 bp, Homo sapiens
tcaggcttccatgcagcctgccttaccgcttctcctcttccttaaagcctt

SEQ ID NO: 47370 - DNA, 100 bp, Homo sapiens
ctgtcaatcagaacctgacgacagctttccaactggctttagcaatagcagatcttgccctacagatgccttcctggaagggatgtgtgcaaacactggt

SEQ ID NO: 47371 - DNA, 75 bp, Homo sapiens
catcatcattgttggagatgagatccttaaggtctggccagcatgacccagaacttagagccacttctgaagaag

SEQ ID NO: 47372 - DNA, 88 bp, Homo sapiens
aactgcccatgctgggccggcgccctggggccccggagagggagtgcatccgccccaacccttttccccctcgtctcctgtgagaatt

SEQ ID NO: 47373 - DNA, 82 bp, Homo sapiens
cagctctgcggctcgggccctgagatagggccagatttgagtgtgtgaatttttgagtgaaacctggaacccaaatgagaag

SEQ ID NO: 47374 - DNA, 100 bp, Homo sapiens
ttaaaaatcacagaccaggatggagataaaggaactcaaagaatttggaaccagacgtcctgggtcctctccagcatggcagccctctactggagggtga

SEQ ID NO: 47375 - DNA, 80 bp, Homo sapiens
ctgtgctcgcgctactctctctttctggcctggaggctatccagccaaccatgtccaagggacctgcagttggtattgat

SEQ ID NO: 47376 - DNA, 83 bp, Homo sapiens
ccgtggagggcctcgccatgtcctgctgcccggtgcattcatttgatggtaccaaggaagcagcagctgctttgattgacttg

SEQ ID NO: 47377 - DNA, 74 bp, Homo sapiens
gagtgctgatacctgtcaagcagtatcccaagatgagacgtgcaggtaccatcaggaagcagcgggataagctg

SEQ ID NO: 47378 - DNA, 75 bp, Homo sapiens
ggatcacggatgtaggaagtgttgacttgctggtgaaggtgggggaggttgtggacaagctctttgatttggatg

SEQ ID NO: 47379 - DNA, 83 bp, Homo sapiens
gggttttcttagccctctacttttcaagacaccaagtgagaggccaaccagctgaactttgacctggaccggggcgtgtttcc

SEQ ID NO: 47380 - DNA, 90 bp, Homo sapiens
gaaaggcaagagaatacttactagttaaaggaaagtgactattttaccccacagggagaattccgtgtagacaaagcaggatcccctact

SEQ ID NO: 47381 - DNA, 100 bp, Homo sapiens
gtcggtgggcgcaggacgagcaagctctcctatgtggacgccgagggcaaccctgtgggtgtggtacagatgaccttcctgcggctgctgagcgcctctg

SEQ ID NO: 47382 - DNA, 75 bp, Homo sapiens
ggatatccaggatccaggggtccccaggctaaagaacatgcttgaggcagccctaggtgaggccaagaagcaact

SEQ ID NO: 47383 - DNA, 100 bp, Homo sapiens
tgcagctccagagagacgtgaaacatgtgaacactcaagtgaagcaaaagccttccatgattacatggaccagcttttgggaaatatgattgaaatgtgg

SEQ ID NO: 47384 - DNA, 100 bp, Homo sapiens
gtccgaccgggctagctttggcgaggggacggagccggatcaggagccgccgccgccatatcaggccatccggctgtccttagagcaagccctgcctcct

SEQ ID NO: 47385 - DNA, 75 bp, Homo sapiens
attctgcccactctgcggagttagcagtcacgacctccagcacaggacttcattgacttaactagagagaccaga

SEQ ID NO: 47386 - DNA, 100 bp, Homo sapiens
ggcggcgacgctgacacctcccaccatggacagcttcgacttagccctgctccaggaatgggacctcgagtcactgtggcctcaggagtgcaagtagctg

SEQ ID NO: 47387 - DNA, 101 bp, Homo sapiens
gggagtcaggctgagccttcggcccccaagttgtctgcattcaaaagagcattctattaaagctaccttaatttggcgcttatttttcttaatcatgtttc

SEQ ID NO: 47388 - DNA, 75 bp, Homo sapiens
aatatgaagacatagctgtgaagctgggaactgatctagaatacgagtgatagacagccaagcagagaaactgaa

SEQ ID NO: 47389 - DNA, 135 bp, Homo sapiens
gcgagtttcgctggccgcgagcctcaggtccggacgcagtgggggcgcctcagttgcagggagaacaaggggtctgtggaaatcatgagaaaggacttgaatgacgcccgggacctgcatggccaggcagagtca

SEQ ID NO: 47390 - DNA, 75 bp, Homo sapiens
tggatgtgaaaatgaagccagaccgagtgggccagatggagaacatatccccaggacagatcattgatgaaccca

SEQ ID NO: 47391 - DNA, 90 bp, Homo sapiens
ctacatcctgcgggtgcctttgaaaatcaacgacaacttgagcacagtggcagtatgatcacctcacggctacctatcttctgcttctag

SEQ ID NO: 47392 - DNA, 100 bp, Homo sapiens
gcgggcatgtatcatgtttttgaccagcacgtggatgaggcagtttcacaagactgtaatcaggatatggaagagatgatgtctgagcaggaaaatccag

SEQ ID NO: 47393 - DNA, 82 bp, Homo sapiens
tgcaggtgtctcttctcgccctggcggggaaggttatggaaacaaaggacatgctttacatcgtcactgaatttgctaaaaa

SEQ ID NO: 47394 - DNA, 90 bp, Homo sapiens
ggcgtgtagtggaaccaaagagagctgtttctagagaggtggttgtgtcaaaccgattggtgacatctccatgctgtattgtcacaagca

SEQ ID NO: 47395 - DNA, 100 bp, Homo sapiens
caccgggacctcctggaagccaaaaatgggtgtgtttatggaagacaaactgagatgtgctgtcccagccttaggccctggcagtacgccttgccttttc

SEQ ID NO: 47396 - DNA, 82 bp, Homo sapiens
ccggcgcgaagaggctggactcggattcgttgcctgagaaacgggtatgcaggagattagaagccagtgggcatgagcgtgg

SEQ ID NO: 47397 - DNA, 100 bp, Homo sapiens
aggccatctacctggacatcgatggacgcattcagaaggctgctgagaactagccctagacctctgcgtgagggttcttctgccgaagacatcaccagtg

SEQ ID NO: 47398 - DNA, 50 bp, Homo sapiens
tggacaccaaacatttcctgccgctcgcatttaaatcaaacggtattgag

SEQ ID NO: 47399 - DNA, 100 bp, Homo sapiens
tgaacggcaaagtgctggagtgcttccatcggcgcactggacagaagtgtgccctgaagggtcattggtttcctggaggccattgtttgcataaaatttg

SEQ ID NO: 47400 - DNA, 85 bp, Homo sapiens
gaaattttgggggcaggttctcttgctagctgtctcctatatataatctggttccagtgaaaatgaaaaatgcacacctaaagaa

SEQ ID NO: 47401 - DNA, 100 bp, Homo sapiens
ggcacagccctaaaggccaacccttttggaggtgcttctcatgcaaaaggaatcgtgctggaaaaagtgttggtcaaagaaaaagtgatgtatgaaaaag

SEQ ID NO: 47402 - DNA, 100 bp, Homo sapiens
gtggaaagtgaagaaggcattgaagatgactattttttggagaggcctgatgcccgaatttcagatgaacgacaatctccttgagagctggagcgacctc

SEQ ID NO: 47403 - DNA, 100 bp, Homo sapiens
ccgcggggcgctaaccctggagagcccaggagcgggcgggacatgagctaagtccagtagtagcaaagccccaaatcaaagccagcaagaccacagtcac

SEQ ID NO: 47404 - DNA, 100 bp, Homo sapiens
cctcgctccggaaaggggacacctggagattacctggggcaattgatgttatcggtcagactataactatcagccgagtagaaggcaggcgacgggcaaa

SEQ ID NO: 47405 - DNA, 78 bp, Homo sapiens
ttccacacaactccagtgctaactcaacagggccgatggggaagtgaagcactgtgtgatctacagcactgctcgggg

SEQ ID NO: 47406 - DNA, 82 bp, Homo sapiens
tcgtcgccacctggatgctggagatcagtcgcatcgaatacattcattcaaagaacttcatccaccgggatgtgaagccaga

SEQ ID NO: 47407 - DNA, 87 bp, Homo sapiens
gcagaaggcctctctcctgatacagcaggcgctcaccatgttccctggaggttttggccacttgaccaggcagctgatgaccctggc

SEQ ID NO: 47408 - DNA, 119 bp, Homo sapiens
tggagtgttaacagtgtagggaaaatagagtgtgtatcagcagagaccaccgaagactgcatcgccaagatcatgtgttccttgcctgtatctccccttggttcaatagctaccagatt

SEQ ID NO: 47409 - DNA, 97 bp, Homo sapiens
tcaccccgctgtgacgcgcacgctgtaggaaaacttttccatagcaaggcgtgtacaagatccattagctgagctagtgaaaattgagccaaagcac

SEQ ID NO: 47410 - DNA, 90 bp, Homo sapiens
gcggcagcatgtcggtggcggggctgaagaagcagttctacaaggcgagccagatgcagagcaaagcggcagtccccggacagggatggg

SEQ ID NO: 47411 - DNA, 74 bp, Homo sapiens
ttagataaagagaaaattaacaaaattataatggaagccacgaagggtgtgataggtatacagctggttgttac

SEQ ID NO: 47412 - DNA, 100 bp, Homo sapiens
cagaaccggagcatggaggcgcacaacatcctcagatcaggatcctcatgaccagccaaagagaagaagaattaggaagcataaatcaaagaaaaaattt

SEQ ID NO: 47413 - DNA, 100 bp, Homo sapiens
ttatgagcagtgagctggagaccaccagcttctttgactcagatgaggatgactccaccagcaggctttatcctgtggataaacgcagagtgaacgagtt

SEQ ID NO: 47414 - DNA, 116 bp, Homo sapiens
ctgggcccctgaggaaagagcccgaacttctcccgctctacctcagcctgcgggactgctcggctcggcttctaggcgataacaacgaacttgatgcaagtgataggtttgccaag

SEQ ID NO: 47415 - DNA, 51 bp, Homo sapiens
gggtgagaccctcacttcatccggtgggaaaggtttttattcctggactgc

SEQ ID NO: 47416 - DNA, 100 bp, Homo sapiens
cagagggcaatgaaggcacagaaatggaagtaccagcagaaggtcgcaatgatgatgtcaaatgcttttgttgtgatggtggcttgaggtgttgggaatc

SEQ ID NO: 47417 - DNA, 74 bp, Homo sapiens
gaaaagattgaatgtaacaagaggcataaaacagttctcactgaactacaggagtcttttagtcctgctataca

SEQ ID NO: 47418 - DNA, 75 bp, Homo sapiens
cctggagaccgaggggctgcgcttcctgcacaccacggggaaggatggagacgctgaaggataagaccctgcagg

SEQ ID NO: 47419 - DNA, 82 bp, Homo sapiens
aagcccaaggggatggcaagtccaggagggctggatcttcaacgtggttccttggttggtggcgattccggccagtctattc

SEQ ID NO: 47420 - DNA, 100 bp, Homo sapiens
gacagacctcactgaggcccgcgtgcagtctggagggcagtatgagctttttgctgtgattgcgcacgtgggaatggcagactccggtcattactgtgtc

SEQ ID NO: 47421 - DNA, 98 bp, Homo sapiens
gaaccattgaagcttgagagaaaagcccccaaaagcagctattcagaacaccttccaccatgaccacctcagcaagttcccacttaaataaaggcatc

SEQ ID NO: 47422 - DNA, 146 bp, Homo sapiens
tgaaccactgcaacagtaatgtgtttgttcgtctgctgagactcggctccaaggtcacagctcgtaacactggaagacaactgttagttttgtggcttactgctgctccacccagtgtctgcagacttttgacctgctgagttgat

SEQ ID NO: 47423 - DNA, 101 bp, Homo sapiens
gccgccttccgcaggccgtttccaccgaggaaaaggaatcgtatcgtatgtccgctatccagaacctccactctttcggtgcacagcgacttcaccgcggc

SEQ ID NO: 47424 - DNA, 99 bp, Homo sapiens
gaggttggatttatgcaaacttgggccaaaggacagttagaagacagtagtagtttatgccaacgtgacttcattcatacagatgaaccaaggatcggg

SEQ ID NO: 47425 - DNA, 74 bp, Homo sapiens
ccagccatgtggtcagcctgatctcggacttcacagccagcagaactaaacttactcaagtttatagaactctt

SEQ ID NO: 47426 - DNA, 75 bp, Homo sapiens
gcgcggcagtatccttggggcactgtgcaggtctattatcctcccagtccacaacgctgaaccgtggctggacga

SEQ ID NO: 47427 - DNA, 99 bp, Homo sapiens
gtttgaacaaactcgaagaacagctgtggaaagaagttgcaaaacactgggtggcgggacaggcttcattgggacagccctaacccagctgctgaatgc

SEQ ID NO: 47428 - DNA, 100 bp, Homo sapiens
cctcagttggaagcagccgatccagcctgcggagcctgtggggcagtcactattccaggtcctcaggatatagccgtgacctaaacacagaaatctaccc

SEQ ID NO: 47429 - DNA, 83 bp, Homo sapiens
cagctcttacagaaatgtgtcttgttgcatttggtaatttagcagaacttgatgcttgggatggaagaagtttgagtgaccta

SEQ ID NO: 47430 - DNA, 51 bp, Homo sapiens
cttcctgggactgtcactgctggagaagcttagagacgggggttcaccatg

SEQ ID NO: 47431 - DNA, 51 bp, Homo sapiens
cccaagcgtggctatccccctgcccagtgtttcccgggctctttgagttct

SEQ ID NO: 47432 - DNA, 83 bp, Homo sapiens
tgcggcagcctggggctcggggactggctagatctctttttgctaggcttcctgccatctttaccaagttgagattatccggg

SEQ ID NO: 47433 - DNA, 96 bp, Homo sapiens
caaatattatggatcctatctgaagagagtgattgactgcctggaggatgagaaggcaaccctcaccttggccatggctgactggctgcgggacta

SEQ ID NO: 47434 - DNA, 83 bp, Homo sapiens
gaccaaggtggaaatcaaacgtggagccgccaccaaaatgcagattttcgtgaaaacccttacggggaagaccatcaccctcg

SEQ ID NO: 47435 - DNA, 74 bp, Homo sapiens
caggaaggcgaggcttccgcccggcacagggggattttttatcaagcagaaatgcatcgaacaacgagaatcaa

SEQ ID NO: 47436 - DNA, 82 bp, Homo sapiens
gaggttctgcagaaggttgtgactttagtatacagcccgatgagagaaagggaaagttaaggatgctggagcagaacaatgg

SEQ ID NO: 47437 - DNA, 75 bp, Homo sapiens
aaacgccaggcggatctcagaaggccagttcaaaggtgtgaccatgaagctcatggatgaggtcgccgggatcgt

SEQ ID NO: 47438 - DNA, 51 bp, Homo sapiens
actcctctgctttggactgaaggttacttcttgctgcagattctgcgcagg

SEQ ID NO: 47439 - DNA, 101 bp, Homo sapiens
cgagcggtgactccccgccgctcccgggggccgtgacgatcatccagcgggaggtattcactatgaaatgtgcatagaatgtccacctactttcagtgaca

SEQ ID NO: 47440 - DNA, 100 bp, Homo sapiens
gctcgcgctccaagctccctgcggggaagaacgtgctactgctgggtggatctaggatccggcttccaacatgtggcagctctgggcctccctctgctgc

SEQ ID NO: 47441 - DNA, 88 bp, Homo sapiens
ggcctatgccaatcagcatttcacattcctcatggttggttcaaagctccttcgagaactcatagaacggaagaccagctccttggat

SEQ ID NO: 47442 - DNA, 100 bp, Homo sapiens
ctgcgcagggccaagttcaagtttcctggccgccagaagaaattgcttcagagaattcagattgcatctttccttcagctcctgatgttaaggcctgagc

SEQ ID NO: 47443 - DNA, 88 bp, Homo sapiens
caccatccgcgaggcaggagagaggaggaggagtgcggcgcggcggccccgggaccaaggagttcgatcctttggtacagaagacaga

SEQ ID NO: 47444 - DNA, 82 bp, Homo sapiens
ctgcgaggaggaagtcgcctctgtgctcgtgagtccagggatctaagaactgtaagagtaaatgggtccagtaattggaatg

SEQ ID NO: 47445 - DNA, 80 bp, Homo sapiens
aatttagcgctcgcccagctagccgcaggttgacatcatggacatatgtgagtccatcctggagaggaagcggcatgaca

SEQ ID NO: 47446 - DNA, 75 bp, Homo sapiens
ggacaagatcccgtccatgaatcagaactgggcacctccgggctgtgaaaagttagggaagtgtctgacacctcc

SEQ ID NO: 47447 - DNA, 75 bp, Homo sapiens
ctgagacggtgtcccgccgaaaggttgcaattgtagctcaagacttggcagcattccatactgcctcatcagaaa

SEQ ID NO: 47448 - DNA, 100 bp, Homo sapiens
ctgggcatcagcattgcgggcggcaagggctccacaccctataagggggacgacgaggtttgggtacccagaccccacctacctgacccgggtgcaagag

SEQ ID NO: 47449 - DNA, 100 bp, Homo sapiens
ggaagaatggcagtgctcaaactcaccgaccagccctgggcgctgcctatggcacagccaagagcggtaccggcattgcggccatgtctgtcatgcggcc

SEQ ID NO: 47450 - DNA, 97 bp, Homo sapiens
catccttcaatgacacttttgtccatgtcactgatctttctggcaagaactgtggctgcaccatctgtcttcatcttcccgccatctgatgagcagt

SEQ ID NO: 47451 - DNA, 97 bp, Homo sapiens
tagaacaatccttgaattggctcggtatttccttaagcatggcccaaaaaaggcaatccgatttacgacttttttctgggacgagagctcaaccctc

SEQ ID NO: 47452 - DNA, 75 bp, Homo sapiens
aagagcagcggaaaatgatccagtcacagacgccatcgtagtagaagcagggagcggaagaagtctcgatccagg

SEQ ID NO: 47453 - DNA, 75 bp, Homo sapiens
cttacatcatgccgagccttccttgtaacagcgcgaatccccaccaagaaaatgcatccgatgcagatttatggc

SEQ ID NO: 47454 - DNA, 101 bp, Homo sapiens
ggctgcaatatggcggaggcggaaggggaaagcctggagtcctggctcaccggccaagagccactgcacaatgaggagctggcaggagcaggccgggtggc

SEQ ID NO: 47455 - DNA, 112 bp, Homo sapiens
cgacatgttcacgcacgggatccagagcgccgcgcacttcgtcatgttcttcgcgccctggagccttcacgtaaatgggtccagtcatgcctcccagtaagaagccagaaag

SEQ ID NO: 47456 - DNA, 100 bp, Homo sapiens
cagagtttgccagatcttagacatccctttccatcaagtgtcctacgtaaaggagtattggaatgatgtgttcaggttaaagctgaagctcaacaaagat

SEQ ID NO: 47457 - DNA, 100 bp, Homo sapiens
caaatagagctgccagaggttccctccgagccccttcctgagaagatcccagagaagcacctgaggcaggagccagggacccagccctacaacatcagag

SEQ ID NO: 47458 - DNA, 49 bp, Homo sapiens
gcaaggctgagggacgagaacgaggatgaatgctatcaagtaagacaag

SEQ ID NO: 47459 - DNA, 98 bp, Homo sapiens
ccaaatactgcatatcagaaacaacagaaagggttcaaagacaccagtcagtatgtagtaggagaattggcagcactagagaatgagcaaaagcaaat

SEQ ID NO: 47460 - DNA, 83 bp, Homo sapiens
tgcagcgggagctggacggcgagcgcgagcggcgcgagaaactccacagcacctgttgccttcattagcagcttttcctcctc

SEQ ID NO: 47461 - DNA, 90 bp, Homo sapiens
cagggcagagggcacctgagcggctggagagcctgttggagaaacacaaagagagcagcccgacggccatggaggctgaagagacgatgg

SEQ ID NO: 47462 - DNA, 90 bp, Homo sapiens
tttcatttccatttctaccttgtatgcctcaatttgctggatttaagcactgctgcactttatgaggtaaatgagctggatggtatcccg

SEQ ID NO: 47463 - DNA, 76 bp, Homo sapiens
tatactattgtactatggacttcatcgctttatagagtgtagtccaaaaaaggaccagaaaactccaacatccctg

SEQ ID NO: 47464 - DNA, 101 bp, Homo sapiens
ccttccttgcagaggccatggaggacgaggagagacagaagaagctggaggccggcaaagccaagttaatatgatcctctgttgaagcaagaagacaaact

SEQ ID NO: 47465 - DNA, 75 bp, Homo sapiens
ccctgctgaatcacacgccgccatccgggaggcccagggaaggtcagcccaaggccaaccccactgtcactctgt

SEQ ID NO: 47466 - DNA, 50 bp, Homo sapiens
cgggacaccccggaagctgggaaatgctgcatcttcctcccgtgaggctg

SEQ ID NO: 47467 - DNA, 100 bp, Homo sapiens
gcctccaagaccaaggacaaccctggcagcatcgggaagccctggacacatccaacgtgatggtgaagaagcaggtgtttgagctactggctgccctgtg

SEQ ID NO: 47468 - DNA, 102 bp, Homo sapiens
acagagattcatatgagagttatgtcacagtacaagagtcactttgttgcagccagtttaagtaatcagaaggctggaagttctgctgctggggcaagtggg

SEQ ID NO: 47469 - DNA, 121 bp, Homo sapiens
caagagcgacgccgccgtgtgcccaacggtcggtgtccccggctgaggcagcgcggccgcagcagccctgtttggcaaacatcgaaaagatgacaagattgagaaaacgggtaaaataaaa

SEQ ID NO: 47470 - DNA, 88 bp, Homo sapiens
agaagaagggaaggcgcgagtgaggaaaggaggtactgtagctgaaactagaggaccgttctgtggtgccccgagatgtggtccggca

SEQ ID NO: 47471 - DNA, 100 bp, Homo sapiens
cagacatctcaacgctggctctccagttcctgagggaagacctcaattaccatgacccaacagtgaaacacagcaccttccatggtgaggataagctcat

SEQ ID NO: 47472 - DNA, 83 bp, Homo sapiens
caaagacgctaaacgtgccctactctgccccgggggagaggtttggtgcacctcgatttggaggaagtagggcagggccctta

SEQ ID NO: 47473 - DNA, 75 bp, Homo sapiens
ggccacagcccaggtcacagtgaaagacaatggcgatgaccactcagaaggaggcctggtggagaaccacgtgga

SEQ ID NO: 47474 - DNA, 100 bp, Homo sapiens
gccgatgaagtgcagaggtttttttctggttgttgatcattatgaaaatcctagaaacgtggggtcccttgacaagacatctaaaaatgttggaactgga

SEQ ID NO: 47475 - DNA, 98 bp, Homo sapiens
aaatcaagcctagtgcttcgttttgtgaaaggccaatttcatgaatttcaagagagtaccattggggaatgtttcatcattactaacaggatattcct

SEQ ID NO: 47476 - DNA, 49 bp, Homo sapiens
gaggaactcagccctgattgcggaactgcaagcacatgttgaccagata

SEQ ID NO: 47477 - DNA, 75 bp, Homo sapiens
gaagcaacacgcaaacgagagctgaggctaatgaaaaacaggtatctcaacacccagtttattaaaaagaataaa

SEQ ID NO: 47478 - DNA, 50 bp, Homo sapiens
attactcaaaatatgcagggaagccaaatggtgcaaaatgcattccagta

SEQ ID NO: 47479 - DNA, 100 bp, Homo sapiens
ctcagatacctgttcccggccctcctgcttcacgtggaaagaggcaaaacctgatgaattaatggattccaaattgagatgcgtatttgaaatgcccaat

SEQ ID NO: 47480 - DNA, 95 bp, Homo sapiens
gaggcgaggaggagcgctggcgttggtgtaatacggtgcccagtatgccgccaagaatgcagacagatagaccttgtggataattattttgtgaa

SEQ ID NO: 47481 - DNA, 50 bp, Homo sapiens
gctgcagacggcgagacctcctgcacagaatcaggaaacccaggcccaac

SEQ ID NO: 47482 - DNA, 90 bp, Homo sapiens
ttgaacataatctttcatgtagctttggctctcctaaagctccctgtgctgtcaggaatctacaggacttggctcgtatttacattcgac

SEQ ID NO: 47483 - DNA, 75 bp, Homo sapiens
ttgaaacatgatgaaagagccacagagttggcagaactgtttgaaaatgctcagaatcaaattggatatccccaa

SEQ ID NO: 47484 - DNA, 90 bp, Homo sapiens
cgactgtcattcacaaccccctgaaagctgtttctgaaagatctatccagcactccgatggccagcaacaacaccgccagcatagcacaa

SEQ ID NO: 47485 - DNA, 50 bp, Homo sapiens
cggcggacagattgaccttcagagcgagtgcctacaccaactaatgttac

SEQ ID NO: 47486 - DNA, 82 bp, Homo sapiens
tgctcgccgggagcggcggcgcccggacgccgaacccaacatgagtgaagtttcctgcaagaaacgggacgactatttggaa

SEQ ID NO: 47487 - DNA, 82 bp, Homo sapiens
tccttcagaaaaagcatccccgaggaggaagacgaatcgttaaacatcttaggtcagattgctacatggattcaacgcagaa

SEQ ID NO: 47488 - DNA, 101 bp, Homo sapiens
cggaaactgtcatctgaaaaacaacgtctatgtcaaatcgacaaccatgaagaaagccccgcccccacctccaacctcgatgcccaagactgtgcaagctg

SEQ ID NO: 47489 - DNA, 100 bp, Homo sapiens
tggaggccgtttttctggagaacctgaggcatgcagctggggttttggctcaggctctgaagcggaagccagatttgttcctgtgtgaacgattggatgt

SEQ ID NO: 47490 - DNA, 74 bp, Homo sapiens
agatagacattgaccccgaggagacggtttggcaaacatcgaaaagatgacaagattgagaaaacgggtaaaat

SEQ ID NO: 47491 - DNA, 50 bp, Homo sapiens
ggcaaactgtactatgacaaaagatgaatgaaatgaatgatgtgcctttc

SEQ ID NO: 47492 - DNA, 92 bp, Homo sapiens
gcggcccaagcggtttcaaacggcttagagcaggccgcttggttctgacccagctgagggggctagagagctgaaggagagccagtttcccc

SEQ ID NO: 47493 - DNA, 76 bp, Homo sapiens
caaatactgggtcctatggaaggacatacagcatggaaagaccacagcaagattctttcattcgtctcctcctagc

SEQ ID NO: 47494 - DNA, 147 bp, Homo sapiens
gcttgtccactgtccgccagacctgctgctgcttcaatgtccgcatcgcaaccaccgccctggccatctaccatgtgattgatcacttattcattagtaatttaccagagattgtggtggagttattgatgacgttacatgagccag

SEQ ID NO: 47495 - DNA, 49 bp, Homo sapiens
ccaaggggcggaggcagagccgcggctctttcagtctcacatggcaacg

SEQ ID NO: 47496 - DNA, 75 bp, Homo sapiens
gcatgaacttgggaatgttttcttaaaattcggttattttggagctgttggagcactccttgagctgttgaagat

SEQ ID NO: 47497 - DNA, 88 bp, Homo sapiens
gaaaggctttgaagcaaaagtttgatgagattttttcagcaacaaggtgcctacgaccgcttcctgccctacattctcatgggaagtc

SEQ ID NO: 47498 - DNA, 83 bp, Homo sapiens
ggcgtggacacacaagcaccccaataacctcaaggtggtctttgggaagaagcttcctgcctttgccaccatccccatccacc

SEQ ID NO: 47499 - DNA, 102 bp, Homo sapiens
tggcagaaatgaaaactgaagatggcaaagtagaaaaacactatctcttctatgacggagaatccgtttcaggaaagacttgtgcaccatggacaattttgc

SEQ ID NO: 47500 - DNA, 82 bp, Homo sapiens
tttcaagtatgcaactcaattgatgaatgagctctgggttcccttcattatcctgtggaagtagcggtagcagttcatccaa

SEQ ID NO: 47501 - DNA, 100 bp, Homo sapiens
cgcagcgccatcatcctgcacctcagcaacggcagcgtgcagatcaacttcttccaggaccagcccggtggcaccctggatctgaccctgatccgtgccc

SEQ ID NO: 47502 - DNA, 95 bp, Homo sapiens
tttcgccagcccgtgccgcgagcgcggcctgcaggaggggcactatggcagacaaagttaggaggcagaggccgaggaggcgagtctgttgggcc

SEQ ID NO: 47503 - DNA, 96 bp, Homo sapiens
gcaagatggagccaggaggagagcccacaggtgctaaagagagcagtaccctgatggagtcccttgcagatatcatggaaatcaggacagtggcag

SEQ ID NO: 47504 - DNA, 100 bp, Homo sapiens
cgaaaataaccgccttcgcatggagctggaaaccatcaagtgtctttggtgcaacactaacaaggcttgtctggactacccagttacaagcgtcttgcca

SEQ ID NO: 47505 - DNA, 138 bp, Homo sapiens
aatttttctaaagagtcttgttatttcttctttgagaaaaacctgaaagatgtctcacaatacgagaattggagacccaaccagccagacagcttcttttctgctggagaagactgtgttgtaatcatttggcatgag

SEQ ID NO: 47506 - DNA, 90 bp, Homo sapiens
cgcggacctagacctggaatcgcccaagtccctctactcgcgagatcatgtttgagaccttcaacaccccagccatgtacgttgctatcc

SEQ ID NO: 47507 - DNA, 99 bp, Homo sapiens
gaaggtctctggagacatcttcagcaggtactagatgaattctccaagcaagtcgacaggatagactggccagtaggatcccctgctacaatccattac

SEQ ID NO: 47508 - DNA, 75 bp, Homo sapiens
agcagatctggatcatcaaagacaggagggatttgttcgtgttgaccgagattatgtgctgaagtctgcagagct

SEQ ID NO: 47509 - DNA, 74 bp, Homo sapiens
aaatagaaatgatgaagttaatgggatttgcctcctttgactccacaaaatcctggctggtgccttgttagaag

SEQ ID NO: 47510 - DNA, 82 bp, Homo sapiens
gtctttgcagcgtagcccgagtcggtcagcgccggaggaaaactttattctcaagagatttctcattccgcagaaataagga

SEQ ID NO: 47511 - DNA, 101 bp, Homo sapiens
gggagcccaaatggagccgctgctgcctacgtatgtgccaagagttgtaacctctgcacaacagaaagcaggaagaactattacagcccggatcacaggaa

SEQ ID NO: 47512 - DNA, 102 bp, Homo sapiens
cgggagtttgcggattttgaatatagggaccgtataatagacgctggccccaaaggaaactactctcgatttatgaatcacagctgccagcccaactgtgag

SEQ ID NO: 47513 - DNA, 100 bp, Homo sapiens
aggatcgcccaatccacatgcttttccaggtcaactttgtagtgtgccaactctttgccttgctagcagccatttggtttcgaacttatctacattcaag

SEQ ID NO: 47514 - DNA, 75 bp, Homo sapiens
tttttacagttttccagaactccacaaagggtcctggaaggaggaagcaacaatcctgagtgaaacctcgacaag

SEQ ID NO: 47515 - DNA, 98 bp, Homo sapiens
tagctattgccttattttttctcatggatgttcttcttcgagtatttgtagaaggacctcagagagctaagatgagattctgggccaaagggaaacaa

SEQ ID NO: 47516 - DNA, 50 bp, Homo sapiens
tgccttctgcataggccaaacaggcatcagagataaagtatctgactggg

SEQ ID NO: 47517 - DNA, 88 bp, Homo sapiens
gaggatgcggctcgtggtggatggcatggggcgctttggcaggaatggaagttggatacactttgtgacttgtacgagacactgacca

SEQ ID NO: 47518 - DNA, 100 bp, Homo sapiens
tgtctactggaacagcagcaaccccagatggagtggatgttgaagatgatccgacttgctcttggccagcttcctcaccttctagcaaggatcagacttc

SEQ ID NO: 47519 - DNA, 87 bp, Homo sapiens
cgggctccgggagcccctccacggagcccaccccagaggctggtacaggacatggcaaccacagagagagcagcccttttctttccc

SEQ ID NO: 47520 - DNA, 100 bp, Homo sapiens
ctgcctgattctcctggaccgctgttctcaaggacgggtaaagataggagcatgctgctatgtggaatgttcagctttaacccagaagggattgaagact

SEQ ID NO: 47521 - DNA, 99 bp, Homo sapiens
tggaagttttagatgagtatttcagccgagtggtgaggccagagacaggcagacagcagatgtattgcagggagctggatgacatggcccttggaacct

SEQ ID NO: 47522 - DNA, 74 bp, Homo sapiens
gtgaatcattcctgcagatgaaaaagtgtgacttggcagctgctccttgctcggattgaacgtatggaaaggcg

SEQ ID NO: 47523 - DNA, 98 bp, Homo sapiens
tgccttgacatgcctgaaggagagaagagagcaacttcctccccaggaggattctaagggtcagtatagaccttctgatttgctgtgccctgagacat

SEQ ID NO: 47524 - DNA, 75 bp, Homo sapiens
actgcttccctcagccataacaggtctctaattaacagaagatggcaaagcccagccacagcagctatgtccttc

SEQ ID NO: 47525 - DNA, 50 bp, Homo sapiens
acgacggggccgacgagacctcaggcaacagctgaacagatgcgtctcgc

SEQ ID NO: 47526 - DNA, 86 bp, Homo sapiens
cttcggtggactccttcggcagtccacccaccgccgccgcctcccaggtacactgaggaggggacggctccgtcttcacattgtgc

SEQ ID NO: 47527 - DNA, 82 bp, Homo sapiens
cggcggcagcagcggcattcagatctgactgcagccatgagcagcaatgagtgcttcaagtgtggacgatctggccactggg

SEQ ID NO: 47528 - DNA, 50 bp, Homo sapiens
tggaaaaagtaccatcatttgaaacagaatatcaacacctttgagaacag

SEQ ID NO: 47529 - DNA, 98 bp, Homo sapiens
tcgctgacccgcggtgaagttggcttcgtcctggatctcctgtatcgaaggtctaggtcactagtggattatgaaaatgctaataaagcactggataa

SEQ ID NO: 47530 - DNA, 98 bp, Homo sapiens
gagaaatgagatgatagccaaaccctcaggaactgcaagcacatgttgaccagataactgaaatggcagcagtaatgaggaaagccattgaaattgac

SEQ ID NO: 47531 - DNA, 111 bp, Homo sapiens
cacaggtcacagtaaggccaaaaatgtgcatactcacagagttagagagagggatggtggctaataataagccagagatcgaagcggccctcttcctagactggatgagac

SEQ ID NO: 47532 - DNA, 75 bp, Homo sapiens
ccacccttctccagtagtcctcaaggtttataagaatatttgccaacattacaacaaaggagatggaccccacgg

SEQ ID NO: 47533 - DNA, 50 bp, Homo sapiens
cctgtcccctacgtcctacatgagacagcacccaagaaaacctcatttgg

SEQ ID NO: 47534 - DNA, 100 bp, Homo sapiens
tatccagtatatcacgcgcttctgcaatccaagccgactgatgactggagaggatggctactatttcaccaatctgtttttccagaaaggaggagtcaag

SEQ ID NO: 47535 - DNA, 100 bp, Homo sapiens
ttcctgcccaacaaacagaggacagtggaaactgttaaggcagcaataatagaagagcagaaacgaagtgaaaaggctgtggaagaggcagtgaaaagaa

SEQ ID NO: 47536 - DNA, 82 bp, Homo sapiens
cggagctaacctcggggaccgagatgcagggcccccagatgccgacggccctctctacctcccctacaagacgctggtctcc

SEQ ID NO: 47537 - DNA, 75 bp, Homo sapiens
agttcttcaggaatggagacacggcttcccccaaggaatatacaggcagcctggcatcctcgctacaacctcatt

SEQ ID NO: 47538 - DNA, 75 bp, Homo sapiens
gagacatttttcttccttctgtcacatcacacccaatggactcaagagtagccttcctcgaggacctgcctttcc

SEQ ID NO: 47539 - DNA, 137 bp, Homo sapiens
ggagagactccttgggggtcgagcacataacggggttcgggtgtctcgtgtgtgaacatcacaggcaagtgaaccggagcaaacgacttccgatccagtctgcgctgttgcggctcccgtttgggatttgatttgca

SEQ ID NO: 47540 - DNA, 100 bp, Homo sapiens
atggcacaaatccagcagggaggtccagatgaaaaagaaaagactaccgcactgaaagaagagttaccttgtacatgcccactatgtacctcagacagag

SEQ ID NO: 47541 - DNA, 75 bp, Homo sapiens
cgaagctggtggtggcgctgagccgcacctaccgcacgctggagtttatccagaaattttccccaaaagaagcag

SEQ ID NO: 47542 - DNA, 87 bp, Homo sapiens
cagatgttgtcaaggtggcctaccaggaggccaggggtgtcgccatgatgtcatttgtcagagtgaaccgctgtggtccccgagttg

SEQ ID NO: 47543 - DNA, 82 bp, Homo sapiens
gcttggtttcgggatctcggtgctgcagacggcgagacctcctgcacagaattcagaaggagctggcggacatcactttaga

SEQ ID NO: 47544 - DNA, 90 bp, Homo sapiens
attgaggcgcaatgatgagaggatgtggtggtctactctgatgtcaatcttgagggctagcaacgcacctcttgctttttcctccaaagt

SEQ ID NO: 47545 - DNA, 98 bp, Homo sapiens
aagaaagagaggccctgaagaggcccatggggcccgtacattatgaagacattcgggaaaatgaaccccacggacatatcgtatgtgtacagtgggta

SEQ ID NO: 47546 - DNA, 98 bp, Homo sapiens
agcccgccgcccatgggccgctcgtcccggcgctgaggcctttccgttccgaacgtccacggcgccctggcccccctggccatcccctcggcggcggc

SEQ ID NO: 47547 - DNA, 100 bp, Homo sapiens
tggaagatggaaggaaggagcgcagcggaagcagaatctggtaatataagtcaaaagtctgatgaagaagattttgtaaaagttgaagatttaccactga

SEQ ID NO: 47548 - DNA, 98 bp, Homo sapiens
acgaagccatggccctggaggcggcgggagggccgccggaggaaacgctgtcactgtggaaacggctctgacgcccgctctgcggcttcggtgtttga

SEQ ID NO: 47549 - DNA, 88 bp, Homo sapiens
ccattttcttcagcctccttgtcctagattatcctcttgacttgaaccacagtgaaaccttcctgcaaactacaacatttcttcctga

SEQ ID NO: 47550 - DNA, 100 bp, Homo sapiens
cggggatcgacaagctgcccatcgaggagacgctggaggacagcccgcaggttgcacgttttcaaaaaatacctaatggtgaaaatgagacaatgattcc

SEQ ID NO: 47551 - DNA, 99 bp, Homo sapiens
tggcgacccaggcgaagcgtccacggggtgattctgggggtccacttgtctgtaatggtgtgcttcaaggtatcacatcatggggccctgagccatgtg

SEQ ID NO: 47552 - DNA, 101 bp, Homo sapiens
ccagtcagcccgtcttccttcccctcccttgcatgatggaaacaccatggctgcggcggcccagctctctctgacacagagtttcagattgccaaaagaca

SEQ ID NO: 47553 - DNA, 90 bp, Homo sapiens
tctacccagccaggacctgctgcttggacccagcgagagcaatgaccgcctgtcgcaggtggatcctctatccttcagagactctggaac

SEQ ID NO: 47554 - DNA, 90 bp, Homo sapiens
ctggggacgacgctccccgagccgtgtttccttccatcgtcgggcgccccagacaccagggtggctgttgcaccacgccctccctcctgc

SEQ ID NO: 47555 - DNA, 100 bp, Homo sapiens
tcaaatggcatccggggatttctgctcacctggagaagggatggaaatacttcaacaaggtgtcagcggtgcccactgtgctggccatgaagaatgggga

SEQ ID NO: 47556 - DNA, 83 bp, Homo sapiens
tccgcagcaaggacgtccgcagcagttacagaatgtctgaaggggacagtgtgggagaatccgtccatgggaaaccttcggtg

SEQ ID NO: 47557 - DNA, 82 bp, Homo sapiens
ggactatcgggagaaagtggagtccgagctgagatccatctgcaccacggtgctgccctccagaatacccatcatatagccc

SEQ ID NO: 47558 - DNA, 100 bp, Homo sapiens
atacgtttgaacccagaactagccgagactgtctgaagctgggcccacctgctgagggagaagtcgtccaagtcaagtggcccgatggcaaactctatgg

SEQ ID NO: 47559 - DNA, 75 bp, Homo sapiens
ggaagaacccatcgggcagctacacatcttgaaagagaagctcttcctgtgagagtcattttctgaggatgaatg

SEQ ID NO: 47560 - DNA, 82 bp, Homo sapiens
gccgggacagcggcgagacgcgcgtgtgtgagcgcgccggaccaagcgggcccagaagcggacctcccagtgccaagtgtat

SEQ ID NO: 47561 - DNA, 101 bp, Homo sapiens
aatgaatggtgctatacttgaattttctaaggtgtcattaggtaggtttaggacggcatcagaattaatgtaactacactgaaagatgatggggacatatc

SEQ ID NO: 47562 - DNA, 100 bp, Homo sapiens
ccagcagaccatagagctgaaggaagagtgcaaagactttgtggacaacaattccagggctttcgaatcgtgcttcagccttcctgaccgctctcgcctc

SEQ ID NO: 47563 - DNA, 75 bp, Homo sapiens
gaaagcagtttttaagacaagcggcactccccctatcgcacactggagccagtgcgtcctccagtggtaccaaat

SEQ ID NO: 47564 - DNA, 74 bp, Homo sapiens
agagatcctcagcaagcttgctgatgtccttgaagagaaaatatttacaccagcagctccagttcataccaata

SEQ ID NO: 47565 - DNA, 75 bp, Homo sapiens
ctggatgaggctcaggcgctcaagagtagttccaggagtccttcaataatgttaaacagtggctgcaggaaatag

SEQ ID NO: 47566 - DNA, 100 bp, Homo sapiens
gaagcagccatggaaaaattaatcaacagagtgggacctaatggtgagagcatgttggcagataaattgaacatgactccagaagaagctgaaaggtgga

SEQ ID NO: 47567 - DNA, 75 bp, Homo sapiens
caaggctgcagaatgtactagacctcactggaagtggagttttgcatcccttgctttggctgagaagaggataaa

SEQ ID NO: 47568 - DNA, 112 bp, Homo sapiens
gcacaaggagcgctgccgtacatttcttcagagcactgacccaggggacactgatgccacctcagtatggacagcaaggtgtgagtggttactgccagcagggccaacagcc

SEQ ID NO: 47569 - DNA, 98 bp, Homo sapiens
caactgcagcattgggaagaaaaggctagagaagtcaccctccttcgcctcggagtgggatgaggctggacgtaaagaaagaagtgatgcactcaatt

SEQ ID NO: 47570 - DNA, 75 bp, Homo sapiens
ctggaatatgaagagacacagtatggtagccacacccccaggaaatgggtcctgatgaatatgaagagatggaag

SEQ ID NO: 47571 - DNA, 74 bp, Homo sapiens
ccgggcctaccccctggactccctggagaagcagatggaaaaggctgaccggttccctgatgtgttacctgctt

SEQ ID NO: 47572 - DNA, 75 bp, Homo sapiens
gcaaggtcgccctcaaggccatgatcaaaacctcttgtcaccgcctgagacctcgcgagactttcggtccccccc

SEQ ID NO: 47573 - DNA, 75 bp, Homo sapiens
gggatatctttcttcactcctcttcacttcttcagtaattttaaccaatcagatgacaacaaagattgatagaaa

SEQ ID NO: 47574 - DNA, 83 bp, Homo sapiens
ccagaagggctttcaggatgtggaggcccaggccgccacctgcaaccacactgtgtgcctccggagccagcgtggtggccata

SEQ ID NO: 47575 - DNA, 74 bp, Homo sapiens
gttagggcgtggcctgaggcttggataagtgggaatagcctaacatggcagaccagagacagcgctcactgtct

SEQ ID NO: 47576 - DNA, 83 bp, Homo sapiens
attcttggagctcaaggtgacaggccagagcccaggtccccaggacagtgcagcccagaatgccatcgccggggaaggaatgg

SEQ ID NO: 47577 - DNA, 100 bp, Homo sapiens
gccggggcagcgctcctggcgctgctggctgcgctctgcccggcgagtcgggctctggaggaaaagaaagggcatggtgctgatgtgaaatgtgtagact

SEQ ID NO: 47578 - DNA, 100 bp, Homo sapiens
caaggaggagactcgacaacatgtcacccgcgctccaagacctgtcgcaacccgtggaatcccccaaagaaggtaaagggagcaagccttccccactgtc

SEQ ID NO: 47579 - DNA, 100 bp, Homo sapiens
acggtggatgccaagaccacagaggtgaaaattatctcagtgaacgaggatgtcactcttagatcagccctcgatagaaatctgaagagtgctgtgaccg

SEQ ID NO: 47580 - DNA, 90 bp, Homo sapiens
catttgtaaaggagccggagccccaggaagagagaagggcacagttacctaagtatcaacgtaatcttcctcggccaggacaggccccca

SEQ ID NO: 47581 - DNA, 100 bp, Homo sapiens
agaaggccatcaccacgcagaacgtcaacaccaagtgcatcaccatccccaggtacggggctgatgttgacgtcaaccaccacctgactcctgatgtcca

SEQ ID NO: 47582 - DNA, 96 bp, Homo sapiens
gccagaagcgggcggcgcgggggagatgcacttgcacctcctgcgccgccgccccccatccaaggatatgccttcaagcctccacctagacccgac

SEQ ID NO: 47583 - DNA, 97 bp, Homo sapiens
caagcggcggcggccactgccacgtattcccggcagtggtggcggcggcggcggcggcgcccgcgggcagtgtcatcttgcattacaacatataaga

SEQ ID NO: 47584 - DNA, 97 bp, Homo sapiens
accagacctctgtctctatccccgaaaaccagtctaccatggttactgctgacatgggaaatttggtgagcggcctccacctaaacgacttactagg

SEQ ID NO: 47585 - DNA, 100 bp, Homo sapiens
ccggccacctctgagaagggagacgacgctgctgggtccgctgagcggggcgacccgaggctctgtgtgctccgggatggagcaggtgtgcagagggtga

SEQ ID NO: 47586 - DNA, 74 bp, Homo sapiens
ggaaggacaaccgcactgatgatattcctgaaaatacctgagaacttgacaatggtttttgcccgaagatcgta

SEQ ID NO: 47587 - DNA, 75 bp, Homo sapiens
cgcgccctggcgggtccggaccaagacgccaaattccagcgaaacagctgatgccagccagcttgaagacccctg

SEQ ID NO: 47588 - DNA, 100 bp, Homo sapiens
cgtcctccttttgatgttgtcattgatggtctcaatgttgccaaaatgtttcctaaagttcgtgaatctcaacttcttgtagaccctggagttaaggcat

SEQ ID NO: 47589 - DNA, 87 bp, Homo sapiens
tccagccgagaggacgcggctgtgatatacgaagagccctatgagtttgtctctctggaatggctgcaaaagtggttggatgaatca

SEQ ID NO: 47590 - DNA, 50 bp, Homo sapiens
ccgccaccacccactccggacacagattccctataaggagcccctgctgg

SEQ ID NO: 47591 - DNA, 98 bp, Homo sapiens
agccactcgcccctggcctcgcgggccgtgtctccggcatcatgtgtgacatggcagggaggtttaatagacatggataagaagtccactcacagaaa

SEQ ID NO: 47592 - DNA, 100 bp, Homo sapiens
cgcggcccggggggctgaggcgcccgccgcctgccgcgggggccgctcgcgtcctccatggaggccggaggttaagaatagacccaccagcatttcgtgg

SEQ ID NO: 47593 - DNA, 132 bp, Homo sapiens
agggggtcccgccagcgccgtgacgtggactacagtgacgccctcacggagaagcagtggctaagggggtcaggcccagccccaggcccagtggtattactgaattcactgaatgtggatgcagtatgtgag

SEQ ID NO: 47594 - DNA, 100 bp, Homo sapiens
cgactgggtccgggaccggcgtcagggacacggggtgctgcgctgcgccgacggctccacctacaaggcatggaaagctcacctgatgggcccagccggc

SEQ ID NO: 47595 - DNA, 74 bp, Homo sapiens
ttccatgtcaacatagtcctgctttgcccgaagtttttacatacaaattctactagtcacacctggccattcag

SEQ ID NO: 47596 - DNA, 75 bp, Homo sapiens
ccgccggagatgttttccttgtcgagcacggtgcaaccccagtggaagtagtggaggaagtggaagtcgagaaaa

SEQ ID NO: 47597 - DNA, 50 bp, Homo sapiens
cttgaaataccggatgattttggagggatttatcaaagatgttcatgaag

SEQ ID NO: 47598 - DNA, 105 bp, Homo sapiens
tggatatagcacaccatccccagccagtactccaaagattcaggtttactcacgtcatccagcagagaatggaaagtcaaatttcctgaattgctatgtgtctgg

SEQ ID NO: 47599 - DNA, 50 bp, Homo sapiens
ggaacatctcttcccagcggctcaggaattgagttcttctcagactttat

SEQ ID NO: 47600 - DNA, 100 bp, Homo sapiens
ggttaacagcctatgggtgaaatttggctttcattcatgaatgaggctaaaagagatgctaagagaatgcctgcaaaagaagtcaccattaatgtaacag

SEQ ID NO: 47601 - DNA, 90 bp, Homo sapiens
cttggaccgagccgatcgccgcggggcagttcgggccggctgtcctggcgcggtggtataagttgaaatccaaaccaggaaagaaggaca

SEQ ID NO: 47602 - DNA, 82 bp, Homo sapiens
ccagcctcaggcctgcacggacggtgttggttgggggcgccctgcgtccggcagaggaggcgagcatcccgctcaggtgatg

SEQ ID NO: 47603 - DNA, 82 bp, Homo sapiens
tggagttcagcccactactctgaaccagcttgttctaaagacgaaggggaactccctagtgctacaggctgtttcaggaagc

SEQ ID NO: 47604 - DNA, 76 bp, Homo sapiens
tcctgaagcagtttgaacaggggaagatccagctttacctagccccaggtgaggacgggcactgggtccccatccc

SEQ ID NO: 47605 - DNA, 100 bp, Homo sapiens
accgcctgtgtcgccgccgcctcgggaccggctgtatgattaggccacaatcttcaatgagtaaacatattcctccacattgctgtgaggaagcctgggc

SEQ ID NO: 47606 - DNA, 75 bp, Homo sapiens
atatttttggtatcacaaatgaatccaaccagccacagatactattaggaggaaatgagccgtcagactgctaca

SEQ ID NO: 47607 - DNA, 51 bp, Homo sapiens
ttggagaactcactgatgaagaccctgatgctcccataagacagaaaatgc

SEQ ID NO: 47608 - DNA, 82 bp, Homo sapiens
aagggcttcctggccctctaccaaaccgtggacagtcatcaccaccatgaccaccttgaagaagaacctggctgacgaggat

SEQ ID NO: 47609 - DNA, 100 bp, Homo sapiens
tctcgggcggggcggcggcgacgcggacctgcggactagcgaacccggaggaaaatgcaacatggcagcagcaatggaaacagaacagctgggtgttgag

SEQ ID NO: 47610 - DNA, 105 bp, Homo sapiens
ggactgtcttgggcagcatgcagtgctttctggctcgcagacctctgaagagagtgccattgagacgggttccagcagttccaccttcatcaagagagaggacga

SEQ ID NO: 47611 - DNA, 74 bp, Homo sapiens
ctgaagaaggtgacgataatttggctagttgcagatatcaagaaagtcaacaacttcatcagagaacaagactt

SEQ ID NO: 47612 - DNA, 100 bp, Homo sapiens
aggagagctgcacctgggccctgggaacctacaagcagcaattggcgcctattatgactttgagagcccaaacatcagtgtgccctctatgtcctttgtt

SEQ ID NO: 47613 - DNA, 75 bp, Homo sapiens
agcgccccagggcaagccccgctccggccaacaaagagcatcagtgatgtcacgtttggagcaggggtcagttac

SEQ ID NO: 47614 - DNA, 77 bp, Homo sapiens
cgggaacctcttccagttggaattgaagaatattcccaagtccttcacccggctgcatcttcctcccgtgaggctgg

SEQ ID NO: 47615 - DNA, 100 bp, Homo sapiens
ggaacaacttcagtaacttcaaataatgagatcatcacttcaagtgaagaccatagcctcttgataggagtgggatagatatcacagattttcaggccaa

SEQ ID NO: 47616 - DNA, 98 bp, Homo sapiens
agaccatatagctgccctcagctgcactgtggcaaggcttttgcttccaaatacaagctgtataggtatggtttaggaatgatttattacaagcaaga

SEQ ID NO: 47617 - DNA, 117 bp, Homo sapiens
gtggactacagcgccacggtggatcagcgcctacccgagtgtgcgaagctagccaagccctgagaacaatgaccttatttcctacaacagtgtctgggttgcgtgccagcagatgcc

SEQ ID NO: 47618 - DNA, 88 bp, Homo sapiens
tgaaagcacagccttggtggaccccaaaagaaacgggctacacagagttagtaaaggtgatcatggagctcagcttggtctccatggg

SEQ ID NO: 47619 - DNA, 100 bp, Homo sapiens
ccgcgcagagcaagctgagccgagccgagccgagctgggggcgcagagcgcgggaggcggcggcggcgcggagcccagatggagtttcactcttgttgcc

SEQ ID NO: 47620 - DNA, 74 bp, Homo sapiens
caggtgctgcggcctggggctggagtccgattgccgattcagcccagcagtcttcccatgcacaagatgattaa

SEQ ID NO: 47621 - DNA, 75 bp, Homo sapiens
atctttagatacttctactcataaatcaagtgataataaactagaggaggggtatagaacaggctatgcttacag

SEQ ID NO: 47622 - DNA, 114 bp, Homo sapiens
cggcccggaggcggcggagggcaccccgggcgggcggcggctgctgccaagactaaggggctgcagagcggggtggacattggcgtcaagtactcggagaagcaggagcggaat

SEQ ID NO: 47623 - DNA, 75 bp, Homo sapiens
aaaaattttccaaaagagagatgggccatttctgagcagtggaggtttcaagtaatccactaacaaccagttcca

SEQ ID NO: 47624 - DNA, 96 bp, Homo sapiens
ggactatgggcgaatagctctgaccacccggcgaaggccagaacacaaagcgtgaatccggaagaaaagttcaatctggaaacatcaatgctgcca

SEQ ID NO: 47625 - DNA, 97 bp, Homo sapiens
cttataaccctgccttctcccggttggaaatctggttccggtttttctttgtggtgctcaccttcatcgtcactgccctggccaacgtcaacattgg

SEQ ID NO: 47626 - DNA, 75 bp, Homo sapiens
gaggccacgctcagctcgccaggcggcgcagggaatcccgttctgcttccagaagtggaagtgctcacggatcgg

SEQ ID NO: 47627 - DNA, 100 bp, Homo sapiens
taagacttcccagcattcctacagatataaataggtagaagaatacatgttcacttccagtgaacaagagcatgttcccaaactcaattttgggtcgccc

SEQ ID NO: 47628 - DNA, 82 bp, Homo sapiens
ccagggccacctaaggagcggaccccgcatcttcgccgtctggaaagaccgcgctgagcacgttcttccaagaaaccaacat

SEQ ID NO: 47629 - DNA, 50 bp, Homo sapiens
ccttttaaagtcaaggctggccaaattgggaaacacctttgtccaagtcc

SEQ ID NO: 47630 - DNA, 100 bp, Homo sapiens
gggagacgcacagctaagatgcccggacatcctggaagctgggaaatgggtttggaatcacttgctaggagtcttgtctctctgccacccaggacatcat

SEQ ID NO: 47631 - DNA, 85 bp, Homo sapiens
ggagccaagcgtcctgcccggccgactggttgccataaaggaagcccacgacatagagaccaggcttaatgaggtggagaagctg

SEQ ID NO: 47632 - DNA, 50 bp, Homo sapiens
tctggagtgcccccagcccagagcccgggttactggacctggaggacgat

SEQ ID NO: 47633 - DNA, 87 bp, Homo sapiens
tggaccctgccaagaagtcgcccatcgcagcagctcgtattaattttaaagacccacagtttgctgaagattacatttttaaagctg

SEQ ID NO: 47634 - DNA, 100 bp, Homo sapiens
aactgtaagtctccaatacagaagaatgaaggctgcaatcacatgcagtgtgctaaggacataagcagctctatgaccaatagcacagctgccagtagac

SEQ ID NO: 47635 - DNA, 98 bp, Homo sapiens
ccgcttcttgctgctgctggccctggctgcgctgctggcctttgtgagcctcagcctgcagttctggtgagttctgcatcctggtacttcctcaatgt

SEQ ID NO: 47636 - DNA, 101 bp, Homo sapiens
gcgggcggctgagacaaaggcgacgccctggcgctctcagtggcaggcatccctgggttggatgaggccaacacatctccccgcctcagccagaccttcct

SEQ ID NO: 47637 - DNA, 100 bp, Homo sapiens
tcccgcttcccatcatcgggaacctcttccagttggaattgaagaatattcccaagtccttcacccggctgcccaccgcacggatgatcgccttcgccat

SEQ ID NO: 47638 - DNA, 99 bp, Homo sapiens
tctcgctccgtggccttagctgtgctcgcgctactctctctttctggcctggaggctatccagcgattttgaagcaagagcaccccgagttggcagtcc

SEQ ID NO: 47639 - DNA, 75 bp, Homo sapiens
tagaacccagcgcaggagtaaattgaaagaatcacttggagatacaactcgtcaacgaatcaaattcagtgatga

SEQ ID NO: 47640 - DNA, 83 bp, Homo sapiens
gtcccaaggaacacctgggcaacagaatattggtcaagttgctgaccttgaagaagctcttcgtgggcggtcttgactggagc

SEQ ID NO: 47641 - DNA, 100 bp, Homo sapiens
ctaggagatctcctcaaagaagtttgtccttctgctattgatcctgaagaagagtcaagtaccattggccaggatcaaacgcttatggaacgtgatacag

SEQ ID NO: 47642 - DNA, 98 bp, Homo sapiens
agatgtccttgggccatcaataacatctttaccagcaatgactgatcgtttggagtccatagcaagacagaatgggtaagtagtctttctgtaggcag

SEQ ID NO: 47643 - DNA, 75 bp, Homo sapiens
tcaccgatcttcttgtgtcaccatgctattatgcatagaaaggtttccaatacttatctacaggaatcgccatga

SEQ ID NO: 47644 - DNA, 75 bp, Homo sapiens
cctttgggacgagtgctgtgactgtgttgaccggaacatgaacattttgcagtactgcccctcttccgacatgtg

SEQ ID NO: 47645 - DNA, 50 bp, Homo sapiens
gctattgccttagatccttcaagtgggctggtgagattggagagatgaag

SEQ ID NO: 47646 - DNA, 96 bp, Homo sapiens
agtgagaagcaagaaggccctggacacagcaatatctctgggctttcacaggactccttccgcccacccattcctcctcccgagtcctttcccctt

SEQ ID NO: 47647 - DNA, 98 bp, Homo sapiens
ggcgagcggacggctgcatttacggggtctcccggagggccagagtcgagtggagactgctgcacggactctggaaccatgaacatatttgatcgaaa

SEQ ID NO: 47648 - DNA, 75 bp, Homo sapiens
aaacacaaagccggctacgcgctgcgagggatttgaaactggacaacatccttctggatgcagaaggtcactgca

SEQ ID NO: 47649 - DNA, 82 bp, Homo sapiens
cttgataaaaagagatgtggggggattctcgacctgctaacagaactggaccttttcggaaaaccaattctgtgtcctcgga

SEQ ID NO: 47650 - DNA, 129 bp, Homo sapiens
tcagttggagttggaatttgtgcaatgtttagccaacccaaattaccttaattgtctattattagcagaagatttttctgcatagttggcacgctgtacctgtatcggtgtattacaatgtatgtaact

SEQ ID NO: 47651 - DNA, 100 bp, Homo sapiens
tctccgtcgcctcaaacaggagctgagaatgtgatcaatgggcaggactacgaagtgatgatgcagattgactgtcaggtgatggacaccaggatcctcc

SEQ ID NO: 47652 - DNA, 83 bp, Homo sapiens
tcctggtcgaggccacaaagacagatgttactgtggttaggtttccagtgatcagactctgagaatatgggatgtgaaggcag

SEQ ID NO: 47653 - DNA, 97 bp, Homo sapiens
ggagaactatagcaacttggtatcactaggaaacagtgacatttaaggatgtggctgttgaccttacccaggaggagtgggagcaaatgaaacctgc

SEQ ID NO: 47654 - DNA, 100 bp, Homo sapiens
aattattcacatgcttgaatactgtggacaagaaccagttgagtcatctctggggcttagtaatggagtaagtgatctttctcctgagtatgcggtcctg

SEQ ID NO: 47655 - DNA, 87 bp, Homo sapiens
tcgctgggagagaggtacctctccttttccctctccctttccctaaggctgtggaaaatctctgttctcacaaagtctccccaatgc

SEQ ID NO: 47656 - DNA, 60 bp, Homo sapiens
cgcgaatatcgtcatcgttagaagcaaacggggattcagcgtccgatcctttggaacagg

SEQ ID NO: 47657 - DNA, 114 bp, Homo sapiens
tttgcctacttgagaactcaggaaggtgggaaaattcatctggaattactacccaatcaaggaatgctgatcaaatacttgagcgttctctaaagctgctatttgaaacgagag

SEQ ID NO: 47658 - DNA, 124 bp, Homo sapiens
caaaacccaccaagatccagattgaagctattcctttggccttacaagaactctctttgctcacaagttaccaaaaaaaaaagagccaacatgttggtattgctggctggtatctttgtggtcc

SEQ ID NO: 47659 - DNA, 80 bp, Homo sapiens
agacgccaggacccactggaagcctagaaatgggagttgaccacatttggccatttcccagaagggccccaccccaaggg

SEQ ID NO: 47660 - DNA, 98 bp, Homo sapiens
ttgggaagacatcactgattatgtctctggtcagtgaagaatttccagaagaggaggcaagtgaggcctatctggttggcctttttgaagacaccaac

SEQ ID NO: 47661 - DNA, 85 bp, Homo sapiens
agttggaagcagccgatccagcctgcggagcctgtggggcagccggaagaattaacctcgagtctgcacgcttttaagaacaagg

SEQ ID NO: 47662 - DNA, 98 bp, Homo sapiens
tgcacgcgctggctccgggtgacagccgcgcgcctcggccagctgctcagatggaagataaaaagccctttatcctgtcttccatgaggcttcctctc

SEQ ID NO: 47663 - DNA, 75 bp, Homo sapiens
ggcacagggagaagatgctgtcctcttctggcagcctggctggctgaagggtatgtgattggcagctgtattaaa

SEQ ID NO: 47664 - DNA, 75 bp, Homo sapiens
tccgagtcaaaggaattctgtcttcacaagcagaagcaaacggggattcagcgtccgatcctttggaacagggac

SEQ ID NO: 47665 - DNA, 75 bp, Homo sapiens
tgaccagttctggagctactggaatagcggctggactctattacctggcagaactgatagaagaatacacagtgg

SEQ ID NO: 47666 - DNA, 98 bp, Homo sapiens
ccagccagcggacccgacggctgagagcttcggaaccaaaaagaagcttcccagagccggggccaggagccccaagcgccctctagcagcaaacacag

SEQ ID NO: 47667 - DNA, 99 bp, Homo sapiens
agaaaattttccttgacctttaggtgcttttatattcatctcaaaaacaaaattctgaactcaggacttggcaagaagagagagaaaatccttcaaaac

SEQ ID NO: 47668 - DNA, 96 bp, Homo sapiens
aattagcagaagacattatgtcagggagcccccgggccacagcatcagccctgcacttcccctccacgtccatcatccagcagtcgagcccgtatt

SEQ ID NO: 47669 - DNA, 75 bp, Homo sapiens
agaacccaaggaggtgcaaatggacagagccatactgcgttatagcggccgtgaatgtggacgagtgctcactag

SEQ ID NO: 47670 - DNA, 83 bp, Homo sapiens
gtcattacagaccctgaaaaactggaccaaattagacagagggtgagcagggcagcatttccttctcccactgctgctgagat

SEQ ID NO: 47671 - DNA, 85 bp, Homo sapiens
cgagaggaaactgttgtgcctcttcatattggcgatcctgttgtgcaccatggctgaggaaacagctccagcagttcttgagcgg

SEQ ID NO: 47672 - DNA, 80 bp, Homo sapiens
caaggagctaaagcagcgtgcgttcagccctggggaagtcctgagttgaggcttgcgggatcctttccggagaaagcgca

SEQ ID NO: 47673 - DNA, 75 bp, Homo sapiens
gtcttcgggacgcgcctgctcttcgcctttcgctgcagtccgtcggactggggttcagactttccgcagagacca

SEQ ID NO: 47674 - DNA, 100 bp, Homo sapiens
aaatcaatctcagggctacaaccagtggcagcagggtggaaaactgcctttgcttctgagccggatgaaggaagtagggaaagtatttcttgctaccaac

SEQ ID NO: 47675 - DNA, 100 bp, Homo sapiens
ccacaggattgcacttggaggagtatgtgatcagtctgacattcgaggacacagcctgattcagaagtagccaatgctggtataaaacttgaaaattatt

SEQ ID NO: 47676 - DNA, 75 bp, Homo sapiens
ggcaaaaacattcaagaatgagagcgagaacacctgtcaaggttgaggcctctggtgtctacgcagccagcaaag

SEQ ID NO: 47677 - DNA, 100 bp, Homo sapiens
accaactggaaaaccttgtatgaggtcaaatccgagaacctgggccaaggcgacaagtcggaggcctgcaggactttggcacccgagaaggacaaggcca

SEQ ID NO: 47678 - DNA, 71 bp, Homo sapiens
aacaggtacctgtggatgtggtcgagatgaaaggaatgggtaccacagaccatgtcatcgtcctggcgtcc

SEQ ID NO: 47679 - DNA, 100 bp, Homo sapiens
tcttccccggccggtccctcgcctcccggccgagctgacgtatctggagtccatctttcaccatcttctcctgagattgtactggaccgtgaccactctt

SEQ ID NO: 47680 - DNA, 134 bp, Homo sapiens
gtaccacttggaccttgtggaaacagattactttggcctccagttcctcgactctgcccaggttgcgatgtttctttctcagcaaaatagaggagaagcttacccctcttccagaagataatagtatgaatgtg

SEQ ID NO: 47681 - DNA, 83 bp, Homo sapiens
gcaaacgctctttgttccagagcatggagatcagatatccgacatgaagccagtgacttcccatgtagagtggccaagcttcc

SEQ ID NO: 47682 - DNA, 90 bp, Homo sapiens
ctagctttgtaggagcatggcttggagcacttcctattccactggattgggaaagaccatggcaggatgaagagactcggcacagccttg

SEQ ID NO: 47683 - DNA, 100 bp, Homo sapiens
cttccctggctggacttgcggagtccccgccgaagaacccgagaagcctgccctggactgctcacaggtctccccgccccgtcctgccacatctcctgag

SEQ ID NO: 47684 - DNA, 87 bp, Homo sapiens
cgactatttggcaagaagcagatgcgcattttgatgggtcctactgctctgttggctcatgaaataggttttggaagtaaagttaca

SEQ ID NO: 47685 - DNA, 100 bp, Homo sapiens
ggcctcagccctctgctgcctcttgccatgtctgcccggttccgcctggccatgagcctggctcaggcctgcatggagtttgacctggacattgttgcag

SEQ ID NO: 47686 - DNA, 75 bp, Homo sapiens
ggaggaacagaagcggaacagccacagcagcctcccaaggagtctgcaagttgggaaatgaataagcgtctaaca

SEQ ID NO: 47687 - DNA, 83 bp, Homo sapiens
gagccgccgacatgaagaaagacgtgcggatcctgctggtgggagaacgtcaaaatgcagatcttcgtgaaaacccttaccgg

SEQ ID NO: 47688 - DNA, 75 bp, Homo sapiens
cggagttcagccgccgcctcatcaaggacctggagagcatgttcaaactagtcaacctatttgatttcttgacaa

SEQ ID NO: 47689 - DNA, 83 bp, Homo sapiens
cagtgacgggtctggagtgcgtgggggaccggctgttggcgggtctcaccaacggctttgggggtgcgaggagcgagcaggag

SEQ ID NO: 47690 - DNA, 75 bp, Homo sapiens
ctcattcaaggttacccagttgttttgcaggctttggaggtactcccagtagcaccaccacctgagccaagatca

SEQ ID NO: 47691 - DNA, 100 bp, Homo sapiens
ctcgagaactcttcctaaaagcagtagaagaagaacaaaatggagctctctatgaaggacgactgggtttggattcagaagaggattattatacaccaca

SEQ ID NO: 47692 - DNA, 100 bp, Homo sapiens
ccatcttcaaaatttcaggtcttaaatctgcggcgtcttcgacatcttcggaacattgctgcccggaacattgttaatagaaatggccatcagctccttg

SEQ ID NO: 47693 - DNA, 100 bp, Homo sapiens
acctactcacagataggaattgaagggtggttctcttcccaaagtggaagccaaattcatcaattatgtgaagaattgcttccggatgactgaccaagag

SEQ ID NO: 47694 - DNA, 99 bp, Homo sapiens
gtgaagtgctccactcgaacagatgtgagcgagaaagccgttgcctccagcaccacttctaatgcacactgatttatgtcagtacatggacaagcaccc

SEQ ID NO: 47695 - DNA, 75 bp, Homo sapiens
attgatgcctgggctccttacttacctcagtacatagaccacgtcatatcacgcccacccttcctccattctgag

SEQ ID NO: 47696 - DNA, 50 bp, Homo sapiens
gacgccgtcaacgccttcaaccaggaggtcctagaccagaaggagcacag

SEQ ID NO: 47697 - DNA, 74 bp, Homo sapiens
ccttgatgttctcatcaagcccacgagtttagctggagtcacatcagaagccgcgcagactatcaccacggctc

SEQ ID NO: 47698 - DNA, 89 bp, Homo sapiens
acagaagaagatggggttccttccaaagtgcagcgctgtgcagtgggcacaagagactatagtccccggcagatggcagttcgcgagaa

SEQ ID NO: 47699 - DNA, 75 bp, Homo sapiens
aaccgggtctgctgcggaggaagctgcagaaggtgatttactacctctgcatcttattgaaagatccagtggaac

SEQ ID NO: 47700 - DNA, 100 bp, Homo sapiens
gttgatatcggtggtaacgacggcctcagcaggcggggaagatgaaaggggaaactgaacagccaagactcctataacaattttaccaacaacaaccctg

SEQ ID NO: 47701 - DNA, 102 bp, Homo sapiens
caagaagttgcagctgattaaggactatcgggagaaagtggagtccgagctgagatccatctgcaccacggtgctgaacgtcgaaatgctgagcagcatgga

SEQ ID NO: 47702 - DNA, 98 bp, Homo sapiens
tgatcatgatacagttgataaaattgttggatctatggatgaagtgttggcctccttaaggcatggcagagctcctctccggaaggtggaagtgccgg

SEQ ID NO: 47703 - DNA, 50 bp, Homo sapiens
tattagtgcacaccaccacacctaggcgggagcatccaatcaacttcgag

SEQ ID NO: 47704 - DNA, 96 bp, Homo sapiens
cagttcccacgccaaaccagaccccatggcctgctcagcctcagcggctatggacagaccccctaagccgaaagtctcccagaggaggatgccaaa

SEQ ID NO: 47705 - DNA, 74 bp, Homo sapiens
tttgcattttggaaagtaaattatgcaagctccaggaagcactgaagaaaaatccagttacactcttaaaggaa

SEQ ID NO: 47706 - DNA, 100 bp, Homo sapiens
cagctccctaatgatgatgctcagtttgatgcgtcacactacgacagtgagaaaggaggtggtggtcggtatgttccgggctcttcgggatcttctaaca

SEQ ID NO: 47707 - DNA, 101 bp, Homo sapiens
attaatgcaacctaagactgcaataagctcttttacagactgaggaagcacagcctagcactagcacaagtacacaggccccagccgcttcccctactggt

SEQ ID NO: 47708 - DNA, 107 bp, Homo sapiens
tgcctgagcccgtgcctgtcttcagatcttcacagcacagttcctgggaaggtggagccaccagcctctccctgcctaatgcatggaaagctaacaggatggagcac

SEQ ID NO: 47709 - DNA, 48 bp, Homo sapiens
ctcaatatctaatcaatgtcagcactattcctgatcagagaactccag

SEQ ID NO: 47710 - DNA, 83 bp, Homo sapiens
gccaagggacaatggtcaccgtctcttcagggttttcagagaaagatgctgatgaggtgaaaggaatttttgtagataccaac

SEQ ID NO: 47711 - DNA, 83 bp, Homo sapiens
tggagccagcctccccgctgaattctccggtgcctccggagccagcgtggtggccatagacaacaagatcgaacaggccatgg

SEQ ID NO: 47712 - DNA, 83 bp, Homo sapiens
tgaaattgttaggcgtggagagggagtgatgtcttccagactcggtgctgtacccgccagaatggatcttggagaatgtctga

SEQ ID NO: 47713 - DNA, 97 bp, Homo sapiens
tgacattgacagcaaacagagattcgggttctgccgcttatcttcaggagcgaagagctgcttctgtatcttaagacactctgacctggtcacagcc

SEQ ID NO: 47714 - DNA, 100 bp, Homo sapiens
aagtcacaaaacagcagatttcccaagagcagcggaaaatgatccagtcacaggagtctgtgagccacttcactacaagaacttggagtcttcgcctttg

SEQ ID NO: 47715 - DNA, 75 bp, Homo sapiens
caagatgttgctttaggaaaaccacggaagctgaaggtcttggtgttgatgcctgaggaagtgcaccatggagag

SEQ ID NO: 47716 - DNA, 75 bp, Homo sapiens
ctctggaattgctactgctgcctctgtcactcctggtgaccagcattcaagatttaccaacagcatgaatcaaga

SEQ ID NO: 47717 - DNA, 100 bp, Homo sapiens
gcagaaagaaagctgcggcctgtatcaccagaggagattagacgtagcagattagctcacagaaatgcaagttgagagtagttattacagtccacagaaa

SEQ ID NO: 47718 - DNA, 98 bp, Homo sapiens
tgactttgagccctaccttactggacagtcaaatcaggggacatcacccagaagggctatgaaaagaaaaggtccaaactcctatctccttacagccc

SEQ ID NO: 47719 - DNA, 50 bp, Homo sapiens
ttcaagcgaaatcctgcaaacagattagagtatgctcaggtaatcaaaat

SEQ ID NO: 47720 - DNA, 83 bp, Homo sapiens
gttacctgtggaaatcagaagagagaatatagtaaaaatacgcagtacagtcccagccatcactggtgcaagctatatttaac

SEQ ID NO: 47721 - DNA, 75 bp, Homo sapiens
gtcggggccgccggtggagtctcggcggccggggccactcttcacctccaccatgagcctggacatccagagcct

SEQ ID NO: 47722 - DNA, 98 bp, Homo sapiens
tcagcctccaggctctccagtttttcgtcgagagattcactatggaatcggtggccagcatcgaaatgttcagccttttagtgatgaagatgcatcaa

SEQ ID NO: 47723 - DNA, 75 bp, Homo sapiens
ggatgaaacgtcaggaatttactacacagtactcccctgccctcaacaagatgttttgccaactggccaagacct

SEQ ID NO: 47724 - DNA, 74 bp, Homo sapiens
gagccatggctctcgccgtccgagtcgtttattggggagatggccattccattctttacgggccgcctcactga

SEQ ID NO: 47725 - DNA, 75 bp, Homo sapiens
tcacatgaagaccaatttttacgtctagatttccatgcccatggaagtactatactggcaattgctggagaagat

SEQ ID NO: 47726 - DNA, 51 bp, Homo sapiens
cacatttttactgcagctgagacagttctttttactctgacgtctgtggtt

SEQ ID NO: 47727 - DNA, 82 bp, Homo sapiens
gaagggggagtgactcaggccctcaacctctagcaggttcagccgtctgtatatctccccagatacctgaaactgaccacct

SEQ ID NO: 47728 - DNA, 101 bp, Homo sapiens
cttcattcagatgtggtggaatatgccaaggaaaaactggagagcttcatcaaaaatagtgatagctttgataacagcgctggagagcgaggtggcttcaa

SEQ ID NO: 47729 - DNA, 82 bp, Homo sapiens
ttgggtcttcttcttaatcccatatctggacatctggaacatccatgagttgtctgctggttctcagcttgaagaagattct

SEQ ID NO: 47730 - DNA, 80 bp, Homo sapiens
acaaaggcaatgaggtgaacgcagaacgaatgtttcatcattactaacaggatattcctcatgacattgctgtctggtaa

SEQ ID NO: 47731 - DNA, 121 bp, Homo sapiens
catccccagttgctgtacgagagcaagctctataagattcttcaaggtggggttggcatcccccacatacggtttattcttcagtccaaggaagcaattcacagtcagctgttagagaagc

SEQ ID NO: 47732 - DNA, 117 bp, Homo sapiens
cgggagaagaaccagcccgaggtggacatgagtgaccggggcatctccaacatgctggatgtcaacggcctcttcaggccttgaaaagaggatagaccaggctgtggaggagtggaa

SEQ ID NO: 47733 - DNA, 75 bp, Homo sapiens
gccctccggcggcggctggaggccctgctggctgaagatgaccattctgccccccttggagaaactgcggctgct

SEQ ID NO: 47734 - DNA, 74 bp, Homo sapiens
ctggaacacacatcagtcacgttgtgaccgccatggggaagacgtggcaccccgagcacttcgtctgcacccac

SEQ ID NO: 47735 - DNA, 95 bp, Homo sapiens
ctgacttttcttatgctgggatgtgccttagaggattatgggtattctttaggtgatgctagaaggcctcttcatgaaacagcagttttggtaga

SEQ ID NO: 47736 - DNA, 75 bp, Homo sapiens
gtgacagggatgatgaagaagacctgctggatggtaactaaatgaccatggaatctggagccgagaaccagcaga

SEQ ID NO: 47737 - DNA, 90 bp, Homo sapiens
ggcgtgaaggcggcgctcctactccctccccggactccgcggcttcctaatgaagatcctgagatttttgatgtttcatccaagtgcctg

SEQ ID NO: 47738 - DNA, 100 bp, Homo sapiens
gggggtggaggtggtgcctctggcagtgacgaggacgaagtgtccgagatgcagaagctcgtgaaggccgcgaaggacggcaccaaggacgggctggaga

SEQ ID NO: 47739 - DNA, 73 bp, Homo sapiens
acaaatgtgatggaggcaaaccagcggggatgcccgggtagttaaagacatggcaactggaaaatccaaaggc

SEQ ID NO: 47740 - DNA, 87 bp, Homo sapiens
gagtcatttctgttccgcacaggcctgctgaactgggtgctttatatagggtgtctgatgatttgtgagcctcaagtgactactctg

SEQ ID NO: 47741 - DNA, 95 bp, Homo sapiens
cacaccatttcttcctaaaatcttcatcaaacccaatgctcagaaacctctccctcaaggtggcgacatgtctaagaatgtgagccagtcacaga

SEQ ID NO: 47742 - DNA, 100 bp, Homo sapiens
acaaaacgccaggcggatctcagaaggccagttcaaagttttgatgaagcaagaacacagagaagagattgatttgtcttcagttccatctttgcctgtg

SEQ ID NO: 47743 - DNA, 98 bp, Homo sapiens
gcgaatggggctcacgtcgagcagaaggagaagacagcctgaagaagatgcagctgatggagcttgcgattctgaatggcacctacagagatgccaac

SEQ ID NO: 47744 - DNA, 75 bp, Homo sapiens
cagccggccaggagaaattcggtggactgagagatggctattatatccaagattatgccaagggctttggtggcc

SEQ ID NO: 47745 - DNA, 97 bp, Homo sapiens
ctgccccagcctgctgaagctcttgcgctacctctggacactcctagaatatgcagagaaatggaaaacttcagaagatcctttacctttattggag

SEQ ID NO: 47746 - DNA, 90 bp, Homo sapiens
cggacttcgacacctacgacgatcgggcctacagcagcttcggcggcggcagaggtttcatgatcaacatgggagactcccacgtggaca

SEQ ID NO: 47747 - DNA, 73 bp, Homo sapiens
gatgcttgttggatgaattaatgaaccttgacccacaccaagggcagcggtcttaattctttttatgatcaac

SEQ ID NO: 47748 - DNA, 51 bp, Homo sapiens
caggattctcttggaacattattacaagagttgctttaatgtgaagtattt

SEQ ID NO: 47749 - DNA, 75 bp, Homo sapiens
tggcctctgcagaggattcagccccggctgataaagacgaggacgagtcgtactgcctgaaggtgaaggagatgg

SEQ ID NO: 47750 - DNA, 100 bp, Homo sapiens
actgcgagctactttctgactgcccgcctggcactgaagccgagctcaaaggaaaataccaagcccggattctttccgagagccttctcactcctgcgga

SEQ ID NO: 47751 - DNA, 75 bp, Homo sapiens
agccgatgtgttttggagcctcgccccccggggaagcggtggatggaatactcccccagttgcaagaggcgcagg

SEQ ID NO: 47752 - DNA, 100 bp, Homo sapiens
tttaaatgcagcatctgcgatgtgaggaaaggcacctccaccaggctgttgcaaatgagtccggactaaattttatatctgtcaagggccccgaattact

SEQ ID NO: 47753 - DNA, 113 bp, Homo sapiens
gttccccgccaaccgcaaccattgacgccatgtcgggttattcgagtgaccgagaccgcggccgggaccgaggaatagcattcctttcgaacaccacggcaagtagctgctcg

SEQ ID NO: 47754 - DNA, 90 bp, Homo sapiens
agctgctgccgccccttgggctaaaagtagagacaagttttcaccgtgttagccagaatggtctcaatctcctgaccttgtgatccgccc

SEQ ID NO: 47755 - DNA, 51 bp, Homo sapiens
tcaataaagttgctgtatttacagagttccatgccattgcagtgtcaacta

SEQ ID NO: 47756 - DNA, 98 bp, Homo sapiens
caccattggtaaaatctttaagccttggaaatggaggaaaaagaagaccagcgacaaatttagagaaacctcggcagttgctccttcacatgttccca

SEQ ID NO: 47757 - DNA, 100 bp, Homo sapiens
ggatctggtgtaccaggcgaagctggccgagcaggctgagcgatacgacgtggaagatagatgataagcctgtaaaaattgacaagtgggatggatcagc

SEQ ID NO: 47758 - DNA, 75 bp, Homo sapiens
cactggcaaaaacagcaagtggagtcaatcagcttgttgataatgtttgatgtgggaggtcagagatctgagcgg

SEQ ID NO: 47759 - DNA, 98 bp, Homo sapiens
ggcgctacactagagcagagtacgagtctgaggcggagggagtaatggaactgtggaaggtgcatcagtgaagaaatggaccaatgtgtataatcatg

SEQ ID NO: 47760 - DNA, 101 bp, Homo sapiens
cgatgaggaagtactgagcctgttggaggaactggcccggaaacaggaggaccaggtcaatggccagcaaggaggggggtccgagccggcggcggcggcgg

SEQ ID NO: 47761 - DNA, 101 bp, Homo sapiens
gccagggccggttctgcaccatcttcaggtcctactccaggggcgctcagggtgatattcatgaggatttttgcagcgtttgcagaaaaagtggccagtta

SEQ ID NO: 47762 - DNA, 100 bp, Homo sapiens
cccacgactgcctgggacctggccaagggctccacacaccaagaccaagattatggattggatatgtctacttctggatgcaaattttactgttgttgta

SEQ ID NO: 47763 - DNA, 76 bp, Homo sapiens
actggatagacttcgaacatttaaacagcgtcatcacgtagacataaccaagaaacttcacccaaatcaagctggc

SEQ ID NO: 47764 - DNA, 75 bp, Homo sapiens
tggactgtgggctggtgtgtggaactggaaattggccttgcctctctgggtgcacctgatgaatacattgaaaag

SEQ ID NO: 47765 - DNA, 50 bp, Homo sapiens
ctgcggtgtgcaagtccgactggaacaggccaagtcctgtatctgccatg

SEQ ID NO: 47766 - DNA, 98 bp, Homo sapiens
tgaactctcagtggtcctacctggggatattatcaaatctactactgttcatggcagttgatcctgaaaacgtgtttattggtcgccacttcattatt

SEQ ID NO: 47767 - DNA, 82 bp, Homo sapiens
cgtggaaatccccagctcccctctgggcctggtctccaagtcctctcctaagaagcctcgtggacgtaacatcttcaaggcc

SEQ ID NO: 47768 - DNA, 131 bp, Homo sapiens
gcctcccaggagcacagagagcctaaaagacctgaaatcatatttttgccaagtgtggattttgatatcatgtccctgaaacgaatgctggagaaacttggagtccccaagactcacctagagctaaagaa

SEQ ID NO: 47769 - DNA, 50 bp, Homo sapiens
aaattcttcaaaccggagtcgggtcggtgtctgacttccagcaactgctg

SEQ ID NO: 47770 - DNA, 137 bp, Homo sapiens
ggagtaactgcaaagatgctgtccgtgcgcgttgctgcggccgtggtccgcgcccttcctcggcgggccggactggatggagctatgacattgaagagaggaaggttccaaaacccaagtccaagtcttatggtgca

SEQ ID NO: 47771 - DNA, 74 bp, Homo sapiens
cggggccctctcagcaagaacgggaacaaaactctgtgggtaaacctcacaagtgcaactactgtggacgaagc

SEQ ID NO: 47772 - DNA, 50 bp, Homo sapiens
gaagaggaaaactctaccggtgcagttgttttactcagctaaggaaaata

SEQ ID NO: 47773 - DNA, 74 bp, Homo sapiens
ggacaccgcagtatgaggcagagccaaactgattatccaccagacactcagcgtcttagaagatattgtggaga

SEQ ID NO: 47774 - DNA, 87 bp, Homo sapiens
ctggaacaactcctaattctaaacattctagtatgccagtagaaaaaaatatcactttagaaaggccttctaatgtaaatctcacat

SEQ ID NO: 47775 - DNA, 100 bp, Homo sapiens
ctgagatgggcaccgcggatctggggccgtcctcagaactccatccggcacaacctgtcactgcatagtcgattcatgcgggtccagaatgagggaactg

SEQ ID NO: 47776 - DNA, 90 bp, Homo sapiens
tccctcattaccgtcgccagcggagcgaacccgagagcgtggagcgggctgggccaggtcctggacccaagccagaagcctctgcaaagc

SEQ ID NO: 47777 - DNA, 100 bp, Homo sapiens
caagacctgatcacctgtctggagcaagaaaaagagcctttgactgtgaagagacatgagatggtgaatgaacccccagcttggctgaagaggaaataaa

SEQ ID NO: 47778 - DNA, 75 bp, Homo sapiens
accaatgactgtggaataatatggaagaagatggaaaaaacttgtttaatgggcactagccacagctctcactct

SEQ ID NO: 47779 - DNA, 100 bp, Homo sapiens
ggatgggcacactgtgggggtgtcctggtgcacccccagtgggtgctcacagctgcccattgcctaaagaagtatgacccatatagcaaagtcctatcca

SEQ ID NO: 47780 - DNA, 75 bp, Homo sapiens
tgcggctccaggtgggctcacgcggaaagaatacccacctcatgtccaaaaagttgaaattaatcctgtaaggtt

SEQ ID NO: 47781 - DNA, 74 bp, Homo sapiens
aagaaaccaacattcccaacagccaccaccaccaccagatggtttggggacgacatccctggaatggaaggcct

SEQ ID NO: 47782 - DNA, 78 bp, Homo sapiens
agatgcttccgaactgtgggcaaaaatggcggtccttatgtcgtcagaagatcgagaagctcaggaggatgaattgct

SEQ ID NO: 47783 - DNA, 90 bp, Homo sapiens
ttacagtgcagtcttatcgaaggatgtgcatgaaggacagcctcttctcaatgaagaagcctgggaagtttataaacagataaagacgca

SEQ ID NO: 47784 - DNA, 82 bp, Homo sapiens
ttgtatttaatttttggaacaatttgatgagctaggagaggctgggaggcggcagaatgcagccagaggagggcacaggctg

SEQ ID NO: 47785 - DNA, 100 bp, Homo sapiens
ctattatccaatgaagaggaaaagaacagagccatcattcaagaagtttgcttcatgctacttgtttgcggccccctactactacggcttctacaacaac

SEQ ID NO: 47786 - DNA, 98 bp, Homo sapiens
ggccctgggctttaccatctttgtggctgtgcttgccaggcctggctccatatgtccgtggttcagaccctgtattaaagcttttggacgacaatggg

SEQ ID NO: 47787 - DNA, 74 bp, Homo sapiens
ccagctccgaaatcaccaccaaggaggctactcacagtcgaactacaactccccggggtccggccagaactaca

SEQ ID NO: 47788 - DNA, 141 bp, Homo sapiens
gaagaggattggaggtgtcagtgttaaaggaacctctacaacgaaggtgaagccacggaagataaggacccattccaacaatctcgtaaaacatggtggattactatgaagttctaggcgtgcagagacatgcctcacccg

SEQ ID NO: 47789 - DNA, 102 bp, Homo sapiens
gagaaggatgacaccggagtttgacgaagaggtggtttttgaggcgaacagctgcttggagaactacaagtgaagaaaagaaagcattagatcaggcaagtg

SEQ ID NO: 47790 - DNA, 100 bp, Homo sapiens
ggaataaacatgcaatgaacccaaaaggactcagcccgcctgcacccaggtgaaatatacagccttgttgctcacacaaagcctgtttggtggtttcttc

SEQ ID NO: 47791 - DNA, 74 bp, Homo sapiens
gcttttggaggcagtaatattgagcctagtgttcgcagctgcttccaacagttgtattccctgaatgactataa

SEQ ID NO: 47792 - DNA, 75 bp, Homo sapiens
atctccgccaccgtcttcaggccagattggcggcagtaagcacacaatgaatgatcacctgcatgtcggcagcca

SEQ ID NO: 47793 - DNA, 75 bp, Homo sapiens
agaaggactactttggcattcgctatgtggacccagagaagcaaaggtttcggagcaacatcccctgtcacctgg

SEQ ID NO: 47794 - DNA, 100 bp, Homo sapiens
gagagccgcggctccgtgtttctggaaagtgacagcagtagcctctagttcgttagtcaaaacgtgaaaaaaaagacctgctttgccctgggaaatagta

SEQ ID NO: 47795 - DNA, 50 bp, Homo sapiens
tgcccggcagacggctcagggaatggatgcacagccagagaacaacacat

SEQ ID NO: 47796 - DNA, 90 bp, Homo sapiens
tgggggtggtgccagtttggagctcctggaagagctggaagtcgagtgtgctactcaactcaggagatttggagacaaactgaacttccg

SEQ ID NO: 47797 - DNA, 83 bp, Homo sapiens
ggcccggccacggcggagccaagtgcacgtgccggaaggacatggtcaagatctccatggacgtgttcgtgcgcatcctgcag

SEQ ID NO: 47798 - DNA, 102 bp, Homo sapiens
gctcaccgcaacctccatctcccagccaccacaagggcccgggccaccaggaagagcctgctgcatgtcccctatggagacggcgaaggggagaaagtggac

SEQ ID NO: 47799 - DNA, 83 bp, Homo sapiens
ctcattttctgggttaagtctccttgaaagattaattacagaggatcatgtgattcagcatgggctggtagtggatgggacca

SEQ ID NO: 47800 - DNA, 90 bp, Homo sapiens
gagggcggcaaggcgccggccagcagcctgcacacccaggaagcagggcggtccctcatcaagaagtactctgggaccgagtgcactgaa

SEQ ID NO: 47801 - DNA, 101 bp, Homo sapiens
ggctgtggaaacaggcctccaagtacccaagggcagcacattccccctgttcccaggtgggtccagagatgtcgcctgggagccagggcctggagttctgt

SEQ ID NO: 47802 - DNA, 75 bp, Homo sapiens
cccgtactgcacatcgtggtggtcggatttcaccacaagaagggctgccagacaccaagctggatggtttccttt

SEQ ID NO: 47803 - DNA, 100 bp, Homo sapiens
caaggagagaagttcttatgactcctccatgtctccagaatgccatgatgacatttgaggaagaaaaaatgcagttggcatgtgatgacttaaaaaccac

SEQ ID NO: 47804 - DNA, 74 bp, Homo sapiens
gccagggaaccctggtcaccgtctcctcaggattcactccttctccagttgcacagccacacccttcagctggc

SEQ ID NO: 47805 - DNA, 137 bp, Homo sapiens
gacaaaggtgccttctgtagacactcctgctctcttccatccccatcttacagatgtattaagaagcctcaggaagccccttcttcacaggacatcctggtgttcctcactgggcaggaggagatcgaagccatgag

SEQ ID NO: 47806 - DNA, 100 bp, Homo sapiens
ggaagccatcgcctggccccggctctctggaccttgtctcgctcgggagcggaaacagcggcagccagaggattaattggaattcttcaaaatgtcaggt

SEQ ID NO: 47807 - DNA, 75 bp, Homo sapiens
tagccatcttctaattttcattccttcaaagcacttcactacgcttagcagatgtcctctggaattcccagattc

SEQ ID NO: 47808 - DNA, 100 bp, Homo sapiens
ggggcatacctatggctttattgacctcgactcccatgcggttcaacagagtttggaaaagatttctaaactggagcaggaaaaagaacattggatgttg

SEQ ID NO: 47809 - DNA, 49 bp, Homo sapiens
accaagtggtctctttattgcgcatcaagtaccacgtttttgaagacca

SEQ ID NO: 47810 - DNA, 135 bp, Homo sapiens
cgtggatgaggctctgcggctggtccaggccttccagtacacagacgagcatggggaagcccagtgtgccatcataatgtttgatgtaacatcgagagttacttacaagaatgtgcctaactggcatagagatct

SEQ ID NO: 47811 - DNA, 101 bp, Homo sapiens
ctgtgtaagaaaaagccaagagactgcttttgagtgacatttatttagcagctagtaacttcacttatttcaggaacatccagtcatggataaaaatgagc

SEQ ID NO: 47812 - DNA, 75 bp, Homo sapiens
gcaggaggggctcaggaacctgggcatccctctgggccaggacgccgaggagaatcttgctctgtcacccaggct

SEQ ID NO: 47813 - DNA, 82 bp, Homo sapiens
gctttgccattggggtgcagcagctgcaccccaccttgatccagcggacttacgggacctgaaggagaagaaggagaaggtg

SEQ ID NO: 47814 - DNA, 96 bp, Homo sapiens
gtccctgtcgtgtgacattttctggcagcagaagaggatgaaacacaaaaccagcatgatgatagttcctccgattcaggaactccttcaggccca

SEQ ID NO: 47815 - DNA, 100 bp, Homo sapiens
cttctttcttggagctgaccatgttaaacaggtgttcaaggagctggagtttctgggttggtataccacaggggggccacctgacccctcggacatccac

SEQ ID NO: 47816 - DNA, 100 bp, Homo sapiens
aaaaagttcagtgggaagcatgtcgtctttatcgctcagatgcatgttcctggtcattcgggatttataggcaatgaagaagctgacagattagccagag

SEQ ID NO: 47817 - DNA, 99 bp, Homo sapiens
cggagatccgagagcagggggatggggcagaggacgaggagtggatgcacaagtctggcgttctgaggaaggccattgattacatcaaatacttgcagc

SEQ ID NO: 47818 - DNA, 98 bp, Homo sapiens
agaatttatatagagatgtgatgttggagaactacagaaacctcgtctccctgggcaacagcgagtgaccaagtcaccagcacccgtgcatcgaggga

SEQ ID NO: 47819 - DNA, 75 bp, Homo sapiens
aatgaaagtgagcctgaagaaccatcggctacttttccaggtatgtgggagagaacaataacaataggaagtgct

SEQ ID NO: 47820 - DNA, 100 bp, Homo sapiens
tccggggaggtcacctgacgaggagccctgggcgctgcctatggcacagccaagagcggtaccggcattgcggccatgtctgtcatgcggccggagcaga

SEQ ID NO: 47821 - DNA, 74 bp, Homo sapiens
acggctccccgtcgtcctggtgctgcagcgattggtggaacgagaatgcctacacgcagccacaggaatccagt

SEQ ID NO: 47822 - DNA, 75 bp, Homo sapiens
cgcagcggcggcagcggagagcgagagaggggagcaggtatttaacgttaatgcacctctgcctccacgaaaaga

SEQ ID NO: 47823 - DNA, 100 bp, Homo sapiens
tttcccaaaagacaggctcttcacctgaagcttgtacctccttttaaacctcaagtaacatctgagacagatactagatattttgatgaagaatttacag

SEQ ID NO: 47824 - DNA, 82 bp, Homo sapiens
cccggggagccgttggctgggaccgtgcgcgtgcgcctgggggcaccgctgccgttccgagatcgcaccccctccctccctg

SEQ ID NO: 47825 - DNA, 100 bp, Homo sapiens
aggattggcaggagattatagctctgtatgagaaggacaacacctacttagctggcccggtgatcatgtccattgaggagaagatggaggctgatgcccg

SEQ ID NO: 47826 - DNA, 100 bp, Homo sapiens
cgacctaagtcctgactgcttgggacatgcaggacttgtatatgagtatacattgagcactctataccaaagcgtcaagatacttcaacgcacagggaat

SEQ ID NO: 47827 - DNA, 100 bp, Homo sapiens
acaactcctcaaattccaataaaaatggaaaactttaataatttctatatacttacatctaaagagctagggagcatccgcacttccactaatagccaag

SEQ ID NO: 47828 - DNA, 100 bp, Homo sapiens
taggagcatctacccatggacagacatgtcttcccatggagacactcctagaatatgcagagaaatggaaaacttcagaagatcctttacctttattgga

SEQ ID NO: 47829 - DNA, 100 bp, Homo sapiens
aagagcgggacccgagccctggttcaacagagtttggaaaagatttctaaactggagcaggaaaaagaacattggatgttggaagcacaattagccaaaa

SEQ ID NO: 47830 - DNA, 100 bp, Homo sapiens
tgggaaggaagccccagggcccaacccccgggtgcaggtgctggctgctcagctgctctctgacatgaagctgcaagatctgacaggatggcatctgatg

SEQ ID NO: 47831 - DNA, 51 bp, Homo sapiens
cactgttgtgatggaggaaatcaagtcctgtgtatggaaactcacatgagt

SEQ ID NO: 47832 - DNA, 100 bp, Homo sapiens
cgcactcactccgccgcgctctccgccaccgccaccactgcggccaccgccaatgaaacgcctcccgctcctagtggtaccagaatccggattataattt

SEQ ID NO: 47833 - DNA, 97 bp, Homo sapiens
gaagaaaacatttcttttaatttttaaacttggtttgaaagatttaggcctattaaaggaaggcaggaagaactaaaggaagtaattgaacgtttta

SEQ ID NO: 47834 - DNA, 83 bp, Homo sapiens
ctcaagaagccgcaggaacttaaagaaatggaaaggctgcccttgttgtatcacggactgattcaccgagcccaaccgtactc

SEQ ID NO: 47835 - DNA, 75 bp, Homo sapiens
atcatgatgtcaacaaccgtggctcacaagatgaaagagcacgttcctcagtggtgtgctgaatattgtctttcc

SEQ ID NO: 47836 - DNA, 75 bp, Homo sapiens
ccaggagtcatcggacgccagaatctgggaagatcagttttcctgccatccaggctgctccctccttcagcaact

SEQ ID NO: 47837 - DNA, 78 bp, Homo sapiens
gtgttccgtgtctctggattcaagtcccaggagtcctgaccagagagcagggcgaccattgacgaggtggagacggac

SEQ ID NO: 47838 - DNA, 98 bp, Homo sapiens
gtggaacggctgcttttggaaggagtacgagagggcctccaaagtggaccagtttgtgacgcgcttcctgctgcgggagacggtgagccagctgcaag

SEQ ID NO: 47839 - DNA, 100 bp, Homo sapiens
aaagtttaaaaatgggtgaagaacggtgggtctccctcactccagaagaatttgaccaactccagaaatattcagaatacttacagccagctggcccacc

SEQ ID NO: 47840 - DNA, 101 bp, Homo sapiens
aacccccaaggatggcaccgattggccggagcctcaacagaaagctcctttagttcctcctcctccaccgccaccaccaccaccaccgccacctttgccag

SEQ ID NO: 47841 - DNA, 100 bp, Homo sapiens
ggtaacagatgatggtgaaactcatgaagcccaggacgattcaggaaaaccagtagattcccagacatcgcgaagtgaatctgaaattgtgccaaaagtt

SEQ ID NO: 47842 - DNA, 95 bp, Homo sapiens
cttgggcccagtttatggcttccagtggaggcattttggggcagaatacagagatatggaatcagtttgggagtctggatcaaaaattagccctg

SEQ ID NO: 47843 - DNA, 100 bp, Homo sapiens
agatcttcacagcacagttcctgggaaggtggagccaccagcctctccttgcaccatatgaaggcggagtatggaaagttagagtggacctacctgataa

SEQ ID NO: 47844 - DNA, 96 bp, Homo sapiens
atagcctcaaactcccaggctcaagcaatcctaccatgtcagccttcccagtagctggaactacagcatctgtgttttgtgtgagcctggacccca

SEQ ID NO: 47845 - DNA, 73 bp, Homo sapiens
tttcaagtgcatgcagctcactgatttcatcctcaagtttccgcacagggtggactccattatgctggtggaa

SEQ ID NO: 47846 - DNA, 90 bp, Homo sapiens
caaattatcagcactttttattaatttgatcagtgatccttcacgttgggccgccagatcccacccttggacccccatgaaaatggaaac

SEQ ID NO: 47847 - DNA, 50 bp, Homo sapiens
gtgaagtaacacagaaggatattttctctgtgggcagttctttttgtttt

SEQ ID NO: 47848 - DNA, 82 bp, Homo sapiens
agcagccaataggacatgatccaggaagagcagtaagggactgagctgctgtcggcagaaccaattgaaagaccaacagcaa

SEQ ID NO: 47849 - DNA, 110 bp, Homo sapiens
cctatggattccattgaatgggctgaagtggtgatcaatgtgaacaatattctcaagcttccaaactacaaaaactttaaaggcacgattcaagaacttggtcaaaacca

SEQ ID NO: 47850 - DNA, 75 bp, Homo sapiens
ccagacccaatggaacatcagcaatgcttctgaacccagcttagactagaaagtctagaagacacacacataatg

SEQ ID NO: 47851 - DNA, 75 bp, Homo sapiens
agttggaagcagccgatccagcctgcggagcctgtggggcaggaagtgcttcgggagatccaggatgcagtggcc

SEQ ID NO: 47852 - DNA, 82 bp, Homo sapiens
cccagaccctggagcctcagttggaagcagccgatccagcctgcggagcctgtggggcaggcgtcacaatgtagcagggacc

SEQ ID NO: 47853 - DNA, 100 bp, Homo sapiens
gttcagcttgcagtgtaattcagaagagttaagaccagaagtactggaatcatacttcctttcagagttgacgctggtgaagacattcatgatttaaaca

SEQ ID NO: 47854 - DNA, 87 bp, Homo sapiens
atcatggagccgctggggtcccttttgcctcagatactattttgaaggattattgggactttgcagaactctgcagagttttcagaa

SEQ ID NO: 47855 - DNA, 100 bp, Homo sapiens
tgggaagggacctcgaatgtgggaccccagcccctctccagctcgaaatcgacgtggcccagtggaacatcgggagcctccggaccatcctggacatggt

SEQ ID NO: 47856 - DNA, 100 bp, Homo sapiens
gctgcgctaaggaatgaaacccttccagctcgatctgctcttcgtctgcttcttcctcttcagtcaagaaatacaggtatcaggatgaagatacacctcc

SEQ ID NO: 47857 - DNA, 50 bp, Homo sapiens
ccagaagttccccaagctccgggtgccgtttgacatctacaggaaggtgc

SEQ ID NO: 47858 - DNA, 74 bp, Homo sapiens
aagctgataggctgcgctaccggaatgtcatccagcgagtgattagagaggaacgaagggcatcctacgactat

SEQ ID NO: 47859 - DNA, 50 bp, Homo sapiens
gtcggcacctgaaggacatggagatcagtgtgcgtgtgaccaccatggat

SEQ ID NO: 47860 - DNA, 50 bp, Homo sapiens
gatgaccctcgagggagacatcaggctggatttggtgttgtactgcgagg

SEQ ID NO: 47861 - DNA, 75 bp, Homo sapiens
ctggacaaaatgtttacttgtctggaattgcattttgtgaaaaaagaacaagaattttctgcaaggatcatatct

SEQ ID NO: 47862 - DNA, 75 bp, Homo sapiens
caaccttcgatctcctgacgactcaaattgaaattattccatgcaagatctgtggagacaaatcatcaggaatcc

SEQ ID NO: 47863 - DNA, 80 bp, Homo sapiens
tcgagatcccgggcgggggcaccgagggctaccacgttctgcgggtttaagtggaaaccctgcagatttagaaagaagag

SEQ ID NO: 47864 - DNA, 75 bp, Homo sapiens
ttcaaaactcatctcctgggtgactggtcaacatgattgtgtgaccataatcaacaatttctttcctcgagagag

SEQ ID NO: 47865 - DNA, 100 bp, Homo sapiens
gcccggaggaggctcatgcgggatttcaagcgatggaatcttgctctcttgctcagactggagtgcagtggcatgaccttggctcactgcaacctcacct

SEQ ID NO: 47866 - DNA, 112 bp, Homo sapiens
aggaaccagaacccaggcccacggaggaagagccgggcagtccctggagcgggccaggtgaccaaaagccagccccactgtgagttgaactctttcgtgttgaccggccact

SEQ ID NO: 47867 - DNA, 100 bp, Homo sapiens
caatcagtgtaccatgtgtaaagcaaaattgccaggtgtggtgtcttacacctgtaatcccagcactgtgggaagccagggcaggtggattgcttgagcc

SEQ ID NO: 47868 - DNA, 49 bp, Homo sapiens
ttaagatttattgtcaaccaaggttggaagctgtgtactgtgggtgtta

SEQ ID NO: 47869 - DNA, 100 bp, Homo sapiens
aagatgcatgccagagacttcacagtttctgctctgaagtggtccaaaggcaaagttcgggacaagctcaataacttagtcttgtttgacaaagctacct

SEQ ID NO: 47870 - DNA, 82 bp, Homo sapiens
gaaaagtgaagaaagtgatcataggagaaaaccatttcagtgtgaagcagtatgcagatgttgaaggattctaatgcaagat

SEQ ID NO: 47871 - DNA, 100 bp, Homo sapiens
atcatggccttccaggcgatgtgtcgtggctacttggccagaaaaacccacaatacattatatgcaccagaaatgctagccaaaatggcagagcctttca

SEQ ID NO: 47872 - DNA, 86 bp, Homo sapiens
tttgaaggaagatctccagaaacttaaagacccatctctgacagttagagccgatatcactggaagatattcaaatcgtctctatg

SEQ ID NO: 47873 - DNA, 51 bp, Homo sapiens
ttcgatgatcgtgtgtcggatgaggagaagctctaagcgaaagacatgagg

SEQ ID NO: 47874 - DNA, 98 bp, Homo sapiens
cggccggggcctggggctgcctgccgggcggccgggcgcggcgagcccagtctgcgggccaggcatcgacatccgcaacgactatcagcagctgaagc

SEQ ID NO: 47875 - DNA, 100 bp, Homo sapiens
tgctgagaaagcaacccagttcatccagcgtgcaagtgttcctttctgccgaaattctccattcatatagaaaccaagtatgaggacaacaaaggaagca

SEQ ID NO: 47876 - DNA, 75 bp, Homo sapiens
aagaggatacctctgcgatcccgggtcatctccagatgctagggttatgggagtggacctaccctatgagacgag

SEQ ID NO: 47877 - DNA, 98 bp, Homo sapiens
ctggagaacagggagatccagccaccattcaagcccaaagtggaaattcgaaatgagtcccatgactatcctcatagagtggccaagtttccagaaaa

SEQ ID NO: 47878 - DNA, 98 bp, Homo sapiens
cgaagatttccaatcatttctaaagtttctgagtcccttcaacatgatcctgggaggaatcgtggtggtgctggtgttcacagggtttgtgtgggcag

SEQ ID NO: 47879 - DNA, 100 bp, Homo sapiens
gagtccctggagttggaaaagagcaagcattaaaacttatacagattttgaaagggcaaagtttacttcagagctgttccccaggtcacctccccacctt

SEQ ID NO: 47880 - DNA, 100 bp, Homo sapiens
aaggattccaagtaactcttatttggtttggcaaacatcgaaaagatgacaagattgagaaaacgggtaaaataaaaatacaggaatcctttacatcaga

SEQ ID NO: 47881 - DNA, 74 bp, Homo sapiens
agtgctctgttcacggctccatcgctgttagtgaaatgacaatggatgctctgttggctcgattgaaacttctg

SEQ ID NO: 47882 - DNA, 101 bp, Homo sapiens
gccacagccgcgggggccaccacactggcccaaatatttcctgcagcctctgaagagccaatccattcaggatgggaaaccacgcaggcaaacgagaatta

SEQ ID NO: 47883 - DNA, 75 bp, Homo sapiens
tatgaagacacgcttcttctggaagaccagccaacagagactctgacctgtttttgttggacacccgtgtagtat

SEQ ID NO: 47884 - DNA, 98 bp, Homo sapiens
acggccgctcctgggacagagtagctccggaaggaagcagccaccctcgccatggcctccccgcccgcctgcccctcggaggaggacgagagcctgaa

SEQ ID NO: 47885 - DNA, 100 bp, Homo sapiens
ggaagatgggtttttactgaagatcaagctggggcactacgccacgcagctccaggtttctgggactcctcgctgaatcctccacaagaaagagggaagc

SEQ ID NO: 47886 - DNA, 100 bp, Homo sapiens
ccgaatgcaggaagaccgtgatgggagctgcagcacagtcgggggtgtaggttatggggttaatgaaggagttcccccttctgagtatgttcaatatcca

SEQ ID NO: 47887 - DNA, 115 bp, Homo sapiens
tgagtttcccacttgattacccgttaagtcccccaaagatgagatttacctgtgagatgtttcatcccaacagtacaccaggggttggaaaaaccacactaggcaaagaacttgc

SEQ ID NO: 47888 - DNA, 100 bp, Homo sapiens
ctggagacggcctgggtgctggcgaagcggaggccggagattatggattggatatgtctacttctggatgcaaattttactgttgttgtaatgatgccag

SEQ ID NO: 47889 - DNA, 100 bp, Homo sapiens
cgcgcggccccgcccccgccggttcgcgtctctctgctgcggcgcggggaccgctgtgctctcggttatgaagacagtatggagtttccagaccatagta

SEQ ID NO: 47890 - DNA, 151 bp, Homo sapiens
ctctagtagtgaagaagctacaagaaatcatgatgcatgtgatctgggccgcactggcatttgcagctattcaggagcgatctctctttgagtcggcatggaagaaggagaaggacatcgtttccaaggagatagagaagctccgcacgtc

SEQ ID NO: 47891 - DNA, 101 bp, Homo sapiens
ttcgacaatggcagcatctacaaccctgaagtgcttgatatcacagaggaaactctgcattctcgcttcctggaggtggtgttcccactgatgaagagcag

SEQ ID NO: 47892 - DNA, 98 bp, Homo sapiens
gatttgtattcgatagaccactgcctgtgtctcgtcttgtatctctaattggaagcagaaacatgacagctgccctacaggcagctctgaagaacccc

SEQ ID NO: 47893 - DNA, 102 bp, Homo sapiens
cgttctccaatgcaatgctgtttgccctgaacatcatgaattcccaagaaggagacacgatgaggcgagtggtacgacagagcaagtttcggcatgtatttg

SEQ ID NO: 47894 - DNA, 90 bp, Homo sapiens
aaaagacaaggaaaaggacaaggggaaatggaaggggcctccagggtctgcagacaaggcagggttgctacaagatcaccacggttttca

SEQ ID NO: 47895 - DNA, 71 bp, Homo sapiens
cgacgggggagacggagccccagatatctaacagtgatacgccttcaccaccacctggtttgtcaaaatcc

SEQ ID NO: 47896 - DNA, 75 bp, Homo sapiens
gtccttcagaaggcatcaggaagatgttccagcactctttccttcagagcacgtagtaggattttattttctaca

SEQ ID NO: 47897 - DNA, 100 bp, Homo sapiens
cagagaaggagtgtgacacaggccagtggagcgagtggagccagcctgtgtgcttccaggctccccagagacaaggaacagcaagaggaccttgtgcatg

SEQ ID NO: 47898 - DNA, 100 bp, Homo sapiens
cggcggctggcgcttcctgcgcatcgtctgcaagaccgcgaggcgagacctcttactagacgcttgaagcaaagctgccatcccagaagacgacatgctc

SEQ ID NO: 47899 - DNA, 75 bp, Homo sapiens
ccgaagttgccgcggggccttccgatcccctattgcagagggaatggcatacatcgagcggaagaactacattca

SEQ ID NO: 47900 - DNA, 100 bp, Homo sapiens
cccactagtgcctcaggtgcccggccctgtgactgcagccatggccacaggcttagctgttaacgggaaaggttggctgatcaagatgacactgagtaac

SEQ ID NO: 47901 - DNA, 100 bp, Homo sapiens
gaagatgggaaagttattgaacggctgggccagagcgtggttgctgaccagttgaaagacttcccaagtaagaagcggaagaggagccgctggaaccaag

SEQ ID NO: 47902 - DNA, 50 bp, Homo sapiens
cagaagccgaaaccgccaaagccactggagaagcgactggaggagtggtt

SEQ ID NO: 47903 - DNA, 100 bp, Homo sapiens
attgccctcaccatcgccctcttcaccatctatgtcctctggacgctggatcactactcttggaatcaaagataaatccaaatactgcatatcagaaaca

SEQ ID NO: 47904 - DNA, 100 bp, Homo sapiens
ctggaaccatctcagaagccatgcccctcaggctggaacttgccctgtctcctcgcagatgaggttgaaggtttagaacagatgtggaaaaatgtttact

SEQ ID NO: 47905 - DNA, 98 bp, Homo sapiens
gccaggcggtgatgaagaatccccccgaaaggaccccccagacaatgcagatcttcgtgaagactctgactggtaagaccatcaccctcgaggttgag

SEQ ID NO: 47906 - DNA, 100 bp, Homo sapiens
cgcagggtggagcgcgccagccggggtcctcggatctggcccagaatcggaagactttttgatggtacagagcccattgttttggacagtctcaaacagc

SEQ ID NO: 47907 - DNA, 74 bp, Homo sapiens
tgacaccggagtttgacgaagaggtggtttttgaggagtacttttcgtcagggtttggtgattggaagtaaacc

SEQ ID NO: 47908 - DNA, 82 bp, Homo sapiens
gaagaaaacaagggaggagaagacaagctaaaaatgattcgggaatatcggcaaatggtggagtctttcattttggatcagg

SEQ ID NO: 47909 - DNA, 98 bp, Homo sapiens
gccaacagcagaagagaaagccagttatccacggactggaagatcaaaagaggtgagatggaagattttcgaggtatagcagaagaatcatttccaag

SEQ ID NO: 47910 - DNA, 97 bp, Homo sapiens
atttgttatcccacgacccatccttgaagaaggtgttggtaaatcatgcttattgctacagtttacagacaagaggtttcagccagtgcatgacctt

SEQ ID NO: 47911 - DNA, 83 bp, Homo sapiens
tcacagtgtcttcgagttcctggccttcaagaatgaccctgtcacactcactgaaaatggcggaccagaacctggagaaactg

SEQ ID NO: 47912 - DNA, 75 bp, Homo sapiens
caaaggctattggatcagctcagcagggtcggtgagctggtaaaggttacgaagattaatgtgagtggtcagtgg

SEQ ID NO: 47913 - DNA, 75 bp, Homo sapiens
gttccgatcgacccggtaccaagaaggggagtgcccgcggcaggcaagcctggtatccaatagacaaggaagcac

SEQ ID NO: 47914 - DNA, 83 bp, Homo sapiens
aaggattagcgagaagaaaatgtccacccccatcgaagtgttgtgtaaaggctacccttatcatggaagggaagtggttgctg

SEQ ID NO: 47915 - DNA, 85 bp, Homo sapiens
gacttgctggaggaggagatcaccaagtttgaggagcacgttccctcggagacatggaggccagagaggaggtgcagttggtggg

SEQ ID NO: 47916 - DNA, 73 bp, Homo sapiens
ttgtatgcctcaatttgctggatttaagcactgctgcactttatgagatgcacctgcttcccaaggcctgaaa

SEQ ID NO: 47917 - DNA, 75 bp, Homo sapiens
attcacttctagacgacaaaatgcaaaaaaggaggccaaagactttaatgccaccagcaccaaggcagaagctga

SEQ ID NO: 47918 - DNA, 78 bp, Homo sapiens
gcagaatatgcattgggaaatgatcttcatcaacattgtgctgctgcatctccatatcccaaaagaaagcaaatatgt

SEQ ID NO: 47919 - DNA, 82 bp, Homo sapiens
ggacgtgtacaacccgacgaggaacgaatgggacaagatcccgtccatgaatcagtggtggtcctgctccatgatgtccgtg

SEQ ID NO: 47920 - DNA, 74 bp, Homo sapiens
gcggacacaggcaggagcgccccatcatttgacggtcctagaccagaaggagcacaggctggatggccgtgtca

SEQ ID NO: 47921 - DNA, 83 bp, Homo sapiens
aggaaacatggcggcggcgggtgttgtgagcgggaagttcaaaaggtgatgacctatcaacagccattctcaaacagaagaac

SEQ ID NO: 47922 - DNA, 82 bp, Homo sapiens
atctgggtcacgggctggggacacacccagtatggaggctgaaggtgatgtggccgccctcaaccgacgcatccagctcgtt

SEQ ID NO: 47923 - DNA, 90 bp, Homo sapiens
cgagcactttgtgaatgagctgcgctatggagtcgcccgcagtgaccaggtgggatgtgtgtgggctgaaattccgagctgcggttgtgc

SEQ ID NO: 47924 - DNA, 96 bp, Homo sapiens
cagctgatggcggaggccgagaagcgagtcaaggcctcccactccttcctccgagggctgtttggccgtgctggtatagaggactctaagaagtgg

SEQ ID NO: 47925 - DNA, 100 bp, Homo sapiens
ttcagagagaacagcgtttcagttttggtcatcggaagtggtgccttcagcacaggtatcagtttttggaagaagcttttcaaaatcagaagggtgcaat

SEQ ID NO: 47926 - DNA, 143 bp, Homo sapiens
gccatcattttctgtgtcgcgctcagcggctatgaccaggtgctccacgaagacgaaaccacgactcagcccacctgcacccaggtgaaataaacagctttattgctcacacgaagcctgtttggtggtctcttcacacggat

SEQ ID NO: 47927 - DNA, 75 bp, Homo sapiens
ctgaactaggatgtcccgacatgaaggaagcactacagttcgtaaggagatcatcaggaataagatcagagccat

SEQ ID NO: 47928 - DNA, 96 bp, Homo sapiens
gccgggctgccccgcaggatcatcaaggtcctactgctctgttggctcatgaaataggttttggaagtaaagttacaacacaccctcttgctaaag

SEQ ID NO: 47929 - DNA, 87 bp, Homo sapiens
gcgcgcgcctcgaggccgagtcaagatgttggggatcagccaggtgaggtaggttattcaggctctcctgctgaagctcctccaagc

SEQ ID NO: 47930 - DNA, 50 bp, Homo sapiens
gtcgcccttgcctgcagaggagaggtggggctggtgtccgagcacttctc

SEQ ID NO: 47931 - DNA, 75 bp, Homo sapiens
ctgtttggaggtctgtgcatgcatgttcaggtaaatgagctggatggtatcccgttgatcctggacaactgcaac

SEQ ID NO: 47932 - DNA, 74 bp, Homo sapiens
gagatgtggagttacgcagcaaaggtggccctgaagagcagtggcagagggccatccatgagcgcggggaagcc

SEQ ID NO: 47933 - DNA, 97 bp, Homo sapiens
gactccaagcgccatggccgctgccgcccgagcccgggtcgcgtacttgctgaggcaactgcaacgcgcagctgattgttgagcccattccaattgg

SEQ ID NO: 47934 - DNA, 100 bp, Homo sapiens
ctcaccccaggaaggagggaggccaccgacctactgggccgacggactcccacacaggggagcaagggagcccccggtcctgctggtgctcgtggggaga

SEQ ID NO: 47935 - DNA, 100 bp, Homo sapiens
ttcttgaagagacccacccgcgacctcggtacctcggaccagctctgtaaaagccccgcctctgccttcggatagtgcgaggacgacgggcagacgttct

SEQ ID NO: 47936 - DNA, 75 bp, Homo sapiens
ggacgacatgttgcttttcgtggagcctccttctgaagaaataaaaacaggtgaggatgaagatgaggaagataa

SEQ ID NO: 47937 - DNA, 100 bp, Homo sapiens
cgcggctgctccgctctccccgctccaagcgccgatctgggcacccgccaccagcatggacgctcgccgcgtgccggatcgaatcatcaatttagttgtt

SEQ ID NO: 47938 - DNA, 100 bp, Homo sapiens
agaggaagcgatgatcaattacgaaaactttttgaaggttggtgaaaaggctggagcaaagtgcaaccctggtacctgacagtgtaaagaaggagctcct

SEQ ID NO: 47939 - DNA, 100 bp, Homo sapiens
gttcgaagtctcagcggtattctggtgcttatggtgcctcaggtgtcatggagaaactccagctgggcccagagattctgcagcgggaaaatccaaggct

SEQ ID NO: 47940 - DNA, 100 bp, Homo sapiens
cagcacccggatctcactgtttggcaccttcctgttcaactcccctcaccagcgagtgaagcaaagcacgctagttgctacattgcctgatgatgttcag

SEQ ID NO: 47941 - DNA, 100 bp, Homo sapiens
ccggcgcagcgcagcccgcaccctccccgcccgacctgcgagcgccgcccgggcatgcgaagccgtccctccccggcaattctgtggtgttcttggtcac

SEQ ID NO: 47942 - DNA, 50 bp, Homo sapiens
ccagatagtaccatgatagctgtatcagaatgctgtctctgcaatttgag

SEQ ID NO: 47943 - DNA, 75 bp, Homo sapiens
ccagctgatcctccgggcggagcccactgtcacaaacatcctcaagaaacctgctcctccaaagccagagcccaa

SEQ ID NO: 47944 - DNA, 82 bp, Homo sapiens
cggagccgctgtcctcgtccccagcggtcccgcccaacgcccgactctgatatccgacatgaagccagtgacttcccatgta

SEQ ID NO: 47945 - DNA, 50 bp, Homo sapiens
ctggggcggggaccttgccttgcccgggcttgtcagctcatttgcagctt

SEQ ID NO: 47946 - DNA, 88 bp, Homo sapiens
gaaggtgacttcagaactggagtactatactggcaattgctggagaagattttgcaattgttgcttctgatactcgattgagtgaagg

SEQ ID NO: 47947 - DNA, 82 bp, Homo sapiens
tcggtggactccttcggcagtccacccaccgccgccgcctcccaggaacaagatcactcaaggtgaaggataatctactaat

SEQ ID NO: 47948 - DNA, 100 bp, Homo sapiens
ataagctgcactgcatggttgctgctggatgtgttgtgttcctggcttccctctggatgctgacagaaacaaggccctgcctgatgtggctctgggaatt

SEQ ID NO: 47949 - DNA, 95 bp, Homo sapiens
ctttctgaatgaagaaaccaacagctgtgttactcactgccctgatgggtcatatcaggataccagttcttatagagactgctaagaagctagga

SEQ ID NO: 47950 - DNA, 89 bp, Homo sapiens
attatagagaggctggcagtggttggaaggtgagtggcagtgtgatgagtgtttatagtggagactttggcaatctggaagttaaagga

SEQ ID NO: 47951 - DNA, 51 bp, Homo sapiens
cctgtacagcctgcagaactgtcacaagacacccacttcaggagtcctgcc

SEQ ID NO: 47952 - DNA, 75 bp, Homo sapiens
ttcatttttgatcaggagaaagaagacagccatcatttgaaagcgactgcatttgcctccagacttgtcagacac

SEQ ID NO: 47953 - DNA, 138 bp, Homo sapiens
cgccatggagccgggggaggtgaaggaccggatcctggagaacatctcgctgtcggtgaagaagagtgatcagcagctggactgtgccttggacctaatgaggcgcctgcctccccagcaaatcgagaaaaacctcag

SEQ ID NO: 47954 - DNA, 76 bp, Homo sapiens
tcgtcccgctcgtcatggcctacccgggatacggaggaggggtatagtggaggattacaagccaccgttctacgat

SEQ ID NO: 47955 - DNA, 75 bp, Homo sapiens
cgcgcgacgtacccgccgccgccgttggctggaggccatcagcatcagcaaagccatcaacacccaggaggcccc

SEQ ID NO: 47956 - DNA, 102 bp, Homo sapiens
agaggccagcgcgctgcaacacaagatcaagaactccatctgagagtgctagaagggagactgctgtccccacaatggctgcagccccattcctttttccaa

SEQ ID NO: 47957 - DNA, 80 bp, Homo sapiens
gctttcacgaaggcaccgacgtcatcatgctgaccaccaatcagatccgtaagctgcatcttcctcccgtgaggctggcc

SEQ ID NO: 47958 - DNA, 96 bp, Homo sapiens
agggttctttggaaatctctccatggaggctcgtaggaatactctcataaaagataccatgagggaacagtgcattccaaatctggtggaatcatg

SEQ ID NO: 47959 - DNA, 96 bp, Homo sapiens
ttttcctaaagccgccaggcagtttctgctaaaatggtctttctacaggacctctttgtttttagacatgaattggccataatgagactagcagcc

SEQ ID NO: 47960 - DNA, 100 bp, Homo sapiens
tcgtaggaggctgtcctgtctgcaggattgaaagaaggtggcaagaggaagaagcagaagcagagagaggagtcgaagaagaagaagtcgaccaaaggca

SEQ ID NO: 47961 - DNA, 95 bp, Homo sapiens
cgaccttatctccaacaatgagcaactgcccatgctgggccggcgccctggggccccggagaggaactgtggctgcaccatctgtcttcatcttc

SEQ ID NO: 47962 - DNA, 75 bp, Homo sapiens
caagaaggccctggacacagcaatatctctgggctttcacaggctcccacatcaggacgagaaggagccctcgag

SEQ ID NO: 47963 - DNA, 100 bp, Homo sapiens
gtcgggacaccccggaagctgggaaatggttgtcaagttattaagcaacaaaagatcacaagcagttggaatactaatgtctagccttcatttagatatg

SEQ ID NO: 47964 - DNA, 75 bp, Homo sapiens
gcgaccaacaacattgacagcgtccatgccaccgctttcatcatcgtccagggaaacggaggtggagctgtacaa

SEQ ID NO: 47965 - DNA, 51 bp, Homo sapiens
ttataggaacctggtctccctgggacctccacaaaaagtactcgtacatcc

SEQ ID NO: 47966 - DNA, 95 bp, Homo sapiens
cactgcagctagtaatttgccttctggattgaaaatttctaccttgaaccgtatctgaaagaggttattcgggaaagaaaagaaagagaagaatg

SEQ ID NO: 47967 - DNA, 80 bp, Homo sapiens
tatctgtcttcggtggactccttcggcagtccacccaccgccgccgcctcccaggctagcttgtcactttctgcaaaggt

SEQ ID NO: 47968 - DNA, 97 bp, Homo sapiens
caaccagctgctcctgcccctgctgcaggcgggtgccacgtctatgtgggcttcgtgctgtgggctgctgaatgaagtcatgggaactggagctgtc

SEQ ID NO: 47969 - DNA, 101 bp, Homo sapiens
aaaatggaaaaagaagaacttgatgtatctgtaagatgatgataattccgaagaaggcttccacactattcattcaggaaggcatgaatatgcattcagct

SEQ ID NO: 47970 - DNA, 97 bp, Homo sapiens
cctcccgagtggctgggattacaggtgtggatgaggtcaccattgtcaacattttgaccaaccgcagcaatgcacagagacaggatattgccttcgc

SEQ ID NO: 47971 - DNA, 75 bp, Homo sapiens
tggatgaatttgcttttctggaagttttctggatatgccgcagaaggatccgtgccagaagcaagcctgtgagat

SEQ ID NO: 47972 - DNA, 100 bp, Homo sapiens
gaacttgcagaaatcacattggaccctcctcccaactgtaggcatgattccaacagaactgcagcagctctggaaagaagtgacaagtgctcatactgca

SEQ ID NO: 47973 - DNA, 75 bp, Homo sapiens
ggagctgtagagaggaccccggtacatctgaaagccgggaaatgctttacctgctgttcctgagccttacgctgg

SEQ ID NO: 47974 - DNA, 100 bp, Homo sapiens
actgcgttatagcggccgtgaggaaatgatcttcattggttagcatgtgccttatatgtggcttgcagaaaatctgttccaactgtaagcaaagggacag

SEQ ID NO: 47975 - DNA, 96 bp, Homo sapiens
gctgcctataatcaagtaaaaacaatagctcaaggaaacctttccaacacagatgtccaagctgccaaagcccacaggcggttttgtgagctgctt

SEQ ID NO: 47976 - DNA, 87 bp, Homo sapiens
cagcggaaaatctactgcgtggcttgtcaggaactcgactcagacgtggataaagataatcccggttatgaagacagtatggagttt

SEQ ID NO: 47977 - DNA, 96 bp, Homo sapiens
ttggacctaatgaggcgcctgcctccccagcaaatcgagaaaaacctcagcgacctgatcgacctggtttaaaacctcaaaaaggcttttggatcc

SEQ ID NO: 47978 - DNA, 97 bp, Homo sapiens
gcaggagcgggactgagagcgcctggaggctcgagcggagggtgccaggggagagcaagaaacagtggaaaccagccctggttgtgctgactgagaa

SEQ ID NO: 47979 - DNA, 82 bp, Homo sapiens
ggaaaatttatgggctatacagccattatttggaaagcaggtctataaatgagaaagattatcatagtcgacgctacattga

SEQ ID NO: 47980 - DNA, 100 bp, Homo sapiens
cccgcccctcggacactgcccccgccgccgccggagctctgcagcacggatctggggactttgatgattttaacctggaggatgcagtgaaagaaacttc

SEQ ID NO: 47981 - DNA, 75 bp, Homo sapiens
aaaaattgcaagagagagactattttcgttattacaagaacagcaatttcccagcagaggtgaaggacctgacta

SEQ ID NO: 47982 - DNA, 96 bp, Homo sapiens
aagaaaaagaagggaaccattacagcaaatgttgccgggacaaagtttgaaattgagagagcaggagattcggatgggtcagatggctatgggagg

SEQ ID NO: 47983 - DNA, 88 bp, Homo sapiens
agcgtggcctccgccaccgtgcacatccgaatggggtgaccctaagaatgactcctggatctttgccctggctgtgctcctgtgcagc

SEQ ID NO: 47984 - DNA, 98 bp, Homo sapiens
gccagccctccccgcctctgcgtctttgctcccggagcgcttgaaggagctgcggaatcatggtgtcatggaaagggatttactttatactgactctg

SEQ ID NO: 47985 - DNA, 100 bp, Homo sapiens
cgcgaacccctctgggatccccgccgctctgtctacaacccgaggtgcgcgcggagccatggttatcatgtcggagttcagcgcggaccccgcgggccag

SEQ ID NO: 47986 - DNA, 100 bp, Homo sapiens
gaggcggtggagggccacatcacaactgagattgtcatgctgaatcctgccaatacccgcagcatttccaacatggcgagtttataccgaggtggctaca

SEQ ID NO: 47987 - DNA, 90 bp, Homo sapiens
gatcaaagagcaaacagattcagtggcctgcattgatgcgtctgttactagagtggagagtctaccttcgtctcacatgtgccacaaagg

SEQ ID NO: 47988 - DNA, 96 bp, Homo sapiens
cagcaggctgcagatacgagtggacaagtctatgctccatcagcaagcactgccgactacaatagggactcgccaggctatccttcctccaaacca

SEQ ID NO: 47989 - DNA, 89 bp, Homo sapiens
cggagcatgttgcatcacagggaacttgagaacctcaagggcaggattatattccatcacaacaagatattctgcttgccagaagaccc

SEQ ID NO: 47990 - DNA, 84 bp, Homo sapiens
ggggtgtagcccgagacccacctgcagcccccagcccttgccaggaaaggccattctgcccttccactgcagtgccatcctggc

SEQ ID NO: 47991 - DNA, 74 bp, Homo sapiens
actgcctgcgcagctccggccgcctggctccccatactagtcgccggaaaacgggccttactatacatcatatc

SEQ ID NO: 47992 - DNA, 100 bp, Homo sapiens
acagcctgaagaagggctccctcgtgaagaacctgaaggacacactaggaaacctgtccagtttaagtcgtcttggtctgagatataacagactgtcagc

SEQ ID NO: 47993 - DNA, 82 bp, Homo sapiens
gctacacaagtggagctccttttcctccacctaccttcccgatggaagatagatgataagcctgtaaaaattgacaagtggg

SEQ ID NO: 47994 - DNA, 50 bp, Homo sapiens
gctccgcctcctccgccgcgcaggacaactacacctttgcccaacctggg

SEQ ID NO: 47995 - DNA, 71 bp, Homo sapiens
aaacttgaggagctcgacggtgagcttgctctgcagagacagcatgcagccagtaaagatcccagagaagt

SEQ ID NO: 47996 - DNA, 100 bp, Homo sapiens
gggggtcgctacggacttaaaatctccgcaccgcaccctccacctcaggttgaaggggcccggccaggactcggggaagggtggcctgagagcagcgatg

SEQ ID NO: 47997 - DNA, 101 bp, Homo sapiens
acctgcttctgttggctcagatacactctctgatttggggatctctagcctacaggatggcttggccttgcacataagcatcaagtaccacgtttttgaag

SEQ ID NO: 47998 - DNA, 83 bp, Homo sapiens
gctgagcgagctgtcagagcccggggacggcgaggccctcatgtaccacacgagatgccctgtatccaagcccaatatgggac

SEQ ID NO: 47999 - DNA, 98 bp, Homo sapiens
ctgactgcctatgaatttgctaaacttaaaagcaagctggttctctgggatataaataaggacatggatttgattgacatactttggaggcaagatat

SEQ ID NO: 48000 - DNA, 82 bp, Homo sapiens
cagatacaaacttggattttttccagtctgatccttttgttggcaggcaagatcacctgttgcctgaagcagaagaaatcac

SEQ ID NO: 48001 - DNA, 100 bp, Homo sapiens
cagcatttcaggcatttactaatgatctacttgaaatcttagaggaagaagaggtggataagatgatggaacagaagatgaaggaagaacaggagagaag

SEQ ID NO: 48002 - DNA, 98 bp, Homo sapiens
gtggaagttactgccgcgccaccgagtccggaccggagactttggggcctaactagatctgttacctaaagcaataaaaaatggccagaggatcagtg

SEQ ID NO: 48003 - DNA, 90 bp, Homo sapiens
ggattctgaagaccactccagcgatatgttcaactatgaaggacagtcattttgtttactcattcagccctgttgcaggtcccaataaac

SEQ ID NO: 48004 - DNA, 75 bp, Homo sapiens
aggcttttagtggagaagggcaaaaacttggaaggtagcctttccagtaaatatatgactcagggaaaagcctca

SEQ ID NO: 48005 - DNA, 83 bp, Homo sapiens
ccgcgacggacgcaagatggcgacggcgaccatagctctcgtcatagagctgcccaacatccagaaggtcgaagtgtacccag

SEQ ID NO: 48006 - DNA, 97 bp, Homo sapiens
ctttcgaagacgggatactgctcagcaaggtgttgtgaatttcccatatgatgattgtttgattgcatcgaggtctatgcccctggcttcaaggact

SEQ ID NO: 48007 - DNA, 50 bp, Homo sapiens
ctcatgtggggggtaaaccactcggcatgggcaagaaggacgaccccaag

SEQ ID NO: 48008 - DNA, 100 bp, Homo sapiens
cgaagacggtaacccgtgtgactttgactggggacaaactctgcctgggcgagtccttttcctgcgttatgtcgttcagaccctagaagatgactttcag

SEQ ID NO: 48009 - DNA, 100 bp, Homo sapiens
ctcacctgtgcgggatggaacaaaagatgacatggcagagcttctcctcggggagtcgaagctggagcagtacctgaaggaacaccccctgaggcagggg

SEQ ID NO: 48010 - DNA, 87 bp, Homo sapiens
tgcagcgggagctggacggcgagcgcgagcggcgcgagaaaaggagcaggagcggcttcgcttggagcaggagcgagagcaggaaca

SEQ ID NO: 48011 - DNA, 100 bp, Homo sapiens
gaaccctggtcaccgtctcctcaggaacgaatgcaggaatttgggaactgagctgtgcaagtgctgaagaaggagatttgtttggaggaaacaggaaaga

SEQ ID NO: 48012 - DNA, 100 bp, Homo sapiens
cgagtgctttgtgatcgaaaccctgaccggatcccataaacactgtcggcatgcatgtagggaataccggattcataaagagctggatcatcccagaata

SEQ ID NO: 48013 - DNA, 80 bp, Homo sapiens
catgagattacagttgtaacttcatagactcccaaagggaaattcttgggaggttttacataaatggagtcctaaacaaa

SEQ ID NO: 48014 - DNA, 82 bp, Homo sapiens
ctccttcggcagtccacccaccgccgccgcctcccaggtgacagagttagtccttgataattgcctgtgtgtcaatggggaa

SEQ ID NO: 48015 - DNA, 100 bp, Homo sapiens
gggaatcgcaaggctcttccctgaccattttctactgtccctgcgcgagtaatgctacagccctttgactatgatccgaatgaaaagagtaaacacaagt

SEQ ID NO: 48016 - DNA, 100 bp, Homo sapiens
ggtgcttggctgcggtgctcacactcatgaggagccggaaggaaccacgtgaatgttgagggggcgacacacaagcaggtggtggacctgattcgagcag

SEQ ID NO: 48017 - DNA, 75 bp, Homo sapiens
gcccggacccaaaacaggaagtactccaaagattcaggtttactcacgtcatccagcagagaatggaaagtcaaa

SEQ ID NO: 48018 - DNA, 73 bp, Homo sapiens
aatgacgtaaaagaccctgtctcaattgaagaaagagcgaacctggagctggttgaaaaaggcttcagtaact

SEQ ID NO: 48019 - DNA, 100 bp, Homo sapiens
ttcgtgaataaagtgcatgtaggtggatgtgaccaaactttccaggtttcccttgggggctttgaaataacaccaccagtggtcttaaggttgaagtgtg

SEQ ID NO: 48020 - DNA, 75 bp, Homo sapiens
caagacctactgtccactctgattcaggcctctgacagctcttggaaggacagagcgggatgccaccagcttgtc

SEQ ID NO: 48021 - DNA, 75 bp, Homo sapiens
tggcagcggcgcgtggccacgtggttcaaccagccggcccgtaagatccgcagaaactgcttggaaactccctgc

SEQ ID NO: 48022 - DNA, 75 bp, Homo sapiens
cgacaaaagaaccattgaaaaatttgagaaggaggctgctgaggatggccaggccatgttatgggatctcaacga

SEQ ID NO: 48023 - DNA, 74 bp, Homo sapiens
cgcgggcgattcgcgtagcctcaggcgtgcaatggaattgagttttgccctggtaaatgggaataatatccgag

SEQ ID NO: 48024 - DNA, 100 bp, Homo sapiens
cgaggcctgagcctctgcgtctaggccgccagatcccacccttggacccccatgaaaatggaaacaatggaacaatcaaagttgagaagccaaccatgca

SEQ ID NO: 48025 - DNA, 82 bp, Homo sapiens
gaagccaaagaactggctaggcaaataagctttaagaaactaatctggattcactccctctggttgatacccactcaaaaag

SEQ ID NO: 48026 - DNA, 100 bp, Homo sapiens
cgtgatttaaaagctgaaaatttacttctggatgccaatctgaatatcaaaatagcagcaatatggtgaaattgaagattgtcagattgatgattcctca

SEQ ID NO: 48027 - DNA, 97 bp, Homo sapiens
cttctggcggccatggtgttgctgctgtactccttctccgaacgtccagttgcggataatgagcgaatgtttgatgttcttcaacgatttggaagtc

SEQ ID NO: 48028 - DNA, 95 bp, Homo sapiens
ctcagcttctcccattccgggtaccagttcgcgtcctgctccaaggactgcactgtgaagggaggatgccatcgctcctgggatctctgagcaca

SEQ ID NO: 48029 - DNA, 75 bp, Homo sapiens
gacgccatgtcgggttattcgagtgaccgagaccgcggccgggaccgaggatcgcaccccctccctccctggcgg

SEQ ID NO: 48030 - DNA, 75 bp, Homo sapiens
ctcgctggggcggggaccttgccttgcccgggcatgtggagagggccaaatgtgaactgtgttgacagcactggc

SEQ ID NO: 48031 - DNA, 103 bp, Homo sapiens
cacacacccccactggagaagctgaagcatgtttttggcccagaggagcctctgctctcttagcggtagagcaaaattcctgaagacaatttcttcttccaaa

SEQ ID NO: 48032 - DNA, 75 bp, Homo sapiens
ctaaagcagacagtgttccaggcacttacagaaaagcagtgggagacatttagtgaacgctcttcaagctcacaa

SEQ ID NO: 48033 - DNA, 97 bp, Homo sapiens
ctgagtgaattggcaccaagccttcccagttatcataaccttgaatggcgactagatgtacagtcaggtagcattggtgctgcagatagtcctgaga

SEQ ID NO: 48034 - DNA, 100 bp, Homo sapiens
ccaaaagctacaagagatattcagccgagacccccccaagacacatatgacccaccaccccatctctgaccatgaggccaccctgaggtgctgggccctg

SEQ ID NO: 48035 - DNA, 75 bp, Homo sapiens
gaccaagagaatgtgtcagccgatgcaccgagtccagcccaggaaaatggagagcttgagatcttcttagcccag

SEQ ID NO: 48036 - DNA, 82 bp, Homo sapiens
caccgggtccctcgcccaggtccccttggacaaatggatgttcctcctgctgatcaagagaagctttttatccagaagttac

SEQ ID NO: 48037 - DNA, 83 bp, Homo sapiens
ctgaacggcagccccaagaacggaaagcagcctcccgcgacgatgcccctcaacgttagcttcaccaacaggaactatgacct

SEQ ID NO: 48038 - DNA, 100 bp, Homo sapiens
gtggttggtgattggcaggatcctggtatccgctaacagatccctcatccacctacatcaggcaactggagagcaaagtgaggctgctggagggtgacaa

SEQ ID NO: 48039 - DNA, 99 bp, Homo sapiens
cacttgccaagactcaggtggccgggggacagctgagtttcaaaggcaagagcctcaaactcaacactgcagaagatgtgtggaaaagccactggcagt

SEQ ID NO: 48040 - DNA, 76 bp, Homo sapiens
gcttgaaatgctacatttccaaggtaggaaacatgagcggcaccaacttggatgggaacgatgagtttgatgagca

SEQ ID NO: 48041 - DNA, 74 bp, Homo sapiens
caccttcgtcaagggcaagatacacgtagaagaatacatgttcacttccagtgaacaagagcatgttcccaaac

SEQ ID NO: 48042 - DNA, 75 bp, Homo sapiens
gaagttgaaaaacgcttttcacgtcacctggagagatgcacaggtctctaattaacagaagatggcaaagcccag

SEQ ID NO: 48043 - DNA, 95 bp, Homo sapiens
tccccaaccccaccatcccaccaaagggggctgctgaccgagagagctcactcagccaggtgatggcatcagctgagaagggaaggaagcccatg

SEQ ID NO: 48044 - DNA, 74 bp, Homo sapiens
atattgatagtacattggccaacttcctagcgatgcatcaaattgcaatttggaggagaggcagcacaagcaga

SEQ ID NO: 48045 - DNA, 75 bp, Homo sapiens
cacagcttctagtgttgctttggatcttgtggaaagtcagagcacgcacagaggctgggctgcggtccagatgcg

SEQ ID NO: 48046 - DNA, 75 bp, Homo sapiens
aaacaacgaccagagacagcagagtaatcaagtcagaggattatatgacttttatctgcctagagaagaactatg

SEQ ID NO: 48047 - DNA, 75 bp, Homo sapiens
gctgttttagagctggcagcagcatctcagcccaagagaagatctttaagcaagcgacaatgaaggcattgcgga

SEQ ID NO: 48048 - DNA, 50 bp, Homo sapiens
atggggcccaagaaaaagcacctggacttcctattttgtaacggattatg

SEQ ID NO: 48049 - DNA, 74 bp, Homo sapiens
aaataaagagaaaaatctggagcagtataatattccacctgctcctacgaagcccgactttgatggtcctcgag

SEQ ID NO: 48050 - DNA, 100 bp, Homo sapiens
ggggcggaggcggaggcagaggtggaggcgctttgaaagtcttgtgaaaatgccattgtgtgctggaaacctggcaagatggaagatgatatagataaaa

SEQ ID NO: 48051 - DNA, 90 bp, Homo sapiens
tgttaaggattccaagtaactcttatttgattgatatcagtaaatgccattatttagtggatttggacaccatgagagaaacaccccggg

SEQ ID NO: 48052 - DNA, 100 bp, Homo sapiens
ataggctggtctgcagtgagcccttggattctagccagcacgactgaaggaggcaccatggctgaggaaacagctccagcagttcttgagcggcaccagg

SEQ ID NO: 48053 - DNA, 51 bp, Homo sapiens
gattggcgctgaggtggcccgtggggcagtttcagtcattcagtcagtacc

SEQ ID NO: 48054 - DNA, 100 bp, Homo sapiens
cccacctgcccggtgcccgaggaggcagccaagctcgtagcctgccactccgtgcgtcaaccacacagtagccctcagcacaatcggggagtccaactac

SEQ ID NO: 48055 - DNA, 90 bp, Homo sapiens
actgcccatcgggctggagcgggcccacctgtgcccttggcattgatctggagaacattgtgtactacaaggacgacacccactactttg

SEQ ID NO: 48056 - DNA, 75 bp, Homo sapiens
ttgctgcaactgaacttgaagatcaaaagctggcaggctgacagaggcggcctcaggacggaccttctggctact

SEQ ID NO: 48057 - DNA, 99 bp, Homo sapiens
gatcactcccgctgcgattcagaagatcatcagaaaagcccttactgaggaaaaacgtgtctcaacaaaaacatcagctgcagatcttgtgacagaaac

SEQ ID NO: 48058 - DNA, 50 bp, Homo sapiens
ctttcagtggcagtggctgtaccaggtactctatcatcacccccaacatc

SEQ ID NO: 48059 - DNA, 50 bp, Homo sapiens
ggcgccgccaccgccgccgctgccaggacatagttgacggcaaggaaaaa

SEQ ID NO: 48060 - DNA, 100 bp, Homo sapiens
ctcacctttaactctccttatgctgggtgaaaacaaaggattttttatcaagcagaaatgcatcgaacaacgagaatcaagatcactgagctaaatcccc

SEQ ID NO: 48061 - DNA, 97 bp, Homo sapiens
gcgtgcgccttgctcgcccgcagccccgagaccgcaggtgccctacgagacgctgaacaaacgctttcgcgccgctcagaagaacattgaccgggag

SEQ ID NO: 48062 - DNA, 90 bp, Homo sapiens
ggaacaccttttaattctccagcgtccaagtctgatagcccttctgtaggagaaacagaaaggttgactacagacaaaaagctgctgcag

SEQ ID NO: 48063 - DNA, 82 bp, Homo sapiens
gctcccgcggagccggagccgcagaggctcccgggctggactcaggcttctcagaagtccattggaatattaagcccaggag

SEQ ID NO: 48064 - DNA, 76 bp, Homo sapiens
tcctgctcgtcacctccgtcacactcactctcttccagcaaggattactacagcatcccatttcccacacccacta

SEQ ID NO: 48065 - DNA, 106 bp, Homo sapiens
cccggtgtgtggcgcgcccagagccccgcgtttcagccctagggaagggggatatgagactttctactcggaatatcctgagtgttgcgtggatgtaaaacccatt

SEQ ID NO: 48066 - DNA, 83 bp, Homo sapiens
ctccgcccagggggtgcgaggataccccacgtgcccagcagagtgccaccgtggccaacccagtgcctggtgccaacccggac

SEQ ID NO: 48067 - DNA, 74 bp, Homo sapiens
gcctcctcctgctgctactgtgtccagcgcagtttttccagaaaggaggagtcaaggaagcccttagtgaacga

SEQ ID NO: 48068 - DNA, 87 bp, Homo sapiens
aaaagagaaacctgggtgaactttcacggacaacctcagaggacaacgaagtgttcgccctggtacctgacagtgtaaagaaggagc

SEQ ID NO: 48069 - DNA, 100 bp, Homo sapiens
cgtacccacagtgcttcatgagaggttccagcagcactgatgtgaaggaaaaccgcaatctggacaacgtgtcccccaaggatggcagcacacctgggcc

SEQ ID NO: 48070 - DNA, 76 bp, Homo sapiens
ggaggcaccaaagtagttctagatgacaaggcagggcctggtcactgaccaagtctcactgcacgtgctagtggag

SEQ ID NO: 48071 - DNA, 100 bp, Homo sapiens
cttcctcaacttcacgctggcgcgagccccgtcctccttcgccgccgcgcacaaccgcacgtgcaggttctcttattcaagtaccttccgttgagagggg

SEQ ID NO: 48072 - DNA, 90 bp, Homo sapiens
aaaagggggaaaatgcccaggaggaagcaggagcagcccaagcgccttccctcacgtgtgggcaagagcagtttactgttgcgttttgca

SEQ ID NO: 48073 - DNA, 101 bp, Homo sapiens
ctagagaagattggacagcaggtcgacactggaaccacctgatatggaccaagatgcccaatcccatgccagtgtctcctgggttgtggaccccaaaccag

SEQ ID NO: 48074 - DNA, 98 bp, Homo sapiens
tgaagtccccagataattccattaagatgcccgaagaggaagacgaggtttgcaactgtgcgatatgatcaaggagccaagaacattcggaaccagtt

SEQ ID NO: 48075 - DNA, 131 bp, Homo sapiens
ctaggatccggaacgctgctgtctggagggggcggcgcggcaggagcgcgttgagggactggccaattcctgtccccccagcagcatggcatcgtgtgctgaaccctctgagccctctgccccactgcccg

SEQ ID NO: 48076 - DNA, 76 bp, Homo sapiens
ctgaaaaggaagttttctggaatggtgaaagagtttctagccaaagccaaagaagactttttgaaaaaatgggaga

SEQ ID NO: 48077 - DNA, 102 bp, Homo sapiens
caaagtgccagcagattcagtgtcatgtgaggacgtgcttcctgcttcatagataagagatattgatgatgctcaaatacttccccgctcaactagagtcag

SEQ ID NO: 48078 - DNA, 103 bp, Homo sapiens
gagaaaggccggcctgcagcacccgccaccgtcgccggccgcccgcacgtccgtccgatgctactatcattcacgatggccatgaggagaagatggaaaatgg

SEQ ID NO: 48079 - DNA, 80 bp, Homo sapiens
cggcgggaacccattcccagtctggaggccatttatttgctgagccccacggagaagaacctcttcgacagcatcaagag

SEQ ID NO: 48080 - DNA, 50 bp, Homo sapiens
aaatatgtcacgaggaatttacaagaggaatttttatgatgataagaaat

SEQ ID NO: 48081 - DNA, 50 bp, Homo sapiens
atgaagaacagtcacaggacaggaagatgagaatgtgcctactgctcctg

SEQ ID NO: 48082 - DNA, 90 bp, Homo sapiens
cccctgggcaggctgaaagatggcggcggcgtctgtctctgcggcttctggttctcacttgtcgagacaggatcttactctgttttccag

SEQ ID NO: 48083 - DNA, 96 bp, Homo sapiens
gtcatcacagtcaactatcgacttggagtactcgtgacttctgacagctctctccatggaaggaggcggcggccgcgatgagccttcagcctgccg

SEQ ID NO: 48084 - DNA, 116 bp, Homo sapiens
aaatggggcctgggggacggtaggagcctccgtgcggagaccactgttcaaggccacaggatggatagaatgacagaagatgctcttcgcttgaatctgttgaagcggagcttgga

SEQ ID NO: 48085 - DNA, 75 bp, Homo sapiens
gacacggccagatctgccctccagtggataagattgtggaccagctgcagcagttaatgcaggtgtatgacttgg

SEQ ID NO: 48086 - DNA, 82 bp, Homo sapiens
ttacagacgctgccagcatcgccgccgccagttggaatcgaagcctcttaaaatggcagatgacttggacttcgagacagga

SEQ ID NO: 48087 - DNA, 100 bp, Homo sapiens
cggtgacctggaccacggcgcagacgcgggcgagctgcggctcggacgccagcggacacgcgggcgagaaattggcgtgttagccaaggctttcattgac

SEQ ID NO: 48088 - DNA, 102 bp, Homo sapiens
ctaaggccccctgcccccttttcctggtgcatgtgaagttatcaaaaacaggtacaagaaaattccccaggacacagagctggtttggagcctttctttgat

SEQ ID NO: 48089 - DNA, 83 bp, Homo sapiens
aagcagccgatccagcctgcggagcctgtggggcaggaatcctgttcacgatgctggtatttggaccagcctgcgggtttatc

SEQ ID NO: 48090 - DNA, 96 bp, Homo sapiens
atggaggtggtgaaattcgtgaactttttgttggtaaatggcttccaaactgcagctaaaataaatgaagctgtagaatgcttactgtccctgaag

SEQ ID NO: 48091 - DNA, 95 bp, Homo sapiens
gacttggacacgtcccagctctctctgggcatctggaaaggttggtcaaagaaaaagtgatgtatgaaaaagaggcaaaacaacaagaagaaaag

SEQ ID NO: 48092 - DNA, 50 bp, Homo sapiens
aggggctggacgttccacgccaaagatataacacgtgggaaccggaggag

SEQ ID NO: 48093 - DNA, 50 bp, Homo sapiens
ctgacatgcccgtcctatatgacagcttccattgaagattgacatcatta

SEQ ID NO: 48094 - DNA, 97 bp, Homo sapiens
caagtctctcgctctgcccaggacgcacagatgagagcgctccgaagactggatacttatccgctttttccccttggagtcctggcagattggcaag

SEQ ID NO: 48095 - DNA, 119 bp, Homo sapiens
aacaccaccactgagcctgcaagcaccatgtctcctccaccagccaaaaaactggccctttctgccaagaagttcccagtgacctgacagcagaggagcgtcaagaactggagaacatc

SEQ ID NO: 48096 - DNA, 50 bp, Homo sapiens
cctccggcgtgttcatgcccccggggtaagtaaggaggtctctgtaccat

SEQ ID NO: 48097 - DNA, 101 bp, Homo sapiens
aaaaaataaactcctatttgtttatggcaaggagattagcagaggcatttcatatcagtgaggattctgatcctttcaatatacgttcttcagggtcaaaa

SEQ ID NO: 48098 - DNA, 101 bp, Homo sapiens
ctcgggtccttgaccgcttcgcacagacatcacagtcatctgcccttgggaggccttcaaccacctggagctgcacgagctggcccaatatggcatcatct

SEQ ID NO: 48099 - DNA, 73 bp, Homo sapiens
tggaactgttggagccgcagtgcagcctaattttgacttcagggacagagcagaatgggctgatatagatccg

SEQ ID NO: 48100 - DNA, 75 bp, Homo sapiens
agtccatgctacctgattgcccccgggtctcagcagggatctatttgtgatgactatatggcaactctttgctgt

SEQ ID NO: 48101 - DNA, 98 bp, Homo sapiens
gagaccaaagctgagctcctccagtctgcctttgacgacccctatgccctggtggtgctggctgaggaggagctggtggtgattgacctgcagacagc

SEQ ID NO: 48102 - DNA, 98 bp, Homo sapiens
catcctttaagaatgagggtgccgaaccagatctaatcaggtatctccatacagccaagaataaagaaagaaagggatagatggaatgagtttcatcg

SEQ ID NO: 48103 - DNA, 75 bp, Homo sapiens
agccgagcacgcgggtctgtcatcatgtcgcgttacgggcggtacggaggagtctctgctttctatccgtcaaga

SEQ ID NO: 48104 - DNA, 75 bp, Homo sapiens
agacaagggcggcagagttgttatttttcagcgtgaacaagaggacgacatagacagcctaaacccagttctcag

SEQ ID NO: 48105 - DNA, 83 bp, Homo sapiens
catattatttggtgcaaccatctccttctcatgtaacacagggtgtccctggccagtgtccttccacctgtccacaagcatgg

SEQ ID NO: 48106 - DNA, 60 bp, Homo sapiens
ccgactccacctgagggactggctcctgggatgccgtagggccaggtgagctgctgtgaa

SEQ ID NO: 48107 - DNA, 82 bp, Homo sapiens
ctgcattgatcaggctgtggtcttcatcgaagatgctattcaggttttaaaatcaaagatgggaaaatcggagaaaattgcc

SEQ ID NO: 48108 - DNA, 98 bp, Homo sapiens
cgagggccagctgacggagatggtgcagaagatggaggagcaagccctcgcagggagcctggtagcaggggccggaagcacagtagagacggacctgt

SEQ ID NO: 48109 - DNA, 98 bp, Homo sapiens
agacagacacgatggatacctttgttgattctgcttggtactacttcagatacactgaccctcataatccacacagcagtcctggccctggaagatga

SEQ ID NO: 48110 - DNA, 50 bp, Homo sapiens
tacctgtgttccagccgggagtcaagaagacacccactgcagacccccag

SEQ ID NO: 48111 - DNA, 90 bp, Homo sapiens
gtcgccggccgcccgcacgtccgtccggtggagccgccaccaaaatgcagattttcgtgaaaacccttacggggaagaccatcaccctcg

SEQ ID NO: 48112 - DNA, 51 bp, Homo sapiens
atgtgttgaagtccaggtttacaaaggggtagagaagatgaagtccatgtc

SEQ ID NO: 48113 - DNA, 100 bp, Homo sapiens
tgggaattgtgcaccgagatctgaaggaaatctgaaatagagtactatgctatgttggctaaaactggtgtccatcactacagtggcaataatattgaac

SEQ ID NO: 48114 - DNA, 112 bp, Homo sapiens
caaaacaccagagcgactttcattagaaggagagcgacagcccaagtcaccagaattttcctgcatggagtgctacatcctcttgttccagtctcagctggctgctccgtgg

SEQ ID NO: 48115 - DNA, 75 bp, Homo sapiens
ttgcttaataaagatacaagtttgcagaaggccctgtctctgcccctggtggtcatcgtccatggcaaccaagac

SEQ ID NO: 48116 - DNA, 75 bp, Homo sapiens
ttaacgtatgccttcttgggaactgccatctcctgcatcgtcataggcctttctgagaaaagtctacagcattct

SEQ ID NO: 48117 - DNA, 90 bp, Homo sapiens
atggtgattgtgaaggacatagacatgttttccatgtgtgagcatcacttggttccatttgttggaaagtttgtgtgtgttggtggaagc

SEQ ID NO: 48118 - DNA, 100 bp, Homo sapiens
ctgggggtggagtctcactactcaagtccaagccttatgcatttgatcgggtgttccagtcaagcacatctcaagagcaagtgtataatgactgtgcaaa

SEQ ID NO: 48119 - DNA, 82 bp, Homo sapiens
tggagaaatttgcccgctaacaggccatctgtgtgagggggatatgagactttctactcggaatatcctgagtgttgcgtgg

SEQ ID NO: 48120 - DNA, 98 bp, Homo sapiens
gacgaggaacgaatgggacaagatcccgtccatgaatcaggtggatgtgaaattggaccccaaggatttgcgaatagatacatttcgagccaaaggag

SEQ ID NO: 48121 - DNA, 98 bp, Homo sapiens
tataatctatgctgggtccagagcattgtccagactggatcagatgtggccgcccagcagttgtgcacataggaggagaaggggccaggtgggaaaag

SEQ ID NO: 48122 - DNA, 100 bp, Homo sapiens
ggagacaaccttacctactctgtgttctacaccaaggaagggattgctaggtactttgatggaaacctggagaagctctttgctgagtgtcatgtaatta

SEQ ID NO: 48123 - DNA, 75 bp, Homo sapiens
gaaggcgattggcatcgatctctccatcccttccgaggcccgacttcgtcataccctaatgatcccagcaagata

SEQ ID NO: 48124 - DNA, 100 bp, Homo sapiens
cgagacaacacttggactcagttcatatcagcagaaaagaggactactgagcccagccaggctgtatgccattgctgccaaagaaaaagatattcaagag

SEQ ID NO: 48125 - DNA, 83 bp, Homo sapiens
ggagactcctgaccctcagaatgaccttcacggcatggtgcaactcccacctgcggaaggcaggcacacagatcgagaacatt

SEQ ID NO: 48126 - DNA, 83 bp, Homo sapiens
cgcttcctgacgcagccgcaggtggtggcgcgcgccgtgtgcttgggaccatggctaaacctcctggatcattagccagaagc

SEQ ID NO: 48127 - DNA, 96 bp, Homo sapiens
cgaagacataaatccctgagtgcccgggaggagccttaacaagcgcacggagccctcaagaacaaattggagctctggcagatcagcatatcattc

SEQ ID NO: 48128 - DNA, 82 bp, Homo sapiens
aaaaggaggccaaagactttgtgttacttgattgggcaagacaatcattggttgcattttataagaaaaagcttgaactgaa

SEQ ID NO: 48129 - DNA, 83 bp, Homo sapiens
agatgagaccgggggaggcgacgctaagttgctgatcgtggcgggaacggcaggagcagctgatgggatatcggaagagaggg

SEQ ID NO: 48130 - DNA, 100 bp, Homo sapiens
ctaacccacccaacctcaccaagaagatgaagaagattgtggatgccgtgatcaagtacaaggacagatctcctcttccttcagcaaaggccagcctctc

SEQ ID NO: 48131 - DNA, 98 bp, Homo sapiens
ttgatgaagaagaagaaactggagaaaaccacaccatcttcattggcccagtagaaaagttcgtattgatcacacttctcggaccctgagttttggat

SEQ ID NO: 48132 - DNA, 100 bp, Homo sapiens
ggcttctgcagatgctaagaagtttatgcaactactgctgccaaccccagagagtcgtcctacgcctgttactatgatgagaagaggtccacgtacctgg

SEQ ID NO: 48133 - DNA, 90 bp, Homo sapiens
gaatcttctgggagctgaggaaccagatatcttgaaaagctgccagaaaggtagatgacattaatgctgataagaatatctcttctgcac

SEQ ID NO: 48134 - DNA, 97 bp, Homo sapiens
ccgaagtaccgacccgagttatgcccaccctccaactttgcgacggaaatgtgtcatcgaaagccaggccccgccagcaggcgaagcagggagatgt

SEQ ID NO: 48135 - DNA, 75 bp, Homo sapiens
tggcctcacacctggatcaggaggattagacaggtgatttggcttctgcacagttaggaggagcaccaaaccgat

SEQ ID NO: 48136 - DNA, 98 bp, Homo sapiens
gccgggcggggcgagggcagctccgcctgtcaggattggagctgctttccgagcacctggaccccaaactcctgtgccgcctgacgcagctgcaggag

SEQ ID NO: 48137 - DNA, 76 bp, Homo sapiens
atgttcagcagcgcggcagagtcatgggggtaccagcaactaaggtttcagagctgaaccctaatgcagaagtgtg

SEQ ID NO: 48138 - DNA, 76 bp, Homo sapiens
tggataacgggaggtgaatttccatgtcaacatagtcctgcatgtagagcgcatgaagtacaggacaataaagctt

SEQ ID NO: 48139 - DNA, 83 bp, Homo sapiens
cgcaaccccagatccatttacactttacagataatttcttgagaggagataactcccgtaaagttcagcaccagcagcagagg

SEQ ID NO: 48140 - DNA, 133 bp, Homo sapiens
cccactgtactggaaaggaaaaccactgcgtctccttatctggacacgtgcaggctgggtcccagcaccatggaggacccgaaccctgaagagaacatgaagcagcaggattcacccaaggagagaagtcccc

SEQ ID NO: 48141 - DNA, 98 bp, Homo sapiens
cctgcatttcattacctcatggatacacctgtttctgtcctctaggaaccactggaatctactgtgaacaagtgctccctaccctcacctcaagacga

SEQ ID NO: 48142 - DNA, 100 bp, Homo sapiens
caccctcctgtatggcacgaaccccctcaaccggcagaaactggacagtaagaaacttctaggtactccaaagattcaggtttactcacgtcatccagca

SEQ ID NO: 48143 - DNA, 100 bp, Homo sapiens
acctgtaacgtcccactggtttggacatattcctctcctgatctggcctcatctgttccagggaggtgggattgagtaaaacctgtttcccagcctggtg

SEQ ID NO: 48144 - DNA, 98 bp, Homo sapiens
tcgacgtcgtgatccagaagtccagagctgaggactgcctgtttgcagactcgagttgccgcgtcgggctgggcgcgccgccgggtcccatggagctg

SEQ ID NO: 48145 - DNA, 50 bp, Homo sapiens
ggaacattccaaaggaaaaatttcaggttatgatgtgattgctcaagccc

SEQ ID NO: 48146 - DNA, 75 bp, Homo sapiens
aaagataaatccaaatactgcatatcagaaacaacagtttgtgaagtgtggatatgcaggctctaactttccaga

SEQ ID NO: 48147 - DNA, 80 bp, Homo sapiens
gcgcgaccgccgaatcgctcctgcagcagagccaaataggaagagctctggtctgcagctcccagtgtgatcaatgcaag

SEQ ID NO: 48148 - DNA, 98 bp, Homo sapiens
ttttgcttcaggtggcttttaatcagattcaaaagggaatttagttttctagatattcttcgattatgggagatgaaagctcaagaagtggagctggc

SEQ ID NO: 48149 - DNA, 75 bp, Homo sapiens
ttcgccatgagtttcctgatcgactccagcatcatgattacctcccaggattaaagcaaggagagccaatcatga

SEQ ID NO: 48150 - DNA, 90 bp, Homo sapiens
cctacctgcggcgtcggcagctgctgctccgagggcagagcggcttgggtaaatccaccttaatcaacaccctcttcaaatccaaaatca

SEQ ID NO: 48151 - DNA, 82 bp, Homo sapiens
ctcagcccacatgcccgctcacctgcgctgtgatgcctgcagagctgtggcttaccagcccacagaattcttccagtccctg

SEQ ID NO: 48152 - DNA, 75 bp, Homo sapiens
gtcaaaattatccgaaaccgcctcactgggctccatctactctttgaagcttctgcccagcttgcattgtttcta

SEQ ID NO: 48153 - DNA, 100 bp, Homo sapiens
aatatggaaacaggaacaggactgactccagtgatgacgcaggccttaaggagaaagtttcaggaagatattcctcgtcagcttgtctacattggtcttt

SEQ ID NO: 48154 - DNA, 74 bp, Homo sapiens
aggtgctgtccaaaaagaagctgatccggcaggccggctttccacaatatgccttccgcatgtctcgtctcagt

SEQ ID NO: 48155 - DNA, 100 bp, Homo sapiens
tgtaaatattttcttgaaaggaaatgtattaagaaaagaatggtttgtcattcattgaaacttcggccctagactctacaaatgtagaagctgcttttca

SEQ ID NO: 48156 - DNA, 100 bp, Homo sapiens
ggagattcaaagtccagcatggagctctgcgtacgtgtcctatgggggcctgctcatgaggctgcagggggatgccaacaacctgcatggattcgaggtg

SEQ ID NO: 48157 - DNA, 100 bp, Homo sapiens
tagacatttacgcggatgtcggcgaagagttcaaccagatcctgataacttaagtgactctctcttttccggtgatgaagaaaatgctgggactgaggaa

SEQ ID NO: 48158 - DNA, 75 bp, Homo sapiens
caacaaggtcttaatgacagatcaggaaaacgggccttactatacatcatatcccccatcaccagatttgtgacc

SEQ ID NO: 48159 - DNA, 101 bp, Homo sapiens
cgaaggagggctctcctgtctgccaccatcctgggttgacaattctacacaaggagtcgtcctcttgagttctggcgccttgactactgggaagatgactt

SEQ ID NO: 48160 - DNA, 98 bp, Homo sapiens
gagcctttttggcctggcttgtttgcaaagatcgccacctgcaacagccggaacgggaacccggcccccaagatcacgtggtatcgcaacgggcagcg

SEQ ID NO: 48161 - DNA, 99 bp, Homo sapiens
agacattctgcgggcgtccaccctggaagccatgagagatgtatgtatgtccctgggaagctgcatgatgtggaacacgtgctcatcgatgtgggaact

SEQ ID NO: 48162 - DNA, 76 bp, Homo sapiens
ggaaagcatatggacaggtctacgccacatcacttagaatcccacgtggcgaagtctcgattttggaattatgcca

SEQ ID NO: 48163 - DNA, 75 bp, Homo sapiens
tcaaagtggctcatccccaaagcgcttaatagagtttgggagttgagtgatattgaccatgatggaatgcttgac

SEQ ID NO: 48164 - DNA, 80 bp, Homo sapiens
ggcatggcggacgaggggaagtcgtacagcgaacatgaaaggctcccggagcagcgctgactcctccaggaaacactgag

SEQ ID NO: 48165 - DNA, 90 bp, Homo sapiens
gagcaagattagtggctgctaaacttgaaccgaaaagtgtcttcgtcaaattacagaagccaaatgctgccatccgagactgtgacagag

SEQ ID NO: 48166 - DNA, 100 bp, Homo sapiens
actggaaagctgaaatccttcgcccggaaattcatcaaaatagctgaaacctttggacttcaagaaaattatatcaaaattgtcataaataagaagcaac

SEQ ID NO: 48167 - DNA, 75 bp, Homo sapiens
gagggactgcaaaagctctcagggatgctggtctggcagtcagcattagtgccagcagtagttcccaagggctgt

SEQ ID NO: 48168 - DNA, 100 bp, Homo sapiens
tttcggagacctgaaaagccctgccggcctccaggtgctcaacgattacctggcggacaagagctacatcgagggaagggggcttgcaggagctttcggg

SEQ ID NO: 48169 - DNA, 82 bp, Homo sapiens
gcagtccacccaccgccgccgcctcccagacccctttgctgatgcaagtaagggtgatgacctgcttcctgctggcactgag

SEQ ID NO: 48170 - DNA, 100 bp, Homo sapiens
ggactgaaacggggggagagaacaatgataaagaagaagaagagaagaaagatgaaacttcgagctcctctgtcttgtaatacaatggcgatttgtaaac

SEQ ID NO: 48171 - DNA, 90 bp, Homo sapiens
agccaccaccgccaccatgtcctaccaaggcaagaagaacatcccgcggatcacgtctgtaagtcctgaagattctgaaaagaaacgcac

SEQ ID NO: 48172 - DNA, 74 bp, Homo sapiens
aagattatgacagattacgccccctatcctatccgcaaacagtccgtaaaagccctgggctcagccagagcagg

SEQ ID NO: 48173 - DNA, 100 bp, Homo sapiens
gcagtacctgcagaaggtctctggagacatcttcagcagatgggttttataggcaagtgaatcaaatcagtggagctcacaatacctcagacaagcaaac

SEQ ID NO: 48174 - DNA, 82 bp, Homo sapiens
gtgaccccagcttccgaaatgcccagcaattctgtggtgttcttggtcacacatttatggagtttctgaagggcagtggaga

SEQ ID NO: 48175 - DNA, 100 bp, Homo sapiens
agctcttattagctgcatacagttctgtcttttggtggaaacagctctactccaacaaccctgggatacagcatcatgcaggcctgctgggccttggagc

SEQ ID NO: 48176 - DNA, 74 bp, Homo sapiens
tctcttctataaaaaacttatgtttgaacagcaaaaatcggttaatttggagtggcccctggagtcagtttcct

SEQ ID NO: 48177 - DNA, 90 bp, Homo sapiens
atcgtggcagaggtcgttagtgcccggatccaccccgaggggcctcccctgaaattccaggtggcagtgctccttttggacttttctcta

SEQ ID NO: 48178 - DNA, 75 bp, Homo sapiens
gcagcacccgccaccgtcgccggccgcccgcacgtccgtccgaaaatgacagatggcgagacctggacaggaaat

SEQ ID NO: 48179 - DNA, 97 bp, Homo sapiens
caatcaggaccattgcaataaaatagaacttccaactactgatcaagcttctgaaattcaggtgacaatgatgctcactgaaagttgtaagctgcga

SEQ ID NO: 48180 - DNA, 100 bp, Homo sapiens
ccagcctgttgctgacactagtgacatggatttgattgacatactttggaggcaagatatagatcttggagtaagtcgagaagtatttgacttcagtcag

SEQ ID NO: 48181 - DNA, 75 bp, Homo sapiens
ggagttcccgtgcctgggtcaggagggcctggacaagatcctagaggtacctttaaaacagggcagaagccttat

SEQ ID NO: 48182 - DNA, 90 bp, Homo sapiens
catcagctggggtccgtcaccgacctttggggaactgttctctgtggacattgactcggagctggtggaggagctgccggccgaaatcga

SEQ ID NO: 48183 - DNA, 83 bp, Homo sapiens
gaaccttcgggcaaacaggattccacagtgtcctctggaaaatgcatcgatttcttccctgtgaaaacaagagcaaggccgtg

SEQ ID NO: 48184 - DNA, 100 bp, Homo sapiens
tttaggtgcttttatattcatctcaaaaacaaaattctgaactcaggacttggcaagacagagcgggatgccaccagcttgtccaaagggaagttccagg

SEQ ID NO: 48185 - DNA, 90 bp, Homo sapiens
gaccgggccctgggctggaggtaaaaccccacggatgacccctccggcgaaggtgtcctgccctcggcccgcggcccagccaccttcctc

SEQ ID NO: 48186 - DNA, 89 bp, Homo sapiens
ggattgtgacatatcgttggacccagaattgaggcataatggttatgaaagcttctgtagatgatgacgattcaggatgggagctcagt

SEQ ID NO: 48187 - DNA, 51 bp, Homo sapiens
tccctgcagtaccctttaacgcttgagtgtgcgtcagaatcccctgaagag

SEQ ID NO: 48188 - DNA, 71 bp, Homo sapiens
gaccgagagcgcgaatatcgtcatcgttagaagtgccttgtctttgaagatgctcccaatggggtggaggc

SEQ ID NO: 48189 - DNA, 74 bp, Homo sapiens
cagcggttccaggaagagaggcagaaactcactgcccaggtaaaaatccaggggcagaacaaggagatgttggc

SEQ ID NO: 48190 - DNA, 141 bp, Homo sapiens
acaggattcagactaaaaggaagagatgtgtacagagcaggaattgctacacactttgtagattctgaaaagtcaggtgccactctttgtgcaaattcaccacaaatggcgaagaatgtatgtaggagaatgtcaaggtcc

SEQ ID NO: 48191 - DNA, 75 bp, Homo sapiens
atcaacagacatttaataacaatggctcaaattgatcaagcagatatgccagcagcagggaatacagcagacagc

SEQ ID NO: 48192 - DNA, 82 bp, Homo sapiens
gaggaaacccactggttgtctaacttggaatctactcattggctagaacatattaagacatcccccatttgagaccaaagcc

SEQ ID NO: 48193 - DNA, 95 bp, Homo sapiens
aaatactgcatatcagaaacaacagggttctgatgactgtcttgtgaaaatatgggcaacagatgatgggaggttgttagctaccttaagaggac

SEQ ID NO: 48194 - DNA, 101 bp, Homo sapiens
gtccatccatttcgtggttcacccgctgccgggcaccgaggaccagctcaatgacaggtggtataagttgaaatccaaaccaggaaagaaggacaaggagc

SEQ ID NO: 48195 - DNA, 88 bp, Homo sapiens
ctggaagtcattcaacgggaattgaataggtggatgccaacataaaatgccagaccagttcacgtgagaatatcttgccgtcagaaca

SEQ ID NO: 48196 - DNA, 90 bp, Homo sapiens
tgtggactgtgtcctcacaacaggaatcagagatcattgatttcttcctgggggcctctctcaaggatgaggttttgaagattatgccag

SEQ ID NO: 48197 - DNA, 90 bp, Homo sapiens
cgtcagcactgactttcagctatggaatcggtctgctgagaacagacccagtccctgaggaaggagaagatgttgctgccacgatcagtg

SEQ ID NO: 48198 - DNA, 100 bp, Homo sapiens
acgaggcggcgggctggagacatggaccgcggcgagcaagaatatggtcttcgattggcaagccatatatttgttaaggaaatttcacaagatagtttgg

SEQ ID NO: 48199 - DNA, 116 bp, Homo sapiens
catgcattgaagaagatggaaaactctacctttgtgtatcaagtcccactatcaaggataagccagtgattgtgaagacaagaacggaatatcagccggaacagaagaacaaaggg

SEQ ID NO: 48200 - DNA, 50 bp, Homo sapiens
agttctgcgtttgaaaggaaacccgttgcagagcttgaagtgaaaaccag

SEQ ID NO: 48201 - DNA, 83 bp, Homo sapiens
caaggggcttacgcagaaggacctggccacgctgagcgggctttggacaccatgaactttgatgtgattaagggaaagccaat

SEQ ID NO: 48202 - DNA, 100 bp, Homo sapiens
aaagatccaaaacaagtggctgcggccgtcgcccaggagtcatcggacgccagaatctgatggtggagccagggcaagatttactgcttgctgctttgag

SEQ ID NO: 48203 - DNA, 89 bp, Homo sapiens
cgaagactgcatcgccaagatcatgagtcacctaaggtcctgcgagtacaagggtcgacccccaaaggcaggggcagagccagcatctg

SEQ ID NO: 48204 - DNA, 100 bp, Homo sapiens
atgacgatgatgatgagccaatctttgttggcgagatatcaagttcaaaaccagcaatttcaagtctggaggcggctggtggaaatccaattccccgcgg

SEQ ID NO: 48205 - DNA, 100 bp, Homo sapiens
gaatggcccttgtggataagcacaaagtcaagagacagcgattggacagaatttgtgaaggtagaacgtcatgacatgaataccttaagcctgcccctga

SEQ ID NO: 48206 - DNA, 98 bp, Homo sapiens
gcgaatatcgtcatcgttagaaggtgttagaggagtccaaatgcctcgtgcggagcttcctgaaatcagtgctggaagacgtgaacgagaaggaatgc

SEQ ID NO: 48207 - DNA, 82 bp, Homo sapiens
cccaaggattctgggggaggcctcagagttgtctgctggttctcagcttgaagaagattctgcagtccttattgatcctttt

SEQ ID NO: 48208 - DNA, 83 bp, Homo sapiens
gccagccttcaatgtgtcctacaccaggcagcccccaaatcccggcccagtcagagcaccataacatggtgtgggaagtgaag

SEQ ID NO: 48209 - DNA, 51 bp, Homo sapiens
caagtacatcataatcggcgacacagtaataagaaacctgactcagaagca

SEQ ID NO: 48210 - DNA, 76 bp, Homo sapiens
ctcacagtgccccacttttaactgaaaaagcatgaaaacagccctggaagtctgccctggcgcctgcactgagact

SEQ ID NO: 48211 - DNA, 100 bp, Homo sapiens
gttttgccacgtggatgtgaagatttcctctaaaagagctccttaataagcatttatagtcagtttttggcagcaatagaatcactaaaggcattctggg

SEQ ID NO: 48212 - DNA, 75 bp, Homo sapiens
agaagaggacctggatgatgatgtcatcctgacagaagttctttgaatcatgctgccagtaagaagcttgacctg

SEQ ID NO: 48213 - DNA, 75 bp, Homo sapiens
ttcgatggcaattttttgtggaacagaattggagcaggtgctaaccggatagtattagaagactccaatatcttg

SEQ ID NO: 48214 - DNA, 100 bp, Homo sapiens
cgatggaggagctgagcgctgatgagaccctacagcttggggcctgggctcctctgaccatcctcattgagaaaggaaagtgagtccagagaagttgatg

SEQ ID NO: 48215 - DNA, 96 bp, Homo sapiens
tgaaaattgtcactggatttaatgggcctctctgtcagtgcagatgtcccgtagggtccgggccctgtttggagccatgaacttctgggccatcat

SEQ ID NO: 48216 - DNA, 75 bp, Homo sapiens
ccacagcccatccccagaagatcctggtcccctgctttaaccatcgaaaatgagacagccgatcgccagtacatg

SEQ ID NO: 48217 - DNA, 96 bp, Homo sapiens
attctgtctgtccacgatagtgccaggcctatgttggagacaatgcagatcttcgtgaagactctgactggtaagaccatcaccctcgaggttgag

SEQ ID NO: 48218 - DNA, 100 bp, Homo sapiens
aactgatagatggtccacatctcaactaacagtattgacgctgtaagagcatcagacactggcttcatgtcctattgaccgtaaaccttttcaggcagtg

SEQ ID NO: 48219 - DNA, 98 bp, Homo sapiens
ggtggcagagtccaccgctgtcccgcggcctggagtacaacgaggtcaacgtcaccctggacctgggccaggtctttaaggaggagaagtacttgaaa

SEQ ID NO: 48220 - DNA, 95 bp, Homo sapiens
gacatctaggaggaaagctggtcatcagtttggagttacatggcggtggtgaagcagtattttccaatttgaagattcatttgaaggtggctcct

SEQ ID NO: 48221 - DNA, 100 bp, Homo sapiens
tgcaattcataatggagctactgtactggctattggaaggaggagattctgaagataaggagagcgcatcagcgaggaggtggggctgctgcagctcctt

SEQ ID NO: 48222 - DNA, 51 bp, Homo sapiens
ctcacctatgtcatggaggaagaggctggagtgcagtggcgtgatctcggc

SEQ ID NO: 48223 - DNA, 75 bp, Homo sapiens
tgaagagggaagacacgcggaaacagctgataccccaatgtccttctttgactttgtggttgatcctcattcttt

SEQ ID NO: 48224 - DNA, 75 bp, Homo sapiens
agtctcagaggacaccattaggctaatagagaaacagatgcctgtgaggagccaccaacatttgaagctatggag

SEQ ID NO: 48225 - DNA, 76 bp, Homo sapiens
actccagcgtgtctccagccgtggtgaggcggaaccaaccctcctggccatgggaggggccgtggtggacgagggc

SEQ ID NO: 48226 - DNA, 100 bp, Homo sapiens
ttccgctcctctgaagagtgaagtgagcaaatacaacccagcagtaggttattgaagacagcagccccagtgggttgccagcgttgatgtggtggagaat

SEQ ID NO: 48227 - DNA, 82 bp, Homo sapiens
caatggccgcgtgtacacacaggcctataatagtgacacgctgttgactaatctccttcagaatcaagcagtgaaaggaaaa

SEQ ID NO: 48228 - DNA, 99 bp, Homo sapiens
atggcttcacaattgaagatgaagaactttctcatttgggatcagcgatatttcctgatgagggccccaaggctgttgcagctcctcgacctgatcggt

SEQ ID NO: 48229 - DNA, 82 bp, Homo sapiens
aaaaactctttgagtttcggagaggagtaaagaggctgaccccgcactacatctacccaccagccatcgtgcagcccagcgt

SEQ ID NO: 48230 - DNA, 83 bp, Homo sapiens
cttcgcggtagctgggaccgccgttcagatctgggacatgagcgatgatgagaccatctgagatggccccgctgtggggctga

SEQ ID NO: 48231 - DNA, 74 bp, Homo sapiens
agggagtgatgccggttatctctgtgaatctcagggctacttctacaagtccgaacagccagtccagcaaaatg

SEQ ID NO: 48232 - DNA, 100 bp, Homo sapiens
aaaagagcaaatgcagcatttttgataggtgcctatgcatattgcctaagtgtaatcttgaacatgggcggtgctgtgagtgctggtgaagacaatgatg

SEQ ID NO: 48233 - DNA, 83 bp, Homo sapiens
caatgggcctttccagcccgtggtccttctccatattcgaggtgctttactccatgaactgtctaatgacggtgctcataagc

SEQ ID NO: 48234 - DNA, 82 bp, Homo sapiens
ccagaagcgggcggcgcgggggagatgtattaaaggtggaagaaggtccatatctttttctgtgggtgcttcaagtgttgtt

SEQ ID NO: 48235 - DNA, 101 bp, Homo sapiens
ccgcaacctcttccaccggcagggcttctcctatgactacgtctttgactggaacatgctgaaattcgctattcaagatctctggcagtggaggaagtctc

SEQ ID NO: 48236 - DNA, 131 bp, Homo sapiens
gttttgctgggacgcctactccaaagcggccgggagtcgcgcttcttccccactcccgagacagatcttagcaaagcaatgtctcaagatggtgcttctcagttccaagaagtcattcggcaagagctaga

SEQ ID NO: 48237 - DNA, 100 bp, Homo sapiens
attgggcagtgcctgtgccaggcaggctacgagaaggtggaggatgcctgccagggagcaagagcagctctacctgaggtcaggtgtggtgtcctctgcc

SEQ ID NO: 48238 - DNA, 75 bp, Homo sapiens
gcgcgggcaggcgggaggcaacggagctaccagccggcaaaatggcaatacctgtgctttggaagtttctggaga

SEQ ID NO: 48239 - DNA, 82 bp, Homo sapiens
tggagagtggcctggctggcaacggcacagtttcttaaacaattaggtctacatcctaactggcaattcgttgatgtatatg

SEQ ID NO: 48240 - DNA, 80 bp, Homo sapiens
gaagctgggaaacccacaggaggcaaccacactagtttaggccaaagatgaagaggaagcctttctggattggagtgatg

SEQ ID NO: 48241 - DNA, 75 bp, Homo sapiens
ccgtgccctggggctgagccctcagatgaggacggggacttggttgccttttccagtgacgaggaattgacaatg

SEQ ID NO: 48242 - DNA, 118 bp, Homo sapiens
agaggttacccagcagaccatagagctgaaggaagagtgcaaagactttgtggacagtcagagtcagagttggaatcagggctacggcaactactggaaccagggctacggctaccag

SEQ ID NO: 48243 - DNA, 88 bp, Homo sapiens
gcgcctctcccaggacccgcctggctgcgagatatggatacccacccaccatcccagggtctacaacatccacagccggaccgtcacc

SEQ ID NO: 48244 - DNA, 101 bp, Homo sapiens
aaaagttcaagctgcaaagctttgctgttcctgttccagctgctccgtggcctggcctactgccaccggcagaaggtgctacaccgagacctcaagcccca

SEQ ID NO: 48245 - DNA, 75 bp, Homo sapiens
tccagatcgggatttacgtggagatcaagcgcagcgatggaacgaatgcaggaatttgggaactgagctgtgcaa

SEQ ID NO: 48246 - DNA, 74 bp, Homo sapiens
ttaaacactgcattgtgttgctgcagattgccaaaggtttactgcgaggaaatgcgtgaagagcggcaagaccg

SEQ ID NO: 48247 - DNA, 101 bp, Homo sapiens
cgaaaacggaagcgcagggagaaggaagaggtgtttgaaaaggtggacgtctgatttatgaagctccccatccacctatctgagtacctgacttctcagga

SEQ ID NO: 48248 - DNA, 82 bp, Homo sapiens
tcagcagggggccagctcaggacacacagacccagctggaactcgatcctcagacagattctaagcctcctgagggattgtt

SEQ ID NO: 48249 - DNA, 80 bp, Homo sapiens
gaaatccatctctgccacagagacagctcaggaagcaactttggggccattgacgtttagggatgtggccatagaattct

SEQ ID NO: 48250 - DNA, 100 bp, Homo sapiens
ctatctcctatctgggtgccatggtctccagcaattcagcactacagtttgtcaactacccaactcaggaacatgcttttgaaagcagccagaaatataa

SEQ ID NO: 48251 - DNA, 96 bp, Homo sapiens
ctcgtcgacatgagtgatgtggaggaaaacaacttcgagggcagagttagcatggcctcattgaaagaactagatcaaagactctttgaaaattac

SEQ ID NO: 48252 - DNA, 100 bp, Homo sapiens
ggcaagcttgatcttattcacgaatctatccttcataagtgcatcaaaacaaaatatgagattacggagcagcgcaagattgatcagaaagctgtggact

SEQ ID NO: 48253 - DNA, 95 bp, Homo sapiens
agaggcagaactgcaggacatctgcaatgatgttctggtttacatgttccaatatgattccacccatggcaaattccatggcaccgtcaaggctg

SEQ ID NO: 48254 - DNA, 121 bp, Homo sapiens
gtgagattaatgaaagaagtcatggaacactatgctgatcaagatgatctggttgtcatgtttactgaatgagttttccgtctgatgaaggttggccatttgcaaagtatcttggagcttg

SEQ ID NO: 48255 - DNA, 74 bp, Homo sapiens
tctcaatgcatctgggaagctacctgcattaagtcaggactgagacgcatctgaaatttggtgccatgactcga

SEQ ID NO: 48256 - DNA, 82 bp, Homo sapiens
aatgaggcgcctgcctccccagcaaatcgagaaaaacctcagcgacctgatcgacctgctgtgttggggtggaagaggagga

SEQ ID NO: 48257 - DNA, 51 bp, Homo sapiens
gttaaggattccaagtaactcttatttgaatcttttaatgggtctcctaca

SEQ ID NO: 48258 - DNA, 100 bp, Homo sapiens
aaaaatggctcggactgtggcggcttcggcggctcaggttgtggtagaggcggaggctcaggcagcttgaggagaaccctgcctatgaggaatatataag

SEQ ID NO: 48259 - DNA, 80 bp, Homo sapiens
tcaaaccttgcttctaggagataaaaagaacatccatgatagcagtcttctgtaaatcgaacttttcaagaattctctga

SEQ ID NO: 48260 - DNA, 51 bp, Homo sapiens
cctggatctgcgatctgtttgtggaaacctggacaagcatgaagaactaga

SEQ ID NO: 48261 - DNA, 122 bp, Homo sapiens
ctactctagggagggggctgtgctggttctgcctgggcagccccacgctgagatgtccagctcgccgctgtccaagaaacgtcgcgtgtccgggcctgatccaaagccgggttctaactgct

SEQ ID NO: 48262 - DNA, 80 bp, Homo sapiens
cggaactacgagtacctgatccgcctcttccaggagtgggagagctgcgggtggaagtggagcagccccatcaccagctg

SEQ ID NO: 48263 - DNA, 100 bp, Homo sapiens
tggtgctgcccagtaagggcgagggcactcctcatacttactgccggctgccccgcaacctcaaccctggcatggcatgtcgggccccaggcctgtggtg

SEQ ID NO: 48264 - DNA, 98 bp, Homo sapiens
gacagtggtcttgccagacaccaaaggaaaatcttatctcttcaatatcatggacactccagcgaccgggacacacagctggcacggctgatgcggcg

SEQ ID NO: 48265 - DNA, 117 bp, Homo sapiens
tagatggccagctttcccccgagggtcaacgagaaagagatcgcttctcttttaaaaggactaaaacatgctaacatagtgctacttcatgacatcatccataccaaggagacgctg

SEQ ID NO: 48266 - DNA, 89 bp, Homo sapiens
gggggctgcggtcggcaaggaagcggagggggccggagaagagagctctggggtcgacacgttacatattattgaagttggcacaccac

SEQ ID NO: 48267 - DNA, 83 bp, Homo sapiens
cagcactgactttcagctatggaatcggagtccaaaactacttacctggaagaccttccaccaccccctgagtatgaattggc

SEQ ID NO: 48268 - DNA, 76 bp, Homo sapiens
ggaatgacaaacaaccagctcttcagtgctggacccaaaggagacaacatttatgaatggaggtcaactatattgg

SEQ ID NO: 48269 - DNA, 100 bp, Homo sapiens
acaacgagcttaagtccctcaccagcaagttcatgaccacattcagtcagctccgagctggaccagctattccttctgttgtggcgtatccgaaaaggag

SEQ ID NO: 48270 - DNA, 122 bp, Homo sapiens
aatcaactgggagaatgtaactgaaagatacatggcttgcaaaaagtaaaccacgatcgttatgctgaaatttcttcaggttgaattacctagaagtttgtcactgacttgtgttcctgaac

SEQ ID NO: 48271 - DNA, 100 bp, Homo sapiens
gaggaggagtccccaggaaagcgcctggacgcagctggtcagtgagaaggtcggaggggccgaggggaccaagctggatgatgacttcaaagagatggag

SEQ ID NO: 48272 - DNA, 90 bp, Homo sapiens
gaagtgattcccgaagaatcaaggctgggccggacccggtggcctggcaacaggatgcgcctgcttcctctgcgccagaagaaggcccac

SEQ ID NO: 48273 - DNA, 75 bp, Homo sapiens
catcttcagcctgctcagcttcgagaagattggctacacaggaatcagagatcattgatttcttcctgggggcct

SEQ ID NO: 48274 - DNA, 100 bp, Homo sapiens
gcagtatcatgctggccaagaagatcatcattaaggacggaggcacggtgaactggcacaaaggttaatctcaagatgccgctagtgaaaagaaacatcg

SEQ ID NO: 48275 - DNA, 80 bp, Homo sapiens
tgccgcgagcgcggcctgcaggagcagaccttgggacctgtgagcgctgcatccaattaaccatgggaagggtcagcacc

SEQ ID NO: 48276 - DNA, 100 bp, Homo sapiens
gtgaccgagaccgtgaccgagagcgtgaccgagagcgcgaatatcgtcatcgttagaaggtagacgggaaagtcagtgtgaatggagagacggttcatag

SEQ ID NO: 48277 - DNA, 98 bp, Homo sapiens
cgggagcacgtcatctccatcgagggtgtggccgacgacgatgccctcgctgaggagcgcatgcggagaggccagaacgccctgccagcccagcctgc

SEQ ID NO: 48278 - DNA, 51 bp, Homo sapiens
agttgccgcagccccaggctgagacagccccatccgatcccttgctttgca

SEQ ID NO: 48279 - DNA, 100 bp, Homo sapiens
acacagcaaagttaacctgacacagaaaatccttgtgcaaataaatgcttaggacacagcgggtcaggaaagattccgaacaatcacgacagcgtactac

SEQ ID NO: 48280 - DNA, 100 bp, Homo sapiens
gatgcgactgctacagggaccatgggacactattacgcaacaggaaaccacccctactcctaatcccccgactacagaagaggagaaaacggaatctaat

SEQ ID NO: 48281 - DNA, 100 bp, Homo sapiens
gttctgccagatgttcctggggttactgtaaatgggaaggacaggcagagctaaacaagccagaggaagagcatttggcctgtgatatcaccggatccag

SEQ ID NO: 48282 - DNA, 100 bp, Homo sapiens
tgagaaattagaaaaggggctaaatgatctacagccttggccttctgaattggagaagcctagaggcaggaaaaaaacgcccgtcacagaacaggaggag

SEQ ID NO: 48283 - DNA, 90 bp, Homo sapiens
tggtggacacttttcttcagaagctggtcgccgccggcagaccctgcacttgatggaccagctggcaccacccagatcaataaactggct

SEQ ID NO: 48284 - DNA, 98 bp, Homo sapiens
cggagtgaccagaggagggacacgccctgtatgatgagattcgtcagtttcgcaaggcctgtggggaggctcatcttaaaactatattagcgacagga

SEQ ID NO: 48285 - DNA, 80 bp, Homo sapiens
atttcttcagatcgttctgattcagagcgaggccataggaaaaggatacagagtagagtttcatgaacctgaaacttggt

SEQ ID NO: 48286 - DNA, 75 bp, Homo sapiens
gcctggtatcgggaggtgccgaacactgcctgggactacggccagggcttcgtgaatgaggagatgatccgggac

SEQ ID NO: 48287 - DNA, 75 bp, Homo sapiens
tcagccaatcagtgacatcattgttggtgagtttgtaagtgatgcccttctcgttcctgacaagtgcaaattctt

SEQ ID NO: 48288 - DNA, 126 bp, Homo sapiens
atgtccgcccaggcgcagatgcgggccctgctggaccagctcatgggcacggctcgggacggtgtcatggagaaactccagctgggcccagagattctgcagcgggaaaatccaaggcttatttat

SEQ ID NO: 48289 - DNA, 90 bp, Homo sapiens
aaatacaaatcacacgcataatggatgaaaggaaccgacagctgatcctacagttaaagacttaatcggaggcttcacggctcttcacta

SEQ ID NO: 48290 - DNA, 100 bp, Homo sapiens
gttggctggaggggctgctgctgggaacacctggagtctccgcgggcagacgcaaacatgcagatctttgtgaagaccctcactggcaaaaccatcaccc

SEQ ID NO: 48291 - DNA, 87 bp, Homo sapiens
gagacctttatgcccaattcaagggaattgaaaaattatatggatctgtgccagttcagaagcaggcgagcctcttccctgatgaaa

SEQ ID NO: 48292 - DNA, 80 bp, Homo sapiens
gggtctcgggggccgctctgggatcccggccaccagcaattgtccggagcagtatagcatcaagttctagaggaattggg

SEQ ID NO: 48293 - DNA, 90 bp, Homo sapiens
tacaggatgcctctcagctgccacctgcctttgacctttttgaagcctttgcaaaaagcaaatcatggaggaagataaaaaacatggtgc

SEQ ID NO: 48294 - DNA, 98 bp, Homo sapiens
gccacaaatgctccttctcctggagacgcaactcaaggtgcggtcttgctctgttgcctaggctggagtacagtggtatgagtatggctcaatgcagc

SEQ ID NO: 48295 - DNA, 83 bp, Homo sapiens
ggagtacgagctcaacggcggcctgcctccgggcacacccggctccccggacgcctcggtgtccctggccagtgtccttccac

SEQ ID NO: 48296 - DNA, 90 bp, Homo sapiens
taacagagaaggattatgaggggttgaagagggtgctccgttccttacagggagaggaaattcgatgtcagtatgttgtgacatgtgcag

SEQ ID NO: 48297 - DNA, 98 bp, Homo sapiens
ttgaatatattggtgaaatgggaaaagactacatttatgccgtaacaccgttacttgaagatgctttaatggatagtatggactttctgtcagatttt

SEQ ID NO: 48298 - DNA, 50 bp, Homo sapiens
ccggggtcccaggaagggcggcccagatcctggtggacctctcaaacccc

SEQ ID NO: 48299 - DNA, 83 bp, Homo sapiens
cttagtcccaccctttttaggcactcttgagaaatcagtacaaggcgagtggataattccaacacaagactggcagtccaaat

SEQ ID NO: 48300 - DNA, 75 bp, Homo sapiens
gcctgatcaaacttgccttcctgttctccaagaccagggggggccctcagcctcttggccttgaacgggctgttc

SEQ ID NO: 48301 - DNA, 75 bp, Homo sapiens
tgaaacagcatctcagacttctttcccagatgtttataatgagggcacacaggaactaccaggttgtttttcaaa

SEQ ID NO: 48302 - DNA, 100 bp, Homo sapiens
tggaatgtggattctgaacttgcaaataaattgtatgaaagatggaagaaatataaaaatggtgacgtctgcaaacttgctacatttgtgatgaacaagg

SEQ ID NO: 48303 - DNA, 82 bp, Homo sapiens
gaactgctgtgcagcccctcagagtaccgcttggagatcctagagtggatgtgtacccggtcactctgtgcggtgtgcactg

SEQ ID NO: 48304 - DNA, 100 bp, Homo sapiens
catggcggacgcggccagtcaggtgctcctgggctccggtctcaccatcctgtcccagccgctcatatggcggctcagcggcagcgggcgctggccatca

SEQ ID NO: 48305 - DNA, 100 bp, Homo sapiens
gtgtggcggaggaacgcagcggccactgcgccgtggtggacggaaacttcctctacgtgtgggggggctacgtggtggattttcggaaaagacatatgaa

SEQ ID NO: 48306 - DNA, 90 bp, Homo sapiens
caaatatttacatgttggttatattgtgccaccagctccagaaaagagtatagtagctttactaatatgctgaagaacaaacagccgacg

SEQ ID NO: 48307 - DNA, 82 bp, Homo sapiens
tacagcttcagaagaccgaagcgttcgtatctggaagaaacgcttcgttaagggactcaggcagtacgggaagaacttcttc

SEQ ID NO: 48308 - DNA, 74 bp, Homo sapiens
aacgaaatggagaaactggaaaagaccctcttcagacttgaacaaggtgtaaatgcagacaaagttggaattga

SEQ ID NO: 48309 - DNA, 75 bp, Homo sapiens
ccaacaccagtggaagatgatcacatcccaggttgatgaccaaatgaagctgcttcagaactgctggagtgagct

SEQ ID NO: 48310 - DNA, 52 bp, Homo sapiens
cgaaggaaagacctttcagtatttgaggttcaacagttttttgaaaaatcct

SEQ ID NO: 48311 - DNA, 51 bp, Homo sapiens
gaagaagtgaagaaattattggtacctgcaacctctttattgtgcaaagct

SEQ ID NO: 48312 - DNA, 83 bp, Homo sapiens
cttggaggtggcattgttgggagcgctgttttcgtgatcttcagaccccaggttctttgtttaagctatgaagaaggacatcc

SEQ ID NO: 48313 - DNA, 97 bp, Homo sapiens
atggctaaattacatattccagtaatggtggatgaagttgttcattgtttgtcaccacaaaaaggacaggaaaaacgtggtcttcgagaaatgcgag

SEQ ID NO: 48314 - DNA, 75 bp, Homo sapiens
cagttttggtagaagatgtggtacacactcagttaattaatctgtaatgcaagaagtgtttgtgggaagcagaga

SEQ ID NO: 48315 - DNA, 51 bp, Homo sapiens
cggcaccacccatcttgagtatctgctgagtcagtgctgattctctcaaat

SEQ ID NO: 48316 - DNA, 95 bp, Homo sapiens
cccgaatccccatcctgcacttccgagccgcccggccacccttcgtcatctgcgtgaagctgtactgccaaatctgtcgaaagggagataatgaa

SEQ ID NO: 48317 - DNA, 100 bp, Homo sapiens
cgtctccaggccccaaggagccacacctggaccagaccccaggaaagtcctcctccgcctcctcctctctgcatgcgcgtcagagcccgtgccaagaaca

SEQ ID NO: 48318 - DNA, 74 bp, Homo sapiens
cccagggaaggcatttccagcccgcccacccaggctcttgcagccaatgccggaacaggatttgctgttgctga

SEQ ID NO: 48319 - DNA, 60 bp, Homo sapiens
caccgaagaggtgagaacaaaatcatgtttgcaatggattttggataaacaagatctgtt

SEQ ID NO: 48320 - DNA, 100 bp, Homo sapiens
gtcaaacttgcgggaattttgcagaaagtgaaattcgttattctacatggaagaaagctgtgatgaagtcaatgggttgggttacaactcaatctccaga

SEQ ID NO: 48321 - DNA, 100 bp, Homo sapiens
gtggtgtcggccaagttcgaggggaaaccgctgcttcagagacacagtggtacaggcatggatgggaagaaatgcagcgtatggatgttcctacctcttg

SEQ ID NO: 48322 - DNA, 83 bp, Homo sapiens
cagtgtgtcttgatgatgagaatgagtttcctcctgtgaatggaggcattgagaacacattagagaaggaggtgatgcagtat

SEQ ID NO: 48323 - DNA, 101 bp, Homo sapiens
gaggtgtgggtgttcgtttctcagcaactttcatcctttgaaacgtgtgctgaaaaagaagaatcagcaaatactactgaaagtgcaatatttgagtatca

SEQ ID NO: 48324 - DNA, 100 bp, Homo sapiens
gcgggttctcaagttaggggagagtttcgagaagcagccgcgctgcgccttccacactgtgcgctaattaaacaaccaccatgtcgagcaaaaaggcaaa

SEQ ID NO: 48325 - DNA, 92 bp, Homo sapiens
ctcagtttgtgcaggacaccgacatggaacagggactcactggggggtcattgatgcagtcattctcagtctcctcggagggagtctgaaga

SEQ ID NO: 48326 - DNA, 71 bp, Homo sapiens
gctgctggaggaaacacctcaggacacggcctacaacaccaagagaatctccggcctgtgaaactgtgagg

SEQ ID NO: 48327 - DNA, 82 bp, Homo sapiens
cttttccgaggaggaggacagcgagcgcagcagtgacggcgaggaggccgaggtttgaacggtgtccccgggagcatctggg

SEQ ID NO: 48328 - DNA, 75 bp, Homo sapiens
tgcagacatctacaaccttcgatctcctgacgaggtttctcctcttcaaaaatctgaagttgttgagatggttaa

SEQ ID NO: 48329 - DNA, 100 bp, Homo sapiens
ccgccgcgggcaggacgcgcgctgcaggtttggtgcacctcgatttggaggaagtagggcagggcccttatctggaaagaagtttggaaaccctggggag

SEQ ID NO: 48330 - DNA, 87 bp, Homo sapiens
aagctgtctgggccaaaggaataaggtaaagcagctgagcagccattttcagatttaccccttctcattgaggaaaccaaactcaga

SEQ ID NO: 48331 - DNA, 74 bp, Homo sapiens
ggctttgttagaaggaatacaaaatcgagggcatggtggaggtcctgattgccataagcagcctcacgtctccg

SEQ ID NO: 48332 - DNA, 98 bp, Homo sapiens
tcttgacgaggctgcggtgtctgctgctattctccgagcttcgcaatgacaaattcctgtcccttgtgccgctatgagctgcccactgatgacgacac

SEQ ID NO: 48333 - DNA, 101 bp, Homo sapiens
cggaaaaggacgcaaagttctccggcgaggtggagccccctgagctgcccgctgatctgcagcactggatctcctacaacgaggccagcagccagctgctc

SEQ ID NO: 48334 - DNA, 100 bp, Homo sapiens
agcgaaccagcctgggagtgggaggatgcgcaggggttttctgcacttctacactcaggattcactccttctccagttgcacagccacacccttcagctg

SEQ ID NO: 48335 - DNA, 90 bp, Homo sapiens
ggaacatttaactgaaagtttattttttgagcagtcgtttcaaccaggagatatgtcagtattgaattctcccagacatcagagctgtat

SEQ ID NO: 48336 - DNA, 83 bp, Homo sapiens
gccgcgagaagcagcgggggggcaggcgatcgaaggttcgagaacttgtcttggacaattgcaaatcaaatgatggaaaaatt

SEQ ID NO: 48337 - DNA, 60 bp, Homo sapiens
atcgcagggctcaggacaaaaagaggaatgagctggaaagctgacttcatgagaccgagg

SEQ ID NO: 48338 - DNA, 75 bp, Homo sapiens
gtccccgccggcttcggcttcagcgccgcgggcccgccaagctgccccctgtgtgctattctttgatgagctgga

SEQ ID NO: 48339 - DNA, 103 bp, Homo sapiens
gcctgcagatcccggctagggcacggaccgcctaggccgagagctacagagacttctgaagtggagagtctgcgacctcctcggttcttcaatgaagatggag

SEQ ID NO: 48340 - DNA, 78 bp, Homo sapiens
aaagacgttctcaaggagaaggcagacctgggtcaaagattctaaactgcctgcatataaggatctcggtaaaaatct

SEQ ID NO: 48341 - DNA, 100 bp, Homo sapiens
gcggagcagcgggcggaggtggaccggatgctcagccccaccagctactggaagtcccttgcccctgatcggtcagatgatgagcacgaccctctcgaca

SEQ ID NO: 48342 - DNA, 88 bp, Homo sapiens
tcttcaggagcgaagagctgcttctgtatcttaaggcaaagggcgttgtgaatacagctgtgtctgcagcagtccaagctgttcgggg

SEQ ID NO: 48343 - DNA, 100 bp, Homo sapiens
atcagcgcggagttaccccagacccctcagcgtctggcatctacagaatgttgctgcgggatgtaaaagctcttaccctccactatgaccgctataccac

SEQ ID NO: 48344 - DNA, 75 bp, Homo sapiens
cgaggcccttatccccttggcattgatcctggcaagtgtccagagaatggctgggatgaaagtacacttgaactc

SEQ ID NO: 48345 - DNA, 100 bp, Homo sapiens
attcagagaaaacctaacccgttagccaatagtaacactagtgctaatgtgtctgagcagttgtccttgaagctcccatcaaatgtggtcaaagaatctg

SEQ ID NO: 48346 - DNA, 75 bp, Homo sapiens
gccctgtctcctcgcagatgagagactaaggtgtcagtatgttcttcaagctgctctgctcctgggcccaagcta

SEQ ID NO: 48347 - DNA, 51 bp, Homo sapiens
tcgccaaagcgacaggagctccttggcccctccgttgtgggtttggctcgg

SEQ ID NO: 48348 - DNA, 83 bp, Homo sapiens
cgatggagggcagcgaagagagtcaccgaccatgacgggcgtggcatacatggaatgttccccctccatttggcagccttaag

SEQ ID NO: 48349 - DNA, 101 bp, Homo sapiens
cagttctgcaaagactgcccttggcccaagagttcttcctaaactacctcagaaaggcttgcagccaatttactggagcagggatgacgtagcccagtggc

SEQ ID NO: 48350 - DNA, 75 bp, Homo sapiens
ggcaaaatgatcaagaatgaagtggacatgcaggctcaggggagagagaaagcccagaaagaaagctactccagg

SEQ ID NO: 48351 - DNA, 137 bp, Homo sapiens
gcggccacggcagcgcccacggccactcccgccgcgcaggagtcgggcaccatcccaaagaagcggttgaaccatatgaaattgccagtattcaactgcttggacttagcaaaatgtcagtttcatatggttaaccc

SEQ ID NO: 48352 - DNA, 75 bp, Homo sapiens
gcctctcagcttcggagaatggagtcttccatcaatcatatctcacaggaatgtatcctgtcaggtataatgtca

SEQ ID NO: 48353 - DNA, 88 bp, Homo sapiens
gaatcatgactcctggagaacggatcaagtgcttattacaggccgggctgggatcatatgggaagcggaagctcatcatgaccagaaa

SEQ ID NO: 48354 - DNA, 100 bp, Homo sapiens
gattggcctatgtcgttatggtgggaggattgactgctgctggggctgggctcgccagtcttggggacagtgtcagcgctacccacctttctgttctgag

SEQ ID NO: 48355 - DNA, 95 bp, Homo sapiens
aatgaagaccacaataaaagagacctctacttagctcagcaattcttaccttccgtgttgaaatccttgtctcctgtagacccagtggaacccat

SEQ ID NO: 48356 - DNA, 75 bp, Homo sapiens
tccacttagaggaacatgttattatacactgcctctaggactgggacagatagccactgagtacctgcttcaaat

SEQ ID NO: 48357 - DNA, 100 bp, Homo sapiens
ccagacactggtggcattacgtagaatccattgatcctgtcactgtcagtataaactcatggattgaactgatggcccactgcgtgaccttggttcagct

SEQ ID NO: 48358 - DNA, 73 bp, Homo sapiens
tttccaagcttccagatgctggattaccagatccttcatggatttaaaaatcaagttggcgatgaaaattgga

SEQ ID NO: 48359 - DNA, 96 bp, Homo sapiens
ccgctccgagtggaggcgactgggggctgaagagcgcgccgccctctcgtcccactttccaggtcttgttcagcgttgcgtaatcatccagaaaga

SEQ ID NO: 48360 - DNA, 100 bp, Homo sapiens
ctgccgtcttctttgcctgcactaatgccaccattggttcaggcaatcttcagcggtgatccagaggagatccggatgctcatccataaaactgaagatg

SEQ ID NO: 48361 - DNA, 80 bp, Homo sapiens
cacttgcatgtatttggaacaaaaaaaggagatgcctggcagccccgctctctgcacacttctaccctagccgggcccag

SEQ ID NO: 48362 - DNA, 50 bp, Homo sapiens
gtcggcgctggggacccgcgagcaatgcacgaaggagagagagtgagaag

SEQ ID NO: 48363 - DNA, 97 bp, Homo sapiens
ctactctgatgtcaatcttgagggctagagagacacatctcaattcaaaggcagcttgctgatctagagaatttagcttttgtaactgatggaaatt

SEQ ID NO: 48364 - DNA, 98 bp, Homo sapiens
tggaattgatttgggaacaactggtcgtcttcagttaatggcaagacttgcagagggacactgcccatctctaagataagaacctggaaaggggactc

SEQ ID NO: 48365 - DNA, 83 bp, Homo sapiens
cgacaagccgctggcagccgcggatctcaccgccgctcaggttgttgacctcctgtactggagagacattaagaagactggag

SEQ ID NO: 48366 - DNA, 82 bp, Homo sapiens
agatggtggctcccggagtccagccctgggcgctgcctatggcacagccaagagcggtaccggcattgcggccatgtctgtc

SEQ ID NO: 48367 - DNA, 100 bp, Homo sapiens
gcccggcgaggagaaccaactggtcccgaaagaggaatgtatacaaagactatcgcttccttgagctggcatgtgattcccaggaggatgtcgacagctg

SEQ ID NO: 48368 - DNA, 98 bp, Homo sapiens
gcggcaggctcaggtgcagccgctgagtggagagatctacagaccaagtaatcaagccagtcaatgtaggagctctatcaaaatgggttgggaagata

SEQ ID NO: 48369 - DNA, 75 bp, Homo sapiens
ggccgtcgaggtccgtgtgcagagactgcagatagtggtgaaggtgactttctagctgaaggaggaggcgtgcgt

SEQ ID NO: 48370 - DNA, 82 bp, Homo sapiens
catcctgctgctgaagatctggaagacgcgctcctgcgccgacctgcctagagctggaacgttacctccagagcgagccctg

SEQ ID NO: 48371 - DNA, 75 bp, Homo sapiens
gcccccggagacagcggcacagaggtgcttctgccaggtacatcaggaacgtctctatcaagaatacaatttcag

SEQ ID NO: 48372 - DNA, 108 bp, Homo sapiens
gtgagaagcaagaaggccctggacacagcaatatctctgggctttcacagagagacaagagagacacctccaacttcgacaaagagttcaccagacagcctgtggaac

SEQ ID NO: 48373 - DNA, 75 bp, Homo sapiens
tccacccaaggtctcctcggatcgcctggagaggcactcggacctggctaatgatgccaaaggaggaaaaacaaa

SEQ ID NO: 48374 - DNA, 75 bp, Homo sapiens
gaaaatacaaatcacacgcataatggatgaaaggaaccgacagttccaatttgagccgctgtgaaaaaggcctcc

SEQ ID NO: 48375 - DNA, 75 bp, Homo sapiens
ctcgtcgacatgagtgatgtggaggaaaacaacttcgagggcagatgagaagcgccaccttcaagtgaacgtcac

SEQ ID NO: 48376 - DNA, 50 bp, Homo sapiens
tccctggacagcccagaccgggaaccagaacattgatgatggcacctcag

SEQ ID NO: 48377 - DNA, 100 bp, Homo sapiens
caagagaatctgaacctcgtctgtattcccacttccttccaggatggtcttgttaatgtaggatggatggactgtgccacccaggataacctttgtaaaa

SEQ ID NO: 48378 - DNA, 77 bp, Homo sapiens
aaagcctttgaactgatgcattctggaaagaggattttctgccgtctcttggcaaaaatggcaaataatgatgctgt

SEQ ID NO: 48379 - DNA, 82 bp, Homo sapiens
cgcagggaccccgcgcggccctggaggccaggctgtgggagaccgagaggctgacccgcggctgattgagtccctctcccag

SEQ ID NO: 48380 - DNA, 98 bp, Homo sapiens
ctgaccaggaagttagtgaatctatggattttagatatctgccagatgaaaaaggtttaacaatgcatgcatcaattcttgcatatatgtttaatttg

SEQ ID NO: 48381 - DNA, 100 bp, Homo sapiens
cttcccagccttcagaaattgccggtctgggagttgggggcaaggagaagatcctggacagacatggtggttctgattgcctgggagatagcccaaatgc

SEQ ID NO: 48382 - DNA, 82 bp, Homo sapiens
aatgaataaaaataagatgatgcctgttcttagcgaggatacaatattacagggaacgggtatggcaatccccgaaactcac

SEQ ID NO: 48383 - DNA, 100 bp, Homo sapiens
aggaccaccaattttcaacagtgtgatggccaggaccaagatgaaacgcatgagggaatctgggtgaggaagacaagtgacagcaccaagatgaggatct

SEQ ID NO: 48384 - DNA, 100 bp, Homo sapiens
ggtgacactcaacaggattcccgagcactgcagtttcctcctgaaggctggctccggctctccctcaataatggcagcatcacccacctggtgatccgac

SEQ ID NO: 48385 - DNA, 75 bp, Homo sapiens
ataatagtgtggtctgttctttcttgccagaagttatctacaaggattcttacagaagcagagattgatgctcac

SEQ ID NO: 48386 - DNA, 90 bp, Homo sapiens
acgacctcggcgaggtgcccaccatcgagtccctgatagggaagtgttcgccagttactacatgaaaagataagagatgcttatactcac

SEQ ID NO: 48387 - DNA, 100 bp, Homo sapiens
tgcggctggtccaggccttccagtacacagacgagcatggggaaggtacaaattctgagctgtctaacccctctgaaacggaatctgagcgtaaagacga

SEQ ID NO: 48388 - DNA, 83 bp, Homo sapiens
ggagttcgtctcttacgtctgcggaagtgcagctgcctcagttcttagcgcaggtgatcagcttgaaattcagctaaccgagc

SEQ ID NO: 48389 - DNA, 96 bp, Homo sapiens
gctcctaaagattttgcagaacagagatgacatgccagcccagactttcatgccaacgcagagagccaacagcagagagaacaactggaacgcctt

SEQ ID NO: 48390 - DNA, 82 bp, Homo sapiens
tatgttcaagatcaaaatgaagactgcctttacttaaacatctacgtgcccacggaagatgtggaggccatagtggagtttg

SEQ ID NO: 48391 - DNA, 75 bp, Homo sapiens
ccccagtgaagctgccagtgaagaaagtaacagtgagatagagcaggtattgatgaagatgaccctactgctgat

SEQ ID NO: 48392 - DNA, 75 bp, Homo sapiens
ctcggagggagcccggcggcttcggggggggccctcagcctcttggccttgaacgggctgttcatcttgattcac

SEQ ID NO: 48393 - DNA, 100 bp, Homo sapiens
cttcattcatgaaaatgcagatccactgagaaagggaataagagagatgcaggtcagctcctccagtaccacaacttctgagagtcaagatccgtcttct

SEQ ID NO: 48394 - DNA, 101 bp, Homo sapiens
ggatagacctattggatatggagcctttggtgttgtctggggaaagtggaagttgaagctgggaaagaaggtatgaagtttgaagcgagcgccttctcata

SEQ ID NO: 48395 - DNA, 100 bp, Homo sapiens
tgctgaaagctgtttggaagaaacaggtggcctgggagtagatattgtcctagatgctggagattttccgcagatttccagtggccccactgatccctta

SEQ ID NO: 48396 - DNA, 99 bp, Homo sapiens
cgagtcagaacccgagtgctgcttggcggcgagttttgcagaatcctgctataggaaaaatggagctgttcggtgcatttgtaacgaaaattatgctgg

SEQ ID NO: 48397 - DNA, 100 bp, Homo sapiens
tggaagagtacaagctgatcctgtccacaggttagcactctacgtatatgaatatctgctccatgtaggagctcagaaatcagctcaaacatttttatca

SEQ ID NO: 48398 - DNA, 96 bp, Homo sapiens
aaatgggtggcaagtaccgccttatggagtatacgggcaaccatggaatcaacaaggatttggagtagactggaaatctgctcaggccagtccatt

SEQ ID NO: 48399 - DNA, 83 bp, Homo sapiens
cccaaacgtcagtcgaatcacaggcaggaggctaaaataaatgaagctgtagaatgcttactgtccctgaaggctcagtataa

SEQ ID NO: 48400 - DNA, 75 bp, Homo sapiens
catcctgagctacatggccccctggtttagggagggatgtgctgggtggcgtcctgatcaccgcactcctcatcg

SEQ ID NO: 48401 - DNA, 50 bp, Homo sapiens
acagctccactcgaggcatctcacagggcaagtgtccagagaatggctgg

SEQ ID NO: 48402 - DNA, 101 bp, Homo sapiens
ctcataaagatctggctggcaagtgagactgctgctcctcgggccattttgaccggccatgactatgaggtcacatgtgctgcggtgtgtgcggagctagg

SEQ ID NO: 48403 - DNA, 82 bp, Homo sapiens
aagcacctggatgagacatttgctacagcatcccacattaagtcaacgccacccacacagaatatgcctatgggtcctggag

SEQ ID NO: 48404 - DNA, 75 bp, Homo sapiens
gcatgatccataatcggtttcaagggctgatctatgactcggtcatgctgaagcaccagtgctcctgcggtgaca

SEQ ID NO: 48405 - DNA, 100 bp, Homo sapiens
cttgctcagttcagacacagcatgagcccaagacctcccaagtttacttgatcgtacaaggacactggcctgagactgtctgcagttgcaccgcagatcc

SEQ ID NO: 48406 - DNA, 75 bp, Homo sapiens
cagatacagagatgtaagcccataccacaattagtcctctggagaatgccatagaaaccatgtccacggccaatg

SEQ ID NO: 48407 - DNA, 100 bp, Homo sapiens
gcccccctctctggggtctcagcctccagcgctgacatcctaggccgcctcgacaggtgtgagatatgcgggtttacctgccgccagaaggcttccctga

SEQ ID NO: 48408 - DNA, 75 bp, Homo sapiens
ctctgatgccgatttgcagttgcagatcctaagtgtgaacgtgaagtccccagccctgctgctgagccagttgct

SEQ ID NO: 48409 - DNA, 75 bp, Homo sapiens
tgtgcccacaccagaagccatcagcagcaagctttcccatggtttggcatggacattgggggaactctagtaaag

SEQ ID NO: 48410 - DNA, 100 bp, Homo sapiens
tttcttatggagaactgtccttgttgaagttaaatgaagttcgaaagagattgaatgagctaagagaattagttcattattatgaacaaacgtcagacat

SEQ ID NO: 48411 - DNA, 90 bp, Homo sapiens
ttccagctcacccactgccagcagagggtctcactgtgtcatccagagctggagtgcagcggcacagtcatggctcactggaactcaggc

SEQ ID NO: 48412 - DNA, 82 bp, Homo sapiens
agctggaaccctggggactacgacgtccctcaaaccttgcttctaggagataaaaagaaactatgttccaacttcctgtcaa

SEQ ID NO: 48413 - DNA, 88 bp, Homo sapiens
gagggactgggagtcgttagtgagtaattcgccaaaatgacgaacacaaagggaaagaggagaggcacccgatatatgttctctaggc

SEQ ID NO: 48414 - DNA, 75 bp, Homo sapiens
cggaggggaggaagtgagtatgagcgtagagtggaacggggataccagaaggccctattgatcaggggccagcta

SEQ ID NO: 48415 - DNA, 90 bp, Homo sapiens
ttccacgtggcttgggtggacccagaagacccccacaaaggtcctgcagttctgagcttgggttccctttgcctggacaccaaccaagcc

SEQ ID NO: 48416 - DNA, 83 bp, Homo sapiens
gttccctaagaaggtctgcccaggactcaggtctcctctgagcctccggcctccataagacccaaaacagatgacacctcttc

SEQ ID NO: 48417 - DNA, 100 bp, Homo sapiens
cattcacaaggcagctcgctctgggagcctagaatgcatcagtgcccttgtggcgaatggggctcacgtcgaggtgtcaaattgagaaccaggtagatcc

SEQ ID NO: 48418 - DNA, 80 bp, Homo sapiens
ggccaatgaagaactgcggcagaaatttgagtactatactggcaattgctggagaagattttgcaattgttgcttctgat

SEQ ID NO: 48419 - DNA, 101 bp, Homo sapiens
ggcattgacccatagcctggtcctgcattacggtctctataagaagatgatcggcactctggccgtgctggccctgcagctggcaaggcagatccacttcc

SEQ ID NO: 48420 - DNA, 85 bp, Homo sapiens
tggggccacgctggtctgggatagttgggcagggaggagggtcacgcagcacaatgccagctctgcccctggaccaactccagat

SEQ ID NO: 48421 - DNA, 100 bp, Homo sapiens
atggcggatgccctgcagtacctgcagaaggtctctggagacatcttcagcaggtcatccccttctaaatgcccatcattagatgataggtggtacatgc

SEQ ID NO: 48422 - DNA, 97 bp, Homo sapiens
gtgtgccagctgctagaaaacagggaagatattagccaatatggaattgccaggttcttcactgaatatgacactacctgagaagcctgttaaacta

SEQ ID NO: 48423 - DNA, 75 bp, Homo sapiens
gccgtagcgtcggtgctggaagacgaggccacagacacttctgatagtgaagtggaagaagttgttccgaatgta

SEQ ID NO: 48424 - DNA, 83 bp, Homo sapiens
atggagcctctctcctctgcaacctgataggatttggctacccagcctacatctccacctggctgagcacgcagacactgtgc

SEQ ID NO: 48425 - DNA, 98 bp, Homo sapiens
agccagctcagcatcttcctcctctcagtcggagacccccgagccagggatgccagatgatatgaacttcagtgatgtaaagcaaatccatcaaacag

SEQ ID NO: 48426 - DNA, 100 bp, Homo sapiens
tggttcgatggctgccgcggctacgctgaggctctccgctcagacgaagttatacggaagcgtctcctcattgatggagatggtgctggagatgatcgga

SEQ ID NO: 48427 - DNA, 75 bp, Homo sapiens
acagcacagaggcagcgccacctcgcttggtcactcctggaagcaaggcggctctagctaatttatgtattggag

SEQ ID NO: 48428 - DNA, 98 bp, Homo sapiens
ttgaaccattctacatcccagacaaatggaagtgttatgatgcccttcgaaaaatgatcaactattgaccatatagggggtccactggacggggcctg

SEQ ID NO: 48429 - DNA, 96 bp, Homo sapiens
gcatctttgggcagccattgagattatacggaaccagaagcagattgccaacattgaccgtattacaaacatgatggaagtggttcattgcatgat

SEQ ID NO: 48430 - DNA, 75 bp, Homo sapiens
ttccattgaatgggctgaagtggtgatcaatgtgaacaatattctcaagctaagcggtacatcgagacggaccca

SEQ ID NO: 48431 - DNA, 90 bp, Homo sapiens
cgcggtcgcagtctccacggcgcaggcccacggtagcgcagccgctctgaggaggaggaagccaagaatctggtgagcgaagccatcgca

SEQ ID NO: 48432 - DNA, 90 bp, Homo sapiens
attgactttgatgagaacactgctctggatgatgcagaagaggagtcctttaggaagactttgccttcaaaagaaacagcatttttaaac

SEQ ID NO: 48433 - DNA, 100 bp, Homo sapiens
cgcttcttgaatttctctctgtaaaggaggtatcattgcccagtgcctaagatcttttatgttcagctcactgtaggaaataatgaattttttggggaag

SEQ ID NO: 48434 - DNA, 75 bp, Homo sapiens
atgaggaagtactgagcctgttggaggaactggcccggaaacaggaggactgacctgaccaacggtgcagatggg

SEQ ID NO: 48435 - DNA, 100 bp, Homo sapiens
caaagcctgcgcgagaggagccgggacacgcctagcgcgggctccagtgatcagggccaaagcggtcagtgagaaggaagtggactctggaaacgacatt

SEQ ID NO: 48436 - DNA, 50 bp, Homo sapiens
cttaacaatccacctaagaaattcagagcaccacccagctatgcagaagt

SEQ ID NO: 48437 - DNA, 90 bp, Homo sapiens
gcaaaacatggaatcatcaggaagtctgttctctggggaggcagtaaggggccgtggagctggcctcggcctcggcatcgggagaggctg

SEQ ID NO: 48438 - DNA, 114 bp, Homo sapiens
ccttacgacgggttggggatggcgtgcagcgcaaccacgagacggccttccaagatcaagagactgaaatctcatccttctatcatcatatggagtggcaataatgaaaatgag

SEQ ID NO: 48439 - DNA, 75 bp, Homo sapiens
ccttggcctctcctgggatcggcccaaggccagttctccgcagatcaggcctttgtgacactaaccacaaacgat

SEQ ID NO: 48440 - DNA, 83 bp, Homo sapiens
ggctgaggagaggggagcttggggggcgcctgctgccaaggcaccgaacaagatttgtgatgaaatggagcctggaacaaact

SEQ ID NO: 48441 - DNA, 82 bp, Homo sapiens
cacctaaagttaggcggcactccagccccagctcggcagttccggcgaggggggagcctcagcaggattgctgtgtgaaaac

SEQ ID NO: 48442 - DNA, 75 bp, Homo sapiens
acaaaggaaggggagcccgggacccccgggggcgcaggttaatttggagtggcccctggagtcagtttcctacac

SEQ ID NO: 48443 - DNA, 80 bp, Homo sapiens
cctgtgtgacaccaagataagtaacgtctataagaaggagaaagctcgagtcatcactgaggaagagaagaatttcaaag

SEQ ID NO: 48444 - DNA, 100 bp, Homo sapiens
gaggtggtcaagatgcgcgtgaagcaggaggagaagctcagcgcagccctgcaggccaagcgcagcctccaccagcgggctgacgcacgaggcacacagg

SEQ ID NO: 48445 - DNA, 72 bp, Homo sapiens
cccatggagcgacgcctggtggagcagctcttcagctcaggtggtggaggaggtcccgaacgtgtgcacaga

SEQ ID NO: 48446 - DNA, 82 bp, Homo sapiens
agagaacttaaaggacatgatcttccttctgaaagactcgcttcccaaaactgaaatggtttttagaacttcagccataaaa

SEQ ID NO: 48447 - DNA, 90 bp, Homo sapiens
tggccactggcggccgaggtagaggcagtggcgcttgagttggtcgggggcagcggcagacccaacatgagtgaagtttcctgcaagaaa

SEQ ID NO: 48448 - DNA, 100 bp, Homo sapiens
cgcagctggatgtaccgcatgtgatcactctgggactcgtggggctgcagcaccgtaacaaatgtggcaattattttggatctatcacctgtcatcataa

SEQ ID NO: 48449 - DNA, 100 bp, Homo sapiens
tggttttatggcgcctctactttctggagtttgtgtaaaacaaaaatattatggtctttgtgcacatttacatcaagatgctcccataatactctcagat

SEQ ID NO: 48450 - DNA, 82 bp, Homo sapiens
ttcagaaacttagtctggttgcagtaaagcaacttttagtgaatttgcagccaagcatgctaaagattcaagattcaaagca

SEQ ID NO: 48451 - DNA, 75 bp, Homo sapiens
ggaagactgtttaggctcctagcaaaattgggaacaatcaatgagaggccggaagaacgtttgtctgcctgatga

SEQ ID NO: 48452 - DNA, 75 bp, Homo sapiens
ccaggcttcctccttccaggaatcattgagacttgctaatctggacctgaactctgaaaaacagagtggaggagc

SEQ ID NO: 48453 - DNA, 100 bp, Homo sapiens
aaactatggaccaaatccaagaccagtttaatgaccttgttatcagtgatggctcttctctggaagatcttgtggtgctggagaatgccgaaggtgccag

SEQ ID NO: 48454 - DNA, 74 bp, Homo sapiens
acgactgttctcggtcccggcacagggaccagcgtgatggggttcgctatcctgatcgcatcacactgatccgg

SEQ ID NO: 48455 - DNA, 82 bp, Homo sapiens
aaccatcgcagttggaagcccatggggcaggtattaatctctggagaagacacatccacagttagcactttcttcagatgct

SEQ ID NO: 48456 - DNA, 99 bp, Homo sapiens
ggaaatctggaaccgggatggcgacgtctacactgagtcggaggcgaagactgattcttgctattccaaatcctcttccacgttgacagcccttcagat

SEQ ID NO: 48457 - DNA, 100 bp, Homo sapiens
gtccctgatggcctcagaggaggaggagcagctcctgaagcagcagcagcagcaccagtggcagcagcatcaacagggctctgcccctcctaccccagtg

SEQ ID NO: 48458 - DNA, 74 bp, Homo sapiens
attgagccagaaggaagacaatgctggacaggaagatgtcacccaagcgcatagctaaaagaaggtccccccca

SEQ ID NO: 48459 - DNA, 82 bp, Homo sapiens
aagaattcttgctacacactgcttgagcaaaccagtccagctacgggggcccagccagccagcagctgagtgggggttacgg

SEQ ID NO: 48460 - DNA, 97 bp, Homo sapiens
atgaagaggctttcaaagtacagctgctgtaagtaaagatgattccattatttcaagtcttgatgtcactgatattgcaccaagtagaaaaaggaga

SEQ ID NO: 48461 - DNA, 112 bp, Homo sapiens
actgtggtcactcaactgctagtatataatggtgtttaccaaagtgtcattgttgcagcaaaaaagtcagcagtctcaccttccacctttaatacaagcatacctaccaatg

SEQ ID NO: 48462 - DNA, 100 bp, Homo sapiens
agagaggcctcccggctcgacaagttcaagcagctgcttgccggccccaacacggaccttgggtattgcaggttccgacggtcttcctggggataaagga

SEQ ID NO: 48463 - DNA, 99 bp, Homo sapiens
ttaattggtcctgctgaagctcactcagattccctcattgatacctttcctgagtgtagtacggaaggtcagctccgccgaaggcgccgccaaggaaga

SEQ ID NO: 48464 - DNA, 98 bp, Homo sapiens
ctacgacccagacactggcctggtgctcctgaccggcaaggtcccagcatttgagggtgatgatggattctgtgtgtttgagagcaacgccattgcct

SEQ ID NO: 48465 - DNA, 82 bp, Homo sapiens
gttgtacaggcccacgccagacacgacgtctggcaggaacctcggcctcagagggcccttccagagaaatgtactgaaaaag

SEQ ID NO: 48466 - DNA, 90 bp, Homo sapiens
agttctgcgttttgccagtcacctctcaactgtgtgccaaagaaatttgaagatgacatcacctattggcttaacagagatcgaaatgga

SEQ ID NO: 48467 - DNA, 75 bp, Homo sapiens
cgtggccctgctggaggcctcgctgaggaacgacgccgaggaagggtcctgaggacaccgtgagccagccaggcc

SEQ ID NO: 48468 - DNA, 90 bp, Homo sapiens
ctcaccaagaactgggaggtggacgtggcggcccagctgggcgagtatctggaggaggatcatccagcagctcgtcaacggcatcatcac

SEQ ID NO: 48469 - DNA, 75 bp, Homo sapiens
ggaaatgaacggggagcagcagcttgatgcaggaagtggttctgaaagatggaagaattgaaagactaaagttag

SEQ ID NO: 48470 - DNA, 50 bp, Homo sapiens
gctgccattagatatgctgtcaaccttccgccctgcgctgccagtctcct

SEQ ID NO: 48471 - DNA, 83 bp, Homo sapiens
gtgatagcggcagcgaggggctcggagaggtgctcggattctcgtagctgtgccggttcagaatgaccgaagaagcatgccga

SEQ ID NO: 48472 - DNA, 83 bp, Homo sapiens
tcactctggaaccaaatgccttactataagctccgaagaagtatgcctaacctagcccggatgccaagtacaactgccattag

SEQ ID NO: 48473 - DNA, 100 bp, Homo sapiens
ctgtccttattatcggaccccgaggatcaggaaaaactatgtatgttgcccatattatgaccctgaagttagtaagcacctctgttacgataagagaaaa

SEQ ID NO: 48474 - DNA, 90 bp, Homo sapiens
gaccttcacggccactggccagaggtacttcctcaagggccaccttatcttagttccagaatttagtcttcctttggaatactacctaat

SEQ ID NO: 48475 - DNA, 95 bp, Homo sapiens
caaataagttatgctatgaggatgacaaactctggagtaattggagccaagaaatgagtatagggacaggagagagtggcaagagtacgtttatc

SEQ ID NO: 48476 - DNA, 83 bp, Homo sapiens
tgcagaaggtctctggagacatcttcagcaggctcagctgtcgcaggccctggaggagctgggaggccagaaacaaagagcag

SEQ ID NO: 48477 - DNA, 112 bp, Homo sapiens
ctgactacgatgaggtcccagaggaggggccgggggccccagccagagtgatgaccaagaaggggctgaggaagctgccctcgaaaccctccagaagacatctgtcctgcag

SEQ ID NO: 48478 - DNA, 96 bp, Homo sapiens
gcagccgttcgtgctgcccgtgggcgtgagctccaggaatgaggactacccccgaacctgcaggatgtgcaagagtgagccatggagctacgtgtg

SEQ ID NO: 48479 - DNA, 75 bp, Homo sapiens
ccggcccacagtgggggtgtgcaaacccgagagaactggtaagtacaaggtggactgtgcatgcctcaaagaaaa

SEQ ID NO: 48480 - DNA, 100 bp, Homo sapiens
ctggagaaagtgcaaagtagattcgtagtctcccaacatttgattcgtcctctgatgggcatgagtctggcattacagtgccaagtgagggagctagcaa

SEQ ID NO: 48481 - DNA, 100 bp, Homo sapiens
cccatcttgatcttacagaatcagaggtgcagccgcaagaaaggatgaggatgggacagaagaggataacagtcgtgttgaacctgttggacatgctgac

SEQ ID NO: 48482 - DNA, 90 bp, Homo sapiens
tgttcagttgcaaaaagaaactggagccaccatcaagctgtctaagtccaaagatttttacccagtttgcctgagaatacagatcaaccc

SEQ ID NO: 48483 - DNA, 102 bp, Homo sapiens
ctgcgaaataccttgatgaggatacaatctaccacctacagccaagtggcagatttgttattggtgggcctcagggattttttaacctggccctgctaatcg

SEQ ID NO: 48484 - DNA, 51 bp, Homo sapiens
tggaaagctcgggacaggatgaacactctgctccagccaaggtggtgaggg

SEQ ID NO: 48485 - DNA, 100 bp, Homo sapiens
gtgactgtgatccccggtgcgctccaattaaggaacagctatatcctgcttccttctgtaagcagcatcgacttgtgcaagggttcagtcatgcagccac

SEQ ID NO: 48486 - DNA, 100 bp, Homo sapiens
gccagcgacccaccatggagacccgctacaacctgaagagtccgggtgtggacacctcaagatcgccagtgtgtcctgagtaccttagcacagttgcttt

SEQ ID NO: 48487 - DNA, 51 bp, Homo sapiens
tgcatctctacctggaactttgccggtgaatgaaaactttgccattgattt

SEQ ID NO: 48488 - DNA, 100 bp, Homo sapiens
atcactgttgaagattttatggaattggagaaaagtggtgctctcctagaaagtgggacttatgaaggtttcacaccactaatcctggcagcaacagcag

SEQ ID NO: 48489 - DNA, 97 bp, Homo sapiens
ccacaggaggctgtgcgggccccgctccgcttcgaatggtctgctccatctggacacaagcatctgacggtagaagagttatttggaacctctttgc

SEQ ID NO: 48490 - DNA, 80 bp, Homo sapiens
acctcaggagggaattcagcctcagtgatgtccatgaggtggccagcatcgaaatgttcagccttttagtgatgaagatg

SEQ ID NO: 48491 - DNA, 98 bp, Homo sapiens
cccagctgttcctctccttgaaaagtcaaggcttggttcaagccagatagcacctgaggacagaacatatcagaacctgtgagaagtttctacaatgg

SEQ ID NO: 48492 - DNA, 75 bp, Homo sapiens
acaaggccattttctcaaacgagagtcagcctttaacgggcaagtgtccagagaatggctgggatgaaagtacac

SEQ ID NO: 48493 - DNA, 75 bp, Homo sapiens
agcaatgtcgtttccagtatggagcaacctcccgccaatgtaaatatgggcattgaagataatgatgatgacagc

SEQ ID NO: 48494 - DNA, 82 bp, Homo sapiens
ggagactttagctgtaaggaggagccagaaattgacagcccaggggcaaaatgatgcttcaacacccaggccaggtctctgc

SEQ ID NO: 48495 - DNA, 82 bp, Homo sapiens
gcgcctagccctaccggactacgagtatctggacacactaaagggcaccactgaggatgacgtgttgacaggtcaggtggag

SEQ ID NO: 48496 - DNA, 74 bp, Homo sapiens
atttcctggccgctcctgggcttcgcgaaaactgctgcagatggaaaaaggcaagagatcattgttctggattc

SEQ ID NO: 48497 - DNA, 76 bp, Homo sapiens
tccattctttgtcgtcttcctctcagaatatgtgggttatcaatagtctggctgtctatcgtcatcgtgagactga

SEQ ID NO: 48498 - DNA, 75 bp, Homo sapiens
agtcccatcactccaaggagagaagtgaaaccagcagtgtgtgtagcagcagtgacactgggctctttaccaatg

SEQ ID NO: 48499 - DNA, 100 bp, Homo sapiens
ctgtactttactttagggcaagctttttaggatttccaatttccaagcctgatgggatctcccagctggaacaggatctacaggtctttgatctggaaac

SEQ ID NO: 48500 - DNA, 73 bp, Homo sapiens
aatgtcacaaaagcggatgttgaaaaggaatatgctgaatttcagtatcggaggaggcacagacaacgtcgtc

SEQ ID NO: 48501 - DNA, 100 bp, Homo sapiens
ctgggagcagaggaagccttgaggacctactcacagataggaattgaagacttcccaagtaagaagcggaagaggagccgctggaaccaagacacaatgg

SEQ ID NO: 48502 - DNA, 74 bp, Homo sapiens
tttgtgactgggtccacgcgagtcccgctccaaggcttcaaggctttgcaagcaaaccagtccagctacggggg

SEQ ID NO: 48503 - DNA, 89 bp, Homo sapiens
gatattctggtggggagatgaacccaacctagtgggtgtaatacatcatgaactgcagggtgctgatattcgtggcttcagtgctccta

SEQ ID NO: 48504 - DNA, 100 bp, Homo sapiens
tcacctgaaacagaggaggggcaacctgagttatcagaaagtgacttcctggccttcccttctttactgatcaggtcatcatcagatttgaaatatttaa

SEQ ID NO: 48505 - DNA, 82 bp, Homo sapiens
aataaaaaagaccaaagagaccttcaggtgggggaccttaggcttgcattgcagcgtacagaacaagcggctgccagaaagg

SEQ ID NO: 48506 - DNA, 82 bp, Homo sapiens
gaacagctacgcatagaagccgggattgagcgcatcaaggccagcatccttcagaaaaagcatccccgaggaggaagacgaa

SEQ ID NO: 48507 - DNA, 101 bp, Homo sapiens
tcaaatggcacttcattggccacctacagaaacaaaatgtcaacaaattgatggccaaaactggacaagccaaggcatctgtagccaaagtaaacaaatct

SEQ ID NO: 48508 - DNA, 82 bp, Homo sapiens
ctgaatggctttggtggcatctgcctaacgttcacttcactcacgtttacaggctgtgcatttggatcagctgctatttggc

SEQ ID NO: 48509 - DNA, 50 bp, Homo sapiens
agccaatcccaggaggaaaaacggccatgagagaagcagtaccttataat

SEQ ID NO: 48510 - DNA, 74 bp, Homo sapiens
ccacccaggaacctcgccatccagaaatccgagtgaagcctgacaggaccggtgtggtcacggatggtgtgaag

SEQ ID NO: 48511 - DNA, 80 bp, Homo sapiens
gcgcgaatatcgtcatcgttagaaggaccatggccaacctggagcgcaccttcatcgccatcaagccggacggcgtgcag

SEQ ID NO: 48512 - DNA, 74 bp, Homo sapiens
aggctcctgctgttcggcaggtcaatccccaaaataggccagactttggcagcgtgtaaggtctgaggacaggg

SEQ ID NO: 48513 - DNA, 75 bp, Homo sapiens
agccaggaacatggactgaagtatccagcgctcattgggaatttagttaagtgtgtagcccacaatgccctggag

SEQ ID NO: 48514 - DNA, 100 bp, Homo sapiens
tcacaacctggaagctcagtggttacttctctttccccaggagaagctgtaaagaaatgattccttcagggttaccagaacttacaagtattcaagattt

SEQ ID NO: 48515 - DNA, 101 bp, Homo sapiens
agtagcgacccggggggagcgcggggcgacgctggctgcagggacccggtgacagcgtgagaggttcgcagagtgagtgaatctggattgggaaagtcgac

SEQ ID NO: 48516 - DNA, 90 bp, Homo sapiens
tgttcaacaccctcttcttgaactggtgctgtctgggcttcatagcattcgcctactccgtgaaggaagagcctaaaaggcggcaacacc

SEQ ID NO: 48517 - DNA, 50 bp, Homo sapiens
atcttggtgtttggacataggaggttcattcatggcattggacgatccgg

SEQ ID NO: 48518 - DNA, 99 bp, Homo sapiens
ccgcacccgccttttctctctctcctctggcaggatgaggcgtgcaggcctggcttccttcaaaatgtctactgttcacgaaatcctgtgcaagctcag

SEQ ID NO: 48519 - DNA, 82 bp, Homo sapiens
cattgagtgttttcacatctttgaacaaagagaaggatctagtttgaagcactaagaagaataagacatcagtttgaaaaga

SEQ ID NO: 48520 - DNA, 75 bp, Homo sapiens
gaaagagacttttttctaaagaatttccacttacttacatgatcatttcgagagatgtaatgttgattgctgctg

SEQ ID NO: 48521 - DNA, 75 bp, Homo sapiens
ctgatgaagatgatgacgatgatgatgaagaggatgatgatgaagagtcaccttccgcaaccctgtcattgagag

SEQ ID NO: 48522 - DNA, 74 bp, Homo sapiens
acgtcgaggggacgattggaatgacaggagtccccagagccaggcagggggatgaaccgcgagggagctcccgg

SEQ ID NO: 48523 - DNA, 75 bp, Homo sapiens
ccaagatggcggcggagctggtggaggccaaagttaatttggagtggcccctggagtcagtttcctacaccatcc

SEQ ID NO: 48524 - DNA, 100 bp, Homo sapiens
cctgctcagaggactctatacagggacgtgatgctggagaattataggaacctggtctccctggatctgacaggatggcatctgatgactttgacatagt

SEQ ID NO: 48525 - DNA, 100 bp, Homo sapiens
cggagccggcgtggcgctcatcgagggacgcccggcccaagtgatataattgaccctgcaatcctgcgcccgggccgcctggacaaaacactgtttgtgg

SEQ ID NO: 48526 - DNA, 83 bp, Homo sapiens
ggctgagcagaggacgacatgttgcttttcgtggaggaaataatgcaaaaggtgtcccaaggctcctgaccagtgaacaaaga

SEQ ID NO: 48527 - DNA, 100 bp, Homo sapiens
gaaaataaagaagattccatccctgaatgtagattgtgcagtgctcgactgtgaggatggagtggctgcaaacaaaaagattagcctgaggcctgctcag

SEQ ID NO: 48528 - DNA, 74 bp, Homo sapiens
gctccggaaaggggacacctgattatcaacgcctgatgactgtggcagaaggcatcaccacacttttgttccca

SEQ ID NO: 48529 - DNA, 100 bp, Homo sapiens
tgggggctgaagagcgcgccgccctctcgtcccactttccaggtctttcactaccattcctacagtgattggcaagataccgtttctacctcactctcca

SEQ ID NO: 48530 - DNA, 100 bp, Homo sapiens
atggttgagctcatgttcccgctgttgctcctccttctgcccttccttctgtatatggctgcgccccaaatcaggcatgagtacagtaccagaagttatc

SEQ ID NO: 48531 - DNA, 89 bp, Homo sapiens
ggagacaacgccttaacccaaggaagtgactcaaactgtgagaacttcaggttgcaataaattgacagaccagaccctgatctacctac

SEQ ID NO: 48532 - DNA, 83 bp, Homo sapiens
ctggaatcacccgggtcgctgttcctgagacgtccttctatggccgcttcaggcacttcttggatatcatcgaccctcgcaca

SEQ ID NO: 48533 - DNA, 82 bp, Homo sapiens
aagtgtttgatccagtaccagttggagtaaccaagtaatgtatcctgcatatgcaaaatgggtacagtcacacagagacctg

SEQ ID NO: 48534 - DNA, 100 bp, Homo sapiens
acgaccccgaactccaggacagcatccaggcctcattggacagcattcgagtaagactttgaccccgacgcaggcttcagtgattgccgcggatcagaag

SEQ ID NO: 48535 - DNA, 75 bp, Homo sapiens
tgtgaccctgcagctcctcaaattcaaaaggtgatgacctatcaacagccattctcaaacagaagaaccgtccca

SEQ ID NO: 48536 - DNA, 98 bp, Homo sapiens
ttcttcctagagtgggcaagatctttagaaccacaactcaggtttgacttgtggcttttcatggcctgccactgaaaatcaagaaagaaccccacagt

SEQ ID NO: 48537 - DNA, 100 bp, Homo sapiens
acaagatggtcacgtgcattgcggtggggctgcccctgctgctcatctcgctggccttcgcgcaggagatctcgattgactgaacattcttcacgatctg

SEQ ID NO: 48538 - DNA, 111 bp, Homo sapiens
cacatcgtgacagtcaccattaacggagatgatgccgaaaacgcaaggccgaagccaaagccagaactttgcagaaaacaccatgaatgaactccttggctggtatggcta

SEQ ID NO: 48539 - DNA, 50 bp, Homo sapiens
atcaattattgacacgcccaaggtcctgaggtattttgactatgtgttca

SEQ ID NO: 48540 - DNA, 50 bp, Homo sapiens
agcgcttccgcaccatcacctccacaactgataaatttcaaacggaagag

SEQ ID NO: 48541 - DNA, 82 bp, Homo sapiens
caacaatgcctctgttcaaactcccagctgtgagtacccaggaagctgcaccgtgtggcctggagctgtctatctgtccttc

SEQ ID NO: 48542 - DNA, 101 bp, Homo sapiens
cgagaattaaatgccgagaaggccagtacgaaggacagaataacgggctcccagattcacaagccccaccaagaggatcaccccaggaacgcttggaggct

SEQ ID NO: 48543 - DNA, 100 bp, Homo sapiens
ccggccgctctcccctcctctcacggcacctcccaccatgaagatcactgtcgtcttcctgaaagatgagaagtaccattctttgcctatcatcattaaa

SEQ ID NO: 48544 - DNA, 75 bp, Homo sapiens
agaactcaaggtcttcatagaccagaaccttagtcccgggaaaggtatggcctcacaagtcttggtctacccacc

SEQ ID NO: 48545 - DNA, 96 bp, Homo sapiens
agcgtttcttgcaagaatgggagaccaggtccagggaacagtcaccatccggaacatcagtgccctgtcttcaggtttgtaccagtgcgtggcttc

SEQ ID NO: 48546 - DNA, 89 bp, Homo sapiens
tgatgaagtaatacagaactgccccatcgatgtgcggcgtccgctgtataagatccagacatttaatgtggatgcaccatgccagaccg

SEQ ID NO: 48547 - DNA, 99 bp, Homo sapiens
cgcaagcgaggcagccatgtcttatcccgctgatgattatgagtctgagtacatccagcagtggtcattcgacaacgaaagtcataccgtagaaaagat

SEQ ID NO: 48548 - DNA, 80 bp, Homo sapiens
cccaaggcaattgatcccaagttgtcgacgaccgacagggtggtgaaaggaagaagaaattgtcgagacgaataacatga

SEQ ID NO: 48549 - DNA, 156 bp, Homo sapiens
ccaccatcttcggtctttactcttcaactgacaacagtaaatattttgaatttactgtgatgggacgcttaaacaaaggcattgaatgccccagaggagcccgaaacctcccaggcttggtgcaggaaggagagcccttcagcgaggaagctacac

SEQ ID NO: 48550 - DNA, 75 bp, Homo sapiens
ggatatggtactcctgatggtttgggtggttatggacttggatgttgtgggtgatggtatgcagtgtcctccttc

SEQ ID NO: 48551 - DNA, 75 bp, Homo sapiens
ctcgcggaaagaaatgcttctttgtgaaattttttggaacagaagatcagttcgcctaacccctactggtcataa

SEQ ID NO: 48552 - DNA, 50 bp, Homo sapiens
ggtcaggtctggagctcgaccgggccagcgacatctcgaatcagcgatgc

SEQ ID NO: 48553 - DNA, 83 bp, Homo sapiens
gctggagcctcaggcggcagcgcttctagagatatagatcagctatcaggaagggacttctgccattcaaagaaaatgacagg

SEQ ID NO: 48554 - DNA, 100 bp, Homo sapiens
agcaatcctaccatgtcagccttcccagtagctggaactacaggccaatgagtgccaggagcgccctgttgagtgtaagttctgcaaactggacatgcag

SEQ ID NO: 48555 - DNA, 89 bp, Homo sapiens
ccattgcccactgctgccgcccagtgttatccagatgcagaggtgtgccttcatgtactgaggcttgtccagtctgtggttctggaacc

SEQ ID NO: 48556 - DNA, 90 bp, Homo sapiens
cctcccagcctgacctggctctttcgcccctcggagaaccggttcaaaccttgtactactcagctgatcacaagctgcttgatgggaacc

SEQ ID NO: 48557 - DNA, 101 bp, Homo sapiens
agaaaaaggaagattggactatgctaaggaggatttgttggtattgaggaaaacggtgaaatcctttttggctgtttgccagcagtgcctgtctaatgtta

SEQ ID NO: 48558 - DNA, 100 bp, Homo sapiens
gttctcacggatctggccaacaagacgcacccgtccatcttcgggatcttcgacgggcacgggggagagagtaacagactagctagagacaatgaattaa

SEQ ID NO: 48559 - DNA, 101 bp, Homo sapiens
gaagaatagagccataaagaaagcaaagcgcagaaatgttggatttgaaaacacccatctcggctttctcgcaagataacatctatgaagttcagccccca

SEQ ID NO: 48560 - DNA, 100 bp, Homo sapiens
aagatggaggggcctttgtccgtgttcggtgaccgcagcactggggaaacgatccgctcccaaaacgtcataccctaatgatcccagcaagataatgtcc

SEQ ID NO: 48561 - DNA, 102 bp, Homo sapiens
aaattgatattttgatgaacaatattgaacgctatcttaagagagaaaaggaacagttccgtaagctctttattggtggcttaagctttgaaaccacagaag

SEQ ID NO: 48562 - DNA, 100 bp, Homo sapiens
aatagcccttgaacagctatgcatgctgcttttgatgtctgacaacgtggatcgttgttttgaaacgctagtcaagtggagcagtgggagtgaagatgga

SEQ ID NO: 48563 - DNA, 98 bp, Homo sapiens
gccggagtgagaagcaagaaggccctggacacagcaatatctctgggctttcacaggtactactgagcgagtgtgcttgatccagggaacggttgaag

SEQ ID NO: 48564 - DNA, 82 bp, Homo sapiens
tgatctacaagaaaatccacaagaacgcactttcctcccagattggcggcagtaagcacacaatgaatgatcacctgcatgt

SEQ ID NO: 48565 - DNA, 100 bp, Homo sapiens
cgcgagcggagcggcgcgtgggtcggttgcggtcggccccggcaggaggcaggtggaagtcatcataaagtttctgtttcacccgtcgtccatgttcgag

SEQ ID NO: 48566 - DNA, 50 bp, Homo sapiens
tgggggccggggcgcgtcgcaggatccattccaaggagcacttcaaggag

SEQ ID NO: 48567 - DNA, 139 bp, Homo sapiens
caaaaaatgaaagagaaacaagaaaaactgaaagaagatgagcaaagaaattcaacggcagatatatctattgggacttcttgggcctactttatatgctgaagtcggagacatcataaaagttcactttaaaaataag

SEQ ID NO: 48568 - DNA, 74 bp, Homo sapiens
atgatgacgatgatgatgaagaggatgatgatgaagatgagtgtgtccgcttgaaaccaactgacatacagccc

SEQ ID NO: 48569 - DNA, 75 bp, Homo sapiens
gctgcagcatcaagcccgaccgagcccaccactgcaggaaataactacgtgtttgccagattactacaagtggac

SEQ ID NO: 48570 - DNA, 99 bp, Homo sapiens
tccagccgagaggacgcggctgtgatatacgaaggatgatgacctggaagaaggtgaagtgaaggaccccagtgacaggaaggtgaggcctcgtcccac

SEQ ID NO: 48571 - DNA, 80 bp, Homo sapiens
cagggagcccaccgggcgggcctggccaaggatgccggctccaggagcagcagtggaggtcgggaacgcctcattgtgga

SEQ ID NO: 48572 - DNA, 100 bp, Homo sapiens
caggactgccggccctgcagctgccttctgccccaggggagtaggttgcatctttgttgaaatgatccaaggagttgctgcttttccaggaatgaaagac

SEQ ID NO: 48573 - DNA, 100 bp, Homo sapiens
gccatggggagcctcagcggtctgcgcctggcagcaggagcgaatacaggctgatgaagtgattgcaattctggatcaagaacagcaagggaagcatgaa

SEQ ID NO: 48574 - DNA, 74 bp, Homo sapiens
agctctggtacacgctggacagagcccctgaaggtacggctcctacctggtctggaaagagctgggaggcttca

SEQ ID NO: 48575 - DNA, 50 bp, Homo sapiens
gcccacagacctcaaattcaaaggttctgatctacaatggccaactggac

SEQ ID NO: 48576 - DNA, 74 bp, Homo sapiens
caactctcagtgaaagtgccaatcaggtctttctggtgaacagggatattgtgtcaggcctgaaatacgttcag

SEQ ID NO: 48577 - DNA, 75 bp, Homo sapiens
cgcagggcctgcagcgggagctggacggcgagcgcgagcggcgcgagaaagtgttttccgagtacttcaaggagc

SEQ ID NO: 48578 - DNA, 90 bp, Homo sapiens
gcaggaacagcacccggacggactacgagtaccagcactccaatttgtatgccatatcagacggaaaaggcgtaacttcagtaaacaggc

SEQ ID NO: 48579 - DNA, 82 bp, Homo sapiens
gcaagacgctgcccgccatcgagcgggagatacagatgacccaccaagaattactcagaaccctgtgatcaatgggaatgtg

SEQ ID NO: 48580 - DNA, 78 bp, Homo sapiens
acgactgtaatcaggttgtcaaaccgcaggcatttcaatcacattatggagctccttcccttaacagagctgagagag

SEQ ID NO: 48581 - DNA, 87 bp, Homo sapiens
tgccttgagagcttcaggggaaatggcttcagcgcagtatattactgcaggatttaagtgccctgtatgctcaaaatttgtatcctc

SEQ ID NO: 48582 - DNA, 100 bp, Homo sapiens
ctagaagcttgcagaaaaattggtgtacctcaggggcaattccaaaagtcttcagatttccaaaaggaaggactgcagcagacatttctgcccccagaaa

SEQ ID NO: 48583 - DNA, 89 bp, Homo sapiens
ggcggcggaagtggccggcgagcccggtccccgccggcaccatggaacctttaactgaccagagtgctcattaaacgatgagaagtatt

SEQ ID NO: 48584 - DNA, 101 bp, Homo sapiens
cgccgggcaggcgggacatggaggtggtggacgagacggaggcgctgcagcgcttcttcgaagccatcctggtgatcgagttcatctacgccatcgtgggc

SEQ ID NO: 48585 - DNA, 90 bp, Homo sapiens
ggtctggagacgccgtggcagcctgaacggagtgtgcgacggattgggagggaagtaccactgcccagtgctgtttaccgtgttcaccaa

SEQ ID NO: 48586 - DNA, 75 bp, Homo sapiens
catcaaagctttgcgcaacgccaacctcaggcgagatgacccctttgctgatgcaagtaagggtgatgacctgct

SEQ ID NO: 48587 - DNA, 102 bp, Homo sapiens
gctccggaagtgaagcggccagaccaccagctaatggatgcggagcggagggcccgctgaccgctctccgcgcctggagtctcacactgtcacccaggctgg

SEQ ID NO: 48588 - DNA, 82 bp, Homo sapiens
agacgctctgaactgactgccccgcatcaccggagcgtcccagctgcgaggaggttttttattggcacctcagtctcaacat

SEQ ID NO: 48589 - DNA, 100 bp, Homo sapiens
cttcaactcttggcctcaagtgatcctcctgccttagcttccaagaatgctgaggttacaggagctcgaggccatgagcagatataccagcccagtgaac

SEQ ID NO: 48590 - DNA, 99 bp, Homo sapiens
tgccggaaaaacaccttggcccgccggaagggcaggcacatgggcataggcagtggcagaagagcatttggcagtgggtatcgcagggatgatgactac

SEQ ID NO: 48591 - DNA, 95 bp, Homo sapiens
tactcgcccaactgcctcagaggacaggtgaatctggattgggaaagtcgacattaatcaactcattattcctcacagatttgtattctccagag

SEQ ID NO: 48592 - DNA, 75 bp, Homo sapiens
cccatggctcactatgtgcctgatatcatgccaattgaatctgttattgcaagctatgagtctgtcaatgtgacc

SEQ ID NO: 48593 - DNA, 80 bp, Homo sapiens
gatgtggtggcttccgtttgttggtggaggaggtggcaggcctcggcggtggtattaaagataatcaaacattatcaaga

SEQ ID NO: 48594 - DNA, 98 bp, Homo sapiens
gggcagggtctgggtctttatcgtggagtgaccttcacaatggcatcataggattcagtgaggagtcccagagtggactagaactcagggaaggagct

SEQ ID NO: 48595 - DNA, 74 bp, Homo sapiens
cgacctcatgccaaagaccatcatgcacctcatgatcaacaatgctccttggcgatcccagcaccatccatccg

SEQ ID NO: 48596 - DNA, 88 bp, Homo sapiens
gtcggccaactgagcgagggggccattgcggacactcatgaggaccatgatacttccactgagaatacagacgagtccaaccatgacc

SEQ ID NO: 48597 - DNA, 92 bp, Homo sapiens
gacgtcatcagcctggtggacaagtaccctaaggaggactcggagataagcttcggaaggagtatggggccaatgtgcttcctgcattcccc

SEQ ID NO: 48598 - DNA, 100 bp, Homo sapiens
ttggggtcagcatagctatagacaagatatctgctgctgtcctcaacatggaggaatctggcaattgaaggaacagactaaaaatcgtgtcctggaagga

SEQ ID NO: 48599 - DNA, 82 bp, Homo sapiens
ctgtgggtgctgggacttcccgtccgcggcgtggaggctgctcagatggaagataaaaagccctttatcctgtcttccatga

SEQ ID NO: 48600 - DNA, 82 bp, Homo sapiens
cttgatctccgccaccgtcttcaggccagtgcagagcagagcgggcggaggaccccgggcgcgggcgcggacggcacgcggg

SEQ ID NO: 48601 - DNA, 98 bp, Homo sapiens
aaggatcatcatataaactcctggtagaacaagcaaaactaaagcaggccacttcaaaggttcaaaccttgtactactcagctgatcacaagctgctt

SEQ ID NO: 48602 - DNA, 75 bp, Homo sapiens
tccatttgatcaccatggcacacatgcttcagatactacttacagtagacacagccctctggaccccgaggttgg

SEQ ID NO: 48603 - DNA, 95 bp, Homo sapiens
gatttctatttgactggcaatagtctgaaatggtggagtcaatgaagaaagtagcagggatggatgtggagctgacagttgaagaaagaaacctc

SEQ ID NO: 48604 - DNA, 80 bp, Homo sapiens
tatgaaggcaacagcaatgacatccgcgtggctggcacaggggcctgcttgaatttcttgaaactgtgcaaaataaaata

SEQ ID NO: 48605 - DNA, 88 bp, Homo sapiens
gttctggaacgggactttgcagaaatgtgtgcagactacatggcatctaccataggggcactcaaggagttgcccctggtcctgtaat

SEQ ID NO: 48606 - DNA, 75 bp, Homo sapiens
gaaaaagaaacgaggaccaaagccttcaaaaatatttacaccagcagctccagttcataccaataaagaagatcc

SEQ ID NO: 48607 - DNA, 75 bp, Homo sapiens
agagatatctgcaatgatgtactgcgtcaagggttccacactgttgggagtcgctgcaagaatcggacaggcgct

SEQ ID NO: 48608 - DNA, 74 bp, Homo sapiens
ctacatcggcagctaccagcagtgcataaacgaggcgcagcgggtgaaggaacggagctttgactgtaagatct

SEQ ID NO: 48609 - DNA, 96 bp, Homo sapiens
aacgaggcaaggagctaaagcagcgtgcgttcagccctggggctggttgaactcatggacctgatacttttctcttgagaagcaaaccagcccaaa

SEQ ID NO: 48610 - DNA, 73 bp, Homo sapiens
gccgccgtcatgcagtccccggcggtgctcgtcacctccaggcactcagaatggtccagcgtttgacataccg

SEQ ID NO: 48611 - DNA, 100 bp, Homo sapiens
ctcaacccaaggctctaccagcagcatggggcaggactctttgatgttgatgaaaaaaccgtaggagaacctggttggctttatggtagttttcaaggaa

SEQ ID NO: 48612 - DNA, 74 bp, Homo sapiens
aaacaatagctcaaggaaacctttccaacacagatgtccaagctgccaatgggatgaagctctcttgactatga

SEQ ID NO: 48613 - DNA, 75 bp, Homo sapiens
tcggtgctgcagacggcgagacctcctgcacagaggagcccaaggtgggcatcaagaccatcaaggtgtactgcc

SEQ ID NO: 48614 - DNA, 98 bp, Homo sapiens
gtggatgcaccatgccagaccgtggaagatttaacgaatggggttgtgatggcccaggttcttcaaaagatgaagaccctgttcccaatggcctccgg

SEQ ID NO: 48615 - DNA, 83 bp, Homo sapiens
cccggagcccctttagccatgtggatacctacggagcacgagaaatacggcgtggatgaaggatttgggggcagagcacttgg

SEQ ID NO: 48616 - DNA, 98 bp, Homo sapiens
aagcaaacctttacatagcagtggaatcaatgtaaatgcagctccattccaatccatgcaaacgctcccattgctatcacatgttttaccagaggctt

SEQ ID NO: 48617 - DNA, 78 bp, Homo sapiens
aaagatgcagaggatgctttgcagaaacttcataaatatatgcaggaccctaaagtaaattggttgaagaaattagat

SEQ ID NO: 48618 - DNA, 100 bp, Homo sapiens
gcgctcgcgggccggggcggagggttcggctgcgcggcggggctgaggcggccgcggggcccgagcgcaggaagccttggaatcctgccagactcgcatt

SEQ ID NO: 48619 - DNA, 98 bp, Homo sapiens
acattttacagaataagtcagatgactttctgtgtgctggagaatctggtaaaagcaccattgtgaagcagatgaggatcctgcatgttaatgggttt

SEQ ID NO: 48620 - DNA, 100 bp, Homo sapiens
gcactcaatcagaaagagagctccaaggagaaaatccagaagagcaaaggcgatgatgccacattacctgttaatgactccagagagtaagatcagattc

SEQ ID NO: 48621 - DNA, 100 bp, Homo sapiens
gactcaagaggctcggagaaccagcttggtctcctttagcattggaaacaccaaatcgggtatccttgggacagttatggttagagctgcttaaattcta

SEQ ID NO: 48622 - DNA, 100 bp, Homo sapiens
cggactcgtggagttgtgaacgccgcggactccggagccgcacaaaccagggctcgccatgaagccaggtgtcgtgaaaactacccctaaaagccaaaat

SEQ ID NO: 48623 - DNA, 75 bp, Homo sapiens
tgtctggtaacggcaatgcggctgcaacggcgagacggggtctgactgtgttacccaggctggtcttcaactctt

SEQ ID NO: 48624 - DNA, 100 bp, Homo sapiens
ggactagtcatggcagaagacctccaacctgtcatttactccatcctttatagtgatgctacaggacgaagaggaatggataaaaacattggcgagcaac

SEQ ID NO: 48625 - DNA, 119 bp, Homo sapiens
ctggcctcgtgcggcggcgaccggagaatccgcatctggggcacggaggatatgagggaaggcaccattggagatatggctatcctgggtataacagaaagttttcaagtgaagcgaca

SEQ ID NO: 48626 - DNA, 74 bp, Homo sapiens
catcgtagctgttcattttgaaaactgccagtgataatatgcagcatgcatactgggaactgaagagagaaatg

SEQ ID NO: 48627 - DNA, 90 bp, Homo sapiens
catgtcagctctcgagtccatggtagatcagaagttccaggggtcagtatcatttaaagatgtgactgtgggcttcacccaggaggagtg

SEQ ID NO: 48628 - DNA, 100 bp, Homo sapiens
gaatttgagctagcaattgtagctggagagtttacagattctgaaattatggtgatgctgggggaaaatggtgctgactgggttacttttttaaacacta

SEQ ID NO: 48629 - DNA, 96 bp, Homo sapiens
agggctacacatttttcatcccttccggtggctccgctgccggatgggagtgccccagtgtgctggatgaagctggcgcatgcaccatgtcatcat

SEQ ID NO: 48630 - DNA, 100 bp, Homo sapiens
gatggacaagagacgatcattctgcaagcaggcaacctgaatacagacccaagtcttggattgaggaacaggcaatgggatcattcctcagtgtggccaa

SEQ ID NO: 48631 - DNA, 100 bp, Homo sapiens
caaatcaaatcagaaagacatccttcggaatgtgttcagaacggcgatgccagtccctccactccagaggagaacgaaaccacgacaaccagcgccttca

SEQ ID NO: 48632 - DNA, 83 bp, Homo sapiens
aaacagtgtctgatcttaggggaacaaataggtgtgcaactgaggaacatggctcaagaaactaatcacagccaagtgcctat

SEQ ID NO: 48633 - DNA, 82 bp, Homo sapiens
cgaaaaactgattgactgggctggcgttaactgtgcggaggcaggttttaaaatcaaagatgggaaaatcggagaaaattgc

SEQ ID NO: 48634 - DNA, 100 bp, Homo sapiens
catatccgtggacctccatatgctcataagaacccacacaatggacaagtggctctgtacaactcaatcaagaatgagaagcttgaatgggcagtgtaag

SEQ ID NO: 48635 - DNA, 75 bp, Homo sapiens
caaagagcccctcatcgagctcttcgtcaagatcatgcatgcattttcagttgctccttttgaccagaatttgtc

SEQ ID NO: 48636 - DNA, 98 bp, Homo sapiens
tttggagcaggcgctgggcgagccgtgcgatctggacgcggcgctgctgaccgacatcgaagctggtcctgtctctgctgtgctgacagagctgcgtt

SEQ ID NO: 48637 - DNA, 74 bp, Homo sapiens
tatatcgtggtaccaaaagaaggatcacagtcaccttctatatagcaccatccccaggatgcaggagccggggc

SEQ ID NO: 48638 - DNA, 100 bp, Homo sapiens
atggcgagtgctttgtgatcgaaaccctgaccggatcccataaacactgtcggaatcatcctatgaccatagggagaaccatccttaatatgaagccaac

SEQ ID NO: 48639 - DNA, 82 bp, Homo sapiens
cccaggtgtaagcgcagaaagcaggcgaacccgcggcgcaataacggcataatcaccagcaacacccgggacaataatacgg

SEQ ID NO: 48640 - DNA, 51 bp, Homo sapiens
ggagcagccgccggcgcctaagaggaatgtatcctgtcaggtataatgtca

SEQ ID NO: 48641 - DNA, 74 bp, Homo sapiens
gaggctccgcaccagccgcgcttctgtccgcctgcaggatgtacagttacccagcacgtgtacctcctcctcct

SEQ ID NO: 48642 - DNA, 100 bp, Homo sapiens
gatgcagttgatcactgatattccactctttttataggcaagcaataaacagcaagatgtttgaggtggatatgaaaattgctgcaatgcatgtaaaaag

SEQ ID NO: 48643 - DNA, 50 bp, Homo sapiens
ttgcagctcgggcaaatctggaggaccttctggaccctgcacggtggcgg

SEQ ID NO: 48644 - DNA, 83 bp, Homo sapiens
cgttcttccaagaaaccaacattcccaacagccaccaccaccaccagatgggcttgtcaatgaggcagatcagattcaggttc

SEQ ID NO: 48645 - DNA, 88 bp, Homo sapiens
cggggccaggggggtgcgcctttctccgcgtcggggcggcccggagcgcggtggcgcggcgcggggcttgcacagaaatctggaggca

SEQ ID NO: 48646 - DNA, 80 bp, Homo sapiens
tgcaggatcttgatggtggcaaggacttcaatgggcggcatgtgcctctctctggctcccagatcgtcaagggcaaattg

SEQ ID NO: 48647 - DNA, 75 bp, Homo sapiens
gaccgaggactgtacgcctctcatgctgacctccacaggcttaagtggtgaagcagtattttccaatttgaagat

SEQ ID NO: 48648 - DNA, 90 bp, Homo sapiens
caaaagcacacaaagacctcctcctccacaggggagacagagatctgacaggatggcatctgatgactttgacatagtgattgaggccat

SEQ ID NO: 48649 - DNA, 76 bp, Homo sapiens
atgctgttgaagatcaaagctgtgagggctgctaaggttcattttccagacactgaaagagcagaatggctaaata

SEQ ID NO: 48650 - DNA, 75 bp, Homo sapiens
gaaagctgaaattgagaagctttgtgagaagggcagaagttaatacactgttaaatgtgaaattaagtgagacag

SEQ ID NO: 48651 - DNA, 83 bp, Homo sapiens
gcttatactcctcccagtgacgggtctggagtgcgtgggggaccggctgttggcggatattaataaggcagcggaaagaagaa

SEQ ID NO: 48652 - DNA, 100 bp, Homo sapiens
catctccgattcctccattgcatatgtgtgatgaatgcagactctgctaccattttggctgtttggatcctcctttgaaaaagtctcctaaacagacagg

SEQ ID NO: 48653 - DNA, 75 bp, Homo sapiens
gggaacagatgagaaacccggcaatgaaacccaagagttccatggcctccacttcccgccgccaacgccgagaac

SEQ ID NO: 48654 - DNA, 50 bp, Homo sapiens
atacgaatctttccaaaggagatgcccggaatgtatcctgtcaggtataa

SEQ ID NO: 48655 - DNA, 82 bp, Homo sapiens
attccaacaacaattccgatggcaaagccgttgccaaggtagttttccacggaatgctgtttgcttttatttatctggcttt

SEQ ID NO: 48656 - DNA, 100 bp, Homo sapiens
caagtgcccttggacaaagcctgaaaccaggttatgatgtgattgctcaagcccaatctgggactgggaaaacggccacatttgccatatcgattctgca

SEQ ID NO: 48657 - DNA, 101 bp, Homo sapiens
acagcgttgaacaaccacagctctattcccatggacccagatgatgctgtgtatctggacaatgagaaagaaagagaagagtatgtcctgaatgacatcgg

SEQ ID NO: 48658 - DNA, 100 bp, Homo sapiens
cgccatgcagaagaaatctggctatcataaatcgagagctccagatcatgagaaagctagatcactgtaacatagtccgattgcgttatttcttctactc

SEQ ID NO: 48659 - DNA, 100 bp, Homo sapiens
aggagattggtgcagagatggcattacgaacctttggccacttgttgttagccgaggagaaaaacatctcttccaaatacgcggatgagagggacagagc

SEQ ID NO: 48660 - DNA, 100 bp, Homo sapiens
tcaaagagctgctttgaatcagcagatcctgaaagccgtgcggatgaggaccggagcggaaaaccttctgaaaccgcaggaactagattttaaatatgta

SEQ ID NO: 48661 - DNA, 100 bp, Homo sapiens
gagctgtgcagccgcgaggaggcgcgggaggtgttcgagaacgaccccgagacggtggagccatcgaagcccccacccacaggctgacagaggcaccgtt

SEQ ID NO: 48662 - DNA, 83 bp, Homo sapiens
gcgcccgcggagacgtgaagagggggatatgagactttctactcggaatatcctgagtgttgcgtggatgtaaaacccatttc

SEQ ID NO: 48663 - DNA, 124 bp, Homo sapiens
ccgcggcgatgttcaaccgcgccgtgagccggctgagcaggaagcggccgccgtcagtctgaggaagatgatattgaaagaaggaaagaagttgaaagcatcttgaagaaaaactcagattgga

SEQ ID NO: 48664 - DNA, 87 bp, Homo sapiens
gccagagaggcccgcccaccagttcgcccgtccccctgccccgttcacaatggggaaatttgcagtggtgagaaaatgtataaagaa

SEQ ID NO: 48665 - DNA, 100 bp, Homo sapiens
ggtgaaacaccactgaagcattgccaagccaaaatgaagtttaatccctttgtgacttccgaccgaagcaagaatcgcaaaaggcatttcaatgcacctt

SEQ ID NO: 48666 - DNA, 51 bp, Homo sapiens
acctcaacacccccgacaagatggcccatcttgacgattccaagaccaccc

SEQ ID NO: 48667 - DNA, 100 bp, Homo sapiens
gtggtaatcctgacgaaattgaaattacctccgagggaaacaagaaaacatcaaagaggtctagcaaagcatctactgccgaggatgttccaagccgctg

SEQ ID NO: 48668 - DNA, 100 bp, Homo sapiens
acagacttcttagacttggaggaggtatgcctggactgggccagcctggagcattggtaagcgtcacactgccaaagtgagagctgctggagaactcata

SEQ ID NO: 48669 - DNA, 75 bp, Homo sapiens
aaagaccagtgtcttaagtaccaggaaatctaccactgtcgaagacaaataaaatatagcaaagacaagatgtgg

SEQ ID NO: 48670 - DNA, 82 bp, Homo sapiens
aagatacctctcgcatgtccacctcacaggagccttcacgtaaatgggtccagtcatgcctcccagtaagaagccagaaagc

SEQ ID NO: 48671 - DNA, 100 bp, Homo sapiens
ttaccatgaatagttctactccttctacaggtcacggtctagatcacattctcgatccagaggaaggcgatactctcgctcacgcagcaggagcagggga

SEQ ID NO: 48672 - DNA, 50 bp, Homo sapiens
gagaaaccgcagcactacacaggcgtggagctatttcctatgacagttct

SEQ ID NO: 48673 - DNA, 75 bp, Homo sapiens
gaggctggaagaggatcttgggcgccgccaggtctcctctgagcctccggcctccataagacccaaaacagatga

SEQ ID NO: 48674 - DNA, 75 bp, Homo sapiens
tgccagccggagctctcctctatgaggctgtaggttccatgaggacaggccttgagtctgtcctggtctctggaa

SEQ ID NO: 48675 - DNA, 97 bp, Homo sapiens
aggccattaatatcaccaacaatgagagagtggttgtaaaaatcctgaaggtgccatgtttcagaacagagtaagacccctggtaaagaagaactga

SEQ ID NO: 48676 - DNA, 96 bp, Homo sapiens
gtccagagggtcggcagcggcacctacggggacgtctataagtttgacaacttaaatgctgcgcatgaaacctctaagttggaaattgaagctagc

SEQ ID NO: 48677 - DNA, 83 bp, Homo sapiens
aggcaaggagctaaagcagcgtgcgttcagccctggggtgtccctacctgcaccggacgacgggggacacagaacgcaagtac

SEQ ID NO: 48678 - DNA, 80 bp, Homo sapiens
gatccgccgacgactgcaagcagtttcgggaggagttcaacacttaattcagtgcacaaatgagatgaatgtgaacatcc

SEQ ID NO: 48679 - DNA, 132 bp, Homo sapiens
cctggtgcaggaggctcactccgatttaaggtgcccgagtccacgctgatggactgccgtagacgtacaggtttgcagattccgccagcagcacagcaagctctacagatgagtggctctttggcatttggt

SEQ ID NO: 48680 - DNA, 100 bp, Homo sapiens
cgctgctgctgccgctgccgccctgagtcactgcctgcgcagctccggccgcctggctccccatactagtcgccgctccaggggagctggaaatgcacag

SEQ ID NO: 48681 - DNA, 75 bp, Homo sapiens
cagagagggcctgggagcttgctgcagcttcagctggcccgagataacttcttccgctgtggtgtgctgtatgag

SEQ ID NO: 48682 - DNA, 75 bp, Homo sapiens
ggaaaattacccggtatcgttagaggtggaagggatccccgaggaatagatgcacgagggatggaggcccgagcc

SEQ ID NO: 48683 - DNA, 83 bp, Homo sapiens
gtgagcgcgcctgcgccgccggggccgctgcaaggggaggagagaggccgcctcaggtgagaagccctaccactgcaactggg

SEQ ID NO: 48684 - DNA, 100 bp, Homo sapiens
gggctcctggacttcgcctttcccgagccctggaggtggggagaaaaggggagacggttgctatggagatggatgatatcataactccattgtgaaccag

SEQ ID NO: 48685 - DNA, 90 bp, Homo sapiens
ggcattctgatgggaacttgtgtgttaaagtaacagatgatttagttagtgcagcagctgccccgagccccgtgcttggcaacattcccc

SEQ ID NO: 48686 - DNA, 100 bp, Homo sapiens
cccatacgccagcttcacatagctcctatccattgcacagcagcgtggggaagcaccgttctctaccctccaaggcctgcttccgcgaggccaacatccc

SEQ ID NO: 48687 - DNA, 100 bp, Homo sapiens
ttattatggactttcaaacatctgaagatgacaatttattagatggtgacactgcagttgggagtgaactactttatgtccaagggtatcctggatgatt

SEQ ID NO: 48688 - DNA, 99 bp, Homo sapiens
ttccatggattgctctccaagtttttgtgttcctggcctttggaaccccttcatcatattccgcagtggcagctctcgccgtcgggattactatgacag

SEQ ID NO: 48689 - DNA, 50 bp, Homo sapiens
tatacattgctgtatacaatcatgagtgtcactactccatccagaaggga

SEQ ID NO: 48690 - DNA, 100 bp, Homo sapiens
gcctcgagcgctcaggatggaggaagactcgatccgcctgcctgcgcacctgccaattggaactgtgtcagagattatataagctacacttccagctgct

SEQ ID NO: 48691 - DNA, 75 bp, Homo sapiens
tgcacacgcccccggcacctgaaaattgaccctgaggtggccgccttcctgcagaagctacgaagtagagtgcag

SEQ ID NO: 48692 - DNA, 75 bp, Homo sapiens
ggcgctgcgacagggacttggactgcagcgatggcagcgatgaggaggagtgcatccagggaccttgacccagcc

SEQ ID NO: 48693 - DNA, 90 bp, Homo sapiens
taaagggaagtcatttctactggacttcatgcttagatacatgtataacaaggccgcggagctggtgacccagaactgcgaggcttatga

SEQ ID NO: 48694 - DNA, 97 bp, Homo sapiens
actggtgcgaggacaactacaccatcgtgcctgctatcgccgagttctacaacacggtatatgtctcgagtccacggtatgcaccctaaagagacca

SEQ ID NO: 48695 - DNA, 75 bp, Homo sapiens
gaagaagaaaggattcgttacagccagagattgattgcttccaagtatgatcatcaggcagaagaagatcttcgc

SEQ ID NO: 48696 - DNA, 50 bp, Homo sapiens
gagtgatgaattcccaggagcagggtgaaaatgggatggaggattgtgtc

SEQ ID NO: 48697 - DNA, 73 bp, Homo sapiens
gcctcccacagtgctgggattacaggaatctttggcagctgagattgaggggactatgcgtaaaaagctgagt

SEQ ID NO: 48698 - DNA, 90 bp, Homo sapiens
acacagccggtccaaggcggtgcgctgggggccggggcgcgtcgcagagcatcctggccagaacaagccaaggagccaagacgagaggga

SEQ ID NO: 48699 - DNA, 90 bp, Homo sapiens
tcccagtgtttcacctgtttcacaaactcttggcagaatggcaaacatcagcagatctcaggcagacttcaggatgtccgactcaaaaag

SEQ ID NO: 48700 - DNA, 82 bp, Homo sapiens
gtactggctgctgctgccctgcgcgctgctggctggtgaccccagggtttgaagaaaaggagggggagctgctggtgagggg

SEQ ID NO: 48701 - DNA, 100 bp, Homo sapiens
gccaagggctacattgaggtgatgaggaccagatggcctttgaggatgtggctgtgtacttctcccaggaggagtgggggctcctggacacagcccagag

SEQ ID NO: 48702 - DNA, 75 bp, Homo sapiens
ccttcttcctcaactatctcgctgacacgcaggtacactgaggaggggacggctccgtcttcacattgtgcacag

SEQ ID NO: 48703 - DNA, 75 bp, Homo sapiens
cgcgggcgccggcgaggagagcccgcggctgcagtgcacagccagagaacaacacatcacacacaggaaacagtt

SEQ ID NO: 48704 - DNA, 75 bp, Homo sapiens
aaacttcttaacccctagaccggtttttagtccattgactatgcagcctaatggatgtacagttacccagcacgt

SEQ ID NO: 48705 - DNA, 100 bp, Homo sapiens
gagccgggctcgggtcgccggagccgcgccccaccccgccagctccagagccacgtacggtactccaaagattcaggtttactcacgtcatccagcagag

SEQ ID NO: 48706 - DNA, 90 bp, Homo sapiens
cttggtgctgctagaatgcaggaacagcaggtcttcgccttgatcgtgttctcctgcatctatggtgagggctacagcaatgcccacgag

SEQ ID NO: 48707 - DNA, 90 bp, Homo sapiens
ttctccttcggaacgggagcgtctagattttaggtgatgggcaagtcagaaagtcagatggatataactgatatcaacactccaaagcca

SEQ ID NO: 48708 - DNA, 80 bp, Homo sapiens
ttggacacaggaagattcatctaagcaggcagaaacatatttaaccaaagctccaccatgaggcgaggtggatggaggaa

SEQ ID NO: 48709 - DNA, 76 bp, Homo sapiens
tcagagctttcctcttccagatggaaaatacagtcttcccacaaaggaacaggagtacagctgtgtagtaaagatg

SEQ ID NO: 48710 - DNA, 89 bp, Homo sapiens
ctgcaaacgccccgggtcgctacccggatttgacggtggctggagcggcacgggcgacgcaagccacagtacacgaacctggggctcct

SEQ ID NO: 48711 - DNA, 75 bp, Homo sapiens
ggaagtactgagcctgttggaggaactggcccggaaacaggaggacgcaggtgacagcagggacatgtctcggga

SEQ ID NO: 48712 - DNA, 100 bp, Homo sapiens
caaaatccagatgctggatgacacccaggaggcatttgaagttccaaaaatatttacaccagcagctccagttcataccaataaagaagatcctgctacc

SEQ ID NO: 48713 - DNA, 50 bp, Homo sapiens
ctgaacgagagggacacggagcaggaagtttgtgtttttcaacatacctc

SEQ ID NO: 48714 - DNA, 83 bp, Homo sapiens
cgggtcggctcctggccggagcaagatggctgagggcgagcggcagccgccgccaggcaaggggagagccagttgcgcagagc

SEQ ID NO: 48715 - DNA, 100 bp, Homo sapiens
attccagtaatgacaccgttcccttgtccagacgaagtgacgttgagatcctcggctactgcatgctgcggtggttgtgtgggaaacttccctgggaaca

SEQ ID NO: 48716 - DNA, 100 bp, Homo sapiens
gctggctctgctgctgccgccggcgaaggaggaggcgttgccgggtatctcagatgaagacatcatcaacattactcttcctactggagtccccattctt

SEQ ID NO: 48717 - DNA, 95 bp, Homo sapiens
ggctgccccaatccccggcagctctctcaggatttttagactctgaggagcagttggagctaatccacattatggaaatggaaaccaccgaacct

SEQ ID NO: 48718 - DNA, 100 bp, Homo sapiens
aatctgtccctgaataaatgttttcagaaagtggaaagaagccatggcaaggtggaaaaccatgaattccttgtaaaaccttcatttgatcctaatctca

SEQ ID NO: 48719 - DNA, 98 bp, Homo sapiens
gaggccaacattttttgaaatttttaagacacgctgcaacaaagcaggtcctacaacgtgactttaaaaagacagcagaaagcaaaaatgtcccattg

SEQ ID NO: 48720 - DNA, 100 bp, Homo sapiens
ctgatcgggtcttccttcattttgaggtggtatcaacatcctacagaagaagaattaagaattcttgcagggaaacaacaaaaagggaaaaccaaaaaag

SEQ ID NO: 48721 - DNA, 122 bp, Homo sapiens
cggaagggcggacacctccacatcgccttttgccacctttccctttatttccggagctggacctgtgatctgcagaatgctgagttatcccccaactcgccgagctttaattgtgggttgtg

SEQ ID NO: 48722 - DNA, 74 bp, Homo sapiens
acaattcccacccatttgtaggcctggcttttaaactggagataatgatctacgtactacttcgacactgtctt

SEQ ID NO: 48723 - DNA, 74 bp, Homo sapiens
aagagctgaccatggagatgtttgggaacagctccatcaaggtggacccaagtggagagattgtggaactggcg

SEQ ID NO: 48724 - DNA, 75 bp, Homo sapiens
ggctaacttggattcataaacttcacaaatttcttggatcagttcctcagatgttagcaatgatggttgatttgg

SEQ ID NO: 48725 - DNA, 87 bp, Homo sapiens
gcaatgccgccatccgggagaagctggcctgggccaagggcctcctcccaaggagaacatgagaccacttcatatctggaactctag

SEQ ID NO: 48726 - DNA, 50 bp, Homo sapiens
atccagtaatggagcctctaaggagaaatacgaatgtgctttaaagcgag

SEQ ID NO: 48727 - DNA, 100 bp, Homo sapiens
agtcacccacctacatgttgaggctccttgccagaggcctccactcactccagacccctatagcccgtcgctgtcagctgtcaacaaaggatgcgaatgc

SEQ ID NO: 48728 - DNA, 74 bp, Homo sapiens
tccagcccgtgacattgctgtggtctcgccatacaacctccagctctcctatgtggacgccgagggcaaccctg

SEQ ID NO: 48729 - DNA, 83 bp, Homo sapiens
aaagcgagtcgtcaaggagttgcagcataagcttaaatcgtctcagaaggacaaggtccgccagtttatggcgtgcactcagg

SEQ ID NO: 48730 - DNA, 99 bp, Homo sapiens
cgaggaacgagagcgcgaagctaaggttaaaaagatcaagtggcatgagcagccttttggggaaaattggtgccaagaagcagaaaatgagcacccttg

SEQ ID NO: 48731 - DNA, 83 bp, Homo sapiens
gcctctacaagaagctgctgactcttttcagagctggccacgaccaggccttatgccagcctggaccatcttggaggcagtgt

SEQ ID NO: 48732 - DNA, 52 bp, Homo sapiens
ccaggagtcatcggacgccagaatctgctattactataacaagcgcattctg

SEQ ID NO: 48733 - DNA, 74 bp, Homo sapiens
tgaaacatgtgaacactcaagtgaagcaaaagccttccatgattacatgtgaactatgaagactttactttcac

SEQ ID NO: 48734 - DNA, 131 bp, Homo sapiens
aaaagacacagataaaagagaaagatagatgccctctctcttcatcttcacttgaaataccggatgattttggagggccgttgctccagggagaactgcaaatatcttcatccacccccacatttaaaaac

SEQ ID NO: 48735 - DNA, 82 bp, Homo sapiens
gagaaggcgaaaacatcgggtttgagattatccacgtgtgtaaggctggctttgacacatcttcctcatcttcgaactcagc

SEQ ID NO: 48736 - DNA, 82 bp, Homo sapiens
accacgttctgcagaggaccatccagtgtgcaaaagctgtgttggggtggaagaggaggaggcgcccgacatcgacatatac

SEQ ID NO: 48737 - DNA, 82 bp, Homo sapiens
tggacagcatcgggagcggccgcgccatccccatcaagcaggacggggaggtttactgcatcgacgcgcggttctacgggaa

SEQ ID NO: 48738 - DNA, 100 bp, Homo sapiens
ctgtgagatcactgccctgagccaatccctacagcccttacggaagctgccttttagagcctttcgcacagaggaggagcgagtggacattctaatcaac

SEQ ID NO: 48739 - DNA, 100 bp, Homo sapiens
agaggctggcccgcagtcagatccacagcatccgggacctccagcgactcctggagatagactccgtagctccaccgggggacggctacgtgcaggcgga

SEQ ID NO: 48740 - DNA, 100 bp, Homo sapiens
atggcctctcgtcggcagtgaagctcaagttgctactcgggacgctgcacctcccgcgccgcacggtggacgaggaacgtcaaggtcgtgggaaataaaa

SEQ ID NO: 48741 - DNA, 88 bp, Homo sapiens
cacctttcccacctgctccacctctatccccccaagcaggtgacagtgacaaatgcagccctgaggatttggctactgcatataacaa

SEQ ID NO: 48742 - DNA, 83 bp, Homo sapiens
caaaactgtcattttgggactgctgtgcctcctcctcctgtggtggaggagaaggaaagaacctcaagaaggcatgaagccag

SEQ ID NO: 48743 - DNA, 75 bp, Homo sapiens
cgggaccatggcacctgtgcacggcgacgactgtgagataggggcgagtgatggagtcttgccctgttgcccagg

SEQ ID NO: 48744 - DNA, 100 bp, Homo sapiens
gtgaaaagtcatcagaaacctccacagggccccctggaaaaaggacaagtgaaaaatgaggcgcttagagaattgagagtggagctcagcaaaaaacacc

SEQ ID NO: 48745 - DNA, 89 bp, Homo sapiens
ggaatgtgcaaagtagcaattaactggtctggagggtggcatcatgcaaagaaaactaaggagacactagccacaggccatttcatgag

SEQ ID NO: 48746 - DNA, 99 bp, Homo sapiens
ctctatgtggccatgaatggtgaaggctatctctacagttcagccacagacctccaccagcacgaagtggacatcgttgtgtggcagataataccaacc

SEQ ID NO: 48747 - DNA, 75 bp, Homo sapiens
taccacttggccccctctgatctgcgccgggtcgccacatactggtcgcgtctccttcttcacctcggggtccga

SEQ ID NO: 48748 - DNA, 96 bp, Homo sapiens
atcagctcagcgggggaccccctcgcttcctgctcgacctgcggcagtacttgggatgctgatatgctaactggtgatgagcaagtatggaaggaa

SEQ ID NO: 48749 - DNA, 100 bp, Homo sapiens
caatgaaaccaggcgggtaaacatggtggacagaaagtcagcctcttgtgctccagaacctgggtatcaacccagcaaacattggcttcagtaccctgac

SEQ ID NO: 48750 - DNA, 97 bp, Homo sapiens
tcagaacagttggatcttgctcagtctctgtcagaggaagatcccttggtgctggagaatctggtaaaagcaccattgtgaagcagatgaggatcct

SEQ ID NO: 48751 - DNA, 75 bp, Homo sapiens
cagcactcgctgcactccgcccagtggtactacgacgtccccatcgccaccctggacttctcctcgctgtacccg

SEQ ID NO: 48752 - DNA, 100 bp, Homo sapiens
gaaaaaatagccttattgcagagccttctagatgatgcaaatctacgcaagaatgaactggagacagagaataggtttgagcacaaaatgaacataatta

SEQ ID NO: 48753 - DNA, 100 bp, Homo sapiens
ccgcctttgttgattatgattggctacagtgatggaatgcaggtctggagcatcccttaatccagtccctcatagcactggtgaatgacccccagcctga

SEQ ID NO: 48754 - DNA, 75 bp, Homo sapiens
gcagagcggagggagccccagacacgaggacctgaaaaacgtgttcccacccgaggtcgctgtgtttgagccatc

SEQ ID NO: 48755 - DNA, 128 bp, Homo sapiens
acatggggcacccggtgtaccgcggcgagaagccccagctgcactacgcggttatatcttaagtgtggtgctgctaacattgcccaggcagcatctggttcagctttatctatattttttgactgctc

SEQ ID NO: 48756 - DNA, 80 bp, Homo sapiens
aggagcctcgcgcggcgctggagagagacaagatgtccgccagagctgcggccgccaagtactatactggcaattgctgg

SEQ ID NO: 48757 - DNA, 83 bp, Homo sapiens
gaccctggagcctcagttggaagcagccgatccagcctgcggagcctgtggggcaggtctcagctgagtctgctctgatcacc

SEQ ID NO: 48758 - DNA, 107 bp, Homo sapiens
acttccagaatatctttccaccatcagccactctgcatctttccaacattccacatagatgagtgtgaagtttctggcctgtgcaggcatggagggcgatgcgtgaa

SEQ ID NO: 48759 - DNA, 87 bp, Homo sapiens
accggcacctgcacacctggatccaggataacggaggctggatattgtactccaagatacttggattacgaagatttggagcgcaag

SEQ ID NO: 48760 - DNA, 82 bp, Homo sapiens
ccatgaccctgaaggtccaggagtacccgaccctcaaggagcggtggtgccccccccgggcacggggccatgtacaacggga

SEQ ID NO: 48761 - DNA, 80 bp, Homo sapiens
gcgctgagaaggacgcgcagtccatctctctcaggtacgcatagctgctaaattcatcactcatgcacccccaggggaat

SEQ ID NO: 48762 - DNA, 82 bp, Homo sapiens
gtggaatatgccaaggaaaaactggagagcttcatcaaaaatagtgatagctttgataacacatgcagatgacaatccaggc

SEQ ID NO: 48763 - DNA, 82 bp, Homo sapiens
gcgtgtctaggtgagtcgcggtgggtcctcgcttgcagttcagcgaccacggctgatcagctgaccgaagaacagattgctg

SEQ ID NO: 48764 - DNA, 51 bp, Homo sapiens
cctaactgaacttagtggtggtcagagagtcttgctcagttgcccaggctg

SEQ ID NO: 48765 - DNA, 100 bp, Homo sapiens
ggctttggagcaggcgctgggcgagccgtgcgatctggacgcggcgctgctgaccgacatcgaagacctgcctagagctggaacgttacctccagagcga

SEQ ID NO: 48766 - DNA, 100 bp, Homo sapiens
ggaatcctggaggctgtgcgtgttttcggaaatctctcccaggaccatgatgtctgcgatttcattgtgcagaacaatgacaaatcttcctattttcaag

SEQ ID NO: 48767 - DNA, 96 bp, Homo sapiens
aggccgtgagccatgttcaggcaccctttacaagtgcaacacatttggagcatgtgaggcccatgtttaagctcaatctgaaattgaagtgtctgt

SEQ ID NO: 48768 - DNA, 74 bp, Homo sapiens
cccagaagtgatcgctcagctggagaacgcggctaaagttctgatggctgcaaggtgtgactgttgtaaatctc

SEQ ID NO: 48769 - DNA, 100 bp, Homo sapiens
gctgtcgctgtgctcaaaactgtcattttgggactgctgtgcctcctcctcctgtggtggaggagaaggaaaggacagagcgggatgccaccagcttgtc

SEQ ID NO: 48770 - DNA, 90 bp, Homo sapiens
catccagaatctcctcttgagccagaagaaagagttggtggtccagatagcaggaggtgctcctgtaccctggccacagcccaatcctgc

SEQ ID NO: 48771 - DNA, 87 bp, Homo sapiens
aagatcggctcccggaattggaacagctggagcgcattggactgttcagtcatgcggagattaactacctctacccagatggaaaga

SEQ ID NO: 48772 - DNA, 83 bp, Homo sapiens
tgctgactcttttcagagctggccacgaccagggctatgccaatgaggtgggcgaggctttccgctctcttgtgccagcggcg

SEQ ID NO: 48773 - DNA, 90 bp, Homo sapiens
agaatgaacattgtattgagaacaatatagatttgcaggttccagcaacagatagaaatgctttaagttcactctggggaaagctggcct

SEQ ID NO: 48774 - DNA, 97 bp, Homo sapiens
ccctacctgaaagccatctcaagactcctcagatgccaccaacaaccccatccagcagttccttcaccaaggtgctggagaatctggtaaaagcacc

SEQ ID NO: 48775 - DNA, 100 bp, Homo sapiens
ggaggggccgggccgccgccgctcaggaccgggcctcaaaatggccacacgcgtacccccgtagcggaaaaacgctgatcagctgaccgaagaacagatt

SEQ ID NO: 48776 - DNA, 75 bp, Homo sapiens
ctgaagtcttcccacaactctagcaggaaatactacagagtgtgccaaagttctgttttccctttgacgttgaaa

SEQ ID NO: 48777 - DNA, 91 bp, Homo sapiens
tgctttcaggaacattgctgtggattcccagggtttcacttccatcgcccaggctggagtgcaatggcgtgatctgggctcactgcaacct

SEQ ID NO: 48778 - DNA, 82 bp, Homo sapiens
atgtttgcctcacagttcccgctgggattcgtagccagagtctttggcatacagattctctctcctcaccacgcggctgctg

SEQ ID NO: 48779 - DNA, 109 bp, Homo sapiens
tcgtgttcttcctagcttccctgtatgtgatgatgaccgtcaccaactggttcaatgagcctttgaatacatctttatcaatgaccagtgcagtacagaactccacata

SEQ ID NO: 48780 - DNA, 85 bp, Homo sapiens
tgcaacgttgtgatctggaggcacatctcaaaaacaggttcacgcaaagaatctgctccacaagttttgcttccagaagaagaga

SEQ ID NO: 48781 - DNA, 74 bp, Homo sapiens
attggcatcgatctctccatcccttccgaggcccgacttcgagccctatgagtttgtctctctggaatggctgc

SEQ ID NO: 48782 - DNA, 80 bp, Homo sapiens
ccagtgatggatgcacctggaaggggaccctgaaagaatacgagccgcggcgagtcctttgcacatgttggcaacacacg

SEQ ID NO: 48783 - DNA, 100 bp, Homo sapiens
agcatcccccctccactcacccggcagatatccgtgaaggctctagctcctgggctataacgaaaagccaataaatctacaaatgtttattgggacagca

SEQ ID NO: 48784 - DNA, 50 bp, Homo sapiens
caaacttgtgagagacaaaattacagcttggctgaagaggaaataaaaac

SEQ ID NO: 48785 - DNA, 51 bp, Homo sapiens
catcatggagcccacagcatcctcagctctggaggctgccatcgagaacct

SEQ ID NO: 48786 - DNA, 82 bp, Homo sapiens
gggaggagcctgttcccctgagagggagaaccgaagattacaggaggccagcatgaggttggaacaagagaatgatgacctt

SEQ ID NO: 48787 - DNA, 82 bp, Homo sapiens
ggggccttccacaccccctccgtgggtgtgtggtgagaagccctaccactgcaactgggacggctgcggctggaagtttgcg

SEQ ID NO: 48788 - DNA, 82 bp, Homo sapiens
tccgagtgaggaccatctacgagagcaaaatgattgaatacgatcctgaaagaagattagaacactgattccccatcctatc

SEQ ID NO: 48789 - DNA, 90 bp, Homo sapiens
ggcggtgggaccagcggctgaggccaggatgccgtccaggcggcgcggcggctcctcactcatcccagtgtccaggaggagcatttacac

SEQ ID NO: 48790 - DNA, 74 bp, Homo sapiens
aagttgataaggaaagtactgtccaaatgaattatgtcagcaacgtatccaagactgctctggcccatttagag

SEQ ID NO: 48791 - DNA, 83 bp, Homo sapiens
aaggtgacaggccagagcccaggtccccaggacagtgcagtgtggcaaaggagcagagaactttgacaagttcttcacacgag

SEQ ID NO: 48792 - DNA, 50 bp, Homo sapiens
gagccgcattgaccaggcccagaagcagagggcatgctcagagacctgca

SEQ ID NO: 48793 - DNA, 98 bp, Homo sapiens
tcaaaagtggggggcaggaaagcttgaaatccatggcccaaaatgactctaccagtggagactctcttctgtgaagaagacgaccagataagaggttg

SEQ ID NO: 48794 - DNA, 75 bp, Homo sapiens
accggagtcagaaccctccgcagagtaaaggtgaatctggattgggaaagtcgacattaatcaactcattattcc

SEQ ID NO: 48795 - DNA, 100 bp, Homo sapiens
cgaggccagagcctagggctagcggccatgacttaattcagtgcacaaatgagatgaatgtgaacatcccacagttggcagacagtttatttgaaagaac

SEQ ID NO: 48796 - DNA, 126 bp, Homo sapiens
cggggaagaggcggcggcgccgaagaggcgactgaggccggacggggcggacggcgacgcagcccgcggcagaagactgtttgtctgtgggatataaacgcaggaccaaaagaaggcaaaattgtg

SEQ ID NO: 48797 - DNA, 75 bp, Homo sapiens
aaccatgctcggtcatctgtggcagtatatcaagggtgatcagcccatgacctaaacctccagacaaaataaaac

SEQ ID NO: 48798 - DNA, 101 bp, Homo sapiens
gccgaccgcacgctcggctgctacgtggaaatcctcaagctgcttggatccaaacttctacagcaaaaacttacttcttttaggaaagacatacttgaaac

SEQ ID NO: 48799 - DNA, 99 bp, Homo sapiens
ctcttgggcaatcttcacggggctggctgctctgtgtctcttccaaggttgccaatttggcctgttccatctccaacaatgaagaaggggtgaaattag

SEQ ID NO: 48800 - DNA, 100 bp, Homo sapiens
tgaggattactgtcctcgcaggaaaaagaccttgatgaagttctgcagacccactcagtgtttgtaaatgtttcctaaggtcaggttgccaagaaggaag

SEQ ID NO: 48801 - DNA, 95 bp, Homo sapiens
gatatggtctgcaatatgctaggtttaaataagcagagattcagaatatacccccctggacaacacggttatcctcaaatctcattccacaatat

SEQ ID NO: 48802 - DNA, 100 bp, Homo sapiens
acaagagcttactggtgaaggaatgggacaagacccatctttatgcaaagccagcgttacagtaatgttccagattggagctggagtgagccttccagga

SEQ ID NO: 48803 - DNA, 75 bp, Homo sapiens
ctcagccgcccgctggccgggagcggagcccctgtggaccatcccaatctggcaaaacaagccacatggggctgc

SEQ ID NO: 48804 - DNA, 74 bp, Homo sapiens
tttactgtggaagaaagtccttccttacctgaaaggcatctgctcaggtggtgaacatcccgtccttcattgtc

SEQ ID NO: 48805 - DNA, 90 bp, Homo sapiens
ggttatctctccacctccttttgcaccttcaccaaccttgcctcctacctttcatccggaagaagtagcatctccgcccccacttactga

SEQ ID NO: 48806 - DNA, 75 bp, Homo sapiens
accagggctcctgtggctcctgctggggagagcacatctgcctgatccgcaaggtgaacgagaactggtacgagg

SEQ ID NO: 48807 - DNA, 83 bp, Homo sapiens
cggcgagtttccgatttaaagctgagctgcgaggaaaatggcggcgggaggtgagcgagtgctgtgctttcatgggcctcttc

SEQ ID NO: 48808 - DNA, 99 bp, Homo sapiens
ctgaggcagagggtggcccatgagccggttgcgccacccgaggacaagtaatctatgccagcaattatgacaatgttagcagaccatgcagctcgtcag

SEQ ID NO: 48809 - DNA, 90 bp, Homo sapiens
gtccagactctcggcaccacagcctgcatattgccaattatatctctgggatccagactatcggacatagggtaattgtatctgatgtcc

SEQ ID NO: 48810 - DNA, 100 bp, Homo sapiens
ggtcaagatggttatctttcctcctggcttccaacacaacctgctttgtaaaagccccacactgttaataaccgtgagggtctctctctgtcacccaggc

SEQ ID NO: 48811 - DNA, 82 bp, Homo sapiens
atttgcctccacttagtgagcggaagaatgctccctgggctctgtcagctagcagagcatttggtggaagaaagacagccca

SEQ ID NO: 48812 - DNA, 50 bp, Homo sapiens
catggatctttcccatagaactttacagttttcttagctccctggacccg

SEQ ID NO: 48813 - DNA, 82 bp, Homo sapiens
ctctgaaatgagtgaggaaaaacgagccaaacttcgtgaaattgagaatccacattcatctcaatggaaggatcctgcctta

SEQ ID NO: 48814 - DNA, 82 bp, Homo sapiens
ggaagcggcccccgcagacgctcggcaggatttacttcatttgggtcactaggtcacgggggcctcacttcattctcttcca

SEQ ID NO: 48815 - DNA, 88 bp, Homo sapiens
aactgcaagcattctgtggtctgcccggccagctctcgcttctgcaagaccacgaacacaggaactcaccttcgaggcttggaaacca

SEQ ID NO: 48816 - DNA, 74 bp, Homo sapiens
aatggaaaaaggccctcttcaagcctgagcctgtcatagggaactgcatggatagaagttctccaggacaagca

SEQ ID NO: 48817 - DNA, 100 bp, Homo sapiens
gggagtgtcctggacccagctgagcgggcggtcattcgcatcgcagcgtccagcctgcatgccgtgcggactgcacccaccagcaaggtgatcaagaccc

SEQ ID NO: 48818 - DNA, 90 bp, Homo sapiens
cgtgagtcgcctggggaggccacaggacacagggactggactcgggccatatccgtggtgccgtcaacatgcctttcatggacttcctga

SEQ ID NO: 48819 - DNA, 88 bp, Homo sapiens
tgactcttcctggaatacacccacctaccttgaaccaggaatggaagttggatacactttgtgacttgtacgagacactgaccattac

SEQ ID NO: 48820 - DNA, 100 bp, Homo sapiens
aatttgaagctgggaagtgatatggaccatctacagagctgctactcaaaacttaaggttaaaaagatcaagtggcatgagcagccttttggggaaaatt

SEQ ID NO: 48821 - DNA, 74 bp, Homo sapiens
agaatgaacagacctagtgggcgttgcctttagacccaggaaatggaagccgattatgaagggcccacatgcta

SEQ ID NO: 48822 - DNA, 75 bp, Homo sapiens
cccagaacggccgcctaacagacttcctggactgtgtgatcattaggcagttcttatggagcttcaggctgcccg

SEQ ID NO: 48823 - DNA, 88 bp, Homo sapiens
gataagaaatgttctcgacagcaaggttgatgctatgaaactgggagtaaaggaaatgaagaaggcatacaagcaagtgaagatcgac

SEQ ID NO: 48824 - DNA, 85 bp, Homo sapiens
ttccataaactcacctcctctttactgtgattcagaggtccttatgtcgtcagaagatcgagaagctcaggaggatgaattgctg

SEQ ID NO: 48825 - DNA, 75 bp, Homo sapiens
cgcggagccgcgagccccgagccccgagcccggcgcctggctgagtatgtctttggtgcaacactaacaaggctt

SEQ ID NO: 48826 - DNA, 108 bp, Homo sapiens
ggcgcggcggccgggccctcgagacggggacggacgagattgaggagctgcgggccgagatgctggagatgcgggacgtctatatggaggaggacgtgtatcagctgc

SEQ ID NO: 48827 - DNA, 80 bp, Homo sapiens
agtctcccgaattccagtcacttttcacagaaggactgaagagtctgacagctgctccctggtggttacctgtgaaaggc

SEQ ID NO: 48828 - DNA, 100 bp, Homo sapiens
gcagaatgcaacgccattcgccaggctcttcaggatctgctttcagagtacatgaacaacgacatgtattcctctgagaaaccttggacagcagattttg

SEQ ID NO: 48829 - DNA, 51 bp, Homo sapiens
cgtttttatccatggatgacttgcttgggcaggcagaagtcctgaaggctg

SEQ ID NO: 48830 - DNA, 80 bp, Homo sapiens
aattcatttttgagataactgttcccaatgcagccaagtcatcaaggcatgggacattggggtggctaccatgaagaaag

SEQ ID NO: 48831 - DNA, 75 bp, Homo sapiens
ccgccaccatgcccaagagaaaggcatcctgacatcgaggcccaggagagaggagtccggtgtctacttgagaaa

SEQ ID NO: 48832 - DNA, 100 bp, Homo sapiens
gagtatgcagtctgtgctctaaggaatgacattcttgtttcagagccagcccctgggcaacaaagtggaaatggagattgtgagcatgttggaaaaaaac

SEQ ID NO: 48833 - DNA, 101 bp, Homo sapiens
gcgaggaccgcgtctgccactgcaactgtggccgacaatgattctgcagcttcagaccctgatgctgaaaccactgccaggaccaatgggaaaggaaatcc

SEQ ID NO: 48834 - DNA, 101 bp, Homo sapiens
cactgcagagggtgaggaggagacgattctctatgacttgttggtcaacaccgagtggccaccggagactgaagtacagctttggaaacatgatgagcaag

SEQ ID NO: 48835 - DNA, 75 bp, Homo sapiens
cacctctcaccgcgcatgtttggagagagccagctgctccccgggaacaacttcaccaatgagtgcaacatacca

SEQ ID NO: 48836 - DNA, 96 bp, Homo sapiens
ttgagattgccacctacaggaagctgctggaaggcgaggagagcagcttcatggcggctgaagagatgcattggcctgtccctatgaaggccattg

SEQ ID NO: 48837 - DNA, 100 bp, Homo sapiens
ggctggccaaggacttgtttctgtacaggagatgcagaaactaccagaggccgttcagctaattgagaaggccagcatgatgtatctagaaaacggcacc

SEQ ID NO: 48838 - DNA, 83 bp, Homo sapiens
atctgataatcaagtgattcactgggaaatagaggataatcagtttttggtgttgagccagacttgaccagggaaggcggcag

SEQ ID NO: 48839 - DNA, 90 bp, Homo sapiens
cacagatgtccaagctgccaaatgtgatgctgatccttcagccttagccaactatgttgtagcactggtcaagaaggacaaacctgagaa

SEQ ID NO: 48840 - DNA, 83 bp, Homo sapiens
catgagggaaatcgtgcacatccaggctggtcagtgtggcaaccagatcggtgccaagtgagaaagatcagtctaaagaaaag

SEQ ID NO: 48841 - DNA, 90 bp, Homo sapiens
cctaaatcttcaacataataagatatttgtgaaccaagtagtgaaatggtgaaaaatcagacaatggtcacagagttcctcctactggga

SEQ ID NO: 48842 - DNA, 90 bp, Homo sapiens
ttgacaggtcccaccccaacaagcaggatttagaagaattctgctttaagttttgcatcaatcatttgacagaagttacacagactgcag

SEQ ID NO: 48843 - DNA, 75 bp, Homo sapiens
aatgaaacgggcagccatggccctccacagcccgcagtactatactggcaattgctggagaagattttgcaattg

SEQ ID NO: 48844 - DNA, 95 bp, Homo sapiens
agaattctgtgttgctgttggagcagatttcttctctgtgtagcaagatgaaaattggagagacccacacagatattgaattgagtgggttgttg

SEQ ID NO: 48845 - DNA, 100 bp, Homo sapiens
ccatcagctgcagaaaattttctagttttggggagacaattacaaacatgttttatcaatgcagctaagctgaaggaattgaagaatctgcagcagcaat

SEQ ID NO: 48846 - DNA, 100 bp, Homo sapiens
aggagatcctcagaggggagacccctcgggtggaagaagtggggccatacacctacaggaacagcttcagctgcggggctcctttacctgcacacatggg

SEQ ID NO: 48847 - DNA, 100 bp, Homo sapiens
agatggtgaaggccagtagtgccagtgttcagagggatttcatggaccccactgtcaataacattgtatatgaacacagatcaagattagagaaatcctt

SEQ ID NO: 48848 - DNA, 100 bp, Homo sapiens
aatctcagtcctgacaagaggtgatagttctggaagcagcaaaagcataggcaggctttcaaaaacaggatcatcatgcctagggttcataacataaaaa

SEQ ID NO: 48849 - DNA, 100 bp, Homo sapiens
cactactcagtgttttgttcaccagttctggaggaggaccagcaaaggtcagagacgagcagcaccagtgttccctggggaacctgaaggtccccctcag

SEQ ID NO: 48850 - DNA, 131 bp, Homo sapiens
ttgtccaaagcagtcgtaagaagaggtcccaatcccccactctttccgccctaatggaggtctccagtttcgacaatgcagatcttcgtgaagactctgactggtaagaccatcaccctcgaggttgagcc

SEQ ID NO: 48851 - DNA, 100 bp, Homo sapiens
ccctccgcgggctaccaaccgtggctacagggttcagaagaaaagaattccgtgggaagctggcgattgccatcaccgccaacttcataaacagaaacag

SEQ ID NO: 48852 - DNA, 87 bp, Homo sapiens
ggctatttgtgggtcctgggggaagtacaacctttggcagtcatcatcttccaaatagggaagaaggagaaagggccaacccctgaa

SEQ ID NO: 48853 - DNA, 50 bp, Homo sapiens
actggtgcccaagcctggattaaaaagtcggatatgttgcggtcactatc

SEQ ID NO: 48854 - DNA, 100 bp, Homo sapiens
acaagtatgttggggtttcctcagacagtgttggaggattcagatacaatcaaatgatgccgtttggaaaaatttcccagcagttgtgtggcgtaaagaa

SEQ ID NO: 48855 - DNA, 90 bp, Homo sapiens
atgccctgcagtacctgcagaaggtctctggagacatcttcagcagggactggtgattgcagctggaagtgcccatgaccgagctggcgt

SEQ ID NO: 48856 - DNA, 90 bp, Homo sapiens
cgggaggggaggagagcagagaacgtccccaggaaaatcatcagcgtgttagcattttctttgactatgcaagatgtagcaagaacactg

SEQ ID NO: 48857 - DNA, 75 bp, Homo sapiens
ctgacaatagcagtgctatgttactgcaatggcatgaaaagttactccacaggatccgctgaacataggatgttg

SEQ ID NO: 48858 - DNA, 83 bp, Homo sapiens
attgaagaggaagaactgaccagagctgatcccgagcagcgtcatgtacccctttttgtttggctatgccaccacagtcatcc

SEQ ID NO: 48859 - DNA, 82 bp, Homo sapiens
gctatgcattggcttttggagttccaggactgctcatggtaattgcacttgcctcctcttagacaatgagcgctggaagcaa

SEQ ID NO: 48860 - DNA, 80 bp, Homo sapiens
ccaccaggggatgaaatgtgacaccatccagtccaatggatcagatgggcaagatgagacctcagccatatggcgggact

SEQ ID NO: 48861 - DNA, 104 bp, Homo sapiens
gggcagagtggagtatctggtgaaatggagaggctggtcgcccaagtttggtgcacctcgatttggaggaagtagggcagggcccttatctggaaagaagtttg

SEQ ID NO: 48862 - DNA, 100 bp, Homo sapiens
aagggttgtatcgaggctataaaagcacagttttaagagagtactcccctgccctcaacaagatgttttgccaactggccaagacctgccctgtgcagct

SEQ ID NO: 48863 - DNA, 90 bp, Homo sapiens
tgtctgtggcacatgcgctttctctcccagcagagtcgtatggcaacgatatcttactgtgccgagatcgctcacaatgtttcctccaag

SEQ ID NO: 48864 - DNA, 88 bp, Homo sapiens
tgcactgctacaggactctactatggagctctgctgtgtgcgtgcaccagctgcctccaggccaactacacgtgtgagacagatgggg

SEQ ID NO: 48865 - DNA, 75 bp, Homo sapiens
caaagagcctattttagaaaggccttatggtgtacaaagggaaacatgcaattttcattgtgagctgccttccag

SEQ ID NO: 48866 - DNA, 127 bp, Homo sapiens
cggtactgttgaaagcgacaagtggaggcgccgctctagcggccgggactctgaactatggcgtctcggaagggtgctgacctggaccgggagaagaaggctgccgagtgcaaggtggacagcatcg

SEQ ID NO: 48867 - DNA, 101 bp, Homo sapiens
agccgatcatggcggatggcccccggtgcaagaggcgcaaacaagccaatcccaggaggaaaaacggtttttcgttggaatatacgttgcacatttatggc

SEQ ID NO: 48868 - DNA, 100 bp, Homo sapiens
ggttttatttaccagggacctcacggccaccgataatagtttctgagtttcggaatgagatatatgatgtaagacacagatccaggtccagagagcatcg

SEQ ID NO: 48869 - DNA, 100 bp, Homo sapiens
cacgctcatgatcgacttcctcacccgcgcctgcgacctcgggagaggctgtcgatgctgaggcacgagagaatttgctcctgctcctccagagaaaatg

SEQ ID NO: 48870 - DNA, 75 bp, Homo sapiens
cagtccacccaccgccgccgcctcccagttactccacaggatccgctgaacataggatgttgccacaaaatctac

SEQ ID NO: 48871 - DNA, 90 bp, Homo sapiens
tatgatagaagctatataaagtcaagtgtccattttctttcaactatatttgagcatacccagtactgtaagattgatgttaaaggcatg

SEQ ID NO: 48872 - DNA, 107 bp, Homo sapiens
cgtccgccccgcgagcacagagcctcgcctttgccgatccgccgcccgtccacacccgccgccaggctggagcagccctacttcagcgccaacgcccagttcttcca

SEQ ID NO: 48873 - DNA, 74 bp, Homo sapiens
gatctatagcactctggctggcaccaggaaagatgttgaagtgactaaggggtttttaatgaccacaacaagca

SEQ ID NO: 48874 - DNA, 101 bp, Homo sapiens
agaattgatactcagcagctggaccggcaaattaaagcaattatgaaagaagtcattccttttttgaaggtttctgctttgggacaaccatacatctaatt

SEQ ID NO: 48875 - DNA, 90 bp, Homo sapiens
ccacttccctggagctgaccccacagctgtggaaggtgctgagctactggtgcttcagtcccggccacagcatgcacgagctggtccgcc

SEQ ID NO: 48876 - DNA, 100 bp, Homo sapiens
gctgcagcagcggaagaccccagtccaggagtgcccgtgcgcagcggagatgccaccttccccaaagctatggacaacgtgacggtccggcagggggaga

SEQ ID NO: 48877 - DNA, 50 bp, Homo sapiens
gcaaacagattcagtggcctgcattgcttatttcaacaattccaactagc

SEQ ID NO: 48878 - DNA, 100 bp, Homo sapiens
gaaaaaagatgcttttgttttggagggtggaattgcgtttgttgccataaaaggagcatttaaagtttacttcaaacagcagcaatatttacgacaggca

SEQ ID NO: 48879 - DNA, 100 bp, Homo sapiens
ccgcggtgcgccttctccacgctgggccgggtgttgcgcctggcctacagcgaggctgatcacaaaatttgtccaggatagacatagagctagaagaaac

SEQ ID NO: 48880 - DNA, 75 bp, Homo sapiens
gcctcgagccagcccgccagcatgccccagtccaaagattctgcttctcagaagatgcactattatagatactct

SEQ ID NO: 48881 - DNA, 100 bp, Homo sapiens
gacatcactgtgcggcacatcgcagacctgtcaccaggagacaagctgggagtgtccactcgccttccaccagcatggcaacgtcttcacagtaccgcca

SEQ ID NO: 48882 - DNA, 80 bp, Homo sapiens
ccgtgatgaagttcgcttaccgggtgtcatgtgattctctgagggagcagctgcgtgagtggagatgctttcagtggtgg

SEQ ID NO: 48883 - DNA, 75 bp, Homo sapiens
atgcccgctcacctgcgctgtgatgcctgcagagctgtggcttaccaggaagaagatgaagctgcagggacagtt

SEQ ID NO: 48884 - DNA, 82 bp, Homo sapiens
ctgaaggggacatcatctgtgtgttctcacaggtgagcagggcagcatttccttctcccactgctgctgagatggcagaaat

SEQ ID NO: 48885 - DNA, 82 bp, Homo sapiens
acatttcagagagaatccagtatgcaatggatgtcgcacacaagagagagagacgcagacaatgcagatcttcgtgaagact

SEQ ID NO: 48886 - DNA, 74 bp, Homo sapiens
tggggctgagaggagtcttctggtgcagtcttattttgaaaagggacagagcagaatgggctgatatagatccg

SEQ ID NO: 48887 - DNA, 50 bp, Homo sapiens
cttctggagtactcttattttgaaaaggatgttgacaatgcgtctctggc

SEQ ID NO: 48888 - DNA, 80 bp, Homo sapiens
ggaatgatcatcaaacagctatggtgatgattagagacatactaatgtacatgtactgccaaatctgtcgaaagggagat

SEQ ID NO: 48889 - DNA, 95 bp, Homo sapiens
tgatccttggtcaaatggatagccctacacagatatttgagcatgtgttcctggtggaagcagggaaaggcctggagatgaggaagctggttctc

SEQ ID NO: 48890 - DNA, 88 bp, Homo sapiens
cttacttgaacagagggaggagatcagagcggttaagaagattgtctaccaaatatagaacagaaaagatatatcccacagccactgg

SEQ ID NO: 48891 - DNA, 100 bp, Homo sapiens
gcgagcccacgaagaggtacgattccggagaatcgcgaggcagagcgggagcgcgcagccagacaatgcagatcttcgtgaagactctgactggtaagac

SEQ ID NO: 48892 - DNA, 98 bp, Homo sapiens
tggagctctgggcccagaggacttctggcctttggcacgtcctgctccgtggtgctctatgaccccctgaaattaaccctgcagcatgtgaacagtaa

SEQ ID NO: 48893 - DNA, 100 bp, Homo sapiens
gttacagagggccgagaaggacaggatcaggacacaactcagatgggaagttcatcgcccgggcacagcggatagagtacgactgtgaactagttccccg

SEQ ID NO: 48894 - DNA, 100 bp, Homo sapiens
ggagggcgggaggaacatgacatcgcggaggtcccgctcccggtcccctcggaggagagcccactcccctgagagacggagggaagagaggagtgtgccc

SEQ ID NO: 48895 - DNA, 82 bp, Homo sapiens
ccacgctgagcctcctgaagcgggccaaggtgcacatcaagaaagaagatgctgatatgctacaacacggatgaacctggag

SEQ ID NO: 48896 - DNA, 97 bp, Homo sapiens
gccgcgctgctcctgctgctcatcccggtggccgccgcgcaggagcctcccggagctggcagcagccagagcagccacacaagcaaatactttggca

SEQ ID NO: 48897 - DNA, 101 bp, Homo sapiens
ccagggccaggcgccgctcagaacgagttcgttttctagccaaggaaaatgtaacccaggacgctgaggacaacacagtctctttcctgcagcccaatggt

SEQ ID NO: 48898 - DNA, 100 bp, Homo sapiens
aagaactgaagccaccaacctataagctaatgactcaggcacagttggaagaggtcgtggagggcccccaagacccaacagagggatgccgcaaatgaac

SEQ ID NO: 48899 - DNA, 100 bp, Homo sapiens
acctgtagtcctagctactcaggaggcaactttggctttggggattcacgtggtggcggtggaaatttcggaccaggaccaggaagtaactttagaggag

SEQ ID NO: 48900 - DNA, 75 bp, Homo sapiens
cgcggtagatgatgatgatgaaggcatggagacctgctgaactccagtgcacccagttagacttggagcggaaac

SEQ ID NO: 48901 - DNA, 100 bp, Homo sapiens
tggaggaagtacagccagcagtactgggcctaatcgctacgtgcctctttggctatgatgcctatgtcaccttccccgttcggcagccaagacatacagc

SEQ ID NO: 48902 - DNA, 75 bp, Homo sapiens
gttcaagcgatcctcccacctcagcctgttgagcaaccgggaccccaggtccatcttgagtggcctcttcccacc

SEQ ID NO: 48903 - DNA, 91 bp, Homo sapiens
tcggggatgtggacgaaggggccgacctcctagtttggaaattttagcattcaggtgccaggaatgcagatgggacagccagtgccagaaa

SEQ ID NO: 48904 - DNA, 100 bp, Homo sapiens
aaccgtggctcacaagatgaaagagcacgtcagtactcctgcatttgtaccaacgaaaactcacgtgctgcttcatcgaatgagtggaaaaggactagct

SEQ ID NO: 48905 - DNA, 90 bp, Homo sapiens
cccgccttctccgaggcgcagaagtggattgaggacgcaatgagcccctgaagaaagagcggcttaagtggaagagcgactaccccatga

SEQ ID NO: 48906 - DNA, 76 bp, Homo sapiens
gaggccctgagcagctttcagcactggagaaatgagccgtcagactgctacagcattacctaccggtacctcgaag

SEQ ID NO: 48907 - DNA, 75 bp, Homo sapiens
gcgtgttggggaaggagctgtaaagagagattcccttcaatgaagatcccaatcccaatactcactcatcaggac

SEQ ID NO: 48908 - DNA, 88 bp, Homo sapiens
ccaggtcaagagcctctgcgagaagacctcctgacagtgagtgagactgccaatgagccccctcaagatgaaggtaattccttcaatt

SEQ ID NO: 48909 - DNA, 50 bp, Homo sapiens
cgccaatctagaatactctgcgagttcggcgtgtactgcagccactgccg

SEQ ID NO: 48910 - DNA, 75 bp, Homo sapiens
gaggtcatcaaacagtcggcctatgactcgaaggatactagttccacacgtgctcccgggaaaaccctgccagaa

SEQ ID NO: 48911 - DNA, 75 bp, Homo sapiens
cgggcctagggtaggctctcctgaatcgacaggcgccggacctctgggtgataaaagaaaatgtggctgaagtta

SEQ ID NO: 48912 - DNA, 82 bp, Homo sapiens
cagtgatctggatcgacacccagaggaacgtctggtcctaaccagtgagcactggttagtactggtccccttctgggcaaca

SEQ ID NO: 48913 - DNA, 71 bp, Homo sapiens
cagctttcttgctgcagcagagaccctgaaggaaagagatgcttttactgactctgctatcagtgctaaag

SEQ ID NO: 48914 - DNA, 51 bp, Homo sapiens
cagcctcccgagtacctgagattagcccagttctttatagctccaagctct

SEQ ID NO: 48915 - DNA, 100 bp, Homo sapiens
cgccgacggccagcacgccggcggcctggtgtgcacccccaccatccacactgccaccgtcaaggtcgtcatacaggactggttgccataaaggaagccc

SEQ ID NO: 48916 - DNA, 90 bp, Homo sapiens
tataactcaagttgtttggctaaattcttcaggtggtttcagacaccctcacaggttttctaccatgcagcaactgaacatggaggaaaa

SEQ ID NO: 48917 - DNA, 85 bp, Homo sapiens
actgttgttggaggaacactttccaggagatctataaggacaggcagaaattctcagaacaggttttcaaagtggcctcctcaga

SEQ ID NO: 48918 - DNA, 75 bp, Homo sapiens
tgtttaccgtaagctgtagtaaaatgagctcgattgttgacagtttttggctttcacccccaaccagtgaccaaa

SEQ ID NO: 48919 - DNA, 74 bp, Homo sapiens
tggccaacaagattgtccccattgccatccagcctttccgctgtgcccattgccattactcctgcaacatatct

SEQ ID NO: 48920 - DNA, 100 bp, Homo sapiens
ggccaccttcctaggctacttcaagtctggcctgaagtacaaggttgcagagcctgaggcctgtgatcagatgtacgagagcttagcgcgactccattca

SEQ ID NO: 48921 - DNA, 98 bp, Homo sapiens
attgtgaggctggagagcagcatcaaggagcttcacgacatgtttatggacatcgccatgctggtggagaatcaggttgcaaagacagttgcacagag

SEQ ID NO: 48922 - DNA, 75 bp, Homo sapiens
tggacatgtcagtgtcctttcacacccatgtgaaagagaaaaggcgacggcggattgacagaagtatgattggag

SEQ ID NO: 48923 - DNA, 83 bp, Homo sapiens
cggaactgggaccaaggtcaccgtcctagccattttgcagactctgatcacagtgaaacgttccatgggaacttgggccatga

SEQ ID NO: 48924 - DNA, 75 bp, Homo sapiens
ttccctggagaagccacagcttctgcaaagacaggaggagtgggccctttgtgccgtgtggttttgccatgttct

SEQ ID NO: 48925 - DNA, 80 bp, Homo sapiens
cgacaagccgctggcagccgcggatctcaccgccgctcaggattggagctggagtgagccttccaggaattttggctgcc

SEQ ID NO: 48926 - DNA, 75 bp, Homo sapiens
atccacacatcataaagctttaccagctattcaggattatgaaactgctcaggaacacaatgaaaatgatcagca

SEQ ID NO: 48927 - DNA, 100 bp, Homo sapiens
ggtcactttccgaagatggctgaatgtgcgcatttccattatgagaatgttgagttcggcagcatacaggtcgtccctgatggcccctggaggcgaagct

SEQ ID NO: 48928 - DNA, 90 bp, Homo sapiens
ggcctcgccgccgcggcctctgccagagccaggtggtcttttggtgccttaatgaagagtcggattttgaagcagccttcagcgtgggag

SEQ ID NO: 48929 - DNA, 89 bp, Homo sapiens
ccctattgtatttgccagagcacatctgacacggcatcagcgaggagatacgcatcctctaaccttagatgaaattttggatgaaacac

SEQ ID NO: 48930 - DNA, 100 bp, Homo sapiens
gcggatcaagagcataaaacagatgaaatgcacactgctctgatggaggcttgcatggaatcagagaagatcattgctgagttgaatgaaacttgggaag

SEQ ID NO: 48931 - DNA, 100 bp, Homo sapiens
ttctgatcatcctcactggacgccacaggggcaaggtgcaactgacatgggtgaaccccagggatccatgcggattctagtgacagggggctctgggctg

SEQ ID NO: 48932 - DNA, 100 bp, Homo sapiens
tgtgatctgcaggtccggagagacgcacagctaagatgtcaggacatcctggaagctgggaaagggtctgtggtttaccagcagagttcaaaagaatctg

SEQ ID NO: 48933 - DNA, 78 bp, Homo sapiens
cgagtgtaaagcattgcttgaggttgcccagcccatcatcttcgtttcggacagagcaaacagcaacaaggagctggg

SEQ ID NO: 48934 - DNA, 75 bp, Homo sapiens
gtcaccatttctttcacaaaccttgtgtctcaatttggctacaaaagcagtaaaagccatgatggagataaattc

SEQ ID NO: 48935 - DNA, 97 bp, Homo sapiens
gccctccgagaagaacctctacgccgacatcgacgccgcgtggcaggcgctgcgcacccggtgagaaataagaaaggctgctgactttaccatctga

SEQ ID NO: 48936 - DNA, 96 bp, Homo sapiens
tgaagagatcgactacaaggagatcgaggtggaagagggacctctactcacggttttctgaatggaaatcaggaacaaactgctcatcactgtctg

SEQ ID NO: 48937 - DNA, 100 bp, Homo sapiens
ttggatcttgcacaggaaggaattaaagcccaattttgacatgctttataaccatgtgaagcaactcctctccaatgagctactcctgacacaaatggag

SEQ ID NO: 48938 - DNA, 99 bp, Homo sapiens
aagcggccggagcggcgccatggaggagggggcgccgcggcaggcgcacacggactccttgaacaccctcgtggcactccaccagctctaccaatacac

SEQ ID NO: 48939 - DNA, 90 bp, Homo sapiens
ggaggacgccagttactgcacggaaagcagcgtcaggagccatagtacctacagcagcactccaggattttcagtcaatgcatcatcgga

SEQ ID NO: 48940 - DNA, 96 bp, Homo sapiens
ggcttcagcagaagaaacacttcctataaatctcgcccaaacaggaaagacctggtcctgtagacgggaaggagcctggacacagtgacacattct

SEQ ID NO: 48941 - DNA, 90 bp, Homo sapiens
ggcgaaggtgaagagttgtcccagctcggcccgcgggggagccccgggagccgcacggttaatttggagtggcccctggagtcagtttcc

SEQ ID NO: 48942 - DNA, 83 bp, Homo sapiens
catattacatctacaagaggggacaagtacctttatgaaccagtgtatcccaatttttcagaagaagtgaagtcaagatgaag

SEQ ID NO: 48943 - DNA, 82 bp, Homo sapiens
gatggtggaggaatacacttatttatgaaatccgcatttgctaccagcggcggccgcggcggagccaggccggtcctcagcg

SEQ ID NO: 48944 - DNA, 82 bp, Homo sapiens
ccggcggcagcgacgggccccgaggaaatctggcattttttaaagtttgcgccccacaaagaggaaatattccaaaggtact

SEQ ID NO: 48945 - DNA, 74 bp, Homo sapiens
agacatgagatggtagccaaacccccagagagtcccacgaactggctgggtatacagaaatgtccagaggccgg

SEQ ID NO: 48946 - DNA, 100 bp, Homo sapiens
gcggcagaggattcgctcccagagcagctgcggccagggcgttatggttttctatggcccggactgaatgtccctcttatgaaaaatggagcagtgcaga

SEQ ID NO: 48947 - DNA, 83 bp, Homo sapiens
cagcgggagctggacggcgagcgcgagcggcgcgagaaacatctgtccgatctttcctgtttcccccactccattcccttcct

SEQ ID NO: 48948 - DNA, 100 bp, Homo sapiens
tccacttcctcggctgtggcccttggcatctgcggttatattcaacaggagcaccaacggtggccaagaagtcactagacagaggtcagatcaaggccac

SEQ ID NO: 48949 - DNA, 137 bp, Homo sapiens
tggtggaggagaacgggatcttcgagctgctgcggacactgcgggagcaggatgatgagcttcgcaaaaatgtcacagctttatgaaaactttatcagtgaatttgaacacaggtaaaagcctctcatccgtttttc

SEQ ID NO: 48950 - DNA, 101 bp, Homo sapiens
gttctagtcaaagaacgctttctgttcaagaggcagctgcgtatttaaaaccattcaaactcctccccacgacactctgaagcagcgacggcacagcggga

SEQ ID NO: 48951 - DNA, 75 bp, Homo sapiens
cctgtcacattatttgaggtggtgaaactggggaaaagtgcaatgcaggttctgactaataagaagacgaccttc

SEQ ID NO: 48952 - DNA, 75 bp, Homo sapiens
tccctggagcgacgacggccgctgcctaagctggaaaggaaggcagtaaacaagatgctaactgatggagtgaaa

SEQ ID NO: 48953 - DNA, 98 bp, Homo sapiens
ttcaccctggtcaacaagaagaacgctctcatccggaggcaggaccagctgcagctgcttacctcaacatgctaaggacttgtgagggctacaatgaa

SEQ ID NO: 48954 - DNA, 90 bp, Homo sapiens
gggagcactggcacaagaatctgcctgtaacaatactcttcagcagcagaaacggctgctttgctggctctgcaagaaaatggactagac

SEQ ID NO: 48955 - DNA, 100 bp, Homo sapiens
ttatttgtgacttgtctcatgaacgtgatgggttttaacacagaccgcttagcatggactagaaatgcactacctcctaggacagagaaaatggctgttg

SEQ ID NO: 48956 - DNA, 51 bp, Homo sapiens
gtggggccgccggcggcccggcttcaggattacattgcagtgaaggagaag

SEQ ID NO: 48957 - DNA, 101 bp, Homo sapiens
aggcagttttggggccattggtgggggcggtggaccagggcaccagttcgacgcgctttttggtggtggcctttatgaagtctccagtgggtcagtacttg

SEQ ID NO: 48958 - DNA, 100 bp, Homo sapiens
ctgcagcaattgcaattattattggggcattcttcattccagaaggaacttttacaactggtgcagtttgatgtagtagtgtcagctttttccttaagtg

SEQ ID NO: 48959 - DNA, 74 bp, Homo sapiens
atgagaaggacaacacctacttagtgcccatgacgcttccggagacaaccctggaaacactgaagcataaaatc

SEQ ID NO: 48960 - DNA, 82 bp, Homo sapiens
ccccaggcccgccggacaccatgaaccacctggtgagaagccctaccactgcaactgggacggctgcggctggaagtttgcg

SEQ ID NO: 48961 - DNA, 75 bp, Homo sapiens
gtcttccgtgggcaacgtggccgacagcacagaatcctcactatggatgggctcattgaggacattaagcatcgg

SEQ ID NO: 48962 - DNA, 100 bp, Homo sapiens
agtggcctcggcgattatggacccggccgaggcggtgctgcaagagaaggcactcaagtttatgctacaaaagaccccacagctgtagagagagcaaact

SEQ ID NO: 48963 - DNA, 85 bp, Homo sapiens
ggcagcttttccggcctgacaacttcatctttggttatgatgtgattgctcaagcccaatctgggactgggaaaacggccacatt

SEQ ID NO: 48964 - DNA, 100 bp, Homo sapiens
gcccggtgaaactgaacttataatcgtcactggattgttggaagtgtgaatcctgctgaaaacttccgtgttctagtgaaacagaagaaggccagctttg

SEQ ID NO: 48965 - DNA, 89 bp, Homo sapiens
agtcactttcgtgtggtagccacaggctctggctgtgccctggtccagctgcagccactgacagggaagctctccactgggcccttttc

SEQ ID NO: 48966 - DNA, 76 bp, Homo sapiens
ctggcagatccttcagcaaaagctgtccttacagaatctatgtactttcatcagcgcggccagtaagtttgcacag

SEQ ID NO: 48967 - DNA, 100 bp, Homo sapiens
cagtttctgcctcttcttgtttggggattggagagggaagtgcgtctggatgactactaagattgtctttggctatagagtttttttttttaaagattac

SEQ ID NO: 48968 - DNA, 98 bp, Homo sapiens
tccggctcctccagctaccggcccaaggccatctacctggacatcgatggacgcattcagaagctcagctcacctatgaaccccgtcagcagcagcga

SEQ ID NO: 48969 - DNA, 112 bp, Homo sapiens
aacacgaagacccagatcatccaggacttccttcggaaaggctcagcaggagacatcgctattgcggttccgaggcagtgggaagagatgcggcccctggacatcgtcgagc

SEQ ID NO: 48970 - DNA, 85 bp, Homo sapiens
ctctgcgacctggggccctgggtgaagtgctccgtcgcccttgcctccaggtgtaccttccggtttcccagcacggccatcaaga

SEQ ID NO: 48971 - DNA, 100 bp, Homo sapiens
aggcatctttaggagattctggctcaattattagtcggacagcaaaagttgcagtagcaggtgcattggatcgttgtgtgatggggataacagcagttga

SEQ ID NO: 48972 - DNA, 73 bp, Homo sapiens
tgagcgtgctgcggacggcgctgcggtacatccaggccatcatgcagaagggggatacaaacataaagcccat

SEQ ID NO: 48973 - DNA, 100 bp, Homo sapiens
ggaggtggccgtggaggcagaggtggcatgggatacttggcatatcgaaattttatgattgacacgtatcgtctaaacccccaagagtatttaactagca

SEQ ID NO: 48974 - DNA, 95 bp, Homo sapiens
ccgccgccgttttcgcctgcagctgctcaccggctcttgatggaaatgtgtatgatcatctcaaggattatttaatagccttcagccggactgag

SEQ ID NO: 48975 - DNA, 75 bp, Homo sapiens
ccgcccagacgctgcccgcgggcccggccacggcggagccaagatcatccccccgaaggagtggaagccgcggca

SEQ ID NO: 48976 - DNA, 100 bp, Homo sapiens
gatcgatgtatctcggcacagcatcttggacactcatggcaggaaggagcagcgaccacccgaattaagccctggggcaggggacagggagagggcacca

SEQ ID NO: 48977 - DNA, 98 bp, Homo sapiens
gcgccagccgcaagagtcaggagaagccgcgggagatcatggacgcggcggaaacaaagctctgatggcaccaaatcttgactcctttggacgcgatc

SEQ ID NO: 48978 - DNA, 124 bp, Homo sapiens
cccaactaccacagcctgccttccgctcgcactgatgagcaggccctgctctcttccatccttgccaagacagccaggtggaaactaattctaagccagactgctggagatcaccctgttctag

SEQ ID NO: 48979 - DNA, 75 bp, Homo sapiens
cacctttcggcttctgagacggcggcagcagcggcattcagcttcgtagatcagaagtcggttgtcggtctcact

SEQ ID NO: 48980 - DNA, 74 bp, Homo sapiens
tgctcgcgctactctctctttctggcctggaggctatccagctgcaagaagaaacacacgctgctgtgccccga

SEQ ID NO: 48981 - DNA, 112 bp, Homo sapiens
attcaccaaataagctatatactttggttacctatgtacctgttaccactttcaaaagcctccccatggccacccatggaccagtcggcattcacttcctcccttctgcggc

SEQ ID NO: 48982 - DNA, 50 bp, Homo sapiens
acctgagcctgatgccatttctggtgagaagccctaccactgcaactggg

SEQ ID NO: 48983 - DNA, 73 bp, Homo sapiens
tggggactcgctctcggcttgaccgcattcttcctcccagtaagactttgaccccgacgcaggcttcagtgat

SEQ ID NO: 48984 - DNA, 100 bp, Homo sapiens
cggcagggctacgcctgcgaggatcccaccaaatattttggttgtgagctgggagcacagacccagtttgatgttaagaatgaccgttacattgtcaatg

SEQ ID NO: 48985 - DNA, 102 bp, Homo sapiens
aaggaacgaggcaaggagctaaagcagcgtgcgttcagccctgggagctccacgcaggagatcggtgaggagctgatcaacggagtcatctactccatctcc

SEQ ID NO: 48986 - DNA, 100 bp, Homo sapiens
tgtggaggggttcgaaatccaaatcagagctcccaagtgatggaccctcccacagccaggcctacagaaccagatgttcagcctgttgcctatgaagagc

SEQ ID NO: 48987 - DNA, 100 bp, Homo sapiens
ccacaatgaagctgttagtcattacaagttgctgcttcagcaaaacaagaaatttcaaaacttgatcaagtggcaccctgtgctgcgcacactaaagaac

SEQ ID NO: 48988 - DNA, 50 bp, Homo sapiens
tgaaatcactgtaacactttttaagattcaaccctatgaaaagataaagg

SEQ ID NO: 48989 - DNA, 100 bp, Homo sapiens
tgaaataacccttgatcctcctcctaattgcagtgtatgggtttcgacagaccatgatgaaattgagaatgtggccaaacaatttggtgcacaagttcat

SEQ ID NO: 48990 - DNA, 100 bp, Homo sapiens
tccatgagagatgatgttcctcccttagaccgagaagtaggagttgctgatgtatattcaagatgagtggattaggagaaaacttggatccactggccag

SEQ ID NO: 48991 - DNA, 98 bp, Homo sapiens
tgcaggtagaggcctcccaggagccctcgcacgtgttcagcctgaagcagctgctgcagagatgaggagcgggaaggcctcctgcaccctggagaccg

SEQ ID NO: 48992 - DNA, 83 bp, Homo sapiens
ctcttcaagtacatcataatcggcgacacaggtgagacgtggtcttgtaacacagtggttaagaatgtgactttggagccagc

SEQ ID NO: 48993 - DNA, 76 bp, Homo sapiens
ggattctatccctcctggtcagtacatggattcttcacttgttaagcgaaaactagaagctgaacttcttcaaata

SEQ ID NO: 48994 - DNA, 98 bp, Homo sapiens
ggctcctttttgcacccttaaatgtaaggccatggagagtaagttgcttgttggaggaaaaaatatagtagatcatacgaatgaacagcagaaaatcc

SEQ ID NO: 48995 - DNA, 98 bp, Homo sapiens
gtccagcaacatgcatgaagccgaagagtggtaccgctccaagcttggagaacagccatctctggaagaagccatcagaatagcgtctagaatccaac

SEQ ID NO: 48996 - DNA, 75 bp, Homo sapiens
atgatgatgcgagcagagaacttctttatccttcgaaggaagcctgtggagtccttggttttgatcagcaaacta

SEQ ID NO: 48997 - DNA, 100 bp, Homo sapiens
cctggccagaggactcgcgtgggagcgaggtgccggccccgacaggacggtgaggttttcaacacatactccaatgaagactatgacaggagaaatgacg

SEQ ID NO: 48998 - DNA, 100 bp, Homo sapiens
tctgtggcagaagatgatgatgaaagtgtcctccacttcttccaccttggctacccctgagatagcaagaccaatccttcctcttcttcctccttctcag

SEQ ID NO: 48999 - DNA, 122 bp, Homo sapiens
gaaaattatgggctacaagaaaagatctccctaaatccctctgttcgctttaaggcagagaaactggaaatggattccagacagcattggaaaagacatagaaaaggcttgccaatctattt

SEQ ID NO: 49000 - DNA, 100 bp, Homo sapiens
ggaggaaggaagcctggttcagcccagttcacacataccctcttcttgccaccaggaagaaggtagataatgactataatgcccttcgagaaagactcag

SEQ ID NO: 49001 - DNA, 100 bp, Homo sapiens
ccaagatagaccccagcgccttggtgcagaagctggagctggacgtgaggagtgtcacttccgtcaggagagacacgatgaggcgagtggtacgacagag

SEQ ID NO: 49002 - DNA, 50 bp, Homo sapiens
aaggaagctctttatgccttaacgaaaccaaggtgtatgttggtaacctg

SEQ ID NO: 49003 - DNA, 74 bp, Homo sapiens
ctgaaaccaactcagaatgcttctgagaagttggaccctgggcgttttttacacatggggacccaggctcgcca

SEQ ID NO: 49004 - DNA, 100 bp, Homo sapiens
actcagttgtgattcccagtcaccagggggcctttactttccaagggagtatgatcgacatgccattactgaagcaggcccagaacactgttacgcttgc

SEQ ID NO: 49005 - DNA, 83 bp, Homo sapiens
cgctgctggcgctctggctgtgctgcgcgacccccgcgcatgagttgtctgctggttctcagcttgaagaagattctgcagtc

SEQ ID NO: 49006 - DNA, 90 bp, Homo sapiens
atacaatggaggagaacagtgagagtggaagcatcagttcacagcagtaatgcacactgtacagataagacaattgaagctgctgaagcc

SEQ ID NO: 49007 - DNA, 78 bp, Homo sapiens
gctctgcgtgagtgtggtctacgagctgtttctcatctttatactcttccagcgtgagtgcatctccatccacgttgg

SEQ ID NO: 49008 - DNA, 74 bp, Homo sapiens
aaagagacctctacttagctcagcaattcttaccttgtattggcatactccacacatctgtaccattcttgagt

SEQ ID NO: 49009 - DNA, 75 bp, Homo sapiens
cagttacctccgggtgaagagcttcttccaaggattttttatcaagcagaaatgcatcgaacaacgagaatcaag

SEQ ID NO: 49010 - DNA, 75 bp, Homo sapiens
cccctgaagagttaccagatttctccgaagaccctacctcctcagacctgcctagagctggaacgttacctccag

SEQ ID NO: 49011 - DNA, 97 bp, Homo sapiens
gccacccaggccgtgcctgcccccaaccagcagcccgaggtcttctgcaaccagagagaactcgatgccaccgcaacggtattggcgaaccggcagg

SEQ ID NO: 49012 - DNA, 100 bp, Homo sapiens
gagctgcagaacagaacactttctcatgtccagggtcagattacaagggtgtttctgtggcctgggactggttagcaccaacaagtcctgctcgatgcca

SEQ ID NO: 49013 - DNA, 100 bp, Homo sapiens
attccaagtaactcttatttgcattcttgttatttaacacgggaaggaggtgacttcgcctgtgatggacttccagtgtgagcactggccagagtgacca

SEQ ID NO: 49014 - DNA, 83 bp, Homo sapiens
ccaatgttggagccgtctgcaaagtgtccccggcaagaagctcaccatggatgatgatatcgccgcgctcgtcgtcgacaacg

SEQ ID NO: 49015 - DNA, 85 bp, Homo sapiens
tatttcaaaagagaagcagtgttctcactcagatatgtgcattactgaagtgtcaaaccactgacctggaaacgtgtggagaacc

SEQ ID NO: 49016 - DNA, 100 bp, Homo sapiens
cagtttaccaacaatctctgctttgaaatttaatggtgccttgaccatggcagttggaacaaccacagggcaggttgtgggcatttttgcaggatttggg

SEQ ID NO: 49017 - DNA, 100 bp, Homo sapiens
tttgcccagctgctcgtccaaggacttggatgttgtgggtgatggtatgcagtgtcctccttcacctttgctttttgatccttcactaacccttgaagat

SEQ ID NO: 49018 - DNA, 90 bp, Homo sapiens
tttccttattggagcaagggaaagaaccctggctggggaaaagggaagtgaaaagagatctgttttcagaaaacacacccctggtggaga

SEQ ID NO: 49019 - DNA, 114 bp, Homo sapiens
gtctaccggctctcttatggcgaatgcaacccgaagagagagtgaggaattcgcagactccatatcccagctggtcacacagaagttccgcgaggtgacgacggacctcacgcc

SEQ ID NO: 49020 - DNA, 103 bp, Homo sapiens
gtcggaccccgcggtcaacgcgcagctggatgggatcatttcggacttcgaaggtgagaagccctaccactgcaactgggacggctgcggctggaagtttgcg

SEQ ID NO: 49021 - DNA, 74 bp, Homo sapiens
acaccatggtggacacttttcttcagaagctggtcgccgccggcaggaacgtcaaggtcgtgggaaataaaagg

SEQ ID NO: 49022 - DNA, 100 bp, Homo sapiens
cggacccatggtttccagtgcagcgcggagtgggcgatgccagcgtgccaggcatgagccatgagcccaagtccccttcgctagggatgctttccaccgc

SEQ ID NO: 49023 - DNA, 100 bp, Homo sapiens
cacatctatgctatatctgaatctgcttacagatgcatgcttcaaggtagtgggcagcagtcagtgacaggtgtaacctctgtggatgacagcaacagtt

SEQ ID NO: 49024 - DNA, 101 bp, Homo sapiens
ccaaggaggactcttctaggagacgagagagcgaacgccagggaccctgtgcaggcctgctcctccgtttgcaaggacggggaggtttactgcatcgacgc

SEQ ID NO: 49025 - DNA, 51 bp, Homo sapiens
aattgcctcacctgctcaccgaaagggtgcaccctgacattggcatctctg

SEQ ID NO: 49026 - DNA, 75 bp, Homo sapiens
gcaaaatggtgctgcctcacccaaagctgccagagaaactacgcataggctggaataacaagatggtgaaaactg

SEQ ID NO: 49027 - DNA, 96 bp, Homo sapiens
gtcggtgggtcggggatcggtcgcctgagaggtgtctcccagtctgctaaagccctaaggccatcaccatggacttccagcatcgccccgggggca

SEQ ID NO: 49028 - DNA, 74 bp, Homo sapiens
agcaacagcaagctcccgggcagagatgctgcaatttgtcagtaatcaagtgggagagttccctgacttgtttt

SEQ ID NO: 49029 - DNA, 88 bp, Homo sapiens
cgcgcctgcttcccgtctgcgcgagtccacgcagctccccagctgcatatctatgtgagactgaattttcctcttagacttcagctaa

SEQ ID NO: 49030 - DNA, 90 bp, Homo sapiens
ctcagccaagttccccaacggctccccgtcgtcctggtgctgcagcgaaacctgctccaccaaaacctgaacccaaaccaagaaaaacat

SEQ ID NO: 49031 - DNA, 100 bp, Homo sapiens
ctaaagaaacctctgcactagaagcaagcaggagggatctccccaacctttctgtcttcgagctggccatgaaggaattctctgatctaccttgtctgac

SEQ ID NO: 49032 - DNA, 113 bp, Homo sapiens
atggctctgccgtgccacctgctgcacccacgaatctgcccacccctcctgtaacccagcctgtttcacttcttgaaacctctgtagaggagcaggatgcaaccgacaggctg

SEQ ID NO: 49033 - DNA, 98 bp, Homo sapiens
gatggcaattttttgtggaacagaattggagcagatcctccaggtcctattgacaatactaagattgcagtcactaaatgtggtaatgtgatgcttag

SEQ ID NO: 49034 - DNA, 75 bp, Homo sapiens
tgctaaggaagctgtggcaagagatcctaagaaaaagcttatatgttcagtgtgcaataaaaagtgttcttcagc

SEQ ID NO: 49035 - DNA, 100 bp, Homo sapiens
ttctggagctggaggcacccctcaagatctgcggtgcgggagtatgagttaagaaaaaacaacttctcagatactggaaactttggttttgggatccagg

SEQ ID NO: 49036 - DNA, 98 bp, Homo sapiens
cgggatggctaccacggccgagctcttcgagatggagtcccctgtttccacaccagcagtgctgccaatacaccttttggtgccagtggtcaacaatg

SEQ ID NO: 49037 - DNA, 83 bp, Homo sapiens
ctcgcggctcacgctgagagggacacgcagtgacgagcggccgaagcagctttgcgcatcaagatggtgctcatgtggaccag

SEQ ID NO: 49038 - DNA, 75 bp, Homo sapiens
gggaaccctggtcaccgtctcctcaggaatggaagttggatacactttgtgacttgtacgagacactgaccatta

SEQ ID NO: 49039 - DNA, 76 bp, Homo sapiens
cgtcgtgatccagaagtccagagctgaggactgcctgtttgcaggtggtgatctttgtgaagtctgtgcagcggtg

SEQ ID NO: 49040 - DNA, 101 bp, Homo sapiens
ttcgttcccgggtcccgcgcgagctttcccgggataagtagctttagcgatcgggagacagccgggcgctgcaaggttttgagcaaaattttggactgtga

SEQ ID NO: 49041 - DNA, 115 bp, Homo sapiens
cagacgagatcgtcattgcagtagggacgaacttgatatttttcaagaacagggatgcacatctcttcaagaaaaagtcaagagacaactgcctttgaaagagagtgagtgactg

SEQ ID NO: 49042 - DNA, 103 bp, Homo sapiens
cctgtgacctggccgatgaggaagtactgagcctgttggaggaactggcccggaaacaggaggacgtgtttccccccgggccggcctgccgtgacgatcacag

SEQ ID NO: 49043 - DNA, 74 bp, Homo sapiens
tcctgtcaccaacaaagatttcaggtgtgatccctcacatccacaaatctctgattggaaagaagggacagcag

SEQ ID NO: 49044 - DNA, 75 bp, Homo sapiens
ggagggccgcttccgcatccccttcttcatgtctcaagtgggctccctgctggccacctatggctggtacatcgt

SEQ ID NO: 49045 - DNA, 98 bp, Homo sapiens
tttgggatcccgctgtggtacttctcgcagtccccgcgcgtggtcatccaggatgatcggctgaatgtaacagaggaactaacgtccaacgacaagac

SEQ ID NO: 49046 - DNA, 88 bp, Homo sapiens
agatgtgatgttggagaactatagcaatctggttttcttggactgaaactgttgaggagcccatggaggaagaagaagcagccaaaga

SEQ ID NO: 49047 - DNA, 101 bp, Homo sapiens
cccacaccatgctgaccccgccgttgctcctgctgctgcccctgctctcagctctggtcgcggcggctatcgacgatgtcatcaatgcttcttggtgggtc

SEQ ID NO: 49048 - DNA, 130 bp, Homo sapiens
ttccgcgggcggtgtagaggcggcggacgggccggagggaggatgttaaagccccgcgaggctaagaatattgtacacaaagattcttgatgttcttgaggaaatccctaaaaatgcagcatatagaaag

SEQ ID NO: 49049 - DNA, 100 bp, Homo sapiens
ggaatatttagcaaggattcaaggctttcaggctgctgatactttggctgtgaggcaaaaaaggagaatttatgatatcaccaatgtcttagagggaatt

SEQ ID NO: 49050 - DNA, 75 bp, Homo sapiens
cacatggcccaggcagaccttgcagtcaaagcctgtagtggtggagacacgcccagtggatgatcctactgctcc

SEQ ID NO: 49051 - DNA, 100 bp, Homo sapiens
ggcgagtcgggctctggaggaaaagaaaggctgaccggttccctgatgtgttacctgcttctgctactgatccaaactgcagaacttctcattcatcccc

SEQ ID NO: 49052 - DNA, 82 bp, Homo sapiens
gctttttctgctctgagccggacgccggaatggagtttgaggaagagaagctgcacacatacatgtaagagaagcaaaaatg

SEQ ID NO: 49053 - DNA, 90 bp, Homo sapiens
tagaaaggctcaacgagaacaagctatcagattggtttttcagcagcagatgctgtaacaggactgaaattggtagaagagggagtaccc

SEQ ID NO: 49054 - DNA, 80 bp, Homo sapiens
agctggagctggagctgtcggaagaaagaagatgctgatatgctacaacacggatgaacctggaggacgtggtgcagtga

SEQ ID NO: 49055 - DNA, 100 bp, Homo sapiens
tgtatcttgtctacaccatcatgtttctggtgcctacaccaactaatgttacaattgaatcctataacatgaaccctatcgtatattgggagtaccagat

SEQ ID NO: 49056 - DNA, 75 bp, Homo sapiens
cttccccggccggtccctcgcctcccggccgagctgacgagcactcggccgcagccaagacgggcggctgcttcc

SEQ ID NO: 49057 - DNA, 100 bp, Homo sapiens
ctggagctgcccggagttccgctcctgcgggcttagcaggaaagggtgcctaaggagcagattctggccagatttctgaagaaacatggaattttctgca

SEQ ID NO: 49058 - DNA, 100 bp, Homo sapiens
tgcacagcactgacaagggccccaacagtgcattagtgcagcagcttatcaaagcacctgtgcctgtgtggaatactatgggaaggctctggaagtgctg

SEQ ID NO: 49059 - DNA, 100 bp, Homo sapiens
ccttgtacagggacgtgatgttggagaactacaggaacctgctttctctcgatgaggataacatccctccagaagatggacgtggcccagtggaacatcg

SEQ ID NO: 49060 - DNA, 50 bp, Homo sapiens
cactgcgggccggcgaaagctggccgccatggcatcagatgaaggcaaac

SEQ ID NO: 49061 - DNA, 98 bp, Homo sapiens
cggctcctccagctaccggcccaaggccatctacctggacatcgatggacgcattcagaagtttgcctatctggggcgcctggctcacgaggttggct

SEQ ID NO: 49062 - DNA, 51 bp, Homo sapiens
tatgtctttattactggagttcattgggcagcctgcttctgcaaagtggta

SEQ ID NO: 49063 - DNA, 88 bp, Homo sapiens
gctggtagggttgctggaacaggcagccggctacttcaccatggttcctttgcccaaagactcaacaggtgcagcagatcccccccag

SEQ ID NO: 49064 - DNA, 75 bp, Homo sapiens
gatgaatgtagagagaaagtacttcaaggatgataatgaagataattcaaatgatgggacccagccatccaaaag

SEQ ID NO: 49065 - DNA, 74 bp, Homo sapiens
tgccgccgccgccgcgttggcctcgccgcccctgctcgggtgcatgaatacctcagaagtaaactctgttcact

SEQ ID NO: 49066 - DNA, 75 bp, Homo sapiens
gaaaacaggtctgtttctgggttccttcactttgacactgctacaaaaggaagccctcaatctagaagagtagag

SEQ ID NO: 49067 - DNA, 100 bp, Homo sapiens
tcagcgctgagcgaaagagaggcctcccggctcgacaagttcaagcagctgcttgccggccccaacacggaccttgatggatcctgagcttgaaaaaaaa

SEQ ID NO: 49068 - DNA, 51 bp, Homo sapiens
cggagatgaagaagaagagccagccttgaagcccttagtgtatacaaggaa

SEQ ID NO: 49069 - DNA, 101 bp, Homo sapiens
tgaagaatgtgagagctacaccttctaccatgaggcttccaagcgtttctggtgaaccaggctgttaagtgcaccagaaaaataaatttagaacagtgtga

SEQ ID NO: 49070 - DNA, 75 bp, Homo sapiens
ctggagcacggagctgcagccggttgggccggtgtactttcccgcttggtggaaccgtgggggacatagaaagca

SEQ ID NO: 49071 - DNA, 90 bp, Homo sapiens
cggatgagaaatctttcgagaatattcagaactggatgaaaagcatcaaggagacgctgaccggaaaggagattgagattgacattgaac

SEQ ID NO: 49072 - DNA, 100 bp, Homo sapiens
cggcgctgcagcctgagccgggcggggtcccgctgcactcgtcctggaccttctggctcgacagaataactgaagtgaagtgatggactccgatttggag

SEQ ID NO: 49073 - DNA, 90 bp, Homo sapiens
atttagctttagttggtggtggaaaaaagccgaaataccctcccaacaaaggtgctggagaatctggtaaaagcaccattgtgaagcaga

SEQ ID NO: 49074 - DNA, 100 bp, Homo sapiens
gcggcacccccaggccaggggcacctctggtggggcagaagctcggtgctgattatcacaactgtttggtgacctacttcactgacctgtgaggattcct

SEQ ID NO: 49075 - DNA, 99 bp, Homo sapiens
ccaggaaggaagctgtttccatatgacccttatgaacgagctcgccaaaagatgttattggagctattttgtaaggctgcaagaaagcgtaagattgcc

SEQ ID NO: 49076 - DNA, 75 bp, Homo sapiens
ctgtgtgctggccatcatcgtacccattcccaagtcccacgaggcgatgttgatcttgtctcagaatattgccca

SEQ ID NO: 49077 - DNA, 90 bp, Homo sapiens
cagagatctacatcttagtatcacggacgcagtgatgactgcagtgagggcatgggagttctggaacctgaagaccctgcaggagaggga

SEQ ID NO: 49078 - DNA, 97 bp, Homo sapiens
agttcaatcacttggcgtgacttcactacttttaagcaaaagaagtggccaaatcaatgaaggtccctgtatatgagaccccagctggatggagatt

SEQ ID NO: 49079 - DNA, 75 bp, Homo sapiens
ttcgcagtggtcgcttcttctccttgtaaactgtttcacgttagacctgtaacccaaggagatgtgtatagagct

SEQ ID NO: 49080 - DNA, 75 bp, Homo sapiens
ctggcatctcaatgcatctgggaagctacctgcattaagtcaggactgagggtcggtgtacccgagagaactgca

SEQ ID NO: 49081 - DNA, 50 bp, Homo sapiens
aaagagtcaacagcagtggcaacaggtgagatttcaatggaaaaagtgaa

SEQ ID NO: 49082 - DNA, 50 bp, Homo sapiens
gcggaggtcgataagctggaactgatgaaaggcctaaagaatgtatttga

SEQ ID NO: 49083 - DNA, 96 bp, Homo sapiens
actgctcggcctccacatcccaaggtcgcaaggccagcacggcccctggggcggagggtcgttccaggggtagaggaggcatgaaggatgaccgtc

SEQ ID NO: 49084 - DNA, 90 bp, Homo sapiens
gaaggatccgagcctgtggccgcccatcagggggaagaggcgtcctgttcttcctgggggactggcagaatagcctaacatggcagacca

SEQ ID NO: 49085 - DNA, 89 bp, Homo sapiens
cgcgccaccggcatggcgctccggggcttctgcagcgccgatggctccgacccgctctgggtgaaaaattagacgatttcaagaattgg

SEQ ID NO: 49086 - DNA, 95 bp, Homo sapiens
tattcacagacaactccaccaattgtacagatctctgacatctacattagtggagaatcaggggatatgtcagccaaggagaaactactcctgtg

SEQ ID NO: 49087 - DNA, 75 bp, Homo sapiens
ccacggtggaagcgagagaggaggggtgagcttgtcggccacagactgctacattgtgcatgagatctacaatgg

SEQ ID NO: 49088 - DNA, 75 bp, Homo sapiens
ctcttcccggttgatcgtggattatttgagactggcatccttcgaaccaactgtgtggactgtttagatcgcacc

SEQ ID NO: 49089 - DNA, 75 bp, Homo sapiens
cacacgggtatcatcttctatgctccatacacagcgtcactggtgtaccgcctgccccagtcgtgggtggggccc

SEQ ID NO: 49090 - DNA, 100 bp, Homo sapiens
ggtggaatatgccaaggaaaaactggagagcttcatcaaaaatagtgatagctttgataagccaggagtggtggctcacacctgtaatcccagctctggg

SEQ ID NO: 49091 - DNA, 98 bp, Homo sapiens
aaaagttcaaaaactgaaggactctgaagctgaggttattcagcttctcaaggctggaaaagcgaaggaagtttcctacaatgcactagcctcacaca

SEQ ID NO: 49092 - DNA, 100 bp, Homo sapiens
cttttccacagggaattgagttggttatcctacctacaaagaaaaagtaaagaaaaggcctggaggccgcccagaagtgatctacaactatgtccaaaga

SEQ ID NO: 49093 - DNA, 75 bp, Homo sapiens
ggggcggcggccacgccaaggacgggtatcgatatcctgaagcttgtagcagcccaagtgggaagccagtggaaa

SEQ ID NO: 49094 - DNA, 101 bp, Homo sapiens
gcggcctgcgccgccgcgcgagaggaagtctcctgaaatctgcccctctcctactgcctggaaggcacttactcaatgcaggcttactggctgctagtgtg

SEQ ID NO: 49095 - DNA, 75 bp, Homo sapiens
tttgtcgtcaccacaaatccagtgaacaacgatggcattttgaaaacagcaaagtataaagtttggataaagcct

SEQ ID NO: 49096 - DNA, 75 bp, Homo sapiens
cctggacgggagagtctgccggcggagaatataaggacctgcgcgaagtctggctcaattatcctctccacccac

SEQ ID NO: 49097 - DNA, 95 bp, Homo sapiens
attcaaactctgggacctctgcagtgccaaccaaatcctaatatcaatccacaggatataaagtaattacaagtagtggctacagccccagatca

SEQ ID NO: 49098 - DNA, 82 bp, Homo sapiens
ggagctgcaggaaccagactgggggcgagctgagcacctgtagtcaatcacacgcagacaatgcagatcttcgtgaagactc

SEQ ID NO: 49099 - DNA, 98 bp, Homo sapiens
tatgatgctattgtggttgaacaatggacagtcctggaaggggacttgatctcatcttcatgccaggccttgggtttgacaaacatggcaaccgactg

SEQ ID NO: 49100 - DNA, 100 bp, Homo sapiens
tgcaggaactctacaacccaatccagcgtgagtgcatctccatccacgttggccaggctggtgtccagattggcaatgcctgctgggagctctactgcct

SEQ ID NO: 49101 - DNA, 75 bp, Homo sapiens
agggatatgcagactacagtgaatgagtccctggaacgccagatgcgtgaaatggaagagaactttgccgttgaa

SEQ ID NO: 49102 - DNA, 88 bp, Homo sapiens
cagaaggcttatgaggatggctgcaagactgtcgacctaaagcctgactggggcaagctcgccctcccctacctgcggaagagtcaag

SEQ ID NO: 49103 - DNA, 126 bp, Homo sapiens
gaacatcgaggcccccagtccccaagcagggctccatgggtcgggcggcgggcattgggtactgccagggggatggttaccgcatcggctttggccagtgtgctggaaaagtgctgcctgctctcc

SEQ ID NO: 49104 - DNA, 100 bp, Homo sapiens
ctgtgacctgcaaaagtacagcagagctggaggctgaggagctcgagaaattgcaacaatttctctatgaatcatcatcaagaactctgggagaactttt

SEQ ID NO: 49105 - DNA, 75 bp, Homo sapiens
aagaaggcgagcagggtgcgggagagccccttgcagaagacgccgtacgaggaggagagacttcagcatgcaaac

SEQ ID NO: 49106 - DNA, 98 bp, Homo sapiens
tgagccggcgcggggtcggcgctgggctggaggcggcggagcgcgagagcttcgagcggactcagggaactctaatgatccaggacaaagaagttacc

SEQ ID NO: 49107 - DNA, 90 bp, Homo sapiens
ctcctgctctgggaccggaggagacatcggcctctgcaggcttgccgaagaagggaggctcttgtcaggatggtgaagctgttcatcgga

SEQ ID NO: 49108 - DNA, 83 bp, Homo sapiens
cggtgttaacgtctgctccagctcgcagcccgctgctggacaatgcagatcttcgtgaagactctgactggtaagaccatcac

SEQ ID NO: 49109 - DNA, 75 bp, Homo sapiens
cccaggccgcagctctgtataaggatattgtgattcagcaggacgatgagatccgcttaaagattgtggggaccc

SEQ ID NO: 49110 - DNA, 76 bp, Homo sapiens
agcgtttcagcgcctacaattacagaccaagatcactccatggatgaaatgacagctgtggtgaaaattgaaaaag

SEQ ID NO: 49111 - DNA, 90 bp, Homo sapiens
ctgtcctcgtgtgtactgtgagaaccagccaatgcttcccattgaaatgtgagcgtgtactgctggccctattctgtcacgaaccctgcc

SEQ ID NO: 49112 - DNA, 100 bp, Homo sapiens
ggaggtagaaaaaacacaaatgaattctataagaccattccccggttttattatagggttgggcagcccccttcccgaagcttctggacggaaggcccca

SEQ ID NO: 49113 - DNA, 82 bp, Homo sapiens
gtcgggttattcgagtgaccgagaccgcggccgggaccgaggctgccccccaagagggacgagacggccctgcaggaggagg

SEQ ID NO: 49114 - DNA, 100 bp, Homo sapiens
gggcagcatatgaaagtggattatggaccgacgcagatatccaggcattcttcatgagcatagacagtctgtgtaagaagtactccagggaaacctccca

SEQ ID NO: 49115 - DNA, 82 bp, Homo sapiens
agccgatccagcctgcggagcctgtggggcagaaagtctttatctcttgcaaggttcagtagtggcagatcatgactacatt

SEQ ID NO: 49116 - DNA, 74 bp, Homo sapiens
gccgcctctgtccctttcccggatgttctcagggctgcgcagggacctgccgccctcggtgcacctgctcacgc

SEQ ID NO: 49117 - DNA, 98 bp, Homo sapiens
tccccggtggcccaggcctcggactccgcggccggcccggcgcggcccagcgccctcaggttgaaggtcgaggagctggaaggcgagcggagtcggct

SEQ ID NO: 49118 - DNA, 82 bp, Homo sapiens
acttactcgattttccccacagcacacacatgcttcatgatgatccaagcagaagaattcctgctgaaatggcattgtgcag

SEQ ID NO: 49119 - DNA, 125 bp, Homo sapiens
ctcagcatggtcagtgccgtttaacctttattgtggtggagtccaccccgctgtgtgtctttggtgcaacactaacaaggcttgtctggactacccagttacaagcgtcttgccaccggcttccc

SEQ ID NO: 49120 - DNA, 100 bp, Homo sapiens
gttgggttcagttttcttcagaagaaggacttcggaatgcactacaacaggaaaatcatattatagatggagtaaaggcatcaacatcgaaagctaccag

SEQ ID NO: 49121 - DNA, 75 bp, Homo sapiens
cagcggtgggcagtcctagtccgaggtgccaccgtggaaggacagaatggactcagaattcatgattgaagaaat

SEQ ID NO: 49122 - DNA, 73 bp, Homo sapiens
ttatggactttctactttcaagtcacccacaaaagctgtatataatgccagacattggaatcatccagattca

SEQ ID NO: 49123 - DNA, 105 bp, Homo sapiens
cgcttgaaaagactgggcttgtccttgctggtgcatgcgtcgtcggcctctgggcagcaggctggcctgctgtctgccttgggctccctgatattgatgatttgg

SEQ ID NO: 49124 - DNA, 100 bp, Homo sapiens
agtgctggcttgggaacctactacagtgactccatcttcttcctctcggtcgccatgcatcagatcatgcccaaagcatatagcactttctacattgtgg

SEQ ID NO: 49125 - DNA, 74 bp, Homo sapiens
ggggacttaaaatttcccctgaagatatttcagcattccaaaccagatgctatagaaagcgcaattggtggtaa

SEQ ID NO: 49126 - DNA, 74 bp, Homo sapiens
ggtaatctacatgctcatccaggcctataagcaactttgtaagtgtggctttgagaaatgtcgaggaatcatcg

SEQ ID NO: 49127 - DNA, 125 bp, Homo sapiens
aagagggcagagccgtgcatggggctgctccccaggacctgagcaggaacctggagttttcaggaaaagaagcccatctgtgtccagagatcagaatagaagatacgaccaaagggaagaaagag

SEQ ID NO: 49128 - DNA, 83 bp, Homo sapiens
gatccagcaaggtcggcagagcaaggggcttacgcagaaggacctggccacgcgtgaagcctctgcgggccttcttttcgtct

SEQ ID NO: 49129 - DNA, 74 bp, Homo sapiens
aagaatgaacactgtccttcaaaacgagtgaagacattcagtgaagcttgcctgatggtaaggaaaccagccct

SEQ ID NO: 49130 - DNA, 88 bp, Homo sapiens
cccagtctctcagtattgcctcaaatgctgctcatggaagatccaaatccgactcgctctccgtctccagcaatgacgccagtccacc

SEQ ID NO: 49131 - DNA, 75 bp, Homo sapiens
tccgcgaagatggcgggccgggatttctctgaaggatccagagttgtctcctatggtccatgcagaattttctgt

SEQ ID NO: 49132 - DNA, 98 bp, Homo sapiens
gatacatcagtgtgggaagccaagcagatacaagcactcaaggagttgcccctggtcctgtaattggacttcaggcaccatctactggtcttcttggc

SEQ ID NO: 49133 - DNA, 97 bp, Homo sapiens
aggcctgaaaaagaaacaagtaaaactggatgagcagctcatggagaatgtatgacaacatgtccacaatggtgtacataaaggaagacaagttgga

SEQ ID NO: 49134 - DNA, 82 bp, Homo sapiens
gcgctgctgccgcgattacccgggagaaaagccttacagatgctcatgggaagggtgtgagtggcgttttgcaagaagtgat

SEQ ID NO: 49135 - DNA, 100 bp, Homo sapiens
gggcccagcacagccagcaccgcacgccctgcaagggaggatggacaaccggaaattttctacacattttggaattcagttactcaggcactttcttctc

SEQ ID NO: 49136 - DNA, 90 bp, Homo sapiens
atgggctacccactagccgtgaaactgggaaccatcactcctgacggggcagcttttcatgcaacacccaacacttataagcggaagaac

SEQ ID NO: 49137 - DNA, 50 bp, Homo sapiens
agggagaatccgaggaatcttctgcacagaaccaggaagacagcgcttcc

SEQ ID NO: 49138 - DNA, 83 bp, Homo sapiens
cgtgtccctggcattttaggtgtcggttgggtagggacccagacatggagctgcgggaagaagcctggtctccggggccgctg

SEQ ID NO: 49139 - DNA, 100 bp, Homo sapiens
acatacctcctttttctcatagtcttgtgcatctaatggctgttgatggtgggtgtggggacactggagactgggaaggtcgctggaaccatgtaaagaa

SEQ ID NO: 49140 - DNA, 90 bp, Homo sapiens
gtcctctattggagtgcagagtgggaatctcagtctttgaggagattttaatctcacatgcaaattcagtggcttagtcagcttccccac

SEQ ID NO: 49141 - DNA, 50 bp, Homo sapiens
gactacagccacctgtcctccacgagcacgacaaggtgctggggcaacca

SEQ ID NO: 49142 - DNA, 100 bp, Homo sapiens
aagaaattcccacctgtcaaagaggcaaccctgctcagcccacttccctccactacatgaatccttaccaactgaatgcctatggtatggcactaaaagc

SEQ ID NO: 49143 - DNA, 51 bp, Homo sapiens
tgaatgcatcagaaccatgcacgggcattttgtcagtgatgctgatctttg

SEQ ID NO: 49144 - DNA, 96 bp, Homo sapiens
aggagtcatcctcacctgttaggacatccgggaactgatcgaggtggatgatgtaatggaggatgattctctgcgattcggtcccaacggaggatt

SEQ ID NO: 49145 - DNA, 100 bp, Homo sapiens
tccgtatctgcctaggcattttgctgtctcctcctaatacgaggccagcagtaccaggaacatttggccctctgcgaggatcagatcctgccaccttgta

SEQ ID NO: 49146 - DNA, 74 bp, Homo sapiens
aagtcatttctactggacttcatgcttagatacatgtataacaagtgttcggtgaccagtgacttggattttcc

SEQ ID NO: 49147 - DNA, 81 bp, Homo sapiens
aaggagacccgactgcaactgctggattgctgcaaggctgagggacgagaacgagaccccatatcatgtgaacctcctcct

SEQ ID NO: 49148 - DNA, 83 bp, Homo sapiens
ctgcgagcaccagctcccttctcctcgccactccaaggttgcagacgaagcagctacgagttccagggagctctgtcctggtg

SEQ ID NO: 49149 - DNA, 82 bp, Homo sapiens
ctatggccgtgccctggggctgagccctcaggtgacagagctgaatgaacctctctccaatgaagatcgaaatctcctctct

SEQ ID NO: 49150 - DNA, 118 bp, Homo sapiens
ataaacgaggggctggaacacctcgccaaagcagagaaatagactcacaccacccggcaagaactgctcactacggctccctgccccagaagtcacacggccggacccaagatgaaaa

SEQ ID NO: 49151 - DNA, 82 bp, Homo sapiens
taccagtggaggccgacttcttgtatgcatactccacagcacctggtacatcaggaacgtctctatcaagaatacaatttca

SEQ ID NO: 49152 - DNA, 73 bp, Homo sapiens
tccgccttctctgtcagctctttccccgtcagcatcccagccgtgctcacgggggagaagcgagcggacatcc

SEQ ID NO: 49153 - DNA, 78 bp, Homo sapiens
caaaacaggcatcaccctcaagagctgccggagacaggaacgggttaacttgtttggtttctggagccgattcaacgg

SEQ ID NO: 49154 - DNA, 75 bp, Homo sapiens
cctcatcttaggggataaatttacggagaaatggcagcacacgttgcagaacttcaaagatatccgatatcaaaa

SEQ ID NO: 49155 - DNA, 58 bp, Homo sapiens
cgtgtctactcaggagagaaggcacaggagatcttaggcccagaaaggcagattcaga

SEQ ID NO: 49156 - DNA, 82 bp, Homo sapiens
tccagatcgggatttacgtggagatcaagcgcagcgatgttggaaaatggatataccttatttgattatgatgttggactga

SEQ ID NO: 49157 - DNA, 75 bp, Homo sapiens
ccgagagcgtgaccgagagcgcgaatatcgtcatcgttagaagatccagctccaggtcccacaggggctcttctt

SEQ ID NO: 49158 - DNA, 110 bp, Homo sapiens
gtcctgtgaattctatgctctagcttgggttaagggatttggaattgcacttgtttcagaggatcatggggttgacagcagcattttccagaatcctaaaaagcttcatc

SEQ ID NO: 49159 - DNA, 99 bp, Homo sapiens
tgccatggatgccaccaagctgatggcccactgcgtgaccttggttcagctgtccatttcctgtgaccatctcattgacaaggacatcggctccaagtc

SEQ ID NO: 49160 - DNA, 90 bp, Homo sapiens
cctggcggtggggctgcggcgcctgggactgcaccgcaccgagggcgagctccagaccaagatcactccatggatgaaatgacagctgtg

SEQ ID NO: 49161 - DNA, 82 bp, Homo sapiens
cagggagacccattttggacttgtgacctccgggacgaaatgaaagctcattagcatctacactgaagacgctcctgttctt

SEQ ID NO: 49162 - DNA, 98 bp, Homo sapiens
gcggagacggcatccagtggggggcgagcctctcagccggccgggatggctaccacggccgagctcttcgaggcatggaagaggagatggttcgtgtt

SEQ ID NO: 49163 - DNA, 50 bp, Homo sapiens
cagctgcggaatttgcggctttggcaggaactcgaatcatttatgacaga

SEQ ID NO: 49164 - DNA, 90 bp, Homo sapiens
ctggaaactgttctgagcaggaagggcagcaggttttcaaatggaacattttgatgcatcacttagtacctatttcaaggcattgctagg

SEQ ID NO: 49165 - DNA, 100 bp, Homo sapiens
caggaggccaggggtgtcgccatgatttttacataccgttgctcaaaagagggctgcaagaagaaagagatgctgcagatggtatgtgcccaatgtcacg

SEQ ID NO: 49166 - DNA, 82 bp, Homo sapiens
gagaacactggatagacttcgaacatttaaacagcggatcctctggttggaagcatagccactcagtatttgaccaacagag

SEQ ID NO: 49167 - DNA, 75 bp, Homo sapiens
ctgcaagggccaagcacgctgttccagatggagttcgctcttgttgcccaggctggaatgcaatggcatgacctt

SEQ ID NO: 49168 - DNA, 98 bp, Homo sapiens
ctggtcgatgaagaggatgatgtttttggtgaagattctgatggtagaattaaccatgggcgaattgcttatatttcttcgaagagctgctctaatcc

SEQ ID NO: 49169 - DNA, 75 bp, Homo sapiens
tttcctgcctatcatttgaagacgttccttgaggaggtttgaaaaaagtaaccagagagcacagagaaatgctgg

SEQ ID NO: 49170 - DNA, 100 bp, Homo sapiens
aagtctgatgagaagctgttcctcgttctcttttttgataataagagaagttgaacccagtgacttgattgtaaaaatttacagagcggaatcatatgct

SEQ ID NO: 49171 - DNA, 89 bp, Homo sapiens
ggctgcagccgcgaatgccgtagtgagtccatgacagaagaaaccctgaaaagggcaaaggagattgggttctcagataagcagatttc

SEQ ID NO: 49172 - DNA, 100 bp, Homo sapiens
tcctgctcaagacctgcaaactcatctacgactccatggccctcggcaacccaggtgccagaaccctgtggagcatcatgaactgggaagagtagctgag

SEQ ID NO: 49173 - DNA, 75 bp, Homo sapiens
gggatcgatgtttcaatattggaagcgctttgatttacagcagctgcagtgtcagagatggctttggattccccg

SEQ ID NO: 49174 - DNA, 100 bp, Homo sapiens
gtgtatcctggccgactgcacattgatcctcgcctggagtggagatggctatttcgaaaacagcccactgatgtcccagccagtgtgggagaggtatcgc

SEQ ID NO: 49175 - DNA, 82 bp, Homo sapiens
gcactgctttccactcggctcctgtcgtccgttctctcaggctcccgttcaggtcctgaacgaggctgtgggggccctgatg

SEQ ID NO: 49176 - DNA, 82 bp, Homo sapiens
ggaggtgttcgagaacgaccccgagacgagctaatgtcaaaccccgaaattccacaccacctagtttggcaagaaatcctgc

SEQ ID NO: 49177 - DNA, 100 bp, Homo sapiens
ggaaaaagagacataccctagaaaagatgactgattctgtcacttgtttgtattgcaattccttttccaagcaaagagcccagaggctcatcaggacttg

SEQ ID NO: 49178 - DNA, 82 bp, Homo sapiens
gttgagcagcccatcgtgcttaaagaagggattttttatcaagcagaaatgcatcgaacaacgagaatcaagatcactgagc

SEQ ID NO: 49179 - DNA, 114 bp, Homo sapiens
ggaactgcgcagcctcttcgagcgccgcggacgcgtcatcgagtgtgacgtggtgaaaggtgagaagccctaccactgcaactgggacggctgcggctggaagtttgcgcgctc

SEQ ID NO: 49180 - DNA, 90 bp, Homo sapiens
cggcggccgagctgcggcagagcgtgtctgaggtggtgcgcggctccgtgctcctggttttagattcaggaagactgaaagaatatgatg

SEQ ID NO: 49181 - DNA, 98 bp, Homo sapiens
ccactccctgcgccgcctcctcccaccctgagcagagccgccgaggatgataaacacccaggacagcttcgagagctgtgcccaggagtgaacaacca

SEQ ID NO: 49182 - DNA, 101 bp, Homo sapiens
ggaaatttcaggaattaagtcaaccacgttctcataccagcctgaaggtctgaaggggcgtctcgattacctgagctctctgaaggtgaagggccttgtgc

SEQ ID NO: 49183 - DNA, 97 bp, Homo sapiens
cggagacccgggagcaggagctgggcctaggtctgcgccctggcagttgtgaaaaacttcaggacaaaaatgtttcatttaaggacttgtgctgcta

SEQ ID NO: 49184 - DNA, 83 bp, Homo sapiens
tacgaccaggacagggacgagcactgggtgaaggacctgggcagcctcaatgggatgtggcaaaatctggcaaaggcagagac

SEQ ID NO: 49185 - DNA, 51 bp, Homo sapiens
ctactgcctgcctgcctgcctgctacgaaaaagcttgtggtgaaggggggc

SEQ ID NO: 49186 - DNA, 51 bp, Homo sapiens
ataatgaaatgctgactaaggaacaagggagaggagcggaagaccttctgg

SEQ ID NO: 49187 - DNA, 98 bp, Homo sapiens
gagattctacttattcatcagtttgttgtgcttgtcaagatcagtctcggtcaagacaagaagatccagaacagttaaggctgaaacagaaggcaaag

SEQ ID NO: 49188 - DNA, 100 bp, Homo sapiens
cgccgctgaccgacaggcagacggactcggtattggagctgaaggcggcggcagagaacttgccggtgccagctgaggatgctgaaaacgccattcaaca

SEQ ID NO: 49189 - DNA, 98 bp, Homo sapiens
cgggtaacaagatacccactgatcattaaaaatatgatgtctttctacctaaagatattgacctagacagtgtggatatggatgagacagagagggaa

SEQ ID NO: 49190 - DNA, 83 bp, Homo sapiens
tctcatgcacagaggcaacaaatggcaactttctgagttcgagactataagaggcttacccccatttctgtgctggaccatgc

SEQ ID NO: 49191 - DNA, 87 bp, Homo sapiens
aacaagccgtggaataggtgtatcaagtaatggtgcaaagcctgaaaatgaccagtcaacaggggacataaaagtaattggtggaga

SEQ ID NO: 49192 - DNA, 74 bp, Homo sapiens
tctctgctgagtgtccagatcctccaaagacagatctggtgtctgatgatttgtgagcctcaagtgactactct

SEQ ID NO: 49193 - DNA, 80 bp, Homo sapiens
ctggagggactctccttctcaccgttccgggaacaaatgctagatacgtggcatccttagctgggcctggagggcaagtg

SEQ ID NO: 49194 - DNA, 81 bp, Homo sapiens
aggagaagctgtggcagcagctcagaagaggacgtgacaaaggagagcatgcttccagctggagctgagtccaagcacaca

SEQ ID NO: 49195 - DNA, 98 bp, Homo sapiens
tactcagcccctgcgaacctgtatgtgcgagataacaatgaagatggtgccaaaactgctttctcctttggttaaagattgggctcccaaagcattta

SEQ ID NO: 49196 - DNA, 90 bp, Homo sapiens
cgatgatgaccgccggggcatccagcaactttatggtgcggttcctcatctgagaggctctccgtgcaggcgatggggcaagacagaaaa

SEQ ID NO: 49197 - DNA, 87 bp, Homo sapiens
gggaggcgcggcgagggcgccagattgtcactgctgttccaagggcacacgcagagggatttggaattcctggagagttgcctttgt

SEQ ID NO: 49198 - DNA, 83 bp, Homo sapiens
ccgagggtcagtttcccgagtacccaccagagggcgccactaaactgggtgctacaaagtacacagataaagacaatggaggg

SEQ ID NO: 49199 - DNA, 112 bp, Homo sapiens
ggcggcggtagcgtctctgtttccttgtgggcgctcgcgcggccctggggtgccaagctgttctacctttctggaatggtgcatggagaatatcaaaaccaagaaatccaca

SEQ ID NO: 49200 - DNA, 80 bp, Homo sapiens
gcaccgcagatgttgtcaaggtggcctaccaggaggccaggggtgtcgccatggcacgtgtggttctcaaatataggcat

SEQ ID NO: 49201 - DNA, 100 bp, Homo sapiens
tgtccaacgccttccagctccggctcccgctgcctgcaccatgtccgccagagttttggagtccagaacatgtaaagttttttcacccattataaacaat

SEQ ID NO: 49202 - DNA, 82 bp, Homo sapiens
gcaggcaggccctgagcacgctgctgtgtgagcagcagacgagccaaactcaggctgtaccttgagcagctcaagcaactgg

SEQ ID NO: 49203 - DNA, 75 bp, Homo sapiens
ccaaaaagcagctggacagcacaattggaatccaccctgtctgtgcagaggtatttaccttgctgtggattgctg

SEQ ID NO: 49204 - DNA, 88 bp, Homo sapiens
taaggattccaagtaactcttatttggaggttgtgcccagacatttccttcttccagagggccactgactacccttgcctcctcatcc

SEQ ID NO: 49205 - DNA, 88 bp, Homo sapiens
cggatttaacttcatcttctggatgccatggacaatattaccaggcagaaccaattctacgatacccaagtcatcaaacaagaaaacg

SEQ ID NO: 49206 - DNA, 90 bp, Homo sapiens
gtgaaggaccccaactctggactgcccaaatttgtcctcatcaactggtatcgtgaagagcgcttccgactgacgagcgagagcaccaac

SEQ ID NO: 49207 - DNA, 74 bp, Homo sapiens
atttacgcggatgtcggcgaagagttcaaccagaagaaaaagtcagcactttttgaagtgtctgaggttatacc

SEQ ID NO: 49208 - DNA, 74 bp, Homo sapiens
gccactgtctgtgaagcagccgccctggagaaacagatcggaaccatcactgttgctggaggcacctgacaaat

SEQ ID NO: 49209 - DNA, 100 bp, Homo sapiens
aaatgcgtgagcaaagaagattccatggccaggccccactggaggagatgaggaaggctgccgaggatctggaaattgatgaagatttgataaagtggaa

SEQ ID NO: 49210 - DNA, 83 bp, Homo sapiens
ctttgtagtaagcttcgaaatttgctacatgacaatgagctgtcagaaaatggtgtgaatggaacattaacttcaaatgtagc

SEQ ID NO: 49211 - DNA, 54 bp, Homo sapiens
ctcggcatggctctcctggtgctcggacatggatttgattgacatactttggag

SEQ ID NO: 49212 - DNA, 89 bp, Homo sapiens
gggtccccaagacccttgtgctcgttgtcgccgcggtcctgctgttgatgggacctgcaaaggataaactggtcattggacggatcttt

SEQ ID NO: 49213 - DNA, 82 bp, Homo sapiens
cgggcgcaggccactgcacaagaccctgtctttcagaagctgaaaggccagttcacgacggtcagagcaccataacatggtg

SEQ ID NO: 49214 - DNA, 135 bp, Homo sapiens
caggtttccttctgtgctcctggagcgccagggcgaagtacattagcagcattgatagcggctcaacgtgtgaccagtctgcttagttttaagtgaaattccttttatgtctacttggtttttacttgtgtcaac

SEQ ID NO: 49215 - DNA, 82 bp, Homo sapiens
gaaagtcatggtagctattcctctggaaatgacatagatgtgtcccaaacatggcacagactttttggaatataaatgtcgc

SEQ ID NO: 49216 - DNA, 74 bp, Homo sapiens
agtccatagaagacatcaagttaaaacttactcagtacatgactcaaggcttggacatgtctggtgtttttatg

SEQ ID NO: 49217 - DNA, 100 bp, Homo sapiens
atccgcagggttcggatgagaccagggatcgcccggagcccacacccgtcctccgctctgcatttccctacgacgtccatcctaccccagacggcctcca

SEQ ID NO: 49218 - DNA, 100 bp, Homo sapiens
gtctctgcaaccgcgccgtcttcaaggcaggacaggagaacatctccgtgtctaagatctgtgacttcctccgcggagccacagtccatagaatcctcgg

SEQ ID NO: 49219 - DNA, 90 bp, Homo sapiens
gatgaacatgtgcttggtgtcgtttttccttgagctgaacgtcttgcaacagtggccgcacgcatagggttttggccaaattgggcgagg

SEQ ID NO: 49220 - DNA, 88 bp, Homo sapiens
agtttcctgaggcctccccagccacgctttctgtacagcctgcagaactgttatatttcacactatgtgctgactgtatctacagaag

SEQ ID NO: 49221 - DNA, 88 bp, Homo sapiens
gaacagcccctgctggcaagtcaagtggcaactccgtcagctcgttagaaagggtgtatgccatgtacaattccgtaaagggatcctg

SEQ ID NO: 49222 - DNA, 74 bp, Homo sapiens
gtggcaatgagaccagtggaagcagcaccatcggggagacaagcaaacactgccctaaccatcatggaggtggc

SEQ ID NO: 49223 - DNA, 75 bp, Homo sapiens
ctatgtacacacagctttatcatcggactgcagttcgtcatgaatcatgcagtggtctctataagttatccctgt

SEQ ID NO: 49224 - DNA, 98 bp, Homo sapiens
aagaacgagaacggcgtagagaggaagagagaagacttggcgatagttccctttctagaaagataaccttctgttcggtgatgaaattatcactaatg

SEQ ID NO: 49225 - DNA, 97 bp, Homo sapiens
tggaattggtgatgcctgtgatgatgacgatgacaatgataaaattccagatgacaggcagttgcaccaccagcaccaccttccagtagtcagctct

SEQ ID NO: 49226 - DNA, 74 bp, Homo sapiens
cagaatgctatacagcctctctttgtatctccacctacacacggcaggccaggaggagtatttgaagacttctg

SEQ ID NO: 49227 - DNA, 90 bp, Homo sapiens
caacaagtggctgatttacaactcaaactttctcggttagaagagcaggctgaatcatgtcagggagatttaagtacattggccaatgtg

SEQ ID NO: 49228 - DNA, 95 bp, Homo sapiens
tcggagacgagtggtgggagaaccagccgactggagcaggcagcagcccaggactgcatcaaaacatgtaaacaaggacctcggtaatatggaag

SEQ ID NO: 49229 - DNA, 90 bp, Homo sapiens
catcatgagggccgttaccattacgatccatctccgattcctccattgcatatgtgtcttctctttagggatggtgaggttggaaaaagg

SEQ ID NO: 49230 - DNA, 82 bp, Homo sapiens
cgctgctgcccctgctgtcgctcctggtcggcgcgtggctcaagctaggtccagcccagaatcaaatgcaggttccatctgg

SEQ ID NO: 49231 - DNA, 82 bp, Homo sapiens
ggattagatgatccaagtcaccaagaaattactgtctcaagtgatacggagcactcactgtgggcctcgtgcgacagtgtca

SEQ ID NO: 49232 - DNA, 82 bp, Homo sapiens
gagctgagtggttgtgtggtcgcgtctcggaaaccggtagcgcttgcagcatggccccttcccagctgcctgcctgccctag

SEQ ID NO: 49233 - DNA, 96 bp, Homo sapiens
ggtggccgtccgggaggatgggggaactgtgggcgtcttctctccaaagaagctgaaggaagaggatcaccttccaagacaaaacagtcttcatgg

SEQ ID NO: 49234 - DNA, 98 bp, Homo sapiens
tcctgcgtcatcaacttaggcggtgaccaagaatatggcccaggtgaccaaagccctggacaaggccctgagcaccatggacctgcagaaggtctcct

SEQ ID NO: 49235 - DNA, 96 bp, Homo sapiens
cggccccgtagggtccccggcgccaggccacccggccgtcagcagcatgcagggaagccaaagctgtagttgaagaaacaagagccctgcgtagtc

SEQ ID NO: 49236 - DNA, 75 bp, Homo sapiens
gggggcctggccgcgcagccgtttggtgccctggttgtcagatgttggaaagcagtaggacggaacatactcttc

SEQ ID NO: 49237 - DNA, 83 bp, Homo sapiens
agatacgaagtcgcgggagcagttggggactcaatgtgtgggcaacaaggttattgaagacaatggtgttcgaagagttgtcg

SEQ ID NO: 49238 - DNA, 100 bp, Homo sapiens
cactgggcaaagaaagtatccctttaatgaagagttgagtatcttatatccagctgccattgtgactattgatggatttagcctttttcaatctcttcgt

SEQ ID NO: 49239 - DNA, 98 bp, Homo sapiens
cagagaaccctgagtgtgcccctgacatgacaaggagccgtcgtcgttagatgtgggaagaatatcctgatgtttatggggtcaggcggtcaaaccga

SEQ ID NO: 49240 - DNA, 75 bp, Homo sapiens
cggtcaggagcgggccctcccttaggtgcgccccccgccaggtactccaaagattcaggtttactcacgtcatcc

SEQ ID NO: 49241 - DNA, 50 bp, Homo sapiens
atattatgctacagaatttgacctcaagtactacagccttccagcagcct

SEQ ID NO: 49242 - DNA, 100 bp, Homo sapiens
tttataacctcatacccagtgacttgaaggagcctccccagcctcctagagtcacaatggcttcagcctttcgcctttctttgaaaccaaaggtcagtga

SEQ ID NO: 49243 - DNA, 100 bp, Homo sapiens
tgaagattccaagttcaggagaactcgaccggctccctttcccaatggtagttttgtgaatggctttaattcgccaggatcttataaaacaaatgctgct

SEQ ID NO: 49244 - DNA, 50 bp, Homo sapiens
taggcattttgctgtctcctcctaatacgctttctaaaaccaatttttcc

SEQ ID NO: 49245 - DNA, 95 bp, Homo sapiens
gcgacaagccgctggcagccgcggatctcaccgccgctcagggtgtcccgacccaggctaagcttgagcatggctgagcaggagcccacagccga

SEQ ID NO: 49246 - DNA, 74 bp, Homo sapiens
gtaaagctgctggacaacaccatggaaatatttgacattgaggcagacctgttatcctaaactaggtgagtcag

SEQ ID NO: 49247 - DNA, 75 bp, Homo sapiens
gtcgtaaacttcctatgatacaaaatgatgcttcaacacccaggccaggtctctgcctcggaagtgagtgcttct

SEQ ID NO: 49248 - DNA, 96 bp, Homo sapiens
aggaaaatcagaccatactggaagaattattttgaaaataccgatattcttgtgcggcggggagagaagtttgttccttggggatttctatcaagg

SEQ ID NO: 49249 - DNA, 100 bp, Homo sapiens
aaagcacctggccccgctacagcaaaccagggtgttattaccgctgtcacagtaagtgcttgaacctcatctccaagccctgtgtgagctccaaagtcag

SEQ ID NO: 49250 - DNA, 100 bp, Homo sapiens
agccaacaggtttcctcagaatggcctttacacacctcagaaatttatagataacaggatcatttcatctaagattccaacaatgtctcacccatcttgg

SEQ ID NO: 49251 - DNA, 75 bp, Homo sapiens
actgcgcccccgggagcgggcgcccagaggccgactgcagcagtggcccagggcaaagagtgtgcgtcatcgatg

SEQ ID NO: 49252 - DNA, 126 bp, Homo sapiens
tcctggctggagtcgctttcatggtcttgctgattccactcaacggagctgtggccgtgaagatgcgcgccttccagttttcggctttgtgagaaaccttaccatcaaacacgatggccagcaacg

SEQ ID NO: 49253 - DNA, 80 bp, Homo sapiens
agaagaagaagttgcgaaggatccccaacggggaggccaacgtgaagaaccctgggcgctgcctatggcacagccaagag

SEQ ID NO: 49254 - DNA, 74 bp, Homo sapiens
gagcagtttctgggagccgttatgccaaggcttgatcaccccccaacttgcccttcaagttctacttcagtttg

SEQ ID NO: 49255 - DNA, 76 bp, Homo sapiens
aacacccacacacagatgtggtgaaatgtacccagttagtaagagaatggatttctgcctgatcctccaagaatac

SEQ ID NO: 49256 - DNA, 82 bp, Homo sapiens
gcgagcgcccggattggggatgagtatgcggaggacagctctgatgaggagccctgcagagcccagggagatggaagacttc

SEQ ID NO: 49257 - DNA, 100 bp, Homo sapiens
agagtggaaaaagaaatatgtcaccctgtgtgacaatggcgtgctgacctatcatcccagtttacatgaagacagtgagcgctactctcgtagatccaga

SEQ ID NO: 49258 - DNA, 75 bp, Homo sapiens
gtttgtatggacaggcttgtccatctgtaacttcattaagggctcaagggttcttgttgatgcacgagataagct

SEQ ID NO: 49259 - DNA, 83 bp, Homo sapiens
ggacgccagcaggccagccggcctctcgcccacactgaccccgggggagcggcagcagggtatttgaagtataccatacaact

SEQ ID NO: 49260 - DNA, 75 bp, Homo sapiens
atacagcaaaagagtctacatagcctttctgagaaaagtctacagcattctttctctgcaggttctcttaactac

SEQ ID NO: 49261 - DNA, 100 bp, Homo sapiens
gtaggctatgaccacgagaagccagttggcaaacatgaattgactgggcataaagtagctgtgaagatactcaatcgacagaagattcggagccttgatg

SEQ ID NO: 49262 - DNA, 90 bp, Homo sapiens
ctgacggagaagcagtggctcaaggcaaaatacatatctcagtgcattgatgagatcaagcaggagctgaagcaggacaacatagcggtg

SEQ ID NO: 49263 - DNA, 50 bp, Homo sapiens
gaatcaccagcactggctgaagattactacaagggaagacataaattcaa

SEQ ID NO: 49264 - DNA, 75 bp, Homo sapiens
catgcaaaccaatgagggagaagtatcggaagaaagcagttccaaggatgagctttctgatgttagccaaggcgg

SEQ ID NO: 49265 - DNA, 75 bp, Homo sapiens
ttatggctatgaatatttgttcaccaaccttagtgaagaattaggagtccaggcagaggaatattttcagtggag

SEQ ID NO: 49266 - DNA, 75 bp, Homo sapiens
gtgcatgacactcctggaaaacagaaatgtagacaaccaatttcctgggcaagctgctccacctggattcccagt

SEQ ID NO: 49267 - DNA, 82 bp, Homo sapiens
ttcttcgagtatttgtagaaggagcccaatgacgaaagtggagctaacgtggatgcgtccaaaatgtggcgcgatgaccggg

SEQ ID NO: 49268 - DNA, 96 bp, Homo sapiens
cccaaaagagccaaactcagctcgcccggtttctcggcgaatgacagcacagacttaattcagtgcacaaatgagatgaatgtgaacatcccacag

SEQ ID NO: 49269 - DNA, 89 bp, Homo sapiens
ccgccgggacgccccgcgccgagccggaggccgcgtggacccgaaagccgctgggaaaagtgtcgtgaaaactacccctaaaagccaaa

SEQ ID NO: 49270 - DNA, 98 bp, Homo sapiens
accgtttacaaggccagagataagaacaccaaccaaattgtcgccattaagaaagctaaactgtgaaaatgcagtcctcaaagagaatttgaaagtga

SEQ ID NO: 49271 - DNA, 74 bp, Homo sapiens
taattttagggtcctttatatagaagggagagtagggttttctagtaccttcacaggagaaaggagacccaaag

SEQ ID NO: 49272 - DNA, 98 bp, Homo sapiens
tgaagcagtgggaagtcactagcagggaggcatgcatctccccatgtgctatgatgctggctctggtgtacattgaacggctccggcaccgaaaccca

SEQ ID NO: 49273 - DNA, 83 bp, Homo sapiens
gggaccagcagcgacggtagcagcagcatggccgcgatctatgggggtgtagagggacaatgcagatcttcgtgaagactctg

SEQ ID NO: 49274 - DNA, 100 bp, Homo sapiens
ctggcgtcttcatcgccatctcgctgttgcagggtgataaaagaaaatgtggctgaagttacccgaagttcagcttgcagtgtaattcagaagagttaag

SEQ ID NO: 49275 - DNA, 98 bp, Homo sapiens
ctgaggaacggtgcctggaaaaggtgtgctgggcatcaaggtgaagatcatgctgccctgggacccaactggtaagattggccctaagaagcccctgc

SEQ ID NO: 49276 - DNA, 100 bp, Homo sapiens
cccgtggactccccatcatccaagacgtcatgctagccgaggcccaggaagagagaagggcacagttacctaagtatcaacgtaatcttcctcggccagg

SEQ ID NO: 49277 - DNA, 50 bp, Homo sapiens
agggaatggaccccgatggtgtcatcgagagtaactggaatgagattgtt

SEQ ID NO: 49278 - DNA, 99 bp, Homo sapiens
gttgttgactaagctgaaggaaactgctgaaaacagcctcaagaaaccagtaacagattgtgttatttcagaaatactccatagcttgggtgggattga

SEQ ID NO: 49279 - DNA, 101 bp, Homo sapiens
tggccgggatcctggagcactcggtcatgtacccggtggactcggtgaagccctaccacttatgtcttggatgaagatgaacctcgattccttgaagaagt

SEQ ID NO: 49280 - DNA, 101 bp, Homo sapiens
ctgagaaaattcaagttggtgttcttgggggagcagagcgaggaatgttacggcatccggagtcatccctcagatttctctgatcatgggcccatgtgctg

SEQ ID NO: 49281 - DNA, 74 bp, Homo sapiens
agcccctcgggggactctgagcaggggaaatcagccttatggtcccacctgttacattatcaggacaaccggca

SEQ ID NO: 49282 - DNA, 74 bp, Homo sapiens
ggaggggctcaggaacctgggcatccctctgggccaggacgccgaggaggttggacgtgataagtatgagcctg

SEQ ID NO: 49283 - DNA, 80 bp, Homo sapiens
ttgcagtagaagtgggacccaaatctacaatggagaatgtcaaaatactccaggagagaagcattgcttatatcaactcg

SEQ ID NO: 49284 - DNA, 100 bp, Homo sapiens
gggcccgggtgcaggcccaaggccacaccctgcaggtggctcatttcccctttaagaacaacatgagctttgtggtccttgtacccacccactttgaatg

SEQ ID NO: 49285 - DNA, 75 bp, Homo sapiens
cttagacagtttggaccaagtggagattatcatggccatggaagacgaatttggcatcccgcctgatgagagccc

SEQ ID NO: 49286 - DNA, 97 bp, Homo sapiens
ggaccttttaccatgaatagttctactccttctacaggaagttattccaacttttgacatggctgtcaatgaaatcttctttgaccgttaccctgac

SEQ ID NO: 49287 - DNA, 98 bp, Homo sapiens
cccatctgaggcgtttgttgcagctacctgcacttctagatgtaagaattgtgacaaaggccagtcttttttcattgacgccccagattccccagcca

SEQ ID NO: 49288 - DNA, 95 bp, Homo sapiens
atgcaagcggtttgggaccttgaacaaggcaaatatggttttgtccgtggtggatgactggattgaatcatataaacaagacagggacatcgcac

SEQ ID NO: 49289 - DNA, 100 bp, Homo sapiens
gatccagatcgggatttacgtggagatcaagcgcagcgatgaggaggcctaccagaaactggccagcgagaccctggaggagctggactggtgtctggac

SEQ ID NO: 49290 - DNA, 135 bp, Homo sapiens
ccagcagggcctgcacctgtgtcccaccccacccacagacggccttctgcaattccgacctcgaaaaattgcttcgccccacaatgtcctgcgtacgccataatccaggagctgatgttgccaagggatcccatc

SEQ ID NO: 49291 - DNA, 96 bp, Homo sapiens
tggagctctcctggaattagctgaagaacttctgaggattggcctgtcagtttcagagagagtgagtaaaggaatacttaaagcatttggtaattc

SEQ ID NO: 49292 - DNA, 75 bp, Homo sapiens
gagctttgcagctgacctacatctcgaagtgacttctgacagctctctccatggaaggaggcggcggccgcgatg

SEQ ID NO: 49293 - DNA, 133 bp, Homo sapiens
aatcatcaccaggctgcttactggaaactggatgcagcaaggaaataggatttaaccgctctctgcctcccaggcaaaggccaggatggaattggtagcaaggcagagaagactctgggtgactttgcagcag

SEQ ID NO: 49294 - DNA, 98 bp, Homo sapiens
ctgctcctgcctcccccgtcccaccactgaggctgttgggccaggccagtcatgctagaacgactcgggacctggttcgggccggggtgctgaaggag

SEQ ID NO: 49295 - DNA, 100 bp, Homo sapiens
aggagctggcggacatcactttagaccctccacctaattgcaggtgatggagaggtgattgaacaaattataagcctgcaaaccaatgataatgatgaac

SEQ ID NO: 49296 - DNA, 50 bp, Homo sapiens
tagagctggaattaggcaaatatggacagctggatagaacttatactggc

SEQ ID NO: 49297 - DNA, 100 bp, Homo sapiens
gtgtctagtcacattcaggttcttgccagaaggaaatctcgtgattttcattccaagctaaaggagcatccccccggtccttcagaatccaaacacgctt

SEQ ID NO: 49298 - DNA, 100 bp, Homo sapiens
gtttgaagtatttgctgcatcaaatgtaaacgacgaacaagatgatgaagccgagaaacatccagaagtcctgccgaattggcagagggggtcgatttgg

SEQ ID NO: 49299 - DNA, 75 bp, Homo sapiens
gaaggaaattagtgatgatgaggtgaggaagaggatggagatgaagatgaggaagctgagtcagctacgggcaag

SEQ ID NO: 49300 - DNA, 75 bp, Homo sapiens
gtgggcagccagggtcggtgaaggtggatctaggatccggcttccaacatgtggcagctctgggcctccctctgc

SEQ ID NO: 49301 - DNA, 75 bp, Homo sapiens
ccctcagtacgccacctactattacccccagtatctgcaagccaaggggaaaagctcatgcgattcagctaccca

SEQ ID NO: 49302 - DNA, 87 bp, Homo sapiens
ttaaaaacatcatggatcaatctcaaacaaaggaactgcaagcacatgttgaccagataactgaaatggcagcagtaatgaggaaag

SEQ ID NO: 49303 - DNA, 100 bp, Homo sapiens
cggttttgagaggggaagatggggacaaagccgctccacctcccatgtcggcacagtacaagttgtgcaaagtgaggaagattactgtgggagtgaaggg

SEQ ID NO: 49304 - DNA, 75 bp, Homo sapiens
ccagcagaccatagagctgaaggaagagtgcaaagactttgtggacagagaattcgcacaaccacggggacggtg

SEQ ID NO: 49305 - DNA, 50 bp, Homo sapiens
tgcagacggcgagacctcctgcacagcccccaaatacatcaagatgtttg

SEQ ID NO: 49306 - DNA, 100 bp, Homo sapiens
agctcagaactgagaagctgtcaccacaggcaaatacgccatgcgagacctagtccacaggcttccaggagggaacaacagcaacaacactgcaagcaag

SEQ ID NO: 49307 - DNA, 98 bp, Homo sapiens
gctacgggaagcaggcctcgccacagaacatggttggtgcgggagaggtggatgaagacttggaagttgaaaccaaggaagaatgtgaaaaatatggc

SEQ ID NO: 49308 - DNA, 58 bp, Homo sapiens
acaagagtccctctaaagcagctcaaaagggctactacaaagttctgggaaagggaaa

SEQ ID NO: 49309 - DNA, 74 bp, Homo sapiens
tgaaatcaaaaccttcatgccgattgcatgggcagcagcttatggttgcaccattactcagacttctaaagaga

SEQ ID NO: 49310 - DNA, 90 bp, Homo sapiens
gtcctcgcttgcagttcagcgaccacgcattcttgttatttaacacgggaaggaggtgacttcgcctgtgatggacttccagtgtgagca

SEQ ID NO: 49311 - DNA, 100 bp, Homo sapiens
ttgtcttggataacagtgtcatcctggcaatgctggaacaacctcttggaaatgagcagagcctgatcacttgaacggacatatcaagcaggtgcacact

SEQ ID NO: 49312 - DNA, 101 bp, Homo sapiens
ggcaaaggcgtgtttgactgcaggaagaacgtgctgggtcacatgcagcagacagaaagaatttactttcaggttttcttacctaaagggagcaaagagaa

SEQ ID NO: 49313 - DNA, 88 bp, Homo sapiens
aggagttgacagcacttttcaaaaacctggcgacattgactacagcaccgtgctcctcggcatgctggtgacgcaggacgtgcagctc

SEQ ID NO: 49314 - DNA, 74 bp, Homo sapiens
agaaaggtggaggccgggaggacgaagtattctaccttgtaaatactgttatttgtatatactgtaaatgatga

SEQ ID NO: 49315 - DNA, 96 bp, Homo sapiens
cctcccgggagtgccgtgcgccgcagcccgggcccaggccccggcagcgcctgggacaaggtgaagacccccttgtggacgatcaaaatgaacgag

SEQ ID NO: 49316 - DNA, 98 bp, Homo sapiens
aaagaaagaaaacaaagaaaaacatactccagaattcctaatagaacagtaagaatgattgatgttggctgatattggagtgctcattcacatgaagt

SEQ ID NO: 49317 - DNA, 75 bp, Homo sapiens
atggagggcatcttcaaccacaaaggatgtgtgaccggaatggtggtcggcggcttcgacagtggctgatcgagc

SEQ ID NO: 49318 - DNA, 100 bp, Homo sapiens
gacaagcacacactatggcgctgaaacggattaataagataatctcagtgataccttgaagaagctgaagataacagctgttgacaagactgaggatagt

SEQ ID NO: 49319 - DNA, 74 bp, Homo sapiens
cacagatctgggacaccgcattcgccatccaggctctgcttgaggatagtggctacccagagacgctggtcaac

SEQ ID NO: 49320 - DNA, 98 bp, Homo sapiens
gaggagcctcctggcctgcagcttctgtgtgctcctgagagttccaacaaggacaatccagacagcaattttgtgagcctgcaaatcaacatcactgc

SEQ ID NO: 49321 - DNA, 78 bp, Homo sapiens
gattttatctttggagaagatgctgaattcctgccagacccctcagctttgcagcatgccaatgaagatgtggaaaga

SEQ ID NO: 49322 - DNA, 78 bp, Homo sapiens
ggcggaagaggaggctgcggcgggaggtgagaattatgaagatgatgacctagtaaattctgatgaggttatgaagaa

SEQ ID NO: 49323 - DNA, 75 bp, Homo sapiens
ttcagtggtgtttttctcaggtgaaaggagcagtagatgatgatgtagcagaagtacaagttcagggacctaact

SEQ ID NO: 49324 - DNA, 50 bp, Homo sapiens
ggggccagtgaaccagtttgactatcaggggcataaggaaatggtggcag

SEQ ID NO: 49325 - DNA, 100 bp, Homo sapiens
gagggtctgaagttcacgactactagaaggggaggggagtggaaaggctctcagtgaaaaaggcaacaggttccaggattggcgtcttaacacaaaatgc

SEQ ID NO: 49326 - DNA, 99 bp, Homo sapiens
agaggaaataccatggcagaaagaagacagctgtttgcagagatgaatggccctgctgtggcaccagtgaccaacgggaacacaacggtgccacccctg

SEQ ID NO: 49327 - DNA, 149 bp, Homo sapiens
tttgctgagctggttggccctgtgatccctcaagactggtccacggagtgtatgaccacaaacagccatcaagtcaccaggagactaaagtccatcaaaaacatccagaaaattaccaagtctatgaaaatggtagcggcagcaaaata

SEQ ID NO: 49328 - DNA, 127 bp, Homo sapiens
ctcgggagaaacaacaactgctacatctgttggaggagccaactagcatggaagtgcaggtgtgtgaatatcctgatggaaccaagtctttgaaactgggagactttgggcttgcgactgtggtaga

SEQ ID NO: 49329 - DNA, 100 bp, Homo sapiens
agcgtgggcgtcaacgccgtatccagcgactacgcggccgcggagacctacctgcggcgtcggcagctgctgctccgagagtccggcagcgtcttctctt

SEQ ID NO: 49330 - DNA, 100 bp, Homo sapiens
gtcgtaagaagaggtcccaatcccccactctttccgccctaatggaggtctccagtttcggtccacgctgcttttatgagctgtaacactcaccgcgaag

SEQ ID NO: 49331 - DNA, 76 bp, Homo sapiens
ctgaactcaggacttggcaagtacaggtttgcagattccgccagcagcacagcaagctctacagatgagtggctct

SEQ ID NO: 49332 - DNA, 126 bp, Homo sapiens
caggtgttggccgcggcctctgagctgggatgagccgtgctcccggtggaagcaagggagcccagccggagccatggcaaaagatgtgattgaagagcatggtccttcagaaaaggcaataaacgg

SEQ ID NO: 49333 - DNA, 75 bp, Homo sapiens
aagaaatcaaaataaaggaaacacatttcatatactgcagaatgaactgacagatacacgtgcaaaattccacgt

SEQ ID NO: 49334 - DNA, 83 bp, Homo sapiens
cttccccatcatcgccagctgcacactcttggggctctacctctttttcaaatggctggtgaaacgagctatagaaacaaaag

SEQ ID NO: 49335 - DNA, 76 bp, Homo sapiens
cctgcacggacggtgttggttgggacagagtgcaagacgatgacttgcaaaatgtcgcagctggaacgcaacatag

SEQ ID NO: 49336 - DNA, 76 bp, Homo sapiens
acagaataactgtcaagacaacagtgatgaggaaagctgtgaaagttctcaaggagaatgatccatctgtgagact

SEQ ID NO: 49337 - DNA, 93 bp, Homo sapiens
cgcgtctctctgctgcggcgcggggaccgctgtgctctcgggtcctgaggacaccgtgagccagccaggcctggccgctgggcctgaccggcc

SEQ ID NO: 49338 - DNA, 75 bp, Homo sapiens
taaaactgttagcaaggagtgtttcatttgaacaggatgatgatgctgaagctatccttgctgcagacttcgaaa

SEQ ID NO: 49339 - DNA, 100 bp, Homo sapiens
cggcccccggcgtggggcgggacagcggccccctggagggggcagtcccgggagaacctgcggcggccggagcgatttggagcaagaggtggtggtggcc

SEQ ID NO: 49340 - DNA, 100 bp, Homo sapiens
gattggaccagcttgtgatctccgctttcgaagcattgtacagtgtggacagccttcctcctgaagagaatgtctttgtgtgtccgaagttgagatggcc

SEQ ID NO: 49341 - DNA, 80 bp, Homo sapiens
caagaacgtgctcttcgctcacctggatgacaacgagaggagactgaaccggccgctgacactctcggagaagattgtgt

SEQ ID NO: 49342 - DNA, 100 bp, Homo sapiens
acctggaaggggagactctgctgacacccatcacccacatctcacagttaaaaagatcaagtggcatgagcagccttttggggaaaattggtgccaagaa

SEQ ID NO: 49343 - DNA, 97 bp, Homo sapiens
gggcgatgtgaagatgtcagtgggctgtgcctgtcctgctctgctgtgtgcgtgcaccagctgcctccaggccaactacacgtgtgagacagatggg

SEQ ID NO: 49344 - DNA, 75 bp, Homo sapiens
gaaagaaaaggaagcaacaacataatgcccagagttggagccaattaaaccagagatgtggtctcactgtgttgc

SEQ ID NO: 49345 - DNA, 75 bp, Homo sapiens
gaaaaacggcaacgtgtaatcagaaggcacagattagaggaaggaagagcaagcagagatgaactccagtccaga

SEQ ID NO: 49346 - DNA, 75 bp, Homo sapiens
cggagctgggggcgggcgcacccccaggtgctggagaatctggtaaaagcaccattgtgaagcagatgaggatcc

SEQ ID NO: 49347 - DNA, 80 bp, Homo sapiens
agactctgtcgcaagccatagtcaaagtggttatcccaacagaaaggtatccaaaccttgaaacctttgctctagatgtc

SEQ ID NO: 49348 - DNA, 75 bp, Homo sapiens
tgggactggagtgcccacagtcagaagaagccttggaagatcgtttggaaaggattaatcgagaactgggttcag

SEQ ID NO: 49349 - DNA, 90 bp, Homo sapiens
aacttcgctatcatggagatcgtcctgtccctgctatcagtggggcactgaagaaagcaggactgagtcttaaggacatggatttggtag

SEQ ID NO: 49350 - DNA, 97 bp, Homo sapiens
ggcagcatgcccgggctgccactgttggggtgtcatggagaaactccagctgggcccagagattctgcagcgggaaaatccaaggcttatttatgcc

SEQ ID NO: 49351 - DNA, 100 bp, Homo sapiens
agcaagttagtggattaaaatctcccaagaggaatgacaaacaaccagctcttcagatttggagcaagaggtggtggtggccttcccccgaagaaatttg

SEQ ID NO: 49352 - DNA, 82 bp, Homo sapiens
cttatggcggcgctggagagggggcgctgagctgttgggggcaagaatatcacggcatgggcatgagtagcttgaaactgct

SEQ ID NO: 49353 - DNA, 98 bp, Homo sapiens
gtattcttgaaccaggtcatgctccaaatcctgactggctcatggagaaagcctacctaagaatgaagccgggacccggcagaatggctcctgtgaag

SEQ ID NO: 49354 - DNA, 100 bp, Homo sapiens
cctgtcctgaatgcagcacgaactgtcatctttgtggcaactggagaaggcaaggcagctgttctgaaggagctagaaaagctaggccttggcgacagcg

SEQ ID NO: 49355 - DNA, 78 bp, Homo sapiens
ccctgaagagggaagacacgcggaaacaggtctcagccttagatccaaggacagtccaaggaagtcctaagaccatgg

SEQ ID NO: 49356 - DNA, 75 bp, Homo sapiens
tctccggctgcacagcgctcaggtactaggttttgacaagcttgcatcatgcgtgagtataagctagtcgttctt

SEQ ID NO: 49357 - DNA, 101 bp, Homo sapiens
acgtgggatccacacagctcagaacagttggatcttgctcagtctctgtcagaggaagatcccttgccgaatttgccatgtactgataacgtagcattcga

SEQ ID NO: 49358 - DNA, 100 bp, Homo sapiens
agattgtcttggaaatactaagttgggcgaggattaaatccaccacacagggtgaaatctatctccatgacaacattcacacaacaggaaattgaattct

SEQ ID NO: 49359 - DNA, 82 bp, Homo sapiens
aatttcatggagaagaaggccttgactacggaggggttgccaggctggtgagattggagagatgaaggatggagtcccagag

SEQ ID NO: 49360 - DNA, 83 bp, Homo sapiens
taggagcatggcttggagcacttcctattccactggattgggaaagaccatggcagcgatgtgcattttgtaagcactttgga

SEQ ID NO: 49361 - DNA, 100 bp, Homo sapiens
ctggaatgatgatgtctcatatgtctcaggcttccatgcagcctgccttaccggcagaagtcaattcatctggaaagactatctctgagtcagacttaaa

SEQ ID NO: 49362 - DNA, 75 bp, Homo sapiens
cgcggacctagacctggaatcgcccaagtccctctactcgcgaggtcagctacacaacctggatcttaccacagt

SEQ ID NO: 49363 - DNA, 75 bp, Homo sapiens
ttcaaaatatggaatgaagaatatagtctctgcatttggcatagtatcgaaggatgatcgcagtgatgtggagag

SEQ ID NO: 49364 - DNA, 122 bp, Homo sapiens
cagacagacagctggcaagaggcagcctgggggccacagctgcttcagtgctttgcaagatatcaccttgtcacagcagaccccctccacttggaaggacacgcagctcctgacggctattc

SEQ ID NO: 49365 - DNA, 83 bp, Homo sapiens
cctgtaccatgatgtgatgctggagaccttgacacttatatcctccctggagtatgtattcccgtgtgccagagtgccaggtc

SEQ ID NO: 49366 - DNA, 100 bp, Homo sapiens
gtgttggaccttccggagcttctcagaagacagagggttttcttttgaggaacgaatgcaggaatttgggaactgagctgtgcaagtgctgaagaaggag

SEQ ID NO: 49367 - DNA, 88 bp, Homo sapiens
ttgcctgcactatgcccgcaaggtgggctacagaaggacagaataacgggctcccagattcacaagccccaccaagaggatcacccca

SEQ ID NO: 49368 - DNA, 100 bp, Homo sapiens
gaagaagccatcctagcagatgatgatgaaccatgcaaaaaatgtggccttccaaaccatcctgagctaggctgtgcttcctggaagtggtattatccat

SEQ ID NO: 49369 - DNA, 74 bp, Homo sapiens
ctcaccccgcggccgcaccttcccgccttctcagcaggtcaatggccagcaaggaggggggtccgagccggcgg

SEQ ID NO: 49370 - DNA, 76 bp, Homo sapiens
atagagcaactgttgaactcagctgcctgtaggagtggaagctggacacactatgtgacttgtatgaaaccctgac

SEQ ID NO: 49371 - DNA, 80 bp, Homo sapiens
aaatccgaccggaccgggctcgggggagcgtgagttgcaggccaccaggaaaccctccccgaagaatgggtagaatcaat

SEQ ID NO: 49372 - DNA, 90 bp, Homo sapiens
cgagccaagaagcgtctcatcatgaccaaatcattggaaaacattttgactttggctggggcatcacgtgccctccccccatgtccgtgg

SEQ ID NO: 49373 - DNA, 75 bp, Homo sapiens
tccgcctcaaggcgcattacgggggtcaccttcaggccattcagaggaggaaagagaggggaatatgaagtcagc

SEQ ID NO: 49374 - DNA, 75 bp, Homo sapiens
cgcaggggctccggaatcgcccgaccgcacacgttgccaccctgagggaggatcaaccgccaaaggcacagctct

SEQ ID NO: 49375 - DNA, 75 bp, Homo sapiens
atggggaagaaaaggattgagaactttaagagtggtgtggtatataagaatgtgattctacaagttccagtggga

SEQ ID NO: 49376 - DNA, 75 bp, Homo sapiens
cagaaaagaagaggagaatgctaagcagaaacttacgctggaaaaactccaacagcttcatatggacagatggac

SEQ ID NO: 49377 - DNA, 100 bp, Homo sapiens
agcaggtctggtgttccttacggccctctcagggatgcaagacttcaattaccttagcagcaactgttttgagatcaccgtggagcttagctgtgagaag

SEQ ID NO: 49378 - DNA, 50 bp, Homo sapiens
cgggcgctggtctgctcccagccgacaaagaaacagccttggtataatag

SEQ ID NO: 49379 - DNA, 105 bp, Homo sapiens
ccgccccttcccaggacagcggaggtggaacttcgtcgcgctgcaacccccggctcgggatcagctcagctactatttaataaaacaaaatctgtagaattcacg

SEQ ID NO: 49380 - DNA, 97 bp, Homo sapiens
cggtttgggaccttgaacaaggcaaatatggttttgtttaaggaagaaatctctaaacgttttaaatcacatactgaccaacttgtgttgatatttg

SEQ ID NO: 49381 - DNA, 87 bp, Homo sapiens
acatcggcctctgcaggcttgccgaagaagggagacttgaaactgcatctgcagagcactgattatggtaacttcctggccaacgag

SEQ ID NO: 49382 - DNA, 75 bp, Homo sapiens
tgaagatgagattcagaagatgcaggtgataaaagaaaatgtggctgaagttacccgaagttcagcttgcagtgt

SEQ ID NO: 49383 - DNA, 100 bp, Homo sapiens
gaactgtgaggagagtaaaccaagaagaaatccacagatttagttctctgtttttggaaggaagaaagatggaaagcggtgcagttctgctggaatccaa

SEQ ID NO: 49384 - DNA, 75 bp, Homo sapiens
ctgctgcctcgcgcccgggagcaggaggagctgctggcgcccgcagatgtctgcgctcctcagaccaccggcagg

SEQ ID NO: 49385 - DNA, 99 bp, Homo sapiens
ctcggcgattatggacccggccgaggcggtgctgcaagagaaggcactcaagtttatggtactaggttttgacaagcttgcatcatgcgtgagtataag

SEQ ID NO: 49386 - DNA, 73 bp, Homo sapiens
aagctgccaaagccttagacaaactgtgatcaaccactctatgattgtcctatgtgtgggctcatatgtacaa

SEQ ID NO: 49387 - DNA, 76 bp, Homo sapiens
gtaaacctgataacactgcatgaaatgttagagtatgattcatccagccttccagctctgttatttaaagcaagaa

SEQ ID NO: 49388 - DNA, 75 bp, Homo sapiens
cgagttacatgttgagccatttcaggatgtctccaatacaacgacagcccagaagaggaagtgcagccagaccca

SEQ ID NO: 49389 - DNA, 100 bp, Homo sapiens
atttatttcctttatcttagccggaggacctgctgatctaagtggagagctcagaaaaggagatcgtattatatcggctcgaaaggacacagaagcggga

SEQ ID NO: 49390 - DNA, 76 bp, Homo sapiens
tcatcctcaaacaagtaatggaggagaagctgaatgcaacaaacattgaggttcttcagatagatcctgaagttac

SEQ ID NO: 49391 - DNA, 75 bp, Homo sapiens
gtccccactttcccctgagcctcagcacctgcttgtttggaaggtacaacaaataacactgtgactccaacctca

SEQ ID NO: 49392 - DNA, 85 bp, Homo sapiens
taaacatcctgaagcaaaaagaatgccctgtgcagaagactatgagcacttgattagactccagaaacagaaactgcagctgctc

SEQ ID NO: 49393 - DNA, 50 bp, Homo sapiens
gcaggcgctcaccatgttccctggagatgcttctgatgagcagaattcac

SEQ ID NO: 49394 - DNA, 101 bp, Homo sapiens
gcaccgacctcgacgtcttgcctgtgtcccacttgttcgcggcctatagcggtgcagaggggcaggatgccgccgacccagccgacccacgggcagttcgc

SEQ ID NO: 49395 - DNA, 100 bp, Homo sapiens
cagaaggaagatggcggatctggaggagcagttgtctgatgaagagaagggggacttgatctcatcttcatgccaggccttgggtttgacaaacatggca

SEQ ID NO: 49396 - DNA, 50 bp, Homo sapiens
gctattccttgggctgcctttcctgcagggcacacgtgtttcacgttgac

SEQ ID NO: 49397 - DNA, 100 bp, Homo sapiens
atgtcttactggcctggctgttgggctaaggaagaaatttggacaatatgcaggacatgcattgaatgccccagaggagcccgaaacctcccaggcttgg

SEQ ID NO: 49398 - DNA, 71 bp, Homo sapiens
attattctgcaagacaaagggaagaaataaaattttcccatactgagcactacctggcagcaccatctaaa

SEQ ID NO: 49399 - DNA, 104 bp, Homo sapiens
ggccgacattaaggaagcaaggagggaagtggaagttaaattgactccgctgattctggaggcaagtgaggcctatctggttggcctttttgaagacaccaacc

SEQ ID NO: 49400 - DNA, 98 bp, Homo sapiens
gtcaaagtaaagtttactccagttcacaacagaactgtttcttcacttatcatagtcagacggtccgggaactcctggagaacccagtccagcccatc

SEQ ID NO: 49401 - DNA, 98 bp, Homo sapiens
cagtggtcgcttcttctccttgctccatctcctccgaagggaatgaactcctcgtccagttcgtctcagatctcagtgtcaccgctgatggcttctca

SEQ ID NO: 49402 - DNA, 100 bp, Homo sapiens
acagaggtctccagagccttctctctcctggtctgagtgtacggtttgcagatatgcctggaaaatcaaggaagaaaaagaagaacatgaaggaactgac

SEQ ID NO: 49403 - DNA, 90 bp, Homo sapiens
gacttgacctaaacagcaaagagtggatccgacctttggcttcaggttttataggatcacattgacaaaagtaccatggagttttatgag

SEQ ID NO: 49404 - DNA, 92 bp, Homo sapiens
ttcttacagaaccagagcctgaacacactgggaaatgccgtgtcagtggggttgttttgggaacagcatatgccatatatgagctggctgtg

SEQ ID NO: 49405 - DNA, 101 bp, Homo sapiens
cctagaccgacttctgcagtacgagaacgtggatgaagactcttcgggcctgaggagcgatgcgacaggcatgatggaggtcgagtcctcctactcggact

SEQ ID NO: 49406 - DNA, 100 bp, Homo sapiens
cgagaccgtgaccgagagcgtgaccgagagcgcgaatatcgtcatcgttagaagggatttcttcagtgccaaccccttcaccccttggacctctggcagg

SEQ ID NO: 49407 - DNA, 100 bp, Homo sapiens
atttccatggcagcaagcatcactcagtgcctatttctatctatcgttcccctgtttcccttcgaggaggacacggattttttatcaagcagaaatgcat

SEQ ID NO: 49408 - DNA, 98 bp, Homo sapiens
gggaagtgatttgcctcagcttgtactggctgggtataagtaagcaagaagagggcctgggagaagagtctgacgagcaaggggaaggtagccaagga

SEQ ID NO: 49409 - DNA, 100 bp, Homo sapiens
ctcagaagaacttgtacagagatgtgatgttggagaactatagcaatctggttttcttgggtgctgtgcctgaggaacaataccatttttaagcaagcct

SEQ ID NO: 49410 - DNA, 100 bp, Homo sapiens
ggcgcaacaaggcaagatcaaagagaagatgtacggcaagcagaagatctattttgcggatcaggaacagattatggcctttgcaagcaaatgagtactc

SEQ ID NO: 49411 - DNA, 74 bp, Homo sapiens
tgcaaggctggcgcgtctccatggaggtttgtcaagggctatttaatgagttactagaaaatgggatttctgtg

SEQ ID NO: 49412 - DNA, 75 bp, Homo sapiens
gcagaaaggctaccatcaccgcactgagatcaacaagaaggaactgtggctgcaccatctgtcttcatcttcccg

SEQ ID NO: 49413 - DNA, 100 bp, Homo sapiens
attgggcaagagaagaattcagaagaaacaaaagtgccaccgaagaggtcatcatcagatttgaaatatttaaagtggatacaaaactatttcagcaatg

SEQ ID NO: 49414 - DNA, 82 bp, Homo sapiens
cggacgagaactggagagaactgctggaaggagactggatgatagaattgtcatcatcagatttgaaatatttaaagtggat

SEQ ID NO: 49415 - DNA, 100 bp, Homo sapiens
gcctttctggacaactggaagacagttacgcttcgtcctccacctctccctccaacatgaagacttccggggcaggcgtcaggaggcacccaaggtggag

SEQ ID NO: 49416 - DNA, 106 bp, Homo sapiens
ctgcgctgctgaggccgggccggccgcccagacgctgcccgcgggcccggccacggcggagccaaggaagctcttcgtgggcggtcttgactggagcacgacccaa

SEQ ID NO: 49417 - DNA, 100 bp, Homo sapiens
gccacacgttggtacagggctccagaaattatgttgaattccaaggtaactgaatgtgagatatttctgtcacttctggtgaaatttctggatgcagata

SEQ ID NO: 49418 - DNA, 89 bp, Homo sapiens
ggtgaattggatgctatggaataccatacaaaggaattgccacaagcagtctgtgagatccttgggcttcaaggcagtgaagttacaac

SEQ ID NO: 49419 - DNA, 121 bp, Homo sapiens
gcagagacagaagagcggggtcggggccggctgaccaggaacctgggcgagcagcggcgggggcccgaggggaaacctgtccagtttaagtcgtcttggtctgagatataacagactgtca

SEQ ID NO: 49420 - DNA, 48 bp, Homo sapiens
gataaacgactcacagtactttgaaaacactttcctggataaaaaaga

SEQ ID NO: 49421 - DNA, 51 bp, Homo sapiens
catcttttatacactcttagtgctgtccagaataactgaagtgaagtgatg

SEQ ID NO: 49422 - DNA, 100 bp, Homo sapiens
cttcagaaagcctccggaatctaaaaagccctcagtaccagagacagaagcagatggattcgtccttttaggtgccagcgagatttcagattcctgtaaa

SEQ ID NO: 49423 - DNA, 83 bp, Homo sapiens
gcttggttgccatgtacaacaatgggaacaaggttcttaaaggtggacaggaagcacccacaaaacccaaaggtcgccccaag

SEQ ID NO: 49424 - DNA, 51 bp, Homo sapiens
acttcaagaatgaagccgcggaccctcgcgtatttcatggttctatcaaag

SEQ ID NO: 49425 - DNA, 100 bp, Homo sapiens
ctgccagctgctgtggcggccccggcctcccacactcctgagccaggaacagatcaagggtgactatgaccagagcaggaccaaagtgctgcacatgagc

SEQ ID NO: 49426 - DNA, 100 bp, Homo sapiens
aatcctaaccagtcagtgtttctcttcattgacagacagcacttgcagatacacaccatctcagcaaggagtggcattcaactctggagctaaacagagg

SEQ ID NO: 49427 - DNA, 90 bp, Homo sapiens
cagcatcccaccaacatttgatggtgaggaggaaccctcgcaagggcagaaggttgaagaacaggagttccaagatgagatgggattctc

SEQ ID NO: 49428 - DNA, 90 bp, Homo sapiens
cgtgtgtaggggagcggaaaaggaagtcaccaccgtggcctgcgacggaaagaccacagcaagattctttcattcgtctcctcctagcct

SEQ ID NO: 49429 - DNA, 50 bp, Homo sapiens
ctccaagacctcatcaacaattaagccgctacatctgttacttttgttgg

SEQ ID NO: 49430 - DNA, 96 bp, Homo sapiens
cagctgctcccttcgccttcgccctttccacctcgcggcagttcggtataatgggtctctcccaaatggcgatagaggaaggaggaaaagtaggtt

SEQ ID NO: 49431 - DNA, 82 bp, Homo sapiens
accagcagcagcaaagctgaaggccagcaggttgacatcatggacatatgtgagtccatcctggagaggaagcggcatgaca

SEQ ID NO: 49432 - DNA, 82 bp, Homo sapiens
agcaattgtgatgagatattctgctgagtggaagctgataggtgttgagttgctgagtgttttgcaccgccttctattgacc

SEQ ID NO: 49433 - DNA, 76 bp, Homo sapiens
cagttgcgatgcatgcaagtcggaggaaacgctagtgcagcctatcatggtcaccatcaagcactggaagtgttgg

SEQ ID NO: 49434 - DNA, 100 bp, Homo sapiens
acgggccttctggagatgcttccgaactgtgggcaaaaatggcgcatgcagcagattggaataaatatgatgaccgattgatgaaagcagcagaaagggg

SEQ ID NO: 49435 - DNA, 50 bp, Homo sapiens
ccagtgcccaagtacggtttgaaactaatctggattcactccctctggtt

SEQ ID NO: 49436 - DNA, 74 bp, Homo sapiens
agtgtggtctacgagctgtttctcatctttatactcttccaggtgctgcgagagatgtgcaagcagggataccg

SEQ ID NO: 49437 - DNA, 100 bp, Homo sapiens
gagccgtgcatggggctgctccccaggacctgagcaggaacctggagttttcaggaaccctaaggactctgcaatatgaataattccctagagaacacca

SEQ ID NO: 49438 - DNA, 98 bp, Homo sapiens
tctgtcagaggaagatcccttgaaggaaggggagttcaccctgcacggccgggccatcctggagatggagcaatacatccgggagacgtaccccgacg

SEQ ID NO: 49439 - DNA, 50 bp, Homo sapiens
ttttgaaccaaattatgctgcaaatgccaccccagtccaccccctgaaaa

SEQ ID NO: 49440 - DNA, 100 bp, Homo sapiens
acagctgcccttgaccatatttcttacttccgagaagatcgtagcagtaattcagtggccctcagattctcagcttgattctaaggaactttcagctggt

SEQ ID NO: 49441 - DNA, 88 bp, Homo sapiens
gaaaacatgaccgctgagcccatgaggtcctgcaaccctggttccagtctggcaagcattgtagacctggctgctgaagactgacggg

SEQ ID NO: 49442 - DNA, 100 bp, Homo sapiens
gagaggtgctgcggcaggcgctgcgctgcactattttgagtatccgaggagcccaggaggaggaacccacagacccccagctgatgcggctggacaacat

SEQ ID NO: 49443 - DNA, 98 bp, Homo sapiens
ccgtcggcagcaagaacagagagagaggtggacagatctgagagatactgaggtcatttcttcagatagctccccagctgtggaaaatgagcatcctc

SEQ ID NO: 49444 - DNA, 80 bp, Homo sapiens
tgaaggcctgttttgaagagaaggggaataagactgcatctgttcatatgaggttaaacccatccagagtaatggctgcg

SEQ ID NO: 49445 - DNA, 75 bp, Homo sapiens
ttttgttattacacttactgatggtcattcagcatggactgggacaggtctcctaaaaacccagaacagaagatc

SEQ ID NO: 49446 - DNA, 100 bp, Homo sapiens
ctgggcacagccttggaaagtcaggaccgcgacggcagcagagcagagaagtgttgagctaaatagcaattctttggagtcctatgaaaatgtcatgcag

SEQ ID NO: 49447 - DNA, 98 bp, Homo sapiens
cccgtcgctatcaaggaattaagagaagcaacatctccgaaagccaacaaggaaatcctcgatgtatggcactaggtgccccagaagtgtgcaaccag

SEQ ID NO: 49448 - DNA, 95 bp, Homo sapiens
tacagaagttgcagatcacattcagttggatgccagcatccctgtcacttttacaaagatgtttactgaactgcaacagatgaggcaacagttac

SEQ ID NO: 49449 - DNA, 82 bp, Homo sapiens
tgttgctgcagattgccaaagcatacactagcgtggctaaggcccctctgcacctgcatgagaaccctgacttagccaaggt

SEQ ID NO: 49450 - DNA, 99 bp, Homo sapiens
cgccttcgccgaccggctacgcgccgtggacacagacggggtggagcccatggaatcggtcctggaggacagggatgaggagaatttctgtgccactgt

SEQ ID NO: 49451 - DNA, 74 bp, Homo sapiens
gggcagacccctgtgttttccaaagatttccacaagacggcaccctatgtcgtcactggcagcgtagatcaaac

SEQ ID NO: 49452 - DNA, 100 bp, Homo sapiens
aatctgcaaaacttattcgggataaagtagcagatgagtactggcagaatcacccagaactacatgacattccaatatactatgcatcatctttggccaa

SEQ ID NO: 49453 - DNA, 100 bp, Homo sapiens
agatcggcaggcgagattgcctgacccaggcctgctcggccctcacagggaggccccgtgtgggccgcggcccggccctcaccatggagtccatgttcga

SEQ ID NO: 49454 - DNA, 51 bp, Homo sapiens
cacctgtgcgggatggaacaaaaggtgttggggaaccactgattcaagtat

SEQ ID NO: 49455 - DNA, 100 bp, Homo sapiens
ttgttcttttcttttccatgatatcattatatggacagtttagggtggtcttccgggatccgtatcggtttaagaagcggacggagctgttcattgccgc

SEQ ID NO: 49456 - DNA, 97 bp, Homo sapiens
cgcctcacatctacgccatcgcagacacggcctaccggagcatgcttcaaggtgtgatgaatgcagactctgctaccattttggctgtttggatcct

SEQ ID NO: 49457 - DNA, 99 bp, Homo sapiens
atctgggcggtatctggaacttgttttagtagagacgggatttcaccatgttagccaggatggtctcgatctcctgacctcgggatccacccgcctcgg

SEQ ID NO: 49458 - DNA, 90 bp, Homo sapiens
aagagcggccccgcggggggcgatgaccgtgcgctgaccctgactcactccagtgatcagaatcatccagataatcaacagctgaagaat

SEQ ID NO: 49459 - DNA, 106 bp, Homo sapiens
ctcagctcttactgcgggccgctccgacggcggtccatcctgtcggtcctgaccgccagcctgtcgtacatggtggggatgatcgccagcttctacaacaccgagg

SEQ ID NO: 49460 - DNA, 83 bp, Homo sapiens
tgcagcgggagctggacggcgagcgcgagcggcgcgagaaacaaccaaccagtggttcatcccagccgtgaggggggacattc

SEQ ID NO: 49461 - DNA, 78 bp, Homo sapiens
taaaagtatctatagggaatataacactctccccagcaatatctgatgatgatgctgaagctatccttgctgcagact

SEQ ID NO: 49462 - DNA, 75 bp, Homo sapiens
cctctgtcgctgggacccttcaggagacagaggagctggaggaggagaagtcaggcctgcagaaggagattgctg

SEQ ID NO: 49463 - DNA, 83 bp, Homo sapiens
cacatactatccgtttgttcaggaaccaccagtgacagacggacaaggcaaaatctcagcaagttcggacctctagtacaata

SEQ ID NO: 49464 - DNA, 101 bp, Homo sapiens
atcagccacatgctcaataaccctgaactcatgaggcagccttcatctcctcgtcctccaggcagcacaagccattgtggaatctccaccaggtgtacaga

SEQ ID NO: 49465 - DNA, 74 bp, Homo sapiens
aaagatctaccttctggaagctactactacgtggtgcttggaaagaagtccattggaatattaagcccaggagt

SEQ ID NO: 49466 - DNA, 90 bp, Homo sapiens
ttgttgcatgggatggcaatgtccacgtatcacagaggagaatctgtgttacacagagcaatgtacgcaaatagtgtaaaattgttttaa

SEQ ID NO: 49467 - DNA, 82 bp, Homo sapiens
ccctctgcccccccttccccacgcaaccccagatccatttacactttacagtcgcgtctccttcttcacctcggggtccgag

SEQ ID NO: 49468 - DNA, 97 bp, Homo sapiens
ctccccgagacccaccggaccccgaacccagtgccggatggagtgctgtgatgtgccagccgagacactctacgacgtcctacacgacattgagtac

SEQ ID NO: 49469 - DNA, 101 bp, Homo sapiens
cactgcctggctgcgagcacatgatggcgatacgggagctcaaagtgtgccttctcgggagctaagcttgtctgctggatccctgcagctggagcgcaaaa

SEQ ID NO: 49470 - DNA, 82 bp, Homo sapiens
gccgtcaacgccttcaaccaggagtttggtgccctggttgtcagatgttggaaagcagtaggacggaacatactcttcgtgg

SEQ ID NO: 49471 - DNA, 75 bp, Homo sapiens
gcagaagaagaaggtgtactcctttctattttaaagagccaagcctcagagagtctgccatcatggatgttctcg

SEQ ID NO: 49472 - DNA, 82 bp, Homo sapiens
ccttcaatactacctttatttccaccataggtgacttaagagattaaaattaatttggttgctgttggttctgaacaaataa

SEQ ID NO: 49473 - DNA, 119 bp, Homo sapiens
agcagcccaacggcggcgagcccttccttataggcgtcagcgggggaacagctagcggcaaggttttgcacactagggaccaagaagccctcggggacactgctgagaaaagactgccg

SEQ ID NO: 49474 - DNA, 120 bp, Homo sapiens
tggacggtccctagagaggataccgggacgctcctgaagccgcgagatggtatggcgatggtgtcagcaggaacttggtggtgggcacactggcctggccttcaccctgggtcatcgtca

SEQ ID NO: 49475 - DNA, 87 bp, Homo sapiens
ccgtaggatgatgtttcctccgccaggctgagggtaaaaagctgggattggtaggctgggtccagaacactgaccggggcacagtgc

SEQ ID NO: 49476 - DNA, 100 bp, Homo sapiens
ctggcactggggacctctcttacggttaccagggcagcagccctatccagccaagaccaggtcacaccaccgtgagcgcaggcggagtcctcaatgacca

SEQ ID NO: 49477 - DNA, 100 bp, Homo sapiens
tacgcgggccggaagcggaggaggcccctgcagaaacagaccatggccaacctggagcgcaccttcatcgccatcaagccggacggcgtgcagcgcggcc

SEQ ID NO: 49478 - DNA, 88 bp, Homo sapiens
ttattcaactatgaacaatcacatatctttggtctaagtggtgaaatagggccttctaaacctgtggagaagtgagagatctgaattt

SEQ ID NO: 49479 - DNA, 90 bp, Homo sapiens
tggcggtccctgtgacctgtggagacacggccagatctgccctccagggaaaggccatacaaatgtcagacctgcgagcgaaccttcacc

SEQ ID NO: 49480 - DNA, 95 bp, Homo sapiens
cgcctgggcccgacgggcatgccaagaagatgagaccgggggaggcgacgctaagttgctgatcgtggcggcccgcgatgctcccagcccggtga

SEQ ID NO: 49481 - DNA, 90 bp, Homo sapiens
gcctccgccaccgtgcacatccgaatgggtgttgacttcaaaatcaaaactgtagagctaagaggaaagaaaattagattacagatctgg

SEQ ID NO: 49482 - DNA, 83 bp, Homo sapiens
aagaaatagttacctatgatcttatgccccgtggtgccctgcttgtcaaaatcttcaaccggaatgggaaagttttgctgaat

SEQ ID NO: 49483 - DNA, 83 bp, Homo sapiens
cttccgtatctgcctaggcattttgctgtctcctcctaatacgaccaaactgcagctggaatacccagtacagttctgcttac

SEQ ID NO: 49484 - DNA, 100 bp, Homo sapiens
gcttcctggatgagaagagcggcagtttcgtgagcgacctcagcaggtgagaagccctaccactgcaactgggacggctgcggctggaagtttgcgcgct

SEQ ID NO: 49485 - DNA, 104 bp, Homo sapiens
tggaattctgcccactctgcggagttagcagtcacgacctccagcacagctgatgtagaaggccaatccttaagacaccgagacaagcggcttagtttgaattt

SEQ ID NO: 49486 - DNA, 101 bp, Homo sapiens
gccgccgccgccgccatgaacaactcgggcgccgacgagatcggctctacgaactcgacggggaccccaagaggaaggaattcctggatgacttgttcagc

SEQ ID NO: 49487 - DNA, 98 bp, Homo sapiens
ttcattttacctttatgtatttacctacggagtcagattcctgaaaaaggttgtgaagatgagaaaagaagtgaagagaattcgagttttagttatcc

SEQ ID NO: 49488 - DNA, 88 bp, Homo sapiens
aaattatccctactacaggactgcggacaagggctggcaggcatgcatgtagggaataccggattcataaagagctggatcatcccag

SEQ ID NO: 49489 - DNA, 75 bp, Homo sapiens
ctgcaggattttcagcttcagcaagcaggacttgaaaatactggaaatctgtccggatccaaattattttgcaag

SEQ ID NO: 49490 - DNA, 75 bp, Homo sapiens
ctccgggtgtccggccgtgtcccgaggaagtgcaagacccgcaaaatgatgcttcaacacccaggccaggtctct

SEQ ID NO: 49491 - DNA, 140 bp, Homo sapiens
tggaattgggcaaagttgctgccaaattatctgagactggataagatgaccttcagtgtgctgctcaaaaacaggaaaatggttctcctgaagaacatgcaatctatgtttgggatcatttcatagctcaggctgctgct

SEQ ID NO: 49492 - DNA, 82 bp, Homo sapiens
tggcttgtgaaatcatgcctctgcaaaggtatgttgagtctaaaaaggacagagtcacagtagtcttcagcacagtgtttaa

SEQ ID NO: 49493 - DNA, 90 bp, Homo sapiens
cagggactgaaggtcacaccacagcgcgttcctcatgagagtgctggactcctacggggatgactaccgggccagccagttcaccattgt

SEQ ID NO: 49494 - DNA, 90 bp, Homo sapiens
tacgctttttagaattgcacttggaggacaagaggtggactagcagaaagactaaatggactgcagaatcgagagagatctgctatttct

SEQ ID NO: 49495 - DNA, 102 bp, Homo sapiens
tcatccccgagtaaggactcctcaagaggagaggctcctcagtggttggaaagtgattcttgtcagaaatgtgagcagccatttttctggaacataaagcag

SEQ ID NO: 49496 - DNA, 101 bp, Homo sapiens
cgggatcccagcctcaggcgtgcgcggacggtgtgcggaacgacaaatcctccacccctgggctcaagtccaacacaccaaccccaaggaacgacgcccca

SEQ ID NO: 49497 - DNA, 50 bp, Homo sapiens
cagatttggaatcaaggctgcagaggagttcatgatcaagtgttgcccac

SEQ ID NO: 49498 - DNA, 100 bp, Homo sapiens
tcagagagactttcgaaagaatatgatcaactcctgaaagaacactctgaacttcaggtggaaccgtcccaaaatgtcccttgctcagaagaaggatcgg

SEQ ID NO: 49499 - DNA, 100 bp, Homo sapiens
cggatctggaggagcagttgtctgatgaagagaaggtggcagggcccagccccgaaccagacaagggacccctcaaggagcttcattctagcaggagaaa

SEQ ID NO: 49500 - DNA, 101 bp, Homo sapiens
tatgatctacctaccaatcgtgaaaactatattcacagggccttgatacaaagcatgcttgaaaaatgcgatcggtttctctggtcccagcaggcctagtg

SEQ ID NO: 49501 - DNA, 75 bp, Homo sapiens
tcagacacatgatccgcaagaacaagtaccgccccgacctgcgcatgagaaacttgcccaggccaaagaagagaa

SEQ ID NO: 49502 - DNA, 83 bp, Homo sapiens
gacgcggcgctgctgaccgacatcgaagcaatgatcgtgcgcttcctgaccaagagattcattggagactatgaaccgaatac

SEQ ID NO: 49503 - DNA, 90 bp, Homo sapiens
gtcctttcgtggctcactccctttcctctgctgccgctcggtcacgcttggtggtgaatgcagtcaactgcagtctgttctcagctgtgc

SEQ ID NO: 49504 - DNA, 88 bp, Homo sapiens
tgatgagaaggacccacggcgtctgttcgaaggcaagcacgaggagcggcaggacgagcatggctacatctcccggtgcttcacgcgg

SEQ ID NO: 49505 - DNA, 75 bp, Homo sapiens
gtctttagatgcactgttggcttgcgagacaaatatggatcaccccttctgtgtcattctctgaggaaaacaagt

SEQ ID NO: 49506 - DNA, 83 bp, Homo sapiens
cagggcgcggcctctccgccgggtgtaccacctgtcgcggcgcgagacctctggctctcccacctgtcaccctggcccttctc

SEQ ID NO: 49507 - DNA, 109 bp, Homo sapiens
ggaagaagcagctgaagacggaggcagctccacactgtgaactaattgattatggaagattcccacaagagtaccacgtcagagacagcacctcaacctggttcagcag

SEQ ID NO: 49508 - DNA, 100 bp, Homo sapiens
ggaggctgtgcgggccccgctccgcttcgaatggagggagaaccgaagattacaggaggccagcatgaggttggaacaagagaatgatgaccttgcccat

SEQ ID NO: 49509 - DNA, 75 bp, Homo sapiens
gatctagaggcataattaggataataaatcctataacaatgcagtgtataaagcctccagggtcgtatagacctc

SEQ ID NO: 49510 - DNA, 74 bp, Homo sapiens
gagtgttcagcccctagcaggaaggatagctcctctctgcagatatcatggtggaagagtttgtggaagggggt

SEQ ID NO: 49511 - DNA, 75 bp, Homo sapiens
ggaggtgcttctcatgcaaaaggaatcgtgctggaaaaagttggatgtaaagctggatcccgccacggcgcaccc

SEQ ID NO: 49512 - DNA, 115 bp, Homo sapiens
aggcatggctaccgaacacagaaatttgggaaactggactatacttcaggacatcactccattagatggaagatggtaccccaaagcatatcatccagatgacaggatttaagat

SEQ ID NO: 49513 - DNA, 51 bp, Homo sapiens
gtcccagttcgcaatgagaaaggtgaaatgacaatggatgctctgttggct

SEQ ID NO: 49514 - DNA, 100 bp, Homo sapiens
gtgaccttcgcttggtgtcctcctggcctcagcaacctgacaattctgtcgtgtcccgatattaataaggcagcggaaagaagaaatatgaatacggctc

SEQ ID NO: 49515 - DNA, 100 bp, Homo sapiens
aatggttatattttagaaatgttaggaagtggagggaagaaagcacagataatttcagtcctgtcacagatctacgtgatggagtcttgctctgtctccc

SEQ ID NO: 49516 - DNA, 98 bp, Homo sapiens
cacattagccagtgtgaagacctccgaaggaccatagaagtgatccagttgagtctgccagaagatcagaaactaagcatcactgcagcaactgtggg

SEQ ID NO: 49517 - DNA, 96 bp, Homo sapiens
ccagcatccctgcctggactggtcctgagattcctgaatcagaatgtcaaaactggaccaatggggccaggctgaagtattgaactttctgctacg

SEQ ID NO: 49518 - DNA, 82 bp, Homo sapiens
gcccaggagtcatcggacgccagaatctgatgatatcatcaagttgaatcgaaaggaagggaagaagcagaattttccaaga

SEQ ID NO: 49519 - DNA, 71 bp, Homo sapiens
tacaggtgtgagccacggcgccgggccccctagggattttcaggtccagtggctcctggacaactatgaga

SEQ ID NO: 49520 - DNA, 82 bp, Homo sapiens
agtgaatgaggtgctgaatagactgcacctggctatcccaaccaggagggacgataagtcaccaggagactaaagtccatca

SEQ ID NO: 49521 - DNA, 126 bp, Homo sapiens
gatcttcctggtgtccgagtgcgccctgatgctggcgcagggcacggtgggcgcctacctgattccagaattctctgatggtttctggactgggtcccagctggcgtgctggacgaattcggaaac

SEQ ID NO: 49522 - DNA, 75 bp, Homo sapiens
gaaaggcactcctaggggacataaaattagtgattactttgaggaatatcataatgcatgaaggcagctggggca

SEQ ID NO: 49523 - DNA, 74 bp, Homo sapiens
ttgatgggcacctcccgggacggtgatgcaggttctgaatgctgatgccattgttgtgaagctgaactcaggcg

SEQ ID NO: 49524 - DNA, 99 bp, Homo sapiens
aagctttccagagaatgtttcagagaaagttacgtggagcgtgggcgtttcgcagactcctaagcaaatgaagaaacacccctgccgccagtgtgacaa

SEQ ID NO: 49525 - DNA, 100 bp, Homo sapiens
tacgctttgttggtggactactctcagcctactatctgtctggagaagaggctatagaaagcgcaattggtggtaacgcttatcaacacagcaaagtgaa

SEQ ID NO: 49526 - DNA, 96 bp, Homo sapiens
tgtctgcaggaggagccactgtttttcctgaagttggagctagtgtttggcccaaaaaagaaaggcaccaatgcccagacctggctacaagcccca

SEQ ID NO: 49527 - DNA, 51 bp, Homo sapiens
atctcgggctcggaacgagactgcacgcaatcccacagagtattgatgagg

SEQ ID NO: 49528 - DNA, 83 bp, Homo sapiens
gagatatctgcaatgatgtactggaaatccaggagctgcaggctcagattcaggaacagcatgtccaaatcgatgtggatgtt

SEQ ID NO: 49529 - DNA, 75 bp, Homo sapiens
ctttcagccaaatgccagactgattgtcatgctcagggaccctgtggagagttccggaaccccaaggcatccttg

SEQ ID NO: 49530 - DNA, 98 bp, Homo sapiens
gctggtgcccattgggcagtgcctgtgccaggcaggctacgagaaggtggaggatgcctgccaggatgaggacggggacttggttgccttttccagtg

SEQ ID NO: 49531 - DNA, 100 bp, Homo sapiens
agtccggggactggggggaccagtactctgccgagtgcggcggctggctacagcaaacatcattcaagatgtccagcaaagggagcagcacagatggcag

SEQ ID NO: 49532 - DNA, 50 bp, Homo sapiens
ctgacagcgagatcgcttgtagccccatggctgggggttatggagtgatg

SEQ ID NO: 49533 - DNA, 75 bp, Homo sapiens
ctttgaaggaggatgctccagcaggcaaaatgggcatatcaagtttttgaccaaaggagataataatgcggttga

SEQ ID NO: 49534 - DNA, 98 bp, Homo sapiens
cggttagacacacagctgaagaataagcttataacactgatggatacagatccacgggttttagaaaaacaagaattacagcagccaacctatgttgc

SEQ ID NO: 49535 - DNA, 98 bp, Homo sapiens
gctggggtgggcccgggcaactacagcttctcctaccagctcgagtctggatattgagagcagcttgaagcagttggctgagcggcgtactgacatct

SEQ ID NO: 49536 - DNA, 83 bp, Homo sapiens
ctggctgactgcgagaaggtggctgtggagttcgggaaccagctggagacatctgaatgggactccgagtgccttacatccct

SEQ ID NO: 49537 - DNA, 75 bp, Homo sapiens
cttagaaggaaggctgagaaactaaagaataacatagctgatccagaagaactgttcacaaaattagagcgcatt

SEQ ID NO: 49538 - DNA, 104 bp, Homo sapiens
cgacgacgtgctgttcgaggatgtgtacgagctgtgcgaggtgatcggaaatttttcacagcatatggtcctgattatgtgctggaaatcacgccaagctgccg

SEQ ID NO: 49539 - DNA, 101 bp, Homo sapiens
gcggagtgcaacgccgtgcggcaggcgctccaggacctgctcagcgagtacatgaataatctccagaaacatgacaaggaggactttcctgcctcttggag

SEQ ID NO: 49540 - DNA, 95 bp, Homo sapiens
ccttttccacagggaattgagttgttacggctagatgaggctcaagaagcagaatgccaggccttgaggctacagctccagcaggaaatggagct

SEQ ID NO: 49541 - DNA, 130 bp, Homo sapiens
tggaaagaaaaaaaaacatacctcaacccttggaaaaaaatcgattctgctcctctagaggctgttggaagctgcttgggagaagtgggtcctatagatttctctaccatagctatacaacatagtaaag

SEQ ID NO: 49542 - DNA, 124 bp, Homo sapiens
tctacgagtggatggtcaagagcgtgccctacttcaaggataagggtgacagcaacagctcggcgggctggaaggttgaactcccaccacctgatcttggaccaagttctgcactaaatcagac

SEQ ID NO: 49543 - DNA, 101 bp, Homo sapiens
tcgaccggcgacagcagccaggagtcatgagcgacagcggcgagcagaactacggcgagcgggtgagcgagtgctgtgctttcatgggcctcttctttatg

SEQ ID NO: 49544 - DNA, 100 bp, Homo sapiens
tctcagtttgtgtttctgagaaagactggatacacgtctgtttaactacgcaaaaggtaatgctggcatggcttactgggaccctaagtgtggcgaaggg

SEQ ID NO: 49545 - DNA, 100 bp, Homo sapiens
tttagccttgcgactggcccagtatccaggtcgaggttctgcagaaggttgtgactttagtatacagaagaaatgttggctatttggcgatgagaggtgg

SEQ ID NO: 49546 - DNA, 100 bp, Homo sapiens
gatggccgtaaccccgaaggaaataaacctctgtagaggagcaggatgcaaccgacaggctgtggccggacagctgctgcccagcacatggagcctgcac

SEQ ID NO: 49547 - DNA, 100 bp, Homo sapiens
ttatagactagcagatctctttgggtggtctcagcttatctacaatcatatcacagaagcaatgaggctccccaagaacacacctgaggaaaaggacagg

SEQ ID NO: 49548 - DNA, 100 bp, Homo sapiens
cagactcgccgtggtcaagttcaccatgagagggattgacatctttaagtatgtgatctacggcatcgcagctgcgttctttgtgtatggcattttgctg

SEQ ID NO: 49549 - DNA, 74 bp, Homo sapiens
ggtggtcccccgctcccggggtccccggccggccaagcaggccggaccagaatatggccaagggatgaacccta

SEQ ID NO: 49550 - DNA, 101 bp, Homo sapiens
gggcgctgggggcgccacaccaggttactcctggatggagcacctctgatagcaatccacaaagccaggtattacaagaggaaagatggcttagccctggg

SEQ ID NO: 49551 - DNA, 46 bp, Homo sapiens
gaaaaatcaaaatggtacatttaagaagaaaaagtcagcacttttt

SEQ ID NO: 49552 - DNA, 80 bp, Homo sapiens
ctcagcacatgatcagggatatacagaccttactatcccggatggaggtgacctctgagaaggatgtgcaaacagctctg

SEQ ID NO: 49553 - DNA, 51 bp, Homo sapiens
aaattcatcccagaaatctaagagctggtctcttgtggctcagcgccgtgc

SEQ ID NO: 49554 - DNA, 105 bp, Homo sapiens
ccaaccccagccgaccttgagctccaggagttcgtctcttacgtctgcggaagtgcagctgcctcagttcttagcgcagactccatcaagaatgctggaggaagg

SEQ ID NO: 49555 - DNA, 100 bp, Homo sapiens
gtagaccccgcgagaaggaaggtcgagccaggcaacttcagttcatttatgcagaaggaaatatttgagcagccagagtctgtcgtgaacacaatgagag

SEQ ID NO: 49556 - DNA, 82 bp, Homo sapiens
tccttcggcagtccacccaccgccgccgcctcccagctccgctctgcaccgaaggggatgggtccgacccagcctggcatca

SEQ ID NO: 49557 - DNA, 51 bp, Homo sapiens
gggcttggtgcaggatttggaacagaatcttgtggaagaagaatgaagttg

SEQ ID NO: 49558 - DNA, 100 bp, Homo sapiens
tagctgaatgtgttactccattgctgaggagtggtcctgaagacccggatggcgctgcggaagacaggccagtactcaggaatgctggactgcgccagga

SEQ ID NO: 49559 - DNA, 100 bp, Homo sapiens
ccacatgcagcgatatgcagtttggtttggaggatcaatgctggcttccacggaagctattgaatccttcaaagaagctttgaagcagaaagttgacttt

SEQ ID NO: 49560 - DNA, 100 bp, Homo sapiens
cacccactgtggtctgttgtaccccactgctggggtggtggttccaatgagacagggcacaccaaactccatctggggctaaactgcacggtcaagaata

SEQ ID NO: 49561 - DNA, 83 bp, Homo sapiens
caaagagctggtggcctcaggtgaaaaggcctctgactggaaattagaccagcctgattggactggtcgcctccgaatcactt

SEQ ID NO: 49562 - DNA, 97 bp, Homo sapiens
aattatcttgtgattatttgagagatgtatcagtttcttctgaagtacaatcaactgtagaagcctttgtagcaggagtatgctgctgctgttccgc

SEQ ID NO: 49563 - DNA, 83 bp, Homo sapiens
gtgcagtcgagccagcacctgtttctggacctgcctaaggaagcaattttggaggtggtggaagctacaatgattttgggaat

SEQ ID NO: 49564 - DNA, 90 bp, Homo sapiens
aagttccccaacgcctttcattattggagtacattctgtctttaaaactgatgtccatgaacttctgaagcaggagatgggcggcatcgt

SEQ ID NO: 49565 - DNA, 82 bp, Homo sapiens
tactatccgtttgttcaggaaccaccagtgacagacttttctgggagaagaggctacaaggacttagtgcatcagatgtaac

SEQ ID NO: 49566 - DNA, 90 bp, Homo sapiens
ctgtgacctgcatgtactgggggattcgcagggaggatgtcgggacaccccggaagctgggaaatggcacgtgtggttctcaaatatagg

SEQ ID NO: 49567 - DNA, 100 bp, Homo sapiens
ctgagtacaacacggtggcaagcaagtttaatcagacctgctcacacttcagaatagagaagtgggctcgggatgagtttgaaggcctcttcaagcagcc

SEQ ID NO: 49568 - DNA, 100 bp, Homo sapiens
ggagagctgctgaagtcaaaggagcaattgctggtcctgagcctgagtctaaagtagggggaaccaagcctgctggtggtgattttggagaagtcttgaa

SEQ ID NO: 49569 - DNA, 100 bp, Homo sapiens
accagcgcgcaggacagcgccttcctcaacgacgcggacatggtcatgagctttgtgaacctgggtttccgagagagcgcttttgcctacgccatcgcag

SEQ ID NO: 49570 - DNA, 100 bp, Homo sapiens
ttaaagaagatccatttgtatttattcctgaagatgacccattatttccacctattgagttggatggcaagcatgtggtgtttggcaaagtgaaagaagg

SEQ ID NO: 49571 - DNA, 75 bp, Homo sapiens
cggaatgctgctgttcgctggtgggaagcagtatcctggtgtgaaccagctatcctccagtataggaggattgag

SEQ ID NO: 49572 - DNA, 96 bp, Homo sapiens
ttcttgaatgacatccgagcgaaagagaaagagattgttcagattccattctgtggggaaattgactgtgaggactggatcaaaaagaccactgcc

SEQ ID NO: 49573 - DNA, 98 bp, Homo sapiens
ttctcttcacggtggaaaacacagatccagagtgttactggcttacaaattggattgagtttcccggttggaggagcgggagtcggagatgaagaagg

SEQ ID NO: 49574 - DNA, 76 bp, Homo sapiens
ctcagtcactccagctccacgggcagacacctgcacagagcctcattatctggtttggagacatgaactttcggat

SEQ ID NO: 49575 - DNA, 82 bp, Homo sapiens
cagaacttaattctgaacatgaatgaccacggctttgtggcctcatgcattgtgcgtcagcagcaatgtttatggtgaaaaa

SEQ ID NO: 49576 - DNA, 100 bp, Homo sapiens
gagcctggcccccctggccctgctggtgctgctggccctgctgaaatagttcagcagttaattgaaaatagtacaacattccgagacaagacagaatttg

SEQ ID NO: 49577 - DNA, 100 bp, Homo sapiens
attcaccaaataagctatatactttggttacctatgtacctgttaccactttcaaaagagttgagaagaggaggaagaataatgggaggagacaggacct

SEQ ID NO: 49578 - DNA, 76 bp, Homo sapiens
ccaagaaattactgtctcaagtgatacggacaagacttaaaacctgtcttggatagagaatatttagccatttacc

SEQ ID NO: 49579 - DNA, 101 bp, Homo sapiens
ccaaggtggttgtgaccaagggagcagtggaggacctggagaggaatgacggctcggccgagaggccttacttcatgtcttccaccctcaagaaactcttg

SEQ ID NO: 49580 - DNA, 76 bp, Homo sapiens
ctttcttggttttgcaggaaatcctggagtctgaagaaaaaggaatcatttccagcaatggaaagagatggaagga

SEQ ID NO: 49581 - DNA, 100 bp, Homo sapiens
aagaacgagtcgggcagccgctccaatgagagaggctgctcacccaacagacgtctccatctccaaaacagccttgtactcccgcatcgggaccgctgag

SEQ ID NO: 49582 - DNA, 50 bp, Homo sapiens
ttatccaccaagcccaacaatcaggtgaccaagaatatggcccaggtgac

SEQ ID NO: 49583 - DNA, 100 bp, Homo sapiens
ttgtcaagcaagctgggatctatgagtggaaaggtgaccaagcccaaagaggagaaagatgcttctaaggccgataacagtagaactctgaacgtggatt

SEQ ID NO: 49584 - DNA, 75 bp, Homo sapiens
ccgggagtggaacattgtagagtctgagaaggcccttgtggtcacggtctagatcacattctcgatccagaggaa

SEQ ID NO: 49585 - DNA, 100 bp, Homo sapiens
agagacgggagtcctgggcccagagccgagatgagcagaacctgctgcagcagaagagagaatggatcttggagaatgtctgaaagtccatgacctggct

SEQ ID NO: 49586 - DNA, 82 bp, Homo sapiens
cgtgacaagaagtacgaggaagtgagggacgactggagtgagcactggcctgggagtctgaagattgtgccttcagacctac

SEQ ID NO: 49587 - DNA, 100 bp, Homo sapiens
cgcaaacgaaaaagaacgacatgatgcaatcttcaggaaagtaagaggtcttcccatgcacaagatgattaatacagatcttagcagaatcttgaaaagc

SEQ ID NO: 49588 - DNA, 90 bp, Homo sapiens
taatggaaaatcgcttggttaaaacctgacacttttaacaggaaaatgtttataggaggccttagctgggacactacaaagaaagatctg

SEQ ID NO: 49589 - DNA, 75 bp, Homo sapiens
tgaaggaaaccgcactctcacactggccttgatttggcagctaatgagaagtttctccacagacactacccaaag

SEQ ID NO: 49590 - DNA, 75 bp, Homo sapiens
aagcctcctgccgagataaagccaccacgtctgccgtttccctggggagatggtaaccatactctattccataac

SEQ ID NO: 49591 - DNA, 100 bp, Homo sapiens
cagaccctggagcctcagttggaagcagccgatccagcctgcggagcctgtggggcaggttctgaagccagacacaagatgaaaaagctaactccaaaac

SEQ ID NO: 49592 - DNA, 74 bp, Homo sapiens
tttgttaaggattccaagtaactcttatttggaatttcagacctgaacaatcaggtggacaacttcttgtgact

SEQ ID NO: 49593 - DNA, 50 bp, Homo sapiens
ccgcctgcggcccggccctgctccagatttgtccagtcattgtgccacaa

SEQ ID NO: 49594 - DNA, 50 bp, Homo sapiens
cacagcatcctccagcacctcagggtgcagcagttggaggaagaaaatac

SEQ ID NO: 49595 - DNA, 100 bp, Homo sapiens
attgcgagacaacagcagcaacttctgcaacagcagcacaaaattaatctcctgcagcaacagatccagggttctcatgtatcagccatcttctgtaagg

SEQ ID NO: 49596 - DNA, 75 bp, Homo sapiens
ggcggcggcggcggcggcggcggcggcgcagctgccccagagcacatcagctatgtgccccagctctcaaacgac

SEQ ID NO: 49597 - DNA, 82 bp, Homo sapiens
cccgctggaggagctccccagctggtggctggagcgaccccttgttctttggtggcgctgcttgcctacatgtagcctgtgt

SEQ ID NO: 49598 - DNA, 82 bp, Homo sapiens
gacgagaagtcaagaactatatgatgaacaacatgggtggtgatgaggatgtagatttaccagaagtagatggagcagatga

SEQ ID NO: 49599 - DNA, 83 bp, Homo sapiens
ccgcctccgcccagggccacctaaggagcggaccccgcatcttcgccgtctggaaaggcatggaaaagaccttgccagagcct

SEQ ID NO: 49600 - DNA, 100 bp, Homo sapiens
tgcggcggcgggaacgattgggctgagcagaggacgacatgttgcttttcgtggagctcccagttgaggataaaatcaggatcattgcacagaagatcta

SEQ ID NO: 49601 - DNA, 74 bp, Homo sapiens
tggattggtggatctgaagtacaaaatattttccaggtgcacttacagagtgctacgatgaactggggaacaga

SEQ ID NO: 49602 - DNA, 75 bp, Homo sapiens
actgactttcagctatggaatcgagatggggtttcaccatcttggccaggctggtctcgaactgctgacctcgtg

SEQ ID NO: 49603 - DNA, 100 bp, Homo sapiens
gtggacggtgtggggcggtcccggccccgcaggatggagatattctagcatccaacttctctgttgacacacaagtcgcgtacatcctaagtctgggcgt

SEQ ID NO: 49604 - DNA, 83 bp, Homo sapiens
acgcgctccaaaatatccgccatggagaaatcttggtgtttcccattaaacactaccaggacaaaatcaggccttacatccag

SEQ ID NO: 49605 - DNA, 100 bp, Homo sapiens
gcctcccgagtagctgggaccacagtttgttcatatcaacaacttaaaactcatctgcagagcacatcaactagtgcacgaaggctataaatttatgttt

SEQ ID NO: 49606 - DNA, 100 bp, Homo sapiens
ccttcctcacctactgcgcccgggactctgctctcaaggcccagagtgcactgcacgagcagaagaccctgccagggaacattgatgatggcacctcaga

SEQ ID NO: 49607 - DNA, 98 bp, Homo sapiens
taaaacgcccagataccacagaatcacttaattcttccttgtccaatggaacaagtgatgctggacagagcgggatgccaccagcttgtccaaaggga

SEQ ID NO: 49608 - DNA, 90 bp, Homo sapiens
ctgggcacctacctctggaccgatgtctacaggagctgctggcactaaggctggccctggaggatgggtgtggccctgggcctggacccc

SEQ ID NO: 49609 - DNA, 82 bp, Homo sapiens
cacggagttgcgtcccggggacttggggccgcagggaggtgtccctacctgcaccggacgacgggggacacagaacgcaagt

SEQ ID NO: 49610 - DNA, 98 bp, Homo sapiens
aatcgaatgaaaactgaagctttctgctttattccttttctccttctcctttcagtcaggcggagtacgtccagcttgttactgaacttcgaatgaca

SEQ ID NO: 49611 - DNA, 100 bp, Homo sapiens
gatataggagggcagacaataggaggcaaaatgttggataaatatatctatggagcacaggcagttcaattaacctccagaagatggctgaacctgcagg

SEQ ID NO: 49612 - DNA, 83 bp, Homo sapiens
tgccatttcgcctttatcgtggtggagtccaccctggctgtgacccctctgtgcccctggatccaatctcagtgtctaactca

SEQ ID NO: 49613 - DNA, 100 bp, Homo sapiens
gccagacactgaggctgtgctgaacgggaagggcctcggcactggtaccctttacatcgctgagaggatctaccgctaccagtctcatgactatgccttc

SEQ ID NO: 49614 - DNA, 51 bp, Homo sapiens
gaaaaaacacgctcagagataacctgtgtaaagcaggccctctggctcacc

SEQ ID NO: 49615 - DNA, 100 bp, Homo sapiens
acttgaagaggctatgtggtaccttcctgggtgggcccaagccaccccagagaatgaagaatccccacctgagggccaaactagcagaggtgttggaagc

SEQ ID NO: 49616 - DNA, 50 bp, Homo sapiens
tctgatgatgatgaaagttacacaggtaccagctggaggatgagtctgcg

SEQ ID NO: 49617 - DNA, 51 bp, Homo sapiens
gtgctgcgcgacccccgcgcatgatgcctaccttaatgcctctgaaacaac

SEQ ID NO: 49618 - DNA, 50 bp, Homo sapiens
cgcggatctggggccgtcctcagatattgcggtggtggagatgagcgatg

SEQ ID NO: 49619 - DNA, 82 bp, Homo sapiens
cgtcgaagacatggaccagggctacggaggagggtgtgaagacagagaatgaccacatcaacctgaaggtggccgggcagga

SEQ ID NO: 49620 - DNA, 100 bp, Homo sapiens
gatttcaaagggacacccactaggcgctacagatcatctttcttgctgacaagtatcatctaggaatcactctacctcgctggcaattttgagaaaatag

SEQ ID NO: 49621 - DNA, 75 bp, Homo sapiens
agacaaacaaggtgacatcacagaagatgagggccatgctatgatagtggaagcttatccaaaataatagatcca

SEQ ID NO: 49622 - DNA, 101 bp, Homo sapiens
caaggtcctcgaggtgcctcctgttgtggccatcatgaggaagccacgagcagccgtgggaagtggtcacaggaagcaggcagccagccaggaagggaggc

SEQ ID NO: 49623 - DNA, 83 bp, Homo sapiens
tctccactgttcctggaggaatccgagaagagcagagcggagggagccccagacacgcattctgtgtctggctgactctgccg

SEQ ID NO: 49624 - DNA, 50 bp, Homo sapiens
gtgacagtctgcatgtgcagttttcagggacttccttccccgcggttcag

SEQ ID NO: 49625 - DNA, 83 bp, Homo sapiens
caggctcatcctgtccatcgtgtgcctgatgatcacgcagctggctggcttcagtggaccatgcccagcagaggagcacgcag

SEQ ID NO: 49626 - DNA, 99 bp, Homo sapiens
atcagaagaccaacatttgtgcctcagtggtatgtgcagcagatgaagagagggccagaattttgaagacattttggctacaatatattttttgatgca

SEQ ID NO: 49627 - DNA, 82 bp, Homo sapiens
tagaccattgtggcactgggacagcagctggacaggagcaagccacaggagagtggcaggttcggctttccagtttggcagc

SEQ ID NO: 49628 - DNA, 100 bp, Homo sapiens
aaaaccagacaccagcccatgtttactataggtggaagctttattctattctgcagggacatgatcacccgccgctccttgggctacgcgtatgtgaact

SEQ ID NO: 49629 - DNA, 100 bp, Homo sapiens
ctgcgtatgaagcaggtggaagaactcctagggcctaggcccgggccaccatggcgctgcctccaggcccagccgccctccggcacacactgctgctcct

SEQ ID NO: 49630 - DNA, 98 bp, Homo sapiens
atgttaccattgtgaaagaaggttgggttcagaagagggctctcaaatcgactggaagtggtgaaggaatttctgagaaacaatgaggatcttagaaa

SEQ ID NO: 49631 - DNA, 138 bp, Homo sapiens
ctcgctcctggagaccaacgaaatcccctcgcttatcctgtgggggccgccgggctgcggcaaggctatgtggttgatgttgcagaatgatgagccggaggacttcgttatagctactggggaggtccatagtgtccg

SEQ ID NO: 49632 - DNA, 100 bp, Homo sapiens
gagcacctggctgatcctgcaccacaaggtgtacgatttgaccaaatttctggaagaggtgatgcaggttctgaatgctgatgccattgttgtgaagctg

SEQ ID NO: 49633 - DNA, 51 bp, Homo sapiens
gttccaggggctctgggagtggctgccagctgggcatggtggtgcatgcct

SEQ ID NO: 49634 - DNA, 90 bp, Homo sapiens
ggaaaacactatcctctgagatcccagatcatgagtaacaaatgtggcaattattttggatctatcacctgtcatcataactggcttctg

SEQ ID NO: 49635 - DNA, 82 bp, Homo sapiens
cctcgtggtctaaagcttcggcacaagggcccaactggaattccacttacggagtgaagatagtccaagtcctaagagacag

SEQ ID NO: 49636 - DNA, 89 bp, Homo sapiens
ctcatcccggtccagacccagcaccccatacggaagggtctgcatcacaagtgtgccctatttggacttgacttgaacgtgaatgcagc

SEQ ID NO: 49637 - DNA, 75 bp, Homo sapiens
tgaggaaatctggaactttgggccacccagggccccaggcatggaagagctgatatgggaacagtacactgtgac

SEQ ID NO: 49638 - DNA, 100 bp, Homo sapiens
gggccccgcgggccccgcggcgcagtaccaggcaaacagttctgctattattgatcacatatttgccagtaaagcagtggtgaatgccgcaattccagcc

SEQ ID NO: 49639 - DNA, 82 bp, Homo sapiens
ctttggggcaccacagagatgcgggtctcgtcagcctatctcggcccctctcttttcatgtcctgacaaaaacaaggttaat

SEQ ID NO: 49640 - DNA, 99 bp, Homo sapiens
cagaaggccatcagggaccgcgacgaggccattgcaaaggtctcctatggacagaagtgcgggcaaggagctttgttcctccccgatgtcaccctccca

SEQ ID NO: 49641 - DNA, 100 bp, Homo sapiens
gagtggagactctctgaaaagcgtgggctccgtggcctccggcgcggccgcggcgggtcggtctcctagagtgcagcagctgccccgagccccgtgcttg

SEQ ID NO: 49642 - DNA, 100 bp, Homo sapiens
gaagctctacgctactgccatgataataacataattcacagggatgtgaaggagtccatagaggccactgtattctattgaagaacatgtctaacagtaa

SEQ ID NO: 49643 - DNA, 97 bp, Homo sapiens
tcgccaaaaaggacatctttggagccagacccaacatgagtgaagtttcctgcaagaaacgggacgactatttggaatggccagagtattttatggc

SEQ ID NO: 49644 - DNA, 83 bp, Homo sapiens
aaatacgaaaaatactaaaaaatccttctgcacaatatgtgacagtatcaggacaggaggaaatctaccactgtcgaagacaa

SEQ ID NO: 49645 - DNA, 90 bp, Homo sapiens
cccgggttcgccgagccgcaggagagacacgctgggccgaccccagagaggcgctggacagggaaattcaactactgaggaggttacggc

SEQ ID NO: 49646 - DNA, 75 bp, Homo sapiens
ctgaccgcaaacaaggagagcctactgagcagcctgagtggaaaacctcggatcaattctcagctggtggcacaa

SEQ ID NO: 49647 - DNA, 100 bp, Homo sapiens
ctcgcagcaactgtgctactcctcaccatctgcagccttgaaggatgaccggaaagaagggatgaccgcgtttgtggaaaagagaaaggccaacttcaaa

SEQ ID NO: 49648 - DNA, 90 bp, Homo sapiens
gcagcatggacctgtcagcaactaaggaacaaaagtaatgaagatttacacaaactttgatttgggtctcgctgtgctagaatattccgt

SEQ ID NO: 49649 - DNA, 82 bp, Homo sapiens
ctcagaacgtctccctggaagtggtcaattcaagagtctatgctccatcagcaagcactgccgactacaatagggactcgcc

SEQ ID NO: 49650 - DNA, 73 bp, Homo sapiens
tggcaggccatcgatttagtaaagcagggcagatcttaatatttgccagtgatgcctgcaaaaatgtgacatt

SEQ ID NO: 49651 - DNA, 90 bp, Homo sapiens
ccggggccgtggctgacatggagcagaacccttaggagaaatcttgagagtggacagcaattgtgaagatcgccagagagttctgtgttt

SEQ ID NO: 49652 - DNA, 100 bp, Homo sapiens
tcggtccttacagccgctcgtcagactccagcagccaagatggtgaagcagatcgagagcaagtctctagtgatccctgaaaagttccagcatattttgc

SEQ ID NO: 49653 - DNA, 75 bp, Homo sapiens
ctgtgacgaaggtgctaccatcgtgagagtaagccgctgccatggcccagacactgcagatggagatcccgaact

SEQ ID NO: 49654 - DNA, 51 bp, Homo sapiens
ccgtcagcatcccagccgtgctcacgaacgacaaatcctccacccctgggc

SEQ ID NO: 49655 - DNA, 100 bp, Homo sapiens
agcatctgggccatcttcaatttactaaaccaaggagatttaactgaaagacggacatgagcgtgggtgctgactcctggaagagcaactctatctgatc

SEQ ID NO: 49656 - DNA, 100 bp, Homo sapiens
gctttggataatgacgacagcaacccgaagacagggaaatttaggttatggatgatgaatcagatgaaaaagaagcaaactcaccttaaaataatctgga

SEQ ID NO: 49657 - DNA, 75 bp, Homo sapiens
gcctcagtttgaacattgaccctgatgcaaaggtggacctctccaaggacattcagcactgggaatccctgaaac

SEQ ID NO: 49658 - DNA, 100 bp, Homo sapiens
gagagcttccaagagttatcaagacaagtggttccatggataaacggaggaacctgcagcaacatgagcattcagccttacgggagcacatgcgtttggt

SEQ ID NO: 49659 - DNA, 99 bp, Homo sapiens
catgaaatccaatcctgctatccaggctgccattgacctcacagcgggggctgcaggttctccagaagctggggaaggcagatgagaccaaggatgagc

SEQ ID NO: 49660 - DNA, 51 bp, Homo sapiens
aagagagctgtctccagagaaatcagcctgatgatgaatttccagcctccg

SEQ ID NO: 49661 - DNA, 100 bp, Homo sapiens
ggagccgcccgcacaccaggttattcgcctgcggtatcggttggttgaaagactggaaaagaagagctgaattggaagaaaggcagaatctgaagggaaa

SEQ ID NO: 49662 - DNA, 88 bp, Homo sapiens
aggttgcagtatgtggccagttatttgcctcagtaaaagaaatgacagggagagagtttttctctcgtttcccagaactctatccttt

SEQ ID NO: 49663 - DNA, 82 bp, Homo sapiens
cagcccacatgcccgctcacctgcgctgtgatgcctgcagagctgtggcttaccaggcaagaatgtgcggcggtccatccag

SEQ ID NO: 49664 - DNA, 87 bp, Homo sapiens
ggtcttacattgctgcatcaagaaacccaagctgctgagctggagtgggccatgaagctctggtggccacacagtgaagccatgatt

SEQ ID NO: 49665 - DNA, 100 bp, Homo sapiens
ctttggttatgttggatgaacaaggaggcctactgaacttgacgcactggtatttggccatctatacaccattcttaccacacaattgacaaatgatgaa

SEQ ID NO: 49666 - DNA, 50 bp, Homo sapiens
ctgaactcaggacttggcaactgggagtgtccactcgccttccaccagca

SEQ ID NO: 49667 - DNA, 90 bp, Homo sapiens
aaaggatgttggcggtccctgtgacctgtggagacacggccagatctgccctccatcatccgtccttggctcaggatttggagagcttgc

SEQ ID NO: 49668 - DNA, 82 bp, Homo sapiens
gctatcactgcagcgacctgcctgacagaagctttggtggatcacctcaatgtgggctggattgtagtcacatattccactt

SEQ ID NO: 49669 - DNA, 100 bp, Homo sapiens
ctgcgggccggggacctgcatgtgtgtgcgcgcgaaggagcggaagaatggcagtgctcaaactcaccgaccaggatccgagccagagacaacaacggct

SEQ ID NO: 49670 - DNA, 110 bp, Homo sapiens
cagtcgccagggacaagaacagccaacaaatggaattttcttgagcatgtttctaatcgttttgccattggaatccatggctcatgggctcttccatgaattgggtaact

SEQ ID NO: 49671 - DNA, 50 bp, Homo sapiens
cagggacagagtctgcagcaaaaaagagtgcctggtgaagaatgtgatgg

SEQ ID NO: 49672 - DNA, 99 bp, Homo sapiens
tgcgtgccctacttcaaggataagggcgacagcaacagctctgccggctggaaggaaatacaactggagcacgcaaagcaagcctttgtgcaacgggac

SEQ ID NO: 49673 - DNA, 100 bp, Homo sapiens
ggctccctgggtgacaaccgcgcgccccacctttccccacgtggccgcgaagaccgggaccgagtctcctgccattccgagcaggcctggtatgggtaat

SEQ ID NO: 49674 - DNA, 74 bp, Homo sapiens
cggacgacgtgaccagaagtcccgccgcttaaaggctgaccatactccctggagccttctcccgaggtgcgcgg

SEQ ID NO: 49675 - DNA, 118 bp, Homo sapiens
ctgatggcggaggcttcgagtgacccgggtgccgaggagcgggaagagttgctgggggactttgaacatgtcggggatcgccctcagcagactcgcccaggagaggaaagcatggagg

SEQ ID NO: 49676 - DNA, 90 bp, Homo sapiens
attaaaaggtgtcaagaagctcagaatggcacgtgtggttctcaaatataggcattctgatgggaacttgtgtgttaaagtaacagatga

SEQ ID NO: 49677 - DNA, 74 bp, Homo sapiens
taagtgcagtatgagctacatgtttgagtacccggagtatcagctatgaatttgtgaaatacctcaggcagcat

SEQ ID NO: 49678 - DNA, 100 bp, Homo sapiens
gcagcttgctggagagaagagcagtgagaagctggtcagtgagaaggtcggaggggccgaggggaccaagctggatgatgacttcaaagagatggagaag

SEQ ID NO: 49679 - DNA, 51 bp, Homo sapiens
ggactggttgcggacgctgcgagctactctgacctacgacactctccggtt

SEQ ID NO: 49680 - DNA, 100 bp, Homo sapiens
tttcttgtgaggacgcggcagcccgtggagtcggctgagggaaaagcgaggcaaggcaggcggtttgtgaagtgtggatatgcaggctctaactttccag

SEQ ID NO: 49681 - DNA, 75 bp, Homo sapiens
cgatggatagcattcactggaaagaatagtgacagtggtacaggaaagaaagaaaaagaaaagaaaaacagaaag

SEQ ID NO: 49682 - DNA, 100 bp, Homo sapiens
aaatcagagatccttcggaagcggcagctggtggaggacaggaacctgctggtgctgaaaatgtgtgtctgacatgcaagctcagtggggcagagacccg

SEQ ID NO: 49683 - DNA, 88 bp, Homo sapiens
gatacgtcttttaaatgaattgctgccatgggaaccaaagttaatgaaggctttccaaagaaacagagatgcccgagtggtaaaagac

SEQ ID NO: 49684 - DNA, 82 bp, Homo sapiens
cttggaaagattttactgtaacccagaaaatgatagaatgagaatgaagtatggcatgaagccaaaatcaagtcattgactg

SEQ ID NO: 49685 - DNA, 83 bp, Homo sapiens
accggcgccgcgcttgctgctggtaacagggccttgcctagtgggccttccttcccaggaactgtggctgcaccatctgtctt

SEQ ID NO: 49686 - DNA, 82 bp, Homo sapiens
ttatggatcagatccaaatcagcgcagacggggaagcggagccaacatgccagtggcccggagctgggtttgtcgcaaaact

SEQ ID NO: 49687 - DNA, 82 bp, Homo sapiens
attgacatttaattttagggtcctttatatagaagggagagtagggaaattggattccaagatccatcaaggagcaaagaag

SEQ ID NO: 49688 - DNA, 80 bp, Homo sapiens
ctctcagcaagcaactttgagctgcacgttgcacaagagggaggaagaaggagacttcagagaaagaggccgtgtgatgg

SEQ ID NO: 49689 - DNA, 50 bp, Homo sapiens
catccagcaaccttccatctctcatcagcagccctgggccagaagcaagg

SEQ ID NO: 49690 - DNA, 100 bp, Homo sapiens
cacaagacgtgggtcttctctgtgctgatggggatttaatccagagactgacttcactatagaacccacagttgtatcaatggttggggaaagatagtgg

SEQ ID NO: 49691 - DNA, 100 bp, Homo sapiens
aagtcccgtcttatgggacttgaggccctcaagatatgagatcctgactccaaactccattcccaagggtttcatggacgggaagcaggcgtgcgtgctc

SEQ ID NO: 49692 - DNA, 75 bp, Homo sapiens
ggcggcgactctgggcagcggggagcgctggacggaagcttgtcaaaattcccaaaaatgatcccctcaatgaag

SEQ ID NO: 49693 - DNA, 90 bp, Homo sapiens
ctgcacctgctccagagcggggccgtggaccgcgtgttgcaagtgggagtacgaccccagcaaagcgacctttgtgaaggtggtgccaac

SEQ ID NO: 49694 - DNA, 90 bp, Homo sapiens
cagtgagatatcctctcattccagatacaaggcagatccaaccatccccaccgtggtcctacgatcagtcctaccaatacctgggatcca

SEQ ID NO: 49695 - DNA, 83 bp, Homo sapiens
ggaagatactaatgaaatagactgggaagatcttgctagtgccatagggaactaagcgtcttgtagaaggaactattaatcca

SEQ ID NO: 49696 - DNA, 90 bp, Homo sapiens
ccaaaagcataaccaatggcagtgatgatggagctcagccctccacctccacaggcggtggaagaagatatccccatagcgaaagaacgg

SEQ ID NO: 49697 - DNA, 100 bp, Homo sapiens
ctgttggtctcggccctgcggaagttttcggctttgtgagaaaccttaccatcaaacacgatggccagcaacgttaccaacaagacagatcctcgctcca

SEQ ID NO: 49698 - DNA, 101 bp, Homo sapiens
agtgaacagacacgggtgaatgctgctaaaaacaagactggggctgctcccatcattgatgtggtgcgatcggtctcggacagcccgggagacgagccctc

SEQ ID NO: 49699 - DNA, 75 bp, Homo sapiens
cctcaggagcctcctaaaaccacaggacacagcattgttggttttgccatgtactattttacctatgacccgtgg

SEQ ID NO: 49700 - DNA, 75 bp, Homo sapiens
attgaaaagtaccctctggttttctcaccgcagatggtggggagtggcaaaattctattcagaagaatgcaggcc

SEQ ID NO: 49701 - DNA, 100 bp, Homo sapiens
cagaaacagaggactaattttggcagttctaaatttgaatttgagatgtgatgactgaagcccaccacaaatatgaccactctgaggctacaggatcctc

SEQ ID NO: 49702 - DNA, 74 bp, Homo sapiens
cgccagcgacctccgccgcagagtcccaccgccacaggtagctcgtaagctggtcatcctggagggtgagctgg

SEQ ID NO: 49703 - DNA, 98 bp, Homo sapiens
gcctaactttgcaaccattggtctgcaggacatcactttagatgatgggatttagtgcaagaagaagaacagttgatggaagaaaagaaaaagaaaaa

SEQ ID NO: 49704 - DNA, 74 bp, Homo sapiens
aagaggggtgcagatcccggaatgcctgaaccaactgttttgagggcctattccactagaagcaagatggctga

SEQ ID NO: 49705 - DNA, 100 bp, Homo sapiens
cagaaaccggaggagcagtacaaagtgatgctgcagaaacagaaaccacactgccgaggaatggctcccaatggcttaccaaatcatatcatggctcctg

SEQ ID NO: 49706 - DNA, 100 bp, Homo sapiens
ctctccttgccctgcctcagctgctgcctgccagaggtatgacatggagagcacagacaacggggcttccaactcagagaaaaacaagcccctggagcag

SEQ ID NO: 49707 - DNA, 100 bp, Homo sapiens
ccctgaaaaacctacggtggaagccacctcttgtacaggagcctgcagacagggggatttgcctgggaaggagaagtagaaaacaacgtgtacagccagg

SEQ ID NO: 49708 - DNA, 75 bp, Homo sapiens
catccttgaaatgtgtcttttatggggacaagttctatctacagggactgttgacatttagggatgtggccatag

SEQ ID NO: 49709 - DNA, 98 bp, Homo sapiens
cagggatgtctacctggtaatagaggacttgaagcagaaagcaagtgaatacgagtcagaaggttgtttacattcagagctctatcaataagaggaat

SEQ ID NO: 49710 - DNA, 98 bp, Homo sapiens
cgcacttccatattctggaatgacgtaaaagaccctgtctcaattgaagaaagagcggttagaaaatggatttctgactggaatctcaccactgaaaa

SEQ ID NO: 49711 - DNA, 90 bp, Homo sapiens
cgtctgagaagtgaggagcctctccgcccggcagccaccccatctgggaacgtgttcctgccatccagtaggatcagctgtccttcctgc

SEQ ID NO: 49712 - DNA, 100 bp, Homo sapiens
acctcaagggccggattggcggggacccaggactgtcccctcggggcagggagcacgtggtgaggtgtgtatggcttcccgtggactcagcctcttcccc

SEQ ID NO: 49713 - DNA, 90 bp, Homo sapiens
aagcaattatgaaagaagtcattccttttttgaagcttcacgaggctgacattgtggtcctaggctcacctaagccagaagagattcccc

SEQ ID NO: 49714 - DNA, 74 bp, Homo sapiens
ctgcctacaaaccaccctctcctgaccctgaagaactgtgactttgagagttttgacctgcctgaagagcacca

SEQ ID NO: 49715 - DNA, 73 bp, Homo sapiens
agcctttcacttattcatctgtccagcatgactcatccccgggagtgttgaaaagcttatagcttcattgcac

SEQ ID NO: 49716 - DNA, 75 bp, Homo sapiens
gttttgagctaaatattgaggttcgatcctttggtacagaagacagaccgacagatcgtccaataccacctcgag

SEQ ID NO: 49717 - DNA, 96 bp, Homo sapiens
gcacgatcccaccgcacgttcagaagtcggatatccatgacgacattgaaaatgaattttttgtattcaccagatattcttatatgagaagatcta

SEQ ID NO: 49718 - DNA, 82 bp, Homo sapiens
gacatttcaacgagtttgtcatcatgtgagagagaatagcattttgaaagcgaagcagaagccgtagaatcagcggcgagcc

SEQ ID NO: 49719 - DNA, 89 bp, Homo sapiens
gtggttctttacaggatatttatcacggtttccaatacttatctacaggaatcgccatgaccccagctctgagggaggcaacagcaaag

SEQ ID NO: 49720 - DNA, 50 bp, Homo sapiens
gtaagaagctgcgcggtagcgcggtgagctggaatagtcaaatgatttca

SEQ ID NO: 49721 - DNA, 100 bp, Homo sapiens
acgagacatgggcatcgtagatattctacacaaactgagtcagtcaccagattcaaacctttgtgacaacttctcacctggggcgggtgggttctgcacc

SEQ ID NO: 49722 - DNA, 75 bp, Homo sapiens
tcgtgtcaccgctctgaagtcaaggagttgatattcactgatggactccaaagaatcattaactcctggtagaga

SEQ ID NO: 49723 - DNA, 75 bp, Homo sapiens
gagcattcgaagtgacctcagcagggcatccaggttaaacccatccagagtaatggctgcggccttacccaggac

SEQ ID NO: 49724 - DNA, 87 bp, Homo sapiens
gagaattgccatttgaggaccaaaggagaaaagaaactacacgctaattctagaagggccaagggccccatctcctactaagcctct

SEQ ID NO: 49725 - DNA, 100 bp, Homo sapiens
tgacaaagctggcaaaggagaagtaacttttgagagaactcgatgccaccgcaacggtattggcgaaccggcaggatgaaagtgagcagtccagaaagcg

SEQ ID NO: 49726 - DNA, 76 bp, Homo sapiens
agaggcgagccctggtggaggaagagatttggaacattgctaccaataaactgacgttcttgaactcctttaagat

SEQ ID NO: 49727 - DNA, 95 bp, Homo sapiens
ccagaggcgtcggaatggacctgtgccacccagatatcccgcccaggtacccgttccaagccctgccaccgcactacgggaggccctaccctttc

SEQ ID NO: 49728 - DNA, 82 bp, Homo sapiens
atatttcttgtgatgacaatagttcaactttagttggcttaccaagagtgaagcgtgacaagtactcagtcttcaactttct

SEQ ID NO: 49729 - DNA, 89 bp, Homo sapiens
tcctggccttctccctcctctgcctcctctcaaaggtctcctctgagcctccggcctccataagacccaaaacagatgacacctcttcc

SEQ ID NO: 49730 - DNA, 100 bp, Homo sapiens
ttatactgtcatcagggagactgtgaacatgtcattgtcattactgacataagcaaggcaagttacttctatatagaagggtgcacccttacagatcaaa

SEQ ID NO: 49731 - DNA, 102 bp, Homo sapiens
gggagaaagacaatgacttgcactgggaaccaatcagggacccagcaggaagctgaatatggtgggcatgatcagatagatttgtatgacgatgtcatatct

SEQ ID NO: 49732 - DNA, 83 bp, Homo sapiens
caaggttctgagcagccatttccaggctttaaggagttttaagctgagtgtcactgtagaccccaaataccatcccaagatta

SEQ ID NO: 49733 - DNA, 100 bp, Homo sapiens
ggggagcggggccttccacaccccctccgtgggtgtgtgcttatgttcctgaggaagaattgaaggcagcagaaatagatgaagagcacgtggaggatga

SEQ ID NO: 49734 - DNA, 90 bp, Homo sapiens
ctggcaacatggagagaatcatgaaagcacaagcgtaccaaacgggcaaggacatctctacaaaacactacaacaacaggagtgcaaact

SEQ ID NO: 49735 - DNA, 95 bp, Homo sapiens
cacggccagcgtgaccgttggcagcaaggaggtgaccctgaacctctacgacacggccggaagcggggagaggtggtgagagatgacccctgttg

SEQ ID NO: 49736 - DNA, 100 bp, Homo sapiens
ggggtggtctgtctgctcctggcatgccctgccacagccactggccgcctgatcttcgacaacctaaagaagtccattgcctacaccctgaccagcaata

SEQ ID NO: 49737 - DNA, 82 bp, Homo sapiens
gctaaagcagcgtgcgttcagccctgggctccaattaaggaacagctatatcctgcttccttctgtaagcagcatcgacttg

SEQ ID NO: 49738 - DNA, 74 bp, Homo sapiens
tttgacacacagcagttcttgtcagttgagccccatatgggggttggcaggcagcagagaggcccctttcaagg

SEQ ID NO: 49739 - DNA, 98 bp, Homo sapiens
cgtagcgcagaaagtgaagctgtttcgggccagcgacccgctgctcagcgtcctcatgtggggggtaaaccactcggcacctcggaactgaacccatt

SEQ ID NO: 49740 - DNA, 99 bp, Homo sapiens
cgcagccttgggcctcgcgccggctatggccgtgccctggggctgagccctcagctcagagcccgggcgctgtggaagagattctagaccgggagaaca

SEQ ID NO: 49741 - DNA, 98 bp, Homo sapiens
cagccgcgcctctcgcttgcttccctcggccgggccgtcctcggcggcagtgtcaggttcttcctgtccaagatccggtcccacgtggctacttgttc

SEQ ID NO: 49742 - DNA, 75 bp, Homo sapiens
agtagcacgtgggcaggagtctctcctctgatccaggagcattggcaggaacatcattcatggcagtgattcagt

SEQ ID NO: 49743 - DNA, 75 bp, Homo sapiens
cggaaggggaaagcctggagtcctggctcagccctgtctctgcccctggtggtcatcgtccatggcaaccaagac

SEQ ID NO: 49744 - DNA, 100 bp, Homo sapiens
gggaatctgggaagaattgcaaagtctgtatctttagtaaggatgggaccttgtttgcctggggcaatggagaaaaagatcaatggcttttcaaaagcag

SEQ ID NO: 49745 - DNA, 100 bp, Homo sapiens
cccgatgaagcagctgcagccgcagccgcctccgaagatgggggatttctacgacccggagcacccgacccctgaggatcttcattgccttgctgctgcg

SEQ ID NO: 49746 - DNA, 82 bp, Homo sapiens
agccggacaaactcagacatcgtggagcctccaccaggcggtgtgaagatgcctaatgtacccaatacacaaccagcaataa

SEQ ID NO: 49747 - DNA, 98 bp, Homo sapiens
gatccttcaccatcacctgcagcaggatggccaggtattacaaaatctcggcaaagaccaatatccacaacagtcgcttgaacagattggcacccgaa

SEQ ID NO: 49748 - DNA, 82 bp, Homo sapiens
gaaaatttcgatattgaagtgtcaaaatccatagatggaaaagatgtatggtttgaagtggtgaacatggatttttctcggc

SEQ ID NO: 49749 - DNA, 75 bp, Homo sapiens
ctgaagctccactgccatctcgaaaaaacctgctcctccaaagccagagcccaagcctaaaaaggcccctgcaaa

SEQ ID NO: 49750 - DNA, 88 bp, Homo sapiens
tggctccagacaaataaacatggagtccatcttccacgagaaactgaaccttagccggccgatcgaggagcagggccccctggacgtc

SEQ ID NO: 49751 - DNA, 74 bp, Homo sapiens
ccagcctgcgaaggtggcggcgctgctgctcgggctgctcttggagcggacaaggcaaaatctcagcaagttcg

SEQ ID NO: 49752 - DNA, 50 bp, Homo sapiens
gtcctgtgccaccaaaacccaaagaaagtgaaattcgttattctacatgg

SEQ ID NO: 49753 - DNA, 98 bp, Homo sapiens
cgtggtctggtctccgggatcagtgcacgtgccggaaggacatggtcaagatctccatggacgtgttcgtgcgcatcctgcagcccgagcgctacgag

SEQ ID NO: 49754 - DNA, 75 bp, Homo sapiens
tggaccaaaatgaacacagtcactgggaggccttcgaggaagaggcccacctccttcatgggcctctgagcctga

SEQ ID NO: 49755 - DNA, 82 bp, Homo sapiens
accctcccagccacctctgaagttgccaggcttcccaacattcttgtctgtgagtgtgaacatggctacgcctcttcattcc

SEQ ID NO: 49756 - DNA, 100 bp, Homo sapiens
ggcaggatatgaagagaaaaatggcacctgtcaaggtgaccaagaatatggcccaggtgaccaaagccctggacaaggccctgagcaccatggacctgca

SEQ ID NO: 49757 - DNA, 76 bp, Homo sapiens
ctggctccaacttcctgccagactccaaggtggtgttcattgagaggggtcctgggaagaaggagaaagggccaac

SEQ ID NO: 49758 - DNA, 96 bp, Homo sapiens
agaaaccccgttgacaaggcactgctttttcatgacgtcaagttcatccgagaagtaacaccatatatcaagaagccatcattagtatcagatctg

SEQ ID NO: 49759 - DNA, 90 bp, Homo sapiens
cttttgtcaattccagaatacaaagtaaactgtcttgagccccaccctcacctgcctgtgctggcaaccagtggcctagaccatgatgtg

SEQ ID NO: 49760 - DNA, 82 bp, Homo sapiens
tgtgacaccaagataagtaacgctggcgccttcctctgttgggccagcggtacctggacctcctgaccacgtggtactgcag

SEQ ID NO: 49761 - DNA, 82 bp, Homo sapiens
gccaagctcatggcctgccactgcgtgcgacttctgcacggacctggccgtctccagtgccaacttcattcccacggtcact

SEQ ID NO: 49762 - DNA, 100 bp, Homo sapiens
actctgaatgtgacagaaggaaatttccaccagttggtggcactgctacactgccgcagcctgcacaaggacttgcaccttcgagatcccctgtgtttac

SEQ ID NO: 49763 - DNA, 101 bp, Homo sapiens
ataacgatcaggtcattgccagcggttcagaggactgcacggtcatggaataacttagcttgcacatgaatgcagtcatgcaaaccgttaggaaaaccaga

SEQ ID NO: 49764 - DNA, 82 bp, Homo sapiens
cttgatattctacgatcacagtggtctccagcactaactatttcaaaaggacccccgcagcaaacacaagtttaagatccac

SEQ ID NO: 49765 - DNA, 82 bp, Homo sapiens
ggtgaacaggtgaccataactctgccaaatatagaagcttgaacatgacaagcagatttgggagtccaaggcccagacagag

SEQ ID NO: 49766 - DNA, 75 bp, Homo sapiens
gtcctactacgcgtacgtggtggagctctgcgtgtggcgccaatgcttcggcattagagaaagagattggtccag

SEQ ID NO: 49767 - DNA, 51 bp, Homo sapiens
tcgcgcccggagacttgcctgagcgaacagaatgggtagacccagaggacc

SEQ ID NO: 49768 - DNA, 100 bp, Homo sapiens
gagctgcagctgcgatctctgtggtaggcccaggaggcaagtgaggcctatctggttggcctttttgaagacaccaacctgtgtgctatccatgccaaac

SEQ ID NO: 49769 - DNA, 98 bp, Homo sapiens
gcagcaccttctctgttcgtgccaagcagacctacccatactgtgcactgcccaggaagaacctctctatccagggcctccgctggtggctacagtgg

SEQ ID NO: 49770 - DNA, 90 bp, Homo sapiens
gctgtctcgcttggaagaaatcgctgaggaagattcgacggaggcgccttgcacgacttgctggtggacagacctctcagccaaccaccc

SEQ ID NO: 49771 - DNA, 90 bp, Homo sapiens
tgctgcttttctggagcgcttaccagataaactcatcctgaaagtcgctgttgttctcctgctgagcaagaatggaggccccactggtga

SEQ ID NO: 49772 - DNA, 80 bp, Homo sapiens
cagctgccccctgtgtggcaaacctttcttgagctcagtatcgttacccctgtgagtaaattacattttcgtgtgtggag

SEQ ID NO: 49773 - DNA, 98 bp, Homo sapiens
ttttccttgagctgaacgtcttgcaacagtggccgcacgcataggaaaaccaattctgtgtcctcggaggaccacagcccagttgggccccaggcgaa

SEQ ID NO: 49774 - DNA, 82 bp, Homo sapiens
ctggttcactagctgtgtcttcctcatgtggtggaaggggacggacatataatgatctgaaccaatatccagtgtttccgtg

SEQ ID NO: 49775 - DNA, 100 bp, Homo sapiens
cgccaagcacgtggtgggctatggccaccttgaggtggggctggtgtccgagcacttctcgcaggccccgcagaggctgtccttctacagctggtacggc

SEQ ID NO: 49776 - DNA, 74 bp, Homo sapiens
ccgggaccccagcttttcagaactgcagggaaacagccatcatgagagccctatgagtttgtctctctggaatg

SEQ ID NO: 49777 - DNA, 96 bp, Homo sapiens
gcatgtggcaatgatgattgcagaattcacatatttgctcaacaaaatgatcaggtggtgatctttgtgaagtctgtgcagcggtgcattgccttg

SEQ ID NO: 49778 - DNA, 99 bp, Homo sapiens
ggtacagctccatgctcctcgatatcagtctatgagaagggattacaaggcagaggaagacccagcaaaatttaaatctatcaaaacaggccgaggacc

SEQ ID NO: 49779 - DNA, 100 bp, Homo sapiens
gcggacgccgcagagcgccgaggaggctttcctgctggtggcaaccgcctacgagacactcaaggtgttgttagagatacaaaaggaattattagactac

SEQ ID NO: 49780 - DNA, 98 bp, Homo sapiens
tttgcagaaatgtgtgcagactacatggcatctaccatagggccttccttgaatccagaagctggcaaacagcatcagccatgcagacctattgggac

SEQ ID NO: 49781 - DNA, 80 bp, Homo sapiens
ttgcagatcgggagcgcaaggtcgccctcaaggccatgatcaaaactgtcaacagcatctccaccctggagcctgtgagc

SEQ ID NO: 49782 - DNA, 97 bp, Homo sapiens
ggccatctctggcttcttcgtgtggacggccctgctcatcacatgccaccaggacctatttcccattttcctgctcttgcctgaaccagttattggc

SEQ ID NO: 49783 - DNA, 100 bp, Homo sapiens
atggaaacctggtctcactggtcggcctggagattctacgccaccaacctctcgcgcacagacctgcactccacgtggcagtactacgagcgaacggtca

SEQ ID NO: 49784 - DNA, 100 bp, Homo sapiens
gtcatcgtcatcttcctgtcagtctgcagctactcagatgatgaacaacatgggtggtgatgaggatgtagatttaccagaagtagatggagcagatgat

SEQ ID NO: 49785 - DNA, 71 bp, Homo sapiens
caagaggaggacagttcgctacacagcaatgcatcgagaggtgatgatgaaacactccataagaacaatgc

SEQ ID NO: 49786 - DNA, 50 bp, Homo sapiens
gtatcgaagaccttcgtgtagagcttctggaagaggtgaagaaggaattg

SEQ ID NO: 49787 - DNA, 100 bp, Homo sapiens
cctggtgcgaagccaagaacatcacccagatcgtgggccacagcggctgtgaggccaagtccatccagaacaggtgtggccgacgacgatgccctcgctg

SEQ ID NO: 49788 - DNA, 105 bp, Homo sapiens
ccacttcaaacattcgtctcggaaaccccgcctcttacagtcacgaggacagagcgggatgccaccagcttgtccaaagggaagttccaggagctcctggtgggc

SEQ ID NO: 49789 - DNA, 99 bp, Homo sapiens
ccttagctgtgctcgcgctactctctctttctggcctggaggctatccagcgccaggtacaaagcagaaagtgcatagaagatgtgatccactttgcct

SEQ ID NO: 49790 - DNA, 100 bp, Homo sapiens
tggggctcctcatggcccggctccttagcacctctccaggcaacttcgggctcgctggagaacaactaaggggcaccaaaccctctgaggttttacttta

SEQ ID NO: 49791 - DNA, 85 bp, Homo sapiens
gaccctgcagtggcgcctaaagtctgagagagggaagtcgcctctgtgctcgtctgccatcatggatgttctcgcagaagcaaat

SEQ ID NO: 49792 - DNA, 75 bp, Homo sapiens
aacatccgccgccactgtgacttgcagtcatcatccattaccacaaaattagaacatccagtcatggataaaaat

SEQ ID NO: 49793 - DNA, 50 bp, Homo sapiens
ggtcaacactctatacaccgtcagaattatttatgtaaacccgaagacaa

SEQ ID NO: 49794 - DNA, 75 bp, Homo sapiens
gttagcgtgagtgatcactctcaatcccgggccaagaagcttgagagaagaaaaatttcagaaaaattgtctcaa

SEQ ID NO: 49795 - DNA, 100 bp, Homo sapiens
tacaagagacagataaatccaagtcaaataccaagcaaaatagtgtgcctccttcacagagtgcttgtgaatgacttcttcttggtggcttgtcttgagg

SEQ ID NO: 49796 - DNA, 76 bp, Homo sapiens
gtcaatgagcactatccacacgacaggcctacactctattcaaacagcagccaacagagcagtcagcagagcagcc

SEQ ID NO: 49797 - DNA, 98 bp, Homo sapiens
tctcaacaccctgagtgcggatttctgctatgatgacagcaatcccaggacccaccggctcagaagggcccaacgctcaccactaaggtccggcggac

SEQ ID NO: 49798 - DNA, 97 bp, Homo sapiens
acctcactgcagaggtgctggagctggcagaaactaattctgaagcaagcccttatagttgtgctgcagtggtgtttcaatcacaattttagtgttc

SEQ ID NO: 49799 - DNA, 100 bp, Homo sapiens
cagctggcgctgcgggcaggacaggccccttcacagatgtagtcactacaaatcttaaattgcgaaatccatcggatagaaaagtgtgtttcaaagtgaa

SEQ ID NO: 49800 - DNA, 101 bp, Homo sapiens
cgggcagggctctaggaaacatatgttacgatagccgtcactggaaggactgagcgcattcaggagcctggaggaactcatcttggacaacaatcagctgg

SEQ ID NO: 49801 - DNA, 100 bp, Homo sapiens
agaggcgactgaggccggacggggcggacggcgacgcagcccgcggcagaagttcctgggcttcccgatggactcgagtttttactatgtgagcatcccg

SEQ ID NO: 49802 - DNA, 75 bp, Homo sapiens
cccccctctgctgcgggctccccgtggcctttggaggctcgacaatgcagatcttcgtgaagactctgactggta

SEQ ID NO: 49803 - DNA, 87 bp, Homo sapiens
tacactctctgctattgtctgctgcatccaaatcttctccctggacctcgtgcatacggaaggatttgatgccctggatccctttat

SEQ ID NO: 49804 - DNA, 75 bp, Homo sapiens
cattattttaacatttgggagaaacacagccagaaggttgtggtggagagctgtctggggccacaggctccttca

SEQ ID NO: 49805 - DNA, 75 bp, Homo sapiens
catgttctgggacttaggagggcaggaagagctgcagtctttgtgggacaaggctggagtgcagtggcgagatct

SEQ ID NO: 49806 - DNA, 98 bp, Homo sapiens
gacctccggggctcaagtgatcctttcatctcagcctcctcagtagctgagactacaggaatttgtaagtgtctgggttcgagatcctaggattcaga

SEQ ID NO: 49807 - DNA, 88 bp, Homo sapiens
caccgcatagcaaaactcatggctgagccaccaggaaaccctccccgaagaatgggtagaatcaatcatctgcgtggccctagtcccc

SEQ ID NO: 49808 - DNA, 75 bp, Homo sapiens
ggaataattaagatgccttctttagggtctctgccttggggccattttacaggtactccaaagattcaggtttac

SEQ ID NO: 49809 - DNA, 50 bp, Homo sapiens
aaaggaatgattcattcaatgcaggacgactgggtttggattcagaagag

SEQ ID NO: 49810 - DNA, 100 bp, Homo sapiens
cggtcatctcgcagaacgccatcaaccagctgatgacgtagctttgccaaagacttagaagctaagcagaaaatgagcttaacatcctggtttttggtga

SEQ ID NO: 49811 - DNA, 100 bp, Homo sapiens
cagacctagagaaactctacctctaccttcagctgccttctggtctcagcaatggagagaaaaggaaaattcacgaattgtgagagtaagagttatagcc

SEQ ID NO: 49812 - DNA, 99 bp, Homo sapiens
ctacgatgagaactggttctacacgcgagctgtcggatcctgacctcccagccgatgtgcagacaccatcctcggtggaactggggaggtatccagccc

SEQ ID NO: 49813 - DNA, 75 bp, Homo sapiens
ctaaaaagcagagcatttctgttttaagacaattatctcctatattgatgagcaatttgagaggtacctgcatga

SEQ ID NO: 49814 - DNA, 87 bp, Homo sapiens
actccacaggcgcctcctgccaggtctgctcctcggtcgcccacccgcctgcccgccatgtgtcggattgtttgtgctgaacgaact

SEQ ID NO: 49815 - DNA, 110 bp, Homo sapiens
gcttatactcctcccagtgacgggtctggagtgcgtgggggaccggctgttggcggcaagagtgagccatggagctacgtgtggggaacaagtaccgcctgggacggaag

SEQ ID NO: 49816 - DNA, 101 bp, Homo sapiens
gatggagcagggcgaagtggttacaagtacagactctggagccagactgcctgggtttgaattgtgcggtttcagggacaggagagagtggcaagagtacg

SEQ ID NO: 49817 - DNA, 75 bp, Homo sapiens
catgttcctgggcacctctgggtactcatggctgtgatggtgtggtcgggactgtctctaagccttgtttcacag

SEQ ID NO: 49818 - DNA, 49 bp, Homo sapiens
tataacctacaagcagttggacagactgcttgctggaactcacaggagg

SEQ ID NO: 49819 - DNA, 75 bp, Homo sapiens
cgggaccggagtcagaaccctccgcagagtaaagcctttctgagaaaagtctacagcattctttctctgcaggtt

SEQ ID NO: 49820 - DNA, 82 bp, Homo sapiens
ggaacaatcattagttcagtgcagtgtctgacttgtgacaggaacagcacatcccattataatgctggaacttggggcattg

SEQ ID NO: 49821 - DNA, 50 bp, Homo sapiens
ctttaaacaatttctcaggttcaggtgtggaaaatgggaaaccgacccac

SEQ ID NO: 49822 - DNA, 75 bp, Homo sapiens
tgcagctcaacagcagcaatatgcattagcagcagctcagcagccacatataggggatatcattttcaatgccca

SEQ ID NO: 49823 - DNA, 75 bp, Homo sapiens
acggcgacgacgggggaatgtggcgctggatccggcagcagctgtggctgcagctcagacgactccaggagagag

SEQ ID NO: 49824 - DNA, 74 bp, Homo sapiens
aggttcgaggcctacagaacctagcctatcagctggggctggatgagtactgtaggaagaggcagagctctact

SEQ ID NO: 49825 - DNA, 75 bp, Homo sapiens
atttaattttagggtcctttatatagaagggagagtagtgcttatgaggtgatcaaactcaaaggctacacatcc

SEQ ID NO: 49826 - DNA, 100 bp, Homo sapiens
ccaagatgatgtgcggggcgccctccgccacgcagccggccaccgccgagacccagcacatcgccgaccaggttcttcgtatggtgcgctccgctggatc

SEQ ID NO: 49827 - DNA, 100 bp, Homo sapiens
ccagtgctcagcctttccatgctctccatcacctatcacagcagcatccgctctctggaggcagaggtggaggagacactgaagcgactgcagagccaga

SEQ ID NO: 49828 - DNA, 80 bp, Homo sapiens
gccaccagaaccctacttaggggcgggatgtcactccgaggttgcaaaagcttctcatttcagagagatgccaggatcct

SEQ ID NO: 49829 - DNA, 75 bp, Homo sapiens
gcggagcctggcgggcgtgggaacccaggccccgccgaggcggccagagctgaaaccaccaatgggtgaggtcgt

SEQ ID NO: 49830 - DNA, 74 bp, Homo sapiens
ccgctactcggagggcgagcggacctccctggagaagccctggcttgaaaaacagtccaattgatgaaagtgag

SEQ ID NO: 49831 - DNA, 82 bp, Homo sapiens
gacaaaaagtttgtcattaaacccatcgacaagaaggcacctgtactccaaagattcaggtttactcacgtcatccagcaga

SEQ ID NO: 49832 - DNA, 87 bp, Homo sapiens
cctcctgtggtggaggagaaggaaagattcatgctggtcctggccagcaatctgcctgagcagttcgactgtgccatcaacagccgc

SEQ ID NO: 49833 - DNA, 100 bp, Homo sapiens
cgcaccacctcctgctgccttcccgtcgccgctcccgaagcttttccagggcatgaaaatcaacatggacaagaatcggaggcgaaagccagcaagcgac

SEQ ID NO: 49834 - DNA, 85 bp, Homo sapiens
tctctctaggaggaagggtgctcaagatgaagaagagttcagcaagaccagcagattggaagtatcaaagtggattatcatcctc

SEQ ID NO: 49835 - DNA, 100 bp, Homo sapiens
tggctgtagggagcatagctgctacactgaagatgaagcaaggcccaatgacccaggcgcaacaattgagtcacttcaaaaggagttcattgaaggggaa

SEQ ID NO: 49836 - DNA, 75 bp, Homo sapiens
ccagctggaactccggccacagccagcatgcaggtcactgattctactaccatctgtcagcgtggattgattgag

SEQ ID NO: 49837 - DNA, 75 bp, Homo sapiens
tggagaacgtctgcagcaattctcgagagaagatatataaccgttcactggatctagtttgaagcactaagaaga

SEQ ID NO: 49838 - DNA, 74 bp, Homo sapiens
aacaaaatgtcaacaaattgatggggagaagtctcattcgtggttgagcacaggctggtttaccatggtgatcg

SEQ ID NO: 49839 - DNA, 74 bp, Homo sapiens
cgcccccttggccactgatcccccgaagagcttctgtcgccgctctaggttccagctcaaccaagataaaatga

SEQ ID NO: 49840 - DNA, 100 bp, Homo sapiens
gcagcatctcagtatctgagcacagccggttggaaagcagatggtggagctgaatatgccacttaccagactaaatcaaccactccagcagagcagagag

SEQ ID NO: 49841 - DNA, 75 bp, Homo sapiens
gaggagtttgaggggtctgaagactgaaagagtcgaatggtttgttggcagaatctaccgttgaagaagatccca

SEQ ID NO: 49842 - DNA, 100 bp, Homo sapiens
ggaaaagagccctggaatatgaagcaacatgagatggtggatgaacccacagaaccccatgcatcccagctcaaggtggtcagagctagaccttcttatt

SEQ ID NO: 49843 - DNA, 75 bp, Homo sapiens
caccagagtttgagagagtatttcgggcacagggcctgaattaatgaataaatatgttggtgaatctgaaagagc

SEQ ID NO: 49844 - DNA, 75 bp, Homo sapiens
aaagaacagaatgctaaggaagctgtggcaaaaactcccatcaagactgaagcagacgttttggcagaaaaccag

SEQ ID NO: 49845 - DNA, 82 bp, Homo sapiens
gtctggctgggcaagcactacaagaagagtccctgtgaagcaggaagagtgagggcaggttcactgcagctcagcagcatgt

SEQ ID NO: 49846 - DNA, 54 bp, Homo sapiens
cccaaggagtctcgctgcttttgtgtctcaacgtgcgtggagtacgagctagag

SEQ ID NO: 49847 - DNA, 100 bp, Homo sapiens
ggggagtgttgccctgtgtgcgaagccaactgggtacatggaaaactcagtctcctacagcgcaattgaagacgttcagctgctgtcctgggagaatgcc

SEQ ID NO: 49848 - DNA, 83 bp, Homo sapiens
ccgggacaacatgctgcggggcacaggactctcttagcctccacccatgtgaaccataatatctatattacggaggtgaagac

SEQ ID NO: 49849 - DNA, 96 bp, Homo sapiens
tctgaagatccctgtggtagagagaaaaatcctggatctgtatgctttgagcaagatggagtgaaggtacctgagcgcaggaaccatggtcttcat

SEQ ID NO: 49850 - DNA, 75 bp, Homo sapiens
gtcagctgaaaattgtgacaaatcacttgatctcaaagatttcatgagacaagctggggaagtaacgtttgcgga

SEQ ID NO: 49851 - DNA, 82 bp, Homo sapiens
agaagtcattccagagatctgagagactccataccaatctttgaacaggtactaagtgaactggagcccctatgtctggcag

SEQ ID NO: 49852 - DNA, 98 bp, Homo sapiens
ggaggggttacagactgtggtgcctacccccatcactgcttccctcagccataacaggtgcttccatacaaaggggacagaagagatgatggaaggcc

SEQ ID NO: 49853 - DNA, 146 bp, Homo sapiens
gatgcttccaaggcctcaccttctgtctccacagcaggacagccgaactggaatctggatgagcagctcaagcagaaaataatgttgagtttccatgaagaacaggaagtactgccagaaactttccttgctaatttcccttctct

SEQ ID NO: 49854 - DNA, 100 bp, Homo sapiens
catcttcctgctgctggccgtgctgctctggaaggacctcctgcagaattcccccaattccatgtccggagtctccaataacccccaggggattgtggtc

SEQ ID NO: 49855 - DNA, 99 bp, Homo sapiens
ctattgccttattttttctcatggatgttcttcttcgagtatttgtagaagggaggaatactgttggcgttcaaaagcattgctgtttcagttaagtag

SEQ ID NO: 49856 - DNA, 98 bp, Homo sapiens
tgagctccaggagttcgtctcttacgtctgcggaagtgcagctgcctcagttcttagcgcaggtccttccatagtgacgccccccaaggacatctgga

SEQ ID NO: 49857 - DNA, 90 bp, Homo sapiens
tagcaacaaaaagaaagctgcgttaatgtttgcaaatgcagaggaagaatttttctatgaggattatacacatgaattccataaaaccaa

SEQ ID NO: 49858 - DNA, 74 bp, Homo sapiens
aactagcatcctcctggaggagctcggcactgtgacttctgccgtgttcaccgtgggagacaacgtggtttcag

SEQ ID NO: 49859 - DNA, 100 bp, Homo sapiens
gcctagcgtcctggaattacttcaatcaaatcctacatggctttccaccaacctgggcatcctgacctgcatcgagtgttccggaatccaccgagagctg

SEQ ID NO: 49860 - DNA, 90 bp, Homo sapiens
ggaaaagcctgtccttattatcaggacggatttactacaaagtggcgacatgtctaagaatgtgagccagtcacagatggcaaaattgaa

SEQ ID NO: 49861 - DNA, 98 bp, Homo sapiens
cagacttctctgtgagctcttcattagggcaccaaagcgaagaccaaagagaaccctgtacagtaagaaatatggtgtggacctcatcagatacactc

SEQ ID NO: 49862 - DNA, 139 bp, Homo sapiens
ggaaggaagagatggagctgacgctcgtggggctgcagtactcgggcaagaccaccttcgtcaatgtcatcgcgaccagcatctcagacatgtcgaaaaagatgttttgatccctaaaataatgagagaaaaggccaaa

SEQ ID NO: 49863 - DNA, 50 bp, Homo sapiens
gaaagtattgcaggacaagagatttaagaaggtgatgctctcttacacaa

SEQ ID NO: 49864 - DNA, 92 bp, Homo sapiens
tacagggcagaggaaaatgcaagaagactgatggagcaggcttgcaatattaaaacaatgcagatcttcgtgaagactctgactggtaagac

SEQ ID NO: 49865 - DNA, 97 bp, Homo sapiens
gagcacgtgtacctcatccacagggcctcctgccagccccagcccctggagaggatgcaggttgaaggggcccggccaggactcggggaagggtggc

SEQ ID NO: 49866 - DNA, 126 bp, Homo sapiens
ttggcattgacatttaattttagggtcctttatatagaagggagagtagcctagatattatcctactgaagatgtgcctcgaaagctgttgagccacggcaaaaaacccttcagtcagcacgtgag

SEQ ID NO: 49867 - DNA, 90 bp, Homo sapiens
ctccaactttgcgacggaaatgtgtcatcgaaagccagttcatggcctcccacgggaacgacgccgcgagagccaggtttgagtccaaag

SEQ ID NO: 49868 - DNA, 98 bp, Homo sapiens
ttcgaagctgccattgaatatattcggcaaggaagcctctctgctaaaccccctaaactggcgatggaatatgagaggagccctctggaaagaaaagg

SEQ ID NO: 49869 - DNA, 100 bp, Homo sapiens
tttgggaaggtgcaaggggtgtttttccgtaagcatactcagatatagccagtaccaacgtatgctgagcacgctgtctcaatgtgaattttcaatgggc

SEQ ID NO: 49870 - DNA, 89 bp, Homo sapiens
gtctacgaagaccaagtgggcaagtttgattggctgacagataaggcagtgaaggactattccgcttaccgttcttcccttctcttttg

SEQ ID NO: 49871 - DNA, 89 bp, Homo sapiens
ccggtactgtgcactattctttcccaggaaccattggataaggataaagaatcaactggcagtataattgaagttctgagtaaaataga

SEQ ID NO: 49872 - DNA, 82 bp, Homo sapiens
gagctggagctgccgcggcgcagccagcagcctcccgcgacgatgcccctcaacgttagcttcaccaacaggaactatgacc

SEQ ID NO: 49873 - DNA, 98 bp, Homo sapiens
gggatttgtcatcagcgtgtctcatggagaaccactctggctaaagtcatcattggactggcctttgactgcgtggacaagatggtttactggacgga

SEQ ID NO: 49874 - DNA, 100 bp, Homo sapiens
gctgtcaaccaagctgtgtcaccaaacttttcacaagacagtgatgtgtgttctgaaattgtgaaccatgagtctagtacttaatgatctgcttatctgc

SEQ ID NO: 49875 - DNA, 100 bp, Homo sapiens
gagatatagttggcaacctcactgagttagaatcagagtttaatgcgctgaaggttcccgtgccagaggataaatatactgcccaggtggatgccgaaga

SEQ ID NO: 49876 - DNA, 51 bp, Homo sapiens
ggccagggtgcttttggaaacatggacttattttgagtcacttgccaaatg

SEQ ID NO: 49877 - DNA, 74 bp, Homo sapiens
cgagtacgactacctattcaaagaaaccaggcgatgcggaagaagctaatcttgtacttcaagaggaggaatca

SEQ ID NO: 49878 - DNA, 100 bp, Homo sapiens
tgacagagatcttccagaatttggcaaatgaagctcgtgaccgagaacctgaaggaggaaccaatggaaagcgggaaggagaaggcaacctgagtgccca

SEQ ID NO: 49879 - DNA, 101 bp, Homo sapiens
ggcggttccagcatgaagaggagagctggcctggggggcagcatgaggacgcatgaagagtaccaagcaagaggggagaggtaaagttccacaggagggag

SEQ ID NO: 49880 - DNA, 89 bp, Homo sapiens
gtttcggaatgggcattgtcgccaattttcagcaaaagcagacatgtgtcaatttaaattctacatctatgtatttggtaagcggaggc

SEQ ID NO: 49881 - DNA, 82 bp, Homo sapiens
ggcaacgaactggacctgagcctcagcgacctgaatgaggtcccggtgaaggagctggaacgagttgaagcagttaatatgg

SEQ ID NO: 49882 - DNA, 100 bp, Homo sapiens
tgactggattggcatcttcaaggatgatgatgctgaagctatccttgctgcagacttcgaaattggtcactttttacgtgagcgtataatcccaagatca

SEQ ID NO: 49883 - DNA, 83 bp, Homo sapiens
ccgaggcgcaggtggcgctgggcttgggcactgtttaaaggaaagttccgagaaggcatcgacaagccggaccctcccacctg

SEQ ID NO: 49884 - DNA, 73 bp, Homo sapiens
cgccctcgccaccgctcccggccgccgcgctccggtacacacagagttctaaagttcctgttgcttcagacaa

SEQ ID NO: 49885 - DNA, 87 bp, Homo sapiens
tgaagctcttggagcaatttgtctgcgcccacacgggtatcatcttctatgctccatacacaggtggtgttcccactgatgaagagc

SEQ ID NO: 49886 - DNA, 100 bp, Homo sapiens
cggtagaacacagttatgggtcgcaagaagaagaagcagctgaagccgtggtgctggaatttgctcgccctgatacatcgaatgatagagtttgttgtac

SEQ ID NO: 49887 - DNA, 102 bp, Homo sapiens
gagtacttctgaatcagcattgttagaactaccattgattacatgtgaatctgtacaggctctcaactacaatctgagcaaagaagggcatttagaaaaaga

SEQ ID NO: 49888 - DNA, 75 bp, Homo sapiens
gcaacatcatcttctccaacgggaacctggacccctgggcagggggcgggactacgccctgggcaaggactgcat

SEQ ID NO: 49889 - DNA, 98 bp, Homo sapiens
gtcagtatctaccaggcaatgaacaagatgggaaataaggccaagattgcaaaatgtcctttaagaacaaaaactgggcacattctaaaatcaacaca

SEQ ID NO: 49890 - DNA, 100 bp, Homo sapiens
aaaaaaatgaagtgcggtttggtttccttgtcaacggaggatgaagtgaacagctgagcagctcgcagagagcagggttctccaaaaaatgtggaatcct

SEQ ID NO: 49891 - DNA, 100 bp, Homo sapiens
aacaggaggtggtagagggcatggatatctctactcgctccaaagacacactaaagggcaccactgaggatgacgtgttgacaggtcaggtggaggagca

SEQ ID NO: 49892 - DNA, 101 bp, Homo sapiens
aaggaggtcctgccgtccatgcggaagatcgtcgccacctggatgctggagcgtgccaagttggaggccgccattgccgaggctgaggagcgtggggagct

SEQ ID NO: 49893 - DNA, 87 bp, Homo sapiens
ccgccagctgctccggagatacgaatgtcaagctgtcagctgaggtggagccatttattccccagaagaagagtcctgatacattta

SEQ ID NO: 49894 - DNA, 83 bp, Homo sapiens
cagccgcgaggaggcgcgggaggtgttcgagaacgaccccgagacgacaatctgcttcatcctgattctgcggcattccaaac

SEQ ID NO: 49895 - DNA, 75 bp, Homo sapiens
ccactacattctgggtgacacgctgggggtcggcaccttcggcaaagtgaaggaatagctctccagacccccagc

SEQ ID NO: 49896 - DNA, 82 bp, Homo sapiens
ggctggggagcagttgggaatcaggtctggaatactcctaaccaagaagttgcccaggtgatttcaaaaggtgtaatcattc

SEQ ID NO: 49897 - DNA, 100 bp, Homo sapiens
catttccatcggtccttacagccgctcgtcagactccagcagccaagatggtgaagcagatcgagagcaagaagtctgggccaacggtcacaaaagttgt

SEQ ID NO: 49898 - DNA, 102 bp, Homo sapiens
cgtggccgctgtggtgaatgggagcgcgcagggcgcacagatcggagtggctaagcaggttcggttacctgcccccggctgaccccacaacagggcagctgc

SEQ ID NO: 49899 - DNA, 101 bp, Homo sapiens
cactgtacatcttatatgaaaatggagagactttcctgacatacatcagtctgttacacagaatcacggtcactttcaacattaacaacagcatcccacca

SEQ ID NO: 49900 - DNA, 98 bp, Homo sapiens
ttgggcgcgacacaaatcgaggtgagggaagagagaggaaaatcccctgaatccctgcaggtccctttctagagataggagaagagagagatcgctgt

SEQ ID NO: 49901 - DNA, 101 bp, Homo sapiens
gctgccgaggcgttcggtcctgctgttgcggccgctgccccagggctgcggggacggatagaccctttttccggtaactaaacttcttgcgggcagacaca

SEQ ID NO: 49902 - DNA, 89 bp, Homo sapiens
cctaaggtgctctgcataatcaaccctgggaaccccacaggtaacctggatgaggacatcattgcagaagagaacatcgtttcccgaag

SEQ ID NO: 49903 - DNA, 98 bp, Homo sapiens
cagtctccatcagaaaaggctggagtcccagtccgtggaggagcacttacagggtctttcctaagtgctgaaagattctagtgttccagaaactccag

SEQ ID NO: 49904 - DNA, 101 bp, Homo sapiens
ccggaaggggcaagacgggttcagttcgtcatggggctgtttggaaagacccaggagaagccgcccaaagaactgatagggccagatttgagtgtgtgaat

SEQ ID NO: 49905 - DNA, 74 bp, Homo sapiens
tccgggtgaggccggccacgccccgcacggtgagaagccctaccactgcaactgggacggctgcggctggaagt

SEQ ID NO: 49906 - DNA, 98 bp, Homo sapiens
tgataagcaatatcagaaacatcaggaatttgataaccatatcaactcctatgatcatgcacacaagcagagggccccccccacaggaaacttcgcag

SEQ ID NO: 49907 - DNA, 100 bp, Homo sapiens
tcaggtcctcagaccgaccagcccaagaaacatctcaccaatttcaaatctgaagttgattcaagtcagttgagacgccagttgtgtggaggaagtcagg

SEQ ID NO: 49908 - DNA, 75 bp, Homo sapiens
ggatcaccgcccagcgtcaggcgaggggcgacgtctcgaggtttgcccttgcatctcatttcctctggggactgt

SEQ ID NO: 49909 - DNA, 100 bp, Homo sapiens
aggattgcaaccaggcactactgaccaagatcttgtcaagctgtgtcagccgcaaggtagggcctcctcttgacatcaagctgggcgcattgaactgtac

SEQ ID NO: 49910 - DNA, 87 bp, Homo sapiens
accgtcggccgcatccgtttccacgactttctgggagactcctaaacatgaattcagctccaactttcatcaactttcctgcaaaag

SEQ ID NO: 49911 - DNA, 75 bp, Homo sapiens
tccagcgaagccttccactagcaaaggcgcagttgtgtagcagttgagtaatgctggttagctgttaaggtggcg

SEQ ID NO: 49912 - DNA, 90 bp, Homo sapiens
ctcctactatcaagaagctaaaagttcaaagatcatggaatccttcaaaaacatggtccctcagcctcccaaagtgttgggattacaggc

SEQ ID NO: 49913 - DNA, 75 bp, Homo sapiens
caggaatggctaaaaatgtttcaggatctggaaatagtatattcctatttacatggtatggaagccttatcaaac

SEQ ID NO: 49914 - DNA, 83 bp, Homo sapiens
cgatgcatgcaagtcggaggaaacgctagtgcagtttttcgttggaatatacgttgcacatttatggcgattctgagtgtgag

SEQ ID NO: 49915 - DNA, 88 bp, Homo sapiens
ttgcctggacttgggagttgggcccagagctgcaggaagcgtgtccggagcggtgactggaaggggtacacaggcaagaccatcacgg

SEQ ID NO: 49916 - DNA, 82 bp, Homo sapiens
gctggaggaaacacctcaggacacggcctacaacaccaagaggtttgtttgtaaaaacaatggtgtgttgtttgaaaaccag

SEQ ID NO: 49917 - DNA, 50 bp, Homo sapiens
ctcctgagtaactgggactacaggtgactgaatgtctgaccaccgtgaag

SEQ ID NO: 49918 - DNA, 155 bp, Homo sapiens
aggaagattcaaacaaccaaccctgatttcctgcttctccttttcatgagtgttcctgtggtctctgcacctcctttctagctggtggagttgagatctataatggagatcgtaaaataaaggtttccaacaccctggaaagccggctggatctc

SEQ ID NO: 49919 - DNA, 98 bp, Homo sapiens
ggccaacttcggcaagatccagatcgggatttacgtggagatcaagcgcagcgatggtctctttttcagtcatgcaggagtcagtcgaagtgtggcca

SEQ ID NO: 49920 - DNA, 90 bp, Homo sapiens
gcgcctcagcgccctgcagaaggcccagggtaattcctctcctgcaattacttttggatggaagtatgcccctttctcagtagaagatgg

SEQ ID NO: 49921 - DNA, 100 bp, Homo sapiens
tctgtaccaccgacaggagccatctggaagagtgcctgggtctcctatggacagaagtgcgggcaaggagctttgttcctccccgatgtcaccctcccac

SEQ ID NO: 49922 - DNA, 108 bp, Homo sapiens
gcctttgaaacctcgtcattaattggacacagtgccagagtgtatgcactttactacaaagatggacttctctgtacagagtgcttgtgatttcacgtatttttgctg

SEQ ID NO: 49923 - DNA, 90 bp, Homo sapiens
gccagatattccacccatacaggctgcagcgctggtggaggaggaaactcgcagataccgacctactaagaactacctgagctacctgac

SEQ ID NO: 49924 - DNA, 73 bp, Homo sapiens
caccatggccctggtgctgatcctccagctgctgaccctcttgctgggctttgacaaacttcctctgtggggt

SEQ ID NO: 49925 - DNA, 88 bp, Homo sapiens
gtggccatcagcaagcccaggtctatgtcaagtccatcatctccagaaccagctagtcttcctgcagaagatattagtgcaaactcca

SEQ ID NO: 49926 - DNA, 50 bp, Homo sapiens
ggccacgagtgggcaggagcttgcagtcccatagtgctgagaaccctgaa

SEQ ID NO: 49927 - DNA, 82 bp, Homo sapiens
cttacgtctgcggaagtgcagctgcctcagttcttagcgcaggtccctggtgctgaaccgcctgcgtccagttgccagcggg

SEQ ID NO: 49928 - DNA, 75 bp, Homo sapiens
agttcctggtgatattgtagaaattgctgaaatgcactcggtgatggaaagagagccactattctgaagaacact

SEQ ID NO: 49929 - DNA, 100 bp, Homo sapiens
tgtcggcagactggtgacttcacttttgagtgcaactgccttccaggtgaccgggttattgatgtgggatctgaatggcgaactttcagcaatgacaaag

SEQ ID NO: 49930 - DNA, 87 bp, Homo sapiens
ataattgaaggaggtgcagcacataaggatggcaaacttcagattggagataaacttttagcagtgacaaaactcaggctggagtga

SEQ ID NO: 49931 - DNA, 75 bp, Homo sapiens
gcgcaaggcttcaggcgacccgtactgggcctactctggacagagcgggatgccaccagcttgtccaaagggaag

SEQ ID NO: 49932 - DNA, 83 bp, Homo sapiens
agccgagtgcagaagatctgggtgcccgtggaccacaggccctcgttgcccagatatctgacagacatccctgaatcttggtg

SEQ ID NO: 49933 - DNA, 96 bp, Homo sapiens
gggcggagacgcacggagcggccgggggctcggccgggccgtcccggcctgcgcagcctgagctggctggatcggccgtcattgcttttggactat

SEQ ID NO: 49934 - DNA, 100 bp, Homo sapiens
gagtctgggtctccgggccaacctgagggtcagatgtcatgtaatccttcctttggtggcatcggaaagggacatttaatgagggaagtagatgccttgg

SEQ ID NO: 49935 - DNA, 100 bp, Homo sapiens
aagctggaagctttttttggactccttataaccattatggccttgacctttggctatgagatgctgtttaagaagaacctatttgagatggcgattaacc

SEQ ID NO: 49936 - DNA, 110 bp, Homo sapiens
agatgagatgcaccatccggctgctggacgactcggagatctcctgccacatccaggtgctggagaatctggtaaaagcaccattgtgaagcagatgaggatcctgcatg

SEQ ID NO: 49937 - DNA, 83 bp, Homo sapiens
aaatgatgtattttgtgatcgcagcgatgaaagacccctcctcctgtagagagtggtgctgccctctcgggatgtacctgcag

SEQ ID NO: 49938 - DNA, 50 bp, Homo sapiens
tgaatttccatgtcaacatagtcctggggcaatgttaaatattgttcaag

SEQ ID NO: 49939 - DNA, 83 bp, Homo sapiens
ctctgggatcccggccaccagcaattgtccggggacggcaaaacagaacagaaaggcggagataaaaagaggggtgttaaaag

SEQ ID NO: 49940 - DNA, 100 bp, Homo sapiens
gctccttttcctccacctaccttcccgattaatgaaggagttcccccttctgagtatgttcaatatccatgaaaaccttttagaagcccttctggaacta

SEQ ID NO: 49941 - DNA, 90 bp, Homo sapiens
gctggaccgcctgcgcctggagaggatggaccgcatcgagaaggagcgcaagcaccagaaggattactacagcatcccatttcccacacc

SEQ ID NO: 49942 - DNA, 90 bp, Homo sapiens
gacacggatgactttgttttggtgccacacaacatctcgtcagaccactcatggatgatcatggtgattttactgctgcttgtggctatc

SEQ ID NO: 49943 - DNA, 74 bp, Homo sapiens
agagaaaatagatatagtactacattttgccgcacaaacacatgtagcccatctgctggcaaggctaagattag

SEQ ID NO: 49944 - DNA, 75 bp, Homo sapiens
tcgctgacagctgaggaagtctgcatccacattgcacataaagttgggtctccgtctctccaccgggggcttcat

SEQ ID NO: 49945 - DNA, 75 bp, Homo sapiens
gtacaccgtggtgacattgtatcattggtggggagtttgttgcttgtctcctgtccctattacgacaaatgacag

SEQ ID NO: 49946 - DNA, 80 bp, Homo sapiens
ggaaagtatatcaacaaaggagtgaaatttgtgaagagaaatgatatcatcaaaattggagatggagtttcaccatgttg

SEQ ID NO: 49947 - DNA, 111 bp, Homo sapiens
aaggggacttgggcccagtttatggcttccagtggaggcattttggggcagaatacagagatatggaatcagttttgaaacctttgatgtgaacagctttgaacaattttg

SEQ ID NO: 49948 - DNA, 114 bp, Homo sapiens
cgctctcgtcttctgcggctctcggtgccctctccttttcgtttccggaaacatggtttggtgcacctcgatttggaggaagtagggcagggcccttatctggaaagaagtttg

SEQ ID NO: 49949 - DNA, 100 bp, Homo sapiens
gtagggtgaacaacccgttcttgcctcaggccagtcgcctccaggccaagagggatccttcacccgtgtctgattggtttatcttggaagctaaagggca

SEQ ID NO: 49950 - DNA, 100 bp, Homo sapiens
tcccctgtttgagaaaaggcctaagaattttggcattggctgtgagaagacatttatcacagtgagtgccctgttttcccataaccgagcccacttcagg

SEQ ID NO: 49951 - DNA, 74 bp, Homo sapiens
aggacagcacctagtcgtggccggaggagtctcagagctgtcagaaaggccctgggaggagcggggacactgag

SEQ ID NO: 49952 - DNA, 98 bp, Homo sapiens
caaacctctgggctatgccagtacaggatgggactgaggaagacccacaggcagaactggccatcattcatggtcagatggcttatattctgcagctt

SEQ ID NO: 49953 - DNA, 75 bp, Homo sapiens
ggctggaaacctggtagtgaaacagactggacctacagagacatctgggattttctgcgtcagctgtttgtccca

SEQ ID NO: 49954 - DNA, 80 bp, Homo sapiens
attcgttttcaggagcatctccaggctgcctgctgtttcccggggagatcatgaaacgaggtcgccttcccagcagcagt

SEQ ID NO: 49955 - DNA, 75 bp, Homo sapiens
gctgtggtctgcgggaaggtgccatcctcaccttgctgagtgacattggtgttggtaaatcatgcttattgctac

SEQ ID NO: 49956 - DNA, 100 bp, Homo sapiens
ccgtcctccaccgtttcctccaggacagcacctagtcgtggccggaggagtctcagagctgtcagaaagaattcagtactgtacacaggaaattactgtc

SEQ ID NO: 49957 - DNA, 101 bp, Homo sapiens
atctacctccatcaggaccccagatgtctgacagccctgtgtgacaccaagataagtaacaccataaatactgtatcagaagttattcgaggctgccaagt

SEQ ID NO: 49958 - DNA, 75 bp, Homo sapiens
cagaagatccggaagtacacgatgcggagactgctgcaggaaacggaggtcagcccaaggctgccccctcggtca

SEQ ID NO: 49959 - DNA, 96 bp, Homo sapiens
caagtggccatggggagcctcagcggtctgcgcctggcagcagcaggatgaagttaaaggaagtagatcgtacagccatgcaggcatggagccctg

SEQ ID NO: 49960 - DNA, 83 bp, Homo sapiens
gagaaaacggctcgagcagcgacaacccgtcctctcccgagtttttcatgtggattctgaagagccagtctttgaggctgtca

SEQ ID NO: 49961 - DNA, 112 bp, Homo sapiens
ctgcccaaggagtatgtgaagcagaagggagagcgtaagatcttccagagctcgtccgcatggtgctgaatggctgaggaccttcccagtctccccagagtccgtgcctttc

SEQ ID NO: 49962 - DNA, 95 bp, Homo sapiens
ggcagcagcccccgaagaccccagggcggctccgacgcgccctcaggtgcgtgcaggagagccatcaggacttccggagcatcaaagcaaagttc

SEQ ID NO: 49963 - DNA, 75 bp, Homo sapiens
tacagcatcccacattaagtcaacggttccaatacatatgaagaggcagctgcctatattcaatgccagtttgaa

SEQ ID NO: 49964 - DNA, 98 bp, Homo sapiens
agtcagtctcaggggattcagcagctgctgcaggccgagaagcgggcagccgagaaggtgtccgaggcccgcaaaaaaaccaatagagccatggcgac

SEQ ID NO: 49965 - DNA, 100 bp, Homo sapiens
cgacaagaacctgcgggaggacggagagaaggcggcgcgggaggtgaagttgctgctgttgggaatagcgggttttgcagcaattgttgcatatggatta

SEQ ID NO: 49966 - DNA, 74 bp, Homo sapiens
agcgcagagccgcgatgtccatacttgccaaaatgggggactggcaggcaatgagaagcacgaccttcatgtta

SEQ ID NO: 49967 - DNA, 75 bp, Homo sapiens
gccaatccagcatttttgaaaaaacccgcctagtgccaagcaaccctccaagatgctagttatcaaaaaagtttc

SEQ ID NO: 49968 - DNA, 100 bp, Homo sapiens
ggcagacacaagagcaagcccgcacgtgtgaaggcatccactggttttacagacatttcaccagaggaattgaggcttgaataccataacttcttaacca

SEQ ID NO: 49969 - DNA, 100 bp, Homo sapiens
cttgcttctgtagaccagctccaacaggattccatggtagctgggatgttagggctcaggctaaaaggtcagattcctgaaattaaacagactttggaaa

SEQ ID NO: 49970 - DNA, 100 bp, Homo sapiens
aacagctatgcatgctgcttttgatgtctgacaacgtggatcgttgttttgaaacacatatctgaagagatggattaagaatgctttggattaaggattg

SEQ ID NO: 49971 - DNA, 101 bp, Homo sapiens
tcaagtgtttcactcctaaaggttcatctctcaagggagaagatgtcaaccggacactagaaggtggaaggaaacctcttcattatgcagcagattgtggg

SEQ ID NO: 49972 - DNA, 97 bp, Homo sapiens
agcggcgggccccaggcaaacttgcacgacgcctgccaggaaccactcgttttgactattattttatcactctttgtgaaacttcacaatgttcggg

SEQ ID NO: 49973 - DNA, 100 bp, Homo sapiens
tggagagatggcaccggcctgaggtcaaggagaaattgaactaaactctcctttgaagactgtatgtaactgctctgcgcctgacacgggcaacatggag

SEQ ID NO: 49974 - DNA, 134 bp, Homo sapiens
ctgggcttatgggatacagctggacaagaagattatgacagattacgccccctatcctatccgcaaacaggtatttctcaagctgccagatacgtttaccaacgactcatcaacgacgggattttgagccaagc

SEQ ID NO: 49975 - DNA, 83 bp, Homo sapiens
caaccattgacgccatgtcgggttattcgagtgaccgagaccgcggccgggaccgaggtactttaggaagaatcatcaaagta

SEQ ID NO: 49976 - DNA, 90 bp, Homo sapiens
gggaaatcccaggctgccgcggctcctgtgtgctttgaaggtgctggtcgttatgtaccaggttctgcaagtatgggaactaccatggcc

SEQ ID NO: 49977 - DNA, 90 bp, Homo sapiens
actgcagaggtgctggagctggcagcttcccatcgacggtcagtgcgcacgttgtaatcagctgaggccatgtcaggagacggagccacg

SEQ ID NO: 49978 - DNA, 108 bp, Homo sapiens
tggagcaagggaaagaaccctggctggggaaaagggaagtgaaaagagatctgttttcaggtggacccccaaaagtacaagggcatatttaacggattctcagttaca

SEQ ID NO: 49979 - DNA, 88 bp, Homo sapiens
tgccagcattagcctggctcaatatctaatcaatgtcagacttaattcagtgcacaaatgagatgaatgtgaacatcccacagttggc

SEQ ID NO: 49980 - DNA, 100 bp, Homo sapiens
tccccgccaaccgcaaccattgacgccatgtcgggttattcgagtgaccgagaccgcggccgggaccgaggagagcatcagtgatgtcacgtttggagca

SEQ ID NO: 49981 - DNA, 75 bp, Homo sapiens
ttgtggagggcctggtacaagggaatgtcacaagcacatctattatcctcccagtccacaacgctgaaccgtggc

SEQ ID NO: 49982 - DNA, 73 bp, Homo sapiens
cgtgagccaccgtgcctggctgaagtgtgaagcctcagtttaggtcatctggtggttcagaacactcaacaga

SEQ ID NO: 49983 - DNA, 100 bp, Homo sapiens
cgaggtgtccatgaacttctatgtatggtcagcagggcctgtgccccaaagatgcaaacgacggtatccaactgttgaaaaacgagccagagtcttcaat

SEQ ID NO: 49984 - DNA, 98 bp, Homo sapiens
ccttagaaaggatcaggactggcgggttgaagaagcctcagcggaggcgatacggcctcctcgccaacactgaggaccccacggagatggcctcgctg

SEQ ID NO: 49985 - DNA, 100 bp, Homo sapiens
ggaaactggatgcagcaaggaaataggatttaaccgctctctgcctcccagcccagccctggggagcccctgtggaagtggagtccttcctggtccaccc

SEQ ID NO: 49986 - DNA, 75 bp, Homo sapiens
gtacatcgtgaccttcatgaagaggtaccttaacatggggaatcttcttaaagttttgacatgcacagaccttga

SEQ ID NO: 49987 - DNA, 100 bp, Homo sapiens
acaaaacctcttacatcatgggcgacttcaggaacagccataggtctcctctgagcctccggcctccataagacccaaaacagatgacacctcttcccag

SEQ ID NO: 49988 - DNA, 75 bp, Homo sapiens
gcaccatgagctggggcaccgagctctggggtccccagccccaccccagccccaaaggaggctgttcgagaggga

SEQ ID NO: 49989 - DNA, 82 bp, Homo sapiens
ccgagcgcaccgacatctgcctgctcaaaggttagctttatacgtctacgaatatttactgcacgtaggagcacagaaatct

SEQ ID NO: 49990 - DNA, 74 bp, Homo sapiens
gcggcggagactgcgggcccgtagctgggctctgcgagggcagctgcaatgactctccgcacggtattattgtc

SEQ ID NO: 49991 - DNA, 87 bp, Homo sapiens
ccgccctgcccagctgcctgcccccggaggtgcccacgcagctgcctggacaagactcaaatggatgctaaaaagccaaggaaatgt

SEQ ID NO: 49992 - DNA, 82 bp, Homo sapiens
cctctgcccccccttccccacgcaaccccagatccatttacactttacaccgccaccggcacggccaggccagcatggtgga

SEQ ID NO: 49993 - DNA, 75 bp, Homo sapiens
gaggaccgaggcgtgggagtgcgatttgacaatggagtgatgaaggtcagtatgggaatcctttaaataaatata

SEQ ID NO: 49994 - DNA, 100 bp, Homo sapiens
attctgcctaagccaactcgaaaaagccgtacaaaaaataagcaaaagcgtcccaggaggaatccggagatgatgagtatcaaggggaccagtcagacac

SEQ ID NO: 49995 - DNA, 100 bp, Homo sapiens
cggccagccagtcatcaaacctgcgggcgcttacctgccccccctgcagcaggtgttccaggcacctcgccggcctggcattggcactgtggggaaacca

SEQ ID NO: 49996 - DNA, 98 bp, Homo sapiens
cggcgtacgccctcatggggaaaatctccccggtgactttcagacctgcttttttaaaggctgcagaaaacttcactcttttggttaagaacaacatc

SEQ ID NO: 49997 - DNA, 106 bp, Homo sapiens
accatgtcagacgcagccgtagacaccagctccgaaatcaccaccaagttccaaagaactactggttcagattttagctcttcccaagttgtgaaaatagtgaagg

SEQ ID NO: 49998 - DNA, 75 bp, Homo sapiens
actgtgaagagtgaggagaccatagctgcacagccaggatacagacgtccctcaccagtgccagcttggggtctg

SEQ ID NO: 49999 - DNA, 100 bp, Homo sapiens
tcaccctctcgcctcgggtctcgggggccgctctgggatcccggccaccagcaattgtccggactgagcagggggaggaacatttaagctgatggaagtg

SEQ ID NO: 50000 - DNA, 83 bp, Homo sapiens
gttccgagccagccgagacctgccgtgggaccccagagattcccacagcaatgcagcaagtcttggaaaaccttacggagctg

SEQ ID NO: 50001 - DNA, 82 bp, Homo sapiens
gagcccggcaatgccgccatccgggagaagctggcctgggccaagggttaaagcacgaattgggagctctcagcgacatcac

SEQ ID NO: 50002 - DNA, 100 bp, Homo sapiens
gcggggtcggcgggagccagcgagccacgggagcgagccagggaaggaaagtacgggcacgcggcctgctttggcctgcagcccggctgcctgcggcagg

SEQ ID NO: 50003 - DNA, 100 bp, Homo sapiens
cctgtacagcctgcagaactggcgccctgcgtccggcagaggaggcgagcatcccgctcaggtgatgaggaacccctcgcgcacccagcgcagaaggctg

SEQ ID NO: 50004 - DNA, 112 bp, Homo sapiens
cagaccctggagcctcagttggaagcagccgatccagcctgcggagcctgtggggcagatgtgaagttcatttccaatccgccctccatggtggcagcggggagcgtggtgg

SEQ ID NO: 50005 - DNA, 101 bp, Homo sapiens
caagctactcatccacctcagcctcccaagtagctgggactacaggctcacaccacctcacctgggcctatatgaacccaatagcaatggcgagatcaagg

SEQ ID NO: 50006 - DNA, 100 bp, Homo sapiens
tggctgctcagtatggcaagctagaaagcttgagcatacttatttcatcggctgctagcagaagaaagtcttcccacaaccccattttatttcatattgg

SEQ ID NO: 50007 - DNA, 110 bp, Homo sapiens
tcgtgtcagcttttggactccctattgtatttgccagagcacatctgatgagctcacagtgcctgcactttaccccagtagccctgaagtgtgggccccgtaccctctgt

SEQ ID NO: 50008 - DNA, 75 bp, Homo sapiens
gggatcttagtacaaaacgtgttaaactcagcctcacaggccaaagcatcagcaccagaacgcacacccagccca

SEQ ID NO: 50009 - DNA, 75 bp, Homo sapiens
attccagatttcctgagtggggagtgcatggatataattgacactggcaaaacaatgcagactttgctttccttg

SEQ ID NO: 50010 - DNA, 52 bp, Homo sapiens
attttcacctggcccaatactacgtatggaaacctgacaagcccaaactgtg

SEQ ID NO: 50011 - DNA, 88 bp, Homo sapiens
ccccgccgccaaagccgggggaagcggtggcgccggcgtcactctggatgaggccagggtttaagaattgtttaagctgcatcaatgg

SEQ ID NO: 50012 - DNA, 100 bp, Homo sapiens
acccatcaaatcagagagaaggaatccaccttcttacgctatggcagcaatggccaatgtacatggtggactatgccggcctgaacgtgcagctcccggg

SEQ ID NO: 50013 - DNA, 98 bp, Homo sapiens
gcagacatggccagccagcaggattcgggcttctttgagatcagtatcaaatatttactgaaatcctggagtaatagccttgtttgtatgaagtccag

SEQ ID NO: 50014 - DNA, 100 bp, Homo sapiens
aacattaatcagatactgcatttaagtccacctgatcccggtgtcgactcctaagaatggaatgagtagcaagagtcgaaagagaatcatgcccgaccct

SEQ ID NO: 50015 - DNA, 98 bp, Homo sapiens
caggtgttttcctcatacactggaaaggaagagattcatgaagcaggagatacaactcgtcaacgaatcaaattcagtgatgacagagtatgcaagag

SEQ ID NO: 50016 - DNA, 98 bp, Homo sapiens
tagggagcatagctgctacactgaagatgaagcaaggcccaatgacccaggcggctccatctactctttgaagcttctgcccagcttgcattgtttct

SEQ ID NO: 50017 - DNA, 90 bp, Homo sapiens
gaccgcgcgactcggcgcccgcccgcggagaagattggctggcgaaaggatgcactgcatttgctggtgttcacaacagatgatgtgccc

SEQ ID NO: 50018 - DNA, 97 bp, Homo sapiens
cagcggatcacagcccttccccgatcctctccgtgggagccagcgagcctctctccctgatcttacgtgctcaagtagccggatcgagctgggagat

SEQ ID NO: 50019 - DNA, 100 bp, Homo sapiens
gagctgccctgcccggcaggcagccacggggtgcagtgcgcacacaggggccgctacctggtggcgctgggccacgcgtaccacccggaggagtttgtgt

SEQ ID NO: 50020 - DNA, 50 bp, Homo sapiens
atcgtcgagaagcctatcatcggttgtggcagcactgcctgaaggtatga

SEQ ID NO: 50021 - DNA, 100 bp, Homo sapiens
agtaaagatgatgatgacattgacctctttggatctgatgatgaggaggatggaactccaacctcgaaaacatttgaacacgtgaccagtgaaattggag

SEQ ID NO: 50022 - DNA, 98 bp, Homo sapiens
cgggcctggcagagtctggccaaccacgccgtggcagaggaacccgcgggcacattccaactccacagagtgaccagagagaggacgtggctgaagac

SEQ ID NO: 50023 - DNA, 98 bp, Homo sapiens
caacatacaatgtggctgtcggcagagctggtagagattgttcagattccattctgtggggaaattgactgtgaggactggatcaaaaagaccactgc

SEQ ID NO: 50024 - DNA, 82 bp, Homo sapiens
ctactcgctggccagacatacttgtgtgggccatgtttgaggattgccccagcattcagttctatgagtaataaatatccac

SEQ ID NO: 50025 - DNA, 78 bp, Homo sapiens
tgcagacatctacaaccttcgatctcctgacgagatcccaaagaatatcttccatttcttaatacacttaagaaaatg

SEQ ID NO: 50026 - DNA, 80 bp, Homo sapiens
ggcggggagcagctggtggaccagctcatccgcgacctgcaaggagaacttcaacaatgtcccggacctggagctcaacc

SEQ ID NO: 50027 - DNA, 99 bp, Homo sapiens
gtgttgtgtaaaggctacccttctttagcgtcacctccctcactgggcagcatgggggagaagtcagagaactgtggggttccagaggatctgttaaat

SEQ ID NO: 50028 - DNA, 100 bp, Homo sapiens
ttgatctgactcacaatgactctgttgtgacttaattcagtgcacaaatgagatgaatgtgaacatcccacagttggcagacagtttatttgaaagaact

SEQ ID NO: 50029 - DNA, 73 bp, Homo sapiens
ctcaacggcatgggagtcacaggaagaattgtagataagtctctggctgatgaacttgctcttgtggatgttt

SEQ ID NO: 50030 - DNA, 87 bp, Homo sapiens
agacacaggtcactcaaataggcagatgtgagtatgcagtgctcacaggatatacttcgaatgctcctctctcttcagccagttctt

SEQ ID NO: 50031 - DNA, 100 bp, Homo sapiens
ggcgtgtggaaaatggaatctatattcagaaaagttgaaacagactggcacatgcatatagcactttctacattgtgggtttaatattatcaatgcagat

SEQ ID NO: 50032 - DNA, 83 bp, Homo sapiens
tgcccgttgtgtttgtgaaacagagaaagataggcggccatggtccaaccttgaaggatgattcaaagccgccttactcctac

SEQ ID NO: 50033 - DNA, 101 bp, Homo sapiens
cgctggtgaagcccgcggcgcgcgcctctcccggaccctgcagggttgttggtgtagcccaggccatcaacaagaaatcaggaaacggtgggacatttact

SEQ ID NO: 50034 - DNA, 100 bp, Homo sapiens
gtctgatattgaagaggaagaactgaccagagctgatcccgagcagcgtcatgtacccctgtcagttgctctccctggaaggaagagtgttctcggattt

SEQ ID NO: 50035 - DNA, 100 bp, Homo sapiens
agcgaattgtaatggaaagcatatggacaggtctacgccacatcacttagtttacagcgatagctctcctttgattgagaagattcaagcatttgaaaaa

SEQ ID NO: 50036 - DNA, 75 bp, Homo sapiens
ccaccgtctgaactaggatgtcccgacatgaaggtgctggatagtttactagtccagtatggagtggtggagagc

SEQ ID NO: 50037 - DNA, 100 bp, Homo sapiens
attcagagcctttccgtcagccggtagatctccttgaatatccagtggggacccaaactgtatgcattgttccagatgcgctcttgccaaagcagcataa

SEQ ID NO: 50038 - DNA, 83 bp, Homo sapiens
cggattcgccgaggcaccgaggcactcagaggagaacccagcgggtgccgcttctccacccgaggcttccacctccaacgagc

SEQ ID NO: 50039 - DNA, 98 bp, Homo sapiens
acatgagtgatgtggaggaaaacaacttcgagggcagaggactttgaacatgtcggggatcgccctcagcagactcgcccaggagaggaaagcatgga

SEQ ID NO: 50040 - DNA, 80 bp, Homo sapiens
ctgctgcacatcgtcattgacatccctatcaatgtctacaaggaagttggctggaatgtgatgacttaaaaggcccatgt

SEQ ID NO: 50041 - DNA, 100 bp, Homo sapiens
acctgtgcaacaacctcttgaggatcgaatcttcactcccgctgtctcagcagtctacagcacgggaggcgttatggaccccgcagacgccaggagcccc

SEQ ID NO: 50042 - DNA, 75 bp, Homo sapiens
gcggcactcagtgcaaataacaatagcaactcccccagcagccatacacactgctgctatggatatgctgggagg

SEQ ID NO: 50043 - DNA, 82 bp, Homo sapiens
tggtctttgaggactcagaggaactggcagctcagctgcagatgaggacggggacttggttgccttttccagtgacgaggaa

SEQ ID NO: 50044 - DNA, 95 bp, Homo sapiens
gcgccctgctccctctcagcacctgggcggacgatggactcaccctgtcacccaggttggactgcactggcctcaacctcctgagttcaagtgat

SEQ ID NO: 50045 - DNA, 75 bp, Homo sapiens
cttcggtggactccttcggcagtccacccaccgccgccgcctcccaggcttctcacggcattcagcagcagcgtt

SEQ ID NO: 50046 - DNA, 75 bp, Homo sapiens
cggcattctcttcaatcatgagagtcccagaagaggaagtgttgatggcgtctctgaatccaagttgcaaatctg

SEQ ID NO: 50047 - DNA, 74 bp, Homo sapiens
gactgtgtcagcaaagagcgcagctcctccaggtcagttcaccgggacctggaggcccagattgcgatcgtgac

SEQ ID NO: 50048 - DNA, 100 bp, Homo sapiens
atcagcccctgcagatgccaaagatgatgcctgaaaaccagtatccatcagaacagaggtcaccccagctctgatctttgccatcacagttgctacaatc

SEQ ID NO: 50049 - DNA, 100 bp, Homo sapiens
aggagttcattgaactcatccggcagaataagagactggacgctgtgagatgaggagcgggaaggcctcctgcaccctggagaccgtgtgggaagacaag

SEQ ID NO: 50050 - DNA, 100 bp, Homo sapiens
cagaatgctccaggcagtgtaatctcattccatcttcattcatgactccagacaggccaggagtggtggctcacacctgtaatcccagctctgggaggcc

SEQ ID NO: 50051 - DNA, 75 bp, Homo sapiens
tgcattggttccatccttgactgttactacagaaaaagaaacccagcgtttgctggcagaaccagttcctggcat

SEQ ID NO: 50052 - DNA, 100 bp, Homo sapiens
cccgcgtgcgggcctctttcaggccgctcctagtggacgcagaggcgggccgaggacgaaaatggacccaagtggggtcaaagtgctggaaacagcagag

SEQ ID NO: 50053 - DNA, 74 bp, Homo sapiens
aattcattacagaaatctggcacccaaatgggagaaaccccgttgcacacagcgtgtcggcatggcctggccaa

SEQ ID NO: 50054 - DNA, 75 bp, Homo sapiens
caccacctcacacagggaaacggtggaagatggtatcttgaagttgaggaatgctggcaatgaacaagacttagg

SEQ ID NO: 50055 - DNA, 100 bp, Homo sapiens
cccgacggcaccgtcaccgaggcgccgcgcacagtcaagaagggctctgtggactgtcccactctggagtttgagtatggagatgcagatgggcatgcag

SEQ ID NO: 50056 - DNA, 100 bp, Homo sapiens
tggccgccgaagaggccgccgccaaggtgtcccgcatgagatgtctgcagaatgagacttacagtgcgctgagccctggcaaaagtgaggacgttgtgct

SEQ ID NO: 50057 - DNA, 101 bp, Homo sapiens
ccggggccgccatggagcccgactcggtgattgaggacaagaccatcgagctcatggttagtagcaaagatgaagattttcttgacctttctgttgatgtg

SEQ ID NO: 50058 - DNA, 82 bp, Homo sapiens
cctcggtccttcagcacccctcggcccgacgcacccacgcccctcaccccccgagagccgaggagaagaagatgattctttg

SEQ ID NO: 50059 - DNA, 83 bp, Homo sapiens
cggcgctctggctctggctgtgcgcgctggcgctgagcctgcagccggccctgccggttttgagcaaaattttggactgtgaa

SEQ ID NO: 50060 - DNA, 80 bp, Homo sapiens
gcctggtgcctctcttttaatcaacatcttggcaagagtcttctggtccctgttgacgttaaatggaagctgatcggcgt

SEQ ID NO: 50061 - DNA, 75 bp, Homo sapiens
gtgctgaggaccaggtgttggacgcagacggcgtcacttgcttggatatgagggaaggcaccattggagatatgg

SEQ ID NO: 50062 - DNA, 100 bp, Homo sapiens
tgctaccaacccattggtaacctactggggacctgttgatatctccaactgtttaagaaaaccgtcttcagatacagtccctaagcccaagagagcccca

SEQ ID NO: 50063 - DNA, 83 bp, Homo sapiens
caggatagctgttgtttcagagaaagggcatcattgcagaatacaacaaaatcaatgatgtaaaggaagatgatgacacggag

SEQ ID NO: 50064 - DNA, 83 bp, Homo sapiens
cggacggaagaaaaggtctggccgacaatgcagatcttcgtgaagactctgactggtaagaccatcaccctcgaggttgagcc

SEQ ID NO: 50065 - DNA, 100 bp, Homo sapiens
cgcgcctgcacgagcagcgcgtgcgggacatccagaagcaggtatgggttcatagaagggcacgtggtgattccccggatccaccccaactccatctgtg

SEQ ID NO: 50066 - DNA, 100 bp, Homo sapiens
agagaagactcctcaacaagttgctgcaatgtctgtgtctaatctatcatgcatgttggcagataaattgaacatgactccagaagaagctgaaaggtgg

SEQ ID NO: 50067 - DNA, 100 bp, Homo sapiens
gaacacgctggacagcgataaggcaaatggcatcaagattgggccccaacagtcaatttcaacatcagtgggacccagtgcctcccagcggaactctcgt

SEQ ID NO: 50068 - DNA, 51 bp, Homo sapiens
aacattctttgaattggattatcccaaagaaaattgcctaagaattatgac

SEQ ID NO: 50069 - DNA, 100 bp, Homo sapiens
ccagaaccttcagtgaaagtaaaagaaccttcagtacaagaggctacttctactaggaggagcaggtgcggacccacgaggccaagctgaaggccatggc

SEQ ID NO: 50070 - DNA, 100 bp, Homo sapiens
gcgggaccgtgctgacctcaataaggacaagcctgtcattcctgctgctgccctagctggctacacagatccaggatatcagtgtggaaactgaagacaa

SEQ ID NO: 50071 - DNA, 84 bp, Homo sapiens
gtgagttgggcttggtaccgtgctgcccagaatgcccttcgggaggacttgaaaatactggaaatctgtccggatccaaattat

SEQ ID NO: 50072 - DNA, 101 bp, Homo sapiens
gctccggctgtaaggagccgcggcggggggaaaatggagcccttcaccaatgtttgcctgagaatacagatcaacccacagaacaaagcggatttccaagg

SEQ ID NO: 50073 - DNA, 74 bp, Homo sapiens
gcgccgtcgccaccactgccgggcctgcggctatgaaggcagcaacaactcatctccagtggattttgtaaata

SEQ ID NO: 50074 - DNA, 103 bp, Homo sapiens
cacggaacgtcagcaacgatcccgatgtcatcaagttgcaagagattccaaccttccagccccttttgaaagacaatgcagatcttcgtgaagactctgactg

SEQ ID NO: 50075 - DNA, 111 bp, Homo sapiens
ccgccgccaagagtgagcgagcggacccgcgatggagagtacacactagatgtgtacagactctcctccgtggtcacacagcacgattccaagaaggctggagctgaggtg

SEQ ID NO: 50076 - DNA, 75 bp, Homo sapiens
cagtgaacaaatccgggggcaaggccaaaaagaaggtggtgctgtgggtcggcctgggcgtcctggtggtgagca

SEQ ID NO: 50077 - DNA, 87 bp, Homo sapiens
aagaagcctgggtgattggcagtgtggttgcacgagctgaagtctgtggtccgaagacaaccctatgaggcatcagtagggttttac

SEQ ID NO: 50078 - DNA, 98 bp, Homo sapiens
agacccactggatgagggcccgaaaatggtttcagcacctgtgtcaggctggagaatcgggaagggagaaggctacgccgatctggaatatgccatga

SEQ ID NO: 50079 - DNA, 75 bp, Homo sapiens
cctcgtcgacatgagtgatgtggaggaaaacaacttcgagggcagagttggcgtgcagtggtgtgatctcagctc

SEQ ID NO: 50080 - DNA, 75 bp, Homo sapiens
agtggaattttggagatattcaaagcatcattgacaaagaagtttcattaatggcagaaatggataaagttaaag

SEQ ID NO: 50081 - DNA, 90 bp, Homo sapiens
cagagactgatctttgctggcaagcagctggaagatggacgtactttgtctgactacaatattcaaaagaaattcttgatgagggagata

SEQ ID NO: 50082 - DNA, 75 bp, Homo sapiens
ggaagccaagtgccatcttcaaaatttcaggtcttaaatctggtggattcaccaatgaacttgaagcatcctcat

SEQ ID NO: 50083 - DNA, 82 bp, Homo sapiens
ggggccagggaaccctggtcaccgtctcctcaggccgggacctgggggctcctgccggatccatgggggcggccagctgcga

SEQ ID NO: 50084 - DNA, 100 bp, Homo sapiens
agtgttgctgcaacatagagctgacattaactgtcagggtatcactgggatacatcagattggatgccaagcgttcctctgccggacatacaagagttcc

SEQ ID NO: 50085 - DNA, 119 bp, Homo sapiens
gaaattcctttcctgctagaactttcagaatctcaggcgggtgaggagatctataaggacaggcagaaattctcagaacaggttttcaaagtggcctcctcagacctggtcaacatggg

SEQ ID NO: 50086 - DNA, 95 bp, Homo sapiens
gaaggaggttgccgacgccatcaggctcaacgaggaactcaaagtggatgaggaaagtgagaagccctaccactgcaactgggacggctgcggct

SEQ ID NO: 50087 - DNA, 43 bp, Homo sapiens
gcgcgagccaccgattgtacagaaaccctccgtaactctaggt

SEQ ID NO: 50088 - DNA, 101 bp, Homo sapiens
gttgactgcagctcactgtaacttggacaaatcagctgcagagaagagaagacagttgatccaggagtccaaattcttgggtggtgacatggaacacaccc

SEQ ID NO: 50089 - DNA, 96 bp, Homo sapiens
cggggaccggggcgaggcggcccccgccgccgccatggaggcgctgggacccgccgcggcgagtcctttgcacatgttggcaacacacgcatccgc

SEQ ID NO: 50090 - DNA, 100 bp, Homo sapiens
ttgctactgctggcagattgggcatccatcagcggctgtggccaggctgaccttggtgaatggaggcattgagaacacattagagaaggaggtgatgcag

SEQ ID NO: 50091 - DNA, 98 bp, Homo sapiens
ccggcctgcggggagggcggaggtggacgcggatctgtcaacatgggtaaaggagaccccaacaagccgcggggcaaaatgtcctcgtacgccttctt

SEQ ID NO: 50092 - DNA, 80 bp, Homo sapiens
gccgccgcgggcaggacgcgcgctgcagctcctcaagagttactgatctatgaaatggcagagaatggaaaaaattgtga

SEQ ID NO: 50093 - DNA, 73 bp, Homo sapiens
gccgcccgaacatggactccgccggccaagaggagaaggcagagcccccccaggctatgaatgccctgatgcg

SEQ ID NO: 50094 - DNA, 50 bp, Homo sapiens
ccaggaggccaggggtgtcgccatggcatcaactgtgaaatctgtgttag

SEQ ID NO: 50095 - DNA, 100 bp, Homo sapiens
cactggccccatatcctacctcccagctggaaagggctacccctgcaaaacatgtaagatagtgctgaactccatagaacagtaccaagctcatgtcagc

SEQ ID NO: 50096 - DNA, 87 bp, Homo sapiens
tgtggggagaagccatcatttgacaggtcaagaacccagtatggaagggagaagtgaaaagttgaagaaaaatccacacattgcatg

SEQ ID NO: 50097 - DNA, 50 bp, Homo sapiens
ttggattcagacgccgattcgcccaggaactcgtgtccctgaagccttgt

SEQ ID NO: 50098 - DNA, 75 bp, Homo sapiens
gtgatcatgcaggtggccgacgtgcctgagaagcccagtgttgaatatgaaacattcgatatattggaggatgaa

SEQ ID NO: 50099 - DNA, 100 bp, Homo sapiens
aatgctgaagtaagattgtcttggaaatactaagttggatgaccctgatgatctgcaatgtaagcggggagaacatgttgcgctggctaactggcagaac

SEQ ID NO: 50100 - DNA, 83 bp, Homo sapiens
cggtcggagaagtggcctaaaacttcggcgttggactagacgcttgaagcaaagctgccatcccagaagacgacatgctctca

SEQ ID NO: 50101 - DNA, 74 bp, Homo sapiens
tcggggcgatgtgtagtgccttccatagggctgagtctgggaccgagtgccggtggtggtgtgcacattgagcc

SEQ ID NO: 50102 - DNA, 51 bp, Homo sapiens
gggcgctggtctgctcccagccgataaacaggggtcacatgacgacagaag

SEQ ID NO: 50103 - DNA, 82 bp, Homo sapiens
ataccattaagtgcctaattcaaatgggagcagcggtggaagcgaaggacttctgcacggacctggccgtctccagtgccaa

SEQ ID NO: 50104 - DNA, 100 bp, Homo sapiens
agccatcaggtaggctgcgttgaggatctttgctcttccatccgcctttgatcgtcttcctcttcagccatccagaaagagtgttacaccgtgcgctcca

SEQ ID NO: 50105 - DNA, 112 bp, Homo sapiens
cgcggacatcgtctcctgtgtggcgatggtcttcctgctggggctcatgtttgagacaatgcagatcttcgtgaagactctgactggtaagaccatcaccctcgaggttgag

SEQ ID NO: 50106 - DNA, 51 bp, Homo sapiens
atggaggacttgcttttgttgaactggacccactgatctcagcatgaagag

SEQ ID NO: 50107 - DNA, 52 bp, Homo sapiens
ctgttgactcacaatgatccaaaagtttcagctcctggcatcagctctattc

SEQ ID NO: 50108 - DNA, 100 bp, Homo sapiens
ctcatcatcaactccatccaacacttcgtttactccgggcagggtgccatttgccgtgcctgacaaagtgctgtggccacagctgtgtgaggcgctcaac

SEQ ID NO: 50109 - DNA, 101 bp, Homo sapiens
cgaatctgagcaaaggcacgggcagccggaaggacaccaagatgcggatccgggcctttccggcctgtcccctcagttcccaggtgccatgaggaagcctc

SEQ ID NO: 50110 - DNA, 98 bp, Homo sapiens
cccgtgtacatggccgccgtcctggaatacctgacagcctggcgctggccaacaatagcaccctcaccattggcaccatcgatgagatccagaagctg

SEQ ID NO: 50111 - DNA, 90 bp, Homo sapiens
gcctccagcaggacaatattcgcacccggctgaaggtcagttcaccgggacctggaggcccagattgcgatcgtgacggagaaccaggcc

SEQ ID NO: 50112 - DNA, 100 bp, Homo sapiens
gatttccttactggagcaagggaaagagtcctgcatggtttcaagggacgtaccaggaggatggtgcccagacagaataactgaggcctggagccacgtg

SEQ ID NO: 50113 - DNA, 100 bp, Homo sapiens
cgcaaatgacttggagtgttcaggaaaaggaaaatgcaccacgaagccgtcagaggacagagcgggatgccaccagcttgtccaaagggaagttccagga

SEQ ID NO: 50114 - DNA, 74 bp, Homo sapiens
tttctggctccgggctgagcttcctggagaagaggaagttcaacctggtgtgtgctgactcctggaagctggac

SEQ ID NO: 50115 - DNA, 74 bp, Homo sapiens
gattactctgcaacagctaaaggtccaggtcaagacctcgtctccgttctcatagtcgtagcagtgaaaggtcc

SEQ ID NO: 50116 - DNA, 97 bp, Homo sapiens
ctcgctccatctgtctccttgagcaaaaaagaaaagttgtttcctccaacattgatgttcctccagcaaggccccttcacagatgtagtcactacaa

SEQ ID NO: 50117 - DNA, 119 bp, Homo sapiens
ttcgcattttggcattgacatttaattttagggtcctttatatagaagggagagtagccacagcatgttccgaagagatgattggaagatggaagtggagggttaaataatgaaatgca

SEQ ID NO: 50118 - DNA, 100 bp, Homo sapiens
gctgctgggaacacctggagtctccgcgggcaggtgtccctggccagtgtccttccacctgtccacaagcatggggaacatcttcgccaacctcttcaag

SEQ ID NO: 50119 - DNA, 100 bp, Homo sapiens
ctcgatcagctctcgcagtcggagaggcggctaaggaaaggtgccacagcagagacgcgaaggagaggccctagaacccactgttgcaagaattcaattc

SEQ ID NO: 50120 - DNA, 90 bp, Homo sapiens
ctccaacggggatggctctgaaacagaaaccacctctgccatcctcgcctcagtcaaagaacagacatgaagccattattatatcaggaa

SEQ ID NO: 50121 - DNA, 98 bp, Homo sapiens
tcaatgtgtggaatattggggggctcggctgcagacttggccaaatggacgggactattaagatttgaatataacctgccgctttgcaggtgtattcc

SEQ ID NO: 50122 - DNA, 101 bp, Homo sapiens
cagcagccgagtctgacggcgccggttcgctgcccggtccgcccgcggtgagagaactctactacgatcgcgggaaccaccatgagtttgtgtccctggtg

SEQ ID NO: 50123 - DNA, 50 bp, Homo sapiens
tgacggacaccacccgggcgggtccctggatggccggttgcaggtgtccc

SEQ ID NO: 50124 - DNA, 74 bp, Homo sapiens
gtctacgcagatgccgacgaaatcctccaggaggagatcaaggagtacaagtatgacgccgtgcccatccagtc

SEQ ID NO: 50125 - DNA, 82 bp, Homo sapiens
ctggagcctcagttggaagcagccgatccagcctgcggagcctgtggggcaggtccttctatatgatccactctttgactgg

SEQ ID NO: 50126 - DNA, 75 bp, Homo sapiens
cctgcatcagtgcaaaactcctattatccaccgggacctgaagcctgagaacctgctgctggcgagtaaatgcaa

SEQ ID NO: 50127 - DNA, 98 bp, Homo sapiens
caggccccctgggggcgcccgtctcccacagcaaaggcgcattggagtgactgtctggcatcaccaagatgacactccacgccacccggggggctgca

SEQ ID NO: 50128 - DNA, 100 bp, Homo sapiens
gtcaggcccagctctcctgcgccgccgcctcccgccgcgccccgccatgccgctctactccgacaatgcagatcttcgtgaagactctgactggtaagac

SEQ ID NO: 50129 - DNA, 100 bp, Homo sapiens
cggggatggcgtcccccgggggcccgtactgcacatcgtggtggtcggatttcaccacaagaagggctgccagtacctttgtgttggatgaatttaagcg

SEQ ID NO: 50130 - DNA, 50 bp, Homo sapiens
gggggcaccgctgccgttccgaggtttacccaaggtccagcctagcccct

SEQ ID NO: 50131 - DNA, 100 bp, Homo sapiens
cgctcggctgcctgacttcttcctgctgctgcttttcaggggtgttgcagcatccctggaagtgtcagagagccctgggagtatccaggtggcccggggt

SEQ ID NO: 50132 - DNA, 98 bp, Homo sapiens
aacacttcaccctctcgcctcgggtctcgggggccgctctgggatcccggccaccagcaattgtccggttttgagcaaaattttggactgtgaagcaa

SEQ ID NO: 50133 - DNA, 82 bp, Homo sapiens
ttttctactgtccctgcgcgagtttggtgccctggttgtcagatgttggaaagcagtaggacggaacatactcttcgtggtt

SEQ ID NO: 50134 - DNA, 74 bp, Homo sapiens
gtggcgtcttggtgttctccacgctggttcgcaggtggcaaagaaacacagcatgatgtttggaaatataattc

SEQ ID NO: 50135 - DNA, 98 bp, Homo sapiens
gtgctttcatttgtaaaacaagaattgtcaggcctaatgggattgtttgaaaaacgtcgcttcaggaaattcctagtgtatgttgccaacttcgatga

SEQ ID NO: 50136 - DNA, 95 bp, Homo sapiens
atgcaaacattatttctgaggccaagcccgaaggacctagagtcaaggatggatctggaagttttcaagatggcagcatctatgcatggtcagcc

SEQ ID NO: 50137 - DNA, 105 bp, Homo sapiens
gctcagaagataaacgaggggctggaacacctcgccaaagcagagaaataacaatgcagatcttcgtgaagactctgactggtaagaccatcaccctcgaggttg

SEQ ID NO: 50138 - DNA, 75 bp, Homo sapiens
cagttcctaaactcaggggcatatcctcaaaaacctcttaggtgttggtagaaattgaccaagtgaagtccagaa

SEQ ID NO: 50139 - DNA, 100 bp, Homo sapiens
ctctgctaaaaggctccttcagtgagcaaggcatcaacgagtttctcagcaccggaagcagtactcagaacaagtcatacctaatgctgcaggaaacatt

SEQ ID NO: 50140 - DNA, 83 bp, Homo sapiens
ctcagcaaacaggacgggaagatttacagaagccgagacccacagctgttctggaggacacgtgccggcggcaggacttcaac

SEQ ID NO: 50141 - DNA, 82 bp, Homo sapiens
cagacaaatcaaattagtggttttgtttttcagaagaagtgaagtcaagatgaagaaccatttgcttttctggggagtcctg

SEQ ID NO: 50142 - DNA, 98 bp, Homo sapiens
aaacaccggtaggagcggggaggtgggtactacacaaccgtctccagccttggtctgagtggactgtcctgcagcaaaccagtccagctacgggggcc

SEQ ID NO: 50143 - DNA, 75 bp, Homo sapiens
gatggcaaggacggggactttgactacagtttgtgcctgcagatgggaacgcagcctgcgtgaaggtgctccggg

SEQ ID NO: 50144 - DNA, 135 bp, Homo sapiens
cctaccggcacatggccgaccgcatgggcacgccacatctgcagaagacgctgaatcagatttattctagtcgagaactcgaagaaacattaaataaaatcagggaaattttgtcagatgataaacatgactggg

SEQ ID NO: 50145 - DNA, 92 bp, Homo sapiens
gctgccgacaccccagcctgttgctgacactagtgcctctccatattgctgtggtgcagggtaacctgccagctgtgcaccggctggtcaac

SEQ ID NO: 50146 - DNA, 100 bp, Homo sapiens
cattggaagctgcgctcgattctattcgctacattacaagacacatcatgaaggaaaatgatgtccgtgaggacatggatttgattgacatactttggag

SEQ ID NO: 50147 - DNA, 75 bp, Homo sapiens
aagctgaggaagcaggcggagaagagacaagaactcctctttcctaaaatggagtcgagtaaaaagatggactct

SEQ ID NO: 50148 - DNA, 75 bp, Homo sapiens
ggaatcaaacagttttatattaatgttgagagagagctttctacaagttctgattaaagtcagaaatagacacaa

SEQ ID NO: 50149 - DNA, 100 bp, Homo sapiens
tcctctttttaaatagggtacagcttttatcttgcacatgaattttttgatgttcttcctgtgcataaatttcagctatgtgatgatgatgccatttaaa

SEQ ID NO: 50150 - DNA, 98 bp, Homo sapiens
cccgagctacctctttcctgctggctttggagcctgagctcgaggcccggctggcgcacctgggcgtgcagccgattatgtttcgaggggaagtacgt

SEQ ID NO: 50151 - DNA, 98 bp, Homo sapiens
agcctcctgagtagcaattacagggatgatggcgccacttcctcagtttcggcactcaagcgcctggaacggagtcagtggacggataagatggattt

SEQ ID NO: 50152 - DNA, 100 bp, Homo sapiens
tgcccagacggctcacctgtgcgggatggaacaaaaggtgaggcaggcgactaatcagattgtgatgaattgtgctgatattgatattattacagcttca

SEQ ID NO: 50153 - DNA, 100 bp, Homo sapiens
gtgaccgagagcgcgaatatcgtcatcgttagaaggatggtgccatgacaatggtgtgaactacaagattggagagaagtgggaccgtcagggagaaaat

SEQ ID NO: 50154 - DNA, 75 bp, Homo sapiens
cccaggtgtaagcgcagaaagcaggcgaacccgcggcgcaataacgagtaatcaagtcagaggattatatgactt

SEQ ID NO: 50155 - DNA, 100 bp, Homo sapiens
gccacctatgagatccagtttgggcacctgcagcgacctacccactacaatacctcttgggactgggctcgatttgaggagtcgttcacgcctactgagg

SEQ ID NO: 50156 - DNA, 100 bp, Homo sapiens
tgctggtgacaggcactggtggcatccagtggtggccagtagaggaggaggtgaacaaggaggagaatgaattcccagttcctgagcagttcaagaccct

SEQ ID NO: 50157 - DNA, 100 bp, Homo sapiens
tgaggagagctctgaggaggattcactcaggagatgttccaacagtatccgaggatgacatatcctcctctacatggtcccatgagattcccaccttctt

SEQ ID NO: 50158 - DNA, 98 bp, Homo sapiens
caggttctcggagggaccgggataggaggagcaaatacgacatcctcatggagaagctttcggtcatgctgagcacacggactaaccacatagagacg

SEQ ID NO: 50159 - DNA, 100 bp, Homo sapiens
tccacccgaggacaatgattgcggagcccgctcacttttacctgtttggattaatatgtctctgttcagagttggccaccctgttcaagggcttaggaga

SEQ ID NO: 50160 - DNA, 75 bp, Homo sapiens
tcctgagtccaaacactcaagatgatttgggccaggcttagtcatctattggtatggatttatccaggagctgga

SEQ ID NO: 50161 - DNA, 97 bp, Homo sapiens
cagaactcactccattgggtatattttataacaacagggtccattcaaattttaagattcagaggaggaattttttgatgcaccatgtagtcccttg

SEQ ID NO: 50162 - DNA, 82 bp, Homo sapiens
gtacttgcaagaaacctcaggacttgagtaacagcaacatgaagttttcatgggctgagctgctgagttcagcctgggaact

SEQ ID NO: 50163 - DNA, 74 bp, Homo sapiens
tctactgtgacttcagagacactgccaagcagccttagccctagtgtagagggtctgagagagactaagcatcc

SEQ ID NO: 50164 - DNA, 90 bp, Homo sapiens
ggaaggggcacgggcacccccgcggtccccgggaggctagaggcattgaagttgatatcgatgtggagcacggagggaaaagaagccgcc

SEQ ID NO: 50165 - DNA, 98 bp, Homo sapiens
gagacatccaggaagccttacgcaccagacagacgacagtgaaggagtcagccacagaggagaagctgacccctgtgttgctggctaaacagctggca

SEQ ID NO: 50166 - DNA, 134 bp, Homo sapiens
gggcccgcaagggcggagggggcccgaaggacttcggcgcgggactcaagtacaactcccggcacgaggctcagtagatgaaggcgtttctgagggcttgcctacacttcaaagcacgtctagcactaatgctc

SEQ ID NO: 50167 - DNA, 90 bp, Homo sapiens
cgctgatctacaagaaaatccacaagaacgcactttcctcccagcttaaagtatcagtggttgagaagagcttttcggacctgttactac

SEQ ID NO: 50168 - DNA, 75 bp, Homo sapiens
gtttggagcagatggataccgtatcgacgtggggcctccgtgtgtttcacataacagcagataatcaccagaatg

SEQ ID NO: 50169 - DNA, 100 bp, Homo sapiens
gaggtgctcaagccatgttttggaaaagagaactcaaggtctggcagggagaaaggagcaagagagcatcatccacagttacccggagtttagctgtaag

SEQ ID NO: 50170 - DNA, 100 bp, Homo sapiens
attttgacctccttccatgaatcacaaatgttcttaatggcatctagaatgatctgttagtcaagtgtattggtgaagaaaccaagtatgaaagcatcag

SEQ ID NO: 50171 - DNA, 83 bp, Homo sapiens
gatcgctgtgatcgtcacttggttttaaaatcaaagatgggaaaatcggagaaaattgcccttccccatggccagcttgttca

SEQ ID NO: 50172 - DNA, 75 bp, Homo sapiens
tatgctgtattcagctcaggaccaggcaccttctgtggaagggagtcgtcgcatggtggatgtcatggacgtgaa

SEQ ID NO: 50173 - DNA, 100 bp, Homo sapiens
agcctttggtcataatcgctgaagatgttgatggagaagctctaagtacactcgtcttgaataggggggtacatggtatggagtagacatcaacaacgag

SEQ ID NO: 50174 - DNA, 75 bp, Homo sapiens
cgaccacaccgctgatgaagacaaggactcacagtggctgcaagtgtaaacaggaacatcgataagtagtgtaaa

SEQ ID NO: 50175 - DNA, 100 bp, Homo sapiens
agatcaaatggcacttcattggccacctacagaaacaaaatgtcaacaaattgatggggtattcattcaggagaaggaccctacagatggagggaatgca

SEQ ID NO: 50176 - DNA, 100 bp, Homo sapiens
gttggagagctcatctggaattttgccgatttcatgactaaccagtgtcccctcttgctgttggctgcacatcaggaaggctgtgatgggaatgaaggtg

SEQ ID NO: 50177 - DNA, 96 bp, Homo sapiens
gtgaacagaatggaatggagcaaaagacaattattttaataccctctgctactctccagagagaccggatcttcaaacattttaccaggaagcgcc

SEQ ID NO: 50178 - DNA, 73 bp, Homo sapiens
cggcctccagggcaggccccggctcagaccacaagggcagaaccgatgggatggggtgacctcggggtgtatg

SEQ ID NO: 50179 - DNA, 97 bp, Homo sapiens
actttcggtaatgatgctcggttcatcagaagatcatgtacaccaaatgcagagagaaggatatgagaatttctttgataagctccaacaacatagc

SEQ ID NO: 50180 - DNA, 74 bp, Homo sapiens
ctcccgctcggccccgccagcagcactgtggaggccgtcctcggttcagtgtatctttgcctgcctacatcaat

SEQ ID NO: 50181 - DNA, 75 bp, Homo sapiens
gggaacccctgagccgcatggactcggaggacaggaatctttcaaagaagtaccaacctaaaaagaactcgaagg

SEQ ID NO: 50182 - DNA, 75 bp, Homo sapiens
ccatggcagcctcactgacatcagccagtctcttgcatggcaccaagaatgttaccaattcaagcagtttaagat

SEQ ID NO: 50183 - DNA, 98 bp, Homo sapiens
aataccagttcagcgtggaccaacttatggaactggccgggctgagctgtgctacagccatcgccaaggtggtctacatagcctgctccttcaccacg

SEQ ID NO: 50184 - DNA, 82 bp, Homo sapiens
tcccttcgccttcgccctttccacctcgcggcagttcggtctcggcgcggaagatggccggcggcgtggacggccccatcgg

SEQ ID NO: 50185 - DNA, 113 bp, Homo sapiens
tttaaatgaaacctatgtgtatataactttcaaaacttctttttcaagaaactaagaggaaactaaatatattttgccaactttggaaaaagaattattcttggcagagcaca

SEQ ID NO: 50186 - DNA, 105 bp, Homo sapiens
aacgagacttttctcagatgttggatatttgcttggaaaaacgtgtgggtacgaccttgatactggctttggcactactagtggaggggcatttggaacatctgc

SEQ ID NO: 50187 - DNA, 75 bp, Homo sapiens
ttcggtttgtaggtcgtcagaaagaggacccagtggcttttaaggatgtggctgtgaacttcacccaggaggagt

SEQ ID NO: 50188 - DNA, 100 bp, Homo sapiens
ggcggacaacgagaaactggacaaccaacggctcaagaatttcaagaacaaaggccgcgacttggaggcccctggccccaacatggcccgtcgctctcag

SEQ ID NO: 50189 - DNA, 96 bp, Homo sapiens
cctacttcaagaccatcgaggatctgaggaacaaggtgatggtgaacgggagcctcttcgtgcagtacttccaccgcgtgcccttccaccgtgtgg

SEQ ID NO: 50190 - DNA, 97 bp, Homo sapiens
tgcgactattctccgggagccgtccgtgtcaccgccggaacctggcgcaggacgtagacaagtttggcaacgagatcacccagctggcccggcccct

SEQ ID NO: 50191 - DNA, 100 bp, Homo sapiens
ggctgcggccgctgctgcctacgcgccatggagcatcgcatcgtggggcccgggccgtaccgagctaccaggctgtatactgcatgataaacacaggaac

SEQ ID NO: 50192 - DNA, 100 bp, Homo sapiens
tgaagcaactgaagaaaatgtttgaagcaacaagattgcttgcaacaattgttatgcttatcaatgtccgagttaccaccatggatgcagagctggagtt

SEQ ID NO: 50193 - DNA, 74 bp, Homo sapiens
attctacggagggagatattcttgagataactggttaagggaagttaatttatggtgccctactttgaaggtcc

SEQ ID NO: 50194 - DNA, 88 bp, Homo sapiens
actcgaagaacagctgtggaaagaagttgcaaaacactggggttatgtaccgaaggactctaccgtgtcagcgggaataaaactgacc

SEQ ID NO: 50195 - DNA, 117 bp, Homo sapiens
cttggagccatcctctacaggacccgctttctaccattaagccatgtcaaaatctgccgtgaagatatccttggacttactctccaatcccctctgtgagcaagaccaggaccttct

SEQ ID NO: 50196 - DNA, 111 bp, Homo sapiens
tgccactccaagaaaagatggtcccaaacgttctgtactgtccaagtcagttcctgggtacaagttgtggaagctgatcgaggaagcctaagcaggctctgtgaagtggga

SEQ ID NO: 50197 - DNA, 100 bp, Homo sapiens
cacctgcagcttcaaccatgcagttgagtcgtggggacagcttgaaggagccaacctcaattgcagagagcagccgtcaccccagctaccgctcagagcc

SEQ ID NO: 50198 - DNA, 49 bp, Homo sapiens
cactcctcttcacttcttcagtgacagtggatagtggaaacaggagatc

SEQ ID NO: 50199 - DNA, 82 bp, Homo sapiens
tgaaaatcaagtagtgtttgccagagttgattgtgatcagcactgtcatggcaaaaccccaaaagatgccgcgtcagttcga

SEQ ID NO: 50200 - DNA, 98 bp, Homo sapiens
tccgtggccttcgcgtctgcccggccaagaggcaaaggggaggttacgcagcaaaccatccagaagctccaggcggacgacgtgggccgaagagagga

SEQ ID NO: 50201 - DNA, 100 bp, Homo sapiens
gatctacgagtggatggtgcgttgcgtgccctacttcaaggataagggcgacagcaacagctctgccggctggaaggaggaatgtttcttgaacctagag

SEQ ID NO: 50202 - DNA, 100 bp, Homo sapiens
gacaggctgcagctggaggctattcataagcccatcccaggagatgtcctgacaacacctgtgtaccctgcatagggtccctgatgggcctgggtgacat

SEQ ID NO: 50203 - DNA, 90 bp, Homo sapiens
cgggcaactcccgaagatctggtatggacctgtctgccaatcaggacgaggagaccgaccaggagaccttccagctggagatcgaccgcg

SEQ ID NO: 50204 - DNA, 135 bp, Homo sapiens
caaccgcagtagccaatctacttgccaacatcactttgacagcccaatcacgatgaagaggaggcggggagaccagatcctgaaggagctagacgagtgctacgagcgcttcagtcgcgagacagacggggcgca

SEQ ID NO: 50205 - DNA, 101 bp, Homo sapiens
cctgtttttaatcagtgactcaaagctgtgatcaccctgatgtcaccgaatggccacagcttgtaaaaggacccatggatgaaggaccagatcttgatcta

SEQ ID NO: 50206 - DNA, 76 bp, Homo sapiens
ctccctgtctgggaccttctccctgcctggacccctactattgcaacaagctcttttgtgacagggacggcttgtt

SEQ ID NO: 50207 - DNA, 100 bp, Homo sapiens
cagcgtggacgccggatgagttgcttttaggcttgctggcccgcggggctgtccaggcacgcgaggcccctcaggtgtatgcaacagcgttattgcaaca

SEQ ID NO: 50208 - DNA, 100 bp, Homo sapiens
ggagccaccttgccgggattgtacctgcaggcagaaagtcttcctacgaccgtcttttcccttagaggcaccagatggagaacatcattgcaacagtaag

SEQ ID NO: 50209 - DNA, 90 bp, Homo sapiens
gttggcggtccctgtgacctgtggagacacggccagatctgccctccagtttctgggtgtctctggggagcccctgggccagattttcct

SEQ ID NO: 50210 - DNA, 51 bp, Homo sapiens
gggaaaatggagcccttcaccaatgtagactatgccagttactaccagggc

SEQ ID NO: 50211 - DNA, 75 bp, Homo sapiens
tgtgggaggcctctcatttttagttaatcacgatttctctcctcttgagctctcaaaggtctatggccctgtgtt

SEQ ID NO: 50212 - DNA, 83 bp, Homo sapiens
gctgcggatccagggggtcggctgccaggtacagaaactgccaagttttggaccttatctggaacagcgcaagaaaatcatag

SEQ ID NO: 50213 - DNA, 59 bp, Homo sapiens
tttaattttagggtcctttatatagaagggagagtaggagacactgtcggacattcggg

SEQ ID NO: 50214 - DNA, 100 bp, Homo sapiens
tgaacaagacatggaaggaaatgagggcaacttctgaagacttcaacaagcttttctgggagaagaggctacaaggacttagtgcatcagatgtaacaga

SEQ ID NO: 50215 - DNA, 100 bp, Homo sapiens
tcagcgagttccaacttggtctgattttccaagctggctcctttggtgaagattaaacagagcttaacaaaactgaagcaagaaactgtagagatggaca

SEQ ID NO: 50216 - DNA, 75 bp, Homo sapiens
caaaatggcgccctacagcctactggtgactcggctgcaggtgaagccaaaaaccttccctcttacccggggccg

SEQ ID NO: 50217 - DNA, 96 bp, Homo sapiens
gagggagagccgagcagccccggctctgggctacggactatgggcgaatagctctgaccacccggcgaaggtctcgctctcgaagcagacattccc

SEQ ID NO: 50218 - DNA, 100 bp, Homo sapiens
tttcttacaacgggcattgtcgtgtcagcttttggactccctattgtatttgccagagcacatctgacagaatgttgctgcgggatgtaaaagctcttac

SEQ ID NO: 50219 - DNA, 100 bp, Homo sapiens
gtgggcatcgtgggagctgtcatcatgccacacaacatgtacctgcattctgccttagtcaagaatttgccattttcagtggaaaacaagtggtcgttac

SEQ ID NO: 50220 - DNA, 50 bp, Homo sapiens
cgaggagggttgctagtggagaagtttgtagatgcggacaacctgatcct

SEQ ID NO: 50221 - DNA, 75 bp, Homo sapiens
ggatcctctgtacgcccgttcactggttcagcagctccacagaacagagcagtgcctcacgcctgatgagaagac

SEQ ID NO: 50222 - DNA, 100 bp, Homo sapiens
ccgagcggaaccagagaatgctgaggctctgctttcccagcacgctgcctcaccaagaaagaatccagagaaggactggtggacttggaatgttaagtca

SEQ ID NO: 50223 - DNA, 100 bp, Homo sapiens
ttcacgggtagagattggcttcgggctgagctagcagtgagcaccttttggcccaatgaatatcagattatggaacgagctttattccacatggacaact

SEQ ID NO: 50224 - DNA, 100 bp, Homo sapiens
ggagcggtgtcctcttaagaaaatggtctatagaagaggagggaaaaacacacctaggagtaagttatcctgtgctttaaagactagcaaacaatgtcag

SEQ ID NO: 50225 - DNA, 100 bp, Homo sapiens
ctgccgaaaacccgactttccctcatggctggtcgtctccagactccacactcctagcaagcagttatttggcagaaaagcagagtatcagatcacaaga

SEQ ID NO: 50226 - DNA, 100 bp, Homo sapiens
acttcggccctagactctacaaatgtagaagctgcttttcagacaattttaacaggagcaggaactcaaagcagccgctgatggcgtactatctgaagtg

SEQ ID NO: 50227 - DNA, 75 bp, Homo sapiens
agatatctgccagatgaaaaagcaaagccttctagacaagctcagtggaatctgaagggcccaccccatggagga

SEQ ID NO: 50228 - DNA, 100 bp, Homo sapiens
gtccaggcgggcctcccgtttctggctccgggctgagcttcctggagaagaggaaggccaaacgtaccaagaaagtcgggatcgtcggtaaatacgggac

SEQ ID NO: 50229 - DNA, 100 bp, Homo sapiens
cttgtacagagatgtgatgttggagaactatagcaatctggttttcttgggctatgaccagggccagagcactcagatctcagtcagaggagtctgcttc

SEQ ID NO: 50230 - DNA, 100 bp, Homo sapiens
agtgtgaggttctttgtctgctggcagctaggggcgacgaggcgggacgtcatggaagtactgggctggcttagatgaagatgaagatgcacatgtctgg

SEQ ID NO: 50231 - DNA, 80 bp, Homo sapiens
atcgagaaatggccgcgtcggcaggaaacttcctcctggccaaccctgtgtctggcagccccatcgtgacgggtgtggcc

SEQ ID NO: 50232 - DNA, 100 bp, Homo sapiens
tccaaagactgtggaacttttaagtggagtggtggatcagaccaaagatggggaccacgggatcattcgaactctggatttacccatctatgtcacacgg

SEQ ID NO: 50233 - DNA, 90 bp, Homo sapiens
gagggaccccagaaactgatccgcaaagtgtctacctcggggcagatccggaccaagaattttaccttcaatgatgacttcagtcccagc

SEQ ID NO: 50234 - DNA, 75 bp, Homo sapiens
gctcataaggattgtcctctttctacaaaaggcagtgctcggaatgtgaccaggcagggagcagtgacatggaag

SEQ ID NO: 50235 - DNA, 98 bp, Homo sapiens
acttgaaggcgtatacaggaacaatattgatgatgtagtaagctgctgtaagtaaagatgattccattatttcaagtcttgatgtcactgatattgca

SEQ ID NO: 50236 - DNA, 75 bp, Homo sapiens
cctggggatggcgcatcacacaccaaagggcgtctctggccgagcctctttttgtggaaaacgacagcagcagca

SEQ ID NO: 50237 - DNA, 96 bp, Homo sapiens
gaagaggaaagcaaaggagtcagggatggctctttctcagcgagttcctggggaaaaccccagggcaaaacgctcagaaatggattcctgcacgaa

SEQ ID NO: 50238 - DNA, 100 bp, Homo sapiens
ctggcagatgccggctatggcgaacaggaactggatgccaactctgcccttatggaattggacaaaggtgacttgcacctacggagagcttggagaaaac

SEQ ID NO: 50239 - DNA, 75 bp, Homo sapiens
ggagcaagaccgctgacaagatcgagggcttctcattatggatccaagcctgttgagagaaagggagctgttcaa

SEQ ID NO: 50240 - DNA, 90 bp, Homo sapiens
cttgtatgcctcaatttgctggatttaagcactgctgcactttatgagctctgcttatgataatgtcaacaaagttcgagtagctatcaa

SEQ ID NO: 50241 - DNA, 56 bp, Homo sapiens
gcccattttaaccatttttaagtgtacagcctgccgcaccaacccgtgcctccatg

SEQ ID NO: 50242 - DNA, 100 bp, Homo sapiens
tcagttcctggctgaaagtacagaggaccagaataatgaaactcagcaattgcttttctgggagaagaggctacaaggacttagtgcatcagatgtaaca

SEQ ID NO: 50243 - DNA, 74 bp, Homo sapiens
ctgaagcagatcgaggaacagactaagaaggctcagcaagattgccatcacgaaagccaaagtggatttctcca

SEQ ID NO: 50244 - DNA, 97 bp, Homo sapiens
atgccctcattaaagcagccggtgtaaatgttgagcctttttggcctggcttgtttgcaaaggttatcttgacgaatcagattacaacccatctgag

SEQ ID NO: 50245 - DNA, 108 bp, Homo sapiens
gtgaagagttgtcccagctcggcccgcgggggagccccgggagccgcacgcttgcattcacaagagatgggctctgtggtctgtggaatgaaatggttaaagatggag

SEQ ID NO: 50246 - DNA, 75 bp, Homo sapiens
ttcttccaagaaaccaacattcccaacagccaccaccaccaccagatggctctgaagggctccaagaagctggtg

SEQ ID NO: 50247 - DNA, 75 bp, Homo sapiens
aaagatccaagtgctgttcacacagtgagatgcattctggtggacccaagtggagagattgtggaactggcgaaa

SEQ ID NO: 50248 - DNA, 75 bp, Homo sapiens
ataagatgcgactgctacagggaccatgggacactattacgcaacagaacattctagtatgccagtagaaaaaaa

SEQ ID NO: 50249 - DNA, 100 bp, Homo sapiens
aaaactatgttcgatttattgaagatgagcttcaaattccaggcatcaagcatgatggaaccatgtgtgatacctgccgccagcaaccaatcattggcat

SEQ ID NO: 50250 - DNA, 75 bp, Homo sapiens
cctgcattgtggtgggttttacttcaggttatgtacgcttctacactgaggcttttgatgaggccattgctgaac

SEQ ID NO: 50251 - DNA, 82 bp, Homo sapiens
tttaccccctcccccctgagcccgaggtgctgacgtcgcaaaaaaattggatagctctgggcgtggggaggctgagacacgg

SEQ ID NO: 50252 - DNA, 100 bp, Homo sapiens
tcgagtgaatgggcggatctcatatcttcacttggcaaactcaacaagggttcccttctggagaagagtcaccgggtttggttctgtttcccctttctgc

SEQ ID NO: 50253 - DNA, 83 bp, Homo sapiens
gtcagcctcccgccggccgtctccttaacaccgaacaccaatttcgctaaggagtttgtgatcagtgatcggaaggagctgga

SEQ ID NO: 50254 - DNA, 89 bp, Homo sapiens
ccagcatttcatccctcgtcgaaaggattggattggcatctttagagttggcaaaagcagcttttgatgatgcaattgcagaactggat

SEQ ID NO: 50255 - DNA, 75 bp, Homo sapiens
gccccgccaaagaagatcatgcctgaagatccggcactccacccagagcctctttgagtacatgaagggcattca

SEQ ID NO: 50256 - DNA, 82 bp, Homo sapiens
gagcagaggacgacatgttgcttttcgtggaggacattaatgaaatggtacggactgaacgacccgactggcagaacgtgat

SEQ ID NO: 50257 - DNA, 95 bp, Homo sapiens
gcacagctgggtcctgatgaaagcaaacagaaatttgtgctcaaaacccccaaggaattgaatgatctggcacgggaccctccagcacagtgttc

SEQ ID NO: 50258 - DNA, 88 bp, Homo sapiens
tctttggtcaaaagatatggcgccatatcagggaaagaccgttgtttaccttgtggctttccatctgttctttgttatgtttgtatgg

SEQ ID NO: 50259 - DNA, 100 bp, Homo sapiens
ttcagcccaagcctcagatatgggaggagaatcaccagaaattgcatctgatggtctcaagggtcgtgtgtttgaagtgagtcttgctgatttgcagaat

SEQ ID NO: 50260 - DNA, 82 bp, Homo sapiens
attttgatgtcctttcttataagaagacaatgttgcacttaactgatattcagccatccagtccaatggatcagatgggcaa

SEQ ID NO: 50261 - DNA, 76 bp, Homo sapiens
acgtcttatttaatccacatcataggttcagcctggagaaggaaataaagctgctttcaatgacatgagagccttg

SEQ ID NO: 50262 - DNA, 101 bp, Homo sapiens
catatgccaacccacctaactacggaaaacctgatcccaaaattattgaaaacactcgaagggcatgtaatgaatttactacacatgtgatgaaccttctc

SEQ ID NO: 50263 - DNA, 101 bp, Homo sapiens
agtacagaagagtattttgaaaaagcattacaaatatgaagaggcattatttatgaccttttctatggaaagggaaatcctcattgacgattcaatttgtt

SEQ ID NO: 50264 - DNA, 101 bp, Homo sapiens
gataatagctcattttagtagagggcaataaatgccacatgagatgatcacctcagcagaaaactctaaaggtggttatttaagtatttttaaaaattaca

SEQ ID NO: 50265 - DNA, 90 bp, Homo sapiens
ccgctacctgcgtccccccaacacgtctctgttcgtcaggaacgtggccgacgacaccagcgccctcacaaagccaatgctgaggagatg

SEQ ID NO: 50266 - DNA, 98 bp, Homo sapiens
cccggtttgacgcacacggcaccaaacttggctgcttcaacccccaactccactgctggtgcagccatgaactccttgacctctctcgggactctgca

SEQ ID NO: 50267 - DNA, 100 bp, Homo sapiens
ttgacaccgtcctgtgggccataggcccagctgatccacgacaggaacaccgcgtcccacaccgcggcggcagccaggacccaagcgccgcctacgccag

SEQ ID NO: 50268 - DNA, 96 bp, Homo sapiens
tgatgatcacgcagctggctggcttcagtggaccaggtggttctcttcccaaagtggaagccaaattcatcaattatgtgaagaattgcttccgga

SEQ ID NO: 50269 - DNA, 99 bp, Homo sapiens
ctcaaagaagatctatgatacaattcatgatatcagatgttcagtcatgatgattcgggtatactgcaacatccagatggcacagttttgaaacagtta

SEQ ID NO: 50270 - DNA, 98 bp, Homo sapiens
ctgaacttctcatgaaactctcagtgaacacctacctcttcatgatgcaagcccaaggcattctgatccgggacaacgtgagaacaatcggtgctcag

SEQ ID NO: 50271 - DNA, 50 bp, Homo sapiens
tgggaggccgctgccgtcgcgcgccttgcctcctgacaaggtgatccggg

SEQ ID NO: 50272 - DNA, 90 bp, Homo sapiens
aaaaaatgcagtgtaagaagcattggaagaggtttttatctgagcttgaagttttactactgatgttcacggaagaccagggtgtagatg

SEQ ID NO: 50273 - DNA, 100 bp, Homo sapiens
cccaggggagttctctgtgtctgtgaagtctctaattaacagaagatggcaaagcccagccacagcagctatgtccttcagcagctaaacaaccaaagag

SEQ ID NO: 50274 - DNA, 96 bp, Homo sapiens
gttcattgtttgtcaccacaaaaaggacagaatattgtcctctctggaggttcaaccatgttcagggactttggacgtcgcttgcaaagagatttg

SEQ ID NO: 50275 - DNA, 74 bp, Homo sapiens
gagcagctttggataatgacgacagcaacccgaagacagggaaatttagaggctgacccgcggctgattgagtc

SEQ ID NO: 50276 - DNA, 100 bp, Homo sapiens
tccacaaagggacctgatgaagcgaagatcaaggtgcagacacgcagtgctgatgagcccatgactacctttgtcttatgcaatgaatgtggcaatcgct

SEQ ID NO: 50277 - DNA, 74 bp, Homo sapiens
ttcgctccaagttccgatctggaatcagagatcattgatttcttcctgggggcctctctcaaggatgaggtttt

SEQ ID NO: 50278 - DNA, 101 bp, Homo sapiens
ccatatatccaacactgcaaagcatttttatggacaacgaccacaggaatctggaattttattaaacatggcctgggcagtttttaaagggaagtttaaag

SEQ ID NO: 50279 - DNA, 82 bp, Homo sapiens
ggacagccagccctcgctggaccagaccatggccgcggccttcggggacggcaaaacagaacagaaaggcggagataaaaag

SEQ ID NO: 50280 - DNA, 100 bp, Homo sapiens
cctgaagccggcggacggttttcgtacgggcggccgtgcgcgaggcgaggtcctcatcaacctggccctgttgatgaaggaggcagagcttcgaggcagt

SEQ ID NO: 50281 - DNA, 83 bp, Homo sapiens
gaaccctggtcaccgtctcctcaggaccaggaatcaccttcaagcctatgtcgtgaggctttggcagaaattaagaaggaaat

SEQ ID NO: 50282 - DNA, 82 bp, Homo sapiens
gcgcccggattggggatgagtatgcggaggacagctctgatgaggagggtttccaggcctgaggtgcccgccctggccccag

SEQ ID NO: 50283 - DNA, 100 bp, Homo sapiens
attttacctcagtataacattagcgtgcctacagcaggttttcaaatggaacattttgatgcatcacttagtacctatttcaaggcattgctaggccctc

SEQ ID NO: 50284 - DNA, 98 bp, Homo sapiens
gaagaggctggactcggattcgttgcctgagtgccggagcatcagctcacacaggaggaggagatggaagaaggctccttgagttggagggtctacca

SEQ ID NO: 50285 - DNA, 83 bp, Homo sapiens
ggggcgggcgccgcgggacctctccgggccatggttggaatcgaagcctcttaaaatggcagatgacttggacttcgagacag

SEQ ID NO: 50286 - DNA, 97 bp, Homo sapiens
cgccaccctcccgcacttgagggactgaagccatgcaggacccctgggcagacctcttcagaaatagcagcttccctctgtgtgttgcagtcctgtg

SEQ ID NO: 50287 - DNA, 83 bp, Homo sapiens
accacaggccctcgttgcccagatgggaacgcccttttgcttgtgactggcagggctgcgacaagaagttcgcccgctccgac

SEQ ID NO: 50288 - DNA, 75 bp, Homo sapiens
ttgcaggaagtggatgagttccacctcattttagagtatcaagcagatggttgaaaaagaaggttatctgcaaaa

SEQ ID NO: 50289 - DNA, 101 bp, Homo sapiens
ccagtggccacagcatctttgtctagccccagtgcagggactatgttcggagtgaactggagtttgcctatgagggaccaatgtatttagaacctctctct

SEQ ID NO: 50290 - DNA, 96 bp, Homo sapiens
tggaggttcgcggctctaacggggctttctacaagatctgactgcagccatgagcagcaatgagtgcttcaagtgtggacgatctggccactgggc

SEQ ID NO: 50291 - DNA, 90 bp, Homo sapiens
aaaaggagaaggaagaagcagatcttcttttggagcagcagagactgtttaaggaagaaatctctaaacgttttaaatcacatactgacc

SEQ ID NO: 50292 - DNA, 99 bp, Homo sapiens
agtacctgcagaaggtctctggagacatcttcagcaggcttgaccactatgctatcatcaagtttccgctgaccactgagtctgccatgaagaagatag

SEQ ID NO: 50293 - DNA, 74 bp, Homo sapiens
ccgggagtcgcgcttcttccccactcccgagacaggcgatggatgactacagtgtgatcggccgctccctgttc

SEQ ID NO: 50294 - DNA, 100 bp, Homo sapiens
gacgctgctcaaaacctcgctccggaaaggggacacctggagtcattgcagttttcagtagaggtgtacttctgagaagtggcttcttgggtcttcatgc

SEQ ID NO: 50295 - DNA, 100 bp, Homo sapiens
ttcttccacttcctcagaatgtgaaggattatttactcgatgatggaactctggtggtttcaggaagggtgtccggtggagagctgtttgaccggatagt

SEQ ID NO: 50296 - DNA, 85 bp, Homo sapiens
gtgccctacttcaaggataagggtgacagcaacagctcggcgggctggaaggttaaaaatgtgtctgcaggcacacaggacgtgc

SEQ ID NO: 50297 - DNA, 83 bp, Homo sapiens
cgggaacccaggagacaggccacacagatgctaaaactgcagaatctggcgttcgctgagcggcgcgagcggagcttcagccg

SEQ ID NO: 50298 - DNA, 75 bp, Homo sapiens
cttgcacttcggtatgcagggaggcagggaaaaagacctcgatgaagttctgcagacccactcagtgtttgtaaa

SEQ ID NO: 50299 - DNA, 100 bp, Homo sapiens
gcttggtgtcctcctggcctcagcaacctgacaattctgtcgtgtcccgtttacagaagcacttgcagaactcatcagaagccaccccgcttatcagcag

SEQ ID NO: 50300 - DNA, 74 bp, Homo sapiens
ttgacctgacgaaattccacaaaacctcttctggaaacagttgcatgagcccgagaagaatgccagagaaataa

SEQ ID NO: 50301 - DNA, 80 bp, Homo sapiens
ggcccacagaccaagtcctccacagagggcgagccagggtggagaagagccagcccagtttttcagaagaagtgaagtca

SEQ ID NO: 50302 - DNA, 100 bp, Homo sapiens
gaaactaggtcgatggtcggcggcgcccggatgggcagctgaggtatgtcgagagtaccaacgtggcaattgcaaccgaggagaaaatgattgtcggttt

SEQ ID NO: 50303 - DNA, 100 bp, Homo sapiens
aaatgatcttagttctggaatagcattgatgacggggagccttcctggctttgtcgacgtcatcaggaacctcaattctcctgcactgctggaagacagt

SEQ ID NO: 50304 - DNA, 74 bp, Homo sapiens
aaagagatgagagaccactctttccccaaaagaagctcattcacacagaagacccatttaatgatgaacatcag

SEQ ID NO: 50305 - DNA, 48 bp, Homo sapiens
gccctgaggagtccccgctgcttggccggaagctgagaggaaaagcct

SEQ ID NO: 50306 - DNA, 82 bp, Homo sapiens
gggccgagaccattccgtatggagagccggatgctagtgatcaaagagaagatgtttatattggaaaccacatgccttgccc

SEQ ID NO: 50307 - DNA, 100 bp, Homo sapiens
cagatttccctccagatattcaatcaaaattagatgagatgcagtttaaaaagcagaaactcctcctagaactggaccagtatgccccagatgtggccga

SEQ ID NO: 50308 - DNA, 90 bp, Homo sapiens
ctggatatcttccctttggcttgccagaccttccagaagcacgacttttgttacagtgtttgcagaagccaaacctgaccacagacacta

SEQ ID NO: 50309 - DNA, 50 bp, Homo sapiens
tgcgttcacaggtgtttctgcggcaggtcaaaatgcagatcttcgtgaaa

SEQ ID NO: 50310 - DNA, 75 bp, Homo sapiens
gaagtgtcaaaatccatagatggaaaagatgggagactcatgcatctgtatgccgtgtgcgtggactgcctggaa

SEQ ID NO: 50311 - DNA, 100 bp, Homo sapiens
gaccttccaggtcaagctggagacgcgccagatcacgtggagccggggcgccgacaagatcgagggggccacaggaacgaatttcatatacacctccaga

SEQ ID NO: 50312 - DNA, 96 bp, Homo sapiens
ctgggcagaggcttgggccgccgagctggacccggaccggttttgggaatgtcccagcggaattgtcaatgaggagaacttcaagcagatttactc

SEQ ID NO: 50313 - DNA, 75 bp, Homo sapiens
gaggttccttcaggaggatcagctaaagaggctacaaccatcgatttgagtatcctcgcagaaactgcatcaccc

SEQ ID NO: 50314 - DNA, 100 bp, Homo sapiens
ccggagaggagcatgaatggagcaaaatggcggatcatgtgcaggaattgtcgtgtgaaaatgacgcaacaaatgcaaaatttacatctctgtcagtcaa

SEQ ID NO: 50315 - DNA, 90 bp, Homo sapiens
gcccgtggtccttctccatattcgaggatgaaattgattctgcagtaaagatgttggtgtcattaaaaatgagctacaaagctgccgcgg

SEQ ID NO: 50316 - DNA, 100 bp, Homo sapiens
ctgagttccctgatccccacacctacatcaaaactccggcagcctggcatcctcgctacaacctcattgttgtgggccgatacccagatcctaatttcaa

SEQ ID NO: 50317 - DNA, 74 bp, Homo sapiens
gaatggtcagaccaggaagtttctgctggacggggatgaagtcatcataacagatgtggaaactgaggcacaga

SEQ ID NO: 50318 - DNA, 100 bp, Homo sapiens
cgagctccgggatgctgtactccttgtctttgcaaacaaacagactatcaagtgcatcacagaggggctggcggatccggaagtcagaacgggacaccgc

SEQ ID NO: 50319 - DNA, 100 bp, Homo sapiens
cgccgctgccccggctgcctcctccctgaggttacctacctgggcaaagtctccaccactggcatgcagtttttgtcaggctgcacagaaaagccagtca

SEQ ID NO: 50320 - DNA, 83 bp, Homo sapiens
ccagcatgttgcaaggtctcctgccagtcagtctcctcctctctgttgcagggggatatgagactttctactcggaatatcct

SEQ ID NO: 50321 - DNA, 82 bp, Homo sapiens
ccacgcagaggacgccggaacaccctggaagccgagaaatgggactggtgattgcagctggaagtgcccatgaccgagctgg

SEQ ID NO: 50322 - DNA, 100 bp, Homo sapiens
cgccggcgcgcgaccccatccccatcccggtccctgcagagcgatccccgggcccagatatggacgcagcagagccgggcagccagataagctggtggtg

SEQ ID NO: 50323 - DNA, 75 bp, Homo sapiens
ggtgcagaaggagcgggaggacgaggagctgaacaaccccatgaaggtgctcctgtcccaccggctttgaaggac

SEQ ID NO: 50324 - DNA, 100 bp, Homo sapiens
caccttttgacatgagcatccaggtgttggagcgggccggagagaagtagagtgggctgcgaggagaaggaaacaggcctttcggaggctcctcatccct

SEQ ID NO: 50325 - DNA, 100 bp, Homo sapiens
ctcagtgtggccacgggcttcggctgtgcaaccatcttctggcttttgaaatatcgcctacgaggacaagcagaaactcaagcggaccgagatcatcagc

SEQ ID NO: 50326 - DNA, 75 bp, Homo sapiens
tggaatttcctactgtatcatgatcatcataggagtggagaacatgcacaagaattacatgaatgacagtcttcg

SEQ ID NO: 50327 - DNA, 82 bp, Homo sapiens
tcggcagtccacccaccgccgccgcctcccaggccgcggagctggtgacccagaactgcgaggcttatgaggcccacatgag

SEQ ID NO: 50328 - DNA, 100 bp, Homo sapiens
tatgaggccagccgggaggacatctacaagcggatgaaaggttgtatcaaagttcttaaggaccaacctcctaatagtgtggaaggtcttctaaatgctc

SEQ ID NO: 50329 - DNA, 101 bp, Homo sapiens
ggggtcactgcgacgttcacagaggaacactgccggggcccaaccacaagacgactcaataggaggaaggaactgcaagcacatgttgaccagataactga

SEQ ID NO: 50330 - DNA, 75 bp, Homo sapiens
caggcgtgcgcggacggtgtgcgggtttgtttaagcatcttaaacacgtggcatggaagaccagaagagaagtgg

SEQ ID NO: 50331 - DNA, 98 bp, Homo sapiens
agcgctccccccattggacaagtggaaggattatacttactcagctgttaagagtaggcaatttcttcagttcttccacaagaaatcaaagcaacagc

SEQ ID NO: 50332 - DNA, 83 bp, Homo sapiens
tgccgctgtcgtctttgcttcagccgcagtcgccactggctgcctgagcttcggaaccaaaaagaagcttcccagagccgggg

SEQ ID NO: 50333 - DNA, 82 bp, Homo sapiens
ttcagatttaaggctgacaggaagactgatgttcatggggcaatgtgtatgtgaagtgcccatcaattgctgcagctattgc

SEQ ID NO: 50334 - DNA, 75 bp, Homo sapiens
ggccgccaccaggtcaccctggaagagtcgctggccgaagctaattcaaggtagtgcctggtggtgtggaacaat

SEQ ID NO: 50335 - DNA, 101 bp, Homo sapiens
gccttgcagtgggaaatagaatttgatcataatagatttaaaaatatagaggaatcttggatccaaaaatatgacagagcaattgtatgatggctatgatg

SEQ ID NO: 50336 - DNA, 100 bp, Homo sapiens
ggcttctgctgttgctcttctccgccgcggcactgatccccacaggtatggcctcacaagtcttggtctacccaccatatgtttatcaaactcagtcaag

SEQ ID NO: 50337 - DNA, 100 bp, Homo sapiens
gacaagctttttgtaattgatgctttgtattcagatttggttgatgaagacctttcacatttccaatctggatcacctcctgccccaaatggttttaaac

SEQ ID NO: 50338 - DNA, 74 bp, Homo sapiens
ccaggtgcagcagcaaggagaacattctcagagccacagccaaaggattacctgatatggattcttcgatcctt

SEQ ID NO: 50339 - DNA, 100 bp, Homo sapiens
caacatcataaatctggctttaatgacaacagtgttaaatatcagcaaagaaaacatgaccctcacagaaaatgtgccatggagaactgggaccttgtta

SEQ ID NO: 50340 - DNA, 88 bp, Homo sapiens
cttggtcctgcagcttataatgttccattgccaaagaaatcgaaaccgaaacttcattgccccttcaatgtgggaatccagccagacc

SEQ ID NO: 50341 - DNA, 75 bp, Homo sapiens
caggaagcaaaattgaagaggattttccacacatcagatcatgcagcaacaggaactggcacaaatgagacagcg

SEQ ID NO: 50342 - DNA, 50 bp, Homo sapiens
gccgtggaggcagaggtggcatggggttttttgcatgtctgacacccatg

SEQ ID NO: 50343 - DNA, 74 bp, Homo sapiens
aagatgcaccggttccttttgcagacaacagtgagctgggacggagacaagctccagtgtgtgcagaagggtga

SEQ ID NO: 50344 - DNA, 101 bp, Homo sapiens
gcgaaacttacctgaaggggttgccatggaagtaacaaagctctctgatgtaaaggatggagtaaatcaagcagcacctgcatttggatttggcagcagtc

SEQ ID NO: 50345 - DNA, 74 bp, Homo sapiens
aagtgcagacagcagcttcatgatattactgtaccgttagaagtttttgaatgccttcaattaagttgcagagt

SEQ ID NO: 50346 - DNA, 98 bp, Homo sapiens
cagagtccgcggccggggcgcgggaggtgcactaggccttccaatgagggggatgagcaacaatacccctcagttaaatcgcagcttatcacaaggca

SEQ ID NO: 50347 - DNA, 118 bp, Homo sapiens
ccccgggctcggcggcggcggccaggtccctgctgaatcacacgccgccatccgggaggcccagggaaggtgctggagaatctggtaaaagcaccattgtgaagcagatgaggatcct

SEQ ID NO: 50348 - DNA, 90 bp, Homo sapiens
gtcctgtcacaatgggagatgaaggaggacttaggcttttaaggataccggaaaaacacccgtggagccggaggtggcaattcaccgaat

SEQ ID NO: 50349 - DNA, 100 bp, Homo sapiens
gaggcaccgggatcgtgaccgagaccgtgaccgagagcgtgaccgagagcgcgaatatcgtcatcgttagaaggaaccaaccggtgagccctctcctaag

SEQ ID NO: 50350 - DNA, 83 bp, Homo sapiens
gcttcttcctctaccacatccacctgtggatcacaggaggaggcctcaggggggcccacagcccccaaagctgagagtggtcg

SEQ ID NO: 50351 - DNA, 151 bp, Homo sapiens
ctgccgccgccagggtctgcagggcctgggccgccgctgctacctgcagcgccgtgtggcacgacacaaaaatcagaaaccagcctggacaccaagtctgtgtcagaaggccacctcaagaggaacatcgtggtgaagaccgtggagatgc

SEQ ID NO: 50352 - DNA, 98 bp, Homo sapiens
agaaaagtagaaggaaaaacagaacgttgcaaactctggaaaaaaacttgggatattgtacctgtggatgcatcttatgaagtaaaagaactatatgt

SEQ ID NO: 50353 - DNA, 74 bp, Homo sapiens
ccagatcagcgcagacagtggtgtgagcctgacgtctagttcccagctctctgatgtaaaggatggagtaaatc

SEQ ID NO: 50354 - DNA, 90 bp, Homo sapiens
gaatcttcctttgagctccggaaagttgcttctgggagccaatggaaatgcaaacatcaactcaaaacttcgcttgcagctatattaccc

SEQ ID NO: 50355 - DNA, 100 bp, Homo sapiens
cgaacggggcgagcctggaggattgtcactccaacctcttttcgctggctgtggaaaatctctgttctcacaaagtctccccaatgctctacaagcaact

SEQ ID NO: 50356 - DNA, 101 bp, Homo sapiens
ttactgtcctcaaatacgtatattactcttccatggatgccccttgataacagtcaggaagcatctaaatatggtgtcctccggaaaaaagtattccagga

SEQ ID NO: 50357 - DNA, 102 bp, Homo sapiens
ctcagagagggaagagattcagccagcacactcctcgcgagcaagggggatatgagactttctactcggaatatcctgagtgttgcgtggatgtaaaaccca

SEQ ID NO: 50358 - DNA, 83 bp, Homo sapiens
tggacatgaagaggaggatccacctggagctgaggaaccggaccccggcagctcgttacagtgtttctgccacctctgtacaa

SEQ ID NO: 50359 - DNA, 75 bp, Homo sapiens
atgaagacacgcttcttctggaagaccagccaacagcactgccagtgaaagatgtagaagataaacctgaacaac

SEQ ID NO: 50360 - DNA, 101 bp, Homo sapiens
catggtgtggggttggtgtgattagcttcgcagtctggaaagctttaggagttcacagtgttggatggcaagcatgtggtgtttggcaaagtgaaagaagg

SEQ ID NO: 50361 - DNA, 100 bp, Homo sapiens
ggacaggctgcattggggccaaacacagaatcagcaaagaggaggccatgcgctggttccagcagaaggctattttcaaaatgatcactcccgaggacgt

SEQ ID NO: 50362 - DNA, 101 bp, Homo sapiens
gcggcagcagcggcaggagggcagagatggaacccacctttccccagggatatccaggaggtgcagggctacgtgctcatcgctcacaaccaagtgaggca

SEQ ID NO: 50363 - DNA, 50 bp, Homo sapiens
cgcatggcagccggttccggttcgggcatggtgctgatgtgaaatgtgta

SEQ ID NO: 50364 - DNA, 98 bp, Homo sapiens
taaataccttccttaatcgtggactcatctacgtagaactaggccagtatggctttgcactagaggagtcgatagcagcagttggtgacgagatggca

SEQ ID NO: 50365 - DNA, 100 bp, Homo sapiens
gtcctacctcagcagcagtggcagcaccagctaccaagaaatattattcatctgtgccagaggaaggaggggcaacccatgtctatcgttatcacagagg

SEQ ID NO: 50366 - DNA, 102 bp, Homo sapiens
cgggagcgcaaggtcgccctcaaggccatgatcaaaacgccctggccaacgtcaacattgggagcctcatctgcaatgtaggggccggtggacctgctccag

SEQ ID NO: 50367 - DNA, 83 bp, Homo sapiens
ggaagatgacaacccaccatgccccagggtcggtcagagctgacgatgaagttgatgtggatggtacagtagaagaggatctg

SEQ ID NO: 50368 - DNA, 100 bp, Homo sapiens
agataatgaaattttcaccagaaagtgttgcagcgtttatagcagtccttggcattctttccattattgcacaggtatttcatggaaacttggagagaga

SEQ ID NO: 50369 - DNA, 50 bp, Homo sapiens
aacatggtgcggtcggggaataagatatacctgtgtttcccacaatcaca

SEQ ID NO: 50370 - DNA, 101 bp, Homo sapiens
atgtctctagtggcggaagccttcgtctcccagattgcaggttctgggaagttctggattgtttaataaccatggactccaagtacagcagcaacagcaaa

SEQ ID NO: 50371 - DNA, 90 bp, Homo sapiens
tttggctcctaaagattttgcagaacagagatgacatgccagcccagactttcatgggctatcaacagcaggacgcccatgaattcatgc

SEQ ID NO: 50372 - DNA, 75 bp, Homo sapiens
atacataagatcgtagccagacccccaggtcgcagaaccctagctgtaatcactaaacttgatctcatggatgcg

SEQ ID NO: 50373 - DNA, 100 bp, Homo sapiens
cggcggccgaggcggcgacggaggaaacagaagatgtgcaccgtccaggtgaggttagagctggggcatcgcgcccaactgcgcaagaagcccaccacgg

SEQ ID NO: 50374 - DNA, 100 bp, Homo sapiens
cagaattcttcagattctagttttgagaagaatgtggaaataacggagcaacttgctaatggcaggcattttacaaggagcagccagggcttcctgcatc

SEQ ID NO: 50375 - DNA, 75 bp, Homo sapiens
ccgggagccgacagcttcgcgccggtacaaaattggacagctgtacatgatcagcaaacacagccatgaacagag

SEQ ID NO: 50376 - DNA, 80 bp, Homo sapiens
cctggctctgctcccccagactctgttggatcagaaggtcaagagcaccaaaagtggtctgaagtcagagaagttggtgg

SEQ ID NO: 50377 - DNA, 82 bp, Homo sapiens
gtggatctggattctaaggcaacacttccttgaagaaacaagcttacagacataaatgagcatattctgatgtactctttgg

SEQ ID NO: 50378 - DNA, 51 bp, Homo sapiens
ctgcagcggagcccttaagcgaaaagttctaggaactattttggtgcacaa

SEQ ID NO: 50379 - DNA, 80 bp, Homo sapiens
ttggaagcagccgatccagcctgcggagcctgtggggcagggcatcattgcagaatacaacaaaatcaatgatgtaaagg

SEQ ID NO: 50380 - DNA, 80 bp, Homo sapiens
tccaagttagctgacttctgggggaacaacaacgagatcctcagtggcagcggaggaggagaaagagatggacctcccgg

SEQ ID NO: 50381 - DNA, 100 bp, Homo sapiens
cttctccaaggaccacgagcaactctacatcatgtcagagaggcaggtagatcccaatattgtccttcatgcctctgtttccattggaaagtggagtttc

SEQ ID NO: 50382 - DNA, 100 bp, Homo sapiens
ggacagcaggagcagtggtgctgtcagcgcggccgtcggagacatgggagacccggggtcggaggccacggaaaggtatgatatatttgatccaagacag

SEQ ID NO: 50383 - DNA, 89 bp, Homo sapiens
caaaatgcgttaggaaaatgtgatgcatgtctcagtgatcccagctctcctgttggcttcgtgcttggggtagatcttcttcacatatt

SEQ ID NO: 50384 - DNA, 122 bp, Homo sapiens
gcttcctggcagaatttgggagctgtttattgcagcactgttgtgccctctgatgctcctcagagaaattttgaaattgccttcaagatgtttgatttgaatggagatggagaagtagatat

SEQ ID NO: 50385 - DNA, 98 bp, Homo sapiens
ttctgcccactctgcggagttagcagtcacgacctccagcacagctgtgctccattgaagtgacttgtgaatcagccagtgtgatggctgcgacactg

SEQ ID NO: 50386 - DNA, 50 bp, Homo sapiens
gcctccccgggtgcctccgcgactgtacaatttgttcaaggaatttttgt

SEQ ID NO: 50387 - DNA, 100 bp, Homo sapiens
ctcagttggaagcagccgatccagcctgcggagcctgtggggcaggcgttgacccggacgacacctataatgagaccccctacgagaaaggtttctgctt

SEQ ID NO: 50388 - DNA, 95 bp, Homo sapiens
gctgttgccatgaggcgaggctagggaggacctcacttccccggggtgtaataatgttaactgagatccctaaagaagtggctgacatctttaac

SEQ ID NO: 50389 - DNA, 111 bp, Homo sapiens
gaagatgacgattcagagactgaaaaacctgaggctgatgacccaaagacaatgcagatcttcgtgaagactctgactggtaagaccatcaccctcgaggttgagcccagt

SEQ ID NO: 50390 - DNA, 80 bp, Homo sapiens
taaattggaaggatgcacaagttccaaggttacgtttcaatatggccggaacacactcattcagttcgaagactttggaa

SEQ ID NO: 50391 - DNA, 98 bp, Homo sapiens
ttcgatcagagatcggcggagaccctcgaagtgcgcaaacttgacactcaccctgaccgatgccttcaattaagttgcagagttctgatggagagata

SEQ ID NO: 50392 - DNA, 82 bp, Homo sapiens
ggacaacattcagacccatttccagtcatgaatgatgtgatgccagccacttactgtgaaattgatttagataaagaaaaga

SEQ ID NO: 50393 - DNA, 95 bp, Homo sapiens
gggcggtccgttgccaaagccaggtttattcttcagtccaaggaagcaattcacagtcagctgttagagaagcagaaaatagcagaagaaaaaat

SEQ ID NO: 50394 - DNA, 75 bp, Homo sapiens
gtgacaccaagataagtaacgagatgttgcagtaaagatcctaaaggttgtcgacccaaccccagagcaattcca

SEQ ID NO: 50395 - DNA, 98 bp, Homo sapiens
tgttatcaacttaaaagatgccacctctaaggtcagtttaggggctggtgcaaaggatgagttgcacattgttgaagcagaggcaatgaattacgaag

SEQ ID NO: 50396 - DNA, 75 bp, Homo sapiens
aggcgagcgagcggctaggttcgtgatctggagagacgctcaggagctgatggtacacacatggatggtgatcaa

SEQ ID NO: 50397 - DNA, 74 bp, Homo sapiens
acagatctgtggcccagtacactggggggattgccaagatgcagaggccaggatgtgggcccagccctgtgcca

SEQ ID NO: 50398 - DNA, 100 bp, Homo sapiens
gcaagaaacatatactgcttacctcattgaaacaagggcggcgactggcggcgcgatggacctgaccgggctcctgctggacgaagaaggcaccttctcc

SEQ ID NO: 50399 - DNA, 49 bp, Homo sapiens
agacaggtggcgacggcagaggagaatgtatcctgtcaggtataatgtc

SEQ ID NO: 50400 - DNA, 82 bp, Homo sapiens
cgagcacagagcctcgcctttgccgatccgccgcccgtccacacccgccgccagggttggggtgctggaggactgcttcacc

SEQ ID NO: 50401 - DNA, 83 bp, Homo sapiens
cttctggatattttacgggaaagagctcaggcatttgaaaggatgatgagtccaactggttctaatcttaagtctaatcattc

SEQ ID NO: 50402 - DNA, 75 bp, Homo sapiens
tgcagttggccttcatcgacttgagacaagtattgtgttggctgcgtgccaggccttggagaacagcacgtcccc

SEQ ID NO: 50403 - DNA, 50 bp, Homo sapiens
tgattgccaggtgtttttgataaagctgtgttggggtggaagaggaggag

SEQ ID NO: 50404 - DNA, 100 bp, Homo sapiens
tgatatcggtggtaacgacggcctcagcaggcggggaagatgaaagggtttgcctgcaatgagatttcattctctacatttaaaggacatcctttctgag

SEQ ID NO: 50405 - DNA, 100 bp, Homo sapiens
ccaatggacaccttctaagagtttggcgagtcagtgactgaagcgcccgtccattccaagcctcctgacaaggtgatccgggcgggccccgcaggaattt

SEQ ID NO: 50406 - DNA, 100 bp, Homo sapiens
gaagaaacgcctggtgcagagccccaattcctacttcatggatgtgaaatgcccaggtcctagccaatggtctggacaacaagctccgtgaagacctgga

SEQ ID NO: 50407 - DNA, 87 bp, Homo sapiens
tgatcctgattatattaatcagtatgtcatatggatggttgaattctcttacccgcccctgattccaggagatggacatgacagcca

SEQ ID NO: 50408 - DNA, 82 bp, Homo sapiens
aaagaaagagaaaaagcagaaagtagatgaagatgagattcagaagatgcaaatacagattctgttcatcttgctctgaaat

SEQ ID NO: 50409 - DNA, 98 bp, Homo sapiens
ttctcgaaaaaaaccttcaggcggcccatggagttggtcaaacgccatgctggggtgctaggacttggtgcatgtgttctttctagtccttacgatgt

SEQ ID NO: 50410 - DNA, 75 bp, Homo sapiens
aaaatcttatgattatgaggcatgggcaaaacttgatgtggacttaaccaccaccatgtcgagcaaaagaacaaa

SEQ ID NO: 50411 - DNA, 100 bp, Homo sapiens
atgctgctgatgctgaagctgtgcaccgaggtccgtgtggccaacgagctcaacgccaggcgccgctcctttacagggagtgaggattctttggacacca

SEQ ID NO: 50412 - DNA, 75 bp, Homo sapiens
aatatcaaagaagtggggatttcaaaaagatgatagaggtactgacaacaactgactctcagaaactgctacacc

SEQ ID NO: 50413 - DNA, 127 bp, Homo sapiens
atcctcaagcgatgtttgatattgaatatttcagaaaagatccaagaccattcttcaagtttgcaaagatgaagactcttaagatgacagaaggtgatttttctggtgatcgaggacttccggggta

SEQ ID NO: 50414 - DNA, 99 bp, Homo sapiens
cttttctaaagaggactccaaaggaaggactggtcatctctttcatatctcaaaaccatggctcagatttggagtccaggaatgagactaagcatttat

SEQ ID NO: 50415 - DNA, 75 bp, Homo sapiens
ctggtgggagttcaacgttcacagcaagctcaagctgggccggtattaccgcaccaaccacactgtgatgaccat

SEQ ID NO: 50416 - DNA, 90 bp, Homo sapiens
aaggagctaaagcagcgtgcgttcagccctggggacgttcccaattagaggctttcagatttatgatgggcccattcatctcacaaggag

SEQ ID NO: 50417 - DNA, 100 bp, Homo sapiens
accagctctctcttcagaacagagccaatggcttggaatgaggttgtggcagcactgcctgaaggtatgagaccagattctaatctttatggttttccat

SEQ ID NO: 50418 - DNA, 82 bp, Homo sapiens
cttggactgagtcctgcaggacacagagatgccctgtatccaagcccaatatgggacaccagcaccgagtccgggaccccgt

SEQ ID NO: 50419 - DNA, 74 bp, Homo sapiens
ctctgggccaccgcaacccatgggtggccagggattctgatggatatggcagtggacgtggatttggggatggc

SEQ ID NO: 50420 - DNA, 100 bp, Homo sapiens
cctgctgaatcacacgccgccatccgggaggcccagggaaggatgcaaggtgttgtaaaccgactgtccaagttactgaaacctgggggaatgctgttat

SEQ ID NO: 50421 - DNA, 80 bp, Homo sapiens
caagcacgggaagaagcagctggacccgctcaccatctacggcatccggtctggagaagaagcaggcgctccctccattc

SEQ ID NO: 50422 - DNA, 96 bp, Homo sapiens
ctgggcaccagcaggacccgaggccaggagccaggggcccagaaggagacgttctcttccagatggctgaagtccacaggcagatccagaatcagc

SEQ ID NO: 50423 - DNA, 100 bp, Homo sapiens
gatcaaacaattgtagatcccttcagttcaaaacataatgtgattgcctcaagacgttcagaagacagtattaaagggaatcattaacagcctgttacga

SEQ ID NO: 50424 - DNA, 75 bp, Homo sapiens
cgctggctcaggagtgaagctgcagaccttcatgacgcagaagaaacatgtccttcattcaccaggctgagcttt

SEQ ID NO: 50425 - DNA, 100 bp, Homo sapiens
atcggctgacactgctgcctccagctagttatttcgtcctcttccgttcttcacccctacaccttggagcatagaatgtcaagctaaccaggcgtccgct

SEQ ID NO: 50426 - DNA, 88 bp, Homo sapiens
atagtcaactgcgtggaagagaagctttacattcagcccatgatgggggccggcctgaattatgaatgttaccgattcggcatttccc

SEQ ID NO: 50427 - DNA, 80 bp, Homo sapiens
gtcattgctgacaatgaatacccatcccgggtggcctttaccttgctggagaaggttggatggcaagcatgtggtgtttg

SEQ ID NO: 50428 - DNA, 101 bp, Homo sapiens
ctacagggcaaccatgaccgaggagagctctgacgttcccagggagttgatagatgtctttggtggacttgggaaagaggttgctagaagcagcaagaaaa

SEQ ID NO: 50429 - DNA, 82 bp, Homo sapiens
tgggaaatggcggagtatctggcctccatcttcggcaccgagaaagacaaggtgtccgcaatgttgccagtgtctgtctgca

SEQ ID NO: 50430 - DNA, 111 bp, Homo sapiens
gctccgggcgcggggaagtcatgctcgcttcacggaggcaatagctagccgatatcgggaggcaattcagaagtgggatgaagcactacagttaactccaaatgatgctac

SEQ ID NO: 50431 - DNA, 101 bp, Homo sapiens
aatagtccagaatgtcacaggtccagggcagaggaccaacatgggcattttgtttatgagcaaggtggggctgcggcagttggacatgtccttgttgtgcc

SEQ ID NO: 50432 - DNA, 75 bp, Homo sapiens
cctacgaaagaaagctcatcgaggaaatgaatggggtgctgaaaggaatgctctcagaatggttttcctccgggt

SEQ ID NO: 50433 - DNA, 75 bp, Homo sapiens
caggcatcctactatgcttcctgagtgcttctttcttggagctgaccatgatgatgaacaacatgggtggtgatg

SEQ ID NO: 50434 - DNA, 50 bp, Homo sapiens
tctcctgagtagctgagattacagggatcatggcccaagttgcaatgtcc

SEQ ID NO: 50435 - DNA, 100 bp, Homo sapiens
cttctgccgtctcagcctgggcgtcgctgaagctgtgtctgcggggaggcagcggaaggcggcaggccccaggcagtccttgaaagagaagcttgaaaag

SEQ ID NO: 50436 - DNA, 74 bp, Homo sapiens
cgctgtgcggtgtccccgtcttggtgctggccaacaagcaggatgtggaggaagtgcccaccgcgtgccccgat

SEQ ID NO: 50437 - DNA, 100 bp, Homo sapiens
gaagaagcatgtcgaattttagtggacaatctgtgtgatatggagatggtcaacaaagtgctgcgactgatagattggggtctggcagaattctatcatc

SEQ ID NO: 50438 - DNA, 122 bp, Homo sapiens
cagggaggagaccggcacccagacaggtggcgacggcagaggagtattaatctctggagaagacacatccacagttagcactttcttcagatgctgacgctcggtgaacagttgcctttggt

SEQ ID NO: 50439 - DNA, 98 bp, Homo sapiens
atcttgggtttaccgtatttccagattcatgcttaacaagtctagcatcatcatcacttaaacaaattcttggagattctttttcaccaggatctgag

SEQ ID NO: 50440 - DNA, 100 bp, Homo sapiens
cagcgaacctcgagaccaacgtggaggagctgtgggtggaaggttccagttacagctatatcagagaatgagttaatctcctcagaaatcactaaatact

SEQ ID NO: 50441 - DNA, 100 bp, Homo sapiens
ctgaaacttctcctcgagagccgagatgagcatctgcacgagatggcactggagcaaatcacggcagtcactacgatcctgcaccctgaggaatgcatgt

SEQ ID NO: 50442 - DNA, 100 bp, Homo sapiens
gcgcggaggagagaaggaagtgctgatgtggaggttgcaatgaatgtgtatgagttatcatcagctgccggattaccttgtgagattgatcctgcattgg

SEQ ID NO: 50443 - DNA, 82 bp, Homo sapiens
cagagacatgctgaaacatcgaagaagccccatgtgccactcccctgatctgcagcttcggtaggccggtggacctggagaa

SEQ ID NO: 50444 - DNA, 90 bp, Homo sapiens
gagcaagaagcagcccaaagtcgaatgattcagacttgcaaggaggcaagtgaggcctatctggttggcctttttgaagacaccaacctg

SEQ ID NO: 50445 - DNA, 99 bp, Homo sapiens
atagagcaactgttgaactcagctgcctgtaggaagaggagttgtacgcatgtcagagaggttgcaggctgttttcaatttgtcagtttgtggatgatg

SEQ ID NO: 50446 - DNA, 97 bp, Homo sapiens
aggttaaactacagaacaacatatcgtatcagatggcagacatacatcatttaaagggatccagcaagtaggcaatgaagcctatgttatagggctc

SEQ ID NO: 50447 - DNA, 87 bp, Homo sapiens
ggacccgaggccaggagccaggggcccagaaggaccttctggaccctgcacggtggcggatgctgatccagcagttccggtacgaca

SEQ ID NO: 50448 - DNA, 75 bp, Homo sapiens
taaagaactccctcaagtttcatttgtgaagggtgcaacaccggaggatttcagcaacctcccacctgaacaaag

SEQ ID NO: 50449 - DNA, 50 bp, Homo sapiens
cgaagaactcctaaacaggtggatccagctaaggcaggaacggatccaaa

SEQ ID NO: 50450 - DNA, 100 bp, Homo sapiens
ggaaaagaaggtcatgctgctgctgcgggtctgcaagctcatttacacggtcatggagaacaactcagatatgaggaaagcactttccagggatactgag

SEQ ID NO: 50451 - DNA, 51 bp, Homo sapiens
tctggcaatacaaactttctgctttcaatatttggagttcttacaacatgg

SEQ ID NO: 50452 - DNA, 75 bp, Homo sapiens
ctgcctttctatttattttacctcagtataacattagcgtgcctacagcagattatggattggatatgtctactt

SEQ ID NO: 50453 - DNA, 82 bp, Homo sapiens
attagtagctaatgtgattacagcaggagattatgaccttaacatcagtggctggctacagcaaacatcattcaagatgtcc

SEQ ID NO: 50454 - DNA, 82 bp, Homo sapiens
gtggacaagtttgcagatcgggagcgcaaggtcgccctcaaggccatgatcaaaactaaaggcatgacttcctggcaccaca

SEQ ID NO: 50455 - DNA, 75 bp, Homo sapiens
ggcagctcgggactgagtgcaaggtccggtgtctaaaagactatggagaatttgaagttgatgatggcacttcag

SEQ ID NO: 50456 - DNA, 135 bp, Homo sapiens
taggaagcctggacgtgccaaggcccaacagcagggtggagatcgtggctgccatgcgccggatacggagaatgtgatcaatgggcaggactacgaagtgatgatgcagattgactgtcaggtgatggacaccag

SEQ ID NO: 50457 - DNA, 90 bp, Homo sapiens
gccttttccgttgccggtgccggcctagcgtcctggaattacttcaatcaagatctcactggcatcgaatctatggatcagtgtcgccat

SEQ ID NO: 50458 - DNA, 100 bp, Homo sapiens
gtggctacccacccttcgtgggtcactgcggggccgactgtggctgggaccggggcgaggtctgcagggtgtgccagatggagtctctctctgttgccca

SEQ ID NO: 50459 - DNA, 75 bp, Homo sapiens
gtcatcaacacaagctaatagcattgttctggaatcatcaccattcttcacggaaaaatccagcaaagcctactc

SEQ ID NO: 50460 - DNA, 74 bp, Homo sapiens
gagcacgccggccccgcgcgcgcctcgaggccgagtcaaggccttcgtcaagatggttggacaccacgtcgcct

SEQ ID NO: 50461 - DNA, 100 bp, Homo sapiens
cggatggccccaggtgtaagcgcagaaagcaggcgaacccgcggcgcaataacggatatgtgatggcgtccagtttggagctgggataaggttcctgtag

SEQ ID NO: 50462 - DNA, 90 bp, Homo sapiens
gtaactgaagtggtgaaaaactacagaggagaggactactgtaattcccagccttgttcctttataggtgaccaagaatatggcccaggt

SEQ ID NO: 50463 - DNA, 74 bp, Homo sapiens
tccctcctgctgtcaggctacatcagcaaagggtctctagtgatccctgaaaagttccagcatattttgcgagt

SEQ ID NO: 50464 - DNA, 75 bp, Homo sapiens
acgagggccacagtgggattaaaaagaccactgaggagcaggtgcaggtgccatcgcctgcaggattctttattc

SEQ ID NO: 50465 - DNA, 100 bp, Homo sapiens
cagcttgtctgccatccccagactacatggtcaccgccaggactgaatgttacatcactggctggggagaaacccaagactctatgtttgggaatgggaa

SEQ ID NO: 50466 - DNA, 82 bp, Homo sapiens
ttcggtagccatggcacaagaatataggtcaacatatttcactggcacctattcacaagcttgaagaagctctgtatgaata

SEQ ID NO: 50467 - DNA, 101 bp, Homo sapiens
tgctgggtggatccggatcgcatggaagacgcagcctggccgcgctctcccaaccaagatcactccatggatgaaatgacagctgtggtgaaaattgaaaa

SEQ ID NO: 50468 - DNA, 96 bp, Homo sapiens
gcctccgtggtgaagaggtgccggacccgatgagctcgggagtccaccatcgctctgcaagccgcaggaagaaggtagataatgactataatgccc

SEQ ID NO: 50469 - DNA, 83 bp, Homo sapiens
gtaacgggcagtgtggcaaagtggataaggtcgttccaggggtagaggaggcatgaaggatgaccgtcgggacagatactctg

SEQ ID NO: 50470 - DNA, 82 bp, Homo sapiens
tcctgccttagcttccaagaatgctgaggttacagtttgatgaaggccggaacaactttgaaggggaggtcaccaaggagaa

SEQ ID NO: 50471 - DNA, 90 bp, Homo sapiens
gagtcctacgctgctgtgaatcacatatcccaactgtcagaggagcagctgatgtagaaggccaatccttaagacaccgagacaagcggc

SEQ ID NO: 50472 - DNA, 100 bp, Homo sapiens
gagtgggacgcgcactggtcggtgccggctcaggagccgggggatggttttagattgtcatctcaagaagctgcttctagttttggcgatgatagactac

SEQ ID NO: 50473 - DNA, 75 bp, Homo sapiens
agagcaactttactttagtgggaggagatgttaaagtaacccatcttgcaggacgacattgaagattggtcttct

SEQ ID NO: 50474 - DNA, 101 bp, Homo sapiens
agacctgccaatttaccagagataattgataacaccctgtaacagctgaacctccttaactacgtgttttgctcaagaaacttttgggaaacagtacaaac

SEQ ID NO: 50475 - DNA, 100 bp, Homo sapiens
tacaagaagagggcggagcggagacgggagtattatgaaaagatcggtgacccagagaagacagctaaagtggaatgtggggacttctacaacactgggg

SEQ ID NO: 50476 - DNA, 100 bp, Homo sapiens
ccctgggctggaacgaccctgctatatgtgagacagagcctgaacagcctgttcgacattacccattatgggtaaaagtagaaggtgaagtagatccaga

SEQ ID NO: 50477 - DNA, 76 bp, Homo sapiens
aatcgcttggttaaaacctgacacttttaacaggtagaagaagtatgtcttcctggaccccctggctggtgctgta

SEQ ID NO: 50478 - DNA, 75 bp, Homo sapiens
tagtcattcatttttgatcaggagaaagaagacagccatcatttgaaagaaaagcagcatctgttatagcaaaat

SEQ ID NO: 50479 - DNA, 74 bp, Homo sapiens
gcttccccatggggctggcctgcggcgcctgggcgctctgagatgcaagcctcccctatccagccccattctag

SEQ ID NO: 50480 - DNA, 100 bp, Homo sapiens
gaaacgtttagcatcagtgactcacaaatcagcaacacagaatttctgcaagtaattgttcaaacttctcatggaacatctggaccctgatgaagaagaa

SEQ ID NO: 50481 - DNA, 75 bp, Homo sapiens
agtccggacatctgaaacttggtgctgtgattctcttgggaagaaccaatatgtttcgctttaaccatccaaagg

SEQ ID NO: 50482 - DNA, 50 bp, Homo sapiens
gaaggcatatgtttgtatttcaggttacagattatgccattgccaggcgc

SEQ ID NO: 50483 - DNA, 116 bp, Homo sapiens
ttaaaaaaggaaaccccggagagcgagagcgcgaaggaaatctggccgccgccgccgcgagcgctcccgaaaatatttacaccagcagctccagttcataccaataaagaagatcc

SEQ ID NO: 50484 - DNA, 95 bp, Homo sapiens
gacatcaagggaaaatggggtgaggaagattttgaagacaatcgtcacttatacaggtattgatgaagatgaccctactgctgatgataccagtg

SEQ ID NO: 50485 - DNA, 74 bp, Homo sapiens
aaggattccaagtaactcttatttggctcagctgtcgcaggccctggaggagctgggaggccagaaacaaagag

SEQ ID NO: 50486 - DNA, 100 bp, Homo sapiens
cttgaccaagctttcagaggtattctagaagaagaaattcattaaactatcaaaatggtgccagctatgaccttgtgaccacagaggatgggacctctct

SEQ ID NO: 50487 - DNA, 101 bp, Homo sapiens
tctctcccgcgcgcgcccggcgcttcggctccgctccctgtgcgaaaaggacaggggcggcccgactgggcgatatttgggagacttactgaacacaatga

SEQ ID NO: 50488 - DNA, 101 bp, Homo sapiens
ctccagagtagatgggaccacaggtgcaaatatatacagagcttcataatcagcccaagaccacatagagcaaacatgaatgatatttcccaaaaggctga

SEQ ID NO: 50489 - DNA, 90 bp, Homo sapiens
agaattccaatcccagttcattttttttctacagcagtataatcactacaaatccaatgtggagattttcaaattgcaaccaaataaacc

SEQ ID NO: 50490 - DNA, 102 bp, Homo sapiens
acgaggagcagctcactgcgaaaactctctatatgagtcatcgagagctacctgcctgggagagaagatgactgaggaggaggtggagaccgttctggcagg

SEQ ID NO: 50491 - DNA, 83 bp, Homo sapiens
ggaaggaacgaggcaaggagctaaagcagcgtgcgttcagccctgggccttaaattggaatgtgagaaactggcaagtgaaaa

SEQ ID NO: 50492 - DNA, 75 bp, Homo sapiens
aaggggaaagacaggagccagggtcaaatcaccccggacagggctactacaaagttctgggaaagggaaagctcc

SEQ ID NO: 50493 - DNA, 82 bp, Homo sapiens
gttccaaaaacagtggataattttgtggccttagctacaggagagaaggaccctctattgtcccaggcctgtgttggctgcc

SEQ ID NO: 50494 - DNA, 100 bp, Homo sapiens
ccagaacagaaccctgggaggggaattccagcaccgcagcaaccactccagaaactttccctccttcagggaccattgcaatttagagatgtggccatag

SEQ ID NO: 50495 - DNA, 83 bp, Homo sapiens
ggcagattcccctctacatagacgacaccctgacgccagatgaaaactcgctggatttttcctcctgtatgttacggcctggg

SEQ ID NO: 50496 - DNA, 101 bp, Homo sapiens
aggtcctgcacagatggctggtccgccacagccccagaagaagctggatcctgactctatccctagcccagttctcagaggcactgtgactgacttccctg

SEQ ID NO: 50497 - DNA, 88 bp, Homo sapiens
ctgcggcgcctacctctacaaacagggctttgccatccccggctccagcttcctgacccactccggatacttctccagcctgtacccc

SEQ ID NO: 50498 - DNA, 83 bp, Homo sapiens
caaaatagctacaaaccatactaaattattccatttgcaacttatccccaacagtgcttcaggcaccgtgtacacagcaatgg

SEQ ID NO: 50499 - DNA, 50 bp, Homo sapiens
ctgagggggaaccagaccatggtggagatcgagacatgtaagcagcatca

SEQ ID NO: 50500 - DNA, 97 bp, Homo sapiens
tctgaaaactacaccgctgtggcccagactgtgaacctgctggccgagtggctcattcagacaggtgctggagaatctggtaaaagcaccattgtga

SEQ ID NO: 50501 - DNA, 82 bp, Homo sapiens
cgtcgttgcctccacttggcccgtccatagagccagtcaacgtgggagactacatcgaggcggtcctggaccggaacttggc

SEQ ID NO: 50502 - DNA, 100 bp, Homo sapiens
gcaaacttgacactcaccctgaccgaacaccttccaccatgaccacctcagcaagttcccacttaaataaaggcatcaagcaggtgtacatgtccctgcc

SEQ ID NO: 50503 - DNA, 100 bp, Homo sapiens
gcacactcaacggccggaccggctggttccccagcaactacgtgcgcgaggtcaaggccagcgtgtgcaggagaagagaattgggtggacagcaggacca

SEQ ID NO: 50504 - DNA, 100 bp, Homo sapiens
aaggaaatcaccctgcttgagcaaaggaaggaggtggggaagacagggctccagctaccacaggacgggctctgggtatagccgttccagtcagggacag

SEQ ID NO: 50505 - DNA, 100 bp, Homo sapiens
ctggaatcgcccaagtccctctactcgcgagctattgacctgaaaagtggttctggaaaagtgtaccaaggccctgcaaaaggtgctgctgatacaacaa

SEQ ID NO: 50506 - DNA, 101 bp, Homo sapiens
gggaaatggcggagtatctggcctccatcttcggcaccgagaaagacaaatccgcctcacggacacgctgggcaggctctcgcacatcctggagatggacc

SEQ ID NO: 50507 - DNA, 50 bp, Homo sapiens
ctacaaccttcgatctcctgacgaccacaacaagttgttcagaagaagcc

SEQ ID NO: 50508 - DNA, 100 bp, Homo sapiens
gtcgctggagcacaaaagagtctccgcggtggaggtctgcgttgctcttgcttttcctcgctggggtgtacgcaatcatttggggaagaatctacagttg

SEQ ID NO: 50509 - DNA, 87 bp, Homo sapiens
tacagaaagagtcaacagcagtggcaacagcggcaacctttggcactgcatccatgagcatgcccacaggattcggcactcctgctc

SEQ ID NO: 50510 - DNA, 100 bp, Homo sapiens
cttatgaacaccctaaggaaattgagacgtcagatggacatcattgtgtctgaagagtccaaaactacttacctggaagaccttccaccaccccctgagt

SEQ ID NO: 50511 - DNA, 119 bp, Homo sapiens
ggaaactggaatagcagagactccggaggggcgtcggaccagccggcgcaagcgggcgaaggcatacttttttgatgcaccagagatggaccatctcccaacaactacagctactccaa

SEQ ID NO: 50512 - DNA, 100 bp, Homo sapiens
gaaggttttcgatcttttttgaagattcttacctgtatgcaggtcactgaactgatgcaggagcagtcatacctgaagtctgaattgggcctgggacttg

SEQ ID NO: 50513 - DNA, 100 bp, Homo sapiens
tgcaactgctcatcctggcctacgtcatcgggtccggcctctttggcctacccccgttggctccgctgccccaggtcgatgagtcccctgtcaacgacag

SEQ ID NO: 50514 - DNA, 101 bp, Homo sapiens
ggcggatgccctgcagtacctgcagaaggtctctggagacatcttcagcagattcctggtcgggtggcttccagtggtcttcagtctgtcgtgcaccgatg

SEQ ID NO: 50515 - DNA, 125 bp, Homo sapiens
ctccccacctgaatcctcaggatactctgaagaactatgtaccttcttatgacccatccagtccacaaaccagccagcaactccgatccaatatccgagaaattgagaaactttgtttgaaagtc

SEQ ID NO: 50516 - DNA, 100 bp, Homo sapiens
gggagatccaagagattcagtatcactcgctcccttgatgatcttgagctgagctgactgctgcccactttggaggaggcggtgggctccttcacaagaa

SEQ ID NO: 50517 - DNA, 75 bp, Homo sapiens
cgggacccggcgaagacgcgaccgcggcgcgagtcaccatggtactccaaagattcaggtttactcacgtcatcc

SEQ ID NO: 50518 - DNA, 75 bp, Homo sapiens
tttggaagtggtcatttcagatgtgattcatctagtgacagagctgaatgaacctctctccaatgaagatcgaaa

SEQ ID NO: 50519 - DNA, 106 bp, Homo sapiens
gtaagaagtgccttttgcctcccaccgtgattctgaggcctccccaaccatgtgcaattgtactccaaagattcaggtttactcacgtcatccagcagagaatgga

SEQ ID NO: 50520 - DNA, 96 bp, Homo sapiens
gggaaaacaacctgcccgaagacagatggcactggatctttaaaacgcagtggttcctttagcaaactccgggcttccattagacgcagcagtgag

SEQ ID NO: 50521 - DNA, 90 bp, Homo sapiens
ctgcctttgggccgtcaggcagttggttgggacccgctccaaccctcggtaacctgtctggtcagagtgcagcttcagtcttgcaccccc

SEQ ID NO: 50522 - DNA, 96 bp, Homo sapiens
cggccccccgcgcccccgcgcgccgcggctcctgttgacccggtccgcccgtcggtctgcagcgcggctgagaggacgattatttatcatttctac

SEQ ID NO: 50523 - DNA, 101 bp, Homo sapiens
tgaaatactgaaagaaattcgagaagctgcaaatgccagtgcagtagacattgttgcaatcatgatcggcaatctgaaaggcacaaaaattctgcaatcta

SEQ ID NO: 50524 - DNA, 51 bp, Homo sapiens
caactaactccattcttaattggcttgcttccggcgtcatggctcaaaggg

SEQ ID NO: 50525 - DNA, 90 bp, Homo sapiens
ctggtacttaggaatttattcagctattcctgcaccaactgacctgaagttcactcaggtcacacccacaagcctgagcgcccagtggac

SEQ ID NO: 50526 - DNA, 100 bp, Homo sapiens
ctagtcagggctcagcagtgccccagcatggggcagagcctctcggtgccagccagttatggctgcagcttcgattgccaatattgtaaaaagttctctt

SEQ ID NO: 50527 - DNA, 100 bp, Homo sapiens
gctgtcaaccctggagacaactgctactccgtgggcagcgtcggggatgtccccttcacggtaagaagcgcaattccacactctacataaccatgttact

SEQ ID NO: 50528 - DNA, 100 bp, Homo sapiens
gaagggccccgtaaattggaaggatgcacaagttccaaggttacgtttcagtcacgagaagagaatgccttctagatgcaaaatcacctccaaaccagac

SEQ ID NO: 50529 - DNA, 82 bp, Homo sapiens
ctttcctctgctgccgctcggtcacgcttggtggttgtgtcaaaccgattggtgacatctccatgctgtattgtcacaagca

SEQ ID NO: 50530 - DNA, 75 bp, Homo sapiens
caaaatcagacctctgtggcagcattttttccagaacacaaaaggagtataacatgtatggctggtgggtgggag

SEQ ID NO: 50531 - DNA, 99 bp, Homo sapiens
acaaagacaaaaggagattctgatgaagaagttattcaagatgaacctgatgatttggaaacagaaattctacaagagccaagtggaacaaacaaagat

SEQ ID NO: 50532 - DNA, 90 bp, Homo sapiens
gactggaaactgctcacctatgtcatggaggaagaggcagacatgccacagacgctgagtgcctccgacatggtcaccccaggcagcctc

SEQ ID NO: 50533 - DNA, 82 bp, Homo sapiens
agaaggggaacggatctgtgtgcccacagctcctggagccccacagctgcctgtggaggaaccgattgtgtccacagatgag

SEQ ID NO: 50534 - DNA, 75 bp, Homo sapiens
agaaagagctggtgcatgatgacgaggctggtccagggaccctcatcatggccacaggagtccaggactttaacc

SEQ ID NO: 50535 - DNA, 75 bp, Homo sapiens
caaggagctcagtgacctcctggacttcagcatggttcgtgctggccgtgggcagcgccgtctttgatgccatgt

SEQ ID NO: 50536 - DNA, 75 bp, Homo sapiens
cagccctggctccagaggatcatggcagctcctatgagagagtcgtagctgagaagcaggagaaaagaaaccagg

SEQ ID NO: 50537 - DNA, 75 bp, Homo sapiens
attttagggtcctttatatagaagggagagtagaccctggtgggcagcagtgggaccattctgaccacaatgcct

SEQ ID NO: 50538 - DNA, 90 bp, Homo sapiens
aataatccattggcattaatggcccagtaccaggatgaagcctgctgggagcgtgaatgacatggccctggatgccttcgacttggaccg

SEQ ID NO: 50539 - DNA, 50 bp, Homo sapiens
agccctggacggcattcagtgttttgggaacccttccaaaacacagagga

SEQ ID NO: 50540 - DNA, 76 bp, Homo sapiens
ggtgacttcacttttgagtgcaactgccttccagatgacatggcctttgatgtgtcctggtttgcggtgcactctt

SEQ ID NO: 50541 - DNA, 101 bp, Homo sapiens
cagtggaggcattttggggcagaatacagagatatggaatcagattaaatctcttgatgaacagtgtgtggttggcaaaatttccaagcactggactggaa

SEQ ID NO: 50542 - DNA, 80 bp, Homo sapiens
ctcctgtcagtgaggatagcacagtgcctcaatttgaagctccttctccatcacacagatgtgaaaggaccacccaccca

SEQ ID NO: 50543 - DNA, 82 bp, Homo sapiens
ggaagaccgcgcgcagggcctgcagcgggagctggacggcgagcgcgagcggcgcgagaaaccttgccaacattccactaac

SEQ ID NO: 50544 - DNA, 82 bp, Homo sapiens
cggcggacagattgaccttcagagcgaggtctcctccgggctggggctgagcaagccctcggagtgaccgtgggtgacagcg

SEQ ID NO: 50545 - DNA, 76 bp, Homo sapiens
agaaactccttcacatctggaagaacttgaaggttatttgttatcaaagcgtgaaggccaagcagggtctccagag

SEQ ID NO: 50546 - DNA, 75 bp, Homo sapiens
aatgaagagctgccagatcccacagaattgtattcccattggagagcagcttcagtcggtgttgggcaattctgg

SEQ ID NO: 50547 - DNA, 97 bp, Homo sapiens
aacgtctctgaagagcccttgcttttgcctggacccccagcatcatggtttcccatttcatggggtctctcaggtgaaaggtgtagcagtcactcgg

SEQ ID NO: 50548 - DNA, 101 bp, Homo sapiens
cttggagtgctgtcccttggaacaggaggagtaagattgagagccctatgagtttgtctctctggaatggctgcaaaagtggttggatgaatcaacaccta

SEQ ID NO: 50549 - DNA, 75 bp, Homo sapiens
cctgcttgctgtgtgcttaatcatttctgcatgtgcaaggagtatgctgctgctgttccgctttgcgtcctcgct

SEQ ID NO: 50550 - DNA, 75 bp, Homo sapiens
ccaaaggatttgatacgactgccataaacaaaagctattacaatgtggtatgcagtggaactgatgaagaccctg

SEQ ID NO: 50551 - DNA, 50 bp, Homo sapiens
gccttggagagagtgccaagcatgggtacaaacattgctgctgggaaagc

SEQ ID NO: 50552 - DNA, 100 bp, Homo sapiens
tttataccatttccatatggcaccttttgattgagacttggcaagcacatgagagggagctctgacagcctttcgcaagacatatgacaaaactgtggcc

SEQ ID NO: 50553 - DNA, 100 bp, Homo sapiens
ctgtggcttgtgatccatgggcgagtctacgatgtcacccgcttcctcaacgagatcaaaggtccatcatcaaaacaccaaagactcaagacacagaaga

SEQ ID NO: 50554 - DNA, 83 bp, Homo sapiens
ggctgaagaagcagttctacaaggcgagccaggagggtgaggacaaaatcttcttaatcaacaagcttcactccatctacgag

SEQ ID NO: 50555 - DNA, 100 bp, Homo sapiens
tgcagacccagaccgccaagctgcaggtggaattcccagaggcccgaatctatgaggagacactcaacgtcctactctatgagactccccgcgtccccga

SEQ ID NO: 50556 - DNA, 100 bp, Homo sapiens
attcctaaaggagggggaaagccaggctggcgcctgtgtctggcagagctggtgtgagacgagacaatcctgccccgccgccgggataatcaagagtttt

SEQ ID NO: 50557 - DNA, 75 bp, Homo sapiens
cctgctcagggtcttcatccagaaacgagcatttgacattgtgcagcaaagaaatggttatggagaagcccagtc

SEQ ID NO: 50558 - DNA, 100 bp, Homo sapiens
aagaagatattgacttggataatctcttcagagatcacacgcgctgcaacgtgtggattctggatggagacttgtaccacaaaggcctgctgaaatttgc

SEQ ID NO: 50559 - DNA, 75 bp, Homo sapiens
cgccgccaccatgcccaagagaaaggagcggcggcatggaggctctcaccactcagctggggccggggcgcgagg

SEQ ID NO: 50560 - DNA, 89 bp, Homo sapiens
gggacattgctgctacttctggcaggtgtggcctgcctccgagggagtggttttcagagacatttcagaaagtgaaggagaaactcaag

SEQ ID NO: 50561 - DNA, 82 bp, Homo sapiens
ggcaggagcttctgggagccaccgtctgaagcttgatcctctcccagaaaaggttttacagcaaagacccaatgcaaacgct

SEQ ID NO: 50562 - DNA, 74 bp, Homo sapiens
tttgatacgtataagggcaagtccttagagatccagaaacccgctgaatctgtgcggagaccctgggagaagaa

SEQ ID NO: 50563 - DNA, 75 bp, Homo sapiens
gtttggttgaggtttcacgctagaaggtggctcaggtccctgagcagcagcctattactttgtgtagtggggttg

SEQ ID NO: 50564 - DNA, 90 bp, Homo sapiens
cgacatggtctacacagtcagacccccaagctcccgagaatcactccagctctcctggaagcaggcaacgtgttggaccttccggagctt

SEQ ID NO: 50565 - DNA, 89 bp, Homo sapiens
cagacaaagtcaatgtaaatgacatcatcctgattgctctcaatttgctgctgacacgccgaccgcctgctgcttcagctacacctccc

SEQ ID NO: 50566 - DNA, 83 bp, Homo sapiens
gactcatcggagcgtgtggatttgagccgccgcattttttaaccctagatctcgccctgggcgctgcctatggcacagccaag

SEQ ID NO: 50567 - DNA, 100 bp, Homo sapiens
actgtggaacttttaagtggagtggtggatcagaccaaagatgggtggcagtagagaagagcatcacagaagttgctcaggagctgacagagctggtgga

SEQ ID NO: 50568 - DNA, 75 bp, Homo sapiens
aaagcaagctggttctctgggatataaataagaggatttttctccaacaattatagaagatcaggctcgtgaaca

SEQ ID NO: 50569 - DNA, 98 bp, Homo sapiens
ccatgttcagcgggcgcatggaagtgctcaccgacagtgaaggtgctggagaatctggtaaaagcaccattgtgaagcagatgaggatcctgcatgtt

SEQ ID NO: 50570 - DNA, 90 bp, Homo sapiens
cagggagctcctcaaagagctcaggaacggacaggacatgcccccaaagcaggttacagccaaggtgcaactcagtatactcaagcccag

SEQ ID NO: 50571 - DNA, 100 bp, Homo sapiens
agtacttcgttccaacatggacatcctgaagccaatcctggtctctctgctccctggtgtgtaagtggacatattcagcagagaaaggctgggacgacag

SEQ ID NO: 50572 - DNA, 100 bp, Homo sapiens
agatggatggagagatagaaaccgagggagggagagagacagcgatcgagagagaccggagaggtggagaggtgaaaggtgtagcagtcactcggcctac

SEQ ID NO: 50573 - DNA, 100 bp, Homo sapiens
cggggcgatgtgtagtgccttccatagggctgagtctgggaccgagaaaccaatagagccatggcgactccctctgctgccttcgaggcccttatgaatg

SEQ ID NO: 50574 - DNA, 49 bp, Homo sapiens
aaaacatagtgcccaagctggttttgtttggctatgccaccacagtcat

SEQ ID NO: 50575 - DNA, 82 bp, Homo sapiens
cgacaagccgctggcagccgcggatctcaccgccgctcaggcggagcgtgctttggacaccatgaattttgatgttataaag

SEQ ID NO: 50576 - DNA, 75 bp, Homo sapiens
gtgccagctctccagagagaaaagtactatactggcaattgctggagaagattttgcaattgttgcttctgatac

SEQ ID NO: 50577 - DNA, 88 bp, Homo sapiens
aagaagcattcttcatctaaagataaggcacggagtgtgaatgtgaagacacaagctctttctggatacagagaccaatttagtttgg

SEQ ID NO: 50578 - DNA, 75 bp, Homo sapiens
cttccaagaaaccaacattcccaacagccaccaccaccaccagatgcgtcaccagtggctacctctacgtgacca

SEQ ID NO: 50579 - DNA, 99 bp, Homo sapiens
tttaatatgctggatgagctgctgaagcccaccgaattagtgtactaatggtcacttgatgtgcgctggctgttttatccacctactagcagatgcccg

SEQ ID NO: 50580 - DNA, 75 bp, Homo sapiens
gaaaaattcaagaagttgaaaaacgcttttcacgtcacctggagagatgcacagctttgcccgaagtttttacat

SEQ ID NO: 50581 - DNA, 82 bp, Homo sapiens
gagcagtccagcggcatgaccattttcttcagcctccttgtcctaggtgctgtaaaatacctggagtgctcggcgctcacac

SEQ ID NO: 50582 - DNA, 75 bp, Homo sapiens
ggtctgatagtgaagaaagtggctcagaagaagaggaagaggaccctcgagatgcccctcctccaactcgtgctg

SEQ ID NO: 50583 - DNA, 100 bp, Homo sapiens
tgggcttggtaccgtgctgcccagaatgcccttcgggaggttatcaatagtctggctgtctatcgtcatcgtgagactgactttggtgtaggagttcgag

SEQ ID NO: 50584 - DNA, 97 bp, Homo sapiens
catgcaagaatatgtgcaagcaccaaggaggcctgttcataaaagatatcgaggatttagccggaagaatcgcctaccagaggaatgacgatgatga

SEQ ID NO: 50585 - DNA, 98 bp, Homo sapiens
tggcagagatgctgacagggaaaactctgttcaaggggaaagattacattgtggatatcaagcctgccaatatggaagagctaacagaggtgattaca

SEQ ID NO: 50586 - DNA, 75 bp, Homo sapiens
cctgcagcgattgcttcagcccaagttactgaagacactttgccaccatcaccttgaccttcatcgacaagaacg

SEQ ID NO: 50587 - DNA, 75 bp, Homo sapiens
agaaaatagtgagataatgaattcactgattgaaaggatgttctgctgcttagccagttcatccggcctcatgga

SEQ ID NO: 50588 - DNA, 100 bp, Homo sapiens
gctttaatggagcagatctgagaaatgtttgtactgaagcaggtataaagatggctgtgaccacatcggggagcaccgagatgatgaaagagaactggcc

SEQ ID NO: 50589 - DNA, 125 bp, Homo sapiens
cgcatcaggaatgaccctgacgacccagaggctaccaagcgcctgaagctcgccatgatccagcagtacctgaagacaaaatagaagccacctggaggcaacttcctcacccatcgacaagctca

SEQ ID NO: 50590 - DNA, 90 bp, Homo sapiens
ggctttggccgccgcgccaccatctttcgggctgccgagggtgttcttgacgattaatcaacagacagccgctcaggaagcaatcttgca

SEQ ID NO: 50591 - DNA, 100 bp, Homo sapiens
gccttctcaggaagaaagtggaggtcctggctgagaagatgattgaagaatcactgaagattaaaataaaaaaggaattagaaatggaaaatgaattaga

SEQ ID NO: 50592 - DNA, 101 bp, Homo sapiens
accgaagttggaagtgtctcttagcagcgcgcggagaagaacggggagccaggttctagcattgaaaagaaaagcttcacagcctggcatgaaacgaaact

SEQ ID NO: 50593 - DNA, 51 bp, Homo sapiens
gcaatatctctgggctttcacaggcatctatatcataaatctcaagaggac

SEQ ID NO: 50594 - DNA, 100 bp, Homo sapiens
cttccccgaacctctattgtggacaaaataagaaatgatttttgtaataaacagagtgacaggtggtgttgagttgatgtccgatgtccctattcgtcac

SEQ ID NO: 50595 - DNA, 100 bp, Homo sapiens
acagaaagaagaaaagaaagatgcagaggaagaggaaagcgaactgggagattctatacaagcaggtgaggaatcaccattctcagattctgtgaccttg

SEQ ID NO: 50596 - DNA, 100 bp, Homo sapiens
tctggctctgaaggcgaacgcttcgctggccatttaggagctctgctcaaagccagacggtgatagttaaatctgggccagggactttcctcagtttggc

SEQ ID NO: 50597 - DNA, 106 bp, Homo sapiens
gacagtatgtggatgtcacagccaaaactagccggatcgagctgggagatgtgacaccacacaatattaaacagttgaaaagattgaatcaggtcatctttccagt

SEQ ID NO: 50598 - DNA, 75 bp, Homo sapiens
cactgcaaatgaagctctcgaggctgctaagagactaagttttagatggagcaggattagatattgatttccatc

SEQ ID NO: 50599 - DNA, 75 bp, Homo sapiens
tgcagccttctggtataccatcgtcaccatgacaacactagggattggagaatccatgttgaccaaatgcaccag

SEQ ID NO: 50600 - DNA, 75 bp, Homo sapiens
gaggcgccccgcgcagctggctggcggagcatgagcgccccaggaattgaatgatctggcacgggaccctccagc

SEQ ID NO: 50601 - DNA, 50 bp, Homo sapiens
gtccatgacggtgaagaagggagaggagccttcacgtaaatgggtccagt

SEQ ID NO: 50602 - DNA, 82 bp, Homo sapiens
cccgcgggtctgctctgtgtgccatggacgggacatcacgagtggttgcttggacctgaggtggacattctcccctttttgc

SEQ ID NO: 50603 - DNA, 102 bp, Homo sapiens
cagatcctgagacccggacagtggcagtgaaacaggtcaagtctggcaccatctttgacaacttcctcatcaccaacgatgaggcatacgctgaggagtttg

SEQ ID NO: 50604 - DNA, 82 bp, Homo sapiens
ggctacttcatattttggaaagcagtttttaagacaagtgacagtatgttgactgctgtctctgtggccagagattgtggaa

SEQ ID NO: 50605 - DNA, 96 bp, Homo sapiens
aacatgaggaactggtctggatgcctggagttaacgactgtgacctccttatgtacttgagggcagcaagagaaactccagaaaatcttgccaaac

SEQ ID NO: 50606 - DNA, 100 bp, Homo sapiens
gtttgctgagctggttggccctgtgatccctcaagactggtccacggagtgtatgaccacaaacagccatcaagtctctggaatctgttctgcgccaccc

SEQ ID NO: 50607 - DNA, 85 bp, Homo sapiens
atcataggagaaaaccatttcaggtccccttcccctgagcccatctacaatagcgaggggaagcggcttaacacccgagagttcc

SEQ ID NO: 50608 - DNA, 75 bp, Homo sapiens
gttcagctccttccagcttgggaacaggctacttcatttcctttgacctcgctgagtacactgcggacgttgacg

SEQ ID NO: 50609 - DNA, 74 bp, Homo sapiens
tactactatcctcattatctccaaaccaagtgccggtggtggtgtgcacattgagccccggtatagacagttcc

SEQ ID NO: 50610 - DNA, 100 bp, Homo sapiens
aacttctgcaggtggatgggctggagaacaacgccctgcacaaggagaagggaacggcaggagcagctgatgggatatcggaagagagggccgaagccca

SEQ ID NO: 50611 - DNA, 82 bp, Homo sapiens
caaaaagggaatcctttgggaaattatttagcatggatagagtccagtgttctggtgatctacaattggctcaccagcttca

SEQ ID NO: 50612 - DNA, 75 bp, Homo sapiens
cttcttcgagtatttgtagaagggttttgggatttgagattgacgcggtgaactctgtccagttttcaaaccaca

SEQ ID NO: 50613 - DNA, 100 bp, Homo sapiens
agagagagctattagagattgtgaagaagaatttcgatctccgccctggggtcattgtcaggtgtatacatttccaaatactccgactgtcttcattcaa

SEQ ID NO: 50614 - DNA, 58 bp, Homo sapiens
tgattactcagtctctaaaaagctaagctgtgtacgccatggaaattaatgtggagaa

SEQ ID NO: 50615 - DNA, 75 bp, Homo sapiens
atggagctcactctcctgtccctggacctcatgcaccatattcacatgttgaatgattacggacctgaagccaaa

SEQ ID NO: 50616 - DNA, 97 bp, Homo sapiens
gactgctgcctggtctgcaaagaagtcctttcaagtctctaggactggactcttcctaagcaagtccggttgcagatgaatacatgttttccctaga

SEQ ID NO: 50617 - DNA, 50 bp, Homo sapiens
actgctcccagtaccaagttttgaagagccagacccagggccctccagat

SEQ ID NO: 50618 - DNA, 95 bp, Homo sapiens
gcagccccgagcactgtggccgaggcccacctgctgacatctacctgccaggtgaaatgacaatggatgctctgttggctcgattgaaacttctg

SEQ ID NO: 50619 - DNA, 96 bp, Homo sapiens
ggacagttcgctacacagcaatgcatcgagggaaaaattgaggaagcagtgaatgcatttaaagaactagtacgcaaataccctcagagtccacga

SEQ ID NO: 50620 - DNA, 100 bp, Homo sapiens
gtggcaggcagaagaaggggaactcctgctgcccactcagcttgtactcccagagtacctcatccacgctttcttctgtgtcatgtttctttgtgcagca

SEQ ID NO: 50621 - DNA, 51 bp, Homo sapiens
ctacagatgaagcaagagcttttgcagctgactggaaataccggcatgcag

SEQ ID NO: 50622 - DNA, 76 bp, Homo sapiens
ctaagatgtcaggacatcctggaagctgggaaagggtaaaaatgcatttgcaaagggagaaaatgaaggccaaaca

SEQ ID NO: 50623 - DNA, 100 bp, Homo sapiens
tcaacaagatgttgtcctgtgctggggctgacagtccatcaataaagccatggagaaagaccatgaagaatacaacattggcgtcctagacatctatggc

SEQ ID NO: 50624 - DNA, 50 bp, Homo sapiens
gctgccaagggctacattgaggtgatgagcgagacggtcatctgttccag

SEQ ID NO: 50625 - DNA, 90 bp, Homo sapiens
cggaaatgtgtcatcgaaagccagatattatgcctggtgatcctgatctgcttcagtgcctccacaccaggctactcctccctgtcggtg

SEQ ID NO: 50626 - DNA, 75 bp, Homo sapiens
aagacccagtgaacaaatccgggggcaaggccaaaaagaagattcagccgttggtctttgaaatttcctgtgatg

SEQ ID NO: 50627 - DNA, 82 bp, Homo sapiens
cggaaaccggtagcgcttgcagcatgatctggtggctggacccagagctgacctatggctgcgccaagcccttcgtcttcac

SEQ ID NO: 50628 - DNA, 98 bp, Homo sapiens
gagcatttgcttcccgagtatttcctccagagattgtggagcagatgggtgctcaaccatgtctattagagaaactgaatgaggaggcaaagcatgac

SEQ ID NO: 50629 - DNA, 75 bp, Homo sapiens
ccaggggaccaagctggagatcaaacctgcagaaccttggcctgaaaatgctacattatatcagcaattgaaagg

SEQ ID NO: 50630 - DNA, 83 bp, Homo sapiens
cagcaacagcttcgaaggcgaccttccttgctttcagaatttcacccaggttctgacagttccagtgtctcgccccatcctca

SEQ ID NO: 50631 - DNA, 87 bp, Homo sapiens
aacctggcagccgccgccgtggaagatgtgtatatctcatgattgatatggagaaactagtcatgggccaaaggtcaagatacttct

SEQ ID NO: 50632 - DNA, 50 bp, Homo sapiens
cagatcaagaaatccagctcaactgttgaaggaggatgttcccatcttgg

SEQ ID NO: 50633 - DNA, 112 bp, Homo sapiens
ccatgaccctaatggtctttttgttcaagataaagtgattttttgcctttgttgattaactggacaaattcagaaaagatgactccacagggtgagtgttctgtagctgaga

SEQ ID NO: 50634 - DNA, 75 bp, Homo sapiens
ctggagagaactgctggaaggagactggatgatagaattgtgggaaagcagtgccactctccgcttcacagatgc

SEQ ID NO: 50635 - DNA, 100 bp, Homo sapiens
agaagaggaggatgcggctcgtggtggatggcatggggcgctttggcaggtctacttccccagcaggacagcatcattctcctatatcttctagacatca

SEQ ID NO: 50636 - DNA, 75 bp, Homo sapiens
gcctttttggcctggcttgtttgcaaaggaatattaccagaagctagagaagaagcaggcagacgaagagctact

SEQ ID NO: 50637 - DNA, 97 bp, Homo sapiens
gtgcccccgaagtgaaagagatggcctggtggaaagcctgggtgctgtcctggagccgagagctgccttgcgcttggcgcgccctgcacacctcccc

SEQ ID NO: 50638 - DNA, 135 bp, Homo sapiens
ctccccctgcgtctctggcctcgccggtcttggggggatggttccatcatggcgtcaatgcagacaatgcagatcttcgtgaagactctgactggtaagaccatcaccctcgaggttgagcccagtgacaccatc

SEQ ID NO: 50639 - DNA, 96 bp, Homo sapiens
cagcacagacagaatccctgctaccaatttgctgctgcttccaggagaagtggagcaggatgtaagcaccagcattccttcctgtatcccttttgt

SEQ ID NO: 50640 - DNA, 82 bp, Homo sapiens
gaagagcgcgccgccctctcgtcccactttccagcctcccgcgacgatgcccctcaacgttagcttcaccaacaggaactat

SEQ ID NO: 50641 - DNA, 82 bp, Homo sapiens
tcttttcttgacttagctaccaggaggtgtgattgcctatatcagttcttccagctcagcctcaagccctgcctcttgtcac

SEQ ID NO: 50642 - DNA, 100 bp, Homo sapiens
gtggtagcggcgtctggctgctgcggaccccgccgagtcctagcgcctggcctgcgcgccgctgcccgcgccacaggattggttgccgtggtctttactg

SEQ ID NO: 50643 - DNA, 75 bp, Homo sapiens
cggaggcggaggcagaggtggaggcgctttgaaagattgtagaaggcatgaaacaaaaaatgtggagtattgaaa

SEQ ID NO: 50644 - DNA, 90 bp, Homo sapiens
tcctaggttctctgctgtttaaaaagtatccctgtgcgcgagcccagcattgacctgctgcaggccttcgtggagcactggaagggcatc

SEQ ID NO: 50645 - DNA, 99 bp, Homo sapiens
gagtttgtagcctattggaggaaaacacaccaaggatgacatctgaactggagagcagcctaacgtctatggactggttaccacagctcaccatgagag

SEQ ID NO: 50646 - DNA, 90 bp, Homo sapiens
cagaaaattacctaaatgcactctttcgaaagaaagtacgtcatgtccattgacagcctccagctgggctatgcggaggatgggcactgc

SEQ ID NO: 50647 - DNA, 98 bp, Homo sapiens
gatcaggtggaacagattcagaaggagcaggattaccaaaggacaggcgagggcgtgaacgatgtgcggaagggagcctgtgccagccacgtcagcac

SEQ ID NO: 50648 - DNA, 83 bp, Homo sapiens
tgtagtcctgttcttctggctctaagatctgaatgttgtgaccactaatttgctgtttgcagacaaggtcccaaagacagcag

SEQ ID NO: 50649 - DNA, 75 bp, Homo sapiens
ttgaaagctcaaattcagcagttccattcccagatagcagcccaggaggtagatgacttctttgagcaagagaag

SEQ ID NO: 50650 - DNA, 101 bp, Homo sapiens
cgaccagcgcagcactccggacagcacatacagcgagagcttcaaggacgcagccacagaggtaggtgatgctctgatgctgctgcctcttatgaattgac

SEQ ID NO: 50651 - DNA, 75 bp, Homo sapiens
cactctcgctcgccgtttccaggagcacaggacagtcattttgtttactcattcagccctgttgcaggtcccaat

SEQ ID NO: 50652 - DNA, 82 bp, Homo sapiens
ttcacgcacgggatccagagcgccgcgcacttcgtcatgttcttcgcgccctggatgcagcaccgaggcttcctcctcctca

SEQ ID NO: 50653 - DNA, 75 bp, Homo sapiens
tcagcagcgctccgcgcctgcacgagcagcgcgtgcgggacatccagaagcaggagccaaaaacctgtatatcat

SEQ ID NO: 50654 - DNA, 75 bp, Homo sapiens
cagaggaaggaattgtcttagaaagtcctcattatgctgtgaaaatattagcttgccaacaacatttgcaacttt

SEQ ID NO: 50655 - DNA, 83 bp, Homo sapiens
ggcccgcgggtctacttcctcaaagacttcccaagtaagaagcggaagaggagccgctggaaccaagacacaatggaacagaa

SEQ ID NO: 50656 - DNA, 88 bp, Homo sapiens
ccggacttcttatcgtggaaggcaacaggtgtcacagcacggttcatctctaacaagtatttagtgaaacgacagagcagagactatg

SEQ ID NO: 50657 - DNA, 100 bp, Homo sapiens
ctgtcggcttcaaagagaaaaggcaacatcctgtcacaggccatgctctggcaaaaaccatctcttgggcagtgaacagcagtcttctgtccagctctgg

SEQ ID NO: 50658 - DNA, 75 bp, Homo sapiens
agaagcctcgattgtggtcaataacccagatttgttgatgttttgtgaccaaggatttagaagaattctgcttta

SEQ ID NO: 50659 - DNA, 100 bp, Homo sapiens
gcgcgcagcccgcccgcccggcgaccagcaagcaatggctgccatccggaagaaactggtgattgttggtgatggagcctgtggaaagacatgcttgctc

SEQ ID NO: 50660 - DNA, 98 bp, Homo sapiens
cgacgctttcaaagatgcactgcagagagcccggcaggccaagtgcaggaacatggagcatgcactgcgggagaaggccaaggccttctgggccatgc

SEQ ID NO: 50661 - DNA, 74 bp, Homo sapiens
tcctgtgcagggagaagtgatggaggttgctcagacaactgctctcccggatgaggatgatgacctgtgagaat

SEQ ID NO: 50662 - DNA, 95 bp, Homo sapiens
ggaggcgtcgtcctccagccccgaggccggcgaagggcagatccgcctcacagacagttgcgtccagagacgactatgaggtgagctgcccagag

SEQ ID NO: 50663 - DNA, 90 bp, Homo sapiens
ctgtttacatggaactcagacatctgcaaatcatggcctccctattccctgagacacaacagtattgaaattgggccaattaataacccc

SEQ ID NO: 50664 - DNA, 100 bp, Homo sapiens
aagggggcggggcgtctacctgatcaacaatccggaaatcactgtggaaaatcttcccagttatttcagacttcagaaaccattattgattttgttcagt

SEQ ID NO: 50665 - DNA, 88 bp, Homo sapiens
gggttgctgacccagaggagagttctccaaacatgatcgtttactgcaaaagtgctgcagcagctcccagtccagtgctaggaaacat

SEQ ID NO: 50666 - DNA, 90 bp, Homo sapiens
ggaaactgggtcccttgaagaatctacagatgagtctgaggcctctgtggatggcatcaattattccaccagatatgattcttactcttt

SEQ ID NO: 50667 - DNA, 90 bp, Homo sapiens
ggccggcagggcagccgggggacagctgtagtgaaggaatacaggagtttccagaaaatataaaaaattgtaaagttttgacaattgtgg

SEQ ID NO: 50668 - DNA, 100 bp, Homo sapiens
cggcgggcgctcgcctcccccgcctgtcgcgatacgctcctcagcggcggcgccagctcctgtgggggggccctcagcctcttggccttgaacgggctgt

SEQ ID NO: 50669 - DNA, 82 bp, Homo sapiens
tcatgctggccaagaagatcatcattaaggacggaggcacgaagagtattgggcaactctgcaagaatccactttcagcaaa

SEQ ID NO: 50670 - DNA, 100 bp, Homo sapiens
gggagcgatggagaactggactggcaggtagaggaggccgatgactggctgcgctacggcaacccctgggagaaagcgcggcctgagtatatgcttcccg

SEQ ID NO: 50671 - DNA, 98 bp, Homo sapiens
cagtggtgtaatagatgtaatcacaaagacatggagaaactctgtgaaggcatatttaaagtccttataaaggacatcccaacaacatgtcaagtgtc

SEQ ID NO: 50672 - DNA, 82 bp, Homo sapiens
caaacaggacgatggaggggcccctattttggaatacattgtgaaatatagaagtatgatgaaacatgcttggaataattat

SEQ ID NO: 50673 - DNA, 82 bp, Homo sapiens
ccggagaagttccgttaccaggatgatttcttgctagatgaaagtgcttccaattgaagacttgtgcagtttaacatcccag

SEQ ID NO: 50674 - DNA, 98 bp, Homo sapiens
ccggttccccggcccacagtgggggtgtgcaaacccgagagaactggttgttcaggggatgaaggaagctcaggaaaggctgacgggtgatgccttca

SEQ ID NO: 50675 - DNA, 87 bp, Homo sapiens
tgatttccggagtcagtcattttactgtcaagacatttcttcggcattctgcaacagggttgagaatgcttgcaccaagcttgtcca

SEQ ID NO: 50676 - DNA, 100 bp, Homo sapiens
gattgtcttaggaccataccatgacaagtcaggtcaattcagtgaagatatgatacccacagtgggcttcaacatgaggaaggtaactaaaggtaacgtc

SEQ ID NO: 50677 - DNA, 98 bp, Homo sapiens
ggaaatatggcctcaatatgtgccgccagtgtttccgtcagtacgcgaaggatatcggtttcattaaggactttgaagaatatcctgaacatagaacg

SEQ ID NO: 50678 - DNA, 100 bp, Homo sapiens
gccatcctgcagacagctgtgtgcacggctgagcagtccaaagtcctgagcgccgtggaggaccgcatggacgagctgggtgctggcattgcacagtcca

SEQ ID NO: 50679 - DNA, 75 bp, Homo sapiens
gatgtacttcctgtcaacttcgcacttctccagttagttggagcccaggatgctataaaatcaccacggtcttta

SEQ ID NO: 50680 - DNA, 100 bp, Homo sapiens
gactagaccccaaaacatcgagacgctgcagaacgcgggagatgttacagcccagatagctcttcagcctgcactgaagttcaatggtggtggtcatatc

SEQ ID NO: 50681 - DNA, 90 bp, Homo sapiens
ccctctgggaatctggagcttcagtaacagaggcggggtttcaccatgttgcccagactggtcttgaactcctgagcttaagcaatccac

SEQ ID NO: 50682 - DNA, 83 bp, Homo sapiens
cagaatttaaaggacccttcccccttacttatgcttgtactcagcccaggaataagacgagttggaagaagacctgatcaaca

SEQ ID NO: 50683 - DNA, 100 bp, Homo sapiens
gtcaagggagcagtactggtttgtgacatgtcctcaaacttcctgtccaagccagtggatgtttccaaggaaagaccacagcaagattctttcattcgtc

SEQ ID NO: 50684 - DNA, 74 bp, Homo sapiens
aggaaatgaccaccaaggacaaaactagattccttcagtcgaatgagccttcgcaaaatggatctctaaactga

SEQ ID NO: 50685 - DNA, 100 bp, Homo sapiens
ggagagaatggctgctgggtacctgccccgctggtcccagggactttgaacatgtcggggatcgccctcagcagactcgcccaggagaggaaagcatgga

SEQ ID NO: 50686 - DNA, 100 bp, Homo sapiens
gctctgtcagtaaacaccgaagggaagaatgcctggaagacaatggtgtaaaattggttgatcctttgggtgaaatgttggcaccatcctgggaggaaca

SEQ ID NO: 50687 - DNA, 75 bp, Homo sapiens
gtggtagcgctcgtctggcggagctggcatctactacaagccttagtgggtctgatagtgagaccgaggggaaac

SEQ ID NO: 50688 - DNA, 100 bp, Homo sapiens
ggccaccatcacctgcacccgcttcacggaagagtaccagctcttcgaggaattgggcaaccttagccccgtgggccccacggagtgagcggcatgcagc

SEQ ID NO: 50689 - DNA, 101 bp, Homo sapiens
gagagcaccccttttaccactgcctggttgcagaagtgccgaaagagcactggactccggaagctgcctaccctccaggtgcctcaatggtccggccacca

SEQ ID NO: 50690 - DNA, 90 bp, Homo sapiens
agagacactggccccatggaggctgctgaagacaccctaagcccccagggagttagggagatttcggagtgcgattgagctggacacccc

SEQ ID NO: 50691 - DNA, 101 bp, Homo sapiens
gcggacccgtggcagaagatggctgtggagagcccgtccgacagcgctgaggactgcatcgacgtaggctggtgggaaggagagctgaacggcagacgagg

SEQ ID NO: 50692 - DNA, 50 bp, Homo sapiens
ggtcaccaagagaggctgagagaccagacactacccgaagcagtccttca

SEQ ID NO: 50693 - DNA, 90 bp, Homo sapiens
cctgccccgccctggggacgaagagctgcagctcctcctgtgcggctattcaaaatcgtaatcctgtgtggtatcaggcactgactcacg

SEQ ID NO: 50694 - DNA, 75 bp, Homo sapiens
gatctacactttctcaagcactgtgatcttcaaataaatgaaagctcattagcatctacactgaagacgctcctg

SEQ ID NO: 50695 - DNA, 100 bp, Homo sapiens
aagaaatccagtatctgagtaatttgcagtactttgctgtgaccaacaacaatagcttagaaaccaagatagccaagtggaacctgcaatcaagaatgaa

SEQ ID NO: 50696 - DNA, 101 bp, Homo sapiens
tgagcccgtgcctgtcttcagatcttcacagcacagttcctgggaaggtggagccaccagcctctccctgggaaacagtgcttcttagtcctacgtcagca

SEQ ID NO: 50697 - DNA, 83 bp, Homo sapiens
ctcgggcttggcgcggcggccagaggaaccccgaggttaaagatcgaggtccggaagccactaggagattttttaattggttt

SEQ ID NO: 50698 - DNA, 48 bp, Homo sapiens
agcaccgtggaatcaaccaagccctcgataatccgcaagatgggatta

SEQ ID NO: 50699 - DNA, 100 bp, Homo sapiens
cagacaagccccggagcgcggccgagcaccgcaaggggagctccgggggcctgtcccatcatttgccttcagccagaatgacatgtgcctggtgtttgta

SEQ ID NO: 50700 - DNA, 75 bp, Homo sapiens
cctgggagaagcagcagcgcaaggtgcccctggtaatctttaagcgggagaaggagctggcccggaagctggagt

SEQ ID NO: 50701 - DNA, 74 bp, Homo sapiens
cgcactgactcgcctcaagcacctgcgcatcgtcatcgaaaatagaagcacgagtgtctgctgatgaagacctc

SEQ ID NO: 50702 - DNA, 83 bp, Homo sapiens
aaacaaggctggcagcttcatcactggaattgatgtcacctccaagcttgaagtacatctggattccttatgtgtgcatgtta

SEQ ID NO: 50703 - DNA, 74 bp, Homo sapiens
ggcgttcgcaccggaaaatgtagcttcccggttaagcctaccgatgttcaccgtgctcaggaaattcaccattc

SEQ ID NO: 50704 - DNA, 75 bp, Homo sapiens
gaacatgacgcaggtgcaggtgtctcttctcgccctggcggggaagaccttcacggcatggtgcaactcccacct

SEQ ID NO: 50705 - DNA, 100 bp, Homo sapiens
gacgaagagaccgccgtccaggatcgtctttaatgagttgatgcggatgaaattaaaaggctaggaaagagatttaagaagcttgatttggacaattctg

SEQ ID NO: 50706 - DNA, 100 bp, Homo sapiens
ggaatcgtgctctccgaggacaagcaggaggtggtggagctggtgaagcaccatctgtgggctctggaaggtctccctgacttggtcccagaccccaact

SEQ ID NO: 50707 - DNA, 87 bp, Homo sapiens
gagctcaagtgatccacccaccgtggcctcccaaagtgctgagattaaagaataatcatgggccagactgggaagaaatctgagaag

SEQ ID NO: 50708 - DNA, 82 bp, Homo sapiens
ctgctattccggcgcctccactccgtcccccgcgggtctgctctgtgtgccatggacgggcttcttccccgggagctcgcag

SEQ ID NO: 50709 - DNA, 100 bp, Homo sapiens
tggcagagcccccaggcacgggggccctctctcttccaggatgaccggaaagaagggatgaccgcgtttgtggaaaagagaaaggccaacttcaaagacc

SEQ ID NO: 50710 - DNA, 89 bp, Homo sapiens
tgggagccgcaccacctaacgctggccgacaacagcctggcgtccgccacggacccagatgatgtggtaccagttggccaaagaagagc

SEQ ID NO: 50711 - DNA, 116 bp, Homo sapiens
gccttggtgatatacatggagagtctggccttagcacatgcagatgagaagtccttaggacacagcattgttggttttgccatgtactattttacctatgacccgtggattggcaa

SEQ ID NO: 50712 - DNA, 98 bp, Homo sapiens
tccagtacgagctggttaggaggcacagggcgtcggacctgcacgagctgtctggacgagcctgtggagtgggagacacctgacctttctcaagctga

SEQ ID NO: 50713 - DNA, 50 bp, Homo sapiens
tcatggaagccctaacattggctgaaggtgactctgacatcattagaagc

SEQ ID NO: 50714 - DNA, 75 bp, Homo sapiens
atggagttcgaggaatttataaacgcagtaaaacgcaggactcttcccgcttggattcgcgaaggtcttgaaaaa

SEQ ID NO: 50715 - DNA, 101 bp, Homo sapiens
ccggtgcactttgtcttccatgacaccaagttggatgccatgctggaggagttcaagaagggtgctggagaatctggtaaaagcaccattgtgaagcagat

SEQ ID NO: 50716 - DNA, 75 bp, Homo sapiens
atcccgctgtggtacttctcgcagtccccgcgcgtggtcatccaggctgttactgaggcggagacacgggtgatg

SEQ ID NO: 50717 - DNA, 60 bp, Homo sapiens
ggttgctacgcgcaccatggctggagtcttgctggaggtttgttaaatttatttatcttt

SEQ ID NO: 50718 - DNA, 100 bp, Homo sapiens
caaacagcacttcctggcaatgatagatacatcagtgtgggaagccaagcagatacaattgtggaagctgatcgaggaagcctaagcaggctctgtgaag

SEQ ID NO: 50719 - DNA, 83 bp, Homo sapiens
tggaggcctgggaagccaacgaccacacgcatgcagagcagagcgggcggaggaccccgggcgcgggcgcggacggcacgcgg

SEQ ID NO: 50720 - DNA, 88 bp, Homo sapiens
aaagcctctctcttgcccaaaccacgatgggaatttgtctgagggaagtcaaaagcatgcaagcctacagaaaagcattgagaaagct

SEQ ID NO: 50721 - DNA, 75 bp, Homo sapiens
acatcgacatccaggcgaactcggcctatcgctaccctccgaagtccgccttgaaaagatcttttgaggtcgagg

SEQ ID NO: 50722 - DNA, 75 bp, Homo sapiens
ctggcagacccgtagctaagacgccaggatttcctggaagcagagaaatgatggcaggagagctggctgacaaaa

SEQ ID NO: 50723 - DNA, 74 bp, Homo sapiens
cgagctggggttggacgctgccagtttgcacagcagcagagtctgtagaagaggcgacaccagggcttccaaat

SEQ ID NO: 50724 - DNA, 75 bp, Homo sapiens
ccgtgatgacgtccagggctatgccgccaagaccgtctttgaggctttatcctgtggataaacgcagagtgaacg

SEQ ID NO: 50725 - DNA, 87 bp, Homo sapiens
atgtgtcagccgatgcaccgagtccagcccaggaaaatggagagagatgcccgagtggtaaaagacatggcaacaggaaagtctaag

SEQ ID NO: 50726 - DNA, 50 bp, Homo sapiens
gcgcgagagcttcgagcggactcagctcctggtggacccatgtggaaatg

SEQ ID NO: 50727 - DNA, 97 bp, Homo sapiens
ggagctccccagctggtggctggagcgaccccttgttctttggtggcgctggttcacctttccttgccagtgaagatggcgtgcttggcggagtgat

SEQ ID NO: 50728 - DNA, 50 bp, Homo sapiens
gaaaacctcaggaacctagaatttctggattagtgtgatctcagctcaag

SEQ ID NO: 50729 - DNA, 83 bp, Homo sapiens
ggaagagaagaaggaacggaaacaaagttattttgctcggagacgcaggtcagaatggaaatgggctgcagaccgggcagcta

SEQ ID NO: 50730 - DNA, 78 bp, Homo sapiens
ctggtgacttcacttttgagtgcaactgccttccaggagacctccgagcttgcacatattgtagaaaaatagccttaa

SEQ ID NO: 50731 - DNA, 100 bp, Homo sapiens
tggatcaattaccagtgctaaggtatgctggagcaatggaaagattgcaagcagagaccgaacttattaatagggtaaatagtacttaccttgtgaggca

SEQ ID NO: 50732 - DNA, 83 bp, Homo sapiens
cgggccagggtgacgatcctcaagttcccaagtagaggagaggaagcggcagagggaggtttctagaccaactggggagattc

SEQ ID NO: 50733 - DNA, 75 bp, Homo sapiens
cggtgtcccaaatcaatgcggagttcgtgacccaggaaagtaatggaccagtgaaggtgtggggaagcattaaag

SEQ ID NO: 50734 - DNA, 100 bp, Homo sapiens
ggccgtcaagatcctcaagaagaagaagttgcgaaggatccccaacggggaggccaacgtgaagaaatcctccgagcggcggcgacggctgttgctaagg

SEQ ID NO: 50735 - DNA, 100 bp, Homo sapiens
ccaggatggtgatccgtgtatatattgcatcttcctctggctctacagcggtattgttgcagcatctggcagtgagactgaggatgaggacagcatggac

SEQ ID NO: 50736 - DNA, 90 bp, Homo sapiens
cttccttataggcgtcagcgggggaacagctagcggcaaggtggacccccaaaagtacaagggcatatttaacggattctcagttacact

SEQ ID NO: 50737 - DNA, 90 bp, Homo sapiens
cggcagctgtccgcgcccacggtcctatggcggagctaacggactccgcgcggtagagacggggtttcgccatgttggccaggatggtct

SEQ ID NO: 50738 - DNA, 75 bp, Homo sapiens
aactttctcctgtcctcaatctctggaagaaactaaaccagatggactcaccctgtcacccaggttggactgcac

SEQ ID NO: 50739 - DNA, 98 bp, Homo sapiens
cagtgatgtcattgaccagaaggtgtatgagatccaggacatctatgagaacaggagtccaatgtgctgattgctgctaacagtcagggtacaattaa

SEQ ID NO: 50740 - DNA, 74 bp, Homo sapiens
caggcagttgtactttgcagtaagaagacttttcagatcaccaaacaagagtcttggtctgttgcccaggctgg

SEQ ID NO: 50741 - DNA, 98 bp, Homo sapiens
acaagcagtccctgaccttccagaacgtggtcttcaatgtcatttatcagagcgcggcggtcttcaagctctcacaaatgaagctcgtgaccgagaac

SEQ ID NO: 50742 - DNA, 75 bp, Homo sapiens
gccagatagtaccatgatagctgtatcagtgaacagggatattgtgtcaggcctgaaatacgttcagcacaccta

SEQ ID NO: 50743 - DNA, 87 bp, Homo sapiens
gcggccttcgaggaggtcatgaaggacctgagcctgacgcgggccgcgcgggagtacgaccccagcaaagcgacctttgtgaaggtg

SEQ ID NO: 50744 - DNA, 100 bp, Homo sapiens
cgggacttctaaaaggaactatgtctggaaggctctgagtaccaggtcctgtacatcgctgatgacaatgagatccgcagcctgttccccggccaccccc

SEQ ID NO: 50745 - DNA, 75 bp, Homo sapiens
caatggcagtgatgatggagctcagccctccacctccacagccttcctaatgatggtgatgaaaaatatgagaag

SEQ ID NO: 50746 - DNA, 82 bp, Homo sapiens
gtcccaggacatggacacctgtgagttacagaatgtctgaaggggacagtgtgggagaatccgtccatgggaaaccttcggt

SEQ ID NO: 50747 - DNA, 102 bp, Homo sapiens
cttctgttctggtggctcgatcttcattgctttcctctggacttcttccttggaaatcattgactagcatcattgaatattattacatgtggaaaactactg

SEQ ID NO: 50748 - DNA, 96 bp, Homo sapiens
tctgtttatccaacgctctctcagcagcttccaagagaaccaatggaatggagaaggtatctttcagatgaaggcattgaagcttgcacaagctct

SEQ ID NO: 50749 - DNA, 88 bp, Homo sapiens
aacaacagcaacagcaagaagaagagcccagctagcaccttcgccctctccagccagaacacaccacagccatcagcactggaatgca

SEQ ID NO: 50750 - DNA, 90 bp, Homo sapiens
gggggtggtgccgcgctcctggccccgcgcgggcggacggcggaggcgcctcccaggtgacagagttagtccttgataattgcctgtgtg

SEQ ID NO: 50751 - DNA, 88 bp, Homo sapiens
cgggcagctattcggtatgttcaaactcagacacgaaaaccagaactgcatcaggtgatgaaacttatcaggacatatttcgtgattt

SEQ ID NO: 50752 - DNA, 95 bp, Homo sapiens
aaatgaggctttggcgttagataaagttgggctgaaccagcagcttctccagacagcacccaagaaaacctcatttggctcgctgaaggatgaag

SEQ ID NO: 50753 - DNA, 62 bp, Homo sapiens
cacgttcaaacagcagtgttagcaagacctgggggagagaaactggcgatggaatatgagag

SEQ ID NO: 50754 - DNA, 75 bp, Homo sapiens
ggggctcatggccttcctgctctccttctacctaattttcaccaatgaggcttatgatcaacatttaaatatgat

SEQ ID NO: 50755 - DNA, 130 bp, Homo sapiens
tctctttccagaggccaggctttatgggagcatgggttaccagcgacgcaccctactggaaagctacccttgaggagaataggttgaattctgaaaaagatcgagctagggaagaactatcccaccacgt

SEQ ID NO: 50756 - DNA, 50 bp, Homo sapiens
agactgggacttggagcagcagtgtcaggatggctaaaggtgaccccaag

SEQ ID NO: 50757 - DNA, 83 bp, Homo sapiens
ccgtgttgctgcaaaaggactatcaggtgtaaaaagatggttccagcttcaaagaggttcactatccatagatcctctaatgt

SEQ ID NO: 50758 - DNA, 75 bp, Homo sapiens
cgcatgagcatcgcggagcttgacccgtccatcgctgtgcaggttcaggagaagtggcacctggtggaggacctg

SEQ ID NO: 50759 - DNA, 108 bp, Homo sapiens
cgcgccgcttagattgggaggggaaagagcaccgaagaagcttcgaggatctgccattcaaactcctccccacgacactctgaagcagcgacggcacagcgggaagaa

SEQ ID NO: 50760 - DNA, 74 bp, Homo sapiens
ctactcagaagacacctaccgtctgaggacccagaagaagatgccaggttaaagcagttgcaggctgcagcagc

SEQ ID NO: 50761 - DNA, 100 bp, Homo sapiens
gaatcccccgcaataccagagaagtccttgtaaagaggttcgtgcagcacttcggaagaggcctgaagaggagtgactcacaccacccggcaagaactgc

SEQ ID NO: 50762 - DNA, 75 bp, Homo sapiens
ggaaatgttcccagaacattgcacgatgcctcctggtgaccaaaagccagccccactgtgagttgaactctttcg

SEQ ID NO: 50763 - DNA, 97 bp, Homo sapiens
gcccctcgtcgaccccgcctgcatcacctccatccagcccggggcccccaagaggagaaggcagagcccccccaggctatgaatgccctgatgcggt

SEQ ID NO: 50764 - DNA, 75 bp, Homo sapiens
aatttatatagagatgtgatgttggagaactacagaaacctcgtctccctggggtgataaaagaaaatgtggctg

SEQ ID NO: 50765 - DNA, 90 bp, Homo sapiens
ggaaaaaggacgaagaggagaaacaagctatgtactctagcactgacacgtttacccacttgaaacagggcttccgagtggacctgccaa

SEQ ID NO: 50766 - DNA, 75 bp, Homo sapiens
agtctccaaattcgcctccatctgtaccatgatgtcaagccctccaacatcctagtcaactcccgtggggagatc

SEQ ID NO: 50767 - DNA, 75 bp, Homo sapiens
tctctaccaggtcttcatcaaatacaaggagaggaaagccaaagtagatgtgacctttggatccctcacgtcggc

SEQ ID NO: 50768 - DNA, 98 bp, Homo sapiens
cgacaagtacatcgccaagtttcagggagaagacacggtcgtgatcgcggtatctcaacacccagtttattaaaaagaataaattaacagaagcggac

SEQ ID NO: 50769 - DNA, 98 bp, Homo sapiens
aaacccctacagacaagccattatgtccttcaagaacacacaaggccccagctcagatgtgtctacagcttcagagactgagtcagagaagagagagg

SEQ ID NO: 50770 - DNA, 82 bp, Homo sapiens
agaactcaacaaatgctgtggcctttgtgtctgcccatgtaataggtactccaaagattcaggtttactcacgtcatccagc

SEQ ID NO: 50771 - DNA, 100 bp, Homo sapiens
gcggcggcgacgcggacctgcggactagcgaacccggagaaagctgccttggaagacacactggcagaaacggaggcgcgctttggagcccagctggcgc

SEQ ID NO: 50772 - DNA, 82 bp, Homo sapiens
gggcgctccaggaggcactcacagcaatcatttggggaagaatctacagttgctgatggacagagtggatgaaatgagccaa

SEQ ID NO: 50773 - DNA, 90 bp, Homo sapiens
tgcagctccgcctcctccgccgcgcagtgccggtggtggtgtgcacattgagccccggtatagacagttcccccagctgaccagatccca

SEQ ID NO: 50774 - DNA, 75 bp, Homo sapiens
agacgcctgagcaagccactgagctggtccatcagctccaggaaagaaccggaggctgaagcaggccaaagaaga

SEQ ID NO: 50775 - DNA, 73 bp, Homo sapiens
gaatctttatctaatcatggaatttctccctggaggctggacggcagtctggaaacgaccaatgagatcttgg

SEQ ID NO: 50776 - DNA, 100 bp, Homo sapiens
gaaaaggaatcgtatcgtatgtccgctatccagaacctccactctttcgcttcaacattgctttatggcatgtgtggtcgtttttcactccattgttgtt

SEQ ID NO: 50777 - DNA, 100 bp, Homo sapiens
gctttttgtccctgtgtgtcatcctgcctgtcaacctctcaggggacttgctggccccacagagcaggtgttgccaatgctgcggttcgtgcagaagcgg

SEQ ID NO: 50778 - DNA, 131 bp, Homo sapiens
ccagaatgaaatccatgctcagagatgccaagaagaatctagacagacaggcctttctaggcaatgaatcgctccctggctaatgtgattcttggaggctatggcaccacttcaacagctggtggaaaacc

SEQ ID NO: 50779 - DNA, 97 bp, Homo sapiens
gtctttgtgtcctgagatcaaatggcacttcattggccacctacagaaacaaaatgtcaacaaattgatggtttctcctctgttgcccaggctggag

SEQ ID NO: 50780 - DNA, 119 bp, Homo sapiens
ttttttctccccgacaatgaagagggcctgaaaatcaggaaatgcctaatcattatgatctagactgccctacagccccaattccatgcacattcagtacttttggttgccatgaaaag

SEQ ID NO: 50781 - DNA, 97 bp, Homo sapiens
ccccagtggtcccctcctgctgggacccagccatgcagactccacctttacaacagcctcaccaggaacaaggctattcaagatctctggcagtgga

SEQ ID NO: 50782 - DNA, 82 bp, Homo sapiens
tggcaccccaacatcacagagacaggggaaatatgtctgaggttcagccgtctgtatatctccccagatacctgaaactgac

SEQ ID NO: 50783 - DNA, 104 bp, Homo sapiens
ccgcctgcgatggggcgagaaaggtcccactgcagccctccaagcagatgagcgggatcgtgtgcagaagaaaaccttcaccaagtgggtcaacaagcacctca

SEQ ID NO: 50784 - DNA, 90 bp, Homo sapiens
ggccgttttacattggctgttttcctcacattcctcaagcaggaagacattctggatgagttactgggtaacatggtgttggccccactc

SEQ ID NO: 50785 - DNA, 82 bp, Homo sapiens
gacagcggcatacagaatgcctatgaccggcgtcgagaatttcaactggttgttgatcattatgaaaatcctagaaacgtgg

SEQ ID NO: 50786 - DNA, 78 bp, Homo sapiens
taaaatccagatgtcatattcaataattggccttttgaatgttttcacaccacagaaatccctagaagaatttcaaga

SEQ ID NO: 50787 - DNA, 90 bp, Homo sapiens
gatgaggatacaatctaccacctacagccaagtggcagatttgttattggtgggcctcagtttggatttaggtggcgagtagaaaaagaa

SEQ ID NO: 50788 - DNA, 82 bp, Homo sapiens
caagagtaacagcagcgccgtcccgtccgacagccaggcccgggagaagcggctatgagaggttttcctccgagtacccaga

SEQ ID NO: 50789 - DNA, 73 bp, Homo sapiens
tccaggaggaggagttgcagagtgatgctattgctgagattagagccatttgtattgaagaaattggagtatg

SEQ ID NO: 50790 - DNA, 75 bp, Homo sapiens
atttgatgctgtggttggatatttagaggacattatcatgggaatcttgtcgattggcctggctgctgcctacta

SEQ ID NO: 50791 - DNA, 101 bp, Homo sapiens
caacctggtgcgcttccggatcgggggcaagcggaaggtgatgcccaagatggaccaggagtccaaaactacttacctggaagaccttccaccaccccctg

SEQ ID NO: 50792 - DNA, 83 bp, Homo sapiens
gccctcccagcccccatcgagaaaaccatctccaaagccaaagggtgtgggccgaagatatgctcatgtggtgttgaggaaag

SEQ ID NO: 50793 - DNA, 99 bp, Homo sapiens
gaggagctgctgaaggaattaagacatggactacgccgacacagagctcctgctttcccgagaaaacgtggaccaggaggctctgctcagctatgccag

SEQ ID NO: 50794 - DNA, 111 bp, Homo sapiens
ttatcgacgtagttaaagcccactagcctaaagccgggcggactgcgttacagaatgtctgaaggggacagtgtgggagaatccgtccatgggaaaccttcggtggtgtac

SEQ ID NO: 50795 - DNA, 75 bp, Homo sapiens
cggtggagcgcagagcgggcgagcgcggaatatgatgaagaatgggctaagaaaattcagagtgaaaagtttcgc

SEQ ID NO: 50796 - DNA, 75 bp, Homo sapiens
gactcaggacggacaagcacagtcttcggaaggtatggatcctggcgggagccagtcaacccctattatgtcaat

SEQ ID NO: 50797 - DNA, 82 bp, Homo sapiens
ctgaaaaccagcgaccacaagcctgttagcgccctcttccatattgggaaccaggctttagcaaagatggatatattggtga

SEQ ID NO: 50798 - DNA, 99 bp, Homo sapiens
agaaaagacagtgttctgctttcatggagttcacagaagagtcgaggagcaaatagtagtgatagtgaagaactttcagctggtgaaagtataactaag

SEQ ID NO: 50799 - DNA, 83 bp, Homo sapiens
aaacaggacctgcctaattaccttcaaacctggttgacatcatggacatatgtgagtccatcctggagaggaagcggcatgac

SEQ ID NO: 50800 - DNA, 82 bp, Homo sapiens
cccgagagccgccgacatgaagaaagacgtgcggatcctgctggtgggagaacgaaactttgagggaaattttgagtcactg

SEQ ID NO: 50801 - DNA, 100 bp, Homo sapiens
ggtgaagcatctgatgcacgttccatccggcgctcagctgggcttgagaaaagtagcagctctgaatccttaagtgacaaaggctctgaattgaagaaaa

SEQ ID NO: 50802 - DNA, 98 bp, Homo sapiens
cacgcttgatccccggccgcggggccaggaagtcggagtttgagccccggaggcagagcggctgccatggggctgcattgtattctcaggctcctatg

SEQ ID NO: 50803 - DNA, 99 bp, Homo sapiens
caccgccgcggacttcgctttgggccatgaccagcgcttctctgaagtagctttggaaagtagagaagaaaatccagtttgcttcttggagaacactgg

SEQ ID NO: 50804 - DNA, 82 bp, Homo sapiens
caggaagtgtcacacagcagtcaagtatgtcccaaacgtctgcatgctgcagacagacctttccgtccttcatgaacacacg

SEQ ID NO: 50805 - DNA, 90 bp, Homo sapiens
ctcatttgaggagtgggaacaggcttcggcgaacacaaagcctaccgtatgtgaacgggagctgtgtgtgtttgcttttcaaaccctggg

SEQ ID NO: 50806 - DNA, 101 bp, Homo sapiens
acctaccacagagccatcaaaatcacagtggatgggccccgagaacctcgaaggcggtgacaaatgcttcccaagctaaagtccctatgtctacagctggc

SEQ ID NO: 50807 - DNA, 98 bp, Homo sapiens
cgggagcacgtcatctccatcgagggtggagagccctggcacgtaccagcaggacccatgggccatgacagacgaagagaaggcaaaggcagtgccac

SEQ ID NO: 50808 - DNA, 130 bp, Homo sapiens
actgccaaatagcagaagaataccatgaggtcaaaaaggaaatcaccctgcttgagcaaaggaagtggtgttcccactgatgaagagcaggcgactgggttggagagggagatcatgctggctgcaaaga

SEQ ID NO: 50809 - DNA, 75 bp, Homo sapiens
ggacggcgagcgcgagcggcgcgagaaagtacggacattgctgcaggagaagaggttgccatcaagcttgaatgt

SEQ ID NO: 50810 - DNA, 74 bp, Homo sapiens
ccggttaggactcggtgtaggagatccatcgaaccactcgctcaggaaccaacatcccgggtaaccgggtggct

SEQ ID NO: 50811 - DNA, 100 bp, Homo sapiens
gccaatgagatatgggcatacagagggacacacggaggtctgttttgatgattctgggagaaactgcttggaaactccctgctgaaactggaaggtgatg

SEQ ID NO: 50812 - DNA, 75 bp, Homo sapiens
catatcgtatcagatggcagacatacatcatttaaaggctccaaaaggaattcttcatttgtctcctgatgttta

SEQ ID NO: 50813 - DNA, 83 bp, Homo sapiens
atttgctcttacgtatttgtgtgacttgactcttcaaacacaaagagcccagccctgaccctgctgctggtggacgaggcctg

SEQ ID NO: 50814 - DNA, 75 bp, Homo sapiens
ggggaaccaaggagacgctcctggcactgcagggctgttgataatcaggtgtatgtggccacagcctctcctgcc

SEQ ID NO: 50815 - DNA, 50 bp, Homo sapiens
agcgtgccccacctccagaaaggtttgtttctgcgtcacatgatcttggc

SEQ ID NO: 50816 - DNA, 76 bp, Homo sapiens
tttctcaacctcatcttctgggttgtccttctattcaggccactcttcgttttccatgtactgcatgctgtttgtg

SEQ ID NO: 50817 - DNA, 98 bp, Homo sapiens
ctctgacatcagctctcctgggaccctccaagagcactagtgtctagaaggcactaaggaatctttagaacacgatgttcttgatgataatacagagc

SEQ ID NO: 50818 - DNA, 90 bp, Homo sapiens
atttgaagacgttccttgaggaggtttgaaaaatactatactggcaattgctggagaagattttgcaattgttgcttctgatactcgatt

SEQ ID NO: 50819 - DNA, 96 bp, Homo sapiens
gctcggctgcgggaaatcgggctgaagcgactgagtccgcgatggaggtgagtcctgcaaatgttaagtgatttgctcaaggtgcccatttcgcag

SEQ ID NO: 50820 - DNA, 100 bp, Homo sapiens
cgctggtggctgaggctgctaggatgtggaacctcattgtgatttcttataggaaagacgtgcaggacacccacacgtacagtgcagaacttgaccgacc

SEQ ID NO: 50821 - DNA, 100 bp, Homo sapiens
tggggaaaggagtagtcggcggtggcggcggcaccaaggcccccaagccctccttcgtgtcgtacgtacgccctgagactgattttgcacgatttagcgg

SEQ ID NO: 50822 - DNA, 90 bp, Homo sapiens
ctgagcgccagagaggacgtttccaactcaaatgccggtggtggtgtgcacattgagccccggtatagacagttcccccagctgaccaga

SEQ ID NO: 50823 - DNA, 115 bp, Homo sapiens
gcacccagaggccggggaccttgccaaccctcccaagaagttcagaggtggtgtggggatgatgtgctcattgagtgaacaagggaagcagctagctatccaggtgtctaatatc

SEQ ID NO: 50824 - DNA, 82 bp, Homo sapiens
cttggactgagtcctgcaggacacaggaattggattcaagtacgtggctctgggagacctcatcatcctcatcacttttggc

SEQ ID NO: 50825 - DNA, 83 bp, Homo sapiens
gccgatccagcctgcggagcctgtggggcaggaggaaatctctgacatcaaagaggaggggaacctagaagctgtcttgaatg

SEQ ID NO: 50826 - DNA, 100 bp, Homo sapiens
cagttagatctcatctctatgggtggaagattactggtggtctacccttggacccagaggttctttgagtcctttggggatctgtcctctcctgatgctg

SEQ ID NO: 50827 - DNA, 75 bp, Homo sapiens
tcctaatccacctcggctgacggcgcgggatccctggctccgcgagaggatgtccggcttccagatcaacctcaa

SEQ ID NO: 50828 - DNA, 99 bp, Homo sapiens
gagggagtttcatgttgggtttagaaacgcatgaccgaaaatcagaagacaaacttgccaaagctacaagagacaggtgttggagcgggccggagagaa

SEQ ID NO: 50829 - DNA, 73 bp, Homo sapiens
acaagtccaagaggaccttctgattagtccacagtcttcctctataggcatcaagcatgatggaaccatgtgt

SEQ ID NO: 50830 - DNA, 50 bp, Homo sapiens
gcactggcgacttcgctcttccagttgttacgaaaagcggctgtactgag

SEQ ID NO: 50831 - DNA, 50 bp, Homo sapiens
gcagcccacccgggcagccctcaccctggactgggaggtgctggtcctag

SEQ ID NO: 50832 - DNA, 100 bp, Homo sapiens
ggccctcctgtgacctgcatgtactgggggattcgcagggaggatgtcgggacaccccggaagctgggaaatgtcccaggctgtccaatcttcctggctg

SEQ ID NO: 50833 - DNA, 75 bp, Homo sapiens
ttcagcagcgaacggaagctcctggaggtcagaggccctttcatcatcaggaggctgaacagtacccagggggag

SEQ ID NO: 50834 - DNA, 100 bp, Homo sapiens
gctgacccaagggaatacctctgtttggacaatagtgcaagatggactcaccctgtcacccaggttggactgcactggcctcaacctcctgagttcaagt

SEQ ID NO: 50835 - DNA, 83 bp, Homo sapiens
cttcatttggtgtcctttcaaatctgccattacccattcccacagtggatgcttcaataccgcgggaggaagcactgaaacaa

SEQ ID NO: 50836 - DNA, 137 bp, Homo sapiens
gagcgagcgaggaggcccgggagcgccgagcgtcgccgccgccgccgccatgaacaactcgggcgccgacgagatcggcttcggaaccaaaaagaagcttcccagagccggggccaggagccccaagcgccctctag

SEQ ID NO: 50837 - DNA, 124 bp, Homo sapiens
gtgctaactaccagacgatgaaagaacatttcctctagtttctggataatgagcaggcacacaggtctctcaggcagctgcagagcttcaacagtactgtatgcagaatgcctgcaaggatgcc

SEQ ID NO: 50838 - DNA, 100 bp, Homo sapiens
ggaccacatagacatttacgcggatgtcggcgaagagttcaaccaggcgaggattaaatccaccacacagggtgaaatctatctccatgacaacattcac

SEQ ID NO: 50839 - DNA, 75 bp, Homo sapiens
acctggataaccttttgctaacaaaaacaggtgccgtgagcgatgtggagatgcaggaacactatgatgagtttt

SEQ ID NO: 50840 - DNA, 74 bp, Homo sapiens
ggaccacggtcaccgtctcctcaggtgaaaggtgtagcagtcactcggcctacacccacagcatcgaccttgtg

SEQ ID NO: 50841 - DNA, 100 bp, Homo sapiens
cttcgctcctttcaagagacctttgagaaagtgcagccacctcccaccacacaagaggagataagcaaggacctcagagccacactgaacgccttcctgt

SEQ ID NO: 50842 - DNA, 90 bp, Homo sapiens
agcccgggcttggcggggactcgccctccgatcccaccagccagcaagctaaagcatggcggccatcccctccagcggctcgctcgtggc

SEQ ID NO: 50843 - DNA, 101 bp, Homo sapiens
gcttcgttaagggactcaggcagtacgggaagaacttcttcagaattagaaaggagctgcttcccaataaggaaacaagtcttgctgtcacccaggctgga

SEQ ID NO: 50844 - DNA, 100 bp, Homo sapiens
ccaaatattatggatcctatctgaagtgggaaagaagcctaaggaataaagtcatctctctagaccataaaaataaaaaacatatccgagggtgtcctgt

SEQ ID NO: 50845 - DNA, 78 bp, Homo sapiens
ccagttatccacggactggaagatcaaaagagggtagctacagcaagctgggtagcaggcagatccaaaggatatcat

SEQ ID NO: 50846 - DNA, 83 bp, Homo sapiens
ggagatcgtcccgcgcctgccggatgccggctccaggagcagcagtggaggtcgggaacgcctcattgtggagcccccgctcc

SEQ ID NO: 50847 - DNA, 50 bp, Homo sapiens
atcaatgctgtccaaacttaaacatggtgagatcggactggaactgttcg

SEQ ID NO: 50848 - DNA, 100 bp, Homo sapiens
gaaatctgaggccatcattgaacatctctgtgccagcgagtttgatgttgatgatggagacacagtgacagatttcatggcccaagagcgagaaagaggc

SEQ ID NO: 50849 - DNA, 75 bp, Homo sapiens
ggtttagtgccctcctgagtgactgcgtcaggcatctcaatcatggagagattaaacagattctagaaaatgaac

SEQ ID NO: 50850 - DNA, 98 bp, Homo sapiens
cccatttagcctgggacagtaaaagagagtgggcgctccctttctcttcctggaagatcagtcccaccccccatttctacatctccttgggtatacca

SEQ ID NO: 50851 - DNA, 75 bp, Homo sapiens
ttaccgagatgcggttttcctcgcagaacgcctttatgcagaaggcttttaaagaagcagttttttcaccgagcc

SEQ ID NO: 50852 - DNA, 50 bp, Homo sapiens
aagctgctcagagtctcaatgaacttgcaacgaaggttttgggaacagta

SEQ ID NO: 50853 - DNA, 100 bp, Homo sapiens
ggagtcctgttccaccttcagagcgtcacggcgtacgccctcatggggaaaatctccccggtgactttcaggctttgttgggccaggagatggttttgca

SEQ ID NO: 50854 - DNA, 83 bp, Homo sapiens
agaccacatacgccaacaccaggaatttacatggggagacctacctaaacccagcttagactagaaagtctagaagacacaca

SEQ ID NO: 50855 - DNA, 102 bp, Homo sapiens
tgacatttaattttagggtcctttatatagaagggagagtagagagtaatgccttctagctttttcctgctgttgcggtttttcttgagaattgatggggtg

SEQ ID NO: 50856 - DNA, 74 bp, Homo sapiens
agacccgtagctaagacgccaggatttcctggaagcagagaaatggagatggaataaactgagactgcaggaca

SEQ ID NO: 50857 - DNA, 87 bp, Homo sapiens
aaacctaaccatgaagacttgaacttaatacagcaagaaagaccatcaagtttaccagtctttaaggaggagaagtacttgaaagag

SEQ ID NO: 50858 - DNA, 87 bp, Homo sapiens
tgcaaaactcattgctcctgtaattgaaacatcttttgctgcaggttatgattgactttgaagattatccaatgagaattttatatg

SEQ ID NO: 50859 - DNA, 75 bp, Homo sapiens
ccttgaagctgccgctgtcgctgctgctcgttcgagtcgcagattatctcaactttggtctcctgggaccactcg

SEQ ID NO: 50860 - DNA, 50 bp, Homo sapiens
cgcatgatggtacccaaagtcaggccactatgtacatggtatttgtatct

SEQ ID NO: 50861 - DNA, 83 bp, Homo sapiens
gagaggctgcctcctgcagcccccatagcagatctattccagaggggagcttcaccacttcattgacggctttaatgaagaga

SEQ ID NO: 50862 - DNA, 51 bp, Homo sapiens
tcacggcgccgagccgcggtccgaatatggctcgtggacagcagaaaattc

SEQ ID NO: 50863 - DNA, 100 bp, Homo sapiens
gctgtggttttgatcatgttgttaccctcggacgtagcccggcttgtattggcagtccagagcgtgagtccattcacatcctgagtgttgatgagaagaa

SEQ ID NO: 50864 - DNA, 82 bp, Homo sapiens
tggcctgggcgctccggtggcggcggagattccctataaggagcccctgctggtgcaccagaactaccgggggccatctgcc

SEQ ID NO: 50865 - DNA, 100 bp, Homo sapiens
actccggagacagcccaaatatcctcggaagagcgctcccaggagaaacaaagagtacacactagatgtgtacagactctcctccgtggtcacacagcac

SEQ ID NO: 50866 - DNA, 101 bp, Homo sapiens
aaaagaattcgctaaatttgaggaagaacgcgccagagcaaaatgggacacaaaaatattttcagaacctggaagcttatccatggccaccgtcgccaagc

SEQ ID NO: 50867 - DNA, 100 bp, Homo sapiens
ctggggaggcgattcatgacagctgagttccttttggaggatccgtcttcaggcagtggcaagctggtgtctcccaagtggaagaatttcaaaggcctca

SEQ ID NO: 50868 - DNA, 111 bp, Homo sapiens
tgagaaagaatgtgaagataccagtttgcgtcaggagacacagttcctctgtgacgagggtgcaggtatctctggggactacatcgatcgcgtggacgagcccttgtcctg

SEQ ID NO: 50869 - DNA, 82 bp, Homo sapiens
aactcacatgagacaaatgcgctcagcttcaattgcaatgtggacctgcaagctgttgtgattttcgaacttgtgtactgaa

SEQ ID NO: 50870 - DNA, 83 bp, Homo sapiens
ctggctctgggccttgaacattccgaaactgtcaagattggcaagttaatttcagaaggaaaatgggtcaagcttgaaaaaac

SEQ ID NO: 50871 - DNA, 58 bp, Homo sapiens
gtggattccagaggggtgacagcaaaacgaagtgacctcacaatgactcaagctacca

SEQ ID NO: 50872 - DNA, 82 bp, Homo sapiens
gacccttcgcgagcggctgctgagcgtgcagcaggatttcacctccgggttttcaaatggaacattttgatgcatcacttag

SEQ ID NO: 50873 - DNA, 74 bp, Homo sapiens
tcaggcacacaggagtgtccagagttgagggtttgtgaaacaggatctgataatcaacctcttggtaataatca

SEQ ID NO: 50874 - DNA, 75 bp, Homo sapiens
ccgaatcgactcagatattagcggcaccctcaagtttgcggggacccaagtaacagggaggaaagcagatgttat

SEQ ID NO: 50875 - DNA, 51 bp, Homo sapiens
tgcagtctaatagtaacacagaggttacgggtaaattccggggaggtgtga

SEQ ID NO: 50876 - DNA, 74 bp, Homo sapiens
cagtacaagcttacgtctctgctcttcagtacaatcctgaatacctgaacagtattttgcaacatgcaaaagat

SEQ ID NO: 50877 - DNA, 82 bp, Homo sapiens
caacattaatcagatactgcatttaaggtattctctactgccgctgatggtcaaacgcaagtggaaattaaagtgtgtcagg

SEQ ID NO: 50878 - DNA, 100 bp, Homo sapiens
cgatgtgatgctggagaacttgacacttacaacctccctggataaggagggttcctgcccccaggtgaacattaactttccccagctcggcctctgtcgg

SEQ ID NO: 50879 - DNA, 100 bp, Homo sapiens
caaccctacctgaaagccatctcaagactcctcagatgccaccaacaaccccatccagcagttccttcaccaagagcccagcattacatcaacatgcccg

SEQ ID NO: 50880 - DNA, 132 bp, Homo sapiens
ccacgagcaggtggtggagcggctgctggaaacgcaagacggtgccgagaagcagctgcgaggttcctttgcccaaagactcaacaggtgcagcagatcccccccagccccacatcgtaggtaagtccgaga

SEQ ID NO: 50881 - DNA, 83 bp, Homo sapiens
tacaacctggtgcgcttccggatcgggggcaagcggaaggtgatgcccaagatggaccagagtcatcttagtgggatttgggg

SEQ ID NO: 50882 - DNA, 100 bp, Homo sapiens
cgggtcgacaagctggggacgcgtcctcagacgcagcgtctagtccctggccatagctccgccgctgcccggtacctgcacatgttgttctttgtcagtg

SEQ ID NO: 50883 - DNA, 89 bp, Homo sapiens
ttttctttactctggggtcccggctgccctgtggcctcgctcctcggagggtgacaaacagcatgtttggtgcttcaagaaagaagttt

SEQ ID NO: 50884 - DNA, 75 bp, Homo sapiens
gactatgacctcgagtctgacatgatcaatgtccgagttaccaccatggatgcagagctggagtttgcaatccag

SEQ ID NO: 50885 - DNA, 100 bp, Homo sapiens
gaccccaccggcacctaccacggggacagcgacctgcagctggaccgcatctctgtgtactacaatgaagccacaggctgtgctgggggccctgggcagg

SEQ ID NO: 50886 - DNA, 90 bp, Homo sapiens
gacctgcagagtgaagaaagctggtaatagatgtctgacaaactaaagaaagacttgtgttacatgttaccagacctaaaagcagacaac

SEQ ID NO: 50887 - DNA, 100 bp, Homo sapiens
ttcagagacactgccaagcagccttagccctagtgtagagatccggaacatggtggcggtgctggaagtcatctccagcctggagaaataccctattacc

SEQ ID NO: 50888 - DNA, 89 bp, Homo sapiens
ggctgattgcattacacctggcctttatgccatggttggtgctgctgcatgcttaggtggtatgtgatccccagctcaggcctgtgcag

SEQ ID NO: 50889 - DNA, 101 bp, Homo sapiens
aagccccggccacctcggcctcttcctgttgcaccaggttcttcgaaaactgaagcagatgttgaacaacaaggaaccagggaaaatgtgtagagggcatg

SEQ ID NO: 50890 - DNA, 101 bp, Homo sapiens
tgcgaccccgagggaagatgaacgggacgcggaactggtgtaccctggtggacgtgcacccagaggaccaggcggcgatgatgtgctgactaaagacgcgg

SEQ ID NO: 50891 - DNA, 51 bp, Homo sapiens
cgggttcatcctacatttttgtgcaagagacacatcaccttcactttggga

SEQ ID NO: 50892 - DNA, 82 bp, Homo sapiens
aacaagtgtgtgcatctggctgttagaagaattcatgctcatccgggtctggctgtccatcagatcatcaccatcaccgtct

SEQ ID NO: 50893 - DNA, 98 bp, Homo sapiens
ggaaagagagagagcagaaaagaagaaacgggcaactaaaactccaatgcaaaatgacgggcagttcaccgtgatccagcttgtgggtatgctcaggg

SEQ ID NO: 50894 - DNA, 75 bp, Homo sapiens
taaccacctcacagattccagcttcggaacaagagaccctgatcctgtttgaccaaactcagagatcaattaagg

SEQ ID NO: 50895 - DNA, 100 bp, Homo sapiens
gccgcgcagctcctggcctattacttcacggagctgaaggatgaccaggtcaaaaagacacgatgaggcgagtggtacgacagagcaagtttcggcatgt

SEQ ID NO: 50896 - DNA, 111 bp, Homo sapiens
ccgcccttgatcttcgctgtggcatggcggacgaggggaagtcgtacagcgggccagcaccttctctctaaagcccaagaggagtttgaggtaaatggctttgcaatagtt

SEQ ID NO: 50897 - DNA, 95 bp, Homo sapiens
agaagcttaagggtcctcctgagaagaagcccaagaaaatgaaggagcgtcctgacctaaaagatgaagatttgataaagtggaaggcactgttt

SEQ ID NO: 50898 - DNA, 100 bp, Homo sapiens
tggaattaggcaaatatggacagatccccagcctgagtcacagtgtgctgtcacagaccagcttcagggccgagtacaaggccagtggcggcccctccgt

SEQ ID NO: 50899 - DNA, 107 bp, Homo sapiens
actgcaatttgcttgaagaacttaaaactcaaagttgtatggattgtatagaggaaacagagcaaatgcagcgttacaatcaaagacttattgaggaattgaaaaac

SEQ ID NO: 50900 - DNA, 75 bp, Homo sapiens
tgaaataacccttgatcctcctcctaattgcagcccacatatgacagtggacatagaggacaacgcagatataga

SEQ ID NO: 50901 - DNA, 50 bp, Homo sapiens
ctccgacggcggtccatcctgtgtgaccgcaacaagggaaaacatggctt

SEQ ID NO: 50902 - DNA, 75 bp, Homo sapiens
aactgtctgtgaggttgtgaatttaacaaatttacattgtatcctgatatcaaaccttccaatattcttctggac

SEQ ID NO: 50903 - DNA, 75 bp, Homo sapiens
gccgccatggccgagagcatcgtggggtggaagacaacccgtgagtattacaccttcatgtgggttactttgccc

SEQ ID NO: 50904 - DNA, 100 bp, Homo sapiens
gaagctcattgaagcagaggacaacatgaactgccagttggggaccctgggagcaggcaaccattatgcagaaatccaggttgtggatgagattttcaat

SEQ ID NO: 50905 - DNA, 74 bp, Homo sapiens
cttcgggctgtcgctcgtctacttcctcagcagcaccttcaagcagcaaggagaacttcaacaatgtcccggac

SEQ ID NO: 50906 - DNA, 122 bp, Homo sapiens
ctaatcagtcacgaggctcccttgacaggcggctttgcatcggaaatcagctctacagttcaggtggaattagtgaatatagggggaactgacattgtggatggaaatcacaaactgacttt

SEQ ID NO: 50907 - DNA, 98 bp, Homo sapiens
ctatgaccacatgaccagcagggaccttgggtcacatgacaatctctctccaccttttgtcaattccagaatacaaatacctgaagctgcgggagcga

SEQ ID NO: 50908 - DNA, 83 bp, Homo sapiens
gatccagcaaggtcggcagagcaaggggcttacgcagaaggacctggccacggagatggcagcagaaaaggccaaagcagcag

SEQ ID NO: 50909 - DNA, 100 bp, Homo sapiens
gaggagggctgtccggggctttgggatcagctcagctactatttaataaaacaaaatctgtagaattcacgttttgtaatgacactgtcgtcattccatg

SEQ ID NO: 50910 - DNA, 75 bp, Homo sapiens
tgcacttcttttttgagaaaggaaggaatatatcctgactgattgttttgcacactagggaccaagaagccctcg

SEQ ID NO: 50911 - DNA, 110 bp, Homo sapiens
attacctggacagaaaggcgacaaaggtgatcctggtatttcaagcattggtcttccaggtcttcctggtccaaagcacttttccagccattaactccaggctctcgaga

SEQ ID NO: 50912 - DNA, 80 bp, Homo sapiens
agaatggaaaaccagcgacctttaccagcttttcagtgcctttggagaatgaagtttctagattagaagacataatgcag

SEQ ID NO: 50913 - DNA, 75 bp, Homo sapiens
aggacatgaagacagttcctgtcataccttttaaagttaatgaaggagttcccccttctgagtatgttcaatatc

SEQ ID NO: 50914 - DNA, 75 bp, Homo sapiens
agtccctggatcaccgacagcacagacagaatccctgctaccagtatctttcagatgaaggcattgaagcttgca

SEQ ID NO: 50915 - DNA, 100 bp, Homo sapiens
ccagaaaaattacagcacatctcagtgaatttgcaagtggcctgggctgtagagacagggaagtaccaggaaggggtggatgaccctgacccagctaaat

SEQ ID NO: 50916 - DNA, 49 bp, Homo sapiens
gcaggagactgaccgcaacggcagggaattgaatgatctggcacgggac

SEQ ID NO: 50917 - DNA, 76 bp, Homo sapiens
cagattcgcagtggtcgcttcttctccttggtccatctcccatttgcagtggttggcagcaccgaagaggtgaaga

SEQ ID NO: 50918 - DNA, 100 bp, Homo sapiens
cgcagacctggtggaggtgttaaatgaaagtactccaaagattcaggtttactcacgtcatccagcagagaatggaaagtcaaatttcctgaattgctat

SEQ ID NO: 50919 - DNA, 50 bp, Homo sapiens
cggctttcctggtcagcagcgacttggaagtaccaccaagaacagggaag

SEQ ID NO: 50920 - DNA, 74 bp, Homo sapiens
aagtagctgtgaagatactcaatcgacagaagattcggagccttgatgtgatgagcacaatgcctggactcccc

SEQ ID NO: 50921 - DNA, 75 bp, Homo sapiens
cacagggcccgatacttctggggcaacctacccgggatgaacaggctcctgcaggagatgggtcacagacccgag

SEQ ID NO: 50922 - DNA, 138 bp, Homo sapiens
aagagtttgaaagcgtgctccacaaatatttacagtcggaggagtactcggtgaaatcctgtcctgaagactgtaagggtggctgtgctggctctggctgtggcaaatgtgactgccatggagtgaagggacaaaagg

SEQ ID NO: 50923 - DNA, 90 bp, Homo sapiens
tggaaaatcgcttggttaaaacctgacacttttaacaggttctccagcatttggctcaaggccccaagggcacatgtgacaagaaggcgc

SEQ ID NO: 50924 - DNA, 100 bp, Homo sapiens
attgtggtggagtccaccccgctgtggaaaatggcaccagggtgtgaattgtgcatcccgcggggatcactgccaccaccccctgaaccacggatttgac

SEQ ID NO: 50925 - DNA, 96 bp, Homo sapiens
gcagtcgttcgcccaggctttggcccggcttccggagtgagaaagatcagtctaaagaaaaggagaagaaagtgaaaaaaacaattccttcctggg

SEQ ID NO: 50926 - DNA, 51 bp, Homo sapiens
cgggagggctggctcctgaagctggccctgcagagcccagggagatggaag

SEQ ID NO: 50927 - DNA, 100 bp, Homo sapiens
gagttccactgggcgtcctgactggacctgcattgtggtgggttttacttcaggttatgtacgcttctacactgagattgataatattgtcctgatgaag

SEQ ID NO: 50928 - DNA, 100 bp, Homo sapiens
ttgtgtgtgtggcaggggttgttttgagtcccaccatcttccatccctgatgcttggagaagctgaggacacacagggttggtgttcgaggaagagacat

SEQ ID NO: 50929 - DNA, 98 bp, Homo sapiens
agacacgccgccgccgccgccgccgccggcgcggaaggacgaggctgaggcgagaaacgagggtgtccgcaatgttgccagtgtctgtctgcagattg

SEQ ID NO: 50930 - DNA, 76 bp, Homo sapiens
tcagcctccctagtagctgggactacagcactctacacccccaagtgcatatgggtctgtcaaagcctatactaac

SEQ ID NO: 50931 - DNA, 110 bp, Homo sapiens
gagtactcggaaattgttggattgccagaagaagaagaaatcccagcaaataggaaaattaagtttagtagtgctcctattaagggggcagcactgaaatacttaccaac

SEQ ID NO: 50932 - DNA, 75 bp, Homo sapiens
gatacaaatcaggattcactcagacaggcatcaagcatgatggaaccatgtgtgatacctgccgccagcaaccaa

SEQ ID NO: 50933 - DNA, 100 bp, Homo sapiens
ggacacggcgcggcgctggcgctgccggagctgtcgacccggcctggcgccggactagctgacatagcccagagatacaggataagcaaatacccaaccc

SEQ ID NO: 50934 - DNA, 100 bp, Homo sapiens
ctgacatccaaggaggacccaaaggagcagaagcttctgttaaggattctcagaagaatggttgatgataattagaagcatgctttccactgaacttccc

SEQ ID NO: 50935 - DNA, 75 bp, Homo sapiens
ggcgcagctgatagcaggaacagaggaatgtttgctgggggattgaaggagatggaacaggaagaggtcctgatc

SEQ ID NO: 50936 - DNA, 82 bp, Homo sapiens
atggaaggggtcctcagagttactgggctacctgcagaccagcagcctcttagccagtgaccaccacctcactgaagaggag

SEQ ID NO: 50937 - DNA, 97 bp, Homo sapiens
gcaccgttacaatgcctatccttcagagcaagaaaaagcgttgctgtcccagcaaacacacctgtctacgctacagttccagctattcttcagatgc

SEQ ID NO: 50938 - DNA, 100 bp, Homo sapiens
cggccagcgcgcattcggccccggacgaaggtactcgcagcacttggagcgcagaaccggccgcgcccggacactcatgaggaccatgatacttccactg

SEQ ID NO: 50939 - DNA, 100 bp, Homo sapiens
tctgctgaggcccagagacctgagcagctctgcaaggttctaacaggttttcaaatggaacattttgatgcatcacttagtacctatttcaaggcattgc

SEQ ID NO: 50940 - DNA, 98 bp, Homo sapiens
gcagctgaaaatccatcagtgccagcataccaatgaacctctattcaagtcaatgagctgaaggagaaaggcaacaaggccctgagcgtgggtaacat

SEQ ID NO: 50941 - DNA, 100 bp, Homo sapiens
gctcattaccttgcagtatttttctctggaaatccttgtaatcttgaaggaatggacctcaaactgtcaccactgactaaagaagagaaaactgcggcag

SEQ ID NO: 50942 - DNA, 75 bp, Homo sapiens
gcggctctccgccgtccccagccctgcctctccctgggctctggattattacaaaaccggtatcatcaattgtcc

SEQ ID NO: 50943 - DNA, 49 bp, Homo sapiens
ggcggagcggccggtccacggaggagggaatgcagagagcaaccaatgt

SEQ ID NO: 50944 - DNA, 90 bp, Homo sapiens
attcgctatacccgatcgcggttttaatcgacgagctccgcaatgaagacgtgcaggccaaagatgaagaggaagcctttctggattgga

SEQ ID NO: 50945 - DNA, 101 bp, Homo sapiens
cggagggaaccatgcgaggttctgagaattgcggcgagggtcgcctcgagagacggtttctgaggccgccgctgcccagcagatcccgatctcccttcaca

SEQ ID NO: 50946 - DNA, 100 bp, Homo sapiens
gaaaaagtcgtggaataggcactgttacttttgaacagtccattgaagctgtgcaagctatatacctacatcggctctgtgctcatctctgtaaacccct

SEQ ID NO: 50947 - DNA, 82 bp, Homo sapiens
tcagttggaagcagccgatccagcctgcggagcctgtggggcaggtgacctgagcatctctgcagaccgcctgagtgagaag

SEQ ID NO: 50948 - DNA, 100 bp, Homo sapiens
cctcctcttggcttcgagatggcttcggggacaggggaggcctcctcaggatccacagatgcccagtctcccaagaggggcctggtccccatggaggaaa

SEQ ID NO: 50949 - DNA, 75 bp, Homo sapiens
gacggctgcccttcaagtaccatctattatcctcccagtccacaacgctgaaccgtggctggacgaatgtttgag

SEQ ID NO: 50950 - DNA, 100 bp, Homo sapiens
gccagatgtggaaccatatccgtggacctccatatgctcataagaacccacacaatggacaagtgactaaatgtgttaaatgggcttgccaacaatatgg

SEQ ID NO: 50951 - DNA, 87 bp, Homo sapiens
gtggcttccttcgttattggagccaggcctacaccccaggtcaaaatgcagatcttcgtgaaaacccttaccggcaagaccatcacc

SEQ ID NO: 50952 - DNA, 100 bp, Homo sapiens
ggtcgatgaggactcggagcctgagcgggaggtgcgaggatgatcgtggagctacatcgaaaggtctccagcctcatcgaattcttgaagcagaagtggg

SEQ ID NO: 50953 - DNA, 100 bp, Homo sapiens
agttaagctctctgaaaagaaggtggcagacccggtttgctgatcgccccagggatcaggagtacataccgagcatcaaatattaaggcacccggagaac

SEQ ID NO: 50954 - DNA, 98 bp, Homo sapiens
atgctgcgcggccttcccatcaccatcacagagagcgatgtgtatgcaacagcgttattgcaacaggctaacgaaaacagacaaaattcaactggaaa

SEQ ID NO: 50955 - DNA, 80 bp, Homo sapiens
gcatcagggaggctttcagccggagaagcgagtttcagctgaatctggccaacctatttgtggaaatggaatggtagaac

SEQ ID NO: 50956 - DNA, 75 bp, Homo sapiens
tctctctcgttcaaggaagcgcaggctgaggaatctgtcttggaggacatcagaaggtgaattttccaagttctt

SEQ ID NO: 50957 - DNA, 89 bp, Homo sapiens
cgtgaccttaaccggaggctccaggacgtgctgctcctgcggcttggcagcgtggaatctaatcagaaaagctcattccaagaaatccc

SEQ ID NO: 50958 - DNA, 100 bp, Homo sapiens
caaatatagtcaacagtgtagtggctctgctgtccattgcgggggtgcttgttggatctggattcctcaggtgtggattctgcaatgctgcacagaaacc

SEQ ID NO: 50959 - DNA, 99 bp, Homo sapiens
cctctgagaaaccttggacagcagattttggtttaatatctgattgggacaacattcagacccatttccagtcatgaacatatctgaagagatggatta

SEQ ID NO: 50960 - DNA, 75 bp, Homo sapiens
cctcagcctcctgagtagctgtgattacaggtactggacacaggagagcagctgatggtccccgtggaagtcctg

SEQ ID NO: 50961 - DNA, 75 bp, Homo sapiens
tcttagaagtgggagctgaacggggaagatggtgaaaggaatgggaggtgctatggatttagtgtccagtgcgaa

SEQ ID NO: 50962 - DNA, 88 bp, Homo sapiens
agtctctgcggccacctccggaagggtccgccggctgtgctggtgagtctataggatcgggtgaaccaccaaccggcaattgaaagct

SEQ ID NO: 50963 - DNA, 101 bp, Homo sapiens
ctaaaagactgaaatgggggcgaccattcttaggggaagactcaggagagaaggacccaagaccccggaagcatgccaacatggaaaactccaactccaaa

SEQ ID NO: 50964 - DNA, 95 bp, Homo sapiens
atcgtgcacatccaggctggtcagtgtggcaaccagatcggtgccaagtcactcaagactgcttgcaactgattgcagacagtgaaacaccaact

SEQ ID NO: 50965 - DNA, 75 bp, Homo sapiens
attccaagtaactcttatttggtggccagcatcgaaatgttcagccttttagtgatgaagatgcatcaattgaaa

SEQ ID NO: 50966 - DNA, 50 bp, Homo sapiens
cccacgcgcagcgacagggagagactgtgccctgtccacggtgcctcctg

SEQ ID NO: 50967 - DNA, 100 bp, Homo sapiens
ttcttctcccagaatatggaggcaccaaagtagttctagatgacaaggttcttgccagaaaccttatgttgcacttattcatggaattacaatgggtggg

SEQ ID NO: 50968 - DNA, 93 bp, Homo sapiens
gaaccaacccactttctcggcgccgcggctcttttctaaaagtaacgaagtcggcctactggagttcttccaaaatgtgataaaagaaactag

SEQ ID NO: 50969 - DNA, 82 bp, Homo sapiens
ggagttgcgtcccggggacttggggccgcagggagtctcacagaaagttctccgctcccagacatgggtccctcggcttcct

SEQ ID NO: 50970 - DNA, 97 bp, Homo sapiens
atccgggtcggctcctggccggagcaagatggctgagggcgagcggcagccgccgccaggatgttttagaagaatgtatgtctcttcccaagctatc

SEQ ID NO: 50971 - DNA, 100 bp, Homo sapiens
ttttggacgatgtgcggcggatgaacaagcggcagggtgtgggccgaagatatgctcatgtggtgttgaggaaagcagacattgacctcaccaagagggc

SEQ ID NO: 50972 - DNA, 74 bp, Homo sapiens
caaaaacaaaattctgaactcaggacttggcaacacctgtggaatcctctcaagaggaacagtcattgtgtgaa

SEQ ID NO: 50973 - DNA, 75 bp, Homo sapiens
gccgccgctgctacctgcagcgccgtgtggcacgacacaaaaatcagaacccgagcaacttcccgagaagagaag

SEQ ID NO: 50974 - DNA, 100 bp, Homo sapiens
ggacgtgcccacgctgaccggagccttcggcatcctggcggcccacgtgcccacgctgcaggatctcacccagggtggcagaaggaggccttctggagct

SEQ ID NO: 50975 - DNA, 100 bp, Homo sapiens
gcgagtccccagcagggcccctgggctcccggaagaaaaacacaccttgactttagtcagatacatcactgtctgttaaaggaaaccaagcgtgaagtgg

SEQ ID NO: 50976 - DNA, 98 bp, Homo sapiens
agaatacctcaaacgtctaccattacagtgattcaattagcagagcctcacagacaatggccaaatgtgtcaaagctgtcacagagggtgcccaggca

SEQ ID NO: 50977 - DNA, 75 bp, Homo sapiens
ttacttactgcggccgcccggctcttgggaaccaaggcctactcactgcagcacagcaaggaggaccggctggcg

SEQ ID NO: 50978 - DNA, 100 bp, Homo sapiens
aactacatcatcaacatcaagtttgccgaccagcacgtgcctggttcctgggtggagctacccatgaacagcagcaatggcaatgataatggcaatggga

SEQ ID NO: 50979 - DNA, 74 bp, Homo sapiens
aacacctaggaagggagaactggtagcagtagctgatgtgcagtttggccccatgagatttcatcaagatcaac

SEQ ID NO: 50980 - DNA, 75 bp, Homo sapiens
gcttttccagttttggtctggaggatctgggcccccctggaatgttccagatagagatgggatttcgccatgttg

SEQ ID NO: 50981 - DNA, 90 bp, Homo sapiens
attcccaaatggatgatgttgaagttgtttatacaattgccaaggccacctttgatgccatttctaagacctacagctacctgacccccg

SEQ ID NO: 50982 - DNA, 79 bp, Homo sapiens
tctccgggatcaggagatcaagttcaaggcgtcacctcctcctgtcgcctggccctcgccatgcagaccccgcgagcgt

SEQ ID NO: 50983 - DNA, 90 bp, Homo sapiens
ggcggggccgtggccgcgagctggaggagcaccgcctgcggaaggagtacctggagtacgaggagtgatgcttccccctctgtgaatgtg

SEQ ID NO: 50984 - DNA, 74 bp, Homo sapiens
cgccgagaggaggcctatgagaatcagccccggggcccagcgacctgacagttacaggactgaagtctttctcc

SEQ ID NO: 50985 - DNA, 75 bp, Homo sapiens
tgagaaccgagtcagtgctcttacccagatgccttcaattaagttgcagagttctgatggagagatatttgaagt

SEQ ID NO: 50986 - DNA, 100 bp, Homo sapiens
ggtgctctgggactacacggccgacctggatgtgcacggcaagggtggagatgttacagccaaaaatatctggttggcagaaagtgttctggatatcctg

SEQ ID NO: 50987 - DNA, 80 bp, Homo sapiens
gttctgaagcccgagaggagccacaatggagacgccgccgctgcctcccgcgcaaaaagggcagctagctgtagaaagag

SEQ ID NO: 50988 - DNA, 75 bp, Homo sapiens
acctccggatactcagtttgtaaaaacatggcggatccagaattctgaagttcaccatgtctattctcaagatcc

SEQ ID NO: 50989 - DNA, 74 bp, Homo sapiens
gaggacgaggacgacgaggaggaggaggaggaggaaaaaggcaccagttagaagacaaatgaaagctaagcaac

SEQ ID NO: 50990 - DNA, 101 bp, Homo sapiens
ggcacatgcaggccagcctggtgcggacacccctgcagggcatccttcagctgggccaggtggagttcacgagggaggtggaggaggagcctgggattcac

SEQ ID NO: 50991 - DNA, 82 bp, Homo sapiens
gggccgttactgattgagctacgaggaccaaggtagaagtaaaatctggagaagaagatgaagaaattttgtttaaagagag

SEQ ID NO: 50992 - DNA, 50 bp, Homo sapiens
caaggaactctttttacaggccaactcccagctgccaaaggctttgtggc

SEQ ID NO: 50993 - DNA, 82 bp, Homo sapiens
ggactgtctaatgagattggagctattgaaaaggctgtggctcaccagcatttcagcttcaggatggttgtgagtacgtgtt

SEQ ID NO: 50994 - DNA, 75 bp, Homo sapiens
gtagccaagaactattcggttctctacttccaacagaagcaagaaaagcctaggcttctcgagcctttggattat

SEQ ID NO: 50995 - DNA, 100 bp, Homo sapiens
tacgagaaaaaaaagattccagatgcaacccctctccttgatgccagctcactggagtatctgtttgctcagggacaattccaaatgagggccttaaatg

SEQ ID NO: 50996 - DNA, 75 bp, Homo sapiens
atgagctgcatcgggatggcttctcctgcagtgactcgggggagtcagaggccgacctggagtgcagcttcgcag

SEQ ID NO: 50997 - DNA, 50 bp, Homo sapiens
cgagtgaggaaaggaggtactgtaggtccaaactgaagacggtacatgag

SEQ ID NO: 50998 - DNA, 100 bp, Homo sapiens
ggaagttatggacttggaggagagaaccaagaatggagttatacgggggcagccctctcctttaggaatccagatcttacataagatggaagtctctcac

SEQ ID NO: 50999 - DNA, 100 bp, Homo sapiens
ctgcgtacattcggggtgccagaaggaaagcatagatctgctttgccacggcatggaggcagaagatctttcaaaggctgaagacagaaatgaagaccca

SEQ ID NO: 51000 - DNA, 100 bp, Homo sapiens
caggctccatcagcctcggtgacagtgtggagatccctgccctcaaggtagattggggtcaactggactacttagttgtagacatgccaccaggaactgg

SEQ ID NO: 51001 - DNA, 83 bp, Homo sapiens
gcagcgggtgggcgacctcttccagaagctggctttatcctgtggataaacgcagagtgaacgagtttggggagtcctacgag

SEQ ID NO: 51002 - DNA, 75 bp, Homo sapiens
gccgaactagatgagaccaaaatcattctgggggaaatttgcagtggtgagaaaatgtataaagaaagattctgg

SEQ ID NO: 51003 - DNA, 100 bp, Homo sapiens
attgtcaagctgcaggtcatcaacctggcagccaagctctacctgaccaactctaaacagtttttggctttcacccccaaccagtgaccaaagacttgac

SEQ ID NO: 51004 - DNA, 98 bp, Homo sapiens
ctgatgtgacccatttgctgctcaaagccatggaacattttcccaatcaccagcagcccactttccttgtggaactgtccagagtgctggcaaatcca

SEQ ID NO: 51005 - DNA, 100 bp, Homo sapiens
ccagcaccccatacggaagggtctgcatcacaaggccagtacgggatccctgaaccatggaattttccttttcggaggagctactggtgcggacctcggc

SEQ ID NO: 51006 - DNA, 101 bp, Homo sapiens
tgcaggcgggggtgctgcagaggacacgaggcggcgggctggagacatggaccgcggcgagcaagatgtgctggtggacggacagccatgtgaccgcgagg

SEQ ID NO: 51007 - DNA, 51 bp, Homo sapiens
gcacctgacggcgtgaccgacccgagccggaatcccagtcagaagttccag

SEQ ID NO: 51008 - DNA, 73 bp, Homo sapiens
ggatttctgctcacctggagaagggatggaaatacttcaacaagcttcttggacacttaatgattgttggcaa

SEQ ID NO: 51009 - DNA, 75 bp, Homo sapiens
gtcccagcggcagcagcagcggcgggaggagcctccgggtgaaaatgcctcgtgtaaaagcagctcaagctggaa

SEQ ID NO: 51010 - DNA, 96 bp, Homo sapiens
cctgaccccgcggccggacgacccaagcccgctgagcaggatgaggtgcaccgtccaggtgaggttagagctggggcatcgcgcccaactgcgcaa

SEQ ID NO: 51011 - DNA, 100 bp, Homo sapiens
gtcaactatcgacttggagtactcggttttggcacaaataccagtgggaatagtatttttggaagtaaaccagcacctgggactcttggaactgggcttg

SEQ ID NO: 51012 - DNA, 98 bp, Homo sapiens
tcaggccaatggaccacaaattgctccgcccaatgccattctggaaaaggtcttcactgcaattacaaaggacatggatttgattgacatactttgga

SEQ ID NO: 51013 - DNA, 133 bp, Homo sapiens
ccggaggaccacaggcttccagtacgagctggttaggaggcacagggcgtcggacctgcacgagctgtctggtgagaagccctaccactgcaactgggacggctgcggctggaagtttgcgcgctcagacgag

SEQ ID NO: 51014 - DNA, 95 bp, Homo sapiens
cgcctcaggcacctcggcccggcgcgggtccaagcctgtagccccaaatcggataatctctgcagctgataacaagcaaaagagaagccaggcaa

SEQ ID NO: 51015 - DNA, 89 bp, Homo sapiens
cagctgaaggatgcccacaggtcccatcccttcatcaaggagtaccaggccaaggtaaagaagctaagtggaagagtgtttcctcctct

SEQ ID NO: 51016 - DNA, 129 bp, Homo sapiens
aatttccaaaatggaatagaatgtggtggtgcctatgtgaaactgctttctaaaacaccagaactcaacctgaatcaggaaacccaggcccaacggcaggtggatgcaagaagaaatgttccccaaaac

SEQ ID NO: 51017 - DNA, 100 bp, Homo sapiens
tgcaatatgacctatggatcatttggtggtgtaaaagatgaagctactgaatctttacatcaaacgtgcacaaacaggttctggaggagctgatcccact

SEQ ID NO: 51018 - DNA, 75 bp, Homo sapiens
aaggacacggtctacaccgacttcgacgcaaacggggattcagcgtccgatcctttggaacagggactcacgtga

SEQ ID NO: 51019 - DNA, 100 bp, Homo sapiens
aaaacctggagtgatgtggctgaataccgcatgatctgaagactgcactggtggctgcgctggatgctgacaaatatgagaatgatccagaattagaaaa

SEQ ID NO: 51020 - DNA, 100 bp, Homo sapiens
aaagaggagggagtgagtgtgtgtggagggttctcatgtatcagccatcttctgtaagggtgcccagtgtgacttcggttgatcctgctgctattccgcc

SEQ ID NO: 51021 - DNA, 51 bp, Homo sapiens
aggtttttgtggacatcgaatttacagctattccaatagaaactgctaagc

SEQ ID NO: 51022 - DNA, 100 bp, Homo sapiens
tggccccatagtgcagcgagccttggagctggagcaggagctgcgccagatcgttctgaagtctccagcctgagttcagaggcccctgagacccctgaga

SEQ ID NO: 51023 - DNA, 50 bp, Homo sapiens
gctgtcaaagacactgtgaacagggtgggaaggatacgagcaagataaag

SEQ ID NO: 51024 - DNA, 96 bp, Homo sapiens
ttccacgacagaaaaacatacaagactccttcagccaacatgatggtactgaaagtagaggaactggtgctggagaatctggtaaaagcaccattg

SEQ ID NO: 51025 - DNA, 142 bp, Homo sapiens
cacggccgacatgttcacgcacgggatccagagcgccgcgcacttcgtcatgttcttcgcgccctgacaatgcagatcttcgtgaagactctgactggtaagaccatcaccctcgaggttgagcccagtgacaccatcgaga

SEQ ID NO: 51026 - DNA, 49 bp, Homo sapiens
cttaacttccaaacatcatgaagggagattttgcagctgctgccggcaa

SEQ ID NO: 51027 - DNA, 117 bp, Homo sapiens
gtcttctcttcctcctccaccgagtcgtgctctcgccccaacccgcgcgccagtactatactggcaattgctggagaagattttgcaattgttgcttctgatactcgattgagtgaa

SEQ ID NO: 51028 - DNA, 88 bp, Homo sapiens
gatgctgacagcacagaatcggcttctgaatgcttatgatgaacatcaaacactcctgaaagaacaggattctttaaaaaggaaagca

SEQ ID NO: 51029 - DNA, 100 bp, Homo sapiens
agggtagcttgcacctgtcccaactgtaaagaaggtggtggaagactacagtgactatggtgggaagcttctctccaagacactcaaagtgcatggtgaa

SEQ ID NO: 51030 - DNA, 75 bp, Homo sapiens
cggggccgcccggaacttggtgcagaaggtggtataagttgaaatccaaaccaggaaagaaggacaaggagcgag

SEQ ID NO: 51031 - DNA, 75 bp, Homo sapiens
atcaacatgctatgggtatggaaacctacaaacatcttttcctggagaaggactggtgaggaatattttaatatc

SEQ ID NO: 51032 - DNA, 75 bp, Homo sapiens
cacaaagggaccttcctagctctgactgaaccacggagctacctgaacgacctggagcgtattgcacagagtgac

SEQ ID NO: 51033 - DNA, 90 bp, Homo sapiens
gagatgaatctctaatcggtggccgccagacacccgcggcgaaggcggctcgggctcgggctccgggatgaggagaatttctgtgccact

SEQ ID NO: 51034 - DNA, 100 bp, Homo sapiens
ccggaagtcaccattggagctcatcagactgaccgtgtcttacatcagttcagagagacaggtgatttggcttctgcacagttaggaggagcaccaaacc

SEQ ID NO: 51035 - DNA, 98 bp, Homo sapiens
gaacagctgtggaaagaagttgcaaaacactggagagagtgcttctggaagcatatgcaagaaactgttcacagtgcacagtgttgccttccaggagt

SEQ ID NO: 51036 - DNA, 100 bp, Homo sapiens
aaaataagctggaaaaatctgaggcggtgtggacacggctgcggtgggcggggtcttcgacgtctccaacgctgaccgcctgggcttctcagaggtggag

SEQ ID NO: 51037 - DNA, 82 bp, Homo sapiens
atggagctcgagaacatcgtagcgaacacggtgctactcaaggcccgggaaggtttggtgcacctcgatttggaggaagtag

SEQ ID NO: 51038 - DNA, 98 bp, Homo sapiens
cggaatgctgcccgatggccctgggtcctcgctgtggggcaatccgggcttgcagacgaggttagaaccatcagagagccttgaggaaaaccagcgga

SEQ ID NO: 51039 - DNA, 82 bp, Homo sapiens
atttcagatgtgttcctcaatgaatcacgtgttcaggcgcttcgtggaggttggccgggtggcctatgtctcctttggacct

SEQ ID NO: 51040 - DNA, 87 bp, Homo sapiens
aggatgctcctgcctcccagagaggggagccggcgaggatcaaaatcttcgaaggaggtattctaccttgtaaatactgttatttgt

SEQ ID NO: 51041 - DNA, 109 bp, Homo sapiens
ctgccggccgtctgtcccagtgatggatgcacctggaaggggaccctgaaagaatacgagtgatgatgacagcctcttcatctatgactgcagtgctgcagaaaagaag

SEQ ID NO: 51042 - DNA, 51 bp, Homo sapiens
gtggtcttcatcgaagatgctattcaggaagctttgacaggtccatacctg

SEQ ID NO: 51043 - DNA, 130 bp, Homo sapiens
ataccctgacactgcgatgttctgcaggacaattgcaccgctttagagcttccaggaggccaagcattatggcagagatctcgttccgcgtgtggcagtgtggtggcagcctggagatcatcccgtgcag

SEQ ID NO: 51044 - DNA, 75 bp, Homo sapiens
tgagcgttccacccgtgccgccccgcaccggacccccccgcctgctggtgagctatgccggcttctttccgcagc

SEQ ID NO: 51045 - DNA, 100 bp, Homo sapiens
cggagagcagcagccgcccgcttcaaccccaggggaccagaggaactcagccctgattgcggagctggctaaatatgaatacatggaagaacaagtaatc

SEQ ID NO: 51046 - DNA, 100 bp, Homo sapiens
ggagaaccgggcccagcagcactggggactggactcgggccatatccgtggtgccgtcaacatgcctttcatggacttcctgactgaggatggcttcgag

SEQ ID NO: 51047 - DNA, 100 bp, Homo sapiens
agacggctcacctgtgcgggatggaacaaaagttgaaggcacagttaaatgaaacactcacaaaacttagaactgaacaaaatgaaagacagaaggtagc

SEQ ID NO: 51048 - DNA, 89 bp, Homo sapiens
tgagaagttataaatttgccatctccctctgcacaacttacctttgggtttgcatcactggttgctgtttatgttgttggggggttcct

SEQ ID NO: 51049 - DNA, 75 bp, Homo sapiens
gcaaaatgttggataaatatatctatggagcacaggcctatggcatgtctgcgttacctttaaatctgataaaag

SEQ ID NO: 51050 - DNA, 100 bp, Homo sapiens
aaagtggttcaacagctccggctggaggccggactcaaccgcgtaaaagtcatgcaagacaagataatctgccttccgaaaagagtgcagcctgctcaga

SEQ ID NO: 51051 - DNA, 96 bp, Homo sapiens
ccgggatcgtgaccgagaccgtgaccgagagcgtgaccgagagcgcgaatatcgtcatcgttagaagaagagtcaagtaccattggccaggatcaa

SEQ ID NO: 51052 - DNA, 75 bp, Homo sapiens
tgggcaactttctgggatccagcgagcgacatgttataggtatggacacagtaagagtcctcatttcagagagaa

SEQ ID NO: 51053 - DNA, 75 bp, Homo sapiens
gtccagcagctgcgcaccatccgcgaatggctggtgtcctggggaccgcatgggaaacatgccctgaactgtcac

SEQ ID NO: 51054 - DNA, 50 bp, Homo sapiens
gaattatgggagcgcatttccccaggctttgagaattcacgtgagtggct

SEQ ID NO: 51055 - DNA, 100 bp, Homo sapiens
agctgggccgcaggggcgcgcagcgcggggagctgccaggcatcttataagccattgttgaagcaagttgtggaggaaatatttcatcccgagaggccag

SEQ ID NO: 51056 - DNA, 100 bp, Homo sapiens
gttaccagccaatcattaaagaaattttaaaaaattttccaaaagagagatggggctcttggctttgggcctcagtgcaagtccattggaaaaggcagct

SEQ ID NO: 51057 - DNA, 79 bp, Homo sapiens
cccagccccacagaccagcccagcattcagggtcgcggagcctcgccggccgccatgtggagctgcagctggttcaacg

SEQ ID NO: 51058 - DNA, 80 bp, Homo sapiens
attgtagctgacgaagcattttgcaacgcagttcggagttattatgagccatgaagctcatgactgctctggtgaatgtt

SEQ ID NO: 51059 - DNA, 96 bp, Homo sapiens
tccgcaggcgcaaggcttcaggcgacccgtactgggcctactctgagaaatgatatcgccatggcaattacaaaatttgatcagtttgattttctc

SEQ ID NO: 51060 - DNA, 74 bp, Homo sapiens
aatcaagaagctgaatttccaggccttcgccgagctgtgcagcttttcctccgcaaccatgtctgacaaacccg

SEQ ID NO: 51061 - DNA, 95 bp, Homo sapiens
aaaaagcaagctgaagacatcaagaagatcttcgagttcaaagagaccctcggaacgttggacacgagttgccgctggttgtccaaatcaacaac

SEQ ID NO: 51062 - DNA, 100 bp, Homo sapiens
ttcagacttctccacgaacacaaagggagatgaccaggatagtgaaaagtcaaaaccagcaggctcagatggtgagcggcggggggtaaagagacagcgg

SEQ ID NO: 51063 - DNA, 82 bp, Homo sapiens
gcaccatggaggaggacgacagctacggcttcagtttcacattcttggtacctcctggtggtgcctgggagggagccactgc

SEQ ID NO: 51064 - DNA, 98 bp, Homo sapiens
gagagctccctcaagcccacagataggagggaccccgtgctggtgtgcagggccatgtgtgctatggttatcaatactctggctgaccatcatcatcg

SEQ ID NO: 51065 - DNA, 100 bp, Homo sapiens
tggatggtcaagagcgtgccctacttcaaggataagggtgacagcaacagctcggcgggctggaagcccaaagagtcgattgatccaattaaagaaagag

SEQ ID NO: 51066 - DNA, 104 bp, Homo sapiens
caccgacaagatcaccacggacgagatgatcaaacgcctgaagggcttccgttacaagatgaggtctgtgtatgctcacttccccatcaacgttgttatccagg

SEQ ID NO: 51067 - DNA, 75 bp, Homo sapiens
cggagctgctggtttcattcgaggtttcgggccgatggagtttcactcttgtctcccaggctggagtacaatggc

SEQ ID NO: 51068 - DNA, 82 bp, Homo sapiens
ccgcagccactcaggactgtcaaagatgtgcactcccagcaacacccctgccacgccgcccaacttccccgatgcgctggcc

SEQ ID NO: 51069 - DNA, 99 bp, Homo sapiens
agtgggaccgcaagctgagcgagctgtcagagcccggggacggcgaggccctcatgtaccacacggaggtgttccctgtcttggctgcaaagcactgta

SEQ ID NO: 51070 - DNA, 100 bp, Homo sapiens
aaaagcattcggcagcgtcgtcgcttcactgtggctcatacatgtgatgcagcttggtttaacgaatcttggttaagccgaattaaagaggatgttgggg

SEQ ID NO: 51071 - DNA, 98 bp, Homo sapiens
tcagttctgcgctgctcccgttccccctccccagagcaaggttctgactcagaagatcttttggaagaattgctgtgctgtttgatgcagttgatcac

SEQ ID NO: 51072 - DNA, 113 bp, Homo sapiens
aagttgttcattaagacttcccagcattcctacagatataaataggagtgacagttcatttagattctttgtattcttcttcgtctatatttgtcagtttgctgtacatgtac

SEQ ID NO: 51073 - DNA, 100 bp, Homo sapiens
gctctccagtgtcaagagcaaagtccttcaggagtccagcaagaaggaccagctcatcaccaagtgcaatgcatgaaaccaccagggacccctcgacccc

SEQ ID NO: 51074 - DNA, 103 bp, Homo sapiens
cttgtattaccgagtaatggaatccatgcttaaatcagggacccccggagaccctacccaactgatttagagatgagaagtgggttactgggtcagatgaaca

SEQ ID NO: 51075 - DNA, 100 bp, Homo sapiens
tcaaaaccttccttggggatacaaacacaccttgaaccagattgatgaagtaaaggtgtggcctcaggccactggagaatgcacggcaaccgtggggaag

SEQ ID NO: 51076 - DNA, 98 bp, Homo sapiens
ctgcttctgccccagaaccggtcgaaaaccgtgtatgagggattcatctcggctcagagtttacccctcaatcccaaacctttcctcaatggactaac

SEQ ID NO: 51077 - DNA, 75 bp, Homo sapiens
ggcggaggcagaggtggaggcgctttgaaagaaaaattgtatggcgacttcttgagctggaagctagaggaaacc

SEQ ID NO: 51078 - DNA, 90 bp, Homo sapiens
gaacatgtgcttggtgtcgtttttccttgagctgaacgtcttgcaacagtggccgcacgcataggttttgagatcaccattgaacaccca

SEQ ID NO: 51079 - DNA, 83 bp, Homo sapiens
ggtctgagctcgggctccccgagcagtttgagtccccttgcccgctccttcaggaaagatgaatgggagggctgattttcgag

SEQ ID NO: 51080 - DNA, 51 bp, Homo sapiens
aagaagggccttactccttcacagatcggttattgacccagtggctccacg

SEQ ID NO: 51081 - DNA, 101 bp, Homo sapiens
tatttatccaacagctcctcccaggaggcaagtgaggcctatctggttggcctttttgaagacaccaacctgtgtgctatccatgccaaacgtgtaacaat

SEQ ID NO: 51082 - DNA, 83 bp, Homo sapiens
tctaaaggaggttttaaacagtataacaggccaaggaggcgggtttggtgcggccactccaaggccaaagcgagaaaatctta

SEQ ID NO: 51083 - DNA, 98 bp, Homo sapiens
ggcaagagtgtacctggtccactgaaaaattcttcagattggaaaataccacaggatggagactacgagtttagtcaatggttgcaggaaagtttgaa

SEQ ID NO: 51084 - DNA, 100 bp, Homo sapiens
ccgaagctggccgcctgcggcatcgtcctcagcgcctggggagtgatcatgttggatgtggaaagctacgatccagttttgaacccggtgctgaaccgtg

SEQ ID NO: 51085 - DNA, 98 bp, Homo sapiens
ttggagatggctttacaagaaaaccacctaaatatgaaagattcatcaggccaatggagagaagaccaagaggtcggagaagaggtagaaaatgtggc

SEQ ID NO: 51086 - DNA, 73 bp, Homo sapiens
atcagagaagcagaaggcacagtgcctctgaccagcatcgtctgtaaagattgatcattcttagaagagctgc

SEQ ID NO: 51087 - DNA, 100 bp, Homo sapiens
cgcacgctcctcgcgcaaggagggtagagctcaaggtaaattcaactggaagggaactattaaagcaattctgaaacaggccccagacaatgaaataacc

SEQ ID NO: 51088 - DNA, 100 bp, Homo sapiens
cggctacgggccccttaccgagctcccagactggtcatatgcggaaggtgcttcctggaggggcctgccccactgttcctgtgctgagttccaggacagc

SEQ ID NO: 51089 - DNA, 73 bp, Homo sapiens
gaagccaccgttgtgacccttggtgaggacaatttaatcatcagaactttgtcagcgagcaagaacaatgcca

SEQ ID NO: 51090 - DNA, 82 bp, Homo sapiens
ccaggagtcatcggacgccagaatctggtgaacttcacggtagaccagatccgcgccatcatggacaagaaggccaacatcc

SEQ ID NO: 51091 - DNA, 82 bp, Homo sapiens
tggcctggaggctatccagcgagaacgtatttaccgggcagtcaaagatctattcctacatgagcccgaacaaatgctctgg

SEQ ID NO: 51092 - DNA, 100 bp, Homo sapiens
attgtggcaatcatcctgaatgaatttagagccaaactgtccaaggctttggcagttatgatgtgattgctcaagcccaatctgggactgggaaaacggc

SEQ ID NO: 51093 - DNA, 90 bp, Homo sapiens
agctaagatgccaggacatcctggaagctgggaaaagaggcggggtttcaccatgttgcccagactggtcttgaactcctgagcttaagc

SEQ ID NO: 51094 - DNA, 51 bp, Homo sapiens
cgatgggacccactgccctgcattcgaactacatgtgatttattgcaaggc

SEQ ID NO: 51095 - DNA, 97 bp, Homo sapiens
atgcagtatttctttggcatcactgcagctagtaatttgccttctggattgaacagggtctgttccacaaaaaagacagtgccaatcaaggctgtgt

SEQ ID NO: 51096 - DNA, 102 bp, Homo sapiens
caaaaggtgatctggacaaaggaacaggtatctcagatgtgttttcgcattataacaaggacctgttgacagagcactgcacagaagcttcattccaaaaag

SEQ ID NO: 51097 - DNA, 90 bp, Homo sapiens
aactccaaagaaaaagcccaaattggaatctaagccatctaatggagataggatgccaggccaaggtggagcaagcggtggagacagagc

SEQ ID NO: 51098 - DNA, 100 bp, Homo sapiens
ctgggacctagctcgggaccggcctggagatggagttcgactgcgagggcctgagacggctgcttggcaagggaaaggtggcccagacagcgtgtatgtc

SEQ ID NO: 51099 - DNA, 100 bp, Homo sapiens
gcggaggaggcgatggctactatccctcgggaggcgcctggccagagcctggtcgagccggaggaagccaccagtgcattgctaaggaactgattccaga

SEQ ID NO: 51100 - DNA, 101 bp, Homo sapiens
gtggtcacagccgcatctttgaaggagctacagggagctggccgactgcacctggcacatggcggagaagctgggctgcttctggcccaatgcagaggtgg

SEQ ID NO: 51101 - DNA, 50 bp, Homo sapiens
tttggggacctcgaccagaaccaaactttcacgatggccgtaaagcacag

SEQ ID NO: 51102 - DNA, 75 bp, Homo sapiens
agggcttcctggcccgaaaggagagcctgcagaagaagcgcaacggaaattgaaaagacaaaatagagaagatac

SEQ ID NO: 51103 - DNA, 100 bp, Homo sapiens
cgttagagctgatttacgagataattattctccaggttggaaattcaatcactgggagctcaaggttaatcatgttatcagccctctgttggatatctac

SEQ ID NO: 51104 - DNA, 82 bp, Homo sapiens
tgaccgagaccgcggccgggaccgaggctatgacatggtgcattacggccactccaaccagctgcgccaggcacgggccatg

SEQ ID NO: 51105 - DNA, 100 bp, Homo sapiens
cattatttggcaggacttgtgttaacagagctggctgtcattttagaccctgatgctgaagggtcaaaatgcagatcttcgtgaaaacccttaccggcaa

SEQ ID NO: 51106 - DNA, 99 bp, Homo sapiens
cacaaagaaatgggtcagctaattgttcagtctgcagaagatccagagaaatcagagagccacgttatacaggcgtcttggctgcccacaagataatgg

SEQ ID NO: 51107 - DNA, 100 bp, Homo sapiens
actcggaaaggaaacaaaattcgatttgcaaatcattcagtgaatcccaactgttatgccaaaggtgtcacgtcttgaaattttaaatgtcctcagtgac

SEQ ID NO: 51108 - DNA, 75 bp, Homo sapiens
atggaaagtaggagacaagtgtatggcagtctggagtgaagatggacaagttaaacatgaagtttctggagagac

SEQ ID NO: 51109 - DNA, 100 bp, Homo sapiens
ctgatgaccaactgcttgttctcaccgatcttcttgtgtcaccatgctattatgcatagaaagaactctaagaaggagctgatgtggaggagcagctgag

SEQ ID NO: 51110 - DNA, 82 bp, Homo sapiens
cgagaagtcgcgggcccagcccacagcaggcttaaagcttttcaagccaggccaagaagctgtgaagtaccagggtcctcgg

SEQ ID NO: 51111 - DNA, 75 bp, Homo sapiens
acgcgtcggactggtctgtctgagggagatggtgacaagctcaaggcctgcgagcttcttccagaccagctggtc

SEQ ID NO: 51112 - DNA, 74 bp, Homo sapiens
aagctcttcatgcaaggaaacataagttggaggttctggaatctcaggtgctttttgaccacgtaggctgttta

SEQ ID NO: 51113 - DNA, 100 bp, Homo sapiens
ctggaggagcagttgtctgatgaagagaagaataatcatgggccagactgggaagaaatctgagaagggaccagtttgttggcggaagcgtgtaaaatca

SEQ ID NO: 51114 - DNA, 50 bp, Homo sapiens
ttttccagctcacccactgccagcagagctgaagagcaatgtgaccagcc

SEQ ID NO: 51115 - DNA, 128 bp, Homo sapiens
ggccgggcagcacctcccggtaccccggctggagggcgtttctcgggagcagttcatgcagcacctctacccacagcccacacatcttgctgacttcactcaagtgcaaaccattcagtattcaaaca

SEQ ID NO: 51116 - DNA, 80 bp, Homo sapiens
ggacctcacttccccggggtgtaataatgttaactgagcaatggtgaactagacccctggtcaggaggtggagtaactaa

SEQ ID NO: 51117 - DNA, 82 bp, Homo sapiens
agagaaggtgcacagtatttgatgcaggcagaagctcctcctggggtagagacagatcttattgatgttggattcacagatg

SEQ ID NO: 51118 - DNA, 83 bp, Homo sapiens
atttgagtggcctaagaatatgatgccgtctagttttgccatgaagaatgagtccctggaacgccagatgcgtgaaatggaag

SEQ ID NO: 51119 - DNA, 98 bp, Homo sapiens
gaagttgtcaaagttcttgttaaggaaggagccaatattaatgcacagtctcaggcccaacgttccccatcattcgccttgctggaggcagcagtgtg

SEQ ID NO: 51120 - DNA, 100 bp, Homo sapiens
agagaaatgtccaaatcttacctacctcaatctgagtggaaacaaaataaaagatctcagtacagtagaagctctgctcctgcttcacatttgccatgac

SEQ ID NO: 51121 - DNA, 51 bp, Homo sapiens
tgtaggagggagccgtggaggtccagaaaacaaccctttttgctgcacatg

SEQ ID NO: 51122 - DNA, 88 bp, Homo sapiens
gggcttaagttccgtgaactcagtactgatgcccagtggggcattcgtcttggtaaacttggtcaactcaagcatcccaaccttgtta

SEQ ID NO: 51123 - DNA, 77 bp, Homo sapiens
gtgtgacaccaagataagtaacgtgactctcctattccatctgtttcttcgggatcatcttcacctctttcagccac

SEQ ID NO: 51124 - DNA, 50 bp, Homo sapiens
tcaacagttcaccaccattaccgagacagggtcttgctatgttgcccaga

SEQ ID NO: 51125 - DNA, 100 bp, Homo sapiens
ctctccatcctctacagcatcggcagcaagcctctgcaaatctgggacaaaaagatcgtaaagctgaaaattgaaatcatgaaagtagacaggactaaac

SEQ ID NO: 51126 - DNA, 100 bp, Homo sapiens
agcagagcgcccactgcctccagcagctgagatgagtgaactgagtgtggcacagaaaccagaaaaacttttggagcgctgcaagtactggcctgcttgt

SEQ ID NO: 51127 - DNA, 101 bp, Homo sapiens
tccgaagaaagcgagaaaggaacaggcgccttcaaaagcccacttggcgatgggttacagtaagagtgatgacgacattgtatttgaggactttgctcgcc

SEQ ID NO: 51128 - DNA, 100 bp, Homo sapiens
tggcgaagtggagagtgacatgcagttggatggcggtgactgcgtggtgaggtggtcacttatcagtggaacatcccagagaggtctggccctgggccca

SEQ ID NO: 51129 - DNA, 88 bp, Homo sapiens
aagactgccctcatccacgatggcctagcacgtggaattcgcgaagctgccaaagccttagacaaggagaagaagtcaatgctggaag

SEQ ID NO: 51130 - DNA, 50 bp, Homo sapiens
tgcagtttgtgaagaaaaaattagaaaaatggctacaaacttcctagcac

SEQ ID NO: 51131 - DNA, 100 bp, Homo sapiens
agtcaggtcacaacgacatagaaattacatgagcagaacacatttacatactcctccagacctaccagaaggctatgtagcccccttgattttgattgaa

SEQ ID NO: 51132 - DNA, 83 bp, Homo sapiens
cgcaccgcccggactcaccatgcaataagagctaactgccatcaagagccatcagtatgtcttcaagctgcatgcccagaaag

SEQ ID NO: 51133 - DNA, 51 bp, Homo sapiens
gccaaccagcatggccctggacaggtttagcccaaaggcgtcccttcaacc

SEQ ID NO: 51134 - DNA, 75 bp, Homo sapiens
caaccatcgcagttggaagcccatggggcaggttgctccttgagggcaggacagttcttatggctttatccgttg

SEQ ID NO: 51135 - DNA, 50 bp, Homo sapiens
gtctccttaacaccgaacaccattctgattcccagcatagccacgaagtg

SEQ ID NO: 51136 - DNA, 100 bp, Homo sapiens
gtcgtcttctcggcgacaactgccctgctcttcatcccagtgcttctctcctaccagaggtgcaaggagtgatcctagaaccacagatacagccaagacc

SEQ ID NO: 51137 - DNA, 75 bp, Homo sapiens
aaaccagtgggtcaaaggacagacagaaggagcttgaagaaatccgcaaatgtgggatgaaaaacttccgtaaca

SEQ ID NO: 51138 - DNA, 50 bp, Homo sapiens
ctccctcagcttccgccccaaaagaagatggcagtgaacgtatactcaac

SEQ ID NO: 51139 - DNA, 117 bp, Homo sapiens
gtcgtacaactacgtggtaacggcccagaagcccaccgccgtgaacggctgcgtgaccgacaatgcagatcttcgtgaagactctgactggtaagaccatcaccctcgaggttgagc

SEQ ID NO: 51140 - DNA, 99 bp, Homo sapiens
agctctgctcaaagccagacgggatgcctctttaatggcaatgagacggcgtatcaatggcttaagtccagaagaaatccgtgcactttctaaagagga

SEQ ID NO: 51141 - DNA, 100 bp, Homo sapiens
cttctaccgggctgagccaggccccttctcagattgcaaacagtggttctgctggattgataaacccagctgctacagggaatgggtactgttcaaaaag

SEQ ID NO: 51142 - DNA, 75 bp, Homo sapiens
aagactaaaaactaaaggcctgggcctgagaactgaatcaggttacagatcgacatatctggagatcagcattag

SEQ ID NO: 51143 - DNA, 82 bp, Homo sapiens
gagcagccctggtgtcacctatcagtaaaaggaaattatcagttcattgcctagcatagtaaatgacaaatatggaaggaag

SEQ ID NO: 51144 - DNA, 83 bp, Homo sapiens
gactcccggggccatggccggaatgcagtaccctcagcagcagcttcatccaggtctttaaaagtcctgaagaattcctccag

SEQ ID NO: 51145 - DNA, 100 bp, Homo sapiens
gactcactgacaagccgcagagagagacacactgagagggagatgattattagttgcgttgagtcatcaggcaaaagaggtggagaagagcgagtacttg

SEQ ID NO: 51146 - DNA, 100 bp, Homo sapiens
gatagctgcaaggaaggtggagatctcctgtgctgcgaccactgcccggctgccttccacctccagtgctggagaacccccgcctcacagaagacttcgt

SEQ ID NO: 51147 - DNA, 100 bp, Homo sapiens
gcggccatgtatgaggaggagatggaaagggaagaaagacctggtggaagaggaggctgaggaggctggagtggctttgagaagcacccagagcacactg

SEQ ID NO: 51148 - DNA, 100 bp, Homo sapiens
gagagcgtgaccgagagcgcgaatatcgtcatcgttagaaggccatttgtgtaggaccagaaaacatgcagataatgtatccagctatatttgaccagtt

SEQ ID NO: 51149 - DNA, 49 bp, Homo sapiens
agaagctgctgcgctgctcgcgttggagtggcagaagctcaactatgat

SEQ ID NO: 51150 - DNA, 51 bp, Homo sapiens
cggtaacccgtgtgactttgactggatccgagtgaagcctgacaggaccgg

SEQ ID NO: 51151 - DNA, 94 bp, Homo sapiens
tcttccatccccatcttacagatgtattaagaagcctcagtatccctctgaagaagatatgatcgaatgggccaagagggaaagtgagagagag

SEQ ID NO: 51152 - DNA, 100 bp, Homo sapiens
tcactctgagtacggtctcacagacaacgttgaggaactctaatgaatcattgattgaccagcactattttaccagttggaatgaatgatcagaaatggg

SEQ ID NO: 51153 - DNA, 88 bp, Homo sapiens
agatatttcagagagcttcttactggatttcttcatggtgtccattttatttagcaaggtgatctgcaactctttcaccatctgtaat

SEQ ID NO: 51154 - DNA, 96 bp, Homo sapiens
cgtggcgttcgctgaggctcagagatgggtggaggcaccaagtatagatgagaaagtagatcttcattttattgcattagttcatgtagatgggca

SEQ ID NO: 51155 - DNA, 100 bp, Homo sapiens
gatctccatgtcctgttgtggggcttttacagcctttggatacgatgaatggattaaagcagataaaatagtaagacctgctgataaaaatgtgccaaag

SEQ ID NO: 51156 - DNA, 100 bp, Homo sapiens
agaatcaaacggtgttttagttttcggaaagatctcgttcctcttccctgtgtcatcttcttaattataaataatgggggatgaagataaaagaattaca

SEQ ID NO: 51157 - DNA, 100 bp, Homo sapiens
cgaggttcgggctggttgttccgttgcgagctgcagctgcgatctctgtggtaggcccagaatgcaagttctagccggtttttcctacaaggaatccagt

SEQ ID NO: 51158 - DNA, 88 bp, Homo sapiens
acatagacggatctcaatggaggaacacgatgaacctattctgaagcacttgaaagatattaaagtgaagttctcagatgctggccag

SEQ ID NO: 51159 - DNA, 90 bp, Homo sapiens
gcaccttttggcccaatgaatatcagccacccacacagaatatgcctatgggtcctggagggatgaatcagagcggccctcccccacctc

SEQ ID NO: 51160 - DNA, 75 bp, Homo sapiens
ggactctggagctgacagcgcgcacttcacccgcagttgtgtggacgaatgtggaacctcgctctgtggctgtgt

SEQ ID NO: 51161 - DNA, 75 bp, Homo sapiens
gtccgcgcccggagcgccccgccgcgcacacacaggaagtcctggagaacctgaaggaccgctggtaccaggcgg

SEQ ID NO: 51162 - DNA, 129 bp, Homo sapiens
ctacaaagagagactttttgtacttacaaagtccatgctaacctactatgagggtcgagcagagtactatgacgacacctaccccagtgtcaaggagcaaaaggcctttgagaagaacattttcaacaa

SEQ ID NO: 51163 - DNA, 98 bp, Homo sapiens
tgcatcccagaggagcgcgtccaggagcggacccgtctgcgggccaggcatcgacatccgcaacgactatcagcagctgaagcgcctggagaactgca

SEQ ID NO: 51164 - DNA, 74 bp, Homo sapiens
ctggttctgccttctggacaatctttccgtggacatttgggagcaataaaaataagaagaaaggaaaagccaga

SEQ ID NO: 51165 - DNA, 101 bp, Homo sapiens
agatcgctgtagtgggcggccagagcgccggcaagagctcggtgctggagaacttcgtgggccgcgtgaagcctctgcgggccttcttttcgtcttatttg

SEQ ID NO: 51166 - DNA, 75 bp, Homo sapiens
tccaccccggagctgctcactccgaagtgcatcgccatgtgcatggaccgctacatggacgcctggaacaccgtg

SEQ ID NO: 51167 - DNA, 101 bp, Homo sapiens
tgtgaatgtattgactggagtgagagaagaaatgctgtggcatctgttgtcgcaggtatattgctgtgctccattgaagtgacttgtgaatcagccagtgt

SEQ ID NO: 51168 - DNA, 75 bp, Homo sapiens
gtatcctgtcacttctggatgtgaggagggagaacatgtacggggacactgggcattatacttcaagacgtgaat

SEQ ID NO: 51169 - DNA, 100 bp, Homo sapiens
cccggctgctggatttccagaagacgaaatacgcgagatgtatcggcaagcagtgtaaacggaggacttggggaaaaaggaccacatagtccatcgaaga

SEQ ID NO: 51170 - DNA, 50 bp, Homo sapiens
tttgctgcatactatgttgccacaggttacaagcctgatgaagggaaacg

SEQ ID NO: 51171 - DNA, 89 bp, Homo sapiens
cctgtggatgctgcattccgtcaaggtcacaacagtgtctttctgatcaaggaacctcactctggagcctgagatcatgcctgctgcca

SEQ ID NO: 51172 - DNA, 74 bp, Homo sapiens
cggtctctgccagtataaatgcagtgacgctggaccagaccaattttgaggaaaggatacagacagcgcctgga

SEQ ID NO: 51173 - DNA, 101 bp, Homo sapiens
ctttgtgcttcgagatctgcagaccagacagccaaaattgcctggaaaagagcagtgagaggagtccgggagatgtgtgatgcatgtgaagcaacattgtt

SEQ ID NO: 51174 - DNA, 89 bp, Homo sapiens
gatttgttaaggattccaagtaactcttatttgcaaattgaagaagttcgacaggtgggatcctataaaaaggggacaatgactacagg

SEQ ID NO: 51175 - DNA, 100 bp, Homo sapiens
cttctgtggattaactcagtggctcaacaggctgaagggagatggaactttctgctctacagtccatgatggctgtgcaggaagaagagctgcaggtgca

SEQ ID NO: 51176 - DNA, 100 bp, Homo sapiens
ttcttctatttcttgtggatattatggctaataacacaacaagtttagggagtccatggccagaaaacttttgggattgggaaaatgaggtacgttagtg

SEQ ID NO: 51177 - DNA, 75 bp, Homo sapiens
gcctgcggagcctgtggggcagttctggacatggcaagacatgtgccactctatcgggcactgctggaattgctt

SEQ ID NO: 51178 - DNA, 100 bp, Homo sapiens
agcctcccaagtacctgggactacaggtatcagatacacaccggacttcaacattctatcataagacctacccaacccaactgtttacctctggacaatg

SEQ ID NO: 51179 - DNA, 90 bp, Homo sapiens
gctcacaagataatagccagctccccagaaatgaacctgcccacggtgtccgcgctcagggggaaaaaggcctttgaacgcatcaacagc

SEQ ID NO: 51180 - DNA, 89 bp, Homo sapiens
ctgacggcgactgcgggaggccaggagacgcaggtcagaatggaaatgggctgcagaccgggcagctattgtcagccgctggaactggc

SEQ ID NO: 51181 - DNA, 75 bp, Homo sapiens
cgtgcacttcctggtgggcaaggggctcagctcgcagcgcatccccgcgcacagatcattgagaagcagccaggc

SEQ ID NO: 51182 - DNA, 82 bp, Homo sapiens
ccgaaaccccagacatcaaccagctgccgccgtccatcctgctcaaggacaagaaatggattctcagtcatgaagatgtcat

SEQ ID NO: 51183 - DNA, 127 bp, Homo sapiens
acaccatgccgtccgccttctctgtcagctctttccccgtcagcatcccagccgtgctcacgccaccctgaagggtcccttcccaagcccttagggaccgcagaggacttggggaccagcaagcaac

SEQ ID NO: 51184 - DNA, 75 bp, Homo sapiens
ggtattggaacagtctttggcagccttatcattggttatgccagatggagtctcactcggtcgcctgggctggag

SEQ ID NO: 51185 - DNA, 74 bp, Homo sapiens
gaaagatgtgttcgggtttttctagaacacggagagatcctgcatattttgatgaaaattggctaaacagaatc

SEQ ID NO: 51186 - DNA, 100 bp, Homo sapiens
tgcaattcagatggggctctgctgcgattctatcccgtgggtgctggctgccaagtcttcgaaggccgacccaagctggccacatggcggcagcgcgtgg

SEQ ID NO: 51187 - DNA, 93 bp, Homo sapiens
gagattatagctctgtatgagaaggacaacacctacttagcgggcgatgatgagatctcatttgaccctgatgacatcatcaccaacatcgag

SEQ ID NO: 51188 - DNA, 100 bp, Homo sapiens
tccaagaggaccttctgattagtccacagtcttcctctataggaaccctaaggactctgcaatatgaataattccctagagaacaccatctcctttgaag

SEQ ID NO: 51189 - DNA, 100 bp, Homo sapiens
aagaagatctaaagagaacgtctctgaaatcaagtccggatgaaggtcaaatgggctctctcattcttggagtgaaaggattccagacacaaaacatatt

SEQ ID NO: 51190 - DNA, 105 bp, Homo sapiens
gagaccgtgaccgagagcgtgaccgagagcgcgaatatcgtcatcgttagaaggaaaacagttcctcctgaggatttcagagaagagctggacttcctggctgac

SEQ ID NO: 51191 - DNA, 100 bp, Homo sapiens
tgacagtctgcatgtgcagttttcagtggagttggatcacaggattgattttgaactcagagaaggccttgtggagagccgctattggtcagctgtcacg

SEQ ID NO: 51192 - DNA, 100 bp, Homo sapiens
gtcagaaggagtggacttgattgatatatatgctgacgaggagttcaaccagattgcccccgaggaattagcacttgttcacaacttgaggaaaatgatg

SEQ ID NO: 51193 - DNA, 100 bp, Homo sapiens
tgctttgcttcactgtttggcctgaatcccgagggatggaaatccgagcctgcaacctgctccgtcaaaggtaccccaatctgaagtcagtaaatgaact

SEQ ID NO: 51194 - DNA, 126 bp, Homo sapiens
gtggcctccacctcggccgccctgcccagctgcctgcccccggaggtgcccacgcagctgcctggacaaagtttcgctctttcacccaggctggagtgcagtggcacgatcttggctcacttcaac

SEQ ID NO: 51195 - DNA, 83 bp, Homo sapiens
caggcgaacccgcggcgcaataacgagtccggcagcgtcttctcttgagggagcaatttggagaagagctggaacccagactc

SEQ ID NO: 51196 - DNA, 100 bp, Homo sapiens
cttcacctgcagctgcccggcaggcaggggaggcgccgtctgtgagaaggggactgctgagatgtcctctattcttgaagagcgtattcttggagctgat

SEQ ID NO: 51197 - DNA, 98 bp, Homo sapiens
tgcactacaaattttcaaaaacacaggaagcaaaattgaagaggattttccacacatcagatcgatgaaacgaggaggaagagatagtgaccgtaatt

SEQ ID NO: 51198 - DNA, 83 bp, Homo sapiens
gtggtgagcctttttgtcactgagactaaggtgtcagtatgttcttcaagctgctctgctcctgggcccaagctattctcctg

SEQ ID NO: 51199 - DNA, 100 bp, Homo sapiens
tgatttttatattttattcctcttcctatccaatccctgccttttgagtccaggtgccgcggcccatggagcccgccggcccggcccccggccgcctcgg

SEQ ID NO: 51200 - DNA, 97 bp, Homo sapiens
agcccgacgcaaaccaaggatctggggatcttcgcactatcccaaggaatgtatcctgtcaggtataatgtcagtgaatggcaagaaagttcttcat

SEQ ID NO: 51201 - DNA, 75 bp, Homo sapiens
cgaggaggtgatggatatgatggtggtggtttgtgatgaaaatggttccaagggctatggatttgtacactttga

SEQ ID NO: 51202 - DNA, 101 bp, Homo sapiens
cgcgccgcggccaggcagggaggagaccggcacccagacaggtggcgaaggcagaggaggctactcctccgtgagcaacatgaacgccggcctggggatga

SEQ ID NO: 51203 - DNA, 137 bp, Homo sapiens
gaaaatccgaagtgccgcggaaagtggaggtgagggccgcccgccctagaggtgcccgtccgagaggcagagacgtctcccacaacctgctccgggcgctggacgttgggctcctggcgaacctctcggcgctggca

SEQ ID NO: 51204 - DNA, 83 bp, Homo sapiens
cgcaaggtcaacctgggagtgggagtctcagagaaagatgtcacatctgctaaagcactgtatgaacatttgactgcaaagaa

SEQ ID NO: 51205 - DNA, 100 bp, Homo sapiens
agaaactgaagaacacagaaatggtgatcagttgtgagctgcaagctaggctgcaggcccaggaagaacagcatcaggaagtccagaaggcaaaagaagc

SEQ ID NO: 51206 - DNA, 75 bp, Homo sapiens
gagctgtgtcctgcaccgctcatgctcgcccggctttggggtcaagcagattggggaccggctgaacgagcgcgt

SEQ ID NO: 51207 - DNA, 100 bp, Homo sapiens
aagttgcctgtttcagatgtcttgagacaactttttgcactctttgacaggacaggtgatttggcttctgcacagttaggaggagcaccaaaccgatggg

SEQ ID NO: 51208 - DNA, 75 bp, Homo sapiens
gaggagcccgaataccaccccgacgcctcagcccaaggtgtggatgaggtcaccattgtcaacattttgaccaac

SEQ ID NO: 51209 - DNA, 100 bp, Homo sapiens
ctgagcagcttaccgccctgccggcgctggagaccatcaacctggaggagaacgagatcgtaggtaagaatgattgatgttggctgatattggagtgctc

SEQ ID NO: 51210 - DNA, 75 bp, Homo sapiens
ggaaggggcagtacaagcttacgtctctgctcttcagtacaatcctcatgtgcagtctttgccaacaaaaaaaat

SEQ ID NO: 51211 - DNA, 100 bp, Homo sapiens
ccgcggacgcgtcatcgagtgtgacgtggtgaaaggaaatgagttctgggccatcagaggaaatgaggtacaagcaggttatccaagaggcatccatacc

SEQ ID NO: 51212 - DNA, 100 bp, Homo sapiens
gtttgttggtggaggaggtggcaggcctcggcgatatttgtcaggatacgaatcaggttctcttcaagtgctgccagggatctgaagaggtaccctgcaa

SEQ ID NO: 51213 - DNA, 83 bp, Homo sapiens
aagaaatcaaaataaaggaaacacatttcatatactgcagacttaattcagtgcacaaatgagatgaatgtgaacatcccaca

SEQ ID NO: 51214 - DNA, 78 bp, Homo sapiens
tcggagcacagggtccatggtgccatggagctgcaggtgcagacagactgctgcatagatgatgacctgatggagaag

SEQ ID NO: 51215 - DNA, 50 bp, Homo sapiens
ccagtttgagaaagtctctacagaccttgagttttgctcttgttgcccag

SEQ ID NO: 51216 - DNA, 102 bp, Homo sapiens
cagaacaacaaggtgttgatgccgccggacgactgtggatattcataaggagaaagtggcacgaagagagattggtattttgacaacaaataagaatacatc

SEQ ID NO: 51217 - DNA, 75 bp, Homo sapiens
gcagaggatgctttgcagaaacttcataaatatatgcaggttacaagagcattctctttctccaaaactccaaaa

SEQ ID NO: 51218 - DNA, 100 bp, Homo sapiens
cttcagaggaagaattaaggggcatgttggtgcatttaactacaaaaccaggtaactcaactggacccaaataaatcattattggaggtaaagttgttcc

SEQ ID NO: 51219 - DNA, 50 bp, Homo sapiens
aggcctcgaggcccacacccacatagtgacagctggagtatcagccttgg

SEQ ID NO: 51220 - DNA, 95 bp, Homo sapiens
gtcctcagagcaagagatgaccttatcacagccaaagaggtgctgaaaaaatatttggagtccaaggaggatgtggctgatgcacttctacagac

SEQ ID NO: 51221 - DNA, 75 bp, Homo sapiens
ctaccatgtcagccttcccagtagctgggaccacaggtcagaagccaatgacctggccctgaggctggctcgcca

SEQ ID NO: 51222 - DNA, 82 bp, Homo sapiens
gcagatgcaattcaacaacctcttcaagaaaaattgttgaagactgggatagtttccaagctattttggatcatacctacaa

SEQ ID NO: 51223 - DNA, 83 bp, Homo sapiens
ccagaaggcaaagccagttgctactgctcctattcctggtactccatggatattagaaatggctactccccagtcaattttca

SEQ ID NO: 51224 - DNA, 100 bp, Homo sapiens
gccctaggccccttcctgcccctgtcgtcagcaggactcgagagcctattttcatctgcttaatcagattgcccctaaaggtggggaagatggacctgcc

SEQ ID NO: 51225 - DNA, 82 bp, Homo sapiens
agaaaacagaaacacttcttttattttcctgtaatatatctgtatcatcggagtgtatgttttaactggaaaaagtcttcca

SEQ ID NO: 51226 - DNA, 147 bp, Homo sapiens
aaaatggcaaagccagagctaagaatacattttatgaaacattaccagtggcaattaatggaaatggacccaccaaggaccccctggaacagctgtccctccacctactggctacccaggaggcttgcctatgggatactacagtcc

SEQ ID NO: 51227 - DNA, 100 bp, Homo sapiens
ttggagctttcagacctgcaggagctgtgggatgatctctgtgaagattatttgccgctccgggtccagcccatgcagaatgccaccaagtatggcaaca

SEQ ID NO: 51228 - DNA, 98 bp, Homo sapiens
ataaacccctggacccccttgttccctcagctctaagggccgcgatgttgtacctagaagactatctggaaaaatgccgaactggggaggaggcaaga

SEQ ID NO: 51229 - DNA, 80 bp, Homo sapiens
agaggactcagactgtggaacttccgtgccccccaccctcaccaagtgctgctcacggccgtgaactgctacagcgtgaa

SEQ ID NO: 51230 - DNA, 75 bp, Homo sapiens
ggggttcctccaaatgttggctgaaattcatcccaaggctggtctgcaagcaacataagctttacaacaaggagt

SEQ ID NO: 51231 - DNA, 101 bp, Homo sapiens
gggcggcaggagccgcggagccggcgctgagaggggctgcggccggagcgggcggctgagacaaaggcgacggagcttgaaaaatcacatttgagaagagg

SEQ ID NO: 51232 - DNA, 101 bp, Homo sapiens
gcaagagaagaattcagaagaaacaaaagtgccaccgaagaggttttccggtgccttcccaatgatgaagtacacaatttaattcagctgagagactttat

SEQ ID NO: 51233 - DNA, 100 bp, Homo sapiens
tctctagaagaaactgtcagtgccagtgaagaagaaaacgtgggacaccagcaggctgggaatgtgaagcagcagttctcccagcaggaggagaagaggc

SEQ ID NO: 51234 - DNA, 75 bp, Homo sapiens
aaatctgaatgctgttatcacgcaaaaactgattattccaagtggaagttgccctgttattctgaatacttactt

SEQ ID NO: 51235 - DNA, 100 bp, Homo sapiens
aaaatcccagatctacctgacgggcctgcgagggttgaagattgtgaagcaatagcctaagaatacagacttttcctatcagcctggagatgccttcagc

SEQ ID NO: 51236 - DNA, 75 bp, Homo sapiens
aggcaaccggacgattcagtggaaagtgtgccaaaggcagtaatgcattttttggttaatcatgtgaaagacact

SEQ ID NO: 51237 - DNA, 75 bp, Homo sapiens
acagacttcgctgtgagtgcccaaggtttcaaagcattatatgaagataaagtaagcatattgtcaaccttcctc

SEQ ID NO: 51238 - DNA, 76 bp, Homo sapiens
gacgatgccgaagccagcatgatctccaagttaaagtcttgtttctggcgctggagacatcaagcttactaaagac

SEQ ID NO: 51239 - DNA, 75 bp, Homo sapiens
cagaaacacaagcctgggagcactggggatccatgtgatcgttccaggatctgtgccagttcagaagcaggcgag

SEQ ID NO: 51240 - DNA, 50 bp, Homo sapiens
tagcactcatccgcttccgggtcaagattctggatgaaattgaagaacat

SEQ ID NO: 51241 - DNA, 82 bp, Homo sapiens
agatgggactgtctagttgcaggaaaacaagctcagggctcccacggattctacattatggccaaatttgagtttcatcatg

SEQ ID NO: 51242 - DNA, 100 bp, Homo sapiens
ccccgcaccacctcctgctgccttcccgtcgccgctcccgaagcttttccagcaatcttcctgagctcttttcgggtgccatatgaggaaatcagaatga

SEQ ID NO: 51243 - DNA, 80 bp, Homo sapiens
ggcctggaggagccgcagtgggtcccggacaaggagtaagactttgaccccgacgcaggcttcagtgattgccgcggatc

SEQ ID NO: 51244 - DNA, 82 bp, Homo sapiens
ccagcccagcgattctcagtcaggaaacatttactagggacaacttttgagtgtcagaccctgtggacacaaagaaaaagct

SEQ ID NO: 51245 - DNA, 75 bp, Homo sapiens
gtgagagctccccaggggagttctctgtgtctgtgaagtctaactcatcttattactatggatttacaccagaag

SEQ ID NO: 51246 - DNA, 100 bp, Homo sapiens
ccaggccgtggtcagccgcttcgacgagcagagccgaacactgtcagctacagccagtccagcttgatccacctggtggggccttcagactgcaccctgc

SEQ ID NO: 51247 - DNA, 75 bp, Homo sapiens
gcacattggaggcgtgatgcttaagctggtggagaaactcggccccttcacagatgtagtcactacaaatcttaa

SEQ ID NO: 51248 - DNA, 82 bp, Homo sapiens
agtacctgcagaaggtctctggagacatcttcagcagagtttatgtggccgaggcagacaagtggaattaggccttgctgca

SEQ ID NO: 51249 - DNA, 96 bp, Homo sapiens
tggtggtatttactgatgagacttggacctcatcttcctgctaattttgaacagtttcttgcagaacataaattattaggaaacattaaaaatgtg

SEQ ID NO: 51250 - DNA, 96 bp, Homo sapiens
cgggcggagacatggccaacatcgcggtgcagcgaatcaagcgggagttcaaggaggtgctgaagagcgaggagatggagtctcactgtgtcaccc

SEQ ID NO: 51251 - DNA, 100 bp, Homo sapiens
gtgttttgctaccgtgaccgtttaggttttgctgttactgctcagtgtagtcacaccttgaataagaaatggaaaaccttgggatgttgataaagctaat

SEQ ID NO: 51252 - DNA, 100 bp, Homo sapiens
cgaggccgctgctgtgcggagacccccgggtgaagccaccgtcatcatgtctgaccagatgcacccactgggcctatgtaataacaatgacgaagaggac

SEQ ID NO: 51253 - DNA, 100 bp, Homo sapiens
ttgctggagacaaattctggaggtactgcataagccgaccacagtataagacttcttgtggcatctcttcattaatttcttgttggaatttcttatacag

SEQ ID NO: 51254 - DNA, 100 bp, Homo sapiens
ccacaagcggggccgggctacagatgctgcggctgcccgggcagcgctagcaccgaggacctgacagtcggttaccagatgtatgctactcatggtgggt

SEQ ID NO: 51255 - DNA, 90 bp, Homo sapiens
ccggaggccggcgtgacaggctctgtcactaaaataggacgcaatgagcccctgaagaaagagcggcttaagtggaagagcgactacccc

SEQ ID NO: 51256 - DNA, 75 bp, Homo sapiens
gcagaatttactacagcatgtgatttcaggtgactgcttagaaaactgcacagcatctgatgaaattagcgaata

SEQ ID NO: 51257 - DNA, 100 bp, Homo sapiens
gccgccgcaggccgggaggagccgcagcgccgggcgaccccgcccgggcctcgggaacgggaggatgaaattgctactatggagtgcatcaacaatggca

SEQ ID NO: 51258 - DNA, 78 bp, Homo sapiens
tggcattggagcaagccaagaaagaatccgaagatcagaaacgtactatactggcaattgctggagaagattttgcaa

SEQ ID NO: 51259 - DNA, 100 bp, Homo sapiens
tcaaagaacaactaactttgaggggtttcttgcaaaacgcttctccggctgcaccctgaccgatgggaccctgttgcttctgcaggaagcctttttggtg

SEQ ID NO: 51260 - DNA, 156 bp, Homo sapiens
aattcgcaacacaacaatcagatggcaccagggactggcagctccactgccgtcaactcctgttctcctcagagcctgaactcttcatcttggcttatacctatactgcctgatatgctccgacacatttttcagttctgtgttttggaaagcagc

SEQ ID NO: 51261 - DNA, 100 bp, Homo sapiens
ctcaaactcccaggctcaagcaatcctaccatgtcagccttcccagtagctggaactacaggtaaagaagcttcttaataaagtagtgctccgtgaatct

SEQ ID NO: 51262 - DNA, 48 bp, Homo sapiens
tccttatgcgaatcgtcagggcattagaatttcgctaaggagtttgtg

SEQ ID NO: 51263 - DNA, 100 bp, Homo sapiens
aaatgttacatgcttgattttggcttggctcgacaatttaccaattcctgtggtgacgtcagaccatggtgggatcagcaagttgatttttatactgctt

SEQ ID NO: 51264 - DNA, 100 bp, Homo sapiens
tgctgggggtcattccctacgctggcctgagcttcttcacctatgagacgctcaagagcttgcacagagtgctgaaccggataaggacctggcagaaaac

SEQ ID NO: 51265 - DNA, 100 bp, Homo sapiens
tatagagatgtgatgttggagaactacagaaacctggtctccctaggccatggcccaaaaggaagatatggaagagagaatcactactcttgaaaaacgc

SEQ ID NO: 51266 - DNA, 82 bp, Homo sapiens
atcttttagctatggcgactttgacttcctgccaaaatcctgttaccctagcaacagtgggagctggtgaggtggccaactt

SEQ ID NO: 51267 - DNA, 127 bp, Homo sapiens
cccaaacttcttaacccctagaccggtttttagtccattgactatgcagcctaatgtgttccttgcctgtatctccccttggttcaatagctaccagatttttggaagaggaggaactgaggtctca

SEQ ID NO: 51268 - DNA, 100 bp, Homo sapiens
gatgccagagccaggtgaactggaggagcgatttgccatcgtgctggtgcaagttctctcctgttgccctgagtgcccactcccaggccctctgtatgag

SEQ ID NO: 51269 - DNA, 50 bp, Homo sapiens
ctgtggcctcgctcctcggaggggaatttgaagtactgccttgtaattct

SEQ ID NO: 51270 - DNA, 100 bp, Homo sapiens
ccctccgatccgtcttttagttgcttctcttccttttttctctccggtttctcatcactccaaccaggaattattttaggaccaggaagcagcacgctgt

SEQ ID NO: 51271 - DNA, 97 bp, Homo sapiens
caattcctactgcatcgtgggcatagcgtacaatgccaaaataggaggtactccaaagattcaggtttactcacgtcatccagcagagaatggaaag

SEQ ID NO: 51272 - DNA, 87 bp, Homo sapiens
ttcctccagaacatgcagacagctctacttgtttgcggccccctactactacggcttctacaacaaccggctgcaggcgtactgcaa

SEQ ID NO: 51273 - DNA, 100 bp, Homo sapiens
gaccctggccactttctggataagagtggcaactttaagaaaagtgactacttcatgcctttctcagcagattgtatccagccttcagtcatcagacatg

SEQ ID NO: 51274 - DNA, 83 bp, Homo sapiens
ccacagagccatcaaaatcacagtggatgggccccgagaacctcgaaacaatgcagatcttcgtgaagactctgactggtaag

SEQ ID NO: 51275 - DNA, 100 bp, Homo sapiens
cggcgagtttccgatttaaagctgagctgcgaggaaaatggcggcgggaggttctgccctgatgtttcctggaataatgctgaggactgcctttcgggta

SEQ ID NO: 51276 - DNA, 74 bp, Homo sapiens
cgccgaggcaccgaggcactcagaggagcagttggaattgatcacaccttttcagttgtacttcaatcctgaat

SEQ ID NO: 51277 - DNA, 100 bp, Homo sapiens
cccggctgtaccaatggagcctgaagagttcggcgcagttcctggggtctccacagctgaggcaggcccgaaagaatgaacttgccattgaagatatgga

SEQ ID NO: 51278 - DNA, 75 bp, Homo sapiens
aataaaactaacagtctatgatgtcaaggataagtctcatgacaccgctggaggctcccaggtgattttcacaaa

SEQ ID NO: 51279 - DNA, 100 bp, Homo sapiens
acccgcactctcttcggacctacgacatcgcggcttctctggcgttggccagtcagccacaggttcgagaacttgtcttggacaattgcaaatcaaatga

SEQ ID NO: 51280 - DNA, 98 bp, Homo sapiens
ccaggtgccaaggaaggggatacaggattttgaagcaagagcaccccgagttggcagtcctcgcagactcggttgaccttcaggagtccacagggata

SEQ ID NO: 51281 - DNA, 99 bp, Homo sapiens
gttcgacgtggggccgcgctacaccaacctctcgtacatcggcgagggcgcctacggcatggtgtgcgaggatgccatgaggaaagctggtgtggcaca

SEQ ID NO: 51282 - DNA, 83 bp, Homo sapiens
gctgggcacccacggagcctccggggctggaatactcccccagttgcaagaggcgcaggaccgtggaagacttcaacaaattc

SEQ ID NO: 51283 - DNA, 95 bp, Homo sapiens
caagtaaaatcaccctacaagacaaacagaacatggtgaagagagtcagcatcatgtcttacgcgttgcaagcttttccagaagcctgttaaaag

SEQ ID NO: 51284 - DNA, 100 bp, Homo sapiens
tccacatcgccttttgccacctttccctttatttccggaggtgagaagaaatttgtttgtccagaatgttcaaaacgctttatgagaagtgaccaccttg

SEQ ID NO: 51285 - DNA, 76 bp, Homo sapiens
agcaaggccaaagacagggagaagataacaacgaacttgatgcaagtgataggtttgccaaggtcagacctctcat

SEQ ID NO: 51286 - DNA, 100 bp, Homo sapiens
ggagccagtggccccccgtccggacacgccgaggctcacggcatctccctggcttctcgtctgaacccgccccagcaaaagtggtggatcttgatccctg

SEQ ID NO: 51287 - DNA, 89 bp, Homo sapiens
agaagctgtaccccgaagcagaggaaataggagctagtgtccgggatctacctggtctgaactttcaccaacaatcaccagtggtttac

SEQ ID NO: 51288 - DNA, 48 bp, Homo sapiens
gcagtggtcgcttcttctccttgcctttaaatctacaagacagcagcc

SEQ ID NO: 51289 - DNA, 100 bp, Homo sapiens
cccgttcttgcctcaggccagtcgcctccaggccaagagggatccttcacccgtgtctgtggtccatgctgtggacggcaccgccgagaacgggatccac

SEQ ID NO: 51290 - DNA, 98 bp, Homo sapiens
gtggaggtggtgtccccactgagctcttggaagagagagtccagcaagctaaaagtacagaaggtggagccctggaacagcgtgcgtgtgacattcaa

SEQ ID NO: 51291 - DNA, 100 bp, Homo sapiens
ctcggagaacgactatctcaagtgcacgtgccggaaggacatggtcaagatctccatggacgtgttcgtgcgcatcctgcagcccgagcgctacgagctg

SEQ ID NO: 51292 - DNA, 80 bp, Homo sapiens
aagtcgagtatctggtgaagtggaaaggatggcccccaaaaaggatatggccctgaagccacatgagcggaaggagaagt

SEQ ID NO: 51293 - DNA, 134 bp, Homo sapiens
cgaaggccgggacccggttccccggcccacagtgggggtgtgcaaacccgagagaactgggacgcgccagcggagctccggctccttcgccctggacgcggaggccgcggtgtgcggggcgacggcgaggccgg

SEQ ID NO: 51294 - DNA, 75 bp, Homo sapiens
ggaagcagccgatccagcctgcggagcctgtggggcaggtctgagttcactgacaccatcctgtccgtgcacccc

SEQ ID NO: 51295 - DNA, 82 bp, Homo sapiens
cagcctgtttcctcccggtcacctccaaatcttgctgcttttaattcaactcagagagctcgctgcccaaatcattcaagag

SEQ ID NO: 51296 - DNA, 90 bp, Homo sapiens
ttttgtcagcaatggagctcatctggaacctgtgtgagattctttttattgaagtggccccagggaagaaggagaaagggccaacccctg

SEQ ID NO: 51297 - DNA, 75 bp, Homo sapiens
gatcgtgttggacattagctcccgagcgctggccttctggacatatcagctggcatactgtgtagtgcagttttt

SEQ ID NO: 51298 - DNA, 75 bp, Homo sapiens
tggttgcagttgtgtagtagttaaggaaaccctgatagattggtgtgatgaaaaggaacttaatttgatattaac

SEQ ID NO: 51299 - DNA, 100 bp, Homo sapiens
tggtcgtctgagagctttacgtcatcttcgattagctaataaccaactgcaattcctacctccagctccatcaagtatgatggtgaaggatgaatatgtg

SEQ ID NO: 51300 - DNA, 88 bp, Homo sapiens
cgcctccgccgccgcctgaggaggcgagctagccgggagttacaccgccaccgccaggtctgagagtcactggagctaccagaagcat

SEQ ID NO: 51301 - DNA, 100 bp, Homo sapiens
tggcccttcatggaacctgtgaagagaacagaagctccaggatattatgaagttataaggttccccatgggattttttatcaagcagaaatgcatcgaac

SEQ ID NO: 51302 - DNA, 50 bp, Homo sapiens
ggacgacaagcccattggggccacccacaaaactggcagacctttcactt

SEQ ID NO: 51303 - DNA, 75 bp, Homo sapiens
ttcctcaactatctcgctgacacgcagttttctttttaaaagcggaaggagagttttacatggaagtggcttaca

SEQ ID NO: 51304 - DNA, 82 bp, Homo sapiens
gcgatggctgggcccgcgtggatctctaagattggtttatcttggaagctaaagggcattgctcatcctgaagatcagctga

SEQ ID NO: 51305 - DNA, 100 bp, Homo sapiens
gtcaaccagcagagcttccaggacatcaagcccatgcgggaccagatcatccgcgtgaagcgtgtctttctcgagaagcaggtggaaacatgagcattca

SEQ ID NO: 51306 - DNA, 114 bp, Homo sapiens
ggaaaaggcaatcactagggaagcacagatgtggaaagtgaatgtgcggaaaatgccttcaaatcagtgtggctcaaatacacagttgcttcatgtgtttcaagaagacttcat

SEQ ID NO: 51307 - DNA, 101 bp, Homo sapiens
ctgcagctgccggaggcggaggccgtggacgtgaccgctcagtacatggagcggctgaacgcgcgccacggcggtgaaggagtcttcaagtgccctgagga

SEQ ID NO: 51308 - DNA, 75 bp, Homo sapiens
ttcagaagagccaaggaataaacatgcaatgaacccaaaagggagtcgatagcagcagttggtgacgagatggca

SEQ ID NO: 51309 - DNA, 88 bp, Homo sapiens
catgtgggagaggagagtaaaaagaacttcctggagaaactgaagcgggacgttgagataaaataccatgaggagtttgagaagagcc

SEQ ID NO: 51310 - DNA, 83 bp, Homo sapiens
ccgccgccaccatgcccaagagaaaggcatcctgtcggctcacaagataatagccagctccccagaaatgaacctgcccacgg

SEQ ID NO: 51311 - DNA, 124 bp, Homo sapiens
ccagggcccatctccttctctaagagatgcctgcagcctgccatgggacgtggggtccaccggtacagggggggccctcagcctcttggccttgaacgggctgttcatcttgattcacaaacac

SEQ ID NO: 51312 - DNA, 100 bp, Homo sapiens
cgggctcgggtcgccggagccgcgccccaccccgccagctccagagccacgtacgcggggccttttccgaagtggttttagctgaagagaaggcaactgg

SEQ ID NO: 51313 - DNA, 99 bp, Homo sapiens
ctgcaagctcatgaaagaaatcttagataagaaggttgagaaggatctatcttgggatcccatggctttctttactgggctctggggccccttcacctg

SEQ ID NO: 51314 - DNA, 50 bp, Homo sapiens
tcttttgctgggtcagcctttatgccaagacgatgttccacaggagcccg

SEQ ID NO: 51315 - DNA, 137 bp, Homo sapiens
tggcacctgcgcgaagctggccaaagcctgcccagacggctcacctgtgcgggatggaacaaaagctctaaccatggaatactgggaatgtccctttctgtgaaggaggtttgtcagccacaacaggaatattcatg

SEQ ID NO: 51316 - DNA, 101 bp, Homo sapiens
taacaggggagaaggctgggccagagccaataccacattctgaacacaggagccacgggaaagaggtgctggtgacagccagtcgggcattgctgctggct

SEQ ID NO: 51317 - DNA, 123 bp, Homo sapiens
cccagctcctaccagaggacctcagaaaggagctctatgaactttgggaaataccatgtttgtgtggaagtgccccgtgtttgctatgccgatgctgtcctagtggaaacaactccactgtaa

SEQ ID NO: 51318 - DNA, 93 bp, Homo sapiens
gagcgagccgcctgccccggtgcgcagacagagctattccagcaccagcagagcttccttcaaaatgtctactgttcacgaaatcctgtgcaa

SEQ ID NO: 51319 - DNA, 83 bp, Homo sapiens
gattcgcgctgctgggcacccacggagcctccggggctgctggtcagtgagaaggtcggaggggccgaggggaccaagctgga

SEQ ID NO: 51320 - DNA, 100 bp, Homo sapiens
cttaccacttctttatacttgcacagaggcagctctatgagggatgtgtggacactgcactgaagacaggtgttggtgtctgtccagtcccttatattag

SEQ ID NO: 51321 - DNA, 100 bp, Homo sapiens
gtttctctgccttgctgatctgagctcagacctgccaatttaccagagataattgataacaccctgtaacagctgaaatgcaggctcaacagtaccagca

SEQ ID NO: 51322 - DNA, 100 bp, Homo sapiens
gtaattgctgaacttaaaaagcagtctaaacctgtgaccacccctgaagaaattgcacagctggttgtcttcttgcctgccctgtgtcgtaaaatggggg

SEQ ID NO: 51323 - DNA, 101 bp, Homo sapiens
cgcagctgcgatggccgtggccgtggggagaccgtctgtcctatggcagcgtatacaaagctattcataaagagaccggccagattgttgctattaagcaa

SEQ ID NO: 51324 - DNA, 76 bp, Homo sapiens
cccgcacctccactccatcctgaaggctaccaactacaatgtgcctccagtccctgtgtgacctgcgcctctcccc

SEQ ID NO: 51325 - DNA, 90 bp, Homo sapiens
cccaatttgcctccacttagtgagcggaagaatgctcttcaggaagctgcagcaaggtttgaggaattaaaggcccaaaaagagctaaga

SEQ ID NO: 51326 - DNA, 99 bp, Homo sapiens
gcgtcgagaagggcgactactacgaggcgcaccagatgtaccggaccctgttcttcaggtggccaaggtggaatacgtcaggaagaagccaaaattaaa

SEQ ID NO: 51327 - DNA, 98 bp, Homo sapiens
cagattccctcattgatacctttcctgagtgtagtacggaaggtaatcccgtttgttggcaccattcctgatcagctggatcctggaactttgattgt

SEQ ID NO: 51328 - DNA, 75 bp, Homo sapiens
gtacaccattacaccagtgaagatgaggaagtctgggggccgagaccacacagaaggatttgaaatttccctgcc

SEQ ID NO: 51329 - DNA, 100 bp, Homo sapiens
tagtaccaatttcagtggtgaaatgcacttctatgagcttgtggaagacacaaaagatggcatctggctggttcaggaggcaggtggaagtcatcataaa

SEQ ID NO: 51330 - DNA, 100 bp, Homo sapiens
ctgacagagcagtccaacaccccgtcttgccacttgcctagtgaggcttttccgaacctggaaggagacgtctagaaatcccaactttgctgtgtaagga

SEQ ID NO: 51331 - DNA, 75 bp, Homo sapiens
tgatttttagaactccacatttgagatggagtttcactcttgtctcccaggctggagtacaatggcatgatctca

SEQ ID NO: 51332 - DNA, 83 bp, Homo sapiens
cttcggcagtccacccaccgccgccgcctcccagtttcactgttacatgccttgaagtgatgaggaggtttctgttactatat

SEQ ID NO: 51333 - DNA, 90 bp, Homo sapiens
gggccagatacagagaatgtccccatcatgtacatctgccatgggatgacgcctcagtgtggacgaatgtggaacctcgctctgtggctg

SEQ ID NO: 51334 - DNA, 100 bp, Homo sapiens
ctcaccatgcccttctgcttcaaacagcttaatcttctccatacagagctggctaaacagttggcagacacaatggttctacctatcatacaattccgag

SEQ ID NO: 51335 - DNA, 99 bp, Homo sapiens
gaagctacacttttcaccaaggaactggtgctgcagcgagagaaagccatcactgcccaggtagaagagaagcgcaggaagaaacaactggaggaagag

SEQ ID NO: 51336 - DNA, 90 bp, Homo sapiens
tggaaatgaaatggtggagtttgcacatctgagtggagatagacaaaatgtgtcagtaattaacactgtggatacctcccatgaggacat

SEQ ID NO: 51337 - DNA, 51 bp, Homo sapiens
agtggagtggtggatcagaccaaagatggaacatggtccaagacaattcct

SEQ ID NO: 51338 - DNA, 75 bp, Homo sapiens
gttcgagcagatcgacaagtccgggagctgggcggccatttaccaggaacggcagagtcgaaacaaacaatgagg

SEQ ID NO: 51339 - DNA, 105 bp, Homo sapiens
gggatcgctttctcccatcgaaccttctagttgcttattgcaggaattacatgaatgacagtcttcgaaccaatgtgtttgttcgatttcaaccagagactatag

SEQ ID NO: 51340 - DNA, 74 bp, Homo sapiens
cgcagtggtcgcttcttctccttgtcttaggaaaagtcctcagtgctgtgggcagtgcccagctactgatgtcc

SEQ ID NO: 51341 - DNA, 99 bp, Homo sapiens
gatccgctgatctagtgcttctcgaaaaaaaccttcaggcggcccatggctgagatgagtgaactgagtgtggcacagaaaccagaaaaacttttggag

SEQ ID NO: 51342 - DNA, 98 bp, Homo sapiens
ctggggctgcctgccgggcggccgggcgcggcgagcccagatgaggtggaggaccatcctgctacagtattgctttctcttgattacatgtttactta

SEQ ID NO: 51343 - DNA, 100 bp, Homo sapiens
tgcaaccaagcacctgaaacagcaggcgcagttgtgtagcagttgagtaatgctggttagctgttaaggtggcgtgttgcagtgcagagtgcttggctgt

SEQ ID NO: 51344 - DNA, 76 bp, Homo sapiens
tcaaggactacagtatgcacttaatgtcccttttctccacagacactacccaaagcagtccttcactacagtggca

SEQ ID NO: 51345 - DNA, 75 bp, Homo sapiens
acagaacatgatcaagggtgttacactgactttttcacagggtacctttagtggttgccaatctgggcatgtctg

SEQ ID NO: 51346 - DNA, 82 bp, Homo sapiens
cggggacattattgcgcgtggaacggctgcttttggaaggttctctttgttcccagacactggtggcattacgtagaatcca

SEQ ID NO: 51347 - DNA, 100 bp, Homo sapiens
ctggatgtggaattctccgtccctttccagggagggaacaaagcccacagcaccggcccctggatcctcctggaatccccgatccctcttgctccctggc

SEQ ID NO: 51348 - DNA, 77 bp, Homo sapiens
ctgcccctggaggagaaatagaagacgggctcatcttcgcttgtgcctggagaagttgaaggggctggtgccacttg

SEQ ID NO: 51349 - DNA, 75 bp, Homo sapiens
atcgtcccctggactctctcaagactccatgttttcgttggccctgaaatgccttatcagtctgtccaccatcat

SEQ ID NO: 51350 - DNA, 129 bp, Homo sapiens
accttttagaagcccttctggaactacaagcatatgctgatgttcaggcagtcttagcaaagtatgatggtgtggccgacgacgatgccctcgctgaggagcgcatgcggagaggccagaacgccctgc

SEQ ID NO: 51351 - DNA, 101 bp, Homo sapiens
gaagcctattctaaggaaaagtcttcaaagaaagggaaggggaaaaagaagcagtatctatgcccatcagatctaaaattgcagtgtttgataaaatgtgg

SEQ ID NO: 51352 - DNA, 76 bp, Homo sapiens
gagccctggaatgtgaagagtgcagagacagtagccatccagccaggagtctcagcagtccaattttggcactgga

SEQ ID NO: 51353 - DNA, 75 bp, Homo sapiens
acgtgtgctttttcaagggagctgataaagaacttcttcccaaaatggttgtcacaacttggacaaaagtaacac

SEQ ID NO: 51354 - DNA, 78 bp, Homo sapiens
ctatgccaacatcttcatcatcaaatgcagccgagagacagagaaggtacgagtggctgctttacagaatctggtgaa

SEQ ID NO: 51355 - DNA, 95 bp, Homo sapiens
tgaaggtgctgaagaagtctgcctacctgtcagccgtgggcaccttcacctgggtctgcacgccctttctgatagcagaccccacgttagctgaa

SEQ ID NO: 51356 - DNA, 50 bp, Homo sapiens
ctcatgttctccttcgtcaacgaccgaaactatgttccaacttcctgtca

SEQ ID NO: 51357 - DNA, 75 bp, Homo sapiens
cgtaataacatttgcagagcgctttcacagtacctgcaatccaacagcaacaactggcgctggtttgatgatcgc

SEQ ID NO: 51358 - DNA, 80 bp, Homo sapiens
gcagccgcgaggaggcgcgggaggtgttcgagaacgaccccgagacggtgttcaggcgcttcgtggaggttggccgggtg

SEQ ID NO: 51359 - DNA, 83 bp, Homo sapiens
ccgctgctgtcctgcgaccccaagcagggcgtgatggtgggcatgggtcagaaggattcctatgtgggcgacgaggcccagag

SEQ ID NO: 51360 - DNA, 74 bp, Homo sapiens
ctcagcctctcgagtagctgggaccacagatttgaaacgccacctgtatcacatactaaatttatatacataga

SEQ ID NO: 51361 - DNA, 82 bp, Homo sapiens
ccagagtatcccatgaaaccaccaagcattattctcctaacggctgctttgactctcccgcgaagacctttccttcactgtt

SEQ ID NO: 51362 - DNA, 75 bp, Homo sapiens
cacagacctgctgtgtgtgcttctgcgccccaggtttttcgttggaatatacgttgcacatttatggcgattctg

SEQ ID NO: 51363 - DNA, 100 bp, Homo sapiens
cctggagagcagctttgtgggctggggcctgccagtccagagccctcaagcacccattggccaggccatccaccgcctgctcctgatccaggctttccgg

SEQ ID NO: 51364 - DNA, 74 bp, Homo sapiens
gtgccttcaggaccttctggtgctccaccaatgcctggtggcccccatagtttgctctccaaagctcggggaat

SEQ ID NO: 51365 - DNA, 88 bp, Homo sapiens
accatctcgcactaccctgactacagctggagcgcccagaggcgagccctggtggaggaagagctgaagagcaatgtgaccagcctgg

SEQ ID NO: 51366 - DNA, 90 bp, Homo sapiens
cgctaggatgggaagaggcatatgacccacaggttggagattacttcatagaccacaacaccagcagcgctgaccagagccctccggaga

SEQ ID NO: 51367 - DNA, 51 bp, Homo sapiens
tgaagatcagaatgatccccttctgccagaaaccaactttgatccagcaga

SEQ ID NO: 51368 - DNA, 98 bp, Homo sapiens
caccatgtactcgggagccggccccgagaggatctgacgaactactctcaggcagtgttctcagtagtccgaactctaatatgagcagcatggtagtt

SEQ ID NO: 51369 - DNA, 83 bp, Homo sapiens
ggacttcatccaggcctacgaggaggtgcgcgagaagtacaaaggtccctggtgctgaaccgcctgcgtccagttgccagcgg

SEQ ID NO: 51370 - DNA, 83 bp, Homo sapiens
ccctgtgaaggtgaaagtggagaaatcaggtacaccaggggttggaaaaaccacactaggcaaagaacttgcgtcaaaatcag

SEQ ID NO: 51371 - DNA, 50 bp, Homo sapiens
atacgtgggtttttgataatgttaagatgctgaaattttcttctaaggag

SEQ ID NO: 51372 - DNA, 75 bp, Homo sapiens
tgctccactttggaacaaatcggaagctagggccttccaggaagctcttcgtgggcggtcttgactggagcacga

SEQ ID NO: 51373 - DNA, 86 bp, Homo sapiens
attaacagaagattttggtgggagtctcacctatgatcacatggactggttaaataagaggctgaaatttgcctgtaatggtactg

SEQ ID NO: 51374 - DNA, 98 bp, Homo sapiens
ttgattattttaagaaaccacaggtggtattaaagataatcaaacattatcaagaagaaggacaaggaactgaagttgttcaaggagtgcttttgggt

SEQ ID NO: 51375 - DNA, 98 bp, Homo sapiens
ttctctgctgcaccgacctcgacgtcttgcctgtgtcccacttgttcgcggcctatagaggctgtggccaggccagctgggctcggggagcgccagcc

SEQ ID NO: 51376 - DNA, 101 bp, Homo sapiens
gctccacgcagttactagtgtctgaagatccaaaggaaggaggagctaccaccaaagagtcagatgccgtagggccaggtgagctgctgtgaaggactcat

SEQ ID NO: 51377 - DNA, 75 bp, Homo sapiens
gtcatgactatcctcctggtggttctgtataaatacaggtgctataagctaaagccaattcaaatactttcaaat

SEQ ID NO: 51378 - DNA, 100 bp, Homo sapiens
tttatcctcaagagtcagctggcaggtttcccaccgttttcgagaactcatgcagctcttccacactgcctgtgaagccagctctgaggatgaggatgat

SEQ ID NO: 51379 - DNA, 82 bp, Homo sapiens
tcgagaccgcttaccgcatctggctggagccctgcattcgcggcgtgtgcagggcgaactttctgaccaagtatacaactac

SEQ ID NO: 51380 - DNA, 90 bp, Homo sapiens
aacagataggtgatagttgggaatggagaccatcaaagccttttcaggagccaaaaaaacaaatacaaacaaacaaaaaaatacccagag

SEQ ID NO: 51381 - DNA, 82 bp, Homo sapiens
agtcctctgcataaagctgagagatgcctacagctgaggatgccaaggacttcttcaagaggaagatagattttctaaccaa

SEQ ID NO: 51382 - DNA, 83 bp, Homo sapiens
gaccgcgcgcagggcctgcagcgggagctggacggcgagcgcgagcggcgcgagaaaggccgagaactactggtggcgtggcc

SEQ ID NO: 51383 - DNA, 100 bp, Homo sapiens
ttcagttcttcctgaaggaatctggagctggaaagcaggaagcaatttgctgtggaattttttccatcacagggaaaacaaagtgcatgatgaagtcttc

SEQ ID NO: 51384 - DNA, 100 bp, Homo sapiens
gttaatgcacgtattttaaactcccgggcctgcggacgctatgcacagcaggcgtggcctggagggactcagcaaattctcctgccttcaacttggcaac

SEQ ID NO: 51385 - DNA, 98 bp, Homo sapiens
gagctgaacggacagcttcagaaataaattgtgagcaagacgtggaaggtgattgcagaggatgaggtgctgtggtacaggctgtgccagcaggaagg

SEQ ID NO: 51386 - DNA, 82 bp, Homo sapiens
ccgggagcggcggcagcggcggcgcggaggcggctgaggtgcgagccgggcgaagctgtgctcaggcccgggctggacgcag

SEQ ID NO: 51387 - DNA, 117 bp, Homo sapiens
gctgttttagtgctttttatttttccccaattcagcagagaatattttcaaggggggtgagaagccctaccactgcaactgggacggctgcggctggaagtttgcgcgctcagacga

SEQ ID NO: 51388 - DNA, 98 bp, Homo sapiens
ccgggatcgtgaccgagaccgtgaccgagagcgtgaccgagagcgcgaatatcgtcatcgttagaagtatacagaagatgaagctaggaaaataggag

SEQ ID NO: 51389 - DNA, 100 bp, Homo sapiens
cagcagcatctcagcccaagagaaggaagatgttaccgagtacttcagtgaattccttagtgcaggggaacggagtcttgaattccagggatgcggcaag

SEQ ID NO: 51390 - DNA, 110 bp, Homo sapiens
agaaactgaacaaaactatgaggcagagatccactgtttacagaagaggcttcaagctgttagtgagtccacggttccgccaaggctctttggtgtaacgggaaactgcg

SEQ ID NO: 51391 - DNA, 74 bp, Homo sapiens
tccgccgccccgaaactttcaccgcgagcggggaggacatgtatgcccaggactctatagagctactaacaaca

SEQ ID NO: 51392 - DNA, 83 bp, Homo sapiens
taacaagcagcagtgaggacaccaaaggagattatttggtagcaattgaagagaaaaacaaagctacatttctacgtgcttat

SEQ ID NO: 51393 - DNA, 100 bp, Homo sapiens
agaagatgatgagcagtttgtttctctgtatggcacagaagaatatttggagcttctaagtaggacatccttagaaactcagaagttggatctgatggct

SEQ ID NO: 51394 - DNA, 104 bp, Homo sapiens
aagacacgagtgggggcacgacagccttgaggcccagcgctagcacccagacattgacgaatgtgtaacctcctcctgcgagggccactgtgtgaacacagaag

SEQ ID NO: 51395 - DNA, 100 bp, Homo sapiens
tccgtttcaaggttaattcgaaagtcttgtggaagatctggaagaaacagaggaaaggccatgtgaggacacagtgagaaggtggccgtctgcaaccctg

SEQ ID NO: 51396 - DNA, 83 bp, Homo sapiens
ctgcggcaaaacctacacaaagagttcccatctcaaggcacacctgcgaacccacacaggttcgatacaagaggctgttttcc

SEQ ID NO: 51397 - DNA, 75 bp, Homo sapiens
ggccgtaggactgaacacggggaggttcctaaaagtaaagctttagaggccaccaaattggcaattgaagctggc

SEQ ID NO: 51398 - DNA, 142 bp, Homo sapiens
gaactctgaagaactattagaatttgcaacaaggtcattagatataaaggaacctgaagaattttcaaaggtaagccgtaactttgagctggttggacgggttaacttggatcagctggaacagatgaaggagaaaatggag

SEQ ID NO: 51399 - DNA, 75 bp, Homo sapiens
ttgtggggcggcgagggctggatcctgggccaaatatatgccaacaacgacaagccaaaacagagtggagtacga

SEQ ID NO: 51400 - DNA, 100 bp, Homo sapiens
cagtgaaaaatgatgaagagcagatggaaacacatgaaagacttcctcaaggactacagtatgcacttaatgtccctgacacagccagtgtgaagtcctc

SEQ ID NO: 51401 - DNA, 96 bp, Homo sapiens
gggagttgggaggacccgggacaccgcacagccgggaaatggaatttgctgattcccttggaattccgtttttggaaaccagtgctaagaatgcaa

SEQ ID NO: 51402 - DNA, 98 bp, Homo sapiens
gagggaggcgaggaggaagaggaggcggccatgtatgaggaggagatggaaagggaagctgaatgaaacctgggtcaacagccatgtggacaactgca

SEQ ID NO: 51403 - DNA, 89 bp, Homo sapiens
aagaattcataagatagccatcctgggtcttggcagcagcattgggactcctccagaaggtgtttcagtcacctccagtaacacgggcg

SEQ ID NO: 51404 - DNA, 100 bp, Homo sapiens
gagcccctacagaaggtggagcccgggcggatccctaaagaagtggctgacatctttaacgcccccagtgatgatgaagagtttgttggcttccgagatg

SEQ ID NO: 51405 - DNA, 87 bp, Homo sapiens
taatatacctgtccagacaatctccagagctgctgcagaaaagctgtttggattcgtgcgacggcgtggagtgcggcccgggcaagg

SEQ ID NO: 51406 - DNA, 83 bp, Homo sapiens
ggccgagtggtctaaggcgccagactcaagagctggaagtcgagtgtgctactcaactcaggagatttggagacaaactgaac

SEQ ID NO: 51407 - DNA, 101 bp, Homo sapiens
tctcccaccaaagtgatggaaacaccattccagaaaatgggattgcccaccacgataatgcagttcttattactaggatctagtgaaaagccatttgatgt

SEQ ID NO: 51408 - DNA, 100 bp, Homo sapiens
cgcctcccgggagtgccgtgcgccgcagcccgggcccaggccccggcagcgcctgggacaagacacattccttaacccagcgcagggctgtccagggtag

SEQ ID NO: 51409 - DNA, 95 bp, Homo sapiens
actccgccctgcacaggatcatcgaggtcgtcgacgccatcatgaccacggcccagagatatgagatcctgactccaaactccattcccaagggt

SEQ ID NO: 51410 - DNA, 74 bp, Homo sapiens
gaattcggaatgtctgaaagagcagcagaaacgctactttccagacaagttggatggcttgaggactggtacta

SEQ ID NO: 51411 - DNA, 82 bp, Homo sapiens
atacgaggaggaagaggtggccataccgttgaccgctcctccaactaaccagtttccaatacttatctacaggaatcgccat

SEQ ID NO: 51412 - DNA, 51 bp, Homo sapiens
tttgccgccgttcattatcagaagacacttgctactgtaaacaaccttcag

SEQ ID NO: 51413 - DNA, 83 bp, Homo sapiens
gggatcctgctggactgcacgaaaaacttattgcaggagtgaccaggacactacctcctagaagtaatgcccacagaaagcgc

SEQ ID NO: 51414 - DNA, 50 bp, Homo sapiens
gagggggaagcggcggcggcaaaggaatacttcagagagtcagagttgtg

SEQ ID NO: 51415 - DNA, 100 bp, Homo sapiens
gcagctcgcacttgctcaacaagggcctgccgcttggtactccaaagattcaggtttactcacgtcatccagcagagaatggaaagtcaaatttcctgaa

SEQ ID NO: 51416 - DNA, 100 bp, Homo sapiens
acattgtggacagtgacagcgatgctgaggatcgaggaacgttgtctggtggccggactgtgccatgctgctccagacccaaggtggcagctctcactgc

SEQ ID NO: 51417 - DNA, 99 bp, Homo sapiens
acctgctgctcaccaccggtggcaccctcaaaatctccgacctgggcgtggccgagtttctggcccagctgaagctcatggactacagtctgctggtgg

SEQ ID NO: 51418 - DNA, 100 bp, Homo sapiens
gctatttgggtgatacccagtgcagtgaactgcagaatattgtcctctctggaggttcaaccatgttcagggactttggacgtcgcttgcaaagagattt

SEQ ID NO: 51419 - DNA, 99 bp, Homo sapiens
gggcctcttactgaaggacagagaagaaatgtggcagtagtgaattcattgtataagttgcaccaatcagtaacaaagttaattggccttggtcctcac

SEQ ID NO: 51420 - DNA, 95 bp, Homo sapiens
actacattcgtgtcctcgactttgatgtcaagcgcaagtggccgtctgcccggcccagcaccatgcacacgcttgtgttcttgagcacacggcag

SEQ ID NO: 51421 - DNA, 100 bp, Homo sapiens
gaagaaggccttgactacggaggggttgccagaagaagacgtaaagcaggctaccagcaattttgagaacttgcaaaaacagcttgcaaggaaaatgaag

SEQ ID NO: 51422 - DNA, 100 bp, Homo sapiens
ttaggttccttttctccggcaggctcctaagcctaggagagcccgaactggaggtccctccagctacaaggtgggcaccatggcggagaagtttgactgc

SEQ ID NO: 51423 - DNA, 74 bp, Homo sapiens
taaaagcagcaaatctacttttgggttacaaaaatccagaccagtgttctacccaagagttcttcttgattgtc

SEQ ID NO: 51424 - DNA, 101 bp, Homo sapiens
cttctgctgttgctcttctccgccgcggcactgatccccacagagactctccaacatgtgccttctgaccatacaaatgaaacttccaacagtactgtgaa

SEQ ID NO: 51425 - DNA, 108 bp, Homo sapiens
cgcgtcccgctcgctgggagagaggtacctctccttttccctctccctttccctaaggagtatgctgctgctgttccgctttgcgtcctcgctacaaacgcctggtgg

SEQ ID NO: 51426 - DNA, 97 bp, Homo sapiens
tacaacccttttgagacccgggagccgtactctgacagctgtgcacgatgccatccttgaggacttggtcttcccaagcgaaattgtgggcaagaga

SEQ ID NO: 51427 - DNA, 90 bp, Homo sapiens
cgaacaatggcaaacagtacggcagtgagggaacagcattgcggcctcagctgtgtgcgtcttcaacctgagcgccatcgcgcaggcctt

SEQ ID NO: 51428 - DNA, 96 bp, Homo sapiens
tcccgggagcaagtgccttcagctgggagtgtctggagccctggccaccagcggaaacgcttcgttaagggactcaggcagtacgggaagaacttc

SEQ ID NO: 51429 - DNA, 100 bp, Homo sapiens
gaagtacctcctggtgtattcacagaagccacccaagaggccctggtgagtggacaacatggttcaacatcgactacccaggcgggaagggcgactatga

SEQ ID NO: 51430 - DNA, 100 bp, Homo sapiens
caggtcgcgatcgaagagtccccccaagtctcctgaagaggaaggagcggtgtcctcttaagaaaatggaactgtggctgcaccatctgtcttcatcttc

SEQ ID NO: 51431 - DNA, 58 bp, Homo sapiens
acccgggccggaccgaccccaggcggcggcctggaagaaacgctggtttatcctgcgg

SEQ ID NO: 51432 - DNA, 101 bp, Homo sapiens
ctggagaagtggatcaacctgaagcatacacaagctgagggagaatgtctttcaagagcatcagacccttaaggagaaggaacttgaaacaggaccaaaag

SEQ ID NO: 51433 - DNA, 85 bp, Homo sapiens
gaaggagtgcagaggcatcacctgaaagctttgtgccgtgggactgctggcctcgccgacctcttgctttatcgacacagtgacc

SEQ ID NO: 51434 - DNA, 75 bp, Homo sapiens
ccgccgccccgaaactttcaccgcgagcggatgggccatcaactgagaaagaccttgacgaaaagaagaaagaac

SEQ ID NO: 51435 - DNA, 74 bp, Homo sapiens
tgatgtgaaaacagaagctgtggctgatgagttagatgaactccgtgctgagatggaagagatgagagacagtt

SEQ ID NO: 51436 - DNA, 90 bp, Homo sapiens
agcctgcaagctgttcgatgccacgctgacccagctcggttggtttagcaaaagcagctctagaagcaattaatggattcaacctttttg

SEQ ID NO: 51437 - DNA, 50 bp, Homo sapiens
gggcgttcatctaccacgcctacgttgaatgagttcacggtgatcaggaa

SEQ ID NO: 51438 - DNA, 80 bp, Homo sapiens
gtgaacttccattctggaggggagagacagatgaacaaggtgcacagagcaggtgatggcgctgagatgcgtctggagag

SEQ ID NO: 51439 - DNA, 73 bp, Homo sapiens
tgcagtgaaaagaaattgcgtgggttgttacaagttgagttgaaaacaagaaaaacttgcttttggcgccatc

SEQ ID NO: 51440 - DNA, 90 bp, Homo sapiens
cttaagagtcttaggagtcagttggatgtgacacataaggagagcttgaggaccctcagcctcccccagaccacattccttggattacag

SEQ ID NO: 51441 - DNA, 74 bp, Homo sapiens
accgcaacattccttatccaatcccttaccggttgaagtctgtacaaataccagcagtcctcatgctggcctct

SEQ ID NO: 51442 - DNA, 100 bp, Homo sapiens
ggcttgtccctgtttcgccacagttcctaccttatgagctcggttttcttatgcttataagagtggaacaggatgttcacggaagaccagggtgtagatg

SEQ ID NO: 51443 - DNA, 100 bp, Homo sapiens
gaagattctgagagattttttattcgttactatgtggatgttccacaggaagaagtgccattcaggtgtttcaccaaaaccaacagcactttcagcagca

SEQ ID NO: 51444 - DNA, 50 bp, Homo sapiens
gccatccaatggatgcaggaaaactgtgcgacttcatgatagcatatcag

SEQ ID NO: 51445 - DNA, 87 bp, Homo sapiens
tggagcctcagttggaagcagccgatccagcctgcggagcctgtggggcaggtattcaggagtctccggtgccgaacggccactcgc

SEQ ID NO: 51446 - DNA, 75 bp, Homo sapiens
atctctgagaaagacggactccaagcaggcttggccaagtgggacccagcagatcctgcttcccccagcatggca

SEQ ID NO: 51447 - DNA, 75 bp, Homo sapiens
ggataattgggatgatgacaatgtagaggatgacttctctaatcagttacggtggagtgtgttactcttggggct

SEQ ID NO: 51448 - DNA, 75 bp, Homo sapiens
atatgcatgcatgtaccgaccttctgaacaaggccaacacctatgcaggtccagcccagaatcaaatgcaggttc

SEQ ID NO: 51449 - DNA, 100 bp, Homo sapiens
ttcctctcgggctcttgggcgctgctctgaggttttgcactgattgcaaaaataaagtcctccgagcatacaatatccttattggtgaacttgactgcag

SEQ ID NO: 51450 - DNA, 83 bp, Homo sapiens
cgcgtccagcacctacgtcccgctgccgtcgccgccgccaccatgcccaagagaaagtgcgcgtcccgggacgactggcgctg

SEQ ID NO: 51451 - DNA, 102 bp, Homo sapiens
aacgtgataagaagcacctggatgagacatttgctacagcatcccacattaagtcaacgggccattatgctgtgatgaacaaccccaccagacagcctttgg

SEQ ID NO: 51452 - DNA, 80 bp, Homo sapiens
tggggctgtccctgctgcagcagcccaggagatgggcttccccaaggatttattgacattgctacttgagtgtgaacagt

SEQ ID NO: 51453 - DNA, 100 bp, Homo sapiens
ctccactacagaaacctcacagaacacagcaaaggtgctggtaaacaatgccaaaactcatggagatacaagagcattggaactgaatcagagattgtcc

SEQ ID NO: 51454 - DNA, 83 bp, Homo sapiens
tgaccaagaacgtgagcaagcccaggcacagccgacgccgcggggcccagcgctggcgcagtgagaacttcgagagacccgtg

SEQ ID NO: 51455 - DNA, 100 bp, Homo sapiens
cttcgacaaggacgagttcatgaagatgcttcaggactgccccaaggcccgcagggaggtggagctgcactggcgggcctcccagtgcccgcacatcgta

SEQ ID NO: 51456 - DNA, 100 bp, Homo sapiens
ggggcccttggcgcggaggctgagggacccgccgcggcgctgtcgccggagagggagggcaccgctgtcgtcggaggagaagatgaggaaggaagaggaa

SEQ ID NO: 51457 - DNA, 99 bp, Homo sapiens
aggatagtccagctcaaattgtgacatatgatcttctgtcagtcatttgccatcatggaactgcaagtagacctccggctagcctgtttcagccacctc

SEQ ID NO: 51458 - DNA, 82 bp, Homo sapiens
acactcatctctactaccatggatgcaatcacacctctaatcagcaccaagctgtttgcagacaaggtcccaaagacagcag

SEQ ID NO: 51459 - DNA, 117 bp, Homo sapiens
cagaaaatttcaaagacagtagattgaaaaggaaaggcttggtaaaaaaggttcagtgggccccatgctgattgagtttaacatgcctgtggacctggagctcgtggcaaagcagaa

SEQ ID NO: 51460 - DNA, 83 bp, Homo sapiens
ggacgaggaggacctggtggactcgctctccgagggcgacgcataccccaacggcctgcagggctgtcacatggtgactgaag

SEQ ID NO: 51461 - DNA, 100 bp, Homo sapiens
tcgggacggaggacgcgctagttcagagcaccataacatggtgtgggaagtgaagacaaatcagatgcctaatgcagtacagaaactcctgttggtgatg

SEQ ID NO: 51462 - DNA, 100 bp, Homo sapiens
ggccgggagccatggagcgcggccctggggcccgggggcgcgggccggggtggactccagaagacctttccagattcgtggttgagctgcagcagaggga

SEQ ID NO: 51463 - DNA, 100 bp, Homo sapiens
agtgagttgttgctcccgcctgagcccagcccccagaaaggattgtgacatatcgttggacccagaattgaggaaatgtgactggaaacagtaactccac

SEQ ID NO: 51464 - DNA, 74 bp, Homo sapiens
cgagtttccgatttaaagctgagctgcgaggaaaatggcggcgggagggaagtggcactaaggtccaaaggaag

SEQ ID NO: 51465 - DNA, 75 bp, Homo sapiens
gaaagagtcaacagcagtggcaacagcaaacatgtctgacaaagagctaaagaagctacgtaataaacaaagaag

SEQ ID NO: 51466 - DNA, 101 bp, Homo sapiens
tacgtggccgtcaacaatcccaagaagcaggaatgaaagtggcgctttctccgccccagtttgaaggaagaaagtactgtgaacatgactttcagatgctc

SEQ ID NO: 51467 - DNA, 80 bp, Homo sapiens
ctggtgcccaagcctggattaaaaagatcttgatgtggaagaaatggaggactcagaaccaaggatttccaagtgatttc

SEQ ID NO: 51468 - DNA, 75 bp, Homo sapiens
gagcactggaagtacgggcagttgcagtgttggagctaaaagcaaagactcaggtggactgaaggccgctatgat

SEQ ID NO: 51469 - DNA, 83 bp, Homo sapiens
ggatgatgtgcttggtggagcagctgcctgggagaatgttgactctactgcagtttctccacagtcgaactcctctaggccca

SEQ ID NO: 51470 - DNA, 89 bp, Homo sapiens
cagccgcaagtacccgtccatcatagtcaactgcgtggaagagaagttctggtgttgtttgggaggtgaaaccaaagcagaaatggaag

SEQ ID NO: 51471 - DNA, 80 bp, Homo sapiens
aggtgcccaaggtcagaaggaagcaccacacagaggcctccaactttaagaaggcaaacatggcatcaagttctcagcga

SEQ ID NO: 51472 - DNA, 74 bp, Homo sapiens
cgcagtcggcaaggagagacgtcgctgaggggcttgcctgaagcgagggccaaactgattatccaccagacact

SEQ ID NO: 51473 - DNA, 98 bp, Homo sapiens
tgaagccacacagtgtccagatacgaggcctcagggatttagagatactgttgttacttctgcatgttcattgcaaacagaaggttccttgagcaccc

SEQ ID NO: 51474 - DNA, 73 bp, Homo sapiens
ggaagatgcctatcatgaacatcaggcaaatcttttgcgccaagttttgggaggtgatcagcgatgagcacgg

SEQ ID NO: 51475 - DNA, 75 bp, Homo sapiens
gacgacttctacatcctgggcagtgggctgaaacattgaatgaggaggataaagcaaagattgctaaaagcaaga

SEQ ID NO: 51476 - DNA, 75 bp, Homo sapiens
atgcccttcacaatagcagcggagaaggtgtacaacacccgccatcagctccgagatgcacgtgccgtcggtggc

SEQ ID NO: 51477 - DNA, 75 bp, Homo sapiens
aggccatcaggagccaggggctggcagtgcatgacgtgctcctctccgaattccggcccagtggggagctgttcg

SEQ ID NO: 51478 - DNA, 104 bp, Homo sapiens
ctcaagatggcggccaatgtgggatcgatgtttcaatattggaagcgctttgatttacagcagctgcaggtactgccaaaattatgacatgataccaaggaaat

SEQ ID NO: 51479 - DNA, 84 bp, Homo sapiens
cgagggccacagtgggattaaaaagaccactgaggagcaggtgcagaggacgacaccgatggcctgaccccgcagctggaggag

SEQ ID NO: 51480 - DNA, 80 bp, Homo sapiens
ctcaaagccctgcattccagaggtggtccagctgctcacctgtgacctgctactgtcgctacggacagcgctctggcaaa

SEQ ID NO: 51481 - DNA, 74 bp, Homo sapiens
attcgcagtggtcgcttcttctccttgatcaattctctccattttcgtctagcagtggaagaagactgaatatc

SEQ ID NO: 51482 - DNA, 98 bp, Homo sapiens
acattccctccagctgctacccatttaccagaccgatgttcacctccacgatatttgctgtggttggattcttgggagctggatactcgtttatcatc

SEQ ID NO: 51483 - DNA, 75 bp, Homo sapiens
agaggcgcaaacaagccaatcccaggaggaaaaacggttctaaggcccagcagctactacaaggattgcaagcca

SEQ ID NO: 51484 - DNA, 90 bp, Homo sapiens
gtcctggatgagattgatgctgccttggataacaccaacattggcaaggtgggggaagaaactgatcatcgttgcctcccaggccatgcg

SEQ ID NO: 51485 - DNA, 75 bp, Homo sapiens
atggagatgggcagacggattcatttagagctgcggaacaggacgccctctgatccttatgccagcctggaccat

SEQ ID NO: 51486 - DNA, 98 bp, Homo sapiens
cggcgggcacgcacggcccgggccggcgctccaaggcccgcccgggagggccggggccgcgctcagagacaatggacctcagatagcctatgttcggg

SEQ ID NO: 51487 - DNA, 101 bp, Homo sapiens
cagagcaggaatgtatcagggacagtggcggatgtgcactgctacaggactctactatggaggggacggcaaaacagaacagaaaggcggagataaaaaga

SEQ ID NO: 51488 - DNA, 99 bp, Homo sapiens
caacaacgaggaaatatttccaacatgcgtgggtcacatttctctgcagcaatatcattcattttgaaagtttacgaacaagaactgcagaagccttaa

SEQ ID NO: 51489 - DNA, 93 bp, Homo sapiens
aacacggaaactgagtatgggatctgatgatgctgcctacacacaagattataatccatatccagtcaaatatgttggaaaacctgataaaga

SEQ ID NO: 51490 - DNA, 50 bp, Homo sapiens
ctgaaaaggaagttttctggaatggtacacattttggaactttataccca

SEQ ID NO: 51491 - DNA, 90 bp, Homo sapiens
gctggagtttcagacgtctgagacccttgattcctgaagagaacaaggagagggtacaagaactccctgattctggagccctcatgctag

SEQ ID NO: 51492 - DNA, 106 bp, Homo sapiens
cggcgagccgggtgtgagctgcctgaaaatgcactcggatgccgccgctgtcaaacatacatatgatagttgagaaagacacatattctgatcatgaagaaataaa

SEQ ID NO: 51493 - DNA, 100 bp, Homo sapiens
ttactcagctgagtgtgccacacaggtagccctggacggcattcagtgttttggttctgccgatgatgagaggatcttgaggttcttggaattggcaggc

SEQ ID NO: 51494 - DNA, 75 bp, Homo sapiens
tggatccttgtgggcatgatccataatcggtttcaagaaaggacaagcgattcgcctgcttcttattcacctgcc

SEQ ID NO: 51495 - DNA, 100 bp, Homo sapiens
ctgatctgatatcctgctttgagcaaataaaagagccctggaatgtgaagagacatgagacagtagtcagcttctcagtaacaacatgctgtaccccaag

SEQ ID NO: 51496 - DNA, 83 bp, Homo sapiens
tgctgtaaccacctcacagattccagcttcggaacaagagaccctgttaattggccttggtcctcacagctccaaaaagaaac

SEQ ID NO: 51497 - DNA, 95 bp, Homo sapiens
ggcggcgctggggcccccagaagtgatcgctcagctggagaacgcggctaaagttctgatgtgttctaagaacggaagcatctgggctggatgga

SEQ ID NO: 51498 - DNA, 80 bp, Homo sapiens
ggccattaccatgtatatattaaagatgttgatcatttgggaaactggcagtttcaaggcttccagcaaaagttctcctt

SEQ ID NO: 51499 - DNA, 89 bp, Homo sapiens
ctgcaacacttacacagcagcaacagcctgctacaggaaagcgtctctagcagctgatatccccagacttggatatagttcctcatccc

SEQ ID NO: 51500 - DNA, 100 bp, Homo sapiens
ctggagacataatattacacagctggtcttcatttcctgggtgagtttgtagatgatgggactgaaactcacttcagtatcgggaaccatgactgttaca

SEQ ID NO: 51501 - DNA, 88 bp, Homo sapiens
acgagagcccggcccgcctgtgtggacgatatggccgcgtggaaagtgtcaaaattcttcccaagaggggatctgaaggaggagtggc

SEQ ID NO: 51502 - DNA, 75 bp, Homo sapiens
atgaccacaacaagcaagcatgcagcttactgcttgaaagctatcagttgagggatttgcagttgataaaatggc

SEQ ID NO: 51503 - DNA, 99 bp, Homo sapiens
catcacccaccaacaacaccacaataatccacagccaaggcaccatgcggcccgtgcggcgcaacttctacgacccgtcgtcggcgccgggcaagggca

SEQ ID NO: 51504 - DNA, 74 bp, Homo sapiens
accattcaagcattaattgatgagggagatgaaaaactggaggcggcccactttgacgaaaagaaggagatcaa

SEQ ID NO: 51505 - DNA, 75 bp, Homo sapiens
ggcgacccggtgtgtggcgcgcccagagccccgcgtttcagccctagggaaggtggtcctgccatcatggctgtc

SEQ ID NO: 51506 - DNA, 100 bp, Homo sapiens
gtttgttgcaaaataatgtaaacgtcaatgcacaaaatggatttggaaggactgcgctgcagagttggccaccctgttcaagggcttaggagaaagtcaa

SEQ ID NO: 51507 - DNA, 83 bp, Homo sapiens
gcaagatgccgctgccggttcaggtgtttaacttgcaggtgctggagaatctggtaaaagcaccattgtgaagcagatgagga

SEQ ID NO: 51508 - DNA, 76 bp, Homo sapiens
ctacaggactgcggacaagggctggcagacatctgtgcaggttccatcaccagcaaatggcgtgattgaagctctt

SEQ ID NO: 51509 - DNA, 100 bp, Homo sapiens
ggagcgtcaaaaactgggagagcttcggaaaaagcactacgagcttgctggtgttgctgagggctgggaagaagctgtgaggtggagcagtgggactcgg

SEQ ID NO: 51510 - DNA, 100 bp, Homo sapiens
ctcacttaggactttctggatccggacccaggcagcgcacactggactcttgaggaagtttttcccctccagtaaatgtgactgtctctccccgttctga

SEQ ID NO: 51511 - DNA, 51 bp, Homo sapiens
aggaggcgaattttcagttgatagccctcaaggacgttttgttctgaagac

SEQ ID NO: 51512 - DNA, 100 bp, Homo sapiens
gagctcatctggaattttgccgatttcatgactaaccagtggaggtggggaagacagggctccagctaccacaggacgggctctgggtatagccgttcca

SEQ ID NO: 51513 - DNA, 100 bp, Homo sapiens
atcctgttacagacattgaggaaattatccgtttctggaaacattctacaaggctgacccgcggctgattgagtccctctcccagatgctgtccatgggc

SEQ ID NO: 51514 - DNA, 75 bp, Homo sapiens
tggagcccgaccatcctttctacagcaacatcagtaagccacagaccccgcacctggaggaggacttgaaggagg

SEQ ID NO: 51515 - DNA, 82 bp, Homo sapiens
gttgaagagtggcagcacagggtgctgggtaggccaggtttcagcatcgcagacaagaagcgcaggacaggctgcattgggg

SEQ ID NO: 51516 - DNA, 102 bp, Homo sapiens
ctctcggtgttcccgctggcggcgggcatcttcttcgtgaggctgctcttcgagcggcgcttacagcttttagatggggaatatgaagtagccatgcaggaa

SEQ ID NO: 51517 - DNA, 90 bp, Homo sapiens
cgaagtctgcttctgcttccaaaggagaaccgcagtgaaaggcagcaaatatgaagtctatggaccctgcctcaggttattcaaataaca

SEQ ID NO: 51518 - DNA, 88 bp, Homo sapiens
gcagtggtcgcttcttctccttgggtccatgcctttttagagcagtggggactcgttaattaccaagttgacccggaaagtagaccca

SEQ ID NO: 51519 - DNA, 82 bp, Homo sapiens
tgagggccttcgagagctaccgcgccagacaggtttccacttgagcggcacagtgacagaacctgcaatacaatcggagcca

SEQ ID NO: 51520 - DNA, 88 bp, Homo sapiens
gtgtacgagaagccggtacaggtgccctgcggacacgtagagaagaagaaggaggttcctgctgtgccagaaacccttaagaaaaagc

SEQ ID NO: 51521 - DNA, 100 bp, Homo sapiens
gccaaagatctgacagaactggttcagcggagaataacatatcttcagattccagactccatcatttctcgtggtgttcaggtgctcccacgagacacag

SEQ ID NO: 51522 - DNA, 74 bp, Homo sapiens
caatgctgatgtttgataaaactaccaacaggcacagagtgaactttgaggcgctgatcatcaccatgtcggta

SEQ ID NO: 51523 - DNA, 50 bp, Homo sapiens
ctaccccactcctgggccgtccctgaagaatttcgctaaggagtttgtga

SEQ ID NO: 51524 - DNA, 75 bp, Homo sapiens
ctttttctttcccctgtcgacagactaaactggaagaggtacaccagaggatcgcttcctggcagaatttgggag

SEQ ID NO: 51525 - DNA, 90 bp, Homo sapiens
ggaaaaaagagaggatttgcttttgtaacttttgatgatcatgatacagttgataaaattgttgtgggattttcctgtgatgggatgaga

SEQ ID NO: 51526 - DNA, 75 bp, Homo sapiens
cttcaacttcgaccacgccctggtctggtccttgcactcctgtttccaagcatggcgagcatggcggctataggc

SEQ ID NO: 51527 - DNA, 96 bp, Homo sapiens
cagcagctggagaatatgatattctttcagccataggaaaaggatacagagtagagtttcatgaacctgaaacttggtggaaatttgatcctgaag

SEQ ID NO: 51528 - DNA, 75 bp, Homo sapiens
aggcagcggcaggctcaggtgcagccgctggtcatcatcagatttgaaatatttaaagtggatacaaaactattt

SEQ ID NO: 51529 - DNA, 90 bp, Homo sapiens
accttttaaacacccaagcaacttggagcttcacaaacggtctcatacaggctggaagtggagccctgccgataggccctcttttgctga

SEQ ID NO: 51530 - DNA, 83 bp, Homo sapiens
gtcaactttactgagaattttccacctcctgacacaacaccactcatctgcgggccaggcatcgacatccgcaacgactatca

SEQ ID NO: 51531 - DNA, 100 bp, Homo sapiens
gatctgcctgaggatgcacctcttgaaaatggttctacctacagcgtcctgtccaccatgccctcagactcagaaagcagcagctccctcagcagtgtgg

SEQ ID NO: 51532 - DNA, 118 bp, Homo sapiens
agacattcaagaagaccgccagcctgatagccaacagttgtaaagcagtatttgctgatagtccaactccaccgccaccacctccaccagatgacattcccatgtttgatgactctcc

SEQ ID NO: 51533 - DNA, 114 bp, Homo sapiens
ttccttcctggcgctttcctgggttgcttctggcggccatggtgttgctgctgtactccttctccgggcgatttgatgaaactgttatcgaagagagaagacaatgtgctgaag

SEQ ID NO: 51534 - DNA, 82 bp, Homo sapiens
cagatcccatcagaggcaccccagacacagtgagaagccctaccactgcaactgggacggctgcggctggaagtttgcgcgc

SEQ ID NO: 51535 - DNA, 98 bp, Homo sapiens
aacaagatggcagccctcatacctcaagggttctcttgtttatcgagggttttgggctggtggtctcggcaggttgtgaactaaaggccgacaaagat

SEQ ID NO: 51536 - DNA, 74 bp, Homo sapiens
taaggattccaagtaactcttatttggatcagtttgacaacttagaaaaacacacacagtggggaattgatatt

SEQ ID NO: 51537 - DNA, 96 bp, Homo sapiens
gaaactgttgaattagacccgtttcctatagatgagaaaccatacaagctgtgtcacagcaaactgtacaatggcagttgagtgggttttgaaaaa

SEQ ID NO: 51538 - DNA, 100 bp, Homo sapiens
ggccggcggggccacgcccggggccaccctccccaagtccccatctcaggacctgaaggagaagaaggagaaggtggaggagaaggcaagccggaaagag

SEQ ID NO: 51539 - DNA, 97 bp, Homo sapiens
tcgcagcccccgcgctggtgcagccaccctcgctccctctgctcttcctcccttcgctcgcaccatgctccagaacctgggtatcaacccagcaaac

SEQ ID NO: 51540 - DNA, 50 bp, Homo sapiens
cagatatgttgtatcagtatttaaaggcccaactccgacactgtatgtcc

SEQ ID NO: 51541 - DNA, 83 bp, Homo sapiens
agcctgcagcggagcccacgagaggcagcgccatggcggagcagacctactcgtggggacggcaaaacagaacagaaaggcgg

SEQ ID NO: 51542 - DNA, 100 bp, Homo sapiens
ctgctgcgggatattttgcagaaggcactactgcagtcttcagttaagcaacaagtagaagctattgaaaaacagtacatttctgcaattgagaaacagg

SEQ ID NO: 51543 - DNA, 100 bp, Homo sapiens
agaagacagagggttttcttttgagggtggttctcttcccaaagtggaagccaaattcatcaattatgtgaagaattgcttccggatgactgaccaagag

SEQ ID NO: 51544 - DNA, 100 bp, Homo sapiens
atctgtttttctcagaagagaattccacaaggaattacatgaacgacagccttcgcaccgacgtcttcgtgcggttccagccagagagcatcgcctgtgc

SEQ ID NO: 51545 - DNA, 95 bp, Homo sapiens
agaagaatgatgtaaatgtggaattttcagaaaaagagctgtccgcaggcttgtccaaaaggaaacatcggaatgaccacttaacatctacaact

SEQ ID NO: 51546 - DNA, 97 bp, Homo sapiens
cacggcgtacgccctcatggggaaaatctccccggtgactttcaggaaactctgctcttaaagacaaagaagatcagtttgggagaacaccacttat

SEQ ID NO: 51547 - DNA, 100 bp, Homo sapiens
acacatttatgcattgatgtggaagatgcagaaggagttttttgatggctgcaaagcaataagtgcagacagcattgacggaatctgtgcacggttccct

SEQ ID NO: 51548 - DNA, 90 bp, Homo sapiens
ctggctacgaatacgtgagcccggagcagctggctggctttgataagtacaagatgaacgacaatctccttgagagctggagcgacctcg

SEQ ID NO: 51549 - DNA, 90 bp, Homo sapiens
cccggagcaagcggagctcccccaagagccggaaaggtgctggagaatctggtaaaagcaccattgtgaagcagatgaggatcctgcatg

SEQ ID NO: 51550 - DNA, 52 bp, Homo sapiens
ttttgacttgtttggaggtgttgatgccgggcgcagtggctcatgcctgtaa

SEQ ID NO: 51551 - DNA, 75 bp, Homo sapiens
gactgacttagggaatcccgaacgtgatgtttgaggcaccatcagagttaacacaaagaccccaagtagggtgct

SEQ ID NO: 51552 - DNA, 90 bp, Homo sapiens
gaaagaccctttgcacaaatcaaggttgttggaagaggagcctttggagttgtttgcaaagctaagtggagagcaaaagatgttgctatt

SEQ ID NO: 51553 - DNA, 98 bp, Homo sapiens
atgcctcaatttgctggatttaagcactgctgcactttatgagattgccatcacgaaagccaaagtggatttctccagtgtggtgtgcctgccccctt

SEQ ID NO: 51554 - DNA, 100 bp, Homo sapiens
gggccgggaaaagtggcactgaggctctggaacttctgcccagctctccttgtcttatgatgtaatcagcgcgatttcacttcctgaatttcgatgaatt

SEQ ID NO: 51555 - DNA, 80 bp, Homo sapiens
agccactcggcttcatcaaggtcctcgagtggcaaatgtcctccatggtcatagagcacatggcatctcatggcacccgg

SEQ ID NO: 51556 - DNA, 83 bp, Homo sapiens
ctggagctgggtcagtccgccgctcaccccgcggccgcaccttcccgccttctcagttggaatcgaagcctcttaaaatggca

SEQ ID NO: 51557 - DNA, 90 bp, Homo sapiens
ctggagtcgaaggccgtgaggtatttttctaaggtaaaatctgtaaaaactgggtcagttttttggacaatgtgctgctgcttatcctat

SEQ ID NO: 51558 - DNA, 100 bp, Homo sapiens
ctccagacatccaatcagagcattcaagggatggtgaaatggatgatagtcgaggcaacagtgcatcccgacagcagcaacctgatccccaagctttttc

SEQ ID NO: 51559 - DNA, 105 bp, Homo sapiens
caccagtagcttttctgagaatacttgctgaaaaggaagttttctggaatggttactctttcaacctgatcagaacgcaccaccaattcgtctccgacacagacg

SEQ ID NO: 51560 - DNA, 90 bp, Homo sapiens
accatgtctgcctcctggtgaaaaaggcgcagttgtgtagcagttgagtaatgctggttagctgttaaggtggcgtgttgcagtgcagag

SEQ ID NO: 51561 - DNA, 97 bp, Homo sapiens
cttggtgaaaggagccatcctgcttcaggataagaagctcatggccatgttcctagatgggacctgcaaaggataaactggtcattggacggatctt

SEQ ID NO: 51562 - DNA, 80 bp, Homo sapiens
ctcacctgcgctgtgatgcctgcagagctgtggcttaccaggtgtaatcgaatcctggaccggaaaggggaagcagtgcc

SEQ ID NO: 51563 - DNA, 82 bp, Homo sapiens
tgccgctcctaagcctgcacagccgcggcggcagcagcagtgagaggacggggaggtttactgcatcgacgcgcggttctac

SEQ ID NO: 51564 - DNA, 75 bp, Homo sapiens
agaacagaatccccctccccgcaaatgcccctgtggcagaacaggccatcggggagttcattttggtggacaagg

SEQ ID NO: 51565 - DNA, 98 bp, Homo sapiens
tcaagaagaagaagttgcgaaggatccccaacggggaggccaacgtgaagaacatgaacaaggctcagttatgatgtttgagcaccttattaattcta

SEQ ID NO: 51566 - DNA, 90 bp, Homo sapiens
ccagctcaaattgtgacatatgatcttctgtcagtcatttgccatcatggaactgcaagtagttacagattatgccattgccaggcgcat

SEQ ID NO: 51567 - DNA, 75 bp, Homo sapiens
gcatgtggcggaagtttagcattaatggattcaggtattataaaaaagttgctgttaaagagaaacaaaaacggg

SEQ ID NO: 51568 - DNA, 83 bp, Homo sapiens
agactaccccaggaacccgcgccgcgagggctccttccctcaggatctcattttgcccaacggtggtactccagcaggtactt

SEQ ID NO: 51569 - DNA, 101 bp, Homo sapiens
ccgagccgagctgggggcgcagagcgcgggaggcggcggcggcgcggagcccagctcatgatggagcagtccaagaagtcctccctcatggtggcccgcag

SEQ ID NO: 51570 - DNA, 50 bp, Homo sapiens
tattaatcaagcggtcaggataccggccactgtatgatgctgcttacctt

SEQ ID NO: 51571 - DNA, 90 bp, Homo sapiens
cggagagccccggagtgagcggagtagcgagtcggcaacccggaggttattctggtacaagttaacccaggagaagcatttacaataaga

SEQ ID NO: 51572 - DNA, 82 bp, Homo sapiens
taaagcagcgtgcgttcagccctgggctcctgcttcaggtgcagaaatacagcgatttccagtgccagctgttgagccagtg

SEQ ID NO: 51573 - DNA, 50 bp, Homo sapiens
ttctcactgtgatgatgaagcatgtcatggctccgatcttcatcttgaag

SEQ ID NO: 51574 - DNA, 100 bp, Homo sapiens
gtgctgctggtgtcatggctattgagcatgcagattttgcaggtgtggaacgcctagctcttgtcacagggtgtgggccgaagatatgctcatgtggtgt

SEQ ID NO: 51575 - DNA, 50 bp, Homo sapiens
caggaaaatggcattctacaaagcttctaaccgaaaatcttcagttggcg

SEQ ID NO: 51576 - DNA, 75 bp, Homo sapiens
atgggaggagacaggacctttttcaacttgacaaatagtcactcaagactgcttgcaactgattgcagacagtga

SEQ ID NO: 51577 - DNA, 100 bp, Homo sapiens
ggagccgatactgagcttcttcctatttgccatgggtttgaagatgccgcatttggattggatgaattccaaattctgcttgcttgctttttaatattga

SEQ ID NO: 51578 - DNA, 75 bp, Homo sapiens
tgtcctggtctggccttctccatggcctcaacacgtccctaacttgtgaatactgcaccgccaacgcagtcactg

SEQ ID NO: 51579 - DNA, 83 bp, Homo sapiens
gcggccccggccgcctccgcgagggcaccatggaggtgaatgcaggccctgtttgtgctcttcgtcctggcctacatccacat

SEQ ID NO: 51580 - DNA, 97 bp, Homo sapiens
ggaagagaaaagggcagcagaggagaggcagagaaaggcaatgccagggtcaagcagctcaagaggcagctggaggaggcagaggaggagtcccagc

SEQ ID NO: 51581 - DNA, 95 bp, Homo sapiens
cgcggggcggccgcggaccgtgagtcagcattggcggcggccccagcgcgtggcagccgtgcgccgccaaggcatgcggatcctggtcactctgc

SEQ ID NO: 51582 - DNA, 97 bp, Homo sapiens
agtggaaatccacaaggattcttttcaatacatcctaaaacaggaaagtccatcagcttgataatggaggagaacaatgactccacggagaaccccc

SEQ ID NO: 51583 - DNA, 101 bp, Homo sapiens
tgtgtgatttcagtggaataaatggcgtccaaagtcacagatgctatagtctggtatcaaaagaagcttaaagcttttcaagccaggccaagaagctgtga

SEQ ID NO: 51584 - DNA, 83 bp, Homo sapiens
ctgtagtcctgttcttctggctctaagatctgaatgttgtgaccactaatttgccgcctttttatagccgaaacacagctgaa

SEQ ID NO: 51585 - DNA, 74 bp, Homo sapiens
taggaactgttctgccggaatttgaaaagtgcctagggctctgaactcctacttcgagcctccggtggaggaga

SEQ ID NO: 51586 - DNA, 88 bp, Homo sapiens
tcggcctggtctacgtgctgaaccacgctgaggggctgggagccgcgcacaccaccatcacctctccagggcacaccgtattcagctc

SEQ ID NO: 51587 - DNA, 98 bp, Homo sapiens
tctatgtttacgcacagctgcctgtcaccccagatgtcctcatcatcccgtcagagctgaggtacttcgtgaaggattggcctccggacagctgtact

SEQ ID NO: 51588 - DNA, 100 bp, Homo sapiens
aagtagctgatgaagataacagtgaaatatcagattcagaggatgacagttgcaattgcctgctaataaagatgcctttcgaaagacatggaatcccaag

SEQ ID NO: 51589 - DNA, 90 bp, Homo sapiens
ctggtgccaggtgtccatccccgtgctgagacctgcctagagctggaacgttacctccagagcgagccctgctatgtttcagcctcagaa

SEQ ID NO: 51590 - DNA, 75 bp, Homo sapiens
gcgtggaggacctgtggaaggcatggaagtcatcagaaggaacagtggaggccatgtgtcttttggcagtcagtc

SEQ ID NO: 51591 - DNA, 100 bp, Homo sapiens
aaagcgggtgtgaggagcgcggcgcggcaggccaagtacctggcccagatcattgtgatgggcgtgcaggtggtgggcagggcctttgcacgggccttgc

SEQ ID NO: 51592 - DNA, 101 bp, Homo sapiens
gacacccggacacctggaagctgggaaatgcatctgtccgatctttcctgtttcccccactccattcccttcctatccatcccacagccagaggaagtgga

SEQ ID NO: 51593 - DNA, 74 bp, Homo sapiens
aaaaatgacccaccaatggaagcagctggcttcactgctcaggtgtttgagaagtcccccctgcgggtgaagaa

SEQ ID NO: 51594 - DNA, 82 bp, Homo sapiens
cccaatgccgaactgggaggcccctttgaccagatgaacggagtggccggaggttttaaaatcaaagatgggaaaatcggag

SEQ ID NO: 51595 - DNA, 83 bp, Homo sapiens
ccagtggccacctctgcagtgtcttccacaacctgggagctgggagtgagcacaaatgcaaattataagattactttcatgtt

SEQ ID NO: 51596 - DNA, 75 bp, Homo sapiens
tctgcgccatcctgcaccgccaccggcccgacctcatgccaccagcccctcgggttccaagatgcagctactgga

SEQ ID NO: 51597 - DNA, 74 bp, Homo sapiens
tacccccgggaccattctgatcatcctcactggacgccacaggggcaagagagcatcagtgatgtcacgtttgg

SEQ ID NO: 51598 - DNA, 83 bp, Homo sapiens
agcaaacaactccgcaaacgaaaaagaacgacatgatgcaatcttcaggaaagtaagagggtgtcagcggtgcccactgtgct

SEQ ID NO: 51599 - DNA, 75 bp, Homo sapiens
agaagccctacgagtgcaacatctgcaaggtccgcttcaccaggtggctattatcatggaaaactaatttttccc

SEQ ID NO: 51600 - DNA, 99 bp, Homo sapiens
gtcggcctgaagccatctctagcaagtggtcaggacgctgattgttctgcgcaggttggagtgaagttattgccagtggactgtgagagaaaaacagat

SEQ ID NO: 51601 - DNA, 75 bp, Homo sapiens
agagatttctgcagtgaagattgctgtaaaaaatttcaggattggtactacaagatattacaccaccatattgcc

SEQ ID NO: 51602 - DNA, 100 bp, Homo sapiens
ctctagtagccacggtgtggcagctgctctgaaccaggacctggacccggacccaaagtgccatgtctttaatagtgctgccctgcccaggaggtacatg

SEQ ID NO: 51603 - DNA, 97 bp, Homo sapiens
cacagccagaagaggaaagcccccgacaaaagaacccattagccagaggccttggcatgagtatgagcacaactttcaaattatgtataaagtgggg

SEQ ID NO: 51604 - DNA, 83 bp, Homo sapiens
ggctggcggagctgcaggagcagaaaatatttacaccagcagctccagttcataccaataaagaagatcctgctacccaaact

SEQ ID NO: 51605 - DNA, 82 bp, Homo sapiens
gggaagggtgttgtccctgacaaccatccatactgtgtaggtgcagccagatccaggatttctctgcctcttccaaactttt

SEQ ID NO: 51606 - DNA, 75 bp, Homo sapiens
cacagctgctcccttcgccttcgccctttccacctcgcggcagttcggcgcctccggcatggcggcggccgaggg

SEQ ID NO: 51607 - DNA, 100 bp, Homo sapiens
ggggtaggcaagacctgcctcctgttccgcttctcagaggacgccttcaacaccaccttcatctccaccatcggtaactaggatttctacctcaaccgcg

SEQ ID NO: 51608 - DNA, 100 bp, Homo sapiens
cagaattacgcatttccacttctaatggttcggctttccagtttggcagcagcactacaaatttcaacttcacaaacaacagtccatcaggagtgttcac

SEQ ID NO: 51609 - DNA, 100 bp, Homo sapiens
gctcgccgcgctcttcttcttttctctctcgtcctcgctgctgtacttcgtctatgtggcgcccggcatagggtgtccgcaatgttgccagtgtctgtct

SEQ ID NO: 51610 - DNA, 51 bp, Homo sapiens
cctggatataggccccacaaagacacaggccaacctgagtgagcagcagat

SEQ ID NO: 51611 - DNA, 90 bp, Homo sapiens
catcctggcggcggccagcccgtacatcagactacatgaggaaataattgacttttataacttcatgtccccttgtcctgaagaagcagc

SEQ ID NO: 51612 - DNA, 100 bp, Homo sapiens
agtgacagcacaggtcacagtaaggccaaaaatgtgcatactcacagagttagagagagggatggtggcaaacatgagacagttggagggcagctcttgc

SEQ ID NO: 51613 - DNA, 82 bp, Homo sapiens
ttttgatgaaggctctgatgtatttcagatggtattatacctgaagaaccttagccctcgggtgactgaaagagatcttgtg

SEQ ID NO: 51614 - DNA, 100 bp, Homo sapiens
gggagcaaaaccaacgcctggctcggagcagcagcctctgagagtaaagccaatcccagctgaaggaatcaagtcaaatccttccaagcggcatagagac

SEQ ID NO: 51615 - DNA, 80 bp, Homo sapiens
atgacctcaggtttgtcggtcgaagtggaagagatgatgtgatgccagccacttactgtgaaattgatttagataaagaa

SEQ ID NO: 51616 - DNA, 74 bp, Homo sapiens
catgagtggcaggcccttcagccagcgcgtacttgctttgtaagtgatctgaagcgaggactaaaaatccaagc

SEQ ID NO: 51617 - DNA, 97 bp, Homo sapiens
ctgcggaccctgctgccgctgctggcggccctgcttcagaatggtcctagtgccagatcgtgtcataaaatgtgcattgatattcaacggaggcaaa

SEQ ID NO: 51618 - DNA, 75 bp, Homo sapiens
atgtgtccagcttgatagctacaaatgaggaccacaggagacttggaagatgcagaactggatgactactcattc

SEQ ID NO: 51619 - DNA, 98 bp, Homo sapiens
tggtatcttatggtgatatggcttggcatgttaacacaaatgactcgtgagatggagaataaagaaactctcaaagggttgcacaagatggatgatcg

SEQ ID NO: 51620 - DNA, 75 bp, Homo sapiens
cgataacgggccgcccccacagcaccccgggctggcgtgagaggctgtgatcaatagccaggaatggactttgag

SEQ ID NO: 51621 - DNA, 90 bp, Homo sapiens
tgacatccgagcgaaagagaaagaggggaagaggctgctgggggtgacaggctcatccatgagcaggacctggagtggctgcagcaggcg

SEQ ID NO: 51622 - DNA, 99 bp, Homo sapiens
ctgtgctacaacgtcggtcagaaaatgaagagtttgttgaagtgggaagattggggccttctgattattttgactcggaatccaagccggaccaggagg

SEQ ID NO: 51623 - DNA, 101 bp, Homo sapiens
ctttcctgctccagaagaatataaacactttcagaggatatatcccagcaaaacaaaccgagcaaatgaaggacgcaatgactaccacccgatgttcttta

SEQ ID NO: 51624 - DNA, 74 bp, Homo sapiens
tgcagaaggtctctggagacatcttcagcagattatggtgacaagctgaacatggagctgagtgagaaatacaa

SEQ ID NO: 51625 - DNA, 96 bp, Homo sapiens
ccggagtcgtcttcgggacgcgcctgctcttcgcctttcgctgcagtccgtcgagaatctttggagtaattacctacccaagggagagatcatcga

SEQ ID NO: 51626 - DNA, 97 bp, Homo sapiens
tggccttgatttggcagctaatgagaaggtttgctgggatgggaaacctgctcaaagtccttaccagggaaattgaaaactatccacactttttcct

SEQ ID NO: 51627 - DNA, 49 bp, Homo sapiens
atcaacttaaaagatgccacctctaaggaggatatgatggttaccgccc

SEQ ID NO: 51628 - DNA, 95 bp, Homo sapiens
gccgagctgaggcggtcgcggccatgaaggcctcgaaaaagcccaagacagcagaagcagacacctccagtgaactagcaaagaaaagcaaagaa

SEQ ID NO: 51629 - DNA, 74 bp, Homo sapiens
ccagggcagggctcctaaggaaggacccgcctttaggaaggtggacttttaaatattctccactgaagcaaatg

SEQ ID NO: 51630 - DNA, 82 bp, Homo sapiens
tttgaaccatgtttggattgaagccgcctctgtattacttaccagggcgaccattgacgaggtggagacggacgtggtggag

SEQ ID NO: 51631 - DNA, 83 bp, Homo sapiens
gtctgtcctgcttcgtcaccccagaccttgccagagacctggcaaatgacatcatgacactgtcaggatggctaaaggtgacc

SEQ ID NO: 51632 - DNA, 82 bp, Homo sapiens
tcttgatattaaatcattcatcacaagtattgcaaacaagattgccacactgaaggtcaaaatattttattcactgatggag

SEQ ID NO: 51633 - DNA, 98 bp, Homo sapiens
ttgtacagcgtaattccacttttcgtaaaatactgtatggtatcagttagcagagcaatcaagccctttgcagaacctggccgccctccagactggtt

SEQ ID NO: 51634 - DNA, 74 bp, Homo sapiens
atctaagatggcgactgtcgaaccgagatggaatttcaccgtgttgcctaggctggtctggagctcttgatctc

SEQ ID NO: 51635 - DNA, 99 bp, Homo sapiens
ctacccaaataagactcatcccaactacatctcaataattaatgaagatggaaatgagaggttggaaagaaccatgactgtattcaggaaggcacatga

SEQ ID NO: 51636 - DNA, 100 bp, Homo sapiens
ctgcgccatcctgcaccgccaccggcccgacctcatgtatcgagaaccttccctgcgaacttcagaggaacttccagctgatgcgagagctggaccagag

SEQ ID NO: 51637 - DNA, 90 bp, Homo sapiens
cagaatgaggctttactccaggccatcaaggtaaagagaaatgtgtatgaccttacaagtatccccgttcgccaccaattatgggagggc

SEQ ID NO: 51638 - DNA, 73 bp, Homo sapiens
tttggatgatgatggatccatttctcctattgaggagtcaacaacatgttcttcaagtatacatggaataact

SEQ ID NO: 51639 - DNA, 75 bp, Homo sapiens
ctgaagaaagaaggtgggagcggagagcgcaggcgtgtcaacaagtggaagaagctgtactcgaccccactgctg

SEQ ID NO: 51640 - DNA, 100 bp, Homo sapiens
aaggtctacagagcggcctgcgccagcgacttagaccatgctcagcctccaagcagccttgtcatcgacaaagaatctgaagtttacaagatgcttcagg

SEQ ID NO: 51641 - DNA, 75 bp, Homo sapiens
gaagaccagaagtggatggagatgagaaagatcagtctaaagaaaaggagaagaaagtgaaaaaaacaattcctt

SEQ ID NO: 51642 - DNA, 82 bp, Homo sapiens
aagctcgtggcctgcctctgcgtgccagttggaattgatcacaccttttcagttgtacttcaatcctgaattaatctttaaa

SEQ ID NO: 51643 - DNA, 82 bp, Homo sapiens
ggaagcgctgctcacagtcagtgtcgttcaaaagaatgctgaaccgggagctgacacacctctcagagatgagccgatcagg

SEQ ID NO: 51644 - DNA, 90 bp, Homo sapiens
aaaacctcaagagtgagcactcccacgcccccgtctctggtcctacctgggtccaaggccgatgtgaatgaagtgtctatgttgaaaaat

SEQ ID NO: 51645 - DNA, 100 bp, Homo sapiens
gcacaaagaagacacattcgatgtgttccgacagaggatgatgcagatgtacagacacaagcgggccaacaaataggggcggctgacggggctgggcgga

SEQ ID NO: 51646 - DNA, 122 bp, Homo sapiens
tattcctggtctacatcctgcgggtgcctttgaaaatcaacgacaacttgagcacaggccttggatggtatactgtaaattcagcatatggagataccattatcataccttgccgacttgac

SEQ ID NO: 51647 - DNA, 74 bp, Homo sapiens
gtgggcaagatcctgtgcactgactgcgacaggggcaagtgtccgagtggtgaatcagctacttacagagatgg

SEQ ID NO: 51648 - DNA, 80 bp, Homo sapiens
gctatactccatccaaatatgcagtggaaggtttcaatgacagcttaagaaggaagaggcccagcagaagggactcgctg

SEQ ID NO: 51649 - DNA, 124 bp, Homo sapiens
cggaggtggactggtgcgaggacaactacaccatcgtgcctgctatcgccgagttctacaacacgatgatctttccatttcagtggcaatgcccatatattcccctttgtcctctttcactggc

SEQ ID NO: 51650 - DNA, 101 bp, Homo sapiens
aacctctatgccgacatcgacgccgcctggcaggccctgcgcaccaggtgagaagccctaccactgcaactgggacggctgcggctggaagtttgcgcgct

SEQ ID NO: 51651 - DNA, 74 bp, Homo sapiens
ttaaacctgtcgggtagaaacctcagtgaagcgcttctctgaagtagctttggaaagtagagaagaaaatccag

SEQ ID NO: 51652 - DNA, 100 bp, Homo sapiens
gccttctgtagacactcctgctctcttccatccccatcttacagatgtattaagaagcctcagagaatgcagaagagggctgaacgattcaatgtacctg

SEQ ID NO: 51653 - DNA, 83 bp, Homo sapiens
caccacctccagcccctgcgcctcggaaactttgaaaagcaccccaaagaactgatcagggggcccatatggcttcgaggttg

SEQ ID NO: 51654 - DNA, 74 bp, Homo sapiens
catgtgatcactctgggactcgtggggctgcagcaccggtagctacagcaagctgggtagcaggcagatccaaa

SEQ ID NO: 51655 - DNA, 89 bp, Homo sapiens
aagagacatcatcttacagattgggatcccagccttctcaccagctactacccacagatggcatgatccgaaaacactctcatgtcaag

SEQ ID NO: 51656 - DNA, 82 bp, Homo sapiens
caagagcaggagcccggcaccccccgccgacaaggaggggcgtctctggccgagcctctttttgtggaaaacgacagcagca

SEQ ID NO: 51657 - DNA, 50 bp, Homo sapiens
tgcctgacctgctgctgccactgatttgattagaactatccgggacccag

SEQ ID NO: 51658 - DNA, 73 bp, Homo sapiens
gcgcttctttaagggctacgggaagatcctggaggtggatctgaagaacggtgacacctcacactcagtgccg

SEQ ID NO: 51659 - DNA, 87 bp, Homo sapiens
tttactaacttttcatcatttgcaccagccccatggctgggggttatggagtgatgggtgacgatggttctattgattatactgttc

SEQ ID NO: 51660 - DNA, 90 bp, Homo sapiens
ttcgagataccagtgggaccagcagaggtgttggctttgcaagtgccggtggtggtgtgcacattgagccccggtatagacagttccccc

SEQ ID NO: 51661 - DNA, 50 bp, Homo sapiens
gccacccggctgctctgggacgagacagagcgggatgccaccagcttgtc

SEQ ID NO: 51662 - DNA, 51 bp, Homo sapiens
caggcagtacggcatggtgctcgacctgcaggctgggacaatgaaaagaaa

SEQ ID NO: 51663 - DNA, 49 bp, Homo sapiens
ttcgagttcaaagagaccctcggaacgttgtactcagactatctctact

SEQ ID NO: 51664 - DNA, 97 bp, Homo sapiens
gagatagaggcagcagaagccagggcagctgaaagacagagaccttcagcacaacattctgaaattttttggttattgtaatgatgttgatcgggag

SEQ ID NO: 51665 - DNA, 100 bp, Homo sapiens
gaactgctatttcacagtctctcagtagatgtcagcagcacagcaaacatctcactgcccatcatggaagcagcattagtgccagcagtagttcccaagg

SEQ ID NO: 51666 - DNA, 118 bp, Homo sapiens
ggccagtcggacagcatcatgcatccttccatgaaccaatcaagcattgcccaagatcgaggccctcttcaatgccatcatcccagatcaccatgcagaagccttctctcctcctcgc

SEQ ID NO: 51667 - DNA, 95 bp, Homo sapiens
atcacccccatggaggccctggcagagcaggctctgcagatggcatggggaggaggttgcactcagcccatgatcctggtctctcaaagacttca

SEQ ID NO: 51668 - DNA, 100 bp, Homo sapiens
tcatgaaggacgtgcccgactggaagggcgccctgcgtccggcagaggaggcgagcatcccgctcaggtgatgaggaacccctcgcgcacccagcgcaga

SEQ ID NO: 51669 - DNA, 90 bp, Homo sapiens
atcatgatggacttggagctgccgccgccgggactcccgtcccagcaggtgaagagatggcgtttgtgaagagtggctggttgctgcgac

SEQ ID NO: 51670 - DNA, 90 bp, Homo sapiens
cagcggaaccgggagtggaacattgtagagtctgagaaggcccttgtgctcagcaaagacccaaatatcgtcatagccaagatggatgcc

SEQ ID NO: 51671 - DNA, 90 bp, Homo sapiens
gaagactacagagaagcttcttcttgtgccgtgaacctcgttttgagattaagatcactattatcttcaaagcccaccatgagtgtacag

SEQ ID NO: 51672 - DNA, 96 bp, Homo sapiens
gcgatcaaggccaagtatccgccagtcaataggaagtacgagtgtgatttgacggtgagaacatgtatatgagcatgacagagccgagccaggact

SEQ ID NO: 51673 - DNA, 101 bp, Homo sapiens
cccgtgggcaatagagtcactgtatttgaccttaaaaacctgaaagaatagacccaagcgcatcacgacaaggatatgatgtccgctctgatgtctggagt

SEQ ID NO: 51674 - DNA, 75 bp, Homo sapiens
tacagaaacctggtctccctaggtcttggtatggtgactcctgtgaacgatcttagaggatctgattctattgcg

SEQ ID NO: 51675 - DNA, 100 bp, Homo sapiens
ctcgggcccgcaggtcgcagggcggcctgcagctgggccgcggccgaggaggcagcgcgacctccgcacgaaacctgctcctccaaagccagagcccaag

SEQ ID NO: 51676 - DNA, 100 bp, Homo sapiens
aactttaagacctcctccactggcaaagagtcacctaaagttaggcggcactccagccccagctcgaacttcgagaaaccaagacctctgaatacttcag

SEQ ID NO: 51677 - DNA, 100 bp, Homo sapiens
tttttgtttttggaaggagaaggatagacttggctttgaggattctgagaaacgaacccctcttcatgtggccgcatttctgggagatgcagagatcatt

SEQ ID NO: 51678 - DNA, 100 bp, Homo sapiens
gaagcataaagacttgttgggtaaaagatacattgaactcttcaggagcacagcagctgaagttcagcagtggtttgaagaaaagcagcagcaatttgag

SEQ ID NO: 51679 - DNA, 75 bp, Homo sapiens
atttattcgtaatgcgactcaaagctgcacggcagtctgtttatgagggatgcccgggtagttaaagacatggca

SEQ ID NO: 51680 - DNA, 100 bp, Homo sapiens
cccggaactgactttgtggttgagtacatcgacagaaagcagatggtggagctgaatatgccacttaccagactaaatcaaccactccagcagagcagag

SEQ ID NO: 51681 - DNA, 91 bp, Homo sapiens
gcctgctccacaagcggcgccgcgccctcggcctgcacgggtttttcgttggaatatacgttgcacatttatggcgattctgagtgtgagg

SEQ ID NO: 51682 - DNA, 85 bp, Homo sapiens
atcctaccatgtcagccttcccagtagctggaactacagagtacatcaagatggcggatcattacgtccccgtcccaggagggcc

SEQ ID NO: 51683 - DNA, 50 bp, Homo sapiens
gtattgaaggggttgttctcagagacaaacagggtcttgctctgttgccc

SEQ ID NO: 51684 - DNA, 96 bp, Homo sapiens
ggagcgaggcagctgtactaggactgggaacgggctatggagttactagtagagaaagcaatcagcagtgcttctagccctcagagccctggggat

SEQ ID NO: 51685 - DNA, 110 bp, Homo sapiens
aacggagataaattcccggaaccgcgattcggcgtgtcagtgagagatttttcttgaggctgaatagaaacgggcttcccaaagcccctgataaaccggaacgacattgc

SEQ ID NO: 51686 - DNA, 82 bp, Homo sapiens
aaggtgatccagcaaggtcggcagagcaaggggcttacgcagaaggacctggccacggtcccagagggtggaaggagccagg

SEQ ID NO: 51687 - DNA, 82 bp, Homo sapiens
tccagtgttcaccatcctggccccggaagccattgagacccagagcagcagttctgaagagatagtgcccagccctccctcg

SEQ ID NO: 51688 - DNA, 98 bp, Homo sapiens
tcagtttccagaatcagcagctccggcagcagtgtcctgtgctgatggtgttggcagacaaatcttcctattttcaagctgaaagaatctactgttag

SEQ ID NO: 51689 - DNA, 83 bp, Homo sapiens
aacaagcgctgcaaatacaatcactctaaaatgtgtgatagctccataatgggagaagtaaagaacaaagacttaaggaacag

SEQ ID NO: 51690 - DNA, 101 bp, Homo sapiens
ccgacgcgtcaggcctgcctagacggtgctgggagcgcgtctccttgaacgttgtcccgcctgggattgcgaggtgaccaagaatatggcccaggtgacca

SEQ ID NO: 51691 - DNA, 90 bp, Homo sapiens
ccagacaacaggatcgtctcgtccaaggatctatctggttcaatagatgacctccccatggggacagaaggagctctgagtcctggagtg

SEQ ID NO: 51692 - DNA, 100 bp, Homo sapiens
caagatgcagatgaatacaaaccagctgacctcaatacatgctgatctctgccagacctctcaagctggatccaaggataaaaagatggaccaaccaccc

SEQ ID NO: 51693 - DNA, 83 bp, Homo sapiens
gagaggatctggtgtaccaggcgaagctggccgagcaggctgagcgatacgacgcccaagaggagagggtttgaccgcttcgg

SEQ ID NO: 51694 - DNA, 75 bp, Homo sapiens
gggaaacctcagcttgatgatgtatctcagccttcaataccccaggtcccaaactacaggctgtcgatgacgatc

SEQ ID NO: 51695 - DNA, 90 bp, Homo sapiens
agcgattggacagaatttgtgaaggaaggatttttactgggagaggtaagacaagaggaaacgtttagcatcagtgactcacaaatcagc

SEQ ID NO: 51696 - DNA, 100 bp, Homo sapiens
ggctttctcgcttttcatctttttggatggctgcttgtcgcaatattgtcttcttcgctttagacaagctcgcaggaaggaggtatttatccaggaacgg

SEQ ID NO: 51697 - DNA, 108 bp, Homo sapiens
gggtctctcagtaatgctggggaccctgagatcgtcaagtctcccagcgaccccaagcaataccggagagattaaacagattctagaaaatgaacttcagatacctgt

SEQ ID NO: 51698 - DNA, 82 bp, Homo sapiens
ttgtttgtggatcgctgtgatcgtcacttggtggcggtggaaatcgcaaaggcaaaagcaagaaatggcggcagatgctcca

SEQ ID NO: 51699 - DNA, 75 bp, Homo sapiens
catgctgggagccatctgtgccatcatcgtggtagttattgtaaccccgctttgtctttgacatggacgtttgtg

SEQ ID NO: 51700 - DNA, 75 bp, Homo sapiens
tgtctacaggcgctgacggccacccctccagggccaattcctgtccccccagcagcatggcatcgtgtgctgaac

SEQ ID NO: 51701 - DNA, 51 bp, Homo sapiens
gctacgggaagcaggcctcgccacagagaccatggcgagcccagggaaaga

SEQ ID NO: 51702 - DNA, 83 bp, Homo sapiens
ctgccgccgcctgcagtcggtgaccgcgcgactcggcgcccgcccgcggtgtcgtgaaaactacccctaaaagccaaaatggg

SEQ ID NO: 51703 - DNA, 90 bp, Homo sapiens
caggactaagagaagtcacaaaacagcagatttcccaagagcagcggaaaatgatccagtcacaggtgatctgtgaaaatggttcgctat

SEQ ID NO: 51704 - DNA, 134 bp, Homo sapiens
gtacgcaaacttttcagagggagcttgcaagcctggctatgcttcagccttgatgacggccatcttcccccggcttcagaaactagctttaagaaataattctgcatctacaactcaacatttacgactgctta

SEQ ID NO: 51705 - DNA, 88 bp, Homo sapiens
tagcacaaagtagacactcagtaaatatttggaaacctcgacctgtctcccagttggttgcacagcaggttactcagcagtttgtgcc

SEQ ID NO: 51706 - DNA, 101 bp, Homo sapiens
ctagcctatcagctggggctggatgagtgaacgtcaaggtcgtgggaaataaaaggcagttctacacagactgcagcaacggttgcatctgcatatcctaa

SEQ ID NO: 51707 - DNA, 83 bp, Homo sapiens
agaagctctatgccaatatgtttgagaggctggctgaggaggagaacaagaacctgtctccagagaagattttccacgtcatt

SEQ ID NO: 51708 - DNA, 83 bp, Homo sapiens
gaaggaggggcggcagcttctccgacaacattcactactttcactgcctaagaatcctggaccttctcaaaggcacagaggcc

SEQ ID NO: 51709 - DNA, 95 bp, Homo sapiens
actgctctggcagtcatcgtgcctgaaggagtacatgccctttatgaagatattcttgaggacattcacggcatggtgtaactcccacctccgga

SEQ ID NO: 51710 - DNA, 80 bp, Homo sapiens
ccgtgccgcgagcgcggcctgcaggagtttgatgaaggccggaacaactttgaaggggaggtcaccaaggagaacctgct

SEQ ID NO: 51711 - DNA, 90 bp, Homo sapiens
caccttctgtccctgtggccacactgtgtgctgtgagagctgcgccgcccagctacaggtggatcttgaacgcaccttcacgtttcgaaa

SEQ ID NO: 51712 - DNA, 76 bp, Homo sapiens
ggccgcctagagtggttcagccacaaggagtctctggatggtcgtcagatccgtgtggatcatgcaggcaagtctg

SEQ ID NO: 51713 - DNA, 138 bp, Homo sapiens
gcagcagcagccgccgcaaccacagacgcagcaacaacagcagccggcccttgttaactacaacagaccatctgcccccaaatacatcaagatgtttgtactggatgaagctgacgaaatgttaagccgtggattcaa

SEQ ID NO: 51714 - DNA, 97 bp, Homo sapiens
ggggtctcgcgggccgcgggccgcatggttcttgtccctcataagaattgcaggaagaataccactgtcccgggaaagaaaggggaggaaaagtctc

SEQ ID NO: 51715 - DNA, 75 bp, Homo sapiens
atggaatgtatggccaggcatggaaccagcaaggatttaagattggattcagcatcaaaatacatctactcatat

SEQ ID NO: 51716 - DNA, 100 bp, Homo sapiens
cgaagtggttgagaagcctgtacctgttttatacttgcttttgcttcagcgttctgtggttgtcaacaggtggatgggaagagagtcccaagggatgcag

SEQ ID NO: 51717 - DNA, 48 bp, Homo sapiens
aaagagtcaacagcagtggcaacaggggaatttggcttacggagatca

SEQ ID NO: 51718 - DNA, 82 bp, Homo sapiens
atatagataagaatgctgatggtttcattgatctagaagagtatattgtattttgacctcagagtcctcaactgaaatgatg

SEQ ID NO: 51719 - DNA, 90 bp, Homo sapiens
gaggagtgcgtcttgttttgggaactgcttcacaggatccagaaaagggcattactgaaacttcagttcccatcatctcaacatctggaa

SEQ ID NO: 51720 - DNA, 50 bp, Homo sapiens
cattaagggatccatcctacagaaggaagctgtgattaagcactcattgg

SEQ ID NO: 51721 - DNA, 75 bp, Homo sapiens
caatgatgagaggatgtggtggtctactctgatgtcaatcttgagggctaggtgtgatgaatgcagactctgcta

SEQ ID NO: 51722 - DNA, 89 bp, Homo sapiens
caacccaatctcccataggcactcagtcaaggacgaaaatgatgatgacgatgactggaacccctgcaaagcagcaggggtgtgcctca

SEQ ID NO: 51723 - DNA, 75 bp, Homo sapiens
ggatttggtactggagtgatgagtttggttcttggcaggaatatggaagacaggaatcactagatttgatctact

SEQ ID NO: 51724 - DNA, 75 bp, Homo sapiens
cggagctgggcgcggagcccctcacagtgcaggacactcccagttgccgggatgacctgctgagtgactacttcc

SEQ ID NO: 51725 - DNA, 87 bp, Homo sapiens
acattcagtcagaagaaggctgctattgaaagagagtatgcacaggtttccactgtatccaaaaggaggggagaagttgcagtttga

SEQ ID NO: 51726 - DNA, 82 bp, Homo sapiens
gtcagcactgactttcagctatggaatcgataacgaaggaggcccaacttcattcaataaggagcctgacggatttatccca

SEQ ID NO: 51727 - DNA, 80 bp, Homo sapiens
acttccagtcactgcataacattggcagtgtggtgcagcacagtgaggggggatgtgtttggccaaatgggagagtggtt

SEQ ID NO: 51728 - DNA, 74 bp, Homo sapiens
cactgttgaggttgatctcttcacctcaaaagccaagtatcttcaagaccttctcatggagagtgtgaattttt

SEQ ID NO: 51729 - DNA, 50 bp, Homo sapiens
tgaaatgtcatgcctctgaaaatgaaggtgctggagaatctggtaaaagc

SEQ ID NO: 51730 - DNA, 75 bp, Homo sapiens
cctgctgaaagtggcgcaaatgattcacaatgacatcctttcaagaagtcccattgcagacttccaactttgccc

SEQ ID NO: 51731 - DNA, 80 bp, Homo sapiens
agccctcctccagaaacccctgcgtccgccacggcccagatcttcctcagaactgtgatcctaacattcccctagttgct

SEQ ID NO: 51732 - DNA, 81 bp, Homo sapiens
tgtgtctgcttggtgtggagccatgaaggagcaggccgggctctcgccatgggtcactgtcgcctctgccacgggaagttt

SEQ ID NO: 51733 - DNA, 82 bp, Homo sapiens
cgacggccaaaaggagcggcgcggtcttcgtggtgttcgtggcagggagagcctggggatgtacaggagatgcctgctccag

SEQ ID NO: 51734 - DNA, 100 bp, Homo sapiens
gtaacatcgcagtgctgctcgcgggtctggctagtcaggcgaagtttgcagcgctcctggttgcagccagaatgcatgacttcaggaggactgtgaagga

SEQ ID NO: 51735 - DNA, 100 bp, Homo sapiens
ggcggacgggaaggcgggagacgagaagcctgaaaagtcgcagcgagctggagccgccggagataaacctgaaaattgggatgtatggtatgaaagcaag

SEQ ID NO: 51736 - DNA, 75 bp, Homo sapiens
cactgctatgaagactgagaattgtgtggccaaagtgctggaggtggtgagagccaactatgacacgctcacgct

SEQ ID NO: 51737 - DNA, 80 bp, Homo sapiens
cgtgcggaaccgccatggccgagccggcttcgcaaacggggattcagcgtccgatcctttggaacagggactcacgtgaa

SEQ ID NO: 51738 - DNA, 90 bp, Homo sapiens
gctggattacacacagcaagttcctgcttctgggacagctctactgacgatcctgtggtattgtggaaattcccagaggactttggagac

SEQ ID NO: 51739 - DNA, 75 bp, Homo sapiens
ggaaaaagaaatggctcatcttaaccatgatctatattcagagtatggaagagttggagaagaatcatgataatc

SEQ ID NO: 51740 - DNA, 75 bp, Homo sapiens
ttgccacacagatcaccctgggaatcctcatctccactcagcgggcccagatctcatcctggccttgggtgtcct

SEQ ID NO: 51741 - DNA, 75 bp, Homo sapiens
cgctacgcgggtcttgcgagatatctggccgcctctgccgcagctggagctgtccctttccccccaacacatcgc

SEQ ID NO: 51742 - DNA, 106 bp, Homo sapiens
tcaatatctgtcttcggtggactccttcggcagtccacccaccgccgccgcctcccagggcgccctgcgtccggcagaggaggcgagcatcccgctcaggtgatga

SEQ ID NO: 51743 - DNA, 51 bp, Homo sapiens
ttattgatcaacatccttcatagtcaccaggagactaaagtccatcaaaaa

SEQ ID NO: 51744 - DNA, 100 bp, Homo sapiens
ctcgagcggctgctggacgaaggacatgtctcaggaaggctatggaactagatctcaacctcctctggcccccggaaaacctaaccatgaagacttgaac

SEQ ID NO: 51745 - DNA, 49 bp, Homo sapiens
caaccgggaacagagaatgtttaagggaatggcatttactttacaagaa

SEQ ID NO: 51746 - DNA, 75 bp, Homo sapiens
gagcctagaatgcatcagtgcccttgtggcgaatggggctcacgtcgagtcaagctaatgcctcctgccccaaac

SEQ ID NO: 51747 - DNA, 123 bp, Homo sapiens
gttggggagaagaggattggaggtgtcagtgttaaaggaacctctacaacgaaggtgaagccacggaagataagcagttggaattgatcacaccttttcagttgtacttcaatcctgaattaa

SEQ ID NO: 51748 - DNA, 100 bp, Homo sapiens
ctccttcccagccttcagaaattgccggtctgggagttgggggcaaggagaagatcctggtgcagtagacattgttgcaatcatgatcggcaatctgaaa

SEQ ID NO: 51749 - DNA, 95 bp, Homo sapiens
ggcgttcccctgagtgctcggaaaatggccttgtctccggtcgttcccgttcaggagcagggctgcccttgagatggagttgctgcctctttggc

SEQ ID NO: 51750 - DNA, 82 bp, Homo sapiens
aaacatttgaaattaatcccagacacccgctgatcagagacatgcttcgacgaattaagggtgaaaatgggatggaggattg

SEQ ID NO: 51751 - DNA, 100 bp, Homo sapiens
tggatgttgaatatgcaaggagctgaagagagagacattagaagagagacttgtccagggttgaaaaataccggccacagaccctgaatgatctcatttc

SEQ ID NO: 51752 - DNA, 74 bp, Homo sapiens
attgtcttaggaccataccatgacaaggtggtggctaatgccgtagcggcattatctgaaatcagtgagtctca

SEQ ID NO: 51753 - DNA, 100 bp, Homo sapiens
agcctgaagaagggctccctcgtgaagaacctgaaggacacactagccagtgaaactgaaattgcattcttctgtgaagaagattataagaactacaaag

SEQ ID NO: 51754 - DNA, 101 bp, Homo sapiens
cgggcatggcaatgtgggtgtcaacagaggctggttctgtgagaagaaatatggctacacacacctttctgcaggagagctgcttcgtgatgaaaggaaga

SEQ ID NO: 51755 - DNA, 98 bp, Homo sapiens
cgagtggccggaacgggagccaacatggcagcggggttcgggcgatgctgcaggtcattgaaattatgagactatcattcaaatggaagcattatagt

SEQ ID NO: 51756 - DNA, 75 bp, Homo sapiens
aacaactttcacattcagacaaggctgagggtaaaaagctgggattggtaggctgggtccagaacactgaccggg

SEQ ID NO: 51757 - DNA, 51 bp, Homo sapiens
gcatcccacattaagtcaacgatactttcattcagaaaaccaagaagctct

SEQ ID NO: 51758 - DNA, 75 bp, Homo sapiens
ctggagaatatggtgcagaggccctccacgctgtcggaaaaggtaacagaagatggaactcgaaatcccaatgaa

SEQ ID NO: 51759 - DNA, 75 bp, Homo sapiens
attttgtcaccgttatgtgggaagcgaatccaaatgcagtaatagtggccttgtcttcaaaatcatgggatgtag

SEQ ID NO: 51760 - DNA, 100 bp, Homo sapiens
cttttcttgctgctgtattactgctgcatggtgattgtgttgttacagtgctgcttgctgaagaggacaaagctgaagatgatgtagtgttttacttggt

SEQ ID NO: 51761 - DNA, 96 bp, Homo sapiens
cgcggatcgccgcgctcagcgacaaacaaagttacactgttagaccttatgatagccaagataacgagtgatgagccactcaccaaggatgacatc

SEQ ID NO: 51762 - DNA, 99 bp, Homo sapiens
ggctgcgtgctggtacgtgcttttcctcctgcagcccaccgtctacttgtttaggtagaagcttaggctattgatttgaacccactattttttctaatg

SEQ ID NO: 51763 - DNA, 74 bp, Homo sapiens
tgctcgtcacttgcctcccgggagtcgctgtggcaaaagttgctcgataatgtggaaaataagatgaaaggcac

SEQ ID NO: 51764 - DNA, 100 bp, Homo sapiens
aattcagaaggagctggcggacatcactttagaccctccacctaattgcagatcttaccaatatatttgagtccttcctgcctcagttattggcctatcc

SEQ ID NO: 51765 - DNA, 82 bp, Homo sapiens
tgaaattttcctttggccaacgtgacaggaaaaatgccagctgtgggacaaggagtgcaggccgcacaacctcggcaggcac

SEQ ID NO: 51766 - DNA, 100 bp, Homo sapiens
agtgaggacggaagcccaagtggcacaaatgcagaaactccctctggtgatgatttcaggctgtactttcgcagtcaagtcaaaggggagacggaccgag

SEQ ID NO: 51767 - DNA, 82 bp, Homo sapiens
tccacccaccgccgccgcctcccagcagatggactgctcccccacggccagcagcagtgccagtcctggtgccagcaccacg

SEQ ID NO: 51768 - DNA, 100 bp, Homo sapiens
tcagcagccccggcatgacctcagggaacggaaactctgcctccagcatcgccggcactgccccccagaatggaaaggccgagggggacggcaagatgca

SEQ ID NO: 51769 - DNA, 73 bp, Homo sapiens
gggcatccagctcattgccaagaagtccaagaaccacatccagtggcttccctctccaagatcctggatgtgg

SEQ ID NO: 51770 - DNA, 100 bp, Homo sapiens
ggtggacaaggtcctccagaaggcatgaaccagcaatattaccctgatggtgttccatttggtttaaaaaatacttcaagtctcaggcccttaaatctac

SEQ ID NO: 51771 - DNA, 100 bp, Homo sapiens
ggctcagtgaagagtctggagtttatctggagtgaggtggccggttcttggtgggatctgagcaggtctgtcgcacttagtagcagcatcatttacagag

SEQ ID NO: 51772 - DNA, 100 bp, Homo sapiens
ggagcggagcgcaggcgccgagactgacaacgcggtcccacaggacctgaaggagaagaaggagaaggtggaggagaaggcaagccggaaagagcgaaag

SEQ ID NO: 51773 - DNA, 98 bp, Homo sapiens
taaaagcagcccttggacgggcactggctatggctgagagtacagagaaacatgccagatttcttcctgaccactatgcccactgactccctcagtgt

SEQ ID NO: 51774 - DNA, 123 bp, Homo sapiens
ttggaagatgcagatgagaaggttcagttggcaaaccagatatatgacttgagctcagagttctacagagtcaccactgaacaatatcagaaagctgctgaagaggtggaagcaaagttcaag

SEQ ID NO: 51775 - DNA, 74 bp, Homo sapiens
tctgaactaattgtcgtggaagaaggaagtgaaccctcagaacttataaaggatgtgagttggtttgatgaccc

SEQ ID NO: 51776 - DNA, 83 bp, Homo sapiens
cctcccagggttcattgcaacacccatgacacagaaagtgccacagaaagtggtggacaagatataacacgtgggaaccggag

SEQ ID NO: 51777 - DNA, 73 bp, Homo sapiens
tcagattgcaacgtcatcctccacagctaaggacgagattgaggagctgcgggccgagatgctggagatgcgg

SEQ ID NO: 51778 - DNA, 80 bp, Homo sapiens
gagcctcagttggaagcagccgatccagcctgcggagcctgtggggcaggagggtgtgaagacagagaatgaccacatca

SEQ ID NO: 51779 - DNA, 90 bp, Homo sapiens
ggacagcgtgcggtctgggccttttgggcagcttttccggcctgacaacttcatctttgtataaatcaaagccattctgtgaaaaactgc

SEQ ID NO: 51780 - DNA, 100 bp, Homo sapiens
gtcgaagcgagggtctgaagttcacgactactagaaggggaggggagtggaaaggctctcagtgaaaaaggacccctatggtgtagccgtgggtggaact

SEQ ID NO: 51781 - DNA, 92 bp, Homo sapiens
catttggcccgtcctaccctaaagtcaccacctgctgcttttctggagcgcttaccagatcctctggaccttctccatctacctggagtcag

SEQ ID NO: 51782 - DNA, 100 bp, Homo sapiens
tgaagagagagaagagggcagagccgtgcatggggctgctccccaggacctgagcaggaacctggagttttcaggtgtgtagctgggacggtgctggtct

SEQ ID NO: 51783 - DNA, 75 bp, Homo sapiens
gagctgggaaaactgtttcagttgcagactttaggcctgaaagatgggagacctttaactctgaaggacatatgg

SEQ ID NO: 51784 - DNA, 100 bp, Homo sapiens
caatcaagcagagtatccacatactgaaatacacaacattttctttgaagatgcccactctggactgcttaaaggaaatagcagacagacagtatggagg

SEQ ID NO: 51785 - DNA, 92 bp, Homo sapiens
tttccggatcaatccagatggcagccagtcagtggtggaggttggtgttcgaggaagagacattgttgttcttggtgtggagaagaagtcag

SEQ ID NO: 51786 - DNA, 82 bp, Homo sapiens
ctttgattcaaccagtacttctggagtgtatgaggacaagaattttgggcagatttgaatgccatgaacgtgtatgaaacaa

SEQ ID NO: 51787 - DNA, 103 bp, Homo sapiens
ttcttccagttcgcagtcaagatctcgttccagttccagagaacgttcgagatctcgtgggtcgaaatcaagagaggagcaagcaagggagctgtacaggaga

SEQ ID NO: 51788 - DNA, 82 bp, Homo sapiens
atgctttacatcgtcactgaatttgctaaaaatggagaaatgtttgttatctccagaagaagaagagaaaaggagaatccga

SEQ ID NO: 51789 - DNA, 100 bp, Homo sapiens
tcccataaaaactatggagaagaccagtccaatgaacattactactggatggaaatccattccgagttcctcgagcagccatattaatgaaaggaacagc

SEQ ID NO: 51790 - DNA, 80 bp, Homo sapiens
tgttcacgcacgggatccagagcgccgcgcacttcgtcatgttcttcgcgccctgagacctgtcggccatggagcctaat

SEQ ID NO: 51791 - DNA, 76 bp, Homo sapiens
atctgtggctgggataagagaggccctgctcccaagcctgtgagcaagatgcgcatggccaccccgctgctgatgc

SEQ ID NO: 51792 - DNA, 80 bp, Homo sapiens
gcctctacaggggcctcccgcgccccccgggacccccacgccgccgccagggactggtgattgcagctggaagtgcccat

SEQ ID NO: 51793 - DNA, 127 bp, Homo sapiens
gaggcctttggcgacagtgaggaggacggagaggatgtgttcgaggtggagaagatcctggacatgaagaccgagggggcatctcccctcagatggaagtcacatgtgtgcccacgcccacaagcac

SEQ ID NO: 51794 - DNA, 74 bp, Homo sapiens
ctgatggggcaggaggggcctttgcagctcaggccccaataagaaacccttttccctgaaggagaagaaaccag

SEQ ID NO: 51795 - DNA, 75 bp, Homo sapiens
ggccgaaggcccgagcgcccgaggcgtctgggatggtgtgggaccggatgaaggtcaccgtgtccaaagggggcg

SEQ ID NO: 51796 - DNA, 100 bp, Homo sapiens
ccagcccagcccgccgctgcgcccgacgctccctgtctgggaccttctccctgcctggacccctactattgcaacaagaaagaggaggaccctgctacag

SEQ ID NO: 51797 - DNA, 88 bp, Homo sapiens
cagattcgcagtggtcgcttcttctccttggttggggtgactcagtgggaacgccatctgagcggggcatgacctatgacgcactcca

SEQ ID NO: 51798 - DNA, 78 bp, Homo sapiens
aaaggccagtacacacacaagatctaccacctgcagagaatagctgaaacctttggacttcaagaaaattatatcaaa

SEQ ID NO: 51799 - DNA, 100 bp, Homo sapiens
tgacttcaagactcggatatgcaaaaaagtctgtggccactacactcagagctgtaggtaaaacttgcctactgatcagttacacaaccaatgcatttcc

SEQ ID NO: 51800 - DNA, 75 bp, Homo sapiens
gagattttggaatttccaacacgagaagtatatgtccctcacactgtgtacagaatgccgggacattctgcttcc

SEQ ID NO: 51801 - DNA, 50 bp, Homo sapiens
ggaaaaagcagtaaagccagaggaaggttttgagcaaaattttggactgt

SEQ ID NO: 51802 - DNA, 100 bp, Homo sapiens
ggaaactaggaagaggaaattaactatctgtacttataagggcaacgggcatgaggaggtagttgcatgcgcctgggatggacagacatatatcattgat

SEQ ID NO: 51803 - DNA, 75 bp, Homo sapiens
tcctatccttacccgacctcagatgctcccttctgctcctgactctgagatttgcccacctgatgaccttgccag

SEQ ID NO: 51804 - DNA, 100 bp, Homo sapiens
actctggcgtgcaacctggaattggaacggagttccatgccattgcagtgtcaactaggcctcagttacttttcagtttgcccaaattgagcccatctca

SEQ ID NO: 51805 - DNA, 113 bp, Homo sapiens
ggataaacggagagcagcagccgcccgcttcaaccccaggggaccagaggaactcagccctgattgcggtgaacctgtgttttgatcagtttgtctacaagctggcagaccag

SEQ ID NO: 51806 - DNA, 83 bp, Homo sapiens
cttcggcagtccacccaccgccgccgcctcccaggtgaaggtgctaaaggagaagatagaagctgagaagggtcgtgatgcct

SEQ ID NO: 51807 - DNA, 100 bp, Homo sapiens
tggaccttccggagcttctcagaagacagagggttttcttttgagaaaccttctctatgtctacccacagaggctgaactttgtaaacaaactagcatca

SEQ ID NO: 51808 - DNA, 129 bp, Homo sapiens
cagcgcggccaccgccccgggacccgcgccgctgccctccggctccgcgggcggcccacggcgaggacttgtcttacaaggaccggcactggcatgaagcctgtttccactgctcgcagtgcagaaact

SEQ ID NO: 51809 - DNA, 100 bp, Homo sapiens
gataacagctgttgacaagactgaggatagtttagaaggatgcttggattgtctgcttcaagccctggctcaaaatatacaaacctccagggaacctggc

SEQ ID NO: 51810 - DNA, 99 bp, Homo sapiens
ctgtggctgccagaagatagcgaacgtctctaattaacagaagatggcaaagcccagccacagcagctatgtccttcagcagctaaacaaccaaagaga

SEQ ID NO: 51811 - DNA, 90 bp, Homo sapiens
gggcgccatcgagccttggcggcggacgtgcaggtttttcttcccccagtccctcagctgctgctgctgctcaggaggtcagatctgcca

SEQ ID NO: 51812 - DNA, 82 bp, Homo sapiens
cttccctggtcgaacagttttttctaatggctattcaagaatttaattccttttcgaccttcaatccagttccaaggactcc

SEQ ID NO: 51813 - DNA, 98 bp, Homo sapiens
gcgtgggaggccgctgccgtcgcgcgccttggtggccggactgtgccatgctgctccagacccaaggtggcagctctcactgcggggaccctgctact

SEQ ID NO: 51814 - DNA, 102 bp, Homo sapiens
caaagtttgagaacctctgcaagctcatgaaagaaatcttagataagaaggttgagaagatgacatgaaaatggagactgatattaagagaaacaaaaagac

SEQ ID NO: 51815 - DNA, 82 bp, Homo sapiens
ccgccatggctgcgtcggagctctacacaaaggtgagaagccctaccactgcaactgggacggctgcggctggaagtttgcg

SEQ ID NO: 51816 - DNA, 100 bp, Homo sapiens
cggccgaacccgcgatggaataatgcccagcggcccgccaggtcccggtgtacgaagccatcgacagcagagatggagcatcttgtgcagagttggtgtc

SEQ ID NO: 51817 - DNA, 75 bp, Homo sapiens
aaattcccggaaccgcgattcggcgtgtcaggttttgaacgaagaatgtgatcagaactggtacaaggcagagct

SEQ ID NO: 51818 - DNA, 83 bp, Homo sapiens
tacccaagcatgcaaaggaaggaaatggtttccaaggtaggagcattgcttttcgtggtgaaagaggcaatgatgaatctgcc

SEQ ID NO: 51819 - DNA, 83 bp, Homo sapiens
tgttggtccaagggaactgggtggtgaagaggtatgtgacagggcacatctgggcctgtcctccaagtgaaggagatgattac

SEQ ID NO: 51820 - DNA, 75 bp, Homo sapiens
gctgctggaggctcgcggcgccggctgctctagcgagcagttcgaggaggacttcctgatccatttgctaaggtg

SEQ ID NO: 51821 - DNA, 83 bp, Homo sapiens
aagacttaacactgcaacaacagatgaaggatttgggggcagagcacttggcaggtcatgaaggggtccaacttctcgggttg

SEQ ID NO: 51822 - DNA, 98 bp, Homo sapiens
cgccctctctgtttctccccaaaataaccattctccagatccagagcccagcattacatcaacatgcccgtgcagttcaaaccgaagtccgcaggcaa

SEQ ID NO: 51823 - DNA, 75 bp, Homo sapiens
aggagttcctgaacggcagggcagtgcccagctgagagccagcctggaggttacccagcagcaggccacccaggc

SEQ ID NO: 51824 - DNA, 50 bp, Homo sapiens
cgcaggggctcctcgggctcagtggctgcacatcattgactcctgggccc

SEQ ID NO: 51825 - DNA, 98 bp, Homo sapiens
tggccccggcctttgccccaatcttgtgtgggcactgaagggggactacaggttcgagagctctagaccaagatagaacagcccttcagaaagtgaag

SEQ ID NO: 51826 - DNA, 75 bp, Homo sapiens
actggccggaaccgctccttggaaggtcgctgggaggtggcattcaaagatgaagaggaagatgatgatgtagtg

SEQ ID NO: 51827 - DNA, 85 bp, Homo sapiens
cagtcatctcgcggccgttcagttttccaagagataacttcaccaagatgtccagtgataggcaaaggtccgatgatgagagccc

SEQ ID NO: 51828 - DNA, 100 bp, Homo sapiens
gacgggacagagcggtcggtgacagcctcaagggcttcagcaccgcgcccatggcagagccagaccaacttcctgcagggactgctcaccaaagacccac

SEQ ID NO: 51829 - DNA, 75 bp, Homo sapiens
gatgaagcctaagaatatgatcaggtccaggaggtgcagcccatcaccagttatgacgcggcaggctccttcctc

SEQ ID NO: 51830 - DNA, 132 bp, Homo sapiens
ctcaaacgttgaaacacccacagactgccaagtgggacaactttctggcttttgaaaggctccttcttcagtttcccagagctatggggacttcccatccggcgttcctggtcttaggctgtcttctcacag

SEQ ID NO: 51831 - DNA, 100 bp, Homo sapiens
aggggaaggaactttgggtcctgaatcttctgggagctgaggaaccagatatcttgaaaagctgccagaaaggaaaaccaattctgtgtcctcggaggac

SEQ ID NO: 51832 - DNA, 82 bp, Homo sapiens
ggtgttcgagaacgaccccgagacggttacaggaggttccagtggcatcgggaagtgcattgctatcgagtgctataaacaa

SEQ ID NO: 51833 - DNA, 98 bp, Homo sapiens
ccacccgcccgcccaaggtctctcgcgggcgggagaacggaaaactcccaacttcctgatgagtataggatcaaaccagtggaagaggtcaaatacat

SEQ ID NO: 51834 - DNA, 96 bp, Homo sapiens
cagactactgaaggacttgaggattcgttttcctggctttgagcccctcacaccctggatccttgacctactatgcacagccagagaacaacacat

SEQ ID NO: 51835 - DNA, 88 bp, Homo sapiens
aggagctagggctggagcctctccagcctcccgcgaaggagctgggaatcccaagtgcaaaattgcaattgttttgggaagaactcaa

SEQ ID NO: 51836 - DNA, 98 bp, Homo sapiens
tggtgacaagacttctaatcctgaagtcctgaaatggatgaatgatttggctaaaggtcgtaaacagctcaaaggctggaatgacacttacttacgac

SEQ ID NO: 51837 - DNA, 100 bp, Homo sapiens
actggcgtcacctgctatgcagcccacccaggtttggtgcacctcgatttggaggaagtagggcagggcccttatctggaaagaagtttggaaaccctgg

SEQ ID NO: 51838 - DNA, 74 bp, Homo sapiens
ctgcgcggctgcggggcttccctgcggctggaggagtcgatagcagcagttggtgacgagatggcactcagaaa

SEQ ID NO: 51839 - DNA, 82 bp, Homo sapiens
gtgggtcaaaggacagacagaagacccaagaaactcgagagatcttacatttccactataccacatggcctgactttggagt

SEQ ID NO: 51840 - DNA, 88 bp, Homo sapiens
tgatctcttccaaagaatgccacagaatcaggggaggcatgcttcagctccaaagacaacaggccctccctctgccctcccgtctgtg

SEQ ID NO: 51841 - DNA, 75 bp, Homo sapiens
cccccatgactgggatttagaggagcctctcttctagatcaagtcatgtgacaagttcttgccaatgaatggaac

SEQ ID NO: 51842 - DNA, 75 bp, Homo sapiens
tactcgggagctggctgaagatggctactctggagttgaggaaggtgggagtcaatcattttgacaagtctcctg

SEQ ID NO: 51843 - DNA, 75 bp, Homo sapiens
tgctgctgctgctgcatgtctaccaggagaggagggaactgcggagcgggtaactgtgacatttgatgatgtggc

SEQ ID NO: 51844 - DNA, 52 bp, Homo sapiens
cccacacctccggaccgagggacgcggatgccagaattccagaaaagttcag

SEQ ID NO: 51845 - DNA, 98 bp, Homo sapiens
aagcctgtcggagctgcctggagcagttttgtgaggagtttaaagaaaagtgtcctatctgtgtcccctgtggcttgaggttggctgagaaaacacaa

SEQ ID NO: 51846 - DNA, 99 bp, Homo sapiens
gaactctttccagcttgtgtctgactggaaagctacccttgaggagaataggttgaattctgaaaaagatcgagctagggaagaactatcccaccacgt

SEQ ID NO: 51847 - DNA, 74 bp, Homo sapiens
tggaagcaggactgcgccgcgtcttcctcaagacctctgtgagtgaaagccttcagagggaagctgctaagaag

SEQ ID NO: 51848 - DNA, 98 bp, Homo sapiens
cacctttgagctctttgcgagagatgtggatttccagctttgaacaatccaagaaagaagcccaggcactaagagtgatttcttctgacttgagcctg

SEQ ID NO: 51849 - DNA, 101 bp, Homo sapiens
tgaatgcaatcaaaacattcatggcaacaactaaacgacctgtaatccttactacaagtggctgcaggccaacttcaccatccgggaagatgccaacccca

SEQ ID NO: 51850 - DNA, 74 bp, Homo sapiens
gctgtatggagcgattttgcagatgctttatcttcaagccaggatgaagggagactgggcaagactcttacgcc

SEQ ID NO: 51851 - DNA, 50 bp, Homo sapiens
aaggattccaagtaactcttatttgctggtcagtgagaaggtcggagggg

SEQ ID NO: 51852 - DNA, 100 bp, Homo sapiens
tctggagcatttcagataaatacctttgatctaagggttcagcctttcaatgtgacacaaggaaagtattctacaggtttttcttcccccagtccctcag

SEQ ID NO: 51853 - DNA, 49 bp, Homo sapiens
gatgctcaggagagcttggaaggtgtgtttggtggccggggccgaggtg

SEQ ID NO: 51854 - DNA, 110 bp, Homo sapiens
gttcggcgcgtcgactgcccagagtccgcggccggggcgcgggagggggcatgtgtccgtttcgccacatcagtggtgagaagacagttgtgtgcaaacactggctgcgt

SEQ ID NO: 51855 - DNA, 88 bp, Homo sapiens
ctaataaagttgcagcgaggagaagcgcagcgacggcgtcgggagagcgcgcctagccggctcgcgattcaaaaggtgatgacctatc

SEQ ID NO: 51856 - DNA, 97 bp, Homo sapiens
ggcggcggcggcggcggagtgtaggaagaggcactgctgagggggcgcgaggggaacggaggccagagctgcggttccgccaggtgcggctgaaaca

SEQ ID NO: 51857 - DNA, 100 bp, Homo sapiens
gggagctagtggaagttactgccgcgccaccgagtccggaccggagactttggggcctaactaggactgatcctttgaaatactccagccatgactaaaa

SEQ ID NO: 51858 - DNA, 95 bp, Homo sapiens
gcccagttgctggggctggagaagagtaaggggaccctggactttggtgctgacgcagggggggccctcagcctcttggccttgaacgggctgtt

SEQ ID NO: 51859 - DNA, 101 bp, Homo sapiens
gctacacaagtggagctccttttcctccacctaccttcccgagacccagatgatgtggtaccagttggccaaagaagagcctggtgttggtgcatgtgctt

SEQ ID NO: 51860 - DNA, 83 bp, Homo sapiens
gccagcgagccacgggagcgagccaggtccccgttctccgtgtcctgctgtccgctgacctgaaggggttccagtacttctct

SEQ ID NO: 51861 - DNA, 100 bp, Homo sapiens
accacaacaagcaagcatgcagcttactgcttgaaaggtgctgactctggctgcccaggagctgtctaggcctgggtgcctcgggaggactccccaacct

SEQ ID NO: 51862 - DNA, 118 bp, Homo sapiens
caagaggaaaagcaagtacaagatcctggatgccacggatcaggaaagcctggagctgaagccaacctcccgagcagtacctgtttgaaaatggtagaatagataacatttttactga

SEQ ID NO: 51863 - DNA, 76 bp, Homo sapiens
gccagccgtcccgagctaccagcagcgccggcatcggccgcacaggcaccatcattgtcatcgacatgctcatgga

SEQ ID NO: 51864 - DNA, 90 bp, Homo sapiens
gctttacaaaccctgaatttataactgacttgcccagtttcgacaaagaaaagctcagtcggatgggcagagtccttccaagaagcagaa

SEQ ID NO: 51865 - DNA, 80 bp, Homo sapiens
agattccagcttcggaacaagagaccctgataactggagtgccaaggctaaaagacgaaataccaccggaactggtcgaa

SEQ ID NO: 51866 - DNA, 83 bp, Homo sapiens
tgctactgcgaagacagctggcagctctctgatccttctgacttaccaaggaatgccttcagaatttttaccattcttgtgga

SEQ ID NO: 51867 - DNA, 100 bp, Homo sapiens
ccagcggggcgatgagtgtgggcatggggcagccgccagcccaaacaggcgtgtcacagtgggctcgggatgagtttgaaggcctcttcaagcagccagc

SEQ ID NO: 51868 - DNA, 100 bp, Homo sapiens
gaaagagatcctggacctatgaatatccagtttgagccatcggatctaagatccaaaagcaatgtttttggaacagtgccagtggttgcttctgcacaga

SEQ ID NO: 51869 - DNA, 75 bp, Homo sapiens
gccgccaagagtgagcgagcggacccgcgatggcagctcttgccaggtaaaaagttttgggaaacagatgaatcc

SEQ ID NO: 51870 - DNA, 98 bp, Homo sapiens
ggacgcgcttcttcccacactgtgagcctcagcagctccagccagcggacccgacggctgagaggaatactcccccagttgcaagaggcgcaggaccg

SEQ ID NO: 51871 - DNA, 51 bp, Homo sapiens
cactgcaacctccgcctcccgggttcaagctattcttctgcctcagcctcc

SEQ ID NO: 51872 - DNA, 75 bp, Homo sapiens
aaataagctatatactttggttacctatgtacctgttaccactttcaaaaaaggacagaataacgggctcccaga

SEQ ID NO: 51873 - DNA, 83 bp, Homo sapiens
ataaaatccagtcctttgatgcagagacccagcagctgctgaagacagcactcaaaggaaataatgcaaaaggtgtcccaagg

SEQ ID NO: 51874 - DNA, 50 bp, Homo sapiens
gcactattttggattagtcaatgacaatgaaaagcgaaccccattgcacg

SEQ ID NO: 51875 - DNA, 97 bp, Homo sapiens
tcccaaatcaagtatacagaaaatcggtgaagagaggttttgaattcacgcttatggtagtggagcaacaagatatggatttggatatagaatttga

SEQ ID NO: 51876 - DNA, 83 bp, Homo sapiens
cggccctgggagctggaggaaccgcggtcaaaatgcagatcttcgtgaaaacccttaccggcaagaccatcacccttgaggtg

SEQ ID NO: 51877 - DNA, 90 bp, Homo sapiens
cctgtggatgactgagtacctgaaccggcacctgcacacctggatccaggataacggaggctggctccttcgagaactcatagaacggaa

SEQ ID NO: 51878 - DNA, 75 bp, Homo sapiens
ttgacttgacttggcagaaactaaaagagaaattcagtcagtgtggtgcaagaagtggggtgtcccaattgagaa

SEQ ID NO: 51879 - DNA, 48 bp, Homo sapiens
gacgcccggcgccagcacatcgcaggttctggctccttggcagcaatg

SEQ ID NO: 51880 - DNA, 100 bp, Homo sapiens
cggagaggtagccatgatgccccacttggtgaatggagatgcagctcagcagggctccgtaggcaccaactgcaaggacccctccccctgcgggcgctcc

SEQ ID NO: 51881 - DNA, 74 bp, Homo sapiens
gcgaacgccgccgggagactccagccggcgggcgagcagggtggtgatctttgtgaagtctgtgcagcggtgca

SEQ ID NO: 51882 - DNA, 100 bp, Homo sapiens
gctcggaagtgcgacgtctttacgtgtccaaaggcttcaacaagaacgatgcccccctccacgagatcaacggaaactttgagggaaattttgagtcact

SEQ ID NO: 51883 - DNA, 98 bp, Homo sapiens
catcatcctggtgctgacggacgaccaggatgtggagctggatcctccgagcggcggcgacggctgttgctaagggaggggacgcgcgaggaagcgcg

SEQ ID NO: 51884 - DNA, 74 bp, Homo sapiens
ctcaggcttccatgcagcctgccttaccgaactctgtccagaatgcagagaaggcttattgtgtcagcagcaga

SEQ ID NO: 51885 - DNA, 99 bp, Homo sapiens
tcatcaaggagctcatcaaggacgggaagtcactcataagcgcgctcaagagtgatgcaggttctgaatgctgatgccattgttgtgaagctgaactca

SEQ ID NO: 51886 - DNA, 49 bp, Homo sapiens
ggtcatccccatgtctcacccgggtgagatcggactggaactgttcggc

SEQ ID NO: 51887 - DNA, 96 bp, Homo sapiens
attttagggtcctttatatagaagggagagtagcttaacaaacaacagttgcagttactgaaagaacggttccaggccttcctcaatggggaaacc

SEQ ID NO: 51888 - DNA, 90 bp, Homo sapiens
aaaaaatgatcacctcaggcaaatggaacgtgaaaggtggtcgtgtgatggtaacagatgctgacaggtcaatactatctccaggtggaa

SEQ ID NO: 51889 - DNA, 112 bp, Homo sapiens
gtatgttccagatgacagggttttggttactgagactcaggttattcgggaaaccctatgatcatacaaatcccactagcccattacttgtgaaaccatctgaccttttaga

SEQ ID NO: 51890 - DNA, 100 bp, Homo sapiens
ttcatcctgcagcggcgccgcgggcacggcgaggggggcggccgcctcaccggctccaccgaggacaccgcgtccagcttgtgtggcgaggaggacacag

SEQ ID NO: 51891 - DNA, 75 bp, Homo sapiens
ggatagccacaagtgacaacttcatgcagatttgttcccgacaaggagttttctggttcagaccgtagacagaga

SEQ ID NO: 51892 - DNA, 50 bp, Homo sapiens
gggaggacagtctagagagaaagagtgttgcggagataggaacatgggag

SEQ ID NO: 51893 - DNA, 80 bp, Homo sapiens
ccctggagcctcagttggaagcagccgatccagcctgcggagcctgtggggcagttttatccaagtatgaagatcagatt

SEQ ID NO: 51894 - DNA, 100 bp, Homo sapiens
caagaacagagagagaggtggacagatctgagagatactgaggtcaaaatgcagatcttcgtgaaaacccttaccggcaagaccatcacccttgaggtgg

SEQ ID NO: 51895 - DNA, 83 bp, Homo sapiens
ccgagcggcaccaacagcggcgcgggcaagaagcgctttgaagtgaaaaagatccacctccgacccttaagccagagactcag

SEQ ID NO: 51896 - DNA, 82 bp, Homo sapiens
gaagctcaagttgctactcgggacgctgcacctcccgcgccgcacggtggacgaggtgaccccagggtttgaagaaaaggag

SEQ ID NO: 51897 - DNA, 100 bp, Homo sapiens
ttgaagtctgggatgtagtagacaaaggtgcatctgcagacgcagcaggaggtgaagctgcgcatgacgggcatggcgctgcgggtggtgcgtaccgacg

SEQ ID NO: 51898 - DNA, 83 bp, Homo sapiens
gaccagctagagaccatacagacctaccggtctgtcagtgagatggcttctaacaagaggttcaagcagttcttctcactgac

SEQ ID NO: 51899 - DNA, 100 bp, Homo sapiens
aaatcctgccgcggacttctctgcacagcatccctgtgacagcgctggcaagacctcaatgtgatcagcagcctgctcaagtccttcttccgaaagctgc

SEQ ID NO: 51900 - DNA, 89 bp, Homo sapiens
tttcggcctggaggagttgtacggcctggcactgcgcttcttcaaaggtgaaatgacaatggatgctctgttggctcgattgaaacttc

SEQ ID NO: 51901 - DNA, 123 bp, Homo sapiens
gatcctgtccttcatgcagtctctcattggcttctttgagactgaaatggcaggaaagaccacagcaagattctttcattcgtctcctcctagcctgggggaccaggctcgaactgaccctgg

SEQ ID NO: 51902 - DNA, 75 bp, Homo sapiens
catctccaagaacgtgctcttcgctcacctggatgacaacgagaggaggtgctgcagggtgcacagctgatcgcc

SEQ ID NO: 51903 - DNA, 50 bp, Homo sapiens
ctactccggaccttacggggacatgcggacactgtcttcagccttttctt

SEQ ID NO: 51904 - DNA, 74 bp, Homo sapiens
tttgttaaggattccaagtaactcttatttgccccagcatgagaccagatgtaagctctcctccatccagctcc

SEQ ID NO: 51905 - DNA, 98 bp, Homo sapiens
aagaggactcaggagcaaatcagtaatatagaatgagtccatttaagtcccaggacggtggaaactagctagtagattgcagccatgttgtggaagct

SEQ ID NO: 51906 - DNA, 51 bp, Homo sapiens
ccatcagctatggagataggcagatgagcgacctgggagacccagccagta

SEQ ID NO: 51907 - DNA, 100 bp, Homo sapiens
gttcacgactactagaaggggaggggagtggaaaggctctcagtgaaaaagacgagggtgacaatagagtgtggtgtcatgtttgtgagagagaaaacac

SEQ ID NO: 51908 - DNA, 119 bp, Homo sapiens
tatggatgatcgagaggatctggtgtaccaggcgaagctggccgagcaggctgagcgatacgacggtgatctgcaactctttcaccatctgtaatgcggagatgcaggaagttggtgtt

SEQ ID NO: 51909 - DNA, 89 bp, Homo sapiens
ctgtagatgctgaaaaatcaatgctgtccaaacttaaacatgaaagggctattgcaagacacgaagtccgagaaattgagcagcgacat

SEQ ID NO: 51910 - DNA, 98 bp, Homo sapiens
aggccagcaactcccagctcaatgcaatgtgcgaggacgacgggcagacgttcttcagcctagatgacgggaacaccaaattctctgacctgatccag

SEQ ID NO: 51911 - DNA, 75 bp, Homo sapiens
acccaggtgtaccccaagctgtacttgtcacctcgaattgagcactctaagcgaaagacatgaggcctcagcctg

SEQ ID NO: 51912 - DNA, 75 bp, Homo sapiens
agactgacaacgcggtcccacaggtggatcatccatgccatggagtatgaacttcagatccgtggcggagacaag

SEQ ID NO: 51913 - DNA, 75 bp, Homo sapiens
tccatcgtgtgcctgatgatcacgcagctggctggcttcagtggaccagttgctcggcgctggggcatccagaag

SEQ ID NO: 51914 - DNA, 82 bp, Homo sapiens
aaaaccttcctgcacaagtaaaagcaactgtattgcaacagttaggcagacaccacccatcctttaaccaagcacagaaaaa

SEQ ID NO: 51915 - DNA, 100 bp, Homo sapiens
gtatgagcgcagttacatgcatagagatgttatcacccatgtggtatgcaccaaggatgcaggtcacaaatgtccagttgacaatgaaatactgctggaa

SEQ ID NO: 51916 - DNA, 100 bp, Homo sapiens
ccacgacctccacgctggactggtgcgaggagaactactccgtgacctggtacatcgccgagttctgttaaataggattgcgaatcaggtggccattcag

SEQ ID NO: 51917 - DNA, 100 bp, Homo sapiens
gttacttcctgtctagagttgtagcttccacctggagaggccccctttcatccctgaaggagtggtggctcgcaggaagaggatggaaactgaggagtcc

SEQ ID NO: 51918 - DNA, 50 bp, Homo sapiens
ggggacgcaggcgggtcgtagagagcggttgtgtctgtaaagacaaaggc

SEQ ID NO: 51919 - DNA, 100 bp, Homo sapiens
acggctctcgactaccacaaccccgccggcttcaactgcaaagatgtagatgaatgctcagaaaacagatgtcaccctgcagctacctgctacaatactc

SEQ ID NO: 51920 - DNA, 82 bp, Homo sapiens
ccctcatcctggttctggaatcctcagttcaagtgggagaagttgcagatgacgtccagcgagcgcaggaagatcatgtgct

SEQ ID NO: 51921 - DNA, 100 bp, Homo sapiens
cagcacggcgtggccgcctcctgcctcgaagacctgaggagcaagggtacaccaggggttggaaaaaccacactaggcaaagaacttgcgtcaaaatcag

SEQ ID NO: 51922 - DNA, 50 bp, Homo sapiens
gcagtgtctcctttgggggcttcggatgaacctcttcgacagcatcaaga

SEQ ID NO: 51923 - DNA, 98 bp, Homo sapiens
gagaatgtcaagttcatcatcgagaacaccgacctggcaaaatcacagagcggttcttccgcaacccagcgaagcccgcggaggaggacgtggcagag

SEQ ID NO: 51924 - DNA, 74 bp, Homo sapiens
tatggcagcagcacggcacagcacgctcgacttcatgctcggcgccaaaggctcttttccacaatggcccccct

SEQ ID NO: 51925 - DNA, 102 bp, Homo sapiens
ggttaatagtggcatggaagatccatttggtgactctgacatcattagaagcatgccagaacagactggtgaaaagtaaaccttttcacctacaaaatttca

SEQ ID NO: 51926 - DNA, 75 bp, Homo sapiens
cacgggcagccggaaggacaccaagatgcggatccgggcctttccgaacattcagaagattctcggccttgcccc

SEQ ID NO: 51927 - DNA, 75 bp, Homo sapiens
agcatcttgggaaaaccctggatcaaatggagccttatctcatagagaagctgcacacatacatgtaagagaagc

SEQ ID NO: 51928 - DNA, 97 bp, Homo sapiens
ttcatcttgtggttggactgtcatcagtcatgagcacctggctgcagtggaagaaagaaagatcaagtccctggtagctctcttggttgagacacaa

SEQ ID NO: 51929 - DNA, 100 bp, Homo sapiens
cacctgcccgcgtgaggagcacctgctgagcccagccaggtgagagaacgccgagccgtcgccgcagcctccgccgccgagaagcccttgttcccgctgc

SEQ ID NO: 51930 - DNA, 100 bp, Homo sapiens
aaagagccctggaatatgaagagacatgcgatggtagatcaacccccaggctaatagctcgtcagcttgctaaaatccatgctattcatgcacacaatgg

SEQ ID NO: 51931 - DNA, 51 bp, Homo sapiens
atgatggaggcagaggtaaacttggagaggctggacggcagtctggaaacg

SEQ ID NO: 51932 - DNA, 101 bp, Homo sapiens
ctcccgctgcggaagagcggctcggtggaaaacgggttcgatacccagtgggttgccagcgttgatgtggtggagaatgaagaggccagcgctagcatcat

SEQ ID NO: 51933 - DNA, 95 bp, Homo sapiens
acttctgcatctcactgcttcgggaacgggtgtcaacattgcatacttgaatactggcatcggaggacacaaaggccccagtttggcagaccgac

SEQ ID NO: 51934 - DNA, 104 bp, Homo sapiens
tccaggtggaattgctgatagacatgggggcctcaaacgtggagatcaactcctctctgttaatggagtggaagcaagatttccagatgtagcaaatgggttta

SEQ ID NO: 51935 - DNA, 116 bp, Homo sapiens
caggcatttatctttctttgagtctaaagaatcccttgaagaaagtattggcaagggtaaaggagctggaagtgcgaaaattgatgcatgtgagaggagatggaccctggtattac

SEQ ID NO: 51936 - DNA, 74 bp, Homo sapiens
gggtcctgagtctccagagctcggctccagtcaggccaacaccgacgcgcagctgggaggaagacaggaccctt

SEQ ID NO: 51937 - DNA, 82 bp, Homo sapiens
catgctcagaccttcattgctctgtgtgccaccgggagttctgggaaatcgttcattcatttacagatgaacagaaaagact

SEQ ID NO: 51938 - DNA, 100 bp, Homo sapiens
gccagctgcggagcagtgcgtcagagtttcaggacctgctgcagctacagtatgaaggagttgcagtcatgaaattatttgatagagctaaagtaaatgt

SEQ ID NO: 51939 - DNA, 96 bp, Homo sapiens
ctgctggagctgacttcctcatgtgttactctgttgcagaagtggtcctttggcgtgctcctctgggagctgatgacaagaggagccccaccttat

SEQ ID NO: 51940 - DNA, 100 bp, Homo sapiens
tgcagaacccagctattactggtccggaaaaagaccacatcagtgtcagatttgtaagaaagcgtttaaacacaagcaccaccttatcgagcactcaagg

SEQ ID NO: 51941 - DNA, 100 bp, Homo sapiens
cggccggtgtccccaccgccatccctgacccatggcgctgaagaggattcagaaaaaaatgtcatccgtgagaatcagtggggaggtgtggacatccgcc

SEQ ID NO: 51942 - DNA, 75 bp, Homo sapiens
gccaattcgattcggagggtcttcatcgctgaggttcccataatagagtttgaaacagctgagacacttctaaat

SEQ ID NO: 51943 - DNA, 100 bp, Homo sapiens
gacgaccaatgtgaagaagcccaaagtgaccatctcctacccaggcgccatgttgaacatcatggtcaagggggggccctcagcctcttggccttgaacg

SEQ ID NO: 51944 - DNA, 100 bp, Homo sapiens
tgccggagagaaacgtcgtgatttggagtattaagtctttcccggaggctatgatggtcacacgttcctggacagtgtggagtgttacgacccagataca

SEQ ID NO: 51945 - DNA, 76 bp, Homo sapiens
gagcctgtgaggtccaaggtaatgaatgatgcccttcgtaaacacattttctgggccttgttagatgacttggata

SEQ ID NO: 51946 - DNA, 100 bp, Homo sapiens
tgcagcagtgatggatgcagctcttctgttgataggaattcctcctgatcagcagagactgatctttgctggcaagcagctggaagatggacgtactttg

SEQ ID NO: 51947 - DNA, 75 bp, Homo sapiens
gagtgtggaatacgtggtgttcgatgaagctgaccggtgtgcctacaggggttgtggaaggagacgctgcccccg

SEQ ID NO: 51948 - DNA, 75 bp, Homo sapiens
aaaggacttggatcgtcttcctactgagacggtatttgaagtataccatacaactgttttgaaaatccagcgtgg

SEQ ID NO: 51949 - DNA, 100 bp, Homo sapiens
tgcctgcactgcaactcggagaggacccagtcccttctggagctagagcttgacagcggcccgatggcaccagcaaggagtgtgtgttcatcgagaaggt

SEQ ID NO: 51950 - DNA, 100 bp, Homo sapiens
ggcgcttcggcccgggccgctcaggtgcagttggcttcctgaggctcaggtagtccaaagagccctgaattctgcggctaacaacgtgtatcagtatgga

SEQ ID NO: 51951 - DNA, 100 bp, Homo sapiens
gaagattcaccaaataagctatatactttggttacctatgtacctgttaccactttcaaaagaggactgacaaatggtagtggtcgatatatctctgcag

SEQ ID NO: 51952 - DNA, 98 bp, Homo sapiens
cggccactgggacggcggcgcggagaaggcaggtgtgagcctcagcagcgatttcattgctggcttttgtggtgagacggaggaagatcacgtccaga

SEQ ID NO: 51953 - DNA, 83 bp, Homo sapiens
tcttgtatgcatactccacagcacctggtccagagggggcaaacctctttatttaccaccttccacaggaatttggagaccag

SEQ ID NO: 51954 - DNA, 89 bp, Homo sapiens
ttgcagggtgcgggcgagcgtcgacccgggccgctcctggaggaggaggtgggagatttatcagcaagactgttgaacgcataactgcc

SEQ ID NO: 51955 - DNA, 100 bp, Homo sapiens
tggttttaacagcaggccccggggtcgcgtctacagtaataacatagatgccgcaatagaaaacattgaaaatatgcttacttcagagaataaagtcatt

SEQ ID NO: 51956 - DNA, 90 bp, Homo sapiens
cacgttcctccgaaaccggtttgcaagtccttgtagagtttgaagaaaacaggtctgaaacaaggtcttacccccagctgcttctgaaca

SEQ ID NO: 51957 - DNA, 100 bp, Homo sapiens
cagagaaccatcaagccagatgtcagaagctacaccatcacaggttcctacttcagtctctggaagatttggacacaagtttaaggaaactgaactcccg

SEQ ID NO: 51958 - DNA, 97 bp, Homo sapiens
caacatgggtggtgatgaggatgtagatttaccagaagtagatggagcagatgatacagttaaatctcacacagaaacagatgagaaacaaacagag

SEQ ID NO: 51959 - DNA, 90 bp, Homo sapiens
gtgactgtgtggacctgtcccactgtgtccaggtcaggtgggttttttgatgacaagattctgcagatcattacggaattgataaaaaca

SEQ ID NO: 51960 - DNA, 124 bp, Homo sapiens
tggaaatctaccagtacctgcgcttcttcaccaagaccatctccaacagccgacagggaagttggacccccactacccaaaagtctgcgggcacagaggcaacgttttggatgtcaagtggaac

SEQ ID NO: 51961 - DNA, 75 bp, Homo sapiens
agtgacttaaattactatttcaattggataaaaactcagctgagttcacaggtacaaacccgtagtgctgatgaa

SEQ ID NO: 51962 - DNA, 100 bp, Homo sapiens
cttctatgctgcagaaatcatttcggctctcatgttcctccatgataaaggaatcatctatagtgtttgatgatggtgatgagcgaacattgagacgtac

SEQ ID NO: 51963 - DNA, 98 bp, Homo sapiens
gtggcagaggagctggcggagagcggcctgcgggcgatcgggccgaggtctccttccgctaccactgccagctgtactccgagtggagaaagaccaac

SEQ ID NO: 51964 - DNA, 98 bp, Homo sapiens
aggaggtggtgaatatggccgtgatcgtgcccaaagaggagggcgtcatcagcgtctccgaggacagctcccagatggacgtatcatcaaagttgggg

SEQ ID NO: 51965 - DNA, 100 bp, Homo sapiens
caacacgtgtaaactcctgggttgctgataaaactaaagcattttgaaagcgaagcagaagccgtagaatcagcggcgagcctgttgaaagaacccacag

SEQ ID NO: 51966 - DNA, 88 bp, Homo sapiens
ccggatcaatccagatggcagccagtcagtggtggagggcttccgttacaagatgaggtctgtgtatgctcacttccccatcaacgtt

SEQ ID NO: 51967 - DNA, 74 bp, Homo sapiens
cttatggcggcgctggagagggggcgctgagctgttggggtttggtgcacctcgatttggaggaagtagggcag

SEQ ID NO: 51968 - DNA, 101 bp, Homo sapiens
aggcgatcaaggccaagtatccgccagtcaataggaagtacgagtacttaattcagtgcacaaatgagatgaatgtgaacatcccacagttggcagacagt

SEQ ID NO: 51969 - DNA, 100 bp, Homo sapiens
ccagcatccattgcaaaccttattaatctcagggaactggatgtcagcaagaatgtgatgtccttgcattgcccatttttaagcaagaagagtcgagttt

SEQ ID NO: 51970 - DNA, 87 bp, Homo sapiens
gatgaccgctgtgtggtggagcccgcggccggggacctggacaacccccctaagaagttccgtgggcgccatgttttggaagtttga

SEQ ID NO: 51971 - DNA, 89 bp, Homo sapiens
tgaagtcggtgtctgctgcgttcacggcaggattcggttagtcaccaggagactaaagtccatcaaaaacatccagaaaattaccaagt

SEQ ID NO: 51972 - DNA, 83 bp, Homo sapiens
cgggagcgcaaggtcgccctcaaggccatgatcaaaacatcctgcagctcctgaaaggcaagctggtggtgggtcatgacctg

SEQ ID NO: 51973 - DNA, 100 bp, Homo sapiens
gccctgaaggtgcggggtctaaatcaggactgctgtgtggtctaccgactcatcaagggcaaactgcggaaccaggcacagagtgagcgatacggatata

SEQ ID NO: 51974 - DNA, 135 bp, Homo sapiens
tatgctaccctctactttgtattttgtgtggattcctcagagagtgaacttggaatcttggacctcatccagaggcctgaacttcttttcctgaggaaggaactcagataaaaacaaatgtaagtttcaagcttt

SEQ ID NO: 51975 - DNA, 51 bp, Homo sapiens
tcaccaaagaggactttagacttgcagacaaggcgaccagccagctcctgt

SEQ ID NO: 51976 - DNA, 83 bp, Homo sapiens
ccatgatgtccttcatcctcaacgccctcacctggtactccaaagattcaggtttactcacgtcatccagcagagaatggaaa

SEQ ID NO: 51977 - DNA, 100 bp, Homo sapiens
aacataaactttctactgatcacattcctatactctacagaacaggtgagacgtggtcttgtaacacagtggttaagaatgtgactttggagccagcctg

SEQ ID NO: 51978 - DNA, 76 bp, Homo sapiens
tggaaccggtagagacctggacccccggaaagggagtacctgacaggcttccacaagcggaaggtcgagcgaaaga

SEQ ID NO: 51979 - DNA, 76 bp, Homo sapiens
gtttctagtagcgcttagtgaatatgatcaagttctcgtggagtcagacaatgagctcatggtgataaacaagaca

SEQ ID NO: 51980 - DNA, 73 bp, Homo sapiens
ctcactgcagaggtgctggagctggcaggtatgaaaatgaaagtcttcagaatggaaggaagtcaactgaatt

SEQ ID NO: 51981 - DNA, 75 bp, Homo sapiens
aggacttgagtaacagcaacatgccacttccggctcctgcgtcgctccggaagcctgcgagttccggaagccttg

SEQ ID NO: 51982 - DNA, 100 bp, Homo sapiens
gggagtccccggggacacctcggcacgcagcggagatgcctctttttgccaccaatcccttcgatcaggatgttggtcaaaatgcagatcttcgtgaaaa

SEQ ID NO: 51983 - DNA, 100 bp, Homo sapiens
gacagctctgcggctcgggccctgagtgccggtggtggtgtgcacattgagccccggtatagacagttcccccagctgaccagatcccaggtgttccaga

SEQ ID NO: 51984 - DNA, 82 bp, Homo sapiens
gtcaccaagaaattactgtctcaagtgatacggcctgctggtgggtacccttgatgttgtgttggactccagcgcccgggtc

SEQ ID NO: 51985 - DNA, 97 bp, Homo sapiens
ctttgtagcagacactgcaaatgaagctctcgaggctgctaagagactaagttgaggaaacgtcccatgcagtcaactgttgctacttaaatgcagc

SEQ ID NO: 51986 - DNA, 83 bp, Homo sapiens
ggccgtgccctggggctgagccctcaggctgaccccgcactacatctacccaccagccatcgtgcagcccagcgtggtgatcc

SEQ ID NO: 51987 - DNA, 50 bp, Homo sapiens
gtgatttgcctcagcttgtactattgcaaaggtcgactgcaaggaagtac

SEQ ID NO: 51988 - DNA, 75 bp, Homo sapiens
cggagggggccgaattctgctggaggcagcgccatatcctggaggtgaagcaggaggccactgtctgcagctccc

SEQ ID NO: 51989 - DNA, 100 bp, Homo sapiens
agtcagcaattctgtgagcagcaagaatggcacggtctgcctcagtccaccctgtaccctggattcctggagttctgtaaagaaaacggagggtataccg

SEQ ID NO: 51990 - DNA, 101 bp, Homo sapiens
catcaccgacatgaagggaacaggcatcatggactgtgcgcccaagacctgtggatgaagagccagagtcctctgaggtcgatgctgctggtcggtggcct

SEQ ID NO: 51991 - DNA, 50 bp, Homo sapiens
tgagatgctaggaagacttggaattaccgaattgatgggatatgagccag

SEQ ID NO: 51992 - DNA, 100 bp, Homo sapiens
tggaccaggcactgagatggctttgggtgggatcatagacggtatttctatgtaaacgaacagtcgggcgagtctcagtgggagtttccagatggtgaag

SEQ ID NO: 51993 - DNA, 98 bp, Homo sapiens
tacattgctcaggaatggaagtttacagagcctcagtgttggctcatctccagttggttcagacatccacgacagcgatggcagttccagcagcagcc

SEQ ID NO: 51994 - DNA, 50 bp, Homo sapiens
ggaatgcagtaccctcagcagcagtgcgaccaagaccagtgcattcagag

SEQ ID NO: 51995 - DNA, 100 bp, Homo sapiens
ccgctgcagccgagatgccgggggagcggggccttccacaccccctccgtgggtgtgtgatggcccactgcgtgaccttggttcagctgtccatttcctg

SEQ ID NO: 51996 - DNA, 74 bp, Homo sapiens
tgatagtgattcatcattgaatcaggttgagccagtgatacagagaggccatgagagtctggtgcaccacatcc

SEQ ID NO: 51997 - DNA, 152 bp, Homo sapiens
tgccttgtagagctacttgaagaccccaacataagtgcttcactgatcttaagtattatcggtttgctgtctcaactagctgaaaatactccttgatcaagttgaagaagcagtggcagattttgatgaatgtattaggttaagacctgagt

SEQ ID NO: 51998 - DNA, 75 bp, Homo sapiens
tggcctgggtgcctcccagatgttggactcccagctcccacaggttatttaggaggattcgatggcaattttttg

SEQ ID NO: 51999 - DNA, 75 bp, Homo sapiens
acgaatctctcaggctgcatcaggatgaatgatgacccaagtatggaatatctggagtccatctttcaccatctt

SEQ ID NO: 52000 - DNA, 96 bp, Homo sapiens
actccggcgggggatgcgcgcccggcccctcagcgcccccagcacgccgccgagtcccgctcgccatgggcacctctaagatactgatggctctgc

SEQ ID NO: 52001 - DNA, 100 bp, Homo sapiens
tcgtggtggtcggatttcaccacaagaagggctgccaggagatgcagaaactaccagaggccgttcagctaattgagaaggccagcatgatgtatctaga

SEQ ID NO: 52002 - DNA, 100 bp, Homo sapiens
cggggaaaatggcggacgggaaggcgggagacgagaagcctgaaaagtcgcagcgagctggagccgccggagaactgataaatttcaaacggaagagagt

SEQ ID NO: 52003 - DNA, 90 bp, Homo sapiens
cctccttgaagctgatggtgaatgtgtgcggacacactctaatgttatggaacagttcaatcctgggctgcgaaatttaataaacctggg

SEQ ID NO: 52004 - DNA, 103 bp, Homo sapiens
gtttccggaagtgtatagggaaacctgggggctccctggacaactccgagcaggggaacgcccttttgcttgtgactggcagggctgcgacaagaagttcgcc

SEQ ID NO: 52005 - DNA, 100 bp, Homo sapiens
ttgaccgcgctcctcgccgccgccgctgctggcggagatgccccgccgggcaaaatcgacttaattcagtgcacaaatgagatgaatgtgaacatcccac

SEQ ID NO: 52006 - DNA, 97 bp, Homo sapiens
tcgaccccttgctgtagaggtcgtcacagctttagccacagtagaagacttccagattcgtccacatactctctatgtacattcttacaaagctcct

SEQ ID NO: 52007 - DNA, 98 bp, Homo sapiens
ggcaagggcaacttcgcggtggtcaagcgggccacgcacctcgtcaccaaggccaagggcttcgtgctggccgtcactgtcatccgtgaggcggtgga

SEQ ID NO: 52008 - DNA, 74 bp, Homo sapiens
tggacgctgccagtttgcacagcagcagggcaaaataacatggcagccagacgaattacacaggagacttttga

SEQ ID NO: 52009 - DNA, 99 bp, Homo sapiens
gaacctcctctcccacttcttgccccagaaagccccagacggaaagagctacttgctgaggaacaccagctggctgatgagcctggagaacccgctcag

SEQ ID NO: 52010 - DNA, 98 bp, Homo sapiens
ggcggagcccgaccacgacggccccagggaggatgacgaacccaacctggtgcccggcccgcaggaagatgatccctatgatcttgaagatgtttctg

SEQ ID NO: 52011 - DNA, 101 bp, Homo sapiens
gaggacggagaggacctgttcaccagcactgtctccaccctagaggtttttcgttggaatatacgttgcacatttatggcgattctgagtgtgagggcaga

SEQ ID NO: 52012 - DNA, 100 bp, Homo sapiens
ttggaaaagagactgttcaaaccactgaggatcagattttgaagagagatatgccaccagcatttattaatgccggtggtggtgtgcacattgagccccg

SEQ ID NO: 52013 - DNA, 75 bp, Homo sapiens
atgattgagccgcgcacgctacagtacaaggagatgctgaaggacgaggtgcgcaccctcacttaccgcaactcc

SEQ ID NO: 52014 - DNA, 100 bp, Homo sapiens
gtgatttcattgtgaagttcttgtagtgtgtttttcagctctaacaggtgtttaagatagaagtgctaatgaatggaagaaaacattttgttgaaaagag

SEQ ID NO: 52015 - DNA, 98 bp, Homo sapiens
aggctgtccctggtggacaaggtcaaaccatcatgcaagtacctgtttctggaacacagggtttgcagcaaactcctatgaaccaagcttcaacccgt

SEQ ID NO: 52016 - DNA, 75 bp, Homo sapiens
gagcttttcaagaaatggaattgaaaagtccagaggaagagctgcagaaccttggcctgaaaatgctacattata

SEQ ID NO: 52017 - DNA, 100 bp, Homo sapiens
cttgtggagacaacgccttaacccaaggaagtgactcaaactgtgagaacttcaggttgactatagtcaatggggccaatggagccaagtgtatggaaac

SEQ ID NO: 52018 - DNA, 96 bp, Homo sapiens
ggcggagtgcgtggaggaggtccagtgtaagcccagggacagccaggcagcaccacaccccactctggccggagcacgccaagcagctccccatcg

SEQ ID NO: 52019 - DNA, 74 bp, Homo sapiens
agctctttgcatccggagagtggacaagaaagacccattccaacaatctcgtaaaacatggtggattactatga

SEQ ID NO: 52020 - DNA, 128 bp, Homo sapiens
gttccccctggacagcacaggctccgagctgaaacagaagatccactcgattacaggtgacttgcttttggagggcttcaacaactacaccttcctctccaatggctttgtgcccatcccagcagccc

SEQ ID NO: 52021 - DNA, 95 bp, Homo sapiens
atgggaaggaggccgagccgggatctcaggtcctcgggggcggcggccacgccaaggacggagagtgataatgaactctcaagtggaacaggtga

SEQ ID NO: 52022 - DNA, 75 bp, Homo sapiens
agcccgggaaatctccaagtcagaaaggatctcaaagatttcatgagacaagctggggaagtaacgtttgcggat

SEQ ID NO: 52023 - DNA, 96 bp, Homo sapiens
cagacccctgtgtcatcctcaagatgcagtctcatgggcagtggtttgaggtgtgggttgctgaccgaggaaataaaagaatccaagtatttgata

SEQ ID NO: 52024 - DNA, 73 bp, Homo sapiens
tcgtctcctagaaatctagcactggagaaacgtacaggtttgcagattccgccagcagcacagcaagctctac

SEQ ID NO: 52025 - DNA, 75 bp, Homo sapiens
ggccctggagaaggggacccttcctctgttgaaggaccaggccataaaattttgagtagaaaaatccagaaattt

SEQ ID NO: 52026 - DNA, 100 bp, Homo sapiens
gctccagagagctatggctgcagaagcagaagcgtcccgcgaggcccgcgccaagggagactcatgcatctgtatgccgtgtgcgtggactgcctggaag

SEQ ID NO: 52027 - DNA, 100 bp, Homo sapiens
aagtgaatgactccaacgaattaggtggtctgactaccagtggctctgcagagggacaatgactcattcttcccaggacactggttcttgtggcattcag

SEQ ID NO: 52028 - DNA, 82 bp, Homo sapiens
atcctgagacccggacagtggcagtgaaacaggacttgccggagcagccttacttgcagcctccactcagcatcttggtgat

SEQ ID NO: 52029 - DNA, 75 bp, Homo sapiens
gagattgttgtgtgtaccccactttttttctcaaggtgcaatgaaagccttccacactttctgtgttgtccttct

SEQ ID NO: 52030 - DNA, 90 bp, Homo sapiens
ctcctctgaccctgtggagatgcggaggctcaactaccagaccccagaaaagttggagaagatgagggatcatgaacgaaaggaagaaac

SEQ ID NO: 52031 - DNA, 98 bp, Homo sapiens
ctccagtagacggtacagcgaaggcagagagttcaggataggatttttgggccttggtctcatgggaagtggaatcgtctccaacttgctaaaaatgg

SEQ ID NO: 52032 - DNA, 82 bp, Homo sapiens
gtcggggccccatcgagaaatggccgcgtcggcagtacctggagtagaacagaaaaattattatgtctgtgttcccttggga

SEQ ID NO: 52033 - DNA, 50 bp, Homo sapiens
atctcctcagggaaggggcagcacaaaatcttctctacatataccctcag

SEQ ID NO: 52034 - DNA, 80 bp, Homo sapiens
ccgggtccccgcgttcacagccccagcgcaggtccctgtgcgttttattgcgacctgccggtgggaactttgtctccgag

SEQ ID NO: 52035 - DNA, 90 bp, Homo sapiens
tgtcagcagccaaggtgtttccaggaagttcagagagaacagatgccatggacaatattaccaggcagaaccaattctacgatacccaag

SEQ ID NO: 52036 - DNA, 75 bp, Homo sapiens
ccgagcggccgaggcgccgcggtcggctctgggactcgtctggcgtccctcagtaagactttgaccccgacgcag

SEQ ID NO: 52037 - DNA, 73 bp, Homo sapiens
aaaaagagctgggatgcctaaggagccaagttacaccctgtttaaccctgccttcaaagggacgactctgtaa

SEQ ID NO: 52038 - DNA, 100 bp, Homo sapiens
cagacagacttatgctggaactgggttttagcaagattttgcaccatttttgaacaattcacgtaagtcaatgggtggtaactcatgagctaactggaag

SEQ ID NO: 52039 - DNA, 106 bp, Homo sapiens
cctccactccgtcccccgcgggtctgctctgtgtgccatggacgggtttggtgcacctcgatttggaggaagtagggcagggcccttatctggaaagaagtttgga

SEQ ID NO: 52040 - DNA, 76 bp, Homo sapiens
tggcggacagtgcggaactaaaggatctgcataaagtattacaaacaaaatcctcttgatgagcaacacatttttc

SEQ ID NO: 52041 - DNA, 72 bp, Homo sapiens
catctcatcttacaggagcagactaggtcagcagcaaggacaagatggagtaaaagtccagcaagctactat

SEQ ID NO: 52042 - DNA, 75 bp, Homo sapiens
gccacctgagtggcgcggcggtgtcagcgctgtgcttcgccgtgagccgctcgctgctgctgacgtgcctggtgc

SEQ ID NO: 52043 - DNA, 80 bp, Homo sapiens
aggcttttttttcctccgcggtggggcgttgccatggagacgcgggcggcagctacaaggctttggccgaccaagtgtgt

SEQ ID NO: 52044 - DNA, 95 bp, Homo sapiens
ggcagtacgggaagaacttcttcagaattagaaaggagctgcttcccaataaggaaacagaatttagataatgggctgtgtgcaatgtaaggata

SEQ ID NO: 52045 - DNA, 74 bp, Homo sapiens
cgtcagtccctgctctgtgcgcgcctccatctgggccatggatggagttaaacatgaagtttctggagagacag

SEQ ID NO: 52046 - DNA, 51 bp, Homo sapiens
gattaactcattcaaggttacccagttggcctgatcttttggccagaagga

SEQ ID NO: 52047 - DNA, 90 bp, Homo sapiens
gaatcttctgggagctgaggaaccagatatcttgaaaagctgccagaaagggaaatcctcattgacgattcaatttgttgaaggccaatt

SEQ ID NO: 52048 - DNA, 112 bp, Homo sapiens
ggggatccttccgcacactgaagagtacgtcttcgggtctacccctaatcacaaactggcagacctttcacttcgtatccaacaaattgaaacaactctcaatattttagat

SEQ ID NO: 52049 - DNA, 100 bp, Homo sapiens
ggaagccagcctcagggactgcagcgacccccaaacacccctcccccaggatcagttcccagtgacgcccgtgagcacgctgtgtgcagaggccagggaa

SEQ ID NO: 52050 - DNA, 75 bp, Homo sapiens
agaagatgaacccacagatttggtgattcgagatgtgataaatgtgcacatggaagaactcagcaatcattggca

SEQ ID NO: 52051 - DNA, 89 bp, Homo sapiens
acgagaaagattgcgccagattgaagaacagaaggcattggccttacagcttcaaaaccagggagttcgtggagcgggaggtgatcgac

SEQ ID NO: 52052 - DNA, 83 bp, Homo sapiens
tgtctgcgagccaggattcccgggtctcccttgatctgagaatggctacctctcgatatgagccagtggctgaaattggtgtc

SEQ ID NO: 52053 - DNA, 98 bp, Homo sapiens
ctcagctcgcagcgcatccccgcgcacagggtcgcggcgagcgcgcctatgacatctactcgcggctgctgcgggagcgcatcgtgtgcgtcatgggc

SEQ ID NO: 52054 - DNA, 93 bp, Homo sapiens
ggaaattgaggaaagagagagagcagaaaagaagaaacgggcaactaaaactccaatggttcaaaccttgtactactcagctgatcacaagct

SEQ ID NO: 52055 - DNA, 51 bp, Homo sapiens
gcaaaatatattgaaacttcggagcttgaatattacttcagtgtagaaaat

SEQ ID NO: 52056 - DNA, 89 bp, Homo sapiens
ggcggaaccagcctgcacgcgctggctccgggtgacagccgcgcgcctcggccagagattggtgtggggatcaccggtttcggcatctt

SEQ ID NO: 52057 - DNA, 100 bp, Homo sapiens
gatccctggctgtagcgaacaacaacccaaccattactgcagtcattgtccaaacctgcttttttccgacaaaattcagagaggaggaacttcaagctgc

SEQ ID NO: 52058 - DNA, 51 bp, Homo sapiens
gggctgctcacaatttatatggccaacttgcctccacaaatgggaagtgtt

SEQ ID NO: 52059 - DNA, 100 bp, Homo sapiens
ttgttttgctgcctgggtttctgcaaaagatgctggtttcagcagccctgatgggtcagatccaaaatcctcaactcaatacagttgtttttatacttct

SEQ ID NO: 52060 - DNA, 100 bp, Homo sapiens
gggacgtttgcccagatccatgagatgcaggaccttggggacaagctgcgcatgatcgtcatgggacacagaaggaggaacaaggtgctgaaccacttca

SEQ ID NO: 52061 - DNA, 74 bp, Homo sapiens
ggaaaacaagaagactgaatgatattccctggctcaacgagaacctttgacaagagcacgaagtgaagaaatgg

SEQ ID NO: 52062 - DNA, 75 bp, Homo sapiens
aaagcagcgtgcgttcagccctgggcactgagattatgaggctctggcctccactggccactcactcgtgaccct

SEQ ID NO: 52063 - DNA, 75 bp, Homo sapiens
tctcctgcctcagcctcccaagtagctgggattacagatataacacgtgggaaccggaggagaacatcctggacc

SEQ ID NO: 52064 - DNA, 100 bp, Homo sapiens
tctctttctggcctggaggctatccagcgtgatggtaatgcccgaaggagcagacacggtgtccaggcccagtcccgactaccccatgttacccacaatt

SEQ ID NO: 52065 - DNA, 50 bp, Homo sapiens
gttgtgcgttgcggccagtcgccactgctagtcttcctgcgagcaattaa

SEQ ID NO: 52066 - DNA, 80 bp, Homo sapiens
cggagccaggctggtttcggaaatgcccttacagcagcaggtcaccggattgaaactgtctcaggaccttgatgatcttg

SEQ ID NO: 52067 - DNA, 82 bp, Homo sapiens
aagcatacaggtgtccagcagagaagctaactgtagaacacatcaagcatttatgcggctgtttgcagacaaggtcccaaag

SEQ ID NO: 52068 - DNA, 99 bp, Homo sapiens
acagaggagttggagttgctactaaaaagagaggtgcctttatctgatgatgatgaaagttacacaggttcggctttccagtttggcagcagcactaca

SEQ ID NO: 52069 - DNA, 100 bp, Homo sapiens
cctggaagagaagagggtggctaatgattaaggtgtcatggagaaactccagctgggcccagagattctgcagcgggaaaatccaaggcttatttatgcc

SEQ ID NO: 52070 - DNA, 96 bp, Homo sapiens
tggtggttcctgctgccctcaaggtcgtgcgtctgaagcctacaagaaagttatctccagaagaagaagagaaaaggagaatccgaagggaaagga

SEQ ID NO: 52071 - DNA, 90 bp, Homo sapiens
aacagaagagagaatgaaatgcttatattacttatatgctagtttggatccaaatgctgtaaactttcagcttatgtggagaagtcgctg

SEQ ID NO: 52072 - DNA, 90 bp, Homo sapiens
cgaattcttataaagctgtcatcaacctgggaaggaattcaggctggaaaggatgcgctggatgccctgggcctgaagcgctactgctgc

SEQ ID NO: 52073 - DNA, 58 bp, Homo sapiens
gaaaatgatccagactatgacccaaaggaggtttttacagaaatggaggagaagtatg

SEQ ID NO: 52074 - DNA, 92 bp, Homo sapiens
cgcagaagtcgcgtgtctaggtgagtcgcggtgggtcctcgcttgcagttcagcgaccacgtaatagctcttcaagtctgcaataaaaaatg

SEQ ID NO: 52075 - DNA, 90 bp, Homo sapiens
gggcggccgggggctcagagatccaagtgcgcgccctggcgggtccggaccaaggtccagctgcagctgctgacagccattgtgaaactc

SEQ ID NO: 52076 - DNA, 100 bp, Homo sapiens
tctcctgactcagaacgatcttctaaactccagccagtaacagaagaatatgacagatacctagcatctagcaaaataatggcagctgcttaccttgacc

SEQ ID NO: 52077 - DNA, 75 bp, Homo sapiens
ctcagatgctgccagggtccctgaagagggaagacacgcggaaacaggaatgggtaccacagaccatgtcatcgt

SEQ ID NO: 52078 - DNA, 75 bp, Homo sapiens
aatgccagccagaagaggcgttcgctgcgcgtgcacattccgactcgtttgtgaacagccaggagtggacgctga

SEQ ID NO: 52079 - DNA, 103 bp, Homo sapiens
ggaagtggcaagagcgcggcctcagagggtcgggcggacgccgcctggttgtgtgacttcattgagacacattacctgaatgagcaggtgaaagccatcaaag

SEQ ID NO: 52080 - DNA, 82 bp, Homo sapiens
ccaccctcgctccctctgctcttcctcccttcgctcgcaccatggtatgatctcgtgaaaccttgagagaaactgaatgacg

SEQ ID NO: 52081 - DNA, 74 bp, Homo sapiens
aaatgaaaatcatcccagactaaatcagtcacaagaggtggtggccaaaaaatatcgcaactttgatattccaa

SEQ ID NO: 52082 - DNA, 75 bp, Homo sapiens
ctcacggggctggactcggagaaggtcttcgccttgatcgtgttctcctgcatctatggtgagggctacagcaat

SEQ ID NO: 52083 - DNA, 97 bp, Homo sapiens
cttcttgaaaaacgtatcgaagaccttcgtgtatcggatcctgacctcccagccgatgtgcagacaccatcctcggtggaactggggaggtatccag

SEQ ID NO: 52084 - DNA, 50 bp, Homo sapiens
catttacttctctgctgaaaagcaatgtgaaaatgcctcgtgtaaaagca

SEQ ID NO: 52085 - DNA, 99 bp, Homo sapiens
atctctcggcgccctggcgctgctcctgctgtccagcctctcccgctgctcagtttgacttgctggaaatggaccggctggagaggccactggttgacc

SEQ ID NO: 52086 - DNA, 101 bp, Homo sapiens
ccgggatctacctggtctgaaatttcagaagaaagtggtagcttcctttccaagaacagttctgagcacaggaatggataaccggtacctggtgttggcag

SEQ ID NO: 52087 - DNA, 50 bp, Homo sapiens
cggcggagctggtggaggccaaagcaacatgagtgagaatgaggaagagg

SEQ ID NO: 52088 - DNA, 98 bp, Homo sapiens
aatgtgggaccccagcccctctccagctcgaaatcgtggagagacttatccaagaacgtggctgggagttcatgtggaatgagcgtttgggatacatc

SEQ ID NO: 52089 - DNA, 89 bp, Homo sapiens
cctgaatctgtcattttattgaagatttcctcctctgatgctcctcttcagcctttggtatcctctccttctctgcaagctgctgttga

SEQ ID NO: 52090 - DNA, 97 bp, Homo sapiens
tcacgtgatgcaactcttttgctgtggtattggaatggaaaatgcagtgggattggagataacccaggcagcagttgtgaaaaacttcaggacaaaa

SEQ ID NO: 52091 - DNA, 82 bp, Homo sapiens
ccagggccacctgaactctctgaccctgaacaggtgaataagtctgatgacacagcagaacatcttctggagttgggctggt

SEQ ID NO: 52092 - DNA, 90 bp, Homo sapiens
atggggtgcaggatgagttttctctgcagcctgaagaagatatgggataaaaccagcctggaatgtttgaaagtgttaacaggacacaca

SEQ ID NO: 52093 - DNA, 82 bp, Homo sapiens
caaggggctcagctcgcagcgcatccccgcgcacaggtccgcgggagagctgtggggcttggtgagtgtttcgtggcctctc

SEQ ID NO: 52094 - DNA, 100 bp, Homo sapiens
ctcactccgcccggccccagccctagcgctggccgcgaccccggcggaatgaatctgaagtctgctgcagtaaaacacagaaggctttaaaatgttttct

SEQ ID NO: 52095 - DNA, 90 bp, Homo sapiens
gacacggccaaccgcctacgtatcagctccatccaggccaccactgcggcgggctctggtacctggagtagaacagaaaaattattatgt

SEQ ID NO: 52096 - DNA, 74 bp, Homo sapiens
tgaccgtgaattcaggagaccctccgctaggtggcattgcagacagtgtagccaagtggatatttaaacaggac

SEQ ID NO: 52097 - DNA, 98 bp, Homo sapiens
caccaggcatcagagatagagtcttccctggcattgcaggagagaatctgaagggatgatggatgcatcaaaagatcgggagcggtgccgagaaaaat

SEQ ID NO: 52098 - DNA, 100 bp, Homo sapiens
gacatcctggaagctgggaaatggatggatcatgaagccgcccagctggagaagcagcatgtgcacaatgtgtacgagagcacagccccttacttcagcg

SEQ ID NO: 52099 - DNA, 83 bp, Homo sapiens
ccgggagcccgccgcgctggtagcggtctgccatcatggatgttctcgcagaagcaaatggcacctttgccttaaaccttttg

SEQ ID NO: 52100 - DNA, 90 bp, Homo sapiens
attgtggattatgaaaaccctttaaagaagatgatggaagaatttgtaccccatagcaagtataacattcaggcttatccaacaacagtg

SEQ ID NO: 52101 - DNA, 100 bp, Homo sapiens
ctcagcagaattttttgcaggggaaaacatccagtgtggtggaaatgaaacctgaatagagtcaccttgtaataactgggaactcttcccctgaagacac

SEQ ID NO: 52102 - DNA, 90 bp, Homo sapiens
gaaagtggagtccgagctgagatccatctgcaccacggtgctggcctcattgctacgatttcagagtaccctggtaatagctgagcatgc

SEQ ID NO: 52103 - DNA, 97 bp, Homo sapiens
tgacagggaccatcctttcaggctccatcagcctcggtgacagtgtggagatccctgccctcaaggtgaaagaactcttttcttctttgggagtcga

SEQ ID NO: 52104 - DNA, 73 bp, Homo sapiens
ggcgagtttccgatttaaagctgagctgcgaggaaaatggcggcgggagccactgaagatcctggtgtcgcca

SEQ ID NO: 52105 - DNA, 107 bp, Homo sapiens
cgagggcaaaggcaaggtggtggacctgctggccacggacgccgacatcatcagccgctgccagcttcggaaccaaaaagaagcttcccagagccggggccaggagc

SEQ ID NO: 52106 - DNA, 74 bp, Homo sapiens
gagaagaatgagcgtgtgcagaagcacctgaagcccgagggcaacatccttcgagaccggttcaagagcttcca

SEQ ID NO: 52107 - DNA, 82 bp, Homo sapiens
cgagggcaactttggaggccccctggaaggctttaggatccagggcgtgatggtgggcatgggtcagaaggattcctatgtg

SEQ ID NO: 52108 - DNA, 100 bp, Homo sapiens
gccagccagccccctcctgccagaagtgcatcctctcacaccccagctgtgcatggtgcaagcaactggtggacccaagtggagagattgtggaactggc

SEQ ID NO: 52109 - DNA, 74 bp, Homo sapiens
ccaccttgatccagcggacttacgggagccaaggaggtcctgctgctggcccggtagacggaccaatggagggt

SEQ ID NO: 52110 - DNA, 82 bp, Homo sapiens
caccgacatctgcctgctcaaagcaaattgtggctactaatttgccccctgaagatcaagatggctctggggatgactctga

SEQ ID NO: 52111 - DNA, 75 bp, Homo sapiens
ttccctggtcgaacagttttttctaatggctattcaaggttccaaaagcatttgctgcaagtctcttggattata

SEQ ID NO: 52112 - DNA, 88 bp, Homo sapiens
ttttcaaggcttaatcgaagagatgatggactctgtgactacatgactaataaaatatggcagaaatgacaccatgcagtttccaagc

SEQ ID NO: 52113 - DNA, 74 bp, Homo sapiens
ggaggtggaggaagaagagagggaccggatcccaggccccgtttgcaaggtagtccatcctttctacgcttatt

SEQ ID NO: 52114 - DNA, 75 bp, Homo sapiens
tagataacgatgtagtcgtatcagtctttgaaacaaacatcagagttcttgggaggcaagtgaggcctatctggt

SEQ ID NO: 52115 - DNA, 99 bp, Homo sapiens
cttcacttccctcggtctgggcttctctgaggcggcgagagatggtcaggtctggagctcgaccgggccagggaacctcagaacctgttctggatccac

SEQ ID NO: 52116 - DNA, 100 bp, Homo sapiens
gtttcggttgcggcagtcgcgtcccgggagcgtcgctgcctggtgaacggagggtgtgaagacagagaatgaccacatcaacctgaaggtggccgggcag

SEQ ID NO: 52117 - DNA, 98 bp, Homo sapiens
gagactgcgggcccgtagctgggctctgcgagttctattgtttccaccctgctagctcttatggatggattggacagcagaggggaaattgtggtcat

SEQ ID NO: 52118 - DNA, 90 bp, Homo sapiens
aactgactttgcagccacggagagacttgtgcaccatggacaattttgctgagggagatttcactgtggcggattatgccttgttagaag

SEQ ID NO: 52119 - DNA, 75 bp, Homo sapiens
gtgacttcagcgtccacatcagcaggctccctggggaagggaatgcagggttgctggggctgggcccagaagcag

SEQ ID NO: 52120 - DNA, 51 bp, Homo sapiens
cttatagctccaataatggaatggatgacaaaagatgtgagtggatctatc

SEQ ID NO: 52121 - DNA, 75 bp, Homo sapiens
caaagaaagggaagctattgctgggattttgaggaggtcagcccaaggccaaccccactgtcactctgttcccgc

SEQ ID NO: 52122 - DNA, 89 bp, Homo sapiens
cctctatacactggtcagcggatccctgccttttgatggacagaacctcaaggtaaatgggcttgatactgtgagagtgcctatgtctg

SEQ ID NO: 52123 - DNA, 83 bp, Homo sapiens
tgaaccctgaagtcggtgtctgctgcgttcacggcaggattcggttaggccgagtgaccaagacaaaggacgggcatgaggtt

SEQ ID NO: 52124 - DNA, 94 bp, Homo sapiens
aagccgcccgccccccaccgccgccccctccggcgtgttcatgcccccggggagcatcagatccatgctgctgctgactcggagccccacagct

SEQ ID NO: 52125 - DNA, 75 bp, Homo sapiens
gctcaagcagtcctaccatgtcagccttcccagtagctgggaccacaggtatgtttctataaaacctgataaccg

SEQ ID NO: 52126 - DNA, 83 bp, Homo sapiens
ctgtttgcagacaaggtcccaaagacagcagacctgcctagagctggaacgttacctccagagcgagccctgctatgtttcag

SEQ ID NO: 52127 - DNA, 100 bp, Homo sapiens
gggaaggcgcctgaagaggacgaagaataagctttccgatttgttggcacccatctcagagcagatcaaagaagtgataacctttcgggagaagaaccga

SEQ ID NO: 52128 - DNA, 106 bp, Homo sapiens
tgctgcaggtcagcagtctccactggaaaaaaagatcttgagaacgtttgtctgcctgatgagagccacttgggttaagaaactacctgtgaatagtcatcatttc

SEQ ID NO: 52129 - DNA, 100 bp, Homo sapiens
ttacgagttctaccttttgagctgggaaaactgtttcagttgcagactttaggcctgaaagatcttggcatatacagaagggctgcatggaaaatggctg

SEQ ID NO: 52130 - DNA, 83 bp, Homo sapiens
tgacaagctcagccatgccagctctggtgcggtccggcctctttggcctacccccgttggctccgctgccccaggtcgatgag

SEQ ID NO: 52131 - DNA, 90 bp, Homo sapiens
ctggcccaacgatggcgagggcgccttccatggagacgcaggaaagaccacagcaagattctttcattcgtctcctcctagcctggggga

SEQ ID NO: 52132 - DNA, 80 bp, Homo sapiens
catgcttccagcctggataatgattgagccacctgtccagttgatattcactgatggactccaaagaatcattaactcct

SEQ ID NO: 52133 - DNA, 74 bp, Homo sapiens
cataaactttgagtgcaataaaaccgcagtgacaggatcacagaatgtgaattttgaacagatctgaaaagtta

SEQ ID NO: 52134 - DNA, 100 bp, Homo sapiens
tacagatccataccagggactggaatccaaaattgtcagatgcatttttaggtgaattggctgaaaaatgtgttggttctaaatggcttctaagaagttg

SEQ ID NO: 52135 - DNA, 100 bp, Homo sapiens
agacatgagatcatggtggccaaacccacagggaggtggggaagacagggctccagctaccacaggacgggctctgggtatagccgttccagtcagggac

SEQ ID NO: 52136 - DNA, 99 bp, Homo sapiens
gtgatcgcctttctccgccagcatcccctccgcttcattctacagcttgtggtctctgtggtacataccgagcatcaaatattaaggcacccggagaac

SEQ ID NO: 52137 - DNA, 100 bp, Homo sapiens
cgccaggccgctgaagacaagtcctggcgcgtccgctacatggtggctgacaagttcacagaggttatcaatactctggctgaccatcatcatcgtggga

SEQ ID NO: 52138 - DNA, 90 bp, Homo sapiens
aaaaagaaactgcatctaagctgtcagaaatggattcttttaacaatcaactaaagcagcagtgttgtactgctacttctataaacggac

SEQ ID NO: 52139 - DNA, 98 bp, Homo sapiens
tacaatgcttctcaagatgtggagctctccttgcagatcggtgacacagttcacatcctggagatgtacgagggtccagtccaggtgcagcagcaagg

SEQ ID NO: 52140 - DNA, 50 bp, Homo sapiens
ctctacgaaggcggctacttcaagagccaaatctcctcagccacctgttg

SEQ ID NO: 52141 - DNA, 90 bp, Homo sapiens
cgccgacgtcgaccagcagagactgattgtggcccagaagaaggtgacccgcccgctgctgctcaagtttggcaggaacgctggcaagtc

SEQ ID NO: 52142 - DNA, 75 bp, Homo sapiens
tgttcaggaaccaccagtgacagattttctggatatgccgcagaaggatccgtgccagaagcaagcctgtgagat

SEQ ID NO: 52143 - DNA, 100 bp, Homo sapiens
aggcctggtatggagaacgagaggaaagaagtcccttatcacggcgatcagtgggtgaccgcggctgcgagggactttgtcatccgtcctccaggatctg

SEQ ID NO: 52144 - DNA, 89 bp, Homo sapiens
ctccgggagtggttcgctacctttctgtttgtgcagcccatactgaatgaacacaccttctgtgctggcatgtctaagtaccaagaaga

SEQ ID NO: 52145 - DNA, 59 bp, Homo sapiens
tcggagctacatccagtgaataagactgtgccctgtccacggtgcctcctgcatgtcct

SEQ ID NO: 52146 - DNA, 101 bp, Homo sapiens
acgatcctttttggatctctgctcctatactttccagtaaaataccatgaagattttgaaaaaacaaaggggagaggctttactcccgtcgtggacgatcc

SEQ ID NO: 52147 - DNA, 87 bp, Homo sapiens
gccagccagtgacagcgtttcctcagggcacttgcgcccgattgaccgccagcgatacgacgagaacgaggacttgtcggacgtgga

SEQ ID NO: 52148 - DNA, 90 bp, Homo sapiens
gccacaatcgacagggacaccgccttcgccattggaggcaagtgaggcctatctggttggcctttttgaagacaccaacctgtgtgctat

SEQ ID NO: 52149 - DNA, 100 bp, Homo sapiens
cttgagtgctagaatgatgaggatcttaaccaccattatcttaactgaggcacccaaaatgcctccagtctgtggactttgaagctgtggcaatcacagt

SEQ ID NO: 52150 - DNA, 75 bp, Homo sapiens
actactaggatcacgcggcatgtattgagtcttacaggccccagaatcagaatgcctgctcctcggaaatgttca

SEQ ID NO: 52151 - DNA, 75 bp, Homo sapiens
agcgaggcagctgtactaggactgggaacggggagagtcacaccgggacagctcatgtcctatattcagctcttc

SEQ ID NO: 52152 - DNA, 90 bp, Homo sapiens
gatttgttaaggattccaagtaactcttatttgacatgtcgagggccagatggagaactccatgccaacctgctttgccctgtggatgtg

SEQ ID NO: 52153 - DNA, 100 bp, Homo sapiens
caggcccgggagcgcgatgtggagcgcttctttaagggctacgggaagatcctggaggtggatctgaagaacggattgcagagggaatggcatacatcga

SEQ ID NO: 52154 - DNA, 100 bp, Homo sapiens
tgttttccagagctttgccaagttcagcaaatttggagatgccgctgccatggcccagacactgcagatggagatcccgaacttcggcaacagcatcctg

SEQ ID NO: 52155 - DNA, 83 bp, Homo sapiens
tgatggagagctgaacattactcttccagaagaggtggcagtagagaagagcatcacagaagttgctcaggagctgacagagc

SEQ ID NO: 52156 - DNA, 90 bp, Homo sapiens
agattactaccgttacttggctgaggttgccgctggtgatgacaagaaagggaagtgaatcgtattaaacacagcaagcctggatctgtg

SEQ ID NO: 52157 - DNA, 90 bp, Homo sapiens
tcggggacggagagaacacgagcccatcaggtctgctgagaacagacccagtccctgaggaaggagaagatgttgctgccacgatcagtg

SEQ ID NO: 52158 - DNA, 87 bp, Homo sapiens
aaaaatggaccaacttctttggcaagtggacattttactggctcaaatgctgagtttgtgtgtgaacggacactgaaatattttcta

SEQ ID NO: 52159 - DNA, 90 bp, Homo sapiens
tatgaagaagagttttttcagaattcaaagctcctaaaacagatacattgataactccatttgtgggtttaatagaccacaacttccagg

SEQ ID NO: 52160 - DNA, 100 bp, Homo sapiens
ccgtgaccgagagcgtgaccgagagcgcgaatatcgtcatcgttagaagatcgaaaagtatcctccttgcacacctcccgagttcagaggcagatggtgg

SEQ ID NO: 52161 - DNA, 110 bp, Homo sapiens
gtggaataagtgctagtatcggacatgatcctcatcttttatacactcttagtgctgtccaggttgggagccacgtgtaccagtgtgtgttgatcttggcttgattcagt

SEQ ID NO: 52162 - DNA, 75 bp, Homo sapiens
tttgtagttgttggaccagaagcacctctggctgctgactgatccgtcaatcttgggtggaatgattgtgcgcat

SEQ ID NO: 52163 - DNA, 80 bp, Homo sapiens
gggcccagggttgttcacctgcccaaaaattgtgtcttgagacggagctgcaggaggtcttaggtgtggacgaggagact

SEQ ID NO: 52164 - DNA, 83 bp, Homo sapiens
ccaagccagagctgcagaacaagcttatcactgttcagctcctagacctagactatccgtctaagagggaagctacagggcaa

SEQ ID NO: 52165 - DNA, 100 bp, Homo sapiens
ccacaaatgtttttctgttttgcctgaatacatgatttaaacaagagatttccacagaaggtttatgctaaaactatcgatgggcaacagactattattg

SEQ ID NO: 52166 - DNA, 82 bp, Homo sapiens
cagttttgaaatcgacacacaaagaatagagttgagcctgtgggacacttcgggttcgtgctggccgtgggcagcgccgtct

SEQ ID NO: 52167 - DNA, 50 bp, Homo sapiens
cagggactgaaggtcacaccacagcgcgaatagccaggccagaagaagga

SEQ ID NO: 52168 - DNA, 83 bp, Homo sapiens
cagagtcagtgatttccataaattgaagcaaagaagctgaagtcttcagcagaaccctgacctaggtagggagtctcaatggc

SEQ ID NO: 52169 - DNA, 80 bp, Homo sapiens
tcggtagctaccgaaacgctctgaaaatcgagccggacccagatgatgtggtaccagttggccaaagaagagcctggtgt

SEQ ID NO: 52170 - DNA, 83 bp, Homo sapiens
ctggatctcctccatcctgctggccatgctctacgggacagatgagcagcaccagcagtaagagggctccgaccacggcaacc

SEQ ID NO: 52171 - DNA, 83 bp, Homo sapiens
ggaggcgcgggaggtgttcgagaacgaccccgagacgagctctcagcatggcggctcctctacgtcacttgcgtccaccaaag

SEQ ID NO: 52172 - DNA, 88 bp, Homo sapiens
ggccgaggcccggcggaggaggcggctccgggggaacccgccgccggatggcccactgcgtgaccttggttcagctgtccatttcctg

SEQ ID NO: 52173 - DNA, 59 bp, Homo sapiens
ggatgcagtcattccagcaccaacaggatccaaaaatatccagagaagttgtattttga

SEQ ID NO: 52174 - DNA, 118 bp, Homo sapiens
cgcacattgggcttgtgtacagccagcaaatcaatgaggtgcttgatcagctggcgaacctggattgtgctcatggacgatgccatggactgcttgatgtctttttcagatttcctct

SEQ ID NO: 52175 - DNA, 98 bp, Homo sapiens
ccctcactcttcatggtcactgatctttgatggaaaacagattccacagagaatggttgatggatggaatgctttcttctttgataaaacagaagaac

SEQ ID NO: 52176 - DNA, 100 bp, Homo sapiens
tttttcagagacaacgtgtggatgctttacttttagacctcagacaaaaatttccacccaaatttgtgcaggtgcagtgccatacttacactgggtactg

SEQ ID NO: 52177 - DNA, 75 bp, Homo sapiens
aggatttgcttttgtaacttttgatgatcatgatacagttgataaaattgttgggagagctgaatttgactgaaa

SEQ ID NO: 52178 - DNA, 100 bp, Homo sapiens
aaacgaggaggagataacgcggccttgggctctggtcttgaggaccggcccagctcaggctcctggggcagcggcgaccagagcagctcctcctttgacc

SEQ ID NO: 52179 - DNA, 75 bp, Homo sapiens
gtcactttgcctggacaggaggaaccctgctacttcacccccctcaacaccccacagagctatgaaaccctggag

SEQ ID NO: 52180 - DNA, 100 bp, Homo sapiens
gcagacatattccttgagagcatttgagaaaccccctcaggtacagacccaggctcttcgagactttgagaaggcttgtgcagacataagagccagttca

SEQ ID NO: 52181 - DNA, 100 bp, Homo sapiens
acacttactagaaatctagattaaccccaagaaaggcatcagggttctggagtggttgtttgagtgacacagcacaaggccttgatttcatcatgctttt

SEQ ID NO: 52182 - DNA, 76 bp, Homo sapiens
ttccacggccactccagtgccaacagccaattctacagatgagaagccggcttgcccaggagcgcagtgtgaagct

SEQ ID NO: 52183 - DNA, 82 bp, Homo sapiens
tggactacgtggcggcgctggaagggatgtcgtctcagcagtgctcgggcgcagggctggaccccaatggagaacaggtggt

SEQ ID NO: 52184 - DNA, 100 bp, Homo sapiens
ttgatgggtgacccggggagaggtacccggccagaggcgagtcctgcggagtggtagcgcgcacggcctgcggccccccgggaccctccaggtcaggcca

SEQ ID NO: 52185 - DNA, 96 bp, Homo sapiens
catgaagctaccggccagggttttctttactctggggtcccggctgccctgtggcctcgctcctcggagggaattgaatgatctggcacgggaccc

SEQ ID NO: 52186 - DNA, 98 bp, Homo sapiens
acttcgatggacctgttgaaaaaaatctgggaggttgaacttattaatcttgttgaagatgcatatagactaccggaaagaaatgacttcttcttgca

SEQ ID NO: 52187 - DNA, 75 bp, Homo sapiens
gtcacctactgtaccagagtttcaggttgaaaggattgttgacaaaaggaaaaataaaaaagggaagacagagta

SEQ ID NO: 52188 - DNA, 98 bp, Homo sapiens
atgacagatgtgtggtgcacccagaggccggggaccttgccaaccctcccaagaagttcagagaacccagtgacttgattgtaaaaatttacagagcg

SEQ ID NO: 52189 - DNA, 125 bp, Homo sapiens
gaacacttcaaaaggtttgaaaaatatgacaaatggaagcttcaggagctcaggcaatttgtaaaaagcaggactggaagcaaccccaaaattagacgcaacaaaatctggggaggacagaatgg

SEQ ID NO: 52190 - DNA, 75 bp, Homo sapiens
gttaatctgcagatgctgacttacctgaacttgaggtctacttccccagcaggacagcatcattctcctatatct

SEQ ID NO: 52191 - DNA, 74 bp, Homo sapiens
ctcagactactgtgtgtggattcagaaagtcaaaatgaagactattctcagcaatcagactgtcgacattccag

SEQ ID NO: 52192 - DNA, 73 bp, Homo sapiens
actggccaagcccggagaccttcaaccctgaaaggctcagcagcacatcaccacggaccgcactgggagccac

SEQ ID NO: 52193 - DNA, 82 bp, Homo sapiens
taaacttgaccaggtttccagtgaaataacttcaagaaacacaggatcaacttacagctactataagatgtactaaggggat

SEQ ID NO: 52194 - DNA, 89 bp, Homo sapiens
gaacaccgcgccttcggaagcccgttcggcctggaggagccgcagtgggtcccggacaaggagacgccctgctggcggacttggagtct

SEQ ID NO: 52195 - DNA, 100 bp, Homo sapiens
cgctttggaggggaaatggtacaaacgtcatcaaaattgctcctgagacagctgttaaattctgggcatatgaacaggtgaagctccaggcagctctgga

SEQ ID NO: 52196 - DNA, 50 bp, Homo sapiens
ggctctccaagttctaccagccctacgtgcaattaaaaactagcatttct

SEQ ID NO: 52197 - DNA, 98 bp, Homo sapiens
cgtgatcgactcggacacagaggacagcggcagcgacgagaacctggatcagggaatccctgtgctgatcgtggggcatcatatcctgtatgggaaaa

SEQ ID NO: 52198 - DNA, 100 bp, Homo sapiens
cggcccggcggctgctgctgctgctgacgctgctgctgcccggcctcggggaaggaaaatcacctcggcagtgtttgaaggaaggatactgcaactcttt

SEQ ID NO: 52199 - DNA, 51 bp, Homo sapiens
ttgctgcctctggtggggaagtggaaggtagaggaggtaagaaaggagcag

SEQ ID NO: 52200 - DNA, 100 bp, Homo sapiens
ctgccccgtccatggctgtgggctgcctcccccaagggcgcctcagtttccattaatgtcaacaccagccttgaagacatgaggagcaacaacgttgagg

SEQ ID NO: 52201 - DNA, 100 bp, Homo sapiens
agtttcacatccttgtctgtgaagctaaactcaatgctgctgtgtgggaagaagatttgtaaagaaaactcttaggttaatgttcgtgaagaaattgaag

SEQ ID NO: 52202 - DNA, 90 bp, Homo sapiens
gatgcagctcctgcttaccgtctactacctggtccagctgggtgaatttccagggccatccagagaagctgatcagactcaggaatccat

SEQ ID NO: 52203 - DNA, 75 bp, Homo sapiens
gctctattatttcaaagatgaagatgaaaccaagcccttgcctcaaggaataggttctcctagtgtctatcatgc

SEQ ID NO: 52204 - DNA, 96 bp, Homo sapiens
gaagcctggaaacgaggcactcagttggaagagtccagcaaggatatttgggatataccagtggcctttccttgttgtgtatggtgttctttctga

SEQ ID NO: 52205 - DNA, 99 bp, Homo sapiens
aaaaacttccagaacatctgggagaatatttaatggaaaatcgcttggttaaaacctgacacttttaacaggtccttgaatgggcaagagggcacatga

SEQ ID NO: 52206 - DNA, 100 bp, Homo sapiens
tttaaaaatcgccaaaaattacttggagcaaagggcagtcggcggagcttcgccaaggctggcgcagtcggggacggcaaaacagaacagaaaggcggag

SEQ ID NO: 52207 - DNA, 100 bp, Homo sapiens
cacatactatccgtttgttcaggaaccaccagtgacagagctctgaagagtgttgtactctatgttatcctggctccttttgacaatgaacagtcagatt

SEQ ID NO: 52208 - DNA, 82 bp, Homo sapiens
agctagaagccttcattgctgatcttgacaaaactttagcaagtcaaggaggttaaaaagactttgtcgggcttggaagtca

SEQ ID NO: 52209 - DNA, 87 bp, Homo sapiens
gactggaaccatctcagaagccatgcccctcaggctggaacttgccctgtctcctcgcagatgagtcaccaccaagtaagcgaagaa

SEQ ID NO: 52210 - DNA, 109 bp, Homo sapiens
gggagagaatttccgtctgatctatgacaccaagggtcgctttgctgtacatcgtattacacctgaggaggccaagaaaaagcttgtggtgaaggggggcaaaaaaaag

SEQ ID NO: 52211 - DNA, 100 bp, Homo sapiens
aagtcatgtacattctttgctgtctattcttcgctatggtgccttatgcaattgcatctatcctttgggctctaaatcacttaataacctaatttctcct

SEQ ID NO: 52212 - DNA, 90 bp, Homo sapiens
ctcagagatgcctgtaccgtgatgtgacgctggagaacctggcacttatgtcctccctgggacctatctggaagaggagctagtgaaggc

SEQ ID NO: 52213 - DNA, 100 bp, Homo sapiens
ttacaacgtaccctatgaacctgactctgtggtcatggagtgacagtgaggattcacatttgggttatttcaagatgagcttcctactgcccaagctgac

SEQ ID NO: 52214 - DNA, 83 bp, Homo sapiens
cccagagatcgcagcatatcaaagccattgaacacccagttcgaaccaatcagattccacgtcagattcctgaacagtcgttc

SEQ ID NO: 52215 - DNA, 74 bp, Homo sapiens
ctagacacaaacaggaacttacggaaaaagatgctacaattgcttcttcacccttctagacttcagaccacaga

SEQ ID NO: 52216 - DNA, 97 bp, Homo sapiens
ccttaaagatgctgaagctgttcagaagttcttccttgaagaaatacagcttggtgaagagttactagctcaaggcagtttgaagagaacacatgaa

SEQ ID NO: 52217 - DNA, 95 bp, Homo sapiens
ggcctggacaagcggaccccggcccaggcggccttcgagaaaatgcaggagaagcggttctctgtggacattgactcggagctggtggaggagct

SEQ ID NO: 52218 - DNA, 51 bp, Homo sapiens
gtctgcggccaagactccgtcctgcaaggaatttcttcacatggctcctgg

SEQ ID NO: 52219 - DNA, 95 bp, Homo sapiens
gtattttccaataccaacaggctctagccaacatgcagttacaacagcatacagcatttctcccaccagttcctggtccagaactttacacagaa

SEQ ID NO: 52220 - DNA, 113 bp, Homo sapiens
ggccggcccgctgcccgacgagcaggacttcatccaggcctacgaggaggtgcgcgagaagtacaaagggtgaggtggctttgaccccgggttgcccggccagcacgaccgag

SEQ ID NO: 52221 - DNA, 100 bp, Homo sapiens
caggcttgcacccagacacgacaccatgcatctcctcggcccctggctcctgctcctggggaacccttccaaaacacagaggagccatatgagaatatca

SEQ ID NO: 52222 - DNA, 98 bp, Homo sapiens
ggacaacagtagtagcagcagctgccttcttggacgcctttcagaaagtggctgacatggccaccaacacacgtgtccaatatcagatggaaatgatg

SEQ ID NO: 52223 - DNA, 147 bp, Homo sapiens
gtgccacccaccccatacctgctgcctgtggcatttattactttgaagtgaagattgtcagcaaaggaagagatgggagtgaaagctggacattgaagaagccaaaatctgtttccaagaaactaaagagtgtattccgagtaccag

SEQ ID NO: 52224 - DNA, 100 bp, Homo sapiens
tgccacgccgcccaggagacccctctgctgcaccacttcatgaaagacgagaatccaggacttgaatcgtatcttcccactttctgaggactactctgga

SEQ ID NO: 52225 - DNA, 100 bp, Homo sapiens
tcgctccggaaaggggacacctggttgctttcaagatgtacctgggaattacaccaagtgtgacctgtaacaattcaagcaaaaatgaattttccctgat

SEQ ID NO: 52226 - DNA, 98 bp, Homo sapiens
ggaagagggactggaaccatctcagaagccatgcccctcaggctggaacttgccctgtctcctcgcagatgaggtaaattgggatattcacaatgtat

SEQ ID NO: 52227 - DNA, 92 bp, Homo sapiens
tctgtcttcggtggactccttcggcagtccacccaccgccgccgcctcccaggctgttcgctgctatgaatctctaatcttaaaagctgaag

SEQ ID NO: 52228 - DNA, 105 bp, Homo sapiens
ctgaactcaagtcaccgtggagctccgccgccccgaaactttcaccgcgagcggctgccaaatggtgtcacttaccacactggaacatatcaagaccggttaaca

SEQ ID NO: 52229 - DNA, 100 bp, Homo sapiens
cagagcgagtctcggagaagatgtggtggcttccgtttgttggtggaggaggtggcaggcctcggcggggcataatcaacccatttcctgcttcaaaagg

SEQ ID NO: 52230 - DNA, 74 bp, Homo sapiens
aaccctccatcttcaacactctgaagaggtggacattgaagtggacctaattcggttttccttttaaaagcccc

SEQ ID NO: 52231 - DNA, 82 bp, Homo sapiens
tgcaacctgcagcacatcagcgaccgggagaacatagacgggcctgatatagaacaattgacagatgcatttggaagagata

SEQ ID NO: 52232 - DNA, 96 bp, Homo sapiens
aaaaaggattttggcttgctcaaggtcacacagcttgtatgaggcagtgctgcaatttaaagccaggtatccagctcacatagaagacattgacta

SEQ ID NO: 52233 - DNA, 100 bp, Homo sapiens
cagccagtgagaagaatgagtataaaggatgggttttaactacagacccagtctctgccaagagaattgacatctcaccaagtaccctgaggaagcatac

SEQ ID NO: 52234 - DNA, 75 bp, Homo sapiens
cctgcatgccccagtgacaagccagcaccagtccagaagcctccatccagtctttaccactcctgaaggccctaa

SEQ ID NO: 52235 - DNA, 100 bp, Homo sapiens
agcgactcggaagattcgaggcggcgggggacaagtcggcgccccagagcggacgagatcgccaaactgaggcagcaactacaacgcagtaaacagagta

SEQ ID NO: 52236 - DNA, 50 bp, Homo sapiens
ccttcaaagaccactccttcttttacctccctgcacttggctattcaaaa

SEQ ID NO: 52237 - DNA, 51 bp, Homo sapiens
gacgatggtgctggtgtcctggattatgtgtagagacgggggttcaccatg

SEQ ID NO: 52238 - DNA, 100 bp, Homo sapiens
tggaggccacatcaactcggcgccttgggaaccgctcgagcctaccaggtgaggcaatggaacaaggtttacgagactgctgtcgatccatacgaattgg

SEQ ID NO: 52239 - DNA, 100 bp, Homo sapiens
ggaaactcatcaggaaggaagcacaggggccactcggagtcgcccgagaatgctatacgtattggtcacgttggaatgcaaattgagcacatcattgaaa

SEQ ID NO: 52240 - DNA, 100 bp, Homo sapiens
gctggctctgctgctgccgccggcgaaggaggaggcgttgccgggtgctatggtctttagaattgggtcactggatttctgaggagccgttcgaactgtc

SEQ ID NO: 52241 - DNA, 83 bp, Homo sapiens
gggggagtcgggggagtcgtaaacaaccctgaagagaacagccaggcctgacaatgcagatcttcgtgaagactctgactggt

SEQ ID NO: 52242 - DNA, 82 bp, Homo sapiens
ggagtttgagcatcagagggcccctagggtctcgccaagctgcgtctggagatggagatggagcggatgagacagacccatt

SEQ ID NO: 52243 - DNA, 97 bp, Homo sapiens
aaaggtggcgtggctggcgattcgtgttcgtgagggccttttctggtctgccatcatggatgttctcgcagaagcaaatggcacctttgccttaaac

SEQ ID NO: 52244 - DNA, 101 bp, Homo sapiens
atttgaagcacatttgggaagccacattttgcagggtgtatcaaccattttaaatctgccctcaaaagcacagaacaaatcagacagcattttgctcacag

SEQ ID NO: 52245 - DNA, 80 bp, Homo sapiens
agccgcgcagccctcggagcacgaaagaagcttccggttctgaggtcctggaggtgccatttccctctctgttgaagcaa

SEQ ID NO: 52246 - DNA, 83 bp, Homo sapiens
gtttttctgccacttttgcaagggcgaggtcagccccaaactaccgagcgaaaagctgttgctatatgatacagtccagagtg

SEQ ID NO: 52247 - DNA, 75 bp, Homo sapiens
aactttttcacttactgcaggattttcagcttcagcaagcagtggtattggaaggaactggccctgggcctctgg

SEQ ID NO: 52248 - DNA, 101 bp, Homo sapiens
actgccgcctcgcctactcactctggagccgagaggagaggcagcagcatggcgagtgtcctgtcccgacgccttggaaagcggtccctcctgggagcccg

SEQ ID NO: 52249 - DNA, 75 bp, Homo sapiens
cctggaccaatgcatcttcccaccaccttaaaccactggaaccttttgaggatggctttgcaaatggggaagaaa

SEQ ID NO: 52250 - DNA, 80 bp, Homo sapiens
ggagaggcgagctcgcgatgagtggtctcggcaggctcttcgggaaggaaaatgggaagcttcccttcatggccatgctt

SEQ ID NO: 52251 - DNA, 90 bp, Homo sapiens
ggcgaccagatgaggcgaccaggtagaaaggggactgggggcggccagtgcccctctcagctgaggaggaaccgagagcggcgctggggc

SEQ ID NO: 52252 - DNA, 50 bp, Homo sapiens
attctgtaggtggtgcatccaaaacaggacgactgggtttggattcagaa

SEQ ID NO: 52253 - DNA, 83 bp, Homo sapiens
aaaatggacgagtaatcgcctgctttgattcattgaaagaagccagttgagggaagttctccatgaatgtacgtcacaatgat

SEQ ID NO: 52254 - DNA, 100 bp, Homo sapiens
cagatctagtgaatgctcagaaagacagtatgcaagatgagtcaagtcagacttcattacagaaaggaattgtcttagaagaaagaaggcaagccaccat

SEQ ID NO: 52255 - DNA, 80 bp, Homo sapiens
cgtacgacctcacgggaggaggtggatgaggcggccagcaccctgacgcggctgccgctctggatgagggggatattgcc

SEQ ID NO: 52256 - DNA, 100 bp, Homo sapiens
ctcggcggccgccatggcgtccaacatggaccgggagatgatcctggcggattttcaggtaaattcaactggaagggaactattaaagcaattctgaaac

SEQ ID NO: 52257 - DNA, 100 bp, Homo sapiens
gggtgacgctcgctccgctcgtcccgctcgtcatggcctacccgggatacggaggaggggtttttggattcaaagcataaaaaccattacaagatataca

SEQ ID NO: 52258 - DNA, 90 bp, Homo sapiens
catgatggagcaaaagaagagggtgtccatgattctgcaaagccctcatgttggcagataaattgaacatgactccagaagaagctgaaa

SEQ ID NO: 52259 - DNA, 100 bp, Homo sapiens
ctgcgacgagcgcctcgtgcccttcgatcacgccgagagcacgtacggcctctaccgggttaatgaactttctgaggaagaagaggaagatgaaaagctg

SEQ ID NO: 52260 - DNA, 75 bp, Homo sapiens
atatggatgtgattcgtgccctcctcatcttcctagagaagcgtttgcacaagggtcgagctgtgcagttttagc

SEQ ID NO: 52261 - DNA, 74 bp, Homo sapiens
gctgggagctggagcagctgtccaagaacgcagacttgtcagacggattctgctatgtagaattcgatgaagtg

SEQ ID NO: 52262 - DNA, 102 bp, Homo sapiens
gctgagcagagatggagctttcctcatggatgcaggctctccaagaaggatcaagaaggtggagaagaaaagaaatctgtgcaaaagaaaaaagtaaaagag

SEQ ID NO: 52263 - DNA, 48 bp, Homo sapiens
tcatatatcagtatatggaagagggtgtcaaattgagaaccaggtaga

SEQ ID NO: 52264 - DNA, 74 bp, Homo sapiens
tgaaatatggaaacgactcctcggccgagctgagtgaggcctcctcgaaagatgttgtcagacagctgtgtcaa

SEQ ID NO: 52265 - DNA, 82 bp, Homo sapiens
ttgactggaacatgctgaaattctgctggcctacatgcagttgctggaggactactcggagccgcagccctctatgttctac

SEQ ID NO: 52266 - DNA, 90 bp, Homo sapiens
cgtgacctggggatcgctacggaccttaaaatacccgcaacagccccttcgtcccaagtgaaataaacagcgttgttgctcacacaaagc

SEQ ID NO: 52267 - DNA, 98 bp, Homo sapiens
actggcaactgcagcccgaggacaagcggctggaacagattctccgtgtgaaggctgaagaagataaaattccactgctcgtcgtgggaaacaagtct

SEQ ID NO: 52268 - DNA, 75 bp, Homo sapiens
cagaactcattctcaccaataatagtctcgtggaactgggctggagcggctctgggctccggaatcgcccgcagc

SEQ ID NO: 52269 - DNA, 98 bp, Homo sapiens
aacattctggccaatcatgcagatcctaacagtgattcgcctttgccagtctcatctcgtgtctgctttgttaagttccatgatccagactcagcagt

SEQ ID NO: 52270 - DNA, 75 bp, Homo sapiens
ggacattgttgctagactgcagactcaggtggtggtgaagtttattaagaaggagaaggtcttggaggattgttg

SEQ ID NO: 52271 - DNA, 100 bp, Homo sapiens
tgcactttggggagcctaagtcctggtgacgcattgctggatgccggcgagtccatgaagcgcctggcagaggtgaaggactccctggacatcgaggtca

SEQ ID NO: 52272 - DNA, 83 bp, Homo sapiens
ccagtcccaacttcgggccccggccccgcgcgccccggcccggccccgcgaggtgatgtgtccaatctagatcccaacttctc

SEQ ID NO: 52273 - DNA, 90 bp, Homo sapiens
ccaagatggacctggaggagcgtaggatgcgccagattaatgagggagctgagcacataacgacttacacgttcaatactcacaaagccc

SEQ ID NO: 52274 - DNA, 83 bp, Homo sapiens
cgccatcctgcaccgccaccggcccgacctcataaaaatggctacaaacttcctagcacatgagaagatctggttcgacaagt

SEQ ID NO: 52275 - DNA, 75 bp, Homo sapiens
cacctgaccgtgcgaatcaatgatgcaaacttaaaactgattagagaactcagagaagagattgaaagactgaaa

SEQ ID NO: 52276 - DNA, 116 bp, Homo sapiens
agcgtgaggccggcatcgtctttccgtcctctgaggcgacggccgcggctgcacaggctttatcctgtggataaacgcagagtgaacgagtttggggagtcctacgaggagaaggc

SEQ ID NO: 52277 - DNA, 98 bp, Homo sapiens
cgacgtcgtgatccagaagtccagagctgaggactgcctgtttgcaggttattcagcttctcaaggctggaaaagcgaaggaagtttcctacaatgca

SEQ ID NO: 52278 - DNA, 51 bp, Homo sapiens
tcctgtacagcctgcagaactcaactgaccaaccacatccgggagtcgctg

SEQ ID NO: 52279 - DNA, 100 bp, Homo sapiens
ggagaatatttaatggaaaatcgcttggttaaaacctgacacttttaacagttatggagaaaacttgtatagatgcacttcctcttactatgaattcttc

SEQ ID NO: 52280 - DNA, 98 bp, Homo sapiens
agcatcccacggccacacctaccgaggccctggagggacaggaaagccagaaatggacttcgtgagactcgctcgactgttcgccagggcccgcccca

SEQ ID NO: 52281 - DNA, 97 bp, Homo sapiens
aatccgagaagagcagagcggagggagccccagacacgtggaatgcagtagccctctgggcctgggatattgtggttgataactgtgccatctgcag

SEQ ID NO: 52282 - DNA, 100 bp, Homo sapiens
ccgcctttcccctctgcacttaacggcacagccaacaagatgaacggagctttggatcactcagaccaaccagacccagatgccattaagatgtttgtcg

SEQ ID NO: 52283 - DNA, 75 bp, Homo sapiens
tttatacttgcttttgcttcagcgttctgtggttgtcaacaggtgttgcttttgaacagggcaaaatccttccta

SEQ ID NO: 52284 - DNA, 83 bp, Homo sapiens
ggttaggaggcacagggcgtcggacctgcacgagctgtctggttgtgaccgagattcccgacgagagagactgaggggaagag

SEQ ID NO: 52285 - DNA, 83 bp, Homo sapiens
cagagagggaagagattcagccagcacactcctcgcgagcaagtgcctacaccaactaatgttacaattgaatcctataacat

SEQ ID NO: 52286 - DNA, 100 bp, Homo sapiens
gcgaggggggcgccgcggcgggtggatgagagttggccccgatatccgctcaggggggggccctcagcctcttggccttgaacgggctgttcatcttgat

SEQ ID NO: 52287 - DNA, 100 bp, Homo sapiens
ttgctgccagtggtagcgctcgtctggcggagctggagagaactcgatgccaccgcaacggtattggcgaaccggcaggatgaaagtgagcagtccagaa

SEQ ID NO: 52288 - DNA, 85 bp, Homo sapiens
ccggcggcgctggaggagcgaggcagctgtactaggactgggaacgggtcctggctataagtcaccatggcacagcaagctgccg

SEQ ID NO: 52289 - DNA, 100 bp, Homo sapiens
gctgacggcgactgcgggaggccagggaggttcccctgaaggatgctaaggaatacgctgaatccataggtgccatcgtggttgagacaagtgcaaaaaa

SEQ ID NO: 52290 - DNA, 75 bp, Homo sapiens
ccagaatcagttgttggagaaaattaaagatgtgaatttggacattggctctggacatgacacatgtggagaaac

SEQ ID NO: 52291 - DNA, 100 bp, Homo sapiens
cgtagttcctattgattcatcagattttgcattggatattcgcatgcctggggttacacctaaacagcgttacagtgtttctgccacctctgtacaaaag

SEQ ID NO: 52292 - DNA, 101 bp, Homo sapiens
cagattcgcagtggtcgcttcttctccttgtgaagtaagaactctgctagagaggaaatggctgcttcatcatcatcctcctcagctggtggggtcagtgg

SEQ ID NO: 52293 - DNA, 83 bp, Homo sapiens
cgcagatagcagagccatccttggggtttttagaacttcagccataaaaatgggcagaattttccttgatcatatcggtggta

SEQ ID NO: 52294 - DNA, 143 bp, Homo sapiens
cgcgaactgggtgtgtctccacgggtcccgccatctcctgccggggctggaggcccgggccgggaaggaaggttcattaaagaagcggaagcagaatgaggctgccaaggaggcagagactcctcaggccaagaagataaagc

SEQ ID NO: 52295 - DNA, 76 bp, Homo sapiens
gtgaatctttagagcctgtggtggttgatctgactcacaatgactctgttgtggttcaaaccttgtactactcagc

SEQ ID NO: 52296 - DNA, 73 bp, Homo sapiens
ttctgccccttcagactgtacaaaggctgcttaaggcagtgcagtcccatgaagctgaggtcttgaagcagct

SEQ ID NO: 52297 - DNA, 100 bp, Homo sapiens
aagaacagatgagtgccaaaagtggatccaaacttctacagcaaaaacttacttcttttaggaaagacatacttgaaactacacaacaaaaagcttgctg

SEQ ID NO: 52298 - DNA, 74 bp, Homo sapiens
caacttggttcaatgggtagcctcaccatgaaatcacagcttcagatcactggcgtgcaatggaattgagtttt

SEQ ID NO: 52299 - DNA, 50 bp, Homo sapiens
acgtcttaacattgaacttgtgcaacagggccaatactcccatttggttt

SEQ ID NO: 52300 - DNA, 100 bp, Homo sapiens
gtagcaccttcacagtccaggcaagaagaggactgtcagaaggacgtagaaggcacggttttactgtgaggagcaaagattctttacctacgcattttac

SEQ ID NO: 52301 - DNA, 100 bp, Homo sapiens
gtttgctctgctcttccaacaccagtggaagatgatcacatcccagctcttcacagatggaatcacaaataaacttattggctgttacgtgggaaacacc

SEQ ID NO: 52302 - DNA, 99 bp, Homo sapiens
gaggatgatgatatttcttctaatattattggattttgttacgattatcttcatattttgaaacagatggaacgagaaatgaggcacaaactgaaaaca

SEQ ID NO: 52303 - DNA, 51 bp, Homo sapiens
taacggcaaaaaatggtggagcagtggctccagcaggaggaaatggtgcag

SEQ ID NO: 52304 - DNA, 100 bp, Homo sapiens
cagcaagctgcgccgcgccgcagtcggtcgtccgctggacaagcacgagggcgcgctcgagacgctcctgagatgtgaacgattggaagaacagctaaat

SEQ ID NO: 52305 - DNA, 83 bp, Homo sapiens
gttttcttagccctctacttttcaagacaccaagtgagaggccaaccagattgtgccttataacctgcctttgcctgggggag

SEQ ID NO: 52306 - DNA, 100 bp, Homo sapiens
tggggattgcccttattgctatgggggaggagattggtgcagagatggcattacgaacctttggccacttggtctcggtccagctcgacttccagctcag

SEQ ID NO: 52307 - DNA, 90 bp, Homo sapiens
ggtccttcatcaaccgcccgaaccagagccggaggcgggaggacgggctgccgcagggaacccgagcgtcatgttagggtgaagcagagg

SEQ ID NO: 52308 - DNA, 50 bp, Homo sapiens
aaccctgaatttataactgagtgaaaacagctactattgccactgaaagg

SEQ ID NO: 52309 - DNA, 83 bp, Homo sapiens
ccgcaccaggagcggaacaaaggagcaggagcggcttcgcttggagcaggagcgagagcaggaacagaagaaggccaatagcc

SEQ ID NO: 52310 - DNA, 101 bp, Homo sapiens
tttttactccgtttttgaccaaagacacctgaacattcctggagaaaacagtgatgtggtactctgtggatatccccttggacaaaactgtcgtcaataag

SEQ ID NO: 52311 - DNA, 98 bp, Homo sapiens
agatactggaagctctacgctactgccatgataataacataattcacagggatgtgaagctgaaggaagaggatcaccttccaagacaaaacagtctt

SEQ ID NO: 52312 - DNA, 90 bp, Homo sapiens
cttcccttttgcacctccgggagctgctgctgtccaatggatgggaccccaatgaaatgttcaagttcaatgaggagaactacggtgtga

SEQ ID NO: 52313 - DNA, 75 bp, Homo sapiens
cacccgctttgcagctcagggtgagcccaagggccatgctggataaggagctggctgcctctgtgaacatcctac

SEQ ID NO: 52314 - DNA, 83 bp, Homo sapiens
tggtgtcatccagccttagcaaaccagaggggctatctgatgggttagagtgcctttgagaagaaatcagtggatactggatt

SEQ ID NO: 52315 - DNA, 82 bp, Homo sapiens
tgcagccaagtgccggaaccgacgccgggagctgacagagaagctgcaggcgagcccaatgacgaaagtggagctaacgtgg

SEQ ID NO: 52316 - DNA, 97 bp, Homo sapiens
cagcagatcattcggtcttcaaccttcccacaaactgatgttctttcaagttcacttgaggcagaacacagttttcggctttgtgagaaaccttacc

SEQ ID NO: 52317 - DNA, 90 bp, Homo sapiens
gatgttatcatgagggaattccggtcagggtcaagtcgtgttctgatcactactgacttgttgttctctcctgcgctatggtggaaacct

SEQ ID NO: 52318 - DNA, 134 bp, Homo sapiens
cttggcaatatttttaaactacagaaaagatggaaactttggacttcaagaacttggattaaagaacttgacaggctaccctgtcatgatcaaggcctcagcaggtggtggtgggaaaggcatgcgcattgctt

SEQ ID NO: 52319 - DNA, 90 bp, Homo sapiens
gatcctttctattcaggataacacaagtcccttgccggaaaagaagatttttcagatcccctggatgcatgcggctagacatgggtggga

SEQ ID NO: 52320 - DNA, 95 bp, Homo sapiens
ctcaggaagtccttttattaccaggaggtgtcagctgtgatgcatgtttaaaaggaaattttcgaggtcgcagatataagtgtttaatttgctac

SEQ ID NO: 52321 - DNA, 51 bp, Homo sapiens
ctcaggctatacttttggagatgaaaaagtttgccaacatctgatctaaaa

SEQ ID NO: 52322 - DNA, 75 bp, Homo sapiens
gtggggttggtgtgattagcttcgcagtctggaaagctttaggagttcacagtgagagattcacccaggatacac

SEQ ID NO: 52323 - DNA, 83 bp, Homo sapiens
tagtgtctcccggacctcttcattgcctaaagaagctgaaggtgaagaggtccagtggtctgcagcaaacacaccccaattcc

SEQ ID NO: 52324 - DNA, 83 bp, Homo sapiens
tgaaaggaaccactcattcacttctagacgacaaaatgcaaaaaaggaggccaaagactttgaaatttggtgagcggcctcca

SEQ ID NO: 52325 - DNA, 82 bp, Homo sapiens
gttgcttctgcaggaagcctttttggtggcatggtcctcaagaagttcctaaaaggggcactatgaacgaagaggagcagtt

SEQ ID NO: 52326 - DNA, 100 bp, Homo sapiens
gatttggtcacctgaagcctcttgtcccttcattgtcatctgcttttgaggttgaattctcttacccgcccctgattccaggagatggacatgacagcca

SEQ ID NO: 52327 - DNA, 80 bp, Homo sapiens
cagacctgagcaggctgcaaaccaaagcaggtggaaattaaaggtggagcacatgattattacaatgttcttcccaataa

SEQ ID NO: 52328 - DNA, 100 bp, Homo sapiens
agtgacacccccagctacatccgaggaggttctaggacctgctacgaggtgttcaggcgcttcgtggaggttggccgggtggcctatgtctcctttggac

SEQ ID NO: 52329 - DNA, 73 bp, Homo sapiens
cgaattgggccttgtgacacaaggaggcaaagttatttggggtgttacagggtcttgattatttacataccaa

SEQ ID NO: 52330 - DNA, 100 bp, Homo sapiens
gggttgataatctaaatggatgtagctgactcattattgcggtatgtgaagacctacctgttgcccgacagatcctcccagggaaagcgcaagactggag

SEQ ID NO: 52331 - DNA, 98 bp, Homo sapiens
ccgattcctcctccttggtcgccgcgtccttggctggcgtagctgccatcagtcatgctcttaaacggggactgcccagagagcctgaagaaggaggc

SEQ ID NO: 52332 - DNA, 87 bp, Homo sapiens
actgatgagacaagatgtggtgatgacagaatcagcttttgccaggagtggtggctcacacctgtaatcccagctctgggaggccaa

SEQ ID NO: 52333 - DNA, 51 bp, Homo sapiens
taaacctgaaagtggtagcaaggagatgagtatgatgtatgtgccatttgt

SEQ ID NO: 52334 - DNA, 96 bp, Homo sapiens
gctccgcagcccgccgggagctctgaccgaggcgcctcgctggggcggggaccttgccttgcccggggtttgtctacagattttgagcgttcgaag

SEQ ID NO: 52335 - DNA, 82 bp, Homo sapiens
ggagccctcgcgacgcgcccggcccggagcccccagcgcagcggccgcggtgtctgcaattgaactccaaggtgcagaatgg

SEQ ID NO: 52336 - DNA, 82 bp, Homo sapiens
ttggaacaaaaaaaggagatgcctggcagccccgctctctgcagaaaaccagtgttctctggacatgaaaagcaaactgaat

SEQ ID NO: 52337 - DNA, 50 bp, Homo sapiens
accaagctaaagcccagtatctcagggagattctgctgtcagccgatcac

SEQ ID NO: 52338 - DNA, 98 bp, Homo sapiens
cagaagtgatcgctcagctggagaacgcggctaaagttctgatgatcaggaagcaccatacctcctgcgaaacctcagtgatcacacagtggccatca

SEQ ID NO: 52339 - DNA, 74 bp, Homo sapiens
cctggctccccatactagtcgccgtttttggctttcacccccaaccagtgaccaaagacttgaccactcaaagt

SEQ ID NO: 52340 - DNA, 90 bp, Homo sapiens
ccaagctctgctccacactgccaaccggccagaggacgagtgtggcctcagtgacaaccgaaagacccaagaaggggaaacggacaagcc

SEQ ID NO: 52341 - DNA, 75 bp, Homo sapiens
cttctgtgccatgttcactagtgaggattggcagccaccatttgcatgtgatgttgataaacttcattttacgcc

SEQ ID NO: 52342 - DNA, 98 bp, Homo sapiens
gactcctcacctccaggatgagcactgcagtgtcgtgacccttggggttttgcagaagatggctgtgccacccacgtatgccgatcttggcaaatctg

SEQ ID NO: 52343 - DNA, 112 bp, Homo sapiens
taactttcattgtcttttccgcccgcttcgatcgcctcgcgccggctgctctttccggggggatatgagactttctactcggaatatcctgagtgttgcgtggatgtaaaac

SEQ ID NO: 52344 - DNA, 100 bp, Homo sapiens
gcagctggctggcttcagtggaccagctattcaagatctctggcagtggaggaagtctctttaagaaaatagtttaaacaatttgttaaaaaattttccg

SEQ ID NO: 52345 - DNA, 75 bp, Homo sapiens
cagcaatgaccaaagcaacccctgctgtacggacagcatataaatttgaacgtcaaggtcgtgggaaataaaagg

SEQ ID NO: 52346 - DNA, 75 bp, Homo sapiens
gctgcaggcaccatggaccgagcccccacggagcagagttactggaggtgaactgtttgaagacatagtggcaag

SEQ ID NO: 52347 - DNA, 100 bp, Homo sapiens
agagggaacgcagctgaaagcgtgaactgtgcagctggctaagagtcttgggcaggctggtgaaattgagcctgaaacagaaggaatactaacagagtat

SEQ ID NO: 52348 - DNA, 100 bp, Homo sapiens
ggcgaggtagagttggggtcgcaggtggcttctggcacagcagcttaattgaccggaacctcattgattattttgttcccttcctccccctggaatacaa

SEQ ID NO: 52349 - DNA, 50 bp, Homo sapiens
atgaagagactccagaaaggggtggaggcctgaattttgatctatgttct

SEQ ID NO: 52350 - DNA, 100 bp, Homo sapiens
aacagtttcctgcgcgaccacagctatgcgaccgaagatatttggagtctgggagtgatccttttcatgttggtgtgtgggcagccgccctttcaagaag

SEQ ID NO: 52351 - DNA, 74 bp, Homo sapiens
gcctgtggaggagcaggcccagcacagcgacctggccctgtatgaacggtgccttagcgtttgtggacacttcg

SEQ ID NO: 52352 - DNA, 90 bp, Homo sapiens
actgactcatgggccctggcggtggacgagcaggaagctgcggctgagtcgaccaatgatgccttaggagccacctggaattggctgtac

SEQ ID NO: 52353 - DNA, 75 bp, Homo sapiens
aaggaggcctgttcataaaagatatcgaggatttagccggaagtgagaaagatcagtctaaagaaaaggagaaga

SEQ ID NO: 52354 - DNA, 100 bp, Homo sapiens
gtgatcgaggacataaggaactagtcacagtgttgctgcaacatagagctgacattaactgtcagattatgatgcatcattatcacagaagaaattcgtg

SEQ ID NO: 52355 - DNA, 100 bp, Homo sapiens
aacaagtttgcctccttcatagacaaggcatcagaacacaccatgatggctgtgacctaagaccctcaggaagccccggggtcatggcccagaagcaccc

SEQ ID NO: 52356 - DNA, 90 bp, Homo sapiens
attgagctcagaaaagtcaaagcctctgtggacatgtttgatcagcttttgcaagcagatggacttattttgagtcacttgccaaatggc

SEQ ID NO: 52357 - DNA, 75 bp, Homo sapiens
gagactaacatgtatgaaggtgtaggaagaatggactatgttcggagtgaactggagtttgcctatgagggacca

SEQ ID NO: 52358 - DNA, 83 bp, Homo sapiens
cgccaccccgcggtcatcggtcaccggtcgctctcaggaacagcagccttatgccagcctggaccatcttggaggcagtgtag

SEQ ID NO: 52359 - DNA, 98 bp, Homo sapiens
tactgagtggagtgagttggagaatctggtccttaaggatatgtcagatggaaaggcaccaatgcccagacctggctacaagccccaagagcccaatg

SEQ ID NO: 52360 - DNA, 82 bp, Homo sapiens
ccgagcgcaaggacagcgcgaggtccgcgcagcccagcgcagccatctgtttgcagacaaggtcccaaagacagcaggttgg

SEQ ID NO: 52361 - DNA, 50 bp, Homo sapiens
ccacctcctggtgaagaaagcaaacaatctatccatactaatggaaatgt

SEQ ID NO: 52362 - DNA, 100 bp, Homo sapiens
cttcaggagctccttagtaaaggacctgagggcactcgctttgctcctgtcagtacacactcccaaacagttaaacccagctctaattccaactctgcaa

SEQ ID NO: 52363 - DNA, 75 bp, Homo sapiens
cagattcgcagtggtcgcttcttctccttgctcctctccaccaaactgccatattgccgtgagaatgtgtgtctg

SEQ ID NO: 52364 - DNA, 100 bp, Homo sapiens
cccaagagccgccgggcccaccgttcaacttctgctgactctgcttcctcctccgatacttcccgcagtcggtttctggaaggggaggatggggaagaca

SEQ ID NO: 52365 - DNA, 98 bp, Homo sapiens
cggcgggaaagatcgccagcaacgtgcagaagaagctcacccgcgcgcaggagaagggggggccctcagcctcttggccttgaacgggctgttcatct

SEQ ID NO: 52366 - DNA, 101 bp, Homo sapiens
aaagaagccaaaattattgctatgacctgtactcatgctgccttaaaacgacatgacttggtcaagctaggtttcaaggtcctggagttgttaattcaccg

SEQ ID NO: 52367 - DNA, 117 bp, Homo sapiens
accaaaacttctattagcattcctaaacctggacaagacggggaaattgggcagagcggcttgggtaaatccaccttaatcaacaccctcttcaaatccaaaatcagccggaagtcg

SEQ ID NO: 52368 - DNA, 97 bp, Homo sapiens
cccagaattgttctccttatttttgtttctggaaaagttgtattaacagtgacgccataagggagaagatgaagaaaaattacatgtccaatccaag

SEQ ID NO: 52369 - DNA, 118 bp, Homo sapiens
gcaggatgtacccctgaaaccggatgctgagtaccctgaatgggcaaacctggtggacctgcagaagaagctggaggagctggaacttgacgagcagcagaagaagcggctggaagcc

SEQ ID NO: 52370 - DNA, 74 bp, Homo sapiens
ccgggactccctggaaacctagaaatgccttcaacaattggatccatggctttgacagaaggggcattgtgtca

SEQ ID NO: 52371 - DNA, 97 bp, Homo sapiens
ttatggcggttggctgctcctggctccagatgggaccgactttgacaacccagtgcaccggtctcgggtcattgaccacagtggcgcccgccttggt

SEQ ID NO: 52372 - DNA, 90 bp, Homo sapiens
cgctgggattgttgcggtgcgctggagccggaggatggtttgtttatcagcagagaaatgaagttcacaataactgtggcatcgagatat

SEQ ID NO: 52373 - DNA, 97 bp, Homo sapiens
cacagtgaagggcctgatggaagcggaagggaaaaggccgaggcatcagcgtgtgaagaccgcaaagacgatcccgagtacagttgtgaacagcatt

SEQ ID NO: 52374 - DNA, 74 bp, Homo sapiens
agagggcagcctcgccaaggcaaccacagccccagccaccacccgtaacacagtggaatgcagtagccctctgg

SEQ ID NO: 52375 - DNA, 74 bp, Homo sapiens
ggggacatctatttggcgatcaacatcaccaacggcgaggttcgggatgagtatcggcaggactacgatgctgg

SEQ ID NO: 52376 - DNA, 98 bp, Homo sapiens
gcgaaggagcggaagaatggcagtgctcaaactcaccgaccagcttctgaaccgaatctgaaattacggtccaggctaaagcagaaagtggccgaaag

SEQ ID NO: 52377 - DNA, 78 bp, Homo sapiens
gcgcgccttcggcattggccgccgcgatgtcagctcagtgctgtgcgggccagtgacagctggagtatcagccttgga

SEQ ID NO: 52378 - DNA, 75 bp, Homo sapiens
agaagcttgcagaaaaattggtgtacctcagggcggcgactggcggcgcgatggacctgaccgggctcctgctgg

SEQ ID NO: 52379 - DNA, 75 bp, Homo sapiens
agttttgctgaccttattcaccatgacttatcaggaagaggcagaaatccaggcagaacttgaacgtttggaaag

SEQ ID NO: 52380 - DNA, 90 bp, Homo sapiens
ccgctgtcgcccccgcagcaccgctactcggagggcgagcggacctccctggagaaggattctcagctggtagctggtgttgcattcaag

SEQ ID NO: 52381 - DNA, 75 bp, Homo sapiens
caggactgtgcaggggactctgtcacagtcaagaacccagtatggaagggagaagtgaaaagttgaagaaaaatc

SEQ ID NO: 52382 - DNA, 87 bp, Homo sapiens
gaaatgagactccctcagatccagtgataattgacagcttgctaatctggacctgaactctgaaaaacagagtggaggagcaagtac

SEQ ID NO: 52383 - DNA, 100 bp, Homo sapiens
cgaaggacgggggaggaattgctccgaccggagaccccaccacccacgttacctacttcaggtgcttctctcctaccagaggtgcaaggagtgatcctag

SEQ ID NO: 52384 - DNA, 75 bp, Homo sapiens
gctgggattacaggcacgcgccaccactcccagctggattataaagttggctggaagaaactgaaggaagtattt

SEQ ID NO: 52385 - DNA, 83 bp, Homo sapiens
ttcaggagtttcctgtctgtcagactgaaatcgccaagagattgaatacgatttgtgcacaagtcatcccatttctgtctcag

SEQ ID NO: 52386 - DNA, 82 bp, Homo sapiens
ctggctgcgccacagaaagcctgagcttgagcggcccatcaagacaatgcagatcttcgtgaagactctgactggtaagacc

SEQ ID NO: 52387 - DNA, 100 bp, Homo sapiens
ctcacagcactagcagcgatcgggcccaggaaaaagaggaaagtggactgtccggggccgggctcaggagcagaggtgctggagaatctggtaaaagcac

SEQ ID NO: 52388 - DNA, 100 bp, Homo sapiens
gctgctccctggccggtcatttcaggtgtgggccatgtttgaggattgccccagcattcagttctatgagtaataaatatccacaggctgttttcttgga

SEQ ID NO: 52389 - DNA, 83 bp, Homo sapiens
ctgctcttccctgagagtgaactttccatccggataggtagagctgggcttctttcaggtttggtgcacctcgatttggagga

SEQ ID NO: 52390 - DNA, 98 bp, Homo sapiens
ttgattactcacagtttcaggaatctgatgatgcaggccatgaccacaatgtttcttcagtagccatcatgcccaatggagatcatatagtgtctgcc

SEQ ID NO: 52391 - DNA, 75 bp, Homo sapiens
catgttcctgagcttgagatgctaggaagacttggaaaagaaacatttgtttgcataggaattcatgaaggcgac

SEQ ID NO: 52392 - DNA, 51 bp, Homo sapiens
cgggaaggggagcgtggggccgctgtgaattttgaagattgcaccggtcga

SEQ ID NO: 52393 - DNA, 89 bp, Homo sapiens
cccttctcatggcaatcgagttgagtacttggatagacttatacctcaggttatttggaaatagcggtgcttgcagcgcttgcggacag

SEQ ID NO: 52394 - DNA, 50 bp, Homo sapiens
gccgatcacctgggacttagttggacagtggtgaagcagcgcttgcagat

SEQ ID NO: 52395 - DNA, 100 bp, Homo sapiens
gcgctaggtggcatctcctctcacggatgcctcgcctgccacagtgactcaggtcactcaaggaactatccgaccagctgccaacttcgatgctataaga

SEQ ID NO: 52396 - DNA, 74 bp, Homo sapiens
ttctcctgtcaaggctgaggcggcaaaggaatcgtctaagtctcagggagatgtcctttgcttctcagatgtaa

SEQ ID NO: 52397 - DNA, 75 bp, Homo sapiens
cacctctacctgtggctctttctgctgggcctgcccttcaccctctacatgggctcattgtcatccccaagccag

SEQ ID NO: 52398 - DNA, 89 bp, Homo sapiens
ccacaatcaatacgattggaaccagcacaagtacaagaggagatgaccgccgggttctgctatggcacatggaacaagccatccactcc

SEQ ID NO: 52399 - DNA, 75 bp, Homo sapiens
cggcggcagggcaagctgtgcgacgtgaccctcaaggaacttagtgatttggcccgtgaccctccagcacaatgt

SEQ ID NO: 52400 - DNA, 82 bp, Homo sapiens
cttgtgggagcaaaaccaacgcctggctcggagcagcagcctctgaggctctacagattctcccctgcccctggagaaggag

SEQ ID NO: 52401 - DNA, 90 bp, Homo sapiens
gagagatgaaagacgtcgaggggacgattggaatgacagcccccaagacgtgctcccaggacgagtttcgctgccacgatgggaagtgca

SEQ ID NO: 52402 - DNA, 51 bp, Homo sapiens
cgccggcgtcgccgccatggacctagatcccagattacaggaatgcagtaa

SEQ ID NO: 52403 - DNA, 74 bp, Homo sapiens
ccgcaggcagtcccgcggcagcaggatcacaggaaacccagcgtttgctggcagaaccagttcctggcatcaaa

SEQ ID NO: 52404 - DNA, 101 bp, Homo sapiens
ggatgttaaaaatcaacaccaggactacagtaaggctgaaatcattgaagtgcttggagtgcagaactgaaagaggtcaaagccatcttggacgcagcgtc

SEQ ID NO: 52405 - DNA, 76 bp, Homo sapiens
tacctgtttcggaatgcttttgtgctgctcacagtcaccgctgtcattgtggcaaccatgtccaagggacctgcag

SEQ ID NO: 52406 - DNA, 96 bp, Homo sapiens
aggagttaaagttacttacactgtgcagtatttcatacacttggattggacttaatcttaaacctctggagttcaagaccttttaaaaagggctaa

SEQ ID NO: 52407 - DNA, 51 bp, Homo sapiens
gggagctcaaagtgtgccttctcggggttcgatacaagaggctgttttcct

SEQ ID NO: 52408 - DNA, 83 bp, Homo sapiens
gaaactttggggcccgcgccgcgcgccggcggcaccatgaagtcagcggaggaagctgtttgcagacaaggtcccaaagacag

SEQ ID NO: 52409 - DNA, 73 bp, Homo sapiens
acctgagcaacccctctgcaggaaccgcagtggttagcaggaagaagatgagccttaagtctgaacgccgagg

SEQ ID NO: 52410 - DNA, 74 bp, Homo sapiens
cctggtccccgcgtggagtctttactcaaaacagctcagcgacatgtcctcacctacatggaggatgcagtgtg

SEQ ID NO: 52411 - DNA, 82 bp, Homo sapiens
gactagaaactgctggcagaactacctggtcaattcaccgtaccatgtggactccccagtgtggagcagaatctgaggactg

SEQ ID NO: 52412 - DNA, 100 bp, Homo sapiens
gatggtgacgtgcagtcggactctgtggcccaagagacgagttgtactgctgtcacaggaaatggacgctggattacaagcatggcagctcaggcagcag

SEQ ID NO: 52413 - DNA, 98 bp, Homo sapiens
acctcatcagccctctgccctcccccacgggaaccatcagagacattttaaatcctaaggatgtgatcacaactcgctttgagaattcctatcctagc

SEQ ID NO: 52414 - DNA, 101 bp, Homo sapiens
cttattttgtgcttgaacttgatcaaacagggtgtttgtgaaccgaagtttagcaatggaaaagataaagtgttttggttttgatatggattatacccttg

SEQ ID NO: 52415 - DNA, 109 bp, Homo sapiens
aagacatggcaacaggaaagtctaagggatatggctttgtctcctttttcaacaaatggctttggacatcagacagtgcaggagaagaatgtgatgcggcagaaggggc

SEQ ID NO: 52416 - DNA, 97 bp, Homo sapiens
gaaagctggaagaattcctgaacaaattttaggaaaagttagcattgctcacaagctccgggtggataaggcagctgctgcagcagcggcactacaa

SEQ ID NO: 52417 - DNA, 82 bp, Homo sapiens
agcagcccgccccgcccggcagcgagcggcgccttccaactccggaacactctgctccagccaaggtggtgagggcagctgt

SEQ ID NO: 52418 - DNA, 100 bp, Homo sapiens
gagaagaatgaacagacctagtgggcgttgcctttagacccaggctgaaggtgatgtggccgccctcaaccgacgcatccagctcgttgaggaggagttg

SEQ ID NO: 52419 - DNA, 90 bp, Homo sapiens
catcaaagatccctcaaacctggatgtagttgggaaggatgttttcaaacagtctcaggaccctgatgctcccataagacagaaaatgcc

SEQ ID NO: 52420 - DNA, 82 bp, Homo sapiens
gtcatgatggaccccaactccacccagcgctaccggctggaagccctcaagtcacctgtgtgccgcccgcctgtggtcctgg

SEQ ID NO: 52421 - DNA, 82 bp, Homo sapiens
cctcagcgactcttctgacctccgcgcgacgtacccgccgccgccgttggctggaggttgggcccgaaggcatcctgcagaa

SEQ ID NO: 52422 - DNA, 50 bp, Homo sapiens
aagatgttccgggctctgatgccagagagtggacccttggccactgttca

SEQ ID NO: 52423 - DNA, 100 bp, Homo sapiens
gacgccgccagcgctgaaggcgcagcccggaggccgcgcgggccggcagttaaccatcttcaacactcaggcgcaaatagccattggtggaaaggacaaa

SEQ ID NO: 52424 - DNA, 50 bp, Homo sapiens
gtgcagtcctgttggaatttatgttcagcccacaagagcttactggtgaa

SEQ ID NO: 52425 - DNA, 98 bp, Homo sapiens
gaagcacgagcagatcctggtcctcgatccgcccacagacctcaaattcaaaggcgggcgctaatattgacacctgctcagaagaccagaggaccccg

SEQ ID NO: 52426 - DNA, 100 bp, Homo sapiens
aatctgtacactctctgctattgtctgctgcatccaaatcttctccctggacctcgtgcatacgaggcgggatgtggtaacagagaccaagactgtggag

SEQ ID NO: 52427 - DNA, 100 bp, Homo sapiens
ccaccgccagctggaaccctggggactacgacgtccctcaaaccttgcttctaggagataaaaagacttaattcagtgcacaaatgagatgaatgtgaac

SEQ ID NO: 52428 - DNA, 99 bp, Homo sapiens
cgagtggatcggggacggagagaacacgagcccatcaggacgctgacttggctcgtttgctgagctccggctccttcggaaacctggagaacctcagtt

SEQ ID NO: 52429 - DNA, 82 bp, Homo sapiens
cgcggagtatacaccatgagcaaagctcaccctcccgagttgaaaaagaaatggctagtgatgagctgaaagagatgcggaa

SEQ ID NO: 52430 - DNA, 87 bp, Homo sapiens
ggcatcgatctctccatcccttccgaggcccgacttcgtcttctcacaagactttcaggattaagcgattcctggccaagaaacaaa

SEQ ID NO: 52431 - DNA, 51 bp, Homo sapiens
tctccgcggcagccgagcgtcgttgattatggaagattcccacaagagtac

SEQ ID NO: 52432 - DNA, 82 bp, Homo sapiens
ggcgaggcagggccagcagcaggcgggagaacaccttccaccatgaccacctcagcaagttcccacttaaataaaggcatca

SEQ ID NO: 52433 - DNA, 75 bp, Homo sapiens
agatttgcataaagccaacattcgcaccgtcatggtcacagggactcagaatattatgactatggacatggggag

SEQ ID NO: 52434 - DNA, 98 bp, Homo sapiens
atgtacttagaaagcttatcttagagccacactgagattggaacccgcaaaatatgccaggttgtttttgagcacgttcactctcgcagtgtcagctg

SEQ ID NO: 52435 - DNA, 50 bp, Homo sapiens
gccgcgcacgctacagtacaagggatcgcccggagcccacacccgtcctc

SEQ ID NO: 52436 - DNA, 82 bp, Homo sapiens
tgatgtgaaaaataccacgacaaaaccaccctagttctccttactatgacaatgtccgccccctctcttaccctgattcgga

SEQ ID NO: 52437 - DNA, 75 bp, Homo sapiens
gacgctttgagccgccccgaactaagcagggcggtcgggggtactaggttttgacaagcttgcatcatgcgtgag

SEQ ID NO: 52438 - DNA, 97 bp, Homo sapiens
gcggaagcatccatggcggagggcggcagcccagacgggcgggcagggccgggctccgcaggatgctgtgaccatctgtaccctgggaattgggacg

SEQ ID NO: 52439 - DNA, 75 bp, Homo sapiens
ggaacctcggcctaatgaagaatgtctacagatacttgggaatgcagagagagaaaaggaacagttccgtaagct

SEQ ID NO: 52440 - DNA, 100 bp, Homo sapiens
aaaagaagccgattccagttcctgtatgatgttcaggtcgacaaagatgctgaattagtggcccaatggaactattgtactctaagtcaggaaatattaa

SEQ ID NO: 52441 - DNA, 83 bp, Homo sapiens
gattgaggacaagaccatcgagctcatgcggaaatgagaaagcagagggagttctatcacaaattgggcatggaggtgccggg

SEQ ID NO: 52442 - DNA, 75 bp, Homo sapiens
cccgccctctcttcctgcagcctgggaacttcagccggctggagtacggattcaacctggtcatgtcccaccccc

SEQ ID NO: 52443 - DNA, 90 bp, Homo sapiens
tgccacaggaggctgtgcgggccccgctccgcttcgaatggatgagaagaggacagctgacatgtgctgctcggggatgtgggaagagac

SEQ ID NO: 52444 - DNA, 74 bp, Homo sapiens
aaaggactaactgcagtcagcaacaatgcaggttcaaacttctcatggaacatctggaccctgatgaagaagaa

SEQ ID NO: 52445 - DNA, 75 bp, Homo sapiens
cttcagtggaccactctgcaatgaccgcgacgctctccgaaagcctcgcctccagaagcccatcacggggcactt

SEQ ID NO: 52446 - DNA, 83 bp, Homo sapiens
gatcggcaggcgagattgcctgacccaggcctgctcggccctcacaggatcgacgacatcgcggatggcgccgtgaagccccc

SEQ ID NO: 52447 - DNA, 101 bp, Homo sapiens
gacctgcgtggtgcactacaccgatccatcatgttacacaaaatggaggactatataaaagaccgtttaatgaagcttttgaagaaacaccaatgctggtt

SEQ ID NO: 52448 - DNA, 90 bp, Homo sapiens
ccataagttttgtaacacagaagatgaggagactatgtatctgcggaggtaattaataatgcttgtgctactcaagccatagtgagtgtg

SEQ ID NO: 52449 - DNA, 100 bp, Homo sapiens
ccagaactctgtcaaatgaagaacactttcaagaaccaggatggtaagcggatgtttggcacctattttcgtgttggtttttatggaaccaagttcgggg

SEQ ID NO: 52450 - DNA, 100 bp, Homo sapiens
ttgaaagcgagcgcgggtgtcgagctctgctgtgactgcggaggaagctgcgagcattttccctgaagatgagatcccagagaaggcctgcaggcgcctg

SEQ ID NO: 52451 - DNA, 75 bp, Homo sapiens
gccaatcacattttgcacaagggcagtcaccatgaaagacatatctgaagagatggattaagaatgctttggatt

SEQ ID NO: 52452 - DNA, 100 bp, Homo sapiens
gctgattgtgctgagccagctcaccattctcattatttttagatatcgaggatacccagagcttaaagttgatggagaaccttgtgacctgtctttgaat

SEQ ID NO: 52453 - DNA, 99 bp, Homo sapiens
gttcatcaggaacgtcgcggacgccaccagagtaatcaagtcagaggattatatgacttttatctgcctagagaagaactatggatctacaacatggag

SEQ ID NO: 52454 - DNA, 98 bp, Homo sapiens
gcagctcaatcgcggagcaactagccgggcgtctgcgggagccgagcgtggtgaggagctgcgggcgtctttggagacacagcgtgctcagagcagtc

SEQ ID NO: 52455 - DNA, 99 bp, Homo sapiens
cccccacgactgctaccactactgtttcaagggtggagagcatcactgtgtatgaagagatcctgaggcaggctcgttatcggctgcgacacggagctg

SEQ ID NO: 52456 - DNA, 90 bp, Homo sapiens
agggagtgcaagcttagagcgtctggccaagaatcagaggaagtgggtaaattcaactggaagggaactattaaagcaattctgaaacag

SEQ ID NO: 52457 - DNA, 75 bp, Homo sapiens
ttcgcagtggtcgcttcttctccttggaagccatgcagtgtgtggaagagctgaatgcccagggcctactacatg

SEQ ID NO: 52458 - DNA, 75 bp, Homo sapiens
cgcagcgaggagaagatctcggactcggagagtgctccaagctcccgaagccgaagtctcactttgctcccacat

SEQ ID NO: 52459 - DNA, 90 bp, Homo sapiens
gaggcggaaagaagaaatccgaggaccggcgacgcctagaacaggcgtcacctcctcctgtcgcctggccctcgccatgcagaccccgcg

SEQ ID NO: 52460 - DNA, 100 bp, Homo sapiens
gcgacgtgggcaagggcgagatcctggagagcctgcaggacggcgcggcagagtccccgtacgcctacagtaacggtgtctcgtgcctctgctggaccct

SEQ ID NO: 52461 - DNA, 100 bp, Homo sapiens
gcagggctgaagcggcggcggcggtggggactgcacgtagcccggcgctcggcatggctctcctggtgctcggttcttgggtgtctctggggagtccctg

SEQ ID NO: 52462 - DNA, 111 bp, Homo sapiens
ggcctccttctgggatacgacccctatcaggaaatattcgagtggcaactgcagtaaagtccggagaagaagctggtgagaaagagacaggagccagatgctgaatgacgg

SEQ ID NO: 52463 - DNA, 100 bp, Homo sapiens
ggagaaggagaacgacggctactttcggaagttacagaatgtctgaaggggacagtgtgggagaatccgtccatgggaaaccttcggtggtgtacagatt

SEQ ID NO: 52464 - DNA, 90 bp, Homo sapiens
tttttgagagtccagtatatttggaggaagctgcagatgtactttgtattttacaagcagacttcccaagtaagaagcggaagaggagcc

SEQ ID NO: 52465 - DNA, 98 bp, Homo sapiens
tatcctgcaactccagtcaatatcccacttaaatcattccagagatcgggaagtaaacagtccactaaccctgccgataactatcatctggcccggag

SEQ ID NO: 52466 - DNA, 101 bp, Homo sapiens
ggcggggcagctgccaggaacgagggtagcagatcatggaagggaagtggttgctgtgtatgttactggtgcttggaactgctattgttgaggctcatgat

SEQ ID NO: 52467 - DNA, 82 bp, Homo sapiens
ggcctgggcgctccggtggcggcggagctgagctgactgctgcccactttggaggaggcggtgggctccttcacaagaagac

SEQ ID NO: 52468 - DNA, 98 bp, Homo sapiens
tgggtgtgccctatgaacagtggaaggtcctcaacgagatcgatgcgcacgtggtgaggtgtgtatggcttcccgtggactcagcctcttccccgagt

SEQ ID NO: 52469 - DNA, 100 bp, Homo sapiens
ccggaggacaggaccgcgcgactggccggccgatccctgggccggccgcgggagcagagtatgtatgtaactgctctgtggttggaagcctgaatgtgaa

SEQ ID NO: 52470 - DNA, 101 bp, Homo sapiens
tcacgctcctacgggacgaggagagggaggtgaatccgtggcagagaaggttgatgctgctgaattgcttcgtttatacttaaactatgaccttttagaag

SEQ ID NO: 52471 - DNA, 50 bp, Homo sapiens
ctgttgctgctagtggacatgaggtgccgtgagcgatgtggagatgcagg

SEQ ID NO: 52472 - DNA, 101 bp, Homo sapiens
ggagagagtcaatggcctgcttgacgtgaactccaaagtcctcctgaatgcaagttctagccggtttttcctacaaggaatccagttgaatacaattcttc

SEQ ID NO: 52473 - DNA, 82 bp, Homo sapiens
agctcatgcagtggtacaaggaccagaagaaactgcaccggaaatgtgcctaccagaaagtttcctacactactgaggttta

SEQ ID NO: 52474 - DNA, 100 bp, Homo sapiens
ctgccgacgctcaaggatggtgatttcatcttgaccgaaagttaagtgggcagaccaacatccacctcagcaaaaacttcttcctgacgaatcgcgccag

SEQ ID NO: 52475 - DNA, 100 bp, Homo sapiens
aggacctggaaaaattacatggacgcactctctgagatattttcgcctgggcgtttcggatcccatccatggggtccctgaatttatttcggttgggtac

SEQ ID NO: 52476 - DNA, 96 bp, Homo sapiens
gccctctccagaaaaacagtagcagtttcctggtcctgttcctcatcaacaccaaggatctgcaccttatgtttgatcatcggccaaggtcctggc

SEQ ID NO: 52477 - DNA, 83 bp, Homo sapiens
gaatggggttgtgatggcccaggttcttcaaaagataaagaatcttcaagagggagacatagggaaaaggaagacataaaaat

SEQ ID NO: 52478 - DNA, 75 bp, Homo sapiens
caagccaaaatcacagctttgagtgagaaacagtgctttctcctgctcaagacagccacacgaacacggatctcc

SEQ ID NO: 52479 - DNA, 100 bp, Homo sapiens
ggattccatcaaatatggtccagagtttgcagatgcatattcaagcttagcttcgttattggctgagcagtctctggctgatgaacttgctcttgtggat

SEQ ID NO: 52480 - DNA, 75 bp, Homo sapiens
gaaccggcacctgcacacctggatccaggataacggaggctgggtagcctttccagtaaatatatgactcaggga

SEQ ID NO: 52481 - DNA, 90 bp, Homo sapiens
gataatgtggtgaattgcttataccatggagaaggagcccagtatcagatgtagaaggtggtgatggactgcagctcagaaaggaacata

SEQ ID NO: 52482 - DNA, 82 bp, Homo sapiens
cgcgagcacagagcctcgcctttgccgatccgccgcccgtccacacccgccgccaggttctccttactatgacaatgtccgc

SEQ ID NO: 52483 - DNA, 90 bp, Homo sapiens
atctccatttcatgatattccaatttatgcagataaggtcacagtcaaagtgcctcagaagaactcataagaatcatgcaagcttcctcc

SEQ ID NO: 52484 - DNA, 95 bp, Homo sapiens
gtgcgcccggaggattctgcagcacgtgcagtgggctcgggatgagtttgaaggcctcttcaagcagccagcagaaaatgtcaaccagtacctca

SEQ ID NO: 52485 - DNA, 90 bp, Homo sapiens
tcaccatgtggtttggggagtctgaggccaatgtcagagaaatctttgacaaggtatttcccagccacttcacacagcagcggaccaaag

SEQ ID NO: 52486 - DNA, 100 bp, Homo sapiens
tttaaacatggaaaagacactgaaaggcctcaacaggtctcagcatcagaggagcccaggaggaggaccctcccgatccccagctaatgagactggacaa

SEQ ID NO: 52487 - DNA, 80 bp, Homo sapiens
aaagacgctcgtcaccaggacccaaggaaccagtggcagaaacagagtgtgttttcttgatgatgaagtgacagtaccac

SEQ ID NO: 52488 - DNA, 100 bp, Homo sapiens
ctcgggggcggcggccacgccaaggacgggtgttcagtgtgaggtggagctgatagagtccatagaggacctgagacaacctgggaagttcctgagactc

SEQ ID NO: 52489 - DNA, 100 bp, Homo sapiens
ctcttttgtctgcccctattgtaagtgcagatggaacacaacagtgcaggccaaggccccctgcccatggaggtgtgctgcagacagcagcagcagcagc

SEQ ID NO: 52490 - DNA, 100 bp, Homo sapiens
ataaaactccagcgagatccgggccgtgaacgaaagcagtgacggaggagcttgtaccaccgaaagcaaggagatggccaccaaggagaagctgcagtgt

SEQ ID NO: 52491 - DNA, 90 bp, Homo sapiens
cccggacgccattgccgacggtgaacgagcgggacacggaaaatgcagctatttttgctatgataatcctgctgcccttcagactcaagt

SEQ ID NO: 52492 - DNA, 75 bp, Homo sapiens
ggcccacatcgacagggacgtcctcattgtcctcggtgaccaaaagccagccccactgtgagttgaactctttcg

SEQ ID NO: 52493 - DNA, 100 bp, Homo sapiens
cgataattcaaaaacactatcccagggagtgcaagcttagagcgtctggccaagaatcagaggaagtgggatctatattggaaggcgtctgacaacctcc

SEQ ID NO: 52494 - DNA, 51 bp, Homo sapiens
ttcacagacatgcggaatttgagtgtggcaaaggagcagagaactttgaca

SEQ ID NO: 52495 - DNA, 98 bp, Homo sapiens
caggagacatgcggtctggatcggattttggaggcattgaagctgctgctgagcccgggaggcgccaagcccatctttgtgtgcttgcatccaactgt

SEQ ID NO: 52496 - DNA, 74 bp, Homo sapiens
gcaaggaggtgaccctgaacctctacgacacggccgaacaccttccaccatgaccacctcagcaagttcccact

SEQ ID NO: 52497 - DNA, 140 bp, Homo sapiens
ctgctgggcgatcttctctgtgctactgcaacttgctctgtgggattatcagaggtgccttggaaatggaaaatggcaaatgcacgacagcggcctcctgaacatcaccaaggtatccttctcagaccgaggtaaataca

SEQ ID NO: 52498 - DNA, 100 bp, Homo sapiens
ttaacacctctgccgctgctaaaaggcaagaaaattggatgtatattttgaatatgaagaaaaaataatgagcaaaactactctggataaatctcttcta

SEQ ID NO: 52499 - DNA, 74 bp, Homo sapiens
agcggctaaagaagatgttgtctgagggcgcaagacgttcaaagaacactttagaaagaacacattccatgaaa

SEQ ID NO: 52500 - DNA, 51 bp, Homo sapiens
cccggtgcagctagaagtccatatcgatttatcatagaatccccgactcag

SEQ ID NO: 52501 - DNA, 76 bp, Homo sapiens
tttcaagtctgccctgcaagcgataggagtggaagcccaccagggtgaagaaggtgaatacagtgaagaggaaaac

SEQ ID NO: 52502 - DNA, 74 bp, Homo sapiens
ctccctgagtctttgaggacacagcctcgctggaggcagtttctggaaacatgccctgaactgtcacagaatga

SEQ ID NO: 52503 - DNA, 83 bp, Homo sapiens
cgtcttgcctgtgtcccacttgttcgcggcctatagagcactgcagtttcctcctgaaggctggctccggctctccctcaata

SEQ ID NO: 52504 - DNA, 73 bp, Homo sapiens
gacgaggcagacgtggctcctgctgcacatgtatgacagtgacaaggtcatcctggcccggcagtatggctcc

SEQ ID NO: 52505 - DNA, 75 bp, Homo sapiens
cttcagcctctagagtagccgagaccacagatcccaccaaatattttggttgtgagctgggagcacagacccagt

SEQ ID NO: 52506 - DNA, 100 bp, Homo sapiens
taccgtccaactacgtggagcggaagaacagcctgaagaagggctccctcgtgaagaacctgaaggacacactaggttactataacaacagtaccaaggt

SEQ ID NO: 52507 - DNA, 99 bp, Homo sapiens
ctttgggcgtcccattgccatggcatattttggtggtgaagctcgctgcgatgctgaggctggacggggagatgattatgatcccagagagctcatttg

SEQ ID NO: 52508 - DNA, 83 bp, Homo sapiens
agccactatattaaaactgctaaggcacggaatgttaacactggtgaattagcagcaattaaagtaataaaattggaaccagg

SEQ ID NO: 52509 - DNA, 100 bp, Homo sapiens
tggacccacagaatcagaccatgactaccttcacctggaacatcaaccacgcccggctgatggtggacatgccagccaacaacaaatgcctgatcttccg

SEQ ID NO: 52510 - DNA, 100 bp, Homo sapiens
tgatgtggatgatgccaaagttttattagtacctggagtagaacagaaaaattattatgtctgtgttcccttgggactcattggaaattgtacagtgaca

SEQ ID NO: 52511 - DNA, 100 bp, Homo sapiens
ccctggatgacaatggaaccatgctgttttttaaaggttttgaggttttgctgaagatattcctgaagaatcatcccaggtgccacactaaaaaaatgat

SEQ ID NO: 52512 - DNA, 50 bp, Homo sapiens
gcgcttccgcaccatcacctccacgaactgtggctgcaccatctgtcttc

SEQ ID NO: 52513 - DNA, 87 bp, Homo sapiens
aataagaaatgatttttgtaataaacagagtgacaggattttttatcaagcagaaatgcatcgaacaacgagaatcaagatcactga

SEQ ID NO: 52514 - DNA, 93 bp, Homo sapiens
gttaagggagacaaagttgaaaacaaagtgctggcctttgtggaggcccagaataagattactgtgccatttcttgagcagtgtcccatcaga

SEQ ID NO: 52515 - DNA, 100 bp, Homo sapiens
agtcaaagcttgacagaaacacgagctttcggcttccatcccttcgcagtacagatgacagaagctttgcatcgtccctatggttgtgatgttgaacccc

SEQ ID NO: 52516 - DNA, 90 bp, Homo sapiens
atcagaggtagtcggacctttcccgctggcgcgcagcctcagctagttggtagctggcagtgttgtgatggcttttgaagaagtatgccc

SEQ ID NO: 52517 - DNA, 76 bp, Homo sapiens
ttcctgcagaggcagcagctggattatggcatctacgtcatccaccagagttttccgtctgatgaaggttggccat

SEQ ID NO: 52518 - DNA, 83 bp, Homo sapiens
gctgcaggcctcctgctgctcctgtttgtggtgtactaatggtcacttgatgtgcgctggctgttttatccacctactagcag

SEQ ID NO: 52519 - DNA, 98 bp, Homo sapiens
tccccctcccggccaagatgtctgacatggaggatgatttcatgtgcgatgatgaggaggactacgacctggctcttgtcaggatggtgaagctgttc

SEQ ID NO: 52520 - DNA, 100 bp, Homo sapiens
cgcgaggagctcatcgggcagattagcgacatccgagtgcagaacctgcaaggctgtattcatcaccaaagaaaaaacttacaccaatgcagaaatcggt

SEQ ID NO: 52521 - DNA, 90 bp, Homo sapiens
aacttcctcggccgagccgggccgcgccgccgctgccgccgccgcgcgcggagagcatcagtgatgtcacgtttggagcaggggtcagtt

SEQ ID NO: 52522 - DNA, 119 bp, Homo sapiens
tgcggctgccgcagtcagccggggacctcgtccgagcccacccgcctttggagatagcagaccccacgttagctgaaatgggaaaaaacttgaaggaggcagtgaagatgctggaggac

SEQ ID NO: 52523 - DNA, 88 bp, Homo sapiens
cccagtttatggcttccagtggaggcattttggggcagaatacagagatatggaatcagtggacgtgactctggacccagacacggcc

SEQ ID NO: 52524 - DNA, 101 bp, Homo sapiens
aggagaggaagaagcgcgagacccacgaggcgctggcccggaggctccagaaacgggtcctgctgctcaccaaggtccggcgggcggtggcctccgtggtg

SEQ ID NO: 52525 - DNA, 80 bp, Homo sapiens
tggagctcactcagaaagcagccagctcttgaggctagtgcgcctctaggcaagatgtccctgcccatcgggatataccg

SEQ ID NO: 52526 - DNA, 75 bp, Homo sapiens
cttcggagaatggagtcttccatcaatcatatctcacagactagggtatttaaattacttcaaaaccaaattcaa

SEQ ID NO: 52527 - DNA, 74 bp, Homo sapiens
atctcctgggccgcctggcggccatcgtggctaaacaggtactgctggaaatacccgcagcccaaagggcagaa

SEQ ID NO: 52528 - DNA, 100 bp, Homo sapiens
gcctcgtgccgctgagcctggcgcagatcgtggcttacagaagagacgaaatgtggtctgagggacgatatgaatatgaaagaattccgagagaacgagc

SEQ ID NO: 52529 - DNA, 51 bp, Homo sapiens
tgggggtcctctctgagtcaaatccagtgaaaatcgcgctgcaactcaaag

SEQ ID NO: 52530 - DNA, 100 bp, Homo sapiens
ctggcgagtcctcggtgtcggtggccggcagtcatctcgcggccgttcagacatgcgtcgggatgtccaggaaatttttcgcatgaccccccacgagaag

SEQ ID NO: 52531 - DNA, 100 bp, Homo sapiens
acatggatgcttatctctcaaagggcaatgtattccaagatgcagtcttcaatcaaacagttacagttattgaaagagaggatgggttagatggagaaac

SEQ ID NO: 52532 - DNA, 82 bp, Homo sapiens
ccaggcgaagctggccgagcaggctgagcgatacgacggttttgggatttgagattgacgcggtgaactctgtccagttttc

SEQ ID NO: 52533 - DNA, 100 bp, Homo sapiens
aacaaaaaatttcaggagaaagattacacaggagctgcagtgctgtactctaaggaggtagaggtggaggcggagccggatgtcagaggtcctgaaatag

SEQ ID NO: 52534 - DNA, 75 bp, Homo sapiens
agtgatgtggaggaaaacaacttcgagggcagaccggaagaattaacctcgagtctgcacgcttttaagaacaag

SEQ ID NO: 52535 - DNA, 74 bp, Homo sapiens
ctctggatagcaccttatggacagcttgacagagccaattcgctattaaaccagactcaacagccttacaggta

SEQ ID NO: 52536 - DNA, 74 bp, Homo sapiens
tttaaaccacatggctatctaaagaggctcatccaaaatacttgagttgtattgcaatcagctgttttttccta

SEQ ID NO: 52537 - DNA, 53 bp, Homo sapiens
ggaagttcctttttgaagtagttccagacagggtctctgtcacccaggctgga

SEQ ID NO: 52538 - DNA, 101 bp, Homo sapiens
gtgggtcttgtgctgcccatgcttataaacaagtggatccgtctattacagtcaacctatttgatttcttgacaagaccacaatctgatcccaaagatgtg

SEQ ID NO: 52539 - DNA, 145 bp, Homo sapiens
gcgaagttctgcgctggtcggcggagtagcaagtggccatggggagcctcagcggtctgcgcctggcagcagaaatcatgaccaccccaggaaaagagaactttcgcctgaaaagttacaagaacaaatctctgaatcccgatga

SEQ ID NO: 52540 - DNA, 88 bp, Homo sapiens
cacatcatgaaggcctgttttgaagagaaggggaataagactgcatctgttcatatgagctagtggcggttggcaggaacctgaaaat

SEQ ID NO: 52541 - DNA, 82 bp, Homo sapiens
atttcaaccataaagacatcttaattgggcacgaaagagaatctatgcagggacatttttgtgctcattgaggcctactgtg

SEQ ID NO: 52542 - DNA, 88 bp, Homo sapiens
ggtgattccctgcggtgtgcaagtccgactggaacaggaaaagagcactggttgccattggtacccatgatttggacactttgtcggg

SEQ ID NO: 52543 - DNA, 100 bp, Homo sapiens
aattcaagaggaggagaggggttgttttataaactgcctggccgaatcagccttttcacgctcaaggaagagagaagggcacagttacctaagtatcaac

SEQ ID NO: 52544 - DNA, 101 bp, Homo sapiens
ctcaagcagtcctaccatgtcagccttcccagtagctgggaccacagtgattcgcctttgccagtctcatctcgtgtctgctttgttaagttccatgatcc

SEQ ID NO: 52545 - DNA, 76 bp, Homo sapiens
tggcagtcggtcatccacctgctgcagatggggcaggtgtggaggtccagcaagactatgaatctctgttccaaat

SEQ ID NO: 52546 - DNA, 75 bp, Homo sapiens
ccagacaagatggacaccgcggaggaaggccatcaagccctgtcgtcctatgaccaacaatgctggcagactttt

SEQ ID NO: 52547 - DNA, 100 bp, Homo sapiens
actcggttaagggaaagcgccgagatgacgggctttctgctgccgcccgcaagcagagacacgggatgcctcactctgtcccagtacatcctccttgacc

SEQ ID NO: 52548 - DNA, 74 bp, Homo sapiens
attcagacatagacaagaatgattacccaggtttccaatacttatctacaggaatcgccatgaccccagctctg

SEQ ID NO: 52549 - DNA, 51 bp, Homo sapiens
aaggcagtctttgctacgtacagcaaaagttcattcggctcctaaagaagt

SEQ ID NO: 52550 - DNA, 75 bp, Homo sapiens
agatgagaccgggggaggcgacgctaagttgctgatcgtggcggaagctcttcgtgggcggtcttgactggagca

SEQ ID NO: 52551 - DNA, 75 bp, Homo sapiens
cttttggcttcgaggtttaccccttccagggaagaaggagaaagggccaacccctgaagaagcaatacagaaact

SEQ ID NO: 52552 - DNA, 100 bp, Homo sapiens
agcagttactcggggtttccggtgcgaggccagaggtggggaagccatcggacgtcggcggtgagagagaagaagaaggaggttcctgctgtgccagaaa

SEQ ID NO: 52553 - DNA, 82 bp, Homo sapiens
gcctcgggagtcggcctgtgagagctaaagttgcagacaagatccagctcatcaataatatgctggacaaagtcaatgagat

SEQ ID NO: 52554 - DNA, 73 bp, Homo sapiens
gctgttggaaatctcgcgatggagggaggaggaggtgtgataaagcggaattgggaatatatatgtagccatg

SEQ ID NO: 52555 - DNA, 75 bp, Homo sapiens
tacctttttcagaaatgcgcagagcaaacatctttcaaagagcactacaaacaccactggtttcccgaaaagccg

SEQ ID NO: 52556 - DNA, 83 bp, Homo sapiens
tggagcctcagttggaagcagccgatccagcctgcggagcctgtggggcaggatggatgagggagatgctgcaatcatgcatc

SEQ ID NO: 52557 - DNA, 120 bp, Homo sapiens
ccccagtgcactagccattgaagtatttgaagcacatttgggaagccacattttgcagcgatacagtgtggaaatgtccatcagacacctgaaaaagacggagctgcttagtaaggttga

SEQ ID NO: 52558 - DNA, 101 bp, Homo sapiens
cgcgcacctcagccgcctcctagcggcgcggcgctcgctcctacgaaaagaggcacagttagatgaagaaggacagtttcttgtcagaataatatatgatg

SEQ ID NO: 52559 - DNA, 83 bp, Homo sapiens
ctacaaaggctccaccttccacagggtgatcccttccttcatgtgccaggattttttatcaagcagaaatgcatcgaacaacg

SEQ ID NO: 52560 - DNA, 101 bp, Homo sapiens
ctcgacttagaagctaccgagttaccctaagaaaggtctgagaaccattggagttatcaccaaactggaccttatggatgaaggaacggatgccagggatg

SEQ ID NO: 52561 - DNA, 87 bp, Homo sapiens
tggttccgtgttcatcaaggaatccatgtttcttccaagaagcagtgattcgcctttgccagtctcatctcgtgtctgctttgttaa

SEQ ID NO: 52562 - DNA, 90 bp, Homo sapiens
ccccagcagcccccgaaggccctatcaggacatggagtatgaaagacgacttttttgtataacgagctctatgtctacaataccagaaag

SEQ ID NO: 52563 - DNA, 80 bp, Homo sapiens
gaaatctgaaaatgcccctggggagacacatgcacaagacaattttggggaacttagtaaaaaactggctgaggtgtgga

SEQ ID NO: 52564 - DNA, 100 bp, Homo sapiens
tcccagacctgtgcttctgactatcttctcttcaccagctcttcagatcaatatggtaacagcgaccagtcaggatcccaggagaagctgctcgttgaca

SEQ ID NO: 52565 - DNA, 100 bp, Homo sapiens
aaggagcagacttacgcactgtggatccagagacacaggcacgactagaagcattgctagaagcagcagatcccgggggcataactgctggcagcaccga

SEQ ID NO: 52566 - DNA, 83 bp, Homo sapiens
tagccctctacttttcaagacaccaagtgagaggccaaccaggttgatgataattagaagcatgctttccactgaacttcccg

SEQ ID NO: 52567 - DNA, 100 bp, Homo sapiens
agtggattatttggtcactgaggaagagatcaatcttaccagagggccctcagttctcaagtaacaaatatgaggaccgaactctcattcaacatccaag

SEQ ID NO: 52568 - DNA, 48 bp, Homo sapiens
ctggtggatctgcagtacgaagtgatggaatggggagaagatattaaa

SEQ ID NO: 52569 - DNA, 82 bp, Homo sapiens
cgagacgcggcgcgcacgctccggcctgcgccgcttacaaacacgcagatggcaagaagattgatggcaggagggtccttgt

SEQ ID NO: 52570 - DNA, 98 bp, Homo sapiens
gaacaagaaagctcagctggtggtgattgcacacgacgtggatcccatcgagcgctgcaactccaagtgtgtctcagaggcaaccttctaccgcctgg

SEQ ID NO: 52571 - DNA, 74 bp, Homo sapiens
ccagccccggtcacagagtgcaccgtatcctgtcacttctggatgtgaggtggaaaggagactatggaaccagg

SEQ ID NO: 52572 - DNA, 117 bp, Homo sapiens
ggccggtccccagacccaagagctgtgagctgcctaagaaatcatggcattcacacagcccataaagcaagacagatgaaattgacagttcttcaatgtcagatgatgatagaaaag

SEQ ID NO: 52573 - DNA, 100 bp, Homo sapiens
agaatgaagccacggaccctcgcgctatgctaagaaggaatctgatcttaatggcgcccagatcaagcttcgagaatatgaagcagcactgaattcgaaa

SEQ ID NO: 52574 - DNA, 75 bp, Homo sapiens
ctcggataaagaaggaagccatgtcaaggtattaatctctggagaagacacatccacagttagcactttcttcag

SEQ ID NO: 52575 - DNA, 100 bp, Homo sapiens
ccatcatgtccgccagcgccgtctacgtgctggacctgaagggcaaggtcccagagaactacttctatgtgccagacctgggccaggtgcctgagattga

SEQ ID NO: 52576 - DNA, 75 bp, Homo sapiens
cacgcgggctgctcatcgtcagcagggagaggctggggaacttcaacatggagttacttttgatccctcagtttt

SEQ ID NO: 52577 - DNA, 100 bp, Homo sapiens
ggctgtcccagagggagaagcagctagaaccagtaccatgcaggatgaaacattaaattcttccgttcagagtattagatcctgataacttaagtgactc

SEQ ID NO: 52578 - DNA, 142 bp, Homo sapiens
cgagccgccgccccgtgctccggggacagggctccccgcgccccgcgcagctgagcgctgccgccgccgcagcaggcagtggagctactgctgtggttcaggcagccctatgcaaacccaggcaagaacgtgtagcaataaa

SEQ ID NO: 52579 - DNA, 74 bp, Homo sapiens
tcgacatgagtgatgtggaggaaaacaacttcgagggcagagtggtggtgaagtttattaagaaggagaaggtc

SEQ ID NO: 52580 - DNA, 100 bp, Homo sapiens
gaactgcgcagacctggtggaggtgttaaatgaaactcttggagataaaatcgtgagggatattcgccctggagctgcctttgagcccacatatatttac

SEQ ID NO: 52581 - DNA, 50 bp, Homo sapiens
ggaataaagagctgtatttgatcagacctccaagaagctggtgaactcgg

SEQ ID NO: 52582 - DNA, 82 bp, Homo sapiens
gtggaggccatcaggggccttgataacacagagtttcaaggtcagggaagtcaaagatgcatccctgagttcttcctagcag

SEQ ID NO: 52583 - DNA, 51 bp, Homo sapiens
gccgagcaggctgagcgatacgacgacttctgcctggtgtcgaaggtggtg

SEQ ID NO: 52584 - DNA, 74 bp, Homo sapiens
cgcgaacccggctttcgcatttgggaccctgcagggttcctgcacttggccatcatccatgaagaaaaggcact

SEQ ID NO: 52585 - DNA, 75 bp, Homo sapiens
cccacttcgttcaagacaggtgtttaagcgttccaagttccccatcaagtggacagccccagaagctgccctctt

SEQ ID NO: 52586 - DNA, 98 bp, Homo sapiens
gaacctgcacctccatcacgacccattcaggagcctccaggagcccagacaccagccccccaccatgcttacagggatcttcagaccagggaagacat

SEQ ID NO: 52587 - DNA, 83 bp, Homo sapiens
ccggagtgtggacaacgtccagttcctgccctttctcaccacggaagtcaaattgatgcctgggctcagctgaactctattcc

SEQ ID NO: 52588 - DNA, 50 bp, Homo sapiens
cggctctaacggggctttctacaaggtcattcaacatttattcaaccaaa

SEQ ID NO: 52589 - DNA, 98 bp, Homo sapiens
ccgtactgcacatcgtggtggtcggatttcaccacaagaagggctgccagtgtgtcatagctaccatagcttttggaatgggcattaataaagctgac

SEQ ID NO: 52590 - DNA, 77 bp, Homo sapiens
agaaaagaaaaagagaagaagatgaagaaacccagcttgatattgttggtaaagaaactgcggcaatgaaagctgat

SEQ ID NO: 52591 - DNA, 75 bp, Homo sapiens
cacaggctgttgaaaccctcctgaatgctgctccagttacagcaccacccggccgctgcacccggctgctcccag

SEQ ID NO: 52592 - DNA, 75 bp, Homo sapiens
cgctgtacgccgagcacccaggcgactgcctcatcttcaagattttgcaagaacgaggctcaaggatgtgaggga

SEQ ID NO: 52593 - DNA, 100 bp, Homo sapiens
gccaggacccactggaagcctagaaatgactgggctggcttagatgaagatgaagatgcacatgtctgggaggataattgggatgatgacaatgtagagg

SEQ ID NO: 52594 - DNA, 83 bp, Homo sapiens
ccaaagtgaaagtggcggtgcggatacgacccatgaaccggcgaggtacaatgactcttcttgcttttcacctaagttgaata

SEQ ID NO: 52595 - DNA, 100 bp, Homo sapiens
cagccatcgcttcggaggggaaggctgaggaaagggcatgatcacaagggccacccccacactagctactaccagtatggcctgggcattctggccctgt

SEQ ID NO: 52596 - DNA, 50 bp, Homo sapiens
acctgtccaccgtcgtgaccgagttcatggcccaggggaagacagggagc

SEQ ID NO: 52597 - DNA, 50 bp, Homo sapiens
gaaaagaacacaacatctgtatggtcagcacctcatctatgggcacttta

SEQ ID NO: 52598 - DNA, 101 bp, Homo sapiens
gagggactgcaaaagctctcagggatgctggtctggcagtcaggccccatcacaggtatatggaggagtgacctactataaccccgcccagcagcaggtgc

SEQ ID NO: 52599 - DNA, 90 bp, Homo sapiens
gattcgttacagccagagattggctgtcacccttgacccaaactttctggatgcttatatcaatttaggaaatgtcttgaaagaggcacg

SEQ ID NO: 52600 - DNA, 87 bp, Homo sapiens
catcagtttctggaagaagaagaagagcatgatcggcatgtccaccaagggacccagacatggagctgcgggaagaagcctggtctc

SEQ ID NO: 52601 - DNA, 100 bp, Homo sapiens
gttttctctgccatgttgctattgcaggacggagtggtggtaaatggaaatcccttctatgagtacgggcaccggcttcccctacagatggtcacccacc

SEQ ID NO: 52602 - DNA, 82 bp, Homo sapiens
gtagaacagcaaagagatttaacgtcacagtttttgaagaccaagctggaagctctttgacatcctttggaacagaaacatc

SEQ ID NO: 52603 - DNA, 75 bp, Homo sapiens
gcttcctaccctgccccccaggaggggtgtccgcaatgttgccagtgtctgtctgcagattggctacccaactgt

SEQ ID NO: 52604 - DNA, 90 bp, Homo sapiens
tgcctccatgaacaatctcacccaattactctgctcagaataagctttccgatttgttggcacccatctcagagcagatcaaagaagtga

SEQ ID NO: 52605 - DNA, 80 bp, Homo sapiens
agatgttacagctgctcatgaaccacttggcaaagcagtggaccaatccagctatggcagtttcttctggaattactcac

SEQ ID NO: 52606 - DNA, 98 bp, Homo sapiens
ctccacggcctccaacagcttacctgagccagccaagaagagtgactgtgaagtgctgaccacactcaccccagacactggccgtatcctgtccaagc

SEQ ID NO: 52607 - DNA, 100 bp, Homo sapiens
gtggtcttcaaatctctcattacaactcatcatttgatggtgtatggaaatgagggggccgaaggccagagaccaggatttggctacggaggcagagcgt

SEQ ID NO: 52608 - DNA, 51 bp, Homo sapiens
cgtaactatgaggaaaatgccaagatttaggcctattaaaggaaggcagga

SEQ ID NO: 52609 - DNA, 100 bp, Homo sapiens
aaacccgtagtgctgatgaaccaatgacaacatttgttgtctgtaatgaatgtggaaatcgatggaaggtctctaattaacagaagatggcaaagcccag

SEQ ID NO: 52610 - DNA, 82 bp, Homo sapiens
gtgccgcgagcgcggcctgcaggaggactcctcctattttgaggacttctccaacatctccatcttctcctcgtccgtggac

SEQ ID NO: 52611 - DNA, 100 bp, Homo sapiens
tcagagcaggagaagctgagcctttctggacagaccaacctgtcagtgctgcaagttctttgcagatgtagttccagcagtcaggaagtggagagaggcc

SEQ ID NO: 52612 - DNA, 100 bp, Homo sapiens
aagagaaagaaaccaaaaacagcaagcgcagagccaaacagccaggcagaacctgcacttgttgccaagtcttccatcttactagatgtgaaaccttggg

SEQ ID NO: 52613 - DNA, 90 bp, Homo sapiens
gaaaaagtatcgtcgagaagcctatcatcggcagcaaatatgaagtctatggaccctgcctcaggttattcaaataacatcctcaccatt

SEQ ID NO: 52614 - DNA, 115 bp, Homo sapiens
cacaacagtctcatgaggaatagcatcttccaactcatgatacacacccttgacccactcgccgaagggaaaacaaagtgcatgatgaagtcttcagactgtgtcataaagcatg

SEQ ID NO: 52615 - DNA, 125 bp, Homo sapiens
gaaaactctagaagtctggatgtcggtgggcctctgagatatgccgtttacgggactactgttcgaagatttttggaagaatactgagaacggcataaagtgaagatcgacatttaaaaaatgag

SEQ ID NO: 52616 - DNA, 80 bp, Homo sapiens
actccggaagaaacctgccacagatggactttgatgatagcatgttcgttaagacctcaactcctgcggagtggattgca

SEQ ID NO: 52617 - DNA, 100 bp, Homo sapiens
attctggagacctgggtgtgggtcaagcaaccaggaggagatgttaaagtaacccatcttgcaggacgacattgaagattggtcttctgttgatctaaga

SEQ ID NO: 52618 - DNA, 51 bp, Homo sapiens
gtgttccagaaattcattgagagggagtgcctgcagggcaccatccgcaac

SEQ ID NO: 52619 - DNA, 100 bp, Homo sapiens
agattcgcagtggtcgcttcttctccttggtgcagcggaactgctgcctgacgctctgcaacttcagcatccccgaggagctggaattccagtaccgccg

SEQ ID NO: 52620 - DNA, 82 bp, Homo sapiens
cctgctcccgcgggcccgcggacccagctgtcaggcaagagttcgaaccaacgtggcctcaaccagatttggaatgtcaaaa

SEQ ID NO: 52621 - DNA, 75 bp, Homo sapiens
aacgatgacattttcaggaaaatcctggtttaggattgggtgtgtgtgtctcctctctgaatggcactcaaatgt

SEQ ID NO: 52622 - DNA, 75 bp, Homo sapiens
aaaagatcttcaaaaggagcagaaaactttacaggtgctgtatttctctgaatccctcgtgcccacggcaaggaa

SEQ ID NO: 52623 - DNA, 100 bp, Homo sapiens
tcaaaactgaagatggtttgaaacagcttcacaaggacttgttctttaagtacacctggaataactttttgcacttccaagtggaactatgcatagccgc

SEQ ID NO: 52624 - DNA, 75 bp, Homo sapiens
aaagctgctggacaacaccatggaaatatttgacattgaggtcaaaatgcagatcttcgtgaaaacccttaccgg

SEQ ID NO: 52625 - DNA, 75 bp, Homo sapiens
gaaataatgtttgagtccttcaatgttccaggcttgtacattgctgtgcaggtcttccccagggaggtcctgaac

SEQ ID NO: 52626 - DNA, 74 bp, Homo sapiens
gcttttttttgctgctagcacatatgtatgggttcagtacgtatggcacacagctagtatgttcaacacaccag

SEQ ID NO: 52627 - DNA, 82 bp, Homo sapiens
accgccgcccccccagacaagatggacaccgcggaggaagatcaggatcctcatgaccagccaaagagaagaagaattagga

SEQ ID NO: 52628 - DNA, 50 bp, Homo sapiens
gtttgccatcccaaggccgaaggaccagtcctgcctctgttgtagaagac

SEQ ID NO: 52629 - DNA, 100 bp, Homo sapiens
tacgcggactttgttgctgcttgcagtaaccttatgcctagcaacatgccaatgcatccgtgtcattctggaccttactcccaactaccggggtgagaac

SEQ ID NO: 52630 - DNA, 100 bp, Homo sapiens
agaacagcccaatctcctttctgggcaaacgttccaagagacattttaaatccaaaggatgtgattagtgtccagctggaagacactacctcttgcaaaa

SEQ ID NO: 52631 - DNA, 121 bp, Homo sapiens
cctactacatgtactcggggggcggctctgcgctggccgggggcgcgggcggcggcgccggcaggaaggcacgtgtggttctcaaatataggcattctgatgggaacttgtgtgttaaagt

SEQ ID NO: 52632 - DNA, 100 bp, Homo sapiens
agggcctgggccgccgctgctacctgcagcgccgtgtggcacgacacaaaaatcagcaacctttcccctggatctcacaaaaactcgactccaaatgcaa

SEQ ID NO: 52633 - DNA, 95 bp, Homo sapiens
tcagcttgatgatgtatctcaggttatcactgtgaatataagatgcggacaggaaggaaacctgatggctgtgctatttgcttcaaacattccaa

SEQ ID NO: 52634 - DNA, 74 bp, Homo sapiens
aagaatttccagtgatacagctgatggaaaatgtgtccaggaaggagtgatttggagaacaatgcatgtaagtc

SEQ ID NO: 52635 - DNA, 76 bp, Homo sapiens
ctgaggagaaggaggagcgggccgtggaggcttcgccgcctaggcctctccttccgatgaaaagagaaaggaagaa

SEQ ID NO: 52636 - DNA, 83 bp, Homo sapiens
gggcgcttcgccccgggccccccagcatgaagaccccggcggacacaggaagctcttcgtgggcggtcttgactggagcacga

SEQ ID NO: 52637 - DNA, 100 bp, Homo sapiens
tggagatcaccctgttctagtgtgtggaggcttccaccaggagtgtgtttcctgtaacaaatcgttcaagaaactctggtcccttcatgaacatatcaag

SEQ ID NO: 52638 - DNA, 100 bp, Homo sapiens
tgaagattcaccaaataagctatatactttggttacctatgtacctgttaccactttcaaaagtgacctcacaaagttcggccgtggggatgcctcctcc

SEQ ID NO: 52639 - DNA, 98 bp, Homo sapiens
agattctcaagacaatccaggcagaagatattaagaagtctttcagaaatccagatggagacgtgagcccctggtgctatgtggcagagcacgaggat

SEQ ID NO: 52640 - DNA, 90 bp, Homo sapiens
gggtttctttcttaaaggactgatttttagaactccacatttgagattgggaaaatgaggtacgttagtgttcgcgattttaaaggcaaa

SEQ ID NO: 52641 - DNA, 51 bp, Homo sapiens
cgcgaatatcgtcatcgttagaagacctttgaaactcacaactctacgaca

SEQ ID NO: 52642 - DNA, 75 bp, Homo sapiens
tggaatcattctcaccttgtatgctttacgaatggcggcgctagatagtaaggcatcagggaagatgggaatgcg

SEQ ID NO: 52643 - DNA, 75 bp, Homo sapiens
ccagccacagcctcccgcgcctcgctcagctccaacatgaaaaagcttgtggtgaaggggggcaaaaaaaagaag

SEQ ID NO: 52644 - DNA, 143 bp, Homo sapiens
caccaaggagactgcaggctacctcaggggccgtccccaggacactgtccggatcttccctccctgtaacctttggaaacatcagaagctactctccattgacctggacaaggtggtgttacccaactttcgatcgaatcgcc

SEQ ID NO: 52645 - DNA, 51 bp, Homo sapiens
caaccttcgatctcctgacgatgtgcaccggcacagacatgaagctgcggc

SEQ ID NO: 52646 - DNA, 75 bp, Homo sapiens
cgctcgctgggagagaggtacctctccttttccctctccctttccctaagggtgtttgtgaaccgaagtttagca

SEQ ID NO: 52647 - DNA, 100 bp, Homo sapiens
ccgactgggggcaacttggcacttagaaccgcagcagggacgtcggtttgctatcgggactcggcgaggacgcgagtaaccagctcataaatcacatcga

SEQ ID NO: 52648 - DNA, 75 bp, Homo sapiens
tgagcgtgctgcggacggcgctgcggtacatccagagacaagaggagcagcagcggcaccgcccctcaccctgga

SEQ ID NO: 52649 - DNA, 100 bp, Homo sapiens
acctgaaggtgaagaacatcatccagtggcagacactgaaaataatgagagtagcatgtttgtctccaagagacgtttcattttgaagacatgtggtacc

SEQ ID NO: 52650 - DNA, 98 bp, Homo sapiens
ctgaccggtgctgggggcccctgcgccgagtggacgcctaccgcatctacttggctgtgagaagacatttatcacagtgagtgccctgttttcccata

SEQ ID NO: 52651 - DNA, 75 bp, Homo sapiens
aggacgccttcaacaccaccttcatctccaccatcgtctaccctgatgggagagtctgcatttccatcctccacg

SEQ ID NO: 52652 - DNA, 88 bp, Homo sapiens
gccttttccgttgccggtgccggcctagcgtcctggaattacttcaatcaactttttagttggagaaggagcctacagatgggcagta

SEQ ID NO: 52653 - DNA, 100 bp, Homo sapiens
ggccaggctgatggagagctgaacattactcttccagaagagaataactgtgtagaatacattgaggatgatgaggagcacgtggacattgagactgtag

SEQ ID NO: 52654 - DNA, 51 bp, Homo sapiens
caggattaacactgcagagtaatggttgctgcagcaactggtcacacagta

SEQ ID NO: 52655 - DNA, 100 bp, Homo sapiens
cgacgaggtgagaaagcttctggcaagaggtgctgatatcaacacggtcaacgtggacggcttgacagccctgcaccagtacagtgctgtggataccaat

SEQ ID NO: 52656 - DNA, 87 bp, Homo sapiens
gattccccggaatcgtgtgctgggctggtcccccttgaagccgatcctactgcagggccatgagcggtccattacgcagattaagta

SEQ ID NO: 52657 - DNA, 97 bp, Homo sapiens
tgggagacgggtgaagtacaggctcagtctgcggccaagactccatcctgcaagggaagcaggaattgaggaacagattctccagccatggattgtg

SEQ ID NO: 52658 - DNA, 99 bp, Homo sapiens
cagaaaggccgcggcatgggcggcgctggccgagggcatgaccattcggcccctggtagacctgttggctgtgaagaaaaagcaagagacgaagcgctc

SEQ ID NO: 52659 - DNA, 74 bp, Homo sapiens
ggagtttgtgagggaaacctgctcccaggagttgaaggcttcgtgctgtgtcactccatcgctgggggtacggg

SEQ ID NO: 52660 - DNA, 83 bp, Homo sapiens
gtgggggccacgccgcacctgcgcaacctcgccgtggccatgtgcagccgctacgtcgcgtggggcaggcagtggcgctgcgg

SEQ ID NO: 52661 - DNA, 82 bp, Homo sapiens
ccaaaatgaagaatttcatcacctgcttcaaagggtttccaggcctgaggtgcccgccctggccccaggagaatgaaccagc

SEQ ID NO: 52662 - DNA, 51 bp, Homo sapiens
ctactctggggcttcctgctccagctggaaatccaggatgagtcagctgtg

SEQ ID NO: 52663 - DNA, 87 bp, Homo sapiens
gatggtgaacgtgggaatgaacgaccaggaggcagcatggcgggagctggaggccgagcgggcccagctgcagagtcagctgcagcg

SEQ ID NO: 52664 - DNA, 75 bp, Homo sapiens
cttaccgcatctggctggagccctgcattcgcggcgtgtgcagggggatatgagactttctactcggaatatcct

SEQ ID NO: 52665 - DNA, 75 bp, Homo sapiens
tggggcttcgcgctcttcttcttcttccagggactcagcacctggcagtctcttcaagaaaatgaggaggaggag

SEQ ID NO: 52666 - DNA, 50 bp, Homo sapiens
aagaaacccagcttgatatgttgattctggacaatcaggaagtccaagcc

SEQ ID NO: 52667 - DNA, 98 bp, Homo sapiens
ccatcacctcatccagttcgctattttgataactcaagtttaggcctttgtccaggtattcaaactcgtgtccttgatgtcacaaagaagaaacaaat

SEQ ID NO: 52668 - DNA, 90 bp, Homo sapiens
ggaggagccgcgagcgctgaggctgctgaatgccatggtggcaaaactggggaaccgggaggacccactcccccaggactcctttgaagg

SEQ ID NO: 52669 - DNA, 83 bp, Homo sapiens
cagacgatgagacagagttgcgaccgcgcggcagagatgccctgtatccaagcccaatatgggacaccagcaccgagtccggg

SEQ ID NO: 52670 - DNA, 100 bp, Homo sapiens
gccacagctgaaggctgcgagggactaagagcagagtggtttcagacaccctcacaggttttctaccatgcagcaactgaacatggaggaaaagatgtat

SEQ ID NO: 52671 - DNA, 100 bp, Homo sapiens
ctttggtggatggggtattcttgaaccaggtcatgctccaaatccttgtccagacgaagtgacgttgagatcctcggctactgcatgctgcggtggttgt

SEQ ID NO: 52672 - DNA, 82 bp, Homo sapiens
ctccttctgccacatttgttttgagctaaatattgaggtttcccagcgaggtggtcattcagagcctacacatctgttctgt

SEQ ID NO: 52673 - DNA, 74 bp, Homo sapiens
ctcagccaggccgactacctcaacctggtgcagtgcgagacgctagagggagacaaagcttttgttgatttcct

SEQ ID NO: 52674 - DNA, 132 bp, Homo sapiens
tacagtgtttgagaattacacggccagttttgaaatcgacacacaaagaatagagttgagcctgtgggacacttcgggtgagaagccctaccactgcaactgggacggctgcggctggaagtttgcgcgctc

SEQ ID NO: 52675 - DNA, 100 bp, Homo sapiens
ctcctgatctgggatcagttgatgtaggcgaagagcaagatttaaatgttgatcatggcctcaaagggcatatctctctccaggatttcattatcctgtt

SEQ ID NO: 52676 - DNA, 75 bp, Homo sapiens
agcttatcatagtctcctatgtgcatatgtatgatgattattccccaccttctaagagacaaagaccaacgagcc

SEQ ID NO: 52677 - DNA, 100 bp, Homo sapiens
atcattgcgcttggcctgctctacaactgctggcagcgccggctgcccaagctcaagcacgtgaggaatggaaagcccaattcattaaaacagaaaggaa

SEQ ID NO: 52678 - DNA, 98 bp, Homo sapiens
agaggaggaaaatggctccgagcagggaccgcctgctgcactttgggttcaaggcgacattttaacagtgtatgccagggaacacacattctctttcg

SEQ ID NO: 52679 - DNA, 83 bp, Homo sapiens
ttctgaagagtgttactgtgaacattcatgcacaaatttttatgtggaggatcagttcttaagagcagccccggtaactggag

SEQ ID NO: 52680 - DNA, 97 bp, Homo sapiens
gctgaatccagtaccaaaaacgtcaacaacagttttacggaagccattaatttgctagaaccaatgacaaacgaccccgtgaactacgtgaggcaag

SEQ ID NO: 52681 - DNA, 100 bp, Homo sapiens
caagtttctgcaggaacacggttcagattcggtgcttacatgttgcagaagctaattgaagagacagataggtttgtagtgttcacagaagaggaatcag

SEQ ID NO: 52682 - DNA, 100 bp, Homo sapiens
ggagaaactgcaggacttggatactgattatggctcaggctaccccaatggcatccgtgtcattctggaccttactcccaactaccggggtgagaactcg

SEQ ID NO: 52683 - DNA, 96 bp, Homo sapiens
gcggactcccctcgccaccgcccgagcccaggttttaaaatcaaagatgggaaaatcggagaaaattgcccttccccatggccagcttgttcatgg

SEQ ID NO: 52684 - DNA, 100 bp, Homo sapiens
tagctcactgcaacctcaaactcctgggctcgagcgatcctcccacctcagtctcctgagtagctatgactacggtttcaggtttagctgtgcctcccag

SEQ ID NO: 52685 - DNA, 100 bp, Homo sapiens
aggcgggagtgcccggctcgctgtcgcagagccgaggttcagaaaatggtcttgcacagaagcatcgaacacctcgccgacgatgtcagcagcccaaaat

SEQ ID NO: 52686 - DNA, 90 bp, Homo sapiens
tgaatctccaatgcatccatattcaaggcagaccataaatcaacttcttgctgaaatggatgggaatggaagttggatacactttgtgac

SEQ ID NO: 52687 - DNA, 101 bp, Homo sapiens
cattttggggcagaatacagagatatggaatcaggtttacatggaataccaggagagaagggggatccaggacctcctggacttgatgttccaggaccccc

SEQ ID NO: 52688 - DNA, 50 bp, Homo sapiens
aattaaaaggtgtcaagaagctcagaatgcttggtgatccagctattttt

SEQ ID NO: 52689 - DNA, 97 bp, Homo sapiens
ctcagtgagagcccagagcctggcaggagtccagaaagccagatggctgaacatcaggaaaaccagtagattcccagacatcgcgaagtgaatctga

SEQ ID NO: 52690 - DNA, 100 bp, Homo sapiens
tcaagttcctccactgagctcgctgcgtataaggaggaagcaaacaccattgctaaggtgtcctgtggccaggcggaaagcagtgagaagcccaacgctg

SEQ ID NO: 52691 - DNA, 90 bp, Homo sapiens
tcacctggggtatggagaggaaggaagagaaatgccagatagcgcagcagctctgctgggcacttgctgcaaactccagatcattcccac

SEQ ID NO: 52692 - DNA, 100 bp, Homo sapiens
aaaactcctggacaatcagtaaagagtaccatattgatgaagaagtgggctttgctctgccaaatccacagctccctgtgctgtcaggaatctacaggac

SEQ ID NO: 52693 - DNA, 100 bp, Homo sapiens
cttattgcttgtggaacaagttaccatgctggtgtagcaactcaccccacacagaccgcgtttctctccagtgtcgacctacacactcactgctcttacc

SEQ ID NO: 52694 - DNA, 100 bp, Homo sapiens
gttaaatgtgcctgaaaagcaatttgcaatctttgcattagggaccatggctaaacctcctggatcattagccagaagcagcagcctgtgccgttcacgc

SEQ ID NO: 52695 - DNA, 90 bp, Homo sapiens
gggctccaccccgtcgcctcgacagtgttctaagaacggaagcatctgggctggatggaatttagcatcaagcagagtcccctttctgtt

SEQ ID NO: 52696 - DNA, 100 bp, Homo sapiens
aaggctgagggacgagaacgagttccctgtattgaacactgatatacaaggaatgaatagaagtcaagaaaaacagacctggtgggaaaaagccttgtac

SEQ ID NO: 52697 - DNA, 83 bp, Homo sapiens
tgtcaagacatttcttcggcattctgcaacagaaatgactgctgtccatgcaggcaacataaacttcaagtgggatcctaaaa

SEQ ID NO: 52698 - DNA, 98 bp, Homo sapiens
cgcttccctcaagagtaactacaaagcacgaacttccaggagccggtgcagccgctgacacagcagcaggtggcgcagatgcagctgaagtactacaa

SEQ ID NO: 52699 - DNA, 80 bp, Homo sapiens
ctcgggctgagggagctcgggccaatcagagggacggccccagaatggcatgcaggctctccccggaggctcagccccct

SEQ ID NO: 52700 - DNA, 75 bp, Homo sapiens
agggaactcaaacagcagatgcagagaacgccagatcaagtgtcccaagtgtgataagctgttcttgagaacaaa

SEQ ID NO: 52701 - DNA, 93 bp, Homo sapiens
gacctgtctgggtctcagccgccaaagaccccgtccgagacaacattttgctctgtcacccaagctgaactgaactgggctccagaaatcctc

SEQ ID NO: 52702 - DNA, 82 bp, Homo sapiens
cggcgccgagggcgaccagatcaacgccagcaagaacgaggaggacgcggggtgtcgtgaaaactacccctaaaagccaaaa

SEQ ID NO: 52703 - DNA, 98 bp, Homo sapiens
gatttgtttctcattctcatatttcaccaataaagggaagcaccattttccacaaaactctcaagaaggacttgttgcaactggaaaagcaattaaat

SEQ ID NO: 52704 - DNA, 100 bp, Homo sapiens
cacagtcagcccttcccgccccaaagcagcttcactaccaccaccaaggagtcccactcccgccccttcagcctgctcccctcagagccctgcgagcggc

SEQ ID NO: 52705 - DNA, 100 bp, Homo sapiens
tagcattgatttcccggatctggtaacatggcaaaagataacatgacctttgacctgccatcagatgccacagtggtgctcaaccgcagctcctgtggaa

SEQ ID NO: 52706 - DNA, 100 bp, Homo sapiens
cccgggagatcccaggcggtgacagagtggagccatggctagagaccatggtgaatccgggcagcagctcgcagccgcccccggtgacggccggctccct

SEQ ID NO: 52707 - DNA, 100 bp, Homo sapiens
gcgaatatcgtcatcgttagaaggagaaaagcctttcagctgtagctggaaaggttgtgaaaggaggtttgcccgttctgatgaactgtccagacacagg

SEQ ID NO: 52708 - DNA, 100 bp, Homo sapiens
ccagaagatccagctttgttgaaaagcgaagccgttagtcccttaatacaaagggatctagtgaaaagccatttgatgtatgcggtcagagaagaagtgg

SEQ ID NO: 52709 - DNA, 90 bp, Homo sapiens
ctggccctgagtagggtgtgacctccgcagccgcagaggaggagcgcagcccggcctcgttcctgctcattttccacaaggccgcggcag

SEQ ID NO: 52710 - DNA, 75 bp, Homo sapiens
ttttggtagaagatgtggtacacactcagttaattaatctgtcaaaccggcacgatgtccaggcaccagaaccag

SEQ ID NO: 52711 - DNA, 100 bp, Homo sapiens
ccgggctcggggtggcccccgcttcagtcccagggcaggccccttcccagctgcctgcctgccctagccagctcccaggtgaagagactctcggcttcca

SEQ ID NO: 52712 - DNA, 51 bp, Homo sapiens
agatgacatgccagcccagactttcatagcttggggcttccttggtcgcac

SEQ ID NO: 52713 - DNA, 100 bp, Homo sapiens
ccagagcagcccctgaccccatctgtgaatgaggctgtgactggtctcccacgtcttcaccaactttggcaagggcatccgctacgtatcttttgagcag

SEQ ID NO: 52714 - DNA, 100 bp, Homo sapiens
ggcggcggaccgtcccgcgcggggcacgatgttgaacatgtggaaggtgcgcgagctggtggacaaagcgcagcctgcttctgcaaagtggtacgatcga

SEQ ID NO: 52715 - DNA, 100 bp, Homo sapiens
gcaggcgcgcctggccgcgaacccggaccctaagaagagtgatcagcagctggactgtgccttggacctaatgaggcgcctgcctccccagcaaatcgag

SEQ ID NO: 52716 - DNA, 100 bp, Homo sapiens
gacatgattgcctaaatcagccaaacacaggatgagtgaccgaggaggtggcgttcctttgaggaaaattgacagacttttcaactacatgtattcaact

SEQ ID NO: 52717 - DNA, 100 bp, Homo sapiens
ccggcttgccccgctatgacgtgctgggggtcatcgacagctgcaaggaggccgtcaccttcaaggccgtcagacaagacttggcttcaaccaactcagg

SEQ ID NO: 52718 - DNA, 82 bp, Homo sapiens
aatgagaaagaagatgatgaatggattcttgttgacttcataggttccagcaacagatagaaatgctttaagttcactctgg

SEQ ID NO: 52719 - DNA, 75 bp, Homo sapiens
cgccgcgcagcctgcgttttctccggtacaggttgaggctactaagtctgctttacaagaacttgaagaattgaa

SEQ ID NO: 52720 - DNA, 74 bp, Homo sapiens
tatgggaagagaagtttcctgaaagaacaactgttactgaattacctcaggttggatggcaagcatgtggtgtt

SEQ ID NO: 52721 - DNA, 98 bp, Homo sapiens
tccatttctaccttgtatgcctcaatttgctggatttaagcactgctgcactttatgagcgccactggcttcaccacgcggtcagacattgggcccgc

SEQ ID NO: 52722 - DNA, 98 bp, Homo sapiens
tgtgatccgcctgcctccgcctcccagtgttgggattataggtgtgagccaccacacccagccactaaggatattaatgcacacgcctgtgttactgg

SEQ ID NO: 52723 - DNA, 102 bp, Homo sapiens
gtcagtgaacagacacgggtgaatgctgctaaaaacaagactggggctgctcccatcattgatgtggtgcgatcggactcatctgatgatgtgagaagagtt

SEQ ID NO: 52724 - DNA, 75 bp, Homo sapiens
gaggagggcaaggactacccctttgccaggttcaataagattccgacaccatagctgagttacaggagctccagc

SEQ ID NO: 52725 - DNA, 100 bp, Homo sapiens
agaagcgaagggcaatcattccttctcacttggcctatggaaaacggggatttccaccatctgtcccaggcgttgacccggacgacacctataatgagac

SEQ ID NO: 52726 - DNA, 83 bp, Homo sapiens
ccctgtcttgggaaaaggagaactcctgactgattagcattcacaccaggattacagtttaaagacaatttctgtgatcaagt

SEQ ID NO: 52727 - DNA, 100 bp, Homo sapiens
tgagattgcatcaggatattaatgattataaccggagattctcagggcaacccagatcttttgaacaaaaaagtggtgcagtttttgatgaaattgtaga

SEQ ID NO: 52728 - DNA, 90 bp, Homo sapiens
atttccgtgggctggaaaaccccctctttcctaaggaaagatttaacgatctgatttcttgtatcaagacaaggtctcactgtgttgccc

SEQ ID NO: 52729 - DNA, 51 bp, Homo sapiens
tgaaggtctagtcaaacgcctccacaaggattcccctctaaagaccctcat

SEQ ID NO: 52730 - DNA, 50 bp, Homo sapiens
ggacggacaagcacagtcttcggaagcttccagagcagttgtagcgcagc

SEQ ID NO: 52731 - DNA, 120 bp, Homo sapiens
ggtgagctcaccgcccagcccaaaccaggagattgcgagggagcgatgcggtgcagcgcgggaacctcagggcctgatccgactactgtgtatgtggatctgaaatcactaagacatgac

SEQ ID NO: 52732 - DNA, 100 bp, Homo sapiens
gtttacatcgggaagcatcaatccggagtaactggcaagcagacatgcgtcgggatgtccaggaaatttttcgcatgaccccccacgagaagcaggtcat

SEQ ID NO: 52733 - DNA, 90 bp, Homo sapiens
cccagggccctgtggcatgaggaagctgggggcatcttctccccagaaatcttcccaaggctgcagacaccgacggatttgctttgggag

SEQ ID NO: 52734 - DNA, 90 bp, Homo sapiens
aggacaagtacaagttagaactctttatctttctgtggatccttacatggattggatagctttagtcaaagcagctgctgcagctgcagc

SEQ ID NO: 52735 - DNA, 74 bp, Homo sapiens
gtgcgcgagacgccgccgagaggtgcgcgcggagccatggttatcatgtcggagttcagcgcggaccccgcggg

SEQ ID NO: 52736 - DNA, 88 bp, Homo sapiens
gatgtcttcatccccaagccattcagggcctttgcctttgttacatttgcagatgatcaggccctgtttgtcttctgcggcctcctca

SEQ ID NO: 52737 - DNA, 98 bp, Homo sapiens
ctgctatacaacacaattataaaatgtcagcttttaaggataccatgtttgtgtggaagtgccccgtgtttgctatgccgatgctgtcctagtggaaa

SEQ ID NO: 52738 - DNA, 98 bp, Homo sapiens
aagtcagccgtgtggggtctgcaatgtctccacaaaccggaggactacccccagactgcagtaagtgttgtcatggagactacagctttcgaggctac

SEQ ID NO: 52739 - DNA, 87 bp, Homo sapiens
gcacaacagtgtatgcttgaaatcttggatactgcaggaacgggcaattgaaggaacagactaaaaatcgtgtcctggaaggaaact

SEQ ID NO: 52740 - DNA, 100 bp, Homo sapiens
aggagggttgctagtggagaaggctgaagccgacgtagcttctctgaacagacgcatccagctggttgaggaagagttggatcgtgcccaggagcgtctg

SEQ ID NO: 52741 - DNA, 82 bp, Homo sapiens
gcgcggacccaggcgcggatggcgaggccagcagctacgagttccagggagctctgtcctggtgaccgtgcccgggttatga

SEQ ID NO: 52742 - DNA, 75 bp, Homo sapiens
cacggtggcaagcaagtttaatcagacctgctcacacttcagaatagagaagaaagaacattggagctatcatgt

SEQ ID NO: 52743 - DNA, 100 bp, Homo sapiens
agaagggcgagtacgtcaaccgctgtctgttcataaaatcttcacttctgggctcaggaggtatcactggacaggccatggctccacggtcccggcgacg

SEQ ID NO: 52744 - DNA, 100 bp, Homo sapiens
acccgtgaaggcaatgatttataccatgaaatgattgaatctggtgttatcaacttaaaagatgccacctctaagcgtgtgaaggcaaagaagaatgctg

SEQ ID NO: 52745 - DNA, 100 bp, Homo sapiens
ccctgagcaaccccctcctgggctcctttcagcagccctccagctacttcctgcctgccatgccccaggtggtggttgtccaggccatcagtgccctgtg

SEQ ID NO: 52746 - DNA, 95 bp, Homo sapiens
ggaagcagggattccagtgccaagccaaaacctattgatgtacaagtcattacacaccacatgcagcgatatgcagtttggtttggaggatcaat

SEQ ID NO: 52747 - DNA, 74 bp, Homo sapiens
gttgtggtacagtttaaagatatggactccagttatgcaaaaagagatgaactgggaagtgaaaacgtgaaagt

SEQ ID NO: 52748 - DNA, 100 bp, Homo sapiens
acctgtctggtacctggtacccggcacactgtgagttcctggacatcaagggctggaagaatgtggccattagccttcggttctggcatgggattaggaa

SEQ ID NO: 52749 - DNA, 83 bp, Homo sapiens
ctccaacccattccagcaccttgagaagagtgcggtactccaggaggtggtgaagcagtattttccaatttgaagattcattt

SEQ ID NO: 52750 - DNA, 98 bp, Homo sapiens
tacagggtcaaaggagagcacaaccatcgcagttggaagcccatggggcaggaattgcattttgtgaaaaaagaacaagaattttctgcaaggatcat

SEQ ID NO: 52751 - DNA, 75 bp, Homo sapiens
gggcggtgcggacaagcgcctgcggtgagttaccttgcgaggattgctttgtagcggaaatggaggataaagttt

SEQ ID NO: 52752 - DNA, 76 bp, Homo sapiens
cagcatctttctgaagccgggagagggcctgtagggggtacccagtgtgttgaacaaattcaagagttggttctac

SEQ ID NO: 52753 - DNA, 50 bp, Homo sapiens
aaattcgcctccatctgtaccatgtatgaaaacccatggacaatcccgaa

SEQ ID NO: 52754 - DNA, 50 bp, Homo sapiens
cggcagccgggacggtcggggacgcctgaaaatcctgagcgagcagctct

SEQ ID NO: 52755 - DNA, 100 bp, Homo sapiens
gctcttcagcaagaggaccgggctgggcgcgcccggccgcgacgcccgggacccagattgcgggttcaggcttatcaggagggcagacttcaaaagctac

SEQ ID NO: 52756 - DNA, 90 bp, Homo sapiens
ggcaagatgagaaattgcgaacttgttcggccaaagattctgaagcaagtaagccaaaagatgggcaggacgccattgcacagagcccgg

SEQ ID NO: 52757 - DNA, 75 bp, Homo sapiens
aagtcagtgacatgcccatgcgagtacctgaggaaggttatcaatagtctggctgtctatcgtcatcgtgagact

SEQ ID NO: 52758 - DNA, 75 bp, Homo sapiens
acgacttcgaccctgcccagcacgaccagctcatgcagcaaatcagccggcaccaggagcagttcatccagatgc

SEQ ID NO: 52759 - DNA, 50 bp, Homo sapiens
cccgaagcctaaattccaggaggtgcctccggagccagcgtggtggccat

SEQ ID NO: 52760 - DNA, 75 bp, Homo sapiens
gatccaacaaaaacagaccagaagattaccaagaacaatgtctcccttttgcagagctgtattgacttgttcaag

SEQ ID NO: 52761 - DNA, 90 bp, Homo sapiens
tgaagcccagcgagcccctccctgtcacaccacactgcacatgtgacaccaaagctagaaaccagtgcctgaaagaaactccaattaaaa

SEQ ID NO: 52762 - DNA, 74 bp, Homo sapiens
actgggggattcgcagggaggatgtcgggacaccccggaagctgggaaatgaagtggtccaaaggcaaagttcg

SEQ ID NO: 52763 - DNA, 75 bp, Homo sapiens
gattgagccagagtctgttggggatgatctgaggcagcaggcaaaacagataacgaaggaggcccaacttcattc

SEQ ID NO: 52764 - DNA, 100 bp, Homo sapiens
gagagaaggaaggtcctggaggaggaagagcagaggaggaagcaggaggaagccgatcgaaaactcagagaggaggaggttcgggaactccaggagcagc

SEQ ID NO: 52765 - DNA, 99 bp, Homo sapiens
tattgcggccctcagcggccgcgaccgagtcatggctgagacctacgctgctggagccagttctgcttctcggcaaggagcgatttgctggtgtagaca

SEQ ID NO: 52766 - DNA, 103 bp, Homo sapiens
tcggttacaggaccctgactgtggccctcttcaccctgatctgctgtccagaatgcagagagcagtttgcagcagaagaatgaagccatcacatcctttgaag

SEQ ID NO: 52767 - DNA, 100 bp, Homo sapiens
gcaagttctgagagccaaccagtacaaagagaaccacaaccgaactcagcagcaggtagaagcagagcgaatgacaacagagctgctcaaggcgggaact

SEQ ID NO: 52768 - DNA, 114 bp, Homo sapiens
ttcctgctgctgagctacccgagcggcggcggcggcagcagcggcagcggcaagcaccgagtccaaaactacttacctggaagaccttccaccaccccctgagtatgaattggc

SEQ ID NO: 52769 - DNA, 83 bp, Homo sapiens
ccaaaagaaaggccagcacctgaagaattgatggtactccaaagattcaggtttactcacgtcatccagcagagaatggaaag

SEQ ID NO: 52770 - DNA, 100 bp, Homo sapiens
cctgccaggttcaagtgattctcctgcctcagcttcccaagtaactgggactacagggctcgcagtatgaactgaaggacaaccctggggtgcaccccgc

SEQ ID NO: 52771 - DNA, 83 bp, Homo sapiens
ctctcgcctcgggtctcgggggccgctctgggatcccggccaccagcaattgtccgaactacaggatctcatgcacatctcac

SEQ ID NO: 52772 - DNA, 83 bp, Homo sapiens
ctccactccgtcccccgcgggtctgctctgtgtgccatggacggcaaattgtggctactaatttgccccctgaagatcaagat

SEQ ID NO: 52773 - DNA, 100 bp, Homo sapiens
ggtgaccaccgaaggcagttcgggtgcagcagggagctacatggaccccatgaacgagtacaacgcgctgaacgaggccaagcagatgatcgccgtcgcc

SEQ ID NO: 52774 - DNA, 100 bp, Homo sapiens
tgagtatttgcgaaaagtgctttttgagtatatgatgggtcgtgagactaagaaattttactgcaggataaaactccaggataaaactgtcaagtgccgg

SEQ ID NO: 52775 - DNA, 74 bp, Homo sapiens
ccccatctgtgctctatatgtgatttgccagttcattctaataaggaattgaatgatctggcacgggaccctcc

SEQ ID NO: 52776 - DNA, 100 bp, Homo sapiens
ttcttttcttttccatgatatcattatatggacagtttaggatatgttccatttaaggctctgaagatggggagagaattctggatgatccaggtgggcc

SEQ ID NO: 52777 - DNA, 100 bp, Homo sapiens
gtggtgcctacccccatcactgcttccctcagccataacaggttatacattggctcttcaaagacgttcacctcatcagagaaatccctgactcctttgc

SEQ ID NO: 52778 - DNA, 75 bp, Homo sapiens
gtctacagagcggcctgcgccagcgagtcgcaatggaagaagagatcgccgcgctggtcattgacaatggctccg

SEQ ID NO: 52779 - DNA, 60 bp, Homo sapiens
ggcagtgaagcgaagaaaaggatcccagaaagtttcagcggtttccaacctagatgagga

SEQ ID NO: 52780 - DNA, 101 bp, Homo sapiens
aaagcctgcccagacggctcacctgtgcgggatggaacaaaagaacaccttccaccatgaccacctcagcaagttcccacttaaataaaggcatcaagcag

SEQ ID NO: 52781 - DNA, 100 bp, Homo sapiens
tgatatcggtggtaacgacggcctcagcaggcggggaagatgaaagggacaagaaatggattctcagtcatgaagatgtcatattgggagaattactggg

SEQ ID NO: 52782 - DNA, 83 bp, Homo sapiens
cattgtttctctccctctgcccccccttccccacgcaaccccagatccatttacactttacatccagaacacatattacataa

SEQ ID NO: 52783 - DNA, 90 bp, Homo sapiens
cccaagctcctcaatgtcaatgccaatgacccacctcctatatcagtaacaatgatgatgttatgttgatttctgtggaaagtcctaatt

SEQ ID NO: 52784 - DNA, 101 bp, Homo sapiens
ggaacttgccctgtctcctcgcagatgaggaacctagaaagattgtacaatgaatggtgattctcgtgctgcggtggtgacctcaccacccccgaccacag

SEQ ID NO: 52785 - DNA, 100 bp, Homo sapiens
ccaacctctcagacagcggctctgtgaagcggggcgaaaaggacctgcgcctgggggaccgcgtgctgatttccatgaggacaacttacaaggacctgta

SEQ ID NO: 52786 - DNA, 83 bp, Homo sapiens
cggacatcactttagaccctccacctaattgcagatgctattccaagttcagatcaaattcgagtagcaccatctttaaaaag

SEQ ID NO: 52787 - DNA, 100 bp, Homo sapiens
ctctggagtaattggagccaagaaatgagtataggtcaaggtgaagatgttcttaaagggtcccagattacgtatgttacaggtgtagaaggggacgacg

SEQ ID NO: 52788 - DNA, 114 bp, Homo sapiens
tgaggatagtttagaaggatgcttggattgtctgcttcaagccctggctcaaaatatggaagtatgcgagacttaagagctcaagtgactagtggtctcctgccatttccagaa

SEQ ID NO: 52789 - DNA, 98 bp, Homo sapiens
atggcccttatcctattgaaggaggactctttggatgtgtacctgaaggaaatcttaaaagaaattggtgttcagaatgtaaaagggatccacaaaaa

SEQ ID NO: 52790 - DNA, 98 bp, Homo sapiens
agccgcgcagccctcggagcacgtaagactttgaccccgacgcaggcttcagtgattgccgcggatcagaagcctgagcactttggctcgagacaatt

SEQ ID NO: 52791 - DNA, 100 bp, Homo sapiens
tccagcgagatccgggccgtgaacgaaagcagtgacggaggagcttgtaccaccggtccgtaaaagccctgggctcagccagagcagggcagaggatgac

SEQ ID NO: 52792 - DNA, 75 bp, Homo sapiens
tctgaacttctcatgaaactctcagcttcctgcctgacacagctcacttcaagaagtgcacaatgtcagaacgtg

SEQ ID NO: 52793 - DNA, 83 bp, Homo sapiens
cagtgttcaccatcctggccccggaagtgaactttgaggcgctgatcatcaccatgtcggtagtcgggggaaccctcctcctg

SEQ ID NO: 52794 - DNA, 108 bp, Homo sapiens
cagtggtggctatgaacccagaggtcgtggaggtggccgtggaggcagaggtggcatgggttttctggatatgccgcagaaggatccgtgccagaagcaagcctgtga

SEQ ID NO: 52795 - DNA, 100 bp, Homo sapiens
cacagacaacccttgcataatgtgtgtctgcttggtttatgcatgtatgatggttttcttcttgagcaacatgattgagaaccagtgtatgtcaacaggt

SEQ ID NO: 52796 - DNA, 90 bp, Homo sapiens
atcccaggacaggtggcactctttcagacaatgcagatcttcgtgaagactctgactggtaagaccatcaccctcgaggttgagcccagt

SEQ ID NO: 52797 - DNA, 51 bp, Homo sapiens
ttctccttcctgggagcctgggcgcagcttccttcaaaatgtctactgttc

SEQ ID NO: 52798 - DNA, 50 bp, Homo sapiens
cttcagcagaggctgcagggccagcagattggaggtggacacaaaggaag

SEQ ID NO: 52799 - DNA, 100 bp, Homo sapiens
tggcaaacctttcttgagctcaggtgacctcacaaagttcggccgtggggatgcctcctccccagccccggccacaaccttggcccaaccccaacagaac

SEQ ID NO: 52800 - DNA, 49 bp, Homo sapiens
gtgggtgtaatacatcatgaactgcaggctctttcgacgtgtagcagca

SEQ ID NO: 52801 - DNA, 83 bp, Homo sapiens
cttcatgaaaccattaaagttttagaagatcgcaaaagctggcaggctgacagaggcggcctcaggacggaccttctggctac

SEQ ID NO: 52802 - DNA, 100 bp, Homo sapiens
accaacaggctctagccaacatgcagttacaacagcatacagcatttctcccaccagaaactggcgatggaatatgagaggagccctctggaaagaaaag

SEQ ID NO: 52803 - DNA, 75 bp, Homo sapiens
atttcagtcactggtttgcagagtccagatcctgataacttaagtgactctctcttttccggtgatgaagaaaat

SEQ ID NO: 52804 - DNA, 100 bp, Homo sapiens
aaagttcttttcatttccagttgcctgttattcctgtgactggtcctgtggctcagctctacagcttacctcctgaagaatggagctggtttgtcaaaat

SEQ ID NO: 52805 - DNA, 100 bp, Homo sapiens
cttcaagcttaggaccacccaccatgcctatccaggtattcctggagtggagagccactctttttgacctgccctacatcagaagtcaccgagctcccag

SEQ ID NO: 52806 - DNA, 87 bp, Homo sapiens
gcagcgggcccttggcgggggactctgagggaggagctggggacggcgaccctaggagaggtggtcctggctctgccatatgacacc

SEQ ID NO: 52807 - DNA, 51 bp, Homo sapiens
cagaaattctggaacacctatatgatggccgccctgctcccccaatgaaag

SEQ ID NO: 52808 - DNA, 88 bp, Homo sapiens
cttatagttgagaatttatcctcaagagtcagctggcaggactttgtgttttatgccccacgtctgagaatcaacaagcggatcctgc

SEQ ID NO: 52809 - DNA, 100 bp, Homo sapiens
ggtggagcctccgggcctgacgtggaccttcactggagaagtgactcagtccaacatggctgttaccaaactggagctggaagacaattgcatcatggag

SEQ ID NO: 52810 - DNA, 100 bp, Homo sapiens
ccatcttccaccgacaagccgtcggttcctacaacagcagccagtacccctgatgccgttgacaagtatctcgagacacctggggatgagaatgaacatg

SEQ ID NO: 52811 - DNA, 87 bp, Homo sapiens
gccggcggtgatgcggctgtgaagccctagtcgacaaaacctgctacaaccccctcttcaactacgaggacatgcaggagatcaccc

SEQ ID NO: 52812 - DNA, 100 bp, Homo sapiens
gtgtatcaagtaatggtgcaaagcctgaagtttcaccagaagtggttagatcaaaattgtccccgtcaccttctctaagaaagtctagcaaatctccgaa

SEQ ID NO: 52813 - DNA, 82 bp, Homo sapiens
ctcacggtcctcctggctgtgctcatatacacctgggttgaaaaatataggccagtaaagctgaatgaaattgtcgggaatg

SEQ ID NO: 52814 - DNA, 87 bp, Homo sapiens
cggggagaggaccatgtgagtgggctccggagcctcagcgccgcgcagtgcagctgtctgcttcagaaagtgagggctccaggaatg

SEQ ID NO: 52815 - DNA, 100 bp, Homo sapiens
tattcctcctcctgttcctatgtggaactccccaggctgcagcgtgggccagaggcagctcgtgtgcctggcccgagccctgctccgcaagagccgcatc

SEQ ID NO: 52816 - DNA, 100 bp, Homo sapiens
aacatgacttccaagctggccgtggctctcttggcagccttcctgatttctgcagctctgtgtgaagcatttttgaaacgttggggttgttggagtggtt

SEQ ID NO: 52817 - DNA, 100 bp, Homo sapiens
gggacccatttctcctcctttgacagggacatcagtggagccttctcagacccacagagatggagtttcaccatgttggccagactggttccgaactcct

SEQ ID NO: 52818 - DNA, 99 bp, Homo sapiens
tatcaaacctttgatcagtactcctcctgtttcatcacagccaaaggttgaagttcatgagttcgcccagcctcagtgacctgggcaagagagagccgg

SEQ ID NO: 52819 - DNA, 100 bp, Homo sapiens
cgctgccctgaggcactcttccagccttccttcctgggcatggacatatctgccattgacttgataaacatcgagagcttctccagtcgtgtggtgtctt

SEQ ID NO: 52820 - DNA, 80 bp, Homo sapiens
gcacctttgctgtattcacacaccttcctctgacatcccagcatccttacgctgaagttttcatcgggcggccacatgtg

SEQ ID NO: 52821 - DNA, 98 bp, Homo sapiens
ctcttatttagttctggggagcgcctcgtcgacatgagtgatgtggaggaaaacaacttcgagggcagatggttagcaggaagaagatgagccttaag

SEQ ID NO: 52822 - DNA, 90 bp, Homo sapiens
gaggtggacgtggcggcccagctgggcgagtatctggaggagctccagcagtacccgcggctacgggaggagatggagcgcatcgtgacc

SEQ ID NO: 52823 - DNA, 87 bp, Homo sapiens
gctctgcacatctgcgccctctacaacaaggtaacccagaatctcccaatgaaagaaggctgcacagaggtctctctccttcgagtt

SEQ ID NO: 52824 - DNA, 82 bp, Homo sapiens
cactcccgcccacgtcccatttcgcccctcgcgtccggagtccccgtggccagaccatggtgaatccgggcagcagctcgca

SEQ ID NO: 52825 - DNA, 100 bp, Homo sapiens
tgtgcaaccctccaagtggaaaatttcgctaaggagtttgtgatcagtgatcggaaggagctggaggaagatttcatcaagagcgagctgaagaaggcgg

SEQ ID NO: 52826 - DNA, 88 bp, Homo sapiens
agggtgcctgggaatcggtcgcctggaggaccagtatttcccatggagggcattgaacctggccacatcccaggtaccgtgaacatcc

SEQ ID NO: 52827 - DNA, 51 bp, Homo sapiens
tctgagactcctgctcagtgtagcattaagacacgaagatcgattgagaag

SEQ ID NO: 52828 - DNA, 100 bp, Homo sapiens
tggtctccatgctcggatgcctccccctgtggagccccctactggagatggagcactcaccagtgagggtcgctgtctgcccattgatagaggccagatt

SEQ ID NO: 52829 - DNA, 83 bp, Homo sapiens
cgcgcgcaggcggtttcgcgagcgcgttggagcggcactcggagcttctacagaagccacttccggctcctgcgtcgctccgg

SEQ ID NO: 52830 - DNA, 100 bp, Homo sapiens
gtgaaggctagcctctatgtggccatgaatggtgaaggctatctctacagttcactgcctgtgtcagggaatctgcttgatgtgtacagtagtcaaggcg

SEQ ID NO: 52831 - DNA, 95 bp, Homo sapiens
taaaactccagcgagatccgggccgtgaacgaaagcagtgacggaggagcttgtaccaccgaagcagcgctatgcaaacaagcactgaagaggaa

SEQ ID NO: 52832 - DNA, 90 bp, Homo sapiens
cggtttgctatcgggactcggcgaggacgtcctccgggcctcatatgaacaggagaaagaagcgcttacccactctttccgggaggccag

SEQ ID NO: 52833 - DNA, 80 bp, Homo sapiens
cggccggccagccgaagatggtggcggctactcctcctgccggcacagtcttcactaccgtagaagaccttggctccaag

SEQ ID NO: 52834 - DNA, 82 bp, Homo sapiens
accgacttgacctcttagatcagattcctgacattcagacaactgacttgtaactgacttataactgacttgtaatacactg

SEQ ID NO: 52835 - DNA, 108 bp, Homo sapiens
aaataacaggaaacacatgaaaaatgccacgattgtaatgtctgtgaggagagagcaaggcagttcttcaggggaggtatctctcctaaatgtgtgatcaaggaatta

SEQ ID NO: 52836 - DNA, 106 bp, Homo sapiens
ctcttactttgtcttcactggaatccattctggcacctcaacggctgatgatttctgcctcctgatttgtatgataccaacacatccctcagtatgtctcgagatg

SEQ ID NO: 52837 - DNA, 97 bp, Homo sapiens
gcgcgccgctgctcccggaccgggccgcgcacgccgcctcaggcagagatcctacaagaatccaggatgatgatcccagattgccagcgcaggttgg

SEQ ID NO: 52838 - DNA, 99 bp, Homo sapiens
gtggaagattgcgtcacgacgcacataaagacgtacgaagccgtcgccaaacacgttggtcgtcattgcctccgagcccactttagccctcagctctgt

SEQ ID NO: 52839 - DNA, 75 bp, Homo sapiens
aatggcttgtgaaatcatgcctctgcaaagcatcaacaacagcaacttgtgattggcggtgaccggatattcagt

SEQ ID NO: 52840 - DNA, 100 bp, Homo sapiens
gtggatctgacagatgccagcgtagctgaatccagtaccaaaaacgtcaacaacagttttacgatgaaagccttgagggaattagacagattttctgttt

SEQ ID NO: 52841 - DNA, 100 bp, Homo sapiens
gcagagatggatccaatactctggtaccgacagattattgtggatgatgatgacagtaagatatggtcgctctatgacgcgggcccccgaagtatcaggt

SEQ ID NO: 52842 - DNA, 75 bp, Homo sapiens
ccatccccatcttacagatgtattaagaagcctcagatttggagcaagaggtggtggtggccttcccccgaagaa

SEQ ID NO: 52843 - DNA, 89 bp, Homo sapiens
gatttcctgcttctccttttcatgagtgttcctgtggtctctgcacctcctttctctgactcttttggtgatcccttcttcccccggac

SEQ ID NO: 52844 - DNA, 100 bp, Homo sapiens
tgggcgccgtccctcaccgcggcatcaagcaggtccggacccactggctgctggagcttgtcaccaccaggttggagtccgtgcggctggagtaccgtgc

SEQ ID NO: 52845 - DNA, 75 bp, Homo sapiens
ggcggaaaggataagcctcgacttagaagctaccgagttaccctaagaaagaggtgccattcacatcaaatgtag

SEQ ID NO: 52846 - DNA, 51 bp, Homo sapiens
gagaatggagaagaaggttgattccaggtgtgaagatgccttaagaaaaaa

SEQ ID NO: 52847 - DNA, 83 bp, Homo sapiens
ctgaggtgtccgtaaagattccagagaagcctgtgaacaaagtaaactgtcttgagccccaccctcacctgcctgtgctggca

SEQ ID NO: 52848 - DNA, 93 bp, Homo sapiens
gccacccgttgagggtcctgggggccgccctctccgcaagtccttccgccgggacaatgcagatcttcgtgaagactctgactggtaagacca

SEQ ID NO: 52849 - DNA, 75 bp, Homo sapiens
gttgaagaagtcatgaaaattaaagcagaaataaaggctgccaaagcagatcgggtgctaccaaggttttgcttt

SEQ ID NO: 52850 - DNA, 74 bp, Homo sapiens
aggcaaatgaggaacagggcaatagtatgatggagcttgtacctccaggcccatacatccttccaaagctccca

SEQ ID NO: 52851 - DNA, 90 bp, Homo sapiens
cctggtggatgatgacttctcagccatcatagctacagagacttctgaagtggagagtctgcgacctcctcggttcttcaatgaagatgg

SEQ ID NO: 52852 - DNA, 74 bp, Homo sapiens
tttgacatggctagcttgataaataatccagccttcattagtatgctattcaggattatgaaactgctcaggaa

SEQ ID NO: 52853 - DNA, 90 bp, Homo sapiens
ttccgagtcaccgcagcgggagacctgggtgggggagggaagaagccggagccgccgcaagccacacggcaggccagaaagcagacccag

SEQ ID NO: 52854 - DNA, 100 bp, Homo sapiens
actcagatcgacattactgctcatgcctaaccttctatgaggcagagatcaatcttcagatatggaatgtgcagatgtcccactattaactccaagcagc

SEQ ID NO: 52855 - DNA, 97 bp, Homo sapiens
aacactgttattgtaaacaaagttggtcgcattatgtttcagctcttctcagacatatgtccaaaaacatgcaaaaacttcctttgcttgtgctcag

SEQ ID NO: 52856 - DNA, 75 bp, Homo sapiens
aagaacggcagccttgactccccagggaagcaggatgctataaaatcaccacggtctttagccatgcacaaacgg

SEQ ID NO: 52857 - DNA, 76 bp, Homo sapiens
cttttccacagggaattgagttggtcttccgaccccgaactccaccggaggcaattgcactgtgtagccgtctgct

SEQ ID NO: 52858 - DNA, 80 bp, Homo sapiens
agaagatcaaaacccaccatgccccagagctgttcctttgggtaccatgctggtggctggggcaaacctccagtggatga

SEQ ID NO: 52859 - DNA, 100 bp, Homo sapiens
cttgttttccttcttggacttatgctatttttttgtggagacttgctgagcaggaacagcatatgccatatatgagctggctgtggcttcatttcccaag

SEQ ID NO: 52860 - DNA, 89 bp, Homo sapiens
ttttggctctgcgtgagtgtggtctacgagctgtttctcatctttatactcttccagatacttccgggtcatcctcctcctcctcctgg

SEQ ID NO: 52861 - DNA, 75 bp, Homo sapiens
cctcgccaaagcagagaaatagtcaccgacgatgagggcgcacctgctgtcctggagcttccgatctctgttcgg

SEQ ID NO: 52862 - DNA, 74 bp, Homo sapiens
tggcttagtggctgcgtgtgcagctggagggcagggttggattgagattgttggatgtgctgatcgttcctgtt

SEQ ID NO: 52863 - DNA, 101 bp, Homo sapiens
tcctagtgctagcagcttagatgccatttctcctgttcaggtggtggtgcccacccgcgtggggcagggctatgtatacgaggccgcccagccggagcagg

SEQ ID NO: 52864 - DNA, 95 bp, Homo sapiens
tgcatgcgttgcctgaagaaatccaaaaggacacttggtggggttcccacacaagctcctccacctcttgaagcaacttcatcatcacaaattat

SEQ ID NO: 52865 - DNA, 100 bp, Homo sapiens
attttaaaatgctttcgaggaaacttgctcaacttcctgatagatgtacactgaaaactggacattataacattaagtggtacaacatcttggccctgca

SEQ ID NO: 52866 - DNA, 50 bp, Homo sapiens
caggcttctggggctgactcaactgatcttatgccttcattcatccggca

SEQ ID NO: 52867 - DNA, 74 bp, Homo sapiens
cggaaccagaagcagattgccaacattgaccgtattacaaagggttatggttttgtgaaattcacagatgaact

SEQ ID NO: 52868 - DNA, 100 bp, Homo sapiens
ggagtgttccttccgctagtgatcctttgcaccctgcttggagacggacttgcttccggttgttttggaaaccgaaataacaaataagtccgctttgaaa

SEQ ID NO: 52869 - DNA, 82 bp, Homo sapiens
cgggaggctgaggatatggtgcagaaggtgcacagccacagcgccgagatggagatttctgcgccaggagatgaggggcggt

SEQ ID NO: 52870 - DNA, 75 bp, Homo sapiens
ttatggcgaatgcaacccgaagagagagtgagcttggttctacagccattgggatccagacatcagagggtgtgt

SEQ ID NO: 52871 - DNA, 88 bp, Homo sapiens
agaattatacctagaagtctactaatggacagttagtcacccacctacatgttgaggttatcttgacgaatcagattacaacccatct

SEQ ID NO: 52872 - DNA, 87 bp, Homo sapiens
cgcgcgcgcctcgacctgctgctggagacctggatctcgcgccacaaggagatggaacttgctactaccagcaccatgccctaccaa

SEQ ID NO: 52873 - DNA, 82 bp, Homo sapiens
acgcagttccgacaaaggtcgcctttgctactaccgcgactggctgctgcggcgcgagtgagaaagatcagtctaaagaaaa

SEQ ID NO: 52874 - DNA, 100 bp, Homo sapiens
ccttaaatatgcatgagtcttctcaacttgaaggtcatttaaccaacctcagctttacaaaccctgaatttataactgaaacccctgaacagtgcccaag

SEQ ID NO: 52875 - DNA, 87 bp, Homo sapiens
ggcgaccaagatcaggaacctgccctgatttgggaatggatgatgaaggagatgatgacccagttcctctaccaaatgtgaatgcag

SEQ ID NO: 52876 - DNA, 75 bp, Homo sapiens
ggaatcttctggtgtactctttttatgaaaaggaaattctaaaggagaatttaaggatgtttgaattagttcaga

SEQ ID NO: 52877 - DNA, 75 bp, Homo sapiens
cgggatctcggtgctgcagacggcgagacctcctgcacagggtaacccagtgcaagtacaaacgcatcggctgcc

SEQ ID NO: 52878 - DNA, 100 bp, Homo sapiens
ctgccgcttcgaggggcagttcagcatcaacaaggacccacgcagccacccagcctcagcactcatctgcgcagccatggaggccctgggacctgggggc

SEQ ID NO: 52879 - DNA, 100 bp, Homo sapiens
ggtacccggctctgcatcgcgtcgccatgatgggccatcgtccagtgctcgtgctcagaggtgttccctgtcttggctgcaaagcactgtatcatgcagg

SEQ ID NO: 52880 - DNA, 99 bp, Homo sapiens
tccgcgtcggcaagaagatcggctgcggcaacttcggggagctccgcctaggccaccagcttgggctccccacggagggcagcaagtgggacttgggga

SEQ ID NO: 52881 - DNA, 98 bp, Homo sapiens
agtgcgttccctgcacagaaggattccgaggctggaatggacagtgccttgttctggacatggcaagacatgtgccactctatcgggcactgctggaa

SEQ ID NO: 52882 - DNA, 98 bp, Homo sapiens
aggaacgaatgggacaagatcccgtccatgaatcaggctaaagaattacctccaaagccattgtcaagaccacagcagtcatctgcaccagtccagct

SEQ ID NO: 52883 - DNA, 82 bp, Homo sapiens
gagtagctggcggtcccgggtgctgctggtactaggttttgacaagcttgcatcatgcgtgagtataagctagtcgttcttg

SEQ ID NO: 52884 - DNA, 101 bp, Homo sapiens
atatctgcgaattgggaatcagtaagtttcctccagcttatggaggcatatctgaggtgaatcaacctgccgaattgatgccccagttttctacaattgag

SEQ ID NO: 52885 - DNA, 80 bp, Homo sapiens
gaggaacttggctaggctggccccgagcggaaccagagaatgctgaggtcattatttagaagcaaggtccttgaatgagc

SEQ ID NO: 52886 - DNA, 98 bp, Homo sapiens
atggctcctgaacagttgcactgtaaaaaacccagctgaagaccactttagaaactcaattaaatgcctgtgaggagccaccaacatttgaagctatg

SEQ ID NO: 52887 - DNA, 126 bp, Homo sapiens
gtagcatatatcctaaaggagatggaagtgatgtaccatcatgggtagcctttgataaacagttgattatggaagattcccacaagagtaccacgtcagagacagcacctcaacctggttcagcag

SEQ ID NO: 52888 - DNA, 83 bp, Homo sapiens
actctttaaggaaataacatttagagtggactgtgcccccagcagcccccaagataacgtgaaggactggagcaaggtcgtcc

SEQ ID NO: 52889 - DNA, 75 bp, Homo sapiens
catgtcagccttcccagtagctgggaccacagatgatccagatcctgatgatggatttaactataaacagatgat

SEQ ID NO: 52890 - DNA, 75 bp, Homo sapiens
gaagaagaattcctcactaatgagctctccagaaaattgatgcaggctattataatggttttagagtcaactgga

SEQ ID NO: 52891 - DNA, 98 bp, Homo sapiens
cgacggccttgagcgaggaggagctggacaatgaagactattactcgttgctgaacgtgcgcagggaggagtagcccatcgaagccagagcagtgaag

SEQ ID NO: 52892 - DNA, 82 bp, Homo sapiens
gagtcatgagcgacagcggcgagcagaactacggcgagcgggatccggccccagctgtcgaaggagaagattgagggctgtc

SEQ ID NO: 52893 - DNA, 85 bp, Homo sapiens
cccctcctccaccagaggactgggaggagcatgtcaacagctccctcgtgaaagatgcttctgttcctctgattgatgttacaaa

SEQ ID NO: 52894 - DNA, 100 bp, Homo sapiens
tgcatcttgtaatgtgtttaacaaagccacgaataacctataatgaagaagctcattcacacagaagacccatttaatgatgaacatcaggagaggcaag

SEQ ID NO: 52895 - DNA, 90 bp, Homo sapiens
tgggatccacacagctcagaacagttggatcttgctcagtctctgtcagaggaagatcccttgaccgagacatgggtgcccggcaccgcg

SEQ ID NO: 52896 - DNA, 97 bp, Homo sapiens
taatgctttctggactaattgaagaaaaaagtaaactacttgaaaaatttagccttgttcaaaaagaggcccggattgcatttctacaaggcgaaag

SEQ ID NO: 52897 - DNA, 100 bp, Homo sapiens
tgggaacactggagacctgatttctaactgacgctaccgtcgcggccgccgggctcgtcggaaaaaaagttctgctagaaaatttggtctacagaaactt

SEQ ID NO: 52898 - DNA, 100 bp, Homo sapiens
gaggatgtcgccgtcccgggcggcgtggacctcctcaccctgccgcagctgtgcttcccagaacctgtctccagagaagattttccacgtcattgtggcc

SEQ ID NO: 52899 - DNA, 75 bp, Homo sapiens
atggggctgatggaggcatggcgggagatgtagtctggagctcataacgactcctgaggaagaagagattttaaa

SEQ ID NO: 52900 - DNA, 71 bp, Homo sapiens
ggattccaagtaactcttatttgcctctactgccccaaggacaacatcgaggaagccctcctgctcctcct

SEQ ID NO: 52901 - DNA, 83 bp, Homo sapiens
ctgttgttggatcaccaatgtctcagggacttgcttccaaagaagcactaccacaggaagagcaagaaggaagtggaagtgag

SEQ ID NO: 52902 - DNA, 82 bp, Homo sapiens
ggaaatccaaaggcagacagtacgggctcccttcgccaaactcttcattttctctgtatgtgagactctgtgaagtagtcga

SEQ ID NO: 52903 - DNA, 82 bp, Homo sapiens
tcggcggctcagttgtccatgaccctgaaggtccaggagtacccgaccctcaagggcagctgtgcggagggtagtggcagcc

SEQ ID NO: 52904 - DNA, 100 bp, Homo sapiens
cgccccggcaaccacgagcccagccaatcagcgccccggactgcaccagagccatggctcgtggtcccaagaagcatctgaagcgggtggcagctccaaa

SEQ ID NO: 52905 - DNA, 74 bp, Homo sapiens
gggctgcggcgtgtgcgcgcccgccagctgctccggagatacggctcccaatcgtcaactcatgacttactggt

SEQ ID NO: 52906 - DNA, 138 bp, Homo sapiens
tgccttctacttcagcacatggaactctgcctccgcagttcttagtccgtacccggcatttcaacaaaaatgagtctaccatggctcaagaatctcccaaaaattcagcagcagaaattccagtgactagtaatggag

SEQ ID NO: 52907 - DNA, 100 bp, Homo sapiens
cccagactcagaccaccaccagaaccatcacctcggagacccagacaatcacaggaacccaggcgttgcccccactcttctccctcggctaccaccagag

SEQ ID NO: 52908 - DNA, 74 bp, Homo sapiens
gcccggcgccagcacatcgcaggtgtcatggagaaactccagctgggcccagagattctgcagcgggaaaatcc

SEQ ID NO: 52909 - DNA, 75 bp, Homo sapiens
tctacttccattataatgcatttcagtggaccgtataatagacgctggccccaaaggaaactactctcgatttat

SEQ ID NO: 52910 - DNA, 50 bp, Homo sapiens
cggccactgtgtggtgggaagaggccgtgatggaatggggagaagatatt

SEQ ID NO: 52911 - DNA, 82 bp, Homo sapiens
ccagatgaggcaggagctcatcgatctccggggaccgggtggcccagttgaaatccttcccttcctctaccttggaagtgcc

SEQ ID NO: 52912 - DNA, 76 bp, Homo sapiens
ccccatggccaatggaaaacctggcgaccctaagtcaggtactggagattgagagcagttggcttctggaggtggc

SEQ ID NO: 52913 - DNA, 83 bp, Homo sapiens
catgaacccgagctatagagaaaggagatgagatgatatcatcaagttgaatcgaaaggaagggaagaagcagaattttccaa

SEQ ID NO: 52914 - DNA, 100 bp, Homo sapiens
ttcaaggataagggtgacagcaacagctcggcgggctggaaggacccagatgatgtggtaccagttggccaaagaagagcctggtgttggtgcatgtgct

SEQ ID NO: 52915 - DNA, 74 bp, Homo sapiens
ttgataaggaaagtactgtccaaatgaattatgtcagcaacgtatccaagggaactgggaacagccaggtgccc

SEQ ID NO: 52916 - DNA, 50 bp, Homo sapiens
ctgggtgctggtgcctatagcatgagatcagtatttaaggacaaccaggg

SEQ ID NO: 52917 - DNA, 50 bp, Homo sapiens
cagcagctcagatggcagcctttgtggaggcatttcatccttcatgaagc

SEQ ID NO: 52918 - DNA, 87 bp, Homo sapiens
cgacccggagcacccgacccctgagataaaagaatcagagtgtctcaacccttgacaagaggaccaagtgcctttattccagagaag

SEQ ID NO: 52919 - DNA, 73 bp, Homo sapiens
ttcggatccccccagggattcccccaggagtgcccagaggatgcggctgtgaaggggcggctggtggaatgtc

SEQ ID NO: 52920 - DNA, 46 bp, Homo sapiens
agaatcaccagcactggctgaagatattaataaggcagcggaaaga

SEQ ID NO: 52921 - DNA, 98 bp, Homo sapiens
aataccagtccccagtgagggtgtacaaatacccctttgaattaattatggctgtgttacagcacatgaaggccgtgcaggcagatcaggagcgggag

SEQ ID NO: 52922 - DNA, 51 bp, Homo sapiens
cccgcgggggagccccgggagccgcacggtagcacaggcggagtgcagcgg

SEQ ID NO: 52923 - DNA, 74 bp, Homo sapiens
atgggaaatgaaacatgatcaccagggcaaggcctacaatgggcaccatcaagccttggaagtccttctgcagt

SEQ ID NO: 52924 - DNA, 75 bp, Homo sapiens
cccagtggtcacctcacactcctccaaggaggcatttcatccttcatgaagccattcaggattttgaattgcata

SEQ ID NO: 52925 - DNA, 114 bp, Homo sapiens
gaagaactcgtcatgctctttgtagcgtggtgcttctgttgctcacaggattcaggagcagttccagaaaaatcccgacagttacaatggtgctgtccgagagaactacacctg

SEQ ID NO: 52926 - DNA, 97 bp, Homo sapiens
ttcgcgaaaacccggaagcggatcgcgtggagtgacggtcccacggcagcgcgattgacttctaaagactcttggtacgtgaggaagaaacccggaa

SEQ ID NO: 52927 - DNA, 74 bp, Homo sapiens
agaaagttaactgaattggtgacacttcgggtctctcacagaggaagaatagaacatttggattcaggtgatct

SEQ ID NO: 52928 - DNA, 75 bp, Homo sapiens
ggcgactaagaggcgaaaacggtgacgaggaaacatttgaaaactattatcgaaaacaaagaaagaaacaagcaa

SEQ ID NO: 52929 - DNA, 75 bp, Homo sapiens
tgcttgatatcacagaggaaactctgcattctcgcttcctggagattggtgctgaagacatggacggcttccagg

SEQ ID NO: 52930 - DNA, 74 bp, Homo sapiens
aagcggtggtgaggcaggctcgcctcctccagctgttgttgctgctgggtgaaaatcctatttataagagtgcc

SEQ ID NO: 52931 - DNA, 74 bp, Homo sapiens
agtccctgaaagctggcctcgattacaaccgcagttaccagatcagacactcctctaatttacaaagcagtgcc

SEQ ID NO: 52932 - DNA, 100 bp, Homo sapiens
ttatctcattgaagcttggaattacatagctggaaaggatcttacaggttgaaatcacaaagattagacacctttttagataggtgttcttcagcaccac

SEQ ID NO: 52933 - DNA, 100 bp, Homo sapiens
tttgactgaagaacagaaggcgatcaaggccaagtatccgccagtcaataggaagtacgagtgtgaggaacagcggatgaaagagcacccctcattcgaa

SEQ ID NO: 52934 - DNA, 75 bp, Homo sapiens
tttacataagaagttacctttttcagatcctctgtcgatgggtcctcagaaagctctggaaaccatcggtgcaaa

SEQ ID NO: 52935 - DNA, 144 bp, Homo sapiens
ggcctggcttctgtcctgtgcttgtagattcgcccggaccaggaagcggatcgcgtggactggaagtcacactgcggcgtcttacacagtgtgggccatgtggtgaatgtgtacctgttctccatcagccccctcagcgtcctc

SEQ ID NO: 52936 - DNA, 82 bp, Homo sapiens
gtgacaactttcgtttccctctgagggaattgggaggtcggcggccccaaaagttttaaaatcaaagatgggaaaatcggag

SEQ ID NO: 52937 - DNA, 83 bp, Homo sapiens
ctggaatcatgggagaaaaccagacctccacttccaaggatatagagcaggttgtggcagcactgcctgaaggtatgagacca

SEQ ID NO: 52938 - DNA, 80 bp, Homo sapiens
ctgaaacggattgccagagaattggcagaaggcacattttacaatatgggataagctattggaaagatctcggaaaatgg

SEQ ID NO: 52939 - DNA, 51 bp, Homo sapiens
tgtcacaaaagcggatgttgaaaaggctcagaacgcccagcagctccatga

SEQ ID NO: 52940 - DNA, 82 bp, Homo sapiens
cgtggtcgtttgtttctccaaggtttgaaaagcagctggcctgcaagttcattccttggaagaagctgtaccatcgatacct

SEQ ID NO: 52941 - DNA, 54 bp, Homo sapiens
ggcccctgggtccacgtggcgcgaaagtgaacagggatattgtgtcaggcctga

SEQ ID NO: 52942 - DNA, 99 bp, Homo sapiens
caaagaaactataaacaatttagatacttcatcatctgacttcactatattacaggttatgaagacagtatggagtttccagaccatagtagacatttg

SEQ ID NO: 52943 - DNA, 75 bp, Homo sapiens
ggagatcatagcagagtacgatactcaggtcaaaggtgctgggactctggtgcccccaaccctgggcatcctcag

SEQ ID NO: 52944 - DNA, 74 bp, Homo sapiens
gaagtggagaagaaatcagtcagccgcagggctgctgctcagagcaaattaggtcactacacagatgcgataaa

SEQ ID NO: 52945 - DNA, 100 bp, Homo sapiens
ggacagaatcatctagaaggacaaatgaacttcaatgcagattctagccaacataaagttggccagtcagtgctgaaagatgtaagcaaagtgaagaagc

SEQ ID NO: 52946 - DNA, 100 bp, Homo sapiens
ttgtatcctagatccccttctgctgtttccgcttcatatgaaacaaccttgtctcaagaaagagattctactatgtctcaagtattcccatgtgttttaa

SEQ ID NO: 52947 - DNA, 51 bp, Homo sapiens
cgcgagtcggcgcgcgggacgaagaccagagtctcactgtcgcccaggctg

SEQ ID NO: 52948 - DNA, 99 bp, Homo sapiens
ccttacctgtttttccagctcacccactgccagcagaggcaacaggacctgtaccgaatcctgaaggcctacaccatctaccggcctgacgagggttac

SEQ ID NO: 52949 - DNA, 100 bp, Homo sapiens
tttcaaatgaccaccatgttgcaaaagattcacaatgacatcctttcaagaagtcccattgcagacttccaactttgcccatgtcatctttcaaaatgtg

SEQ ID NO: 52950 - DNA, 107 bp, Homo sapiens
ctggcgagccgcagtgaggccaacgccgtgttcgacatcctggccgtgctgcagaaggatatggccctgaagccacatgagcggaaggagaagtgggagcgtcgtct

SEQ ID NO: 52951 - DNA, 82 bp, Homo sapiens
gaagcaagcagttcagaagagccaaggaataaacatgcaatgaacccaaaagggtgtggcagagaagacacagcttctgaaa

SEQ ID NO: 52952 - DNA, 75 bp, Homo sapiens
gattcgcagtggtcgcttcttctccttggcaattaagttggaatatgcaaggttggttaagttggcccaagaaga

SEQ ID NO: 52953 - DNA, 90 bp, Homo sapiens
cggcagcggcctgcacaccaagggcgcccttcccctggatacggtcactttctacaaggctttttcttctggggtggatctttccatggc

SEQ ID NO: 52954 - DNA, 98 bp, Homo sapiens
gctgagatatgatgattttgaagtcatttcacatcgaagccatgatttaaatatcggcgttaagcccagcgatctgctcacgagctgcccatggttga

SEQ ID NO: 52955 - DNA, 74 bp, Homo sapiens
aaacattcctatccttgcctgaagcagtcttttgcaggaacatttgagatatttggagttcttacaacatggca

SEQ ID NO: 52956 - DNA, 50 bp, Homo sapiens
ctgttcaatcccagcccagcctgcagggaaatcctcattgacgattcaat

SEQ ID NO: 52957 - DNA, 74 bp, Homo sapiens
ttgcgagcaggagtggtaaagaaaatgatgaaattcctgaagctctgatgtgaattacctcattgaagaagctg

SEQ ID NO: 52958 - DNA, 97 bp, Homo sapiens
ggggatccagagtaggagggagcctttggtggggaaacacgccctaaactgccaccgaatgaagcctgctctctttagcgtcctgtgtgaaatcaag

SEQ ID NO: 52959 - DNA, 75 bp, Homo sapiens
ctggacactcttcactggtaacatattttggcaagccaaccaggagattcttactttgacccccaggctggagtg

SEQ ID NO: 52960 - DNA, 80 bp, Homo sapiens
caggagcacgggtcatcttttccccagaggcgtcggaatggacctgtgccacccaggttttaaaatcaaagatgggaaaa

SEQ ID NO: 52961 - DNA, 51 bp, Homo sapiens
gcctgagtagctgggactaaaggcttcccagctggcgtgtatgttgtaaag

SEQ ID NO: 52962 - DNA, 50 bp, Homo sapiens
cggacatgatcctctccgcctctcgaggtgatgctgggagcagaactcca

SEQ ID NO: 52963 - DNA, 100 bp, Homo sapiens
ctataacccagtcacgagggtagtcaaggactataggaaccgctttctaagaaacgcaggatcataaaaggattcctctgtactagcacactcccctaaa

SEQ ID NO: 52964 - DNA, 100 bp, Homo sapiens
acaccaaggagatcgacctggtcaaccgcgaccctaaacacctcaacgatgacgtggtcaagttatcaggaactgttgccgttattacatcagatgggag

SEQ ID NO: 52965 - DNA, 88 bp, Homo sapiens
ccgcgcgcagggcctgcagcgggagctggacggcgagcgcgagcggcgcgagaaaccagagcagctgagttccagataaaaactgtca

SEQ ID NO: 52966 - DNA, 100 bp, Homo sapiens
ggaatttgtcaaaaacctgctgccaaagtctataggtgtgaaatctaagaatcccctgccaactcttgagggctcaatccagaatgttgaattgaagtac

SEQ ID NO: 52967 - DNA, 75 bp, Homo sapiens
catttggaaggaacagtacagagttgtacaggaggaaaaccaggtcactggagttctggatgattgcttgtgtga

SEQ ID NO: 52968 - DNA, 82 bp, Homo sapiens
tgagatcagccgcccggccaagctatcttctcgctagcagatccagacatttaatgtggatgcaccatgccagaccgtggaa

SEQ ID NO: 52969 - DNA, 90 bp, Homo sapiens
tctattgcttttcatagtgcagtaaggccatactggagatgttactattcaaacacagatgcagtcatttatgtagtagacagttgtgac

SEQ ID NO: 52970 - DNA, 98 bp, Homo sapiens
ctgcagctccgggacacctggggccgccgaggcaaagcggcatggtggtggtggctgacaagacctcggagctctaccagaagacctactgggccagc

SEQ ID NO: 52971 - DNA, 75 bp, Homo sapiens
cctggccccagtgctgcgtccttatcagccgagccggtggataagattgtggaccagctgcagcagttaatgcag

SEQ ID NO: 52972 - DNA, 101 bp, Homo sapiens
gaagagaagaagaagcaggatgaactgaaacggattgccagagaattggcagaagatctcgacatggcaggagctgaggcagctgcaggagcagatccgga

SEQ ID NO: 52973 - DNA, 83 bp, Homo sapiens
gtgatccagcaaggtcggcagagcaaggggcttacgcagaaggacctggccacgccaaaacagagtggagtacgagaaaaggg

SEQ ID NO: 52974 - DNA, 50 bp, Homo sapiens
cgggaccccagggcagcgaagcagaattaaacaaccaccatgtcgagcaa

SEQ ID NO: 52975 - DNA, 75 bp, Homo sapiens
tgctccaagaacaatagcttgccctcataaaacccctctgccatgaaccagtccatcccagtggctcccacccca

SEQ ID NO: 52976 - DNA, 153 bp, Homo sapiens
cgaggtcccatcaggtggggaaagatgctgttccaggcgcacactagtctacaaggccagagctttctggaagggggcaattacaacagcagtgaattgaaaacagcctgcaggaagcatgagctgtatgtgagtttccaagacctgggatgg

SEQ ID NO: 52977 - DNA, 75 bp, Homo sapiens
tcacaaagaatttccttaagagctggactgggcagttgcagtggtgcagaatggctgacctcagtcttgcagatg

SEQ ID NO: 52978 - DNA, 100 bp, Homo sapiens
cactggtctagaacccggctctgagggcactggcctagttcccgacttgtttctcaggtgccaatgttaacagggctacagccaataatgatcatacagt

SEQ ID NO: 52979 - DNA, 59 bp, Homo sapiens
ttgccgcgtcgaggactgtcggaattctgcttggtcagaatcgtgatggcattgtgttc

SEQ ID NO: 52980 - DNA, 82 bp, Homo sapiens
cccgggtgccgaggagcgggaagagttgctgggggtttgccttcccggattgggcctacaagccagagtcgtcccctggctc

SEQ ID NO: 52981 - DNA, 100 bp, Homo sapiens
tctatgtgcctcctggatatgccccacagtaggttgtgacagttggaagtgtcatgtacaacatgcggcgattaagtctttcacccaccttttcaatggg

SEQ ID NO: 52982 - DNA, 104 bp, Homo sapiens
cgcgcgctgagggtctcggggcgggcgccgcgggacctctccgggccatgggttcccacgtaacatcacatcagacccaagggcccgttcattgcaaggcgaag

SEQ ID NO: 52983 - DNA, 100 bp, Homo sapiens
cttatgaccggctgagcccccatcattgggagaaatccccactcctccaagaaccaacccccaaattggctgggacagatgcagagcaaagcggcagtcc

SEQ ID NO: 52984 - DNA, 97 bp, Homo sapiens
ggctgtacggagccatcttgcaggaatcagagatcattgatttcttcctgggggcctctctcaaggatgaggttttgaagattatgccagtgcagaa

SEQ ID NO: 52985 - DNA, 100 bp, Homo sapiens
gcagtgaaggagtgcagaggcatcacctgaaagggatgatggcgccacttcctcagtttcggcactcaagcgcctggaacggagtcagtggacggataag

SEQ ID NO: 52986 - DNA, 90 bp, Homo sapiens
ggagcgagcccagcggctggctgagctccaggagcagcccccccttgcctggacggaagcccgtgtgcaaatggaggtcgttgcacccag

SEQ ID NO: 52987 - DNA, 50 bp, Homo sapiens
ctgctggtcagcactgcggctgcaatatgttaaggatacctgtaagaaag

SEQ ID NO: 52988 - DNA, 100 bp, Homo sapiens
ctggaatctgatcctccacttcagagaacagggatggtgagcctggaggaagacttgcactgggccttctgtgcgccggccagaggccatcaaccaggtg

SEQ ID NO: 52989 - DNA, 50 bp, Homo sapiens
gccaatccagcatttttgaagattgacttctaaggactcttggtacatga

SEQ ID NO: 52990 - DNA, 114 bp, Homo sapiens
ccggggcggagggttcggctgcgcggcggggctgaggcggccgcggggcccgagcgcaggtgagaagccctaccactgcaactgggacggctgcggctggaagtttgcgcgctc

SEQ ID NO: 52991 - DNA, 83 bp, Homo sapiens
cagcggggcaggagcgcttccgcaccatcacctccacgtattgttgcagcatctggcagtgagactgaggatgaggacagcat

SEQ ID NO: 52992 - DNA, 74 bp, Homo sapiens
gccattttgagcaatggggaacgctcacggactgtgtggtgcacatgaacttgaacagatgcagctgattttag

SEQ ID NO: 52993 - DNA, 100 bp, Homo sapiens
cacagagaagatggtagaagactgtgaacaccgtctcttagagctgcagtatttcatctcccgggattggaaagtcaatgcatgtgttgatgtggtgctc

SEQ ID NO: 52994 - DNA, 76 bp, Homo sapiens
ccggtccccatcaccggcacacattgtcgtctgaatttcctgctgctgttcacaaagatgctttttatctttaact

SEQ ID NO: 52995 - DNA, 78 bp, Homo sapiens
cgctcctaagcctgcacagccgcggcggcagcagcagtgagagtctgtagatggacggcagatccgagtagaccaggc

SEQ ID NO: 52996 - DNA, 100 bp, Homo sapiens
cgcctcctacctgaggctctgggcgcttagcctggctcacgcacaggccatgtggaagtgttacatcaccttttgcttggaaagatttactaagaagtca

SEQ ID NO: 52997 - DNA, 95 bp, Homo sapiens
gaagcgccaggacaatggggacccgggacgacgagtacgactacctattcaaagggactttgaacatgtcggggatcgccctcagcagactcgcc

SEQ ID NO: 52998 - DNA, 90 bp, Homo sapiens
accgcatcgactacgtcagctccgccgtccgtatcgaccacgccccggaccttccgcggccagagtactatactggcaattgctggagaa

SEQ ID NO: 52999 - DNA, 83 bp, Homo sapiens
ctataaaagttgctgtttactgttgctgtccgtaaactggaacctctgttcactcaaggtaactataactacccaatattgca

SEQ ID NO: 53000 - DNA, 96 bp, Homo sapiens
cgcaccaagctctgctccacactgccaaccggccagaggacgagtgtggactctgctgggccgctcagccatgcctgagggagcccaaggactgag

SEQ ID NO: 53001 - DNA, 90 bp, Homo sapiens
gacgacgagatggtggaggaggcggtggaaggatccctggccgcctgaacgacaggaggacgcccctgggtgaactgaactggatcttca

SEQ ID NO: 53002 - DNA, 100 bp, Homo sapiens
cactgcttctccgtgggcagcattggcgaccagcgcttcacggtgaagactgatgagaagagtctgtgggtgaagacattgaaaaggtttcaactataaa

SEQ ID NO: 53003 - DNA, 101 bp, Homo sapiens
attgaaaaccctgctgatgtcagtgttatatcctccaggaatactggccagacgcatcttctctccagactgccgatcccagaaagccaggtgatcaccat

SEQ ID NO: 53004 - DNA, 74 bp, Homo sapiens
gcgaattggagaaaaagttcagtgggaagcatgtcgtctttatcgctcaggactcagaattcatgattgaagaa

SEQ ID NO: 53005 - DNA, 98 bp, Homo sapiens
aggcccctcccctggacccgccgcagagccagcagccgagaccgacccgcccgcccgcggccccgcagcagctccaagaaggaaccaagagaccgagg

SEQ ID NO: 53006 - DNA, 100 bp, Homo sapiens
aacttttggggcttattaagttacctacattgcctccactgccttctcttcttgggcaattgaaggaacagactaaaaatcgtgtcctggaaggaaacta

SEQ ID NO: 53007 - DNA, 87 bp, Homo sapiens
cgcatgaaatggaagagagggtggtgcggatagcttgaggaagatgccatggacaatattaccaggcagaaccaattctacgatacc

SEQ ID NO: 53008 - DNA, 137 bp, Homo sapiens
ctccctgcaccgggggagcgctacgagtcccagcggagcgccgcagcacagcgccatggacaaactggccttgaaccggggcattgctgctgtcaaggaggatgcagtcgagatgctggccagctacgggctggcgt

SEQ ID NO: 53009 - DNA, 100 bp, Homo sapiens
gccttttgtccctttgcctcatcccaggttgccttggaaaatgccaacgccgtgtctgaagctgaagagagtgcccccaaccacagctgccagagtccca

SEQ ID NO: 53010 - DNA, 100 bp, Homo sapiens
cctgggtctgctgcgtctgccagcaagcgagttgcaggaccagctctgccccctaattataaaagcagtagttcagattcatcagacagcgatgaagaca

SEQ ID NO: 53011 - DNA, 101 bp, Homo sapiens
agaacaacggaggcagaggagctgaagactccagtatgcaactgactacaaggaggtgctgactgggttacttttttaaacactaggaatggtaatttcta

SEQ ID NO: 53012 - DNA, 75 bp, Homo sapiens
cctgtttgtgcgcacagtgctggtctgcctgacatctgcagaaccttggcctgaaaatgctacattatatcagca

SEQ ID NO: 53013 - DNA, 149 bp, Homo sapiens
acgctagacctcagagcccacgagaagggcatatgatggatgctttgtatgcccaagtcaagaagccgcggaattccaaaccctcacctgtagacaggagagccttgaacttaggaattcttcgagatcctggatcagaaatcgaagac

SEQ ID NO: 53014 - DNA, 51 bp, Homo sapiens
gacacccgtgggtgatgcagacgcaagcggactctgtaagctcggttcggc

SEQ ID NO: 53015 - DNA, 100 bp, Homo sapiens
ctgcccctgtctaatctgctaaggtgtttgtggcttgatcgtcccccaggaagacatgccattttgtgattctggcatctgtccggacatcatcatgaac

SEQ ID NO: 53016 - DNA, 83 bp, Homo sapiens
ggcagtccacccaccgccgccgcctcccagaggacaagaattttgggcagatttgaatgccatgaacgtgtatgaaacaactg

SEQ ID NO: 53017 - DNA, 50 bp, Homo sapiens
ccaagatgcggatccgggcctttccgtaagtacaaggtggactgtgcatg

SEQ ID NO: 53018 - DNA, 74 bp, Homo sapiens
acttcagtgatgagaatcgcacctaccaggcttccagcccggatgagctgcatcttcctcccgtgaggctggcc

SEQ ID NO: 53019 - DNA, 100 bp, Homo sapiens
tgaggactggggcctcattttggatatctgtgataaagttggtcagtctcgcactggagtgtcctgccatacttcgtagctacaaaactggctaaaatcc

SEQ ID NO: 53020 - DNA, 100 bp, Homo sapiens
cgagcccaaggcaattgatcccaagttgtcgacgaccgacagggtggtgaaaggtgctgtacttctttgcagtatacaaggactagcagttaatattgac

SEQ ID NO: 53021 - DNA, 100 bp, Homo sapiens
ctggctttgtagctcgctcaagatggcggcgcagccaccccgcgggatacgcctcagcgcgggagagtggtgaatatcagtagtttgcagtgtttaaggg

SEQ ID NO: 53022 - DNA, 87 bp, Homo sapiens
ttttaaaatggcaagtggagcagccaacgtggtgggacccaaaatctgcctggaagataatgtatgtattagacacagaaatgattg

SEQ ID NO: 53023 - DNA, 100 bp, Homo sapiens
gtttaagaagcggacggagctgttcattgccgccgagggcattcacacgggccagtttgtgtattgcggcaagaaggtggctcacgcctgtaatcccagc

SEQ ID NO: 53024 - DNA, 74 bp, Homo sapiens
cctggaagcaagccgccgtggagaaggaagaactgtgctgagggctggacagactgccgctgcccgtctccggt

SEQ ID NO: 53025 - DNA, 100 bp, Homo sapiens
cctcaacaccagcaccgcagatgttgtcaaggtggcctaccaggaggccaggggtgtcgccatgcaaattcaacacccaacagcttccttaatagcaaag

SEQ ID NO: 53026 - DNA, 50 bp, Homo sapiens
acgtctgtgggttacgccatctttaaggtcagaatgaaggaacgatttcc

SEQ ID NO: 53027 - DNA, 82 bp, Homo sapiens
ccgactatgtcgcctgccaccgagccgggcccacctccccaccaaggaaggagcatcagatccatgctgctgctgactcgga

SEQ ID NO: 53028 - DNA, 50 bp, Homo sapiens
ctacgccgggcaggatgccacgcggaaggagagttttacatggaagtggc

SEQ ID NO: 53029 - DNA, 85 bp, Homo sapiens
cgcatagaagccgggattgagcgcatcaaggtcaatggccagcaaggaggggggtccgagccggcggcggcggcggcagtggtgg

SEQ ID NO: 53030 - DNA, 76 bp, Homo sapiens
ggagctgtcgacccggcctggcgccggactaggtttctggtcctcataccgtgtggttgagtgaaatcaaaacttc

SEQ ID NO: 53031 - DNA, 85 bp, Homo sapiens
caaaacgcccgtgcggaccacggcctgtcagcacgtgaaaaccagtgagtctggagagctgcatgggctcacaactgaggaggaa

SEQ ID NO: 53032 - DNA, 90 bp, Homo sapiens
ggctccttctgcgtctgtgaggccaatgcaaatgaaggaaaatcacctcggcagtgtttgaaggaaggatactgcaactctttgaagtac

SEQ ID NO: 53033 - DNA, 98 bp, Homo sapiens
ccttggcaaccctcgggctgacagcatccacaacacttactcaactgaccatgcttctgcagcaccaccttcagctccaccagatctgcagaattctg

SEQ ID NO: 53034 - DNA, 100 bp, Homo sapiens
gaagtgacagcacagaagaggccagagaacagcctcctggaggagaccctacactttgaccatgctgtccggatgggtgctggctcctcttcctggaggg

SEQ ID NO: 53035 - DNA, 78 bp, Homo sapiens
aggtgtctcttctcgccctggcggggaagaaatcttcccaaggctgcagacaccgacggatttgctttgggagccaga

SEQ ID NO: 53036 - DNA, 75 bp, Homo sapiens
cggagactttggggcctaactaggtgctggcccagcagggggagtacagtgaggccatccccatcctgagggcag

SEQ ID NO: 53037 - DNA, 75 bp, Homo sapiens
gctgaccaccctcatgttctttaataccaaggtccccagccccaccccagccccaaaggaggctgttcgagaggg

SEQ ID NO: 53038 - DNA, 75 bp, Homo sapiens
cgagcctatgccctggcttttgcagaaagaggagcgttagttgttggggatgccaacagacagatcagcgacctc

SEQ ID NO: 53039 - DNA, 89 bp, Homo sapiens
gtcaacatgaccgagtgcgtcccggtgcccagctccgagcacgtcgccgagatcgtgggtcgccaggctcctgtccaaatatgaccccc

SEQ ID NO: 53040 - DNA, 50 bp, Homo sapiens
ttcctggtgatattgtagaaattgctgtctctagtgatccctgaaaagtt

SEQ ID NO: 53041 - DNA, 98 bp, Homo sapiens
cggtcgccatgatggctgtgggcggtaaacgcggttagtgcaagcatctgggccatcttcaatatgccatggacaatattaccaggcagaaccaattc

SEQ ID NO: 53042 - DNA, 83 bp, Homo sapiens
caaaggaccggacaaagaggagcttgatggaccagacaaataggatgatggctgcccccacacaataaatggtaacataggag

SEQ ID NO: 53043 - DNA, 101 bp, Homo sapiens
ggggatggcgtgcagcgcaaccacgagacggccttccaagatgaggacggggacttggttgccttttccagtgacgaggaattgacaatggccatgtccta

SEQ ID NO: 53044 - DNA, 98 bp, Homo sapiens
aattggttatgctactgtgttctcagggagttctgggaaatcgttcattcatttacagatgaacagaaaagactcttcttgcagtttacaacgggcac

SEQ ID NO: 53045 - DNA, 46 bp, Homo sapiens
gacggaatgcctccatacatgtccagctatgcatcaccccttcgct

SEQ ID NO: 53046 - DNA, 90 bp, Homo sapiens
ccatgttgctcgcccagcgcctggcctgcagcttccagcacagctaccgcctgctggtgcctgaagtaaaatgcccattcccatcaagac

SEQ ID NO: 53047 - DNA, 75 bp, Homo sapiens
cagccgatccagcctgcggagcctgtggggcagcctccatccctgtgagatcactgccctgagccaatccctaca

SEQ ID NO: 53048 - DNA, 105 bp, Homo sapiens
cgccctgttccccgcgctgcggcctggcggcttccaggcgcactaccgcgatgtgaagttcatttccaatccgccctccatggtggcagcggggagcgtggtggc

SEQ ID NO: 53049 - DNA, 98 bp, Homo sapiens
cttttatccagctctaaactttatttcctcccagaagacactccccagggcagaaatagcgaccatggcgaggccatggagagcaagctcctcatcgg

SEQ ID NO: 53050 - DNA, 100 bp, Homo sapiens
caggaatgagccagatgtttatgaaactagcgacctacctgaggatgatcaagcggagttcgatgcgctggagaagcgactggaggagtggttggggagg

SEQ ID NO: 53051 - DNA, 100 bp, Homo sapiens
ttaacttggtgtctttagtgcttggattggtgggatgtttcggaatgggcattgtcgccaattttcagattgttctctggggccggactgagaaatgcct

SEQ ID NO: 53052 - DNA, 101 bp, Homo sapiens
tccctggaggaggcatggagcccgaggaggagccaagtgtggcagcagttcgtgaagtctgtgaggaggttgcaaaagcttctcatttcagagagatgcca

SEQ ID NO: 53053 - DNA, 75 bp, Homo sapiens
caacttcccttccagcctatcgagctcaactccttcaccaagatgaacacagtatagagcatgaatttttttcat

SEQ ID NO: 53054 - DNA, 100 bp, Homo sapiens
ggcactttccatgaatactgagaatgccaaagtaaccagatctaacatgagctctttcgacgtgtagcagcagctttgccgggaatggaaagcacacagg

SEQ ID NO: 53055 - DNA, 83 bp, Homo sapiens
tacagactgtggtgcctacccccatcactgcttccctcagccataacagtgtttcctgaggttataggcgggtgtttgaggag

SEQ ID NO: 53056 - DNA, 75 bp, Homo sapiens
aagagcacagaatgtaccagagaggatccttcaaaccaaaaatgtggtggaagaaagaaaaccgtgtctttcagc

SEQ ID NO: 53057 - DNA, 100 bp, Homo sapiens
ctggcctatgtgaaaggcggtctcagtacattcttcgaagcacaggatgccctctcagagacgtctcccacaacctgctccgggcgctggacgttgggct

SEQ ID NO: 53058 - DNA, 96 bp, Homo sapiens
ctgaagtttgaaggtctttgctgccatcctttcttctctaaaattgactggaacaacattcgtaactacacgatgaggcgagtggtacgacagagc

SEQ ID NO: 53059 - DNA, 50 bp, Homo sapiens
ccttttccccatggcagcccctgttctgcaggaggatgcattagcacaac

SEQ ID NO: 53060 - DNA, 50 bp, Homo sapiens
gaagcttgaagggtttggttaaggttgtttacattcagagctctatcaat

SEQ ID NO: 53061 - DNA, 83 bp, Homo sapiens
tcttacgtctgcggaagtgcagctgcctcagttcttagcgcagttcaaaagaatgctgaaccgggagctgacacacctctcag

SEQ ID NO: 53062 - DNA, 75 bp, Homo sapiens
ctacctgcagcgccgtgtggcacgacacaaaaatcagtctattatcctcccagtccacaacgctgaaccgtggct

SEQ ID NO: 53063 - DNA, 76 bp, Homo sapiens
cagcaccagcttccagttagtggatatagcacaccatccccagccagaaggatttgatgccctggatccctttatt

SEQ ID NO: 53064 - DNA, 100 bp, Homo sapiens
atgtggaacctggatgaatgtagagagaaagtacttcaaggaaccgcggggaaaggcgaatgggtgcttttgaatgtgttcgtaaagtgtatcagacaga

SEQ ID NO: 53065 - DNA, 100 bp, Homo sapiens
ggattatcttagaattttaagatacttcagcttgcattcacaagagatgggctctgtggtctgtggaatgaaatggttaaagatggagaaattgtataca

SEQ ID NO: 53066 - DNA, 82 bp, Homo sapiens
ttaatccagtgactgtcaggtcgatcatatccgagcctcttgaagccattcttacagatgatgaaccagaccacggcccgtt

SEQ ID NO: 53067 - DNA, 50 bp, Homo sapiens
gtgtttgcatcggtggacaaggtgccagcggttcaagctctacgttcgtg

SEQ ID NO: 53068 - DNA, 100 bp, Homo sapiens
gggggagctgctgggcgaagcacgctactacctggtgcagggcctgattgaggactgccagctggcgctgcagggctgtggcagaaattctcaggagcag

SEQ ID NO: 53069 - DNA, 75 bp, Homo sapiens
agttcctccaggtttgccatcttcatttccaacatggctagatccatcagaaactgaagccgtggagaacgctct

SEQ ID NO: 53070 - DNA, 100 bp, Homo sapiens
gaactgcacgataaaggaactcaggcgcctcttcttagttgatgatttagttgattctctgaagagtgctgcagcagctcccagtccagtgctaggaaac

SEQ ID NO: 53071 - DNA, 90 bp, Homo sapiens
tactggtccatgctactgagactgacaggaaagaccacccatacctggagcccagacactttgtggatgagaaggccgtgaatgagaacc

SEQ ID NO: 53072 - DNA, 76 bp, Homo sapiens
agcatttcatccctcgtcgaaaggattggattggcatctttagaaaggagctggcaaacagccctgactgtcccca

SEQ ID NO: 53073 - DNA, 74 bp, Homo sapiens
cctgacattcacctgacttctgcagaacagtcgctgcggaggagctttgctgtctgctaggccaggtcttccag

SEQ ID NO: 53074 - DNA, 97 bp, Homo sapiens
gcgtctgcaaccttgatgaacagctcaaggtctttgtgtcccgacactctgccaccttctccagcattgtgaaagatatctctgcgactttacctac

SEQ ID NO: 53075 - DNA, 105 bp, Homo sapiens
ctcggctcatgttctgggacttaggagggcaggaagagctgcagtctttgtgggacaagacaatgcagatcttcgtgaagactctgactggtaagaccatcaccc

SEQ ID NO: 53076 - DNA, 100 bp, Homo sapiens
caggaccagactcaagacacacaactcataacagttgatgaaaaattgggaggtggggaagacagggctccagctaccacaggacgggctctgggtatag

SEQ ID NO: 53077 - DNA, 75 bp, Homo sapiens
gattctgctcacggaactgcaggaatgtttacccttgcggaagttgcatcacttaatgacattcagccaacttac

SEQ ID NO: 53078 - DNA, 100 bp, Homo sapiens
ggggggcccggggcctcgcgctggggacgttgcgtctgcagctgcggcgcggatgctccaggatgaaacgccataggcctgtcagcagcagtgacagttc

SEQ ID NO: 53079 - DNA, 121 bp, Homo sapiens
aggttggagtaatagatttttccctctaccttaaggatgtgcaggatcttgatggtggcaaggagagcaatttacagcaatgagggatttatacatgaaaaatggacaaggatttgcatta

SEQ ID NO: 53080 - DNA, 112 bp, Homo sapiens
atacacccccaaagagcaactgaagattcatacgcagctggcagatattatcatagttgctgcagatccagacatttaatgtggatgcaccatgccagaccgtggaagattt

SEQ ID NO: 53081 - DNA, 92 bp, Homo sapiens
gaaaggtttaaagacaaaaaacatctggataaattctcttcttatcatgtgaaaactgccttctttcacatggactctcgctctgtcgccca

SEQ ID NO: 53082 - DNA, 100 bp, Homo sapiens
ggcgtacacggtgtgcaaggggagtcgtggcgtcgtctgcgaccgctgccttctcgggaagatgaagtcctcagtacattctgaagaagatgattttgtt

SEQ ID NO: 53083 - DNA, 74 bp, Homo sapiens
cggagcctctggaatcacccgggtcgctgttcctgaggactccagcgaaattacagggaattcgtggtcacggg

SEQ ID NO: 53084 - DNA, 101 bp, Homo sapiens
ccgggagatcccaggcggtgacagagtggagccatggctagagacggagccggtgggagaggagagcatctccgacgcagagaaggtggccatggatctca

SEQ ID NO: 53085 - DNA, 75 bp, Homo sapiens
aacgggaggtgaatttccatgtcaacatagtcctggaagagagaagggcacagttacctaagtatcaacgtaatc

SEQ ID NO: 53086 - DNA, 75 bp, Homo sapiens
atttgaccaaatttctggaagagatggtgagaacaagaccaagattggaaagccagcttcagaggagggaattac

SEQ ID NO: 53087 - DNA, 100 bp, Homo sapiens
cccaaagctgaacctatagatattcaaacctggatccttggatacaggaaaccaacagtcacacatgtacattacagtagtattattgattccacagaat

SEQ ID NO: 53088 - DNA, 88 bp, Homo sapiens
ttgagacctgaggttgaaaactatcttaaggaaggctttatgaataaggagaatttccccccaaagtagagatgctaagccaaatcca

SEQ ID NO: 53089 - DNA, 100 bp, Homo sapiens
cctcgtctggatcctcactctctccgatactttctcccaaggttgcagacctgggatgtggtgatacttcactcttaaggctgctaaaagtcaatccatg

SEQ ID NO: 53090 - DNA, 75 bp, Homo sapiens
agttgatggtctgccttgtacatctcaacattcttgaaccacttaatgtgtttggagaagagggattgaccctga

SEQ ID NO: 53091 - DNA, 90 bp, Homo sapiens
accgcctcctcctcctcagtaacgcggccccgctgcaggctgatctgagaaagcctctggcccagggcagataccgccatggccttcctg

SEQ ID NO: 53092 - DNA, 90 bp, Homo sapiens
caggagagcctgcctgcacggaagagacgcctcctcggagatgttgcagtaaagatcctaaaggttgtcgacccaaccccagagcaattc

SEQ ID NO: 53093 - DNA, 100 bp, Homo sapiens
caccatcactggaagcaatgaggacagcttgtgaaggcgctaaggcacatatactcaggggtcctcataaacagacctaatctgggagcctgcaagtgac

SEQ ID NO: 53094 - DNA, 100 bp, Homo sapiens
aaaaagacccaccttctatggcatgtaccagaatagccaggccagaagaaggaaggcctgtggtgagtgggacaggaaatgacatcaccaccccaccgaa

SEQ ID NO: 53095 - DNA, 98 bp, Homo sapiens
gcagaggggtccatacggcgttgttctggaaatttgcctgtaatggtactgtgattgaacatcctgaatacggagaggttattcagcttcaaggtgac

SEQ ID NO: 53096 - DNA, 75 bp, Homo sapiens
gtctgccttacaagggacaccatagcctctcaccctaagggtgtttgtggagctgaatgagttgctcctggacaa

SEQ ID NO: 53097 - DNA, 80 bp, Homo sapiens
agaaaaggcaacatcctgtcacaggccatgctctggcaaaaacatctatccaataaaggagagaaaggaccgcatacgcc

SEQ ID NO: 53098 - DNA, 75 bp, Homo sapiens
ggaaagcccccttatgctgatatccatccaatgagggttccatgcctctgcagcggtgcctcatgtttgctgtgt

SEQ ID NO: 53099 - DNA, 74 bp, Homo sapiens
gcagaaccaacgaggtggccgaatcttccttcaggatatcaagctgagatctgtatctgtggacctgaatgttg

SEQ ID NO: 53100 - DNA, 83 bp, Homo sapiens
gcagcggcgggggcccgaggggtgaccctggcagcaaccccaacaaacgccagaggcagccccctctcctgggagatcacccc

SEQ ID NO: 53101 - DNA, 101 bp, Homo sapiens
gcaactgaagcctgaggtctccccaacgcaggacatcagcccattccagatgatgggatttattggcaggccaaccttgacagattccaccaacacttccg

SEQ ID NO: 53102 - DNA, 51 bp, Homo sapiens
cccagcacttggggaggccgaggacagcctttcctgcctcagggaagaaga

SEQ ID NO: 53103 - DNA, 100 bp, Homo sapiens
ggatgtggccaaaatggggattacagagtataacaatcagtgccgagcaattgtgatgagatattctgctgagtggaagatgcgcctgcttcctctgcgc

SEQ ID NO: 53104 - DNA, 49 bp, Homo sapiens
ggcctgggctgtcccgagccgaggccattaactgtttgatgcgagcaat

SEQ ID NO: 53105 - DNA, 100 bp, Homo sapiens
ccggaagcagcacccctacacgttcccgggtggcagtggcactgtctttgcccggctgttgcaaatgagtccggactaaattttatatctgtcaagggcc

SEQ ID NO: 53106 - DNA, 100 bp, Homo sapiens
tgtcgtcagtaatgcctggaatgatgatgtctcatatgtctcaggcttccatgcagcctgccttaccgctatcagttgagggatttgcagttgataaaat

SEQ ID NO: 53107 - DNA, 100 bp, Homo sapiens
atgggctactcagtttacagccactgcagtatcacagccagcacccagtcagcttgaagagtttcaaatggaccctaccactgagaaatcaagatggcag

SEQ ID NO: 53108 - DNA, 80 bp, Homo sapiens
ctgcgggggggagagccactgacgccgggaccgggaccgccgccgccgccgccaccatgatcatgagcgtcttgttgttc

SEQ ID NO: 53109 - DNA, 98 bp, Homo sapiens
aacttgcgcaaaaacaacagacagccctatgctgtcagtgaattagcagctgctgtggtggctccagccgcgcctggttctcagtggccacacgcaca

SEQ ID NO: 53110 - DNA, 101 bp, Homo sapiens
gagaagccccagctgcactacgcgtaaattcctcatctatgcctgtctgctgctgttctctgtgctgctggcccttcgtttggatggcatcatacagtgga

SEQ ID NO: 53111 - DNA, 90 bp, Homo sapiens
ctgacagccacctgcccactttgtgatcagagccgtgttcggggagtctttcagctatccaacttgataaagtcaatcttcaagtatatt

SEQ ID NO: 53112 - DNA, 75 bp, Homo sapiens
ggcagaactgtttgaaaatgcttgaatgatttgggaggggacttcaaaggagttggtaaaggctccttagctgct

SEQ ID NO: 53113 - DNA, 117 bp, Homo sapiens
atgcaacatgctcagcaggagcttcatcaacgatatatgtcagatctaaagcctaccgtatgtgaacgggagctgtgtgtgtttgcttttcaaaccctgggagtaatgaatgaagct

SEQ ID NO: 53114 - DNA, 100 bp, Homo sapiens
ccagccgagctgcagcagcccgtctcgtgggcgccgcagcctcccggggccctacggccgcccgccaccaggaaatctgaaatagagtactatgctatgt

SEQ ID NO: 53115 - DNA, 83 bp, Homo sapiens
cctgtctacagagaaaaagaagatatgtatgacgagattattgagttaaagaagggggatatgagactttctactcggaatat

SEQ ID NO: 53116 - DNA, 95 bp, Homo sapiens
ggggaactgctggggaaggcgattggcatcgatctctccatcccttccgaggcccgacttcgaaaaggatgcgcctccacttagcaaggctgggc

SEQ ID NO: 53117 - DNA, 90 bp, Homo sapiens
tctggttcttctaaaggagcaattctccaatacttacagtaatctcatattaacagtccaagccttatgcatttgatcgggtgttccagt

SEQ ID NO: 53118 - DNA, 100 bp, Homo sapiens
gtgggacgccagtcaccagcaggagcagccaaccagcagcagccatcatggagcatgtcggtgcctcaggccatggagtggctaattgaacacgcagaag

SEQ ID NO: 53119 - DNA, 100 bp, Homo sapiens
ggcacctgcacacctggatccaggataacggaggctggtttcctgttttccagcacccaacataacttgtaaggattccagtggcaatgaaacacatttt

SEQ ID NO: 53120 - DNA, 97 bp, Homo sapiens
actcgggccggagcgtggccggacccccacccgccgaggggcccagggaggacgcggtgctggagaatctggtaaaagcaccattgtgaagcagatg

SEQ ID NO: 53121 - DNA, 75 bp, Homo sapiens
gtggaatgtatccgggaggtcaacgaggtcatccaggcatctccttggaaacaatgccatctttgaatgtgagag

SEQ ID NO: 53122 - DNA, 75 bp, Homo sapiens
cagaggctacgggaggagaacaagcagttcaaggtgaaaggtgtagcagtcactcggcctacacccacagcatcg

SEQ ID NO: 53123 - DNA, 100 bp, Homo sapiens
gtttgtaaactgggaacagacaaagaaacactctccttctgccacatttgttttgagctaaatattgagggaagtgtttggattgtgagctatttcagaa

SEQ ID NO: 53124 - DNA, 98 bp, Homo sapiens
gctgctgaagaaagattagccgaggcacataggatccaagaaaaactctgtggaaaaaccatatggcatagttgaaaagaagtccagaatattccctg

SEQ ID NO: 53125 - DNA, 101 bp, Homo sapiens
agaattatgcacctgacagcatctattacctttgccttggaatacaggagagactatccttaaataacgacatatttgaggcgaactctgatagcgatcag

SEQ ID NO: 53126 - DNA, 110 bp, Homo sapiens
cgtcacggcgtacgccctcatggggaaaatctccccggtgactttcagggggcagtacccaaaggaaacgctacgaaagaatacatggagagcttgcagctgaagcccgg

SEQ ID NO: 53127 - DNA, 136 bp, Homo sapiens
cagaaaccactaatactagcctcttgcaggtgcaactggaatgcagtttacataataaagtgtgtcagcaattaaaggtggacttaaatgaagaagaaactatattgatcatcaggcgtctacataaggtgttaag

SEQ ID NO: 53128 - DNA, 75 bp, Homo sapiens
tgctgttctcgggagccgtggccctgatccagacctgggcagattcatgatgttgctatcaaaagttgagaaatt

SEQ ID NO: 53129 - DNA, 75 bp, Homo sapiens
tgtatcagggacagtggcggatgtgcactgctacaggactctactatggagatttgtgacccagaaggaaatctc

SEQ ID NO: 53130 - DNA, 75 bp, Homo sapiens
gccgagagattttactaccaagccctgtcagtagctcctcagattgcaacgggacaccctgcggcgccatgtgca

SEQ ID NO: 53131 - DNA, 100 bp, Homo sapiens
tcctggagcagatgcgccggaaggccatgaagcagggcttcgagttcaacatcatggtggtcggtgactctgacatcattagaagcatgccagaacagac

SEQ ID NO: 53132 - DNA, 96 bp, Homo sapiens
gagtccagagcagcattgccttcctgtgtgggaaaaccctgatgaaacgactacaaagtgccatgacagaaggtggtgtggttctacgggaacctc

SEQ ID NO: 53133 - DNA, 90 bp, Homo sapiens
gtcccatctggtgctgggagtggtgtctctgcacgcagccgtgagcacagccgaggtggagataagtaattaacatttcgaaacaggaaa

SEQ ID NO: 53134 - DNA, 100 bp, Homo sapiens
ctgggaaggtctatgtcagcacgcagaaggtttgaggagcattgcttctcatacagtaagatgtgtggagttggctgttacgacatccctgtgtgatccc

SEQ ID NO: 53135 - DNA, 98 bp, Homo sapiens
tccgccaagaggcgccgcaggaggtggatccataaagaacccagccaacccgcagagggaggggaggggctgagctgtgaggagagcggggcccaaga

SEQ ID NO: 53136 - DNA, 98 bp, Homo sapiens
tgcggcagcgcacgctgcagtccaggtctcttgcaacgtgtgagctgcctcttgccaagagtgagtggcaaaagaaactaaccccggagcagttctac

SEQ ID NO: 53137 - DNA, 100 bp, Homo sapiens
gaccacctggtagagaaataccgcattcttatcacaaagtgccagatcccactcccatgatgccaccagtgggagttcaggcttccattctgagtcatga

SEQ ID NO: 53138 - DNA, 100 bp, Homo sapiens
gctgtgggctgtgttccacaagttcaaaggccccttcacagatgtagtcactacaaatcttaaattgcgaaatccatcggatagaaaagtgtgtttcaaa

SEQ ID NO: 53139 - DNA, 82 bp, Homo sapiens
cgacaagccgctggcagccgcggatctcaccgccgctcaggaagcccccgagcgcccacagcatgaaggaggaggccttcct

SEQ ID NO: 53140 - DNA, 101 bp, Homo sapiens
ccccgcgggggacactgcagccggagcccgggaggggccgcgccgccaccgtctgaactaggatgtcccgacatgaagttacagggatgaagagtcctcca

SEQ ID NO: 53141 - DNA, 100 bp, Homo sapiens
gagcaacagaaggactcacctgtgttttgccgcttctttcacttcaggaggttgcagagcctgaggcctgtgatcagatgtacgagagcttagcgcgact

SEQ ID NO: 53142 - DNA, 98 bp, Homo sapiens
ccgagacgcgctggacaagcagtggccacagatgtctttaattccaaaaacctggccgttcaggcacaaaagaagatcttgggtaaaatggtgtccaa

SEQ ID NO: 53143 - DNA, 100 bp, Homo sapiens
gcgggcggtgttcccggctccgtggggccgtcttcccggcgagtccgcgacggtcgccgcccacggcgaggtcaaggtgaagatgttcttaaagggtccc

SEQ ID NO: 53144 - DNA, 75 bp, Homo sapiens
gtcgcccgcgattctcagggattgatcgcctcttcagcgttacagtgtttctgccacctctgtacaaaagacaat

SEQ ID NO: 53145 - DNA, 98 bp, Homo sapiens
gggctggagacatggaccgcggcgagcaagttacagaatgtctgaaggggacagtgtgggagaatccgtccatgggaaaccttcggtggtgtacagat

SEQ ID NO: 53146 - DNA, 100 bp, Homo sapiens
gtcttcctgtctcaacgatacctattttctagtgctgagatcctgagacaatgttttgagtatccgaggagcccaggaggaggaacccacagacccccag

SEQ ID NO: 53147 - DNA, 90 bp, Homo sapiens
cttgtacctgctggggatgctggaggagaaggcagagcccccccaggctatgaatgccctgatgcggttgaaccagctgaagccagggct

SEQ ID NO: 53148 - DNA, 82 bp, Homo sapiens
ttgaggttggtgaaggtgaacaggtgaccataactctgccaaatatagaagagaacctccatttctaccagaatcctttgac

SEQ ID NO: 53149 - DNA, 75 bp, Homo sapiens
cgtatctgcctaggcattttgctgtctcctcctaatacggagccggatgaaacggccctccaccttgcagtcaga

SEQ ID NO: 53150 - DNA, 50 bp, Homo sapiens
cagaactatcagaactacatcttaagggggttctcatgtatcagccatct

SEQ ID NO: 53151 - DNA, 75 bp, Homo sapiens
acaatccctggctttgatggagtagtcaagcatgctacaagtgaaaactgatgagaaactgaatgtgtctgatga

SEQ ID NO: 53152 - DNA, 95 bp, Homo sapiens
gcttctgtcctgtgcttgtagattcgcccggaccaggaagcggatcgcgtggactggaagtcacactgcggcggattgatttccagagacttatg

SEQ ID NO: 53153 - DNA, 99 bp, Homo sapiens
aacgaactccgtccactaacaaaagatggctacgagggtaacatgttcgatcttcctcagaagaataggcttgttgttttacagtgttagtgatccatt

SEQ ID NO: 53154 - DNA, 100 bp, Homo sapiens
ggctcgcggactacttcgtgctggtggcgttcgggccgcacccgcgcgtgtaaatgagcaaagatggatcaggaaggtgggggagatgggcagaaggccc

SEQ ID NO: 53155 - DNA, 90 bp, Homo sapiens
cctgccatctcctcccagccccccacaggagctgcaccaccaccgcctgtgctgatgcaccatggagagtcctcccaggtcctgcaccct

SEQ ID NO: 53156 - DNA, 50 bp, Homo sapiens
ataggactgcccatccactgagacataaagagccacgtgctggagccatt

SEQ ID NO: 53157 - DNA, 100 bp, Homo sapiens
agcagaggaagaagtattccaactccaacgtcatcatgcacgagacctcgcagtaccacgtccagcggaaagaacacccggaaatgaaaggccaccaaga

SEQ ID NO: 53158 - DNA, 99 bp, Homo sapiens
gctgcggccgcggagcccccgagaccaagatcactccatggatgaaatgacagctgtggtgaaaattgaaaaaggagttggtggcaataatgggggcaa

SEQ ID NO: 53159 - DNA, 82 bp, Homo sapiens
tcccagcccgggtccccgcgttcacagccccagcgcagatgctactatcattcacgatggccatgaggagaagatggaaaat

SEQ ID NO: 53160 - DNA, 75 bp, Homo sapiens
accacggcaagtagctgctcgtctcccatcggaaggcagcactgggtttggtgcacctcgatttggaggaagtag

SEQ ID NO: 53161 - DNA, 101 bp, Homo sapiens
tgcattgactggaaacaatggcatttacagaaagagtcaacagcagtggcaacaggatttccatcaccaaggagtaagaagaccttcgggcagagactgtt

SEQ ID NO: 53162 - DNA, 75 bp, Homo sapiens
aagaaagctgctgttatcatcatggctgtagaggcactcttggaaagaacaggctacacacttgatgtgaccact

SEQ ID NO: 53163 - DNA, 98 bp, Homo sapiens
caaggaacatcttgccaatttcaaatcggggtcgagctgtgcagttttagcgggtacaagatctaccccggacacgggaggcgctacgccaggaccga

SEQ ID NO: 53164 - DNA, 98 bp, Homo sapiens
tagccttggtgccaaaatggtagctatcgttggtctgtcacggaaaagtcgcagtgcttctcagctcagccaaacggagcaaactattcatggaagga

SEQ ID NO: 53165 - DNA, 50 bp, Homo sapiens
cccgggcaacgatcggaactcggacacgggcggcaccttcctacttctgc

SEQ ID NO: 53166 - DNA, 75 bp, Homo sapiens
cggcgcggcggccactgggcgcagcacccaggtgtggacactgccagcggctgcagccgacttggaatgacctgg

SEQ ID NO: 53167 - DNA, 77 bp, Homo sapiens
cagggaagcatggctattgtggatgtaaaagccatgttcaagtggctacagcaaaccaaacagcccagcagcccagc

SEQ ID NO: 53168 - DNA, 83 bp, Homo sapiens
ggacttctcacccccaggatgtcatcgagggtgtttcccattaaacactaccaggacaaaatcaggccttacatccagctgcc

SEQ ID NO: 53169 - DNA, 90 bp, Homo sapiens
cagattttgcattggatattcgcatgcctggggttacacctaaacagaggttttgtgtacaccacctccaaaaataaaaaatggaaaaca

SEQ ID NO: 53170 - DNA, 50 bp, Homo sapiens
gggtagtcgtggaagcctgaggggtagtggtggtgcacgaagatccgcac

SEQ ID NO: 53171 - DNA, 115 bp, Homo sapiens
ctgcagtcattcttccgggcctccaaggaacttaagcaaagggggaaactaatgcctaacctgcttccagctggagctgacttttttggattttctcatccagccatccacaacc

SEQ ID NO: 53172 - DNA, 100 bp, Homo sapiens
ccgtcaggaacttgacaagaaacgtgacagtcacattaaagcacatcaacccgagccaggaagcttgctgtgtgggcctggaggccggcatcaaccccac

SEQ ID NO: 53173 - DNA, 98 bp, Homo sapiens
tgcctggagcactcgctggccgactgcgccgagctgcacgtcctcgaacgcgaggccaacagccccggttggagttgctgtgggtgagctgctgtggt

SEQ ID NO: 53174 - DNA, 100 bp, Homo sapiens
tgtgtgggaagaagatttgtaaagaaaactcttagtgttggagaaatcagcatgttaaaacaactgttgatgatagctgttggagtaaagttgcagtgga

SEQ ID NO: 53175 - DNA, 50 bp, Homo sapiens
atctcatctcaagaatggagggctacccacctttctgttctgagacccct

SEQ ID NO: 53176 - DNA, 74 bp, Homo sapiens
gagcacctcctcgaagtcatcccagttttgtgccattcagggattatattgacagaagtggaaaccacatactg

SEQ ID NO: 53177 - DNA, 101 bp, Homo sapiens
cttttgtttggattgcagcatgcagaattacaggtagtgctcatagctctctttgtccagtgcttcggccttggtcccagcgccttcccacggagcagcac

SEQ ID NO: 53178 - DNA, 75 bp, Homo sapiens
gactgtgttatagtagtcttcataggagagatgcctttgagtaatggacagatgggccagcctctcaggcctcag

SEQ ID NO: 53179 - DNA, 100 bp, Homo sapiens
caggcgtgcgcggacggtgtgcggttacagaatgtctgaaggggacagtgtgggagaatccgtccatgggaaaccttcggtggtgtacagatttttcaca

SEQ ID NO: 53180 - DNA, 99 bp, Homo sapiens
tccacgccgtggccggagccgtggagaacatattgtgatgttcgtgcctcagagctaaaactatgagtgaatttcggattcaccatgacgtcaatgaac

SEQ ID NO: 53181 - DNA, 88 bp, Homo sapiens
aactatggagaagaccagtccaatggccacggacacagtcattccctctttaatggtgctctagatcaggcacatggccatgtcgatc

SEQ ID NO: 53182 - DNA, 83 bp, Homo sapiens
ttgagaaacttaaggagtgtgtgttgcgtgacggccctgtttgtgctcttcgtcctggcctacatccacatcgtcttctcccg

SEQ ID NO: 53183 - DNA, 90 bp, Homo sapiens
gaaaaattcctatgttttcttcatataatccaggggaaccaaacaaggctctgattgtactttctccacaagcttcagcatggcagtatc

SEQ ID NO: 53184 - DNA, 100 bp, Homo sapiens
aggccacagacacttctgatagtgaaggcaatccagcatccagcagatgagaagttgcaagagaaggcatggggtgcagttgttccactagtaggcaaat

SEQ ID NO: 53185 - DNA, 101 bp, Homo sapiens
tcgagaaattgcatttttagaacctagagaaatcacactgcctgaggccaaagataagatggaagatggtaccccaaagcatatcatccagatgacaggat

SEQ ID NO: 53186 - DNA, 98 bp, Homo sapiens
cgctggagcggagccggccgtacgcggtgctgcgagggcagaacctgggtgtggggatattcagctttgccaggtatggcagtgatttttatagcatg

SEQ ID NO: 53187 - DNA, 82 bp, Homo sapiens
agcatccggaaacatgtggccctacatcaggaatttcatggcaaggggggtccactggacggggcctgagctacaacttcac

SEQ ID NO: 53188 - DNA, 100 bp, Homo sapiens
agaactagagaatgaaaagggagccttgctccttagttctatagagctggaggagctgaaagctgagaatgctgtcacgggaagtctttttaggataaac

SEQ ID NO: 53189 - DNA, 100 bp, Homo sapiens
tcttcattctcttggactgaacttaaatactgatagagaacgtgactgtcattcctaaccaggtgtatcagccccttggcccttgtccttgtaatttaac

SEQ ID NO: 53190 - DNA, 98 bp, Homo sapiens
tatggcagcctcactcccagtagtttctgcatttagtgagataaggctatggagttactagtagagaaagcaatcagcagtgcttctagccctcagag

SEQ ID NO: 53191 - DNA, 90 bp, Homo sapiens
tttgcgtcctagagtgggaaaaaagcagaggccagggcgccggcaaggggagagccagttgcgcagagccctgcaaccagcagtccaggg

SEQ ID NO: 53192 - DNA, 88 bp, Homo sapiens
agatgggtctgcatgggttacatttatttcgttcacccctgtcaacaggaatgggatggtctagtaaggataacctttgttaggaaaa

SEQ ID NO: 53193 - DNA, 87 bp, Homo sapiens
ttctaccagttcctcggggtgcagcagttgcagatctgatctcttctgaacacctcatcgtgtctccatccctgggaatctgaccct

SEQ ID NO: 53194 - DNA, 100 bp, Homo sapiens
ggcgcctgggccgccggctgtttaacttcgcttccgctggcccatagtgatctttgcagtgacccaggaccagtcctgcctctgttgtagaagacatgtg

SEQ ID NO: 53195 - DNA, 96 bp, Homo sapiens
cgctgtgtggttgcaacggagataaattcccggaaccgcgattcggcgtgtcagggtctaattctgttgcccagtctggagtgcagtagtgcgatc

SEQ ID NO: 53196 - DNA, 100 bp, Homo sapiens
gaaggattatttactcgatgatggaactctggtggtttcaggaagagatgtgaactttgtccccataaggatggagctttaaaaagaacagataatgggg

SEQ ID NO: 53197 - DNA, 98 bp, Homo sapiens
gtcacggagttgccatggcgtcgctgagcggcctggcgtcggcgctggagtcgtacaggggccgggaccgcctggccatttcataattctgaatcatg

SEQ ID NO: 53198 - DNA, 83 bp, Homo sapiens
cgcgctactctctctttctggcctggaggctatccagcgaggagagacttcagcatgcaaaccttcatctgttcggcttgcac

SEQ ID NO: 53199 - DNA, 98 bp, Homo sapiens
ctccgcctcccgggttcaagcaattctcctgcctcagcctcctaagtagctgggactacagaaattaagctgctcagcaaggaactgcggagcttcct

SEQ ID NO: 53200 - DNA, 90 bp, Homo sapiens
gctgccagggtccctgaagagggaagacacgcggaaacagggtgaggacgcttgagcggaagttagaagcaaaaatgatcaaggaggaaa

SEQ ID NO: 53201 - DNA, 48 bp, Homo sapiens
ggagcccggcgccggagcccaagatgggtgagtcaagtgaagacatag

SEQ ID NO: 53202 - DNA, 98 bp, Homo sapiens
ttgcagaagtggcccagcattaccaagacacgctgattagagcgaagagagagaaagcccaggatgaaaactttcggaagagaaagttgcctgtggta

SEQ ID NO: 53203 - DNA, 75 bp, Homo sapiens
cttggcaggaacttattatgaccccaatacccaggggactcgctggccatggatgtgtcctcagtccaccacaac

SEQ ID NO: 53204 - DNA, 100 bp, Homo sapiens
ttctccttggatctgtggtctctggagctgtggttgctgctgtgatatggaggaagaagagctcaggcttcagaagaggctcgcctctagtgtcctccgc

SEQ ID NO: 53205 - DNA, 85 bp, Homo sapiens
tccgtggaagcgtggccggcagcgtcccggacgaggagctcttcaacctttcagagaaaaggcatgacctgacccgcttaaaccc

SEQ ID NO: 53206 - DNA, 88 bp, Homo sapiens
gggctggcctgggttccctgcccatgccccagggtgttgcccaaactggggcaccctccaaggaattactctcacttccaccacccga

SEQ ID NO: 53207 - DNA, 100 bp, Homo sapiens
gttagacttgtttcttatatgtgatgccattccagcactggactcatggaggctgagcatttattcagaaccagaggcttaaagtccctagtccaaagcg

SEQ ID NO: 53208 - DNA, 82 bp, Homo sapiens
agatatcgaggtggatggaaagcagattacctaggaacagtacgatttggggttatcacaaataaacatcttgcgaaactgg

SEQ ID NO: 53209 - DNA, 74 bp, Homo sapiens
agcaagacccaggaagccgcgggcaaactcagactcgaagacagccagctaaaggtgtggatgagcaaatacgg

SEQ ID NO: 53210 - DNA, 100 bp, Homo sapiens
accatggtaaactttggacggcaaggtttaaaccttgcagctactgctgctgttactgcagcagtaaagaattttaccttcaatgatgacttcagtccca

SEQ ID NO: 53211 - DNA, 100 bp, Homo sapiens
ccgaggccttcaagtgcatgatgtgcgatgtgcggaagggcacctccacccggtggattctccacagttttcctcgtgcgtactcacggtggaatccgat

SEQ ID NO: 53212 - DNA, 98 bp, Homo sapiens
ggaagcggcggcggcgcgatgaccacgctacgggcctttacctgcgacgacctgttccgcttcaacaacatatggagacgagagatctggacttctga

SEQ ID NO: 53213 - DNA, 83 bp, Homo sapiens
ggacgggctcccgctggccgcctcgatgcaggaggacgaacaggtggtgccaccaccacaacagaatgatcttgagattcctg

SEQ ID NO: 53214 - DNA, 99 bp, Homo sapiens
atttaaagaaaacacttgatcctgatcctgccatccgacgtccaggaaatctgaaatagagtactatgctatgttggctaaaactggtgtccatcacta

SEQ ID NO: 53215 - DNA, 96 bp, Homo sapiens
gcagggcggctggcacaaacggcggcgccggggccggaggaaaaagctcgacaggggcaagtgtccgagtggtgaatcagctacttacagagatgg

SEQ ID NO: 53216 - DNA, 100 bp, Homo sapiens
agcctggcagcagcccccggggcaagagcaggagcccggcaccccccgccgacaaggaggccttatgccagcctggaccatcttggaggcagtgtaggat

SEQ ID NO: 53217 - DNA, 82 bp, Homo sapiens
cttggagcgcagaaccggccgcgcccggtatttctgggaaaagccagcttctgtttgcactggtcttcacaactcgttacct

SEQ ID NO: 53218 - DNA, 75 bp, Homo sapiens
aaaaattatccgactcctcggaccagcaggacaggaaaaccaattctgtgtcctcggaggaccacagcccagttg

SEQ ID NO: 53219 - DNA, 83 bp, Homo sapiens
caagcacacccctcgtgtccaggttcctcatgggcagtgctcggggtgacaaagaagccttatgccagcctggaccatcttgg

SEQ ID NO: 53220 - DNA, 51 bp, Homo sapiens
accttgaagcagaggagcagcaggaccaggagaatgtactactcatcacct

SEQ ID NO: 53221 - DNA, 101 bp, Homo sapiens
ggcggcggcggcggcggctgctgctgctgctgcccgcgtccgaggctcgcgggcggcgggcccgggaaacttggatttaactggccagaagcaggtattca

SEQ ID NO: 53222 - DNA, 91 bp, Homo sapiens
gacagattcgcagtggtcgcttcttctccttgattagaagcccaggacccaggaaggagacacaggaaatttattcaaagtccccacgctg

SEQ ID NO: 53223 - DNA, 83 bp, Homo sapiens
caggctctgcgggaggtggagcacctgaagagatgccagcaggaagaagaaaggtggggcgaagccagcaatgacgaggacga

SEQ ID NO: 53224 - DNA, 82 bp, Homo sapiens
ccggcccctggatgcacagccccggcgctggatcccatgacagattctgttgtcacgtctccttacagagtttgagcggtgc

SEQ ID NO: 53225 - DNA, 100 bp, Homo sapiens
ggatcccccagttccaaagtgtcttaaaggcactgaacgcagaggaggcccgccttcttcatgtcaaggagaccatgcagattgatgagaggaagcggcc

SEQ ID NO: 53226 - DNA, 76 bp, Homo sapiens
gaagaacctggttttgaaacagcaagaagagagaagggcacagttacctaagtatcaacgtaatcttcctcggcca

SEQ ID NO: 53227 - DNA, 51 bp, Homo sapiens
aacttgccgcgtcgaggactgtcggaacacaggatgcttctgggcctgagc

SEQ ID NO: 53228 - DNA, 100 bp, Homo sapiens
catggtggcccagctcgtgcagcggctccagaggattgaaagaaggtggcaagaggaagaagcagaagcagagagaggagtcgaagaagaagaagtcgac

SEQ ID NO: 53229 - DNA, 82 bp, Homo sapiens
cccagatctttggtcttcggaatctccttgcaaacgtagatgcaaacggggattcagcgtccgatcctttggaacagggact

SEQ ID NO: 53230 - DNA, 60 bp, Homo sapiens
gatcgagcccctcaccaatctcatccacaggtggaaaaggagggagctgctctcaggctg

SEQ ID NO: 53231 - DNA, 100 bp, Homo sapiens
cagctgttcccactggctctgctgaccttgtgccttgtgatggaatggggagaagatattaaagcagtttcaaaagatgaagcagtgatgttggtgaatc

SEQ ID NO: 53232 - DNA, 98 bp, Homo sapiens
caagcgtctcattggccggcgatatgatgatcctgaagtacagaaagacatggtcatcacactgaaacggtgttcaaccgggttttgccagggcctat

SEQ ID NO: 53233 - DNA, 90 bp, Homo sapiens
tggagggcggccttctggacaagccagacaactgtcctgacatgctagatggtgtcttgctatgttgcccaagctggtcttaaattcctg

SEQ ID NO: 53234 - DNA, 100 bp, Homo sapiens
caccttcacagacaccgaggaccctgccaagttcaagatgaagtactggggcgtagcctcctttctccagaaaggaagattggcctaatgaagaagttca

SEQ ID NO: 53235 - DNA, 90 bp, Homo sapiens
atggtcttcttaaggatttaatgagagcatcttatccttgcatgtctcttcatggagggtgtcaaattgagaaccaggtagatccccacc

SEQ ID NO: 53236 - DNA, 75 bp, Homo sapiens
gaccacacactgggaaacatcattaaatcgctgaaaggttccctgagtcgaggtgactggtacaagacaaaggag

SEQ ID NO: 53237 - DNA, 83 bp, Homo sapiens
atgagggctcccctagaccctgttccttgtggagaagcactggtataagcagtgggaggcatacgtgcagggaggggaccagg

SEQ ID NO: 53238 - DNA, 80 bp, Homo sapiens
cttctctgaggcggcgagagatggtcaggtctggagctcgaccgggccaggtgacaaccaaagccaagcaactgaaggat

SEQ ID NO: 53239 - DNA, 82 bp, Homo sapiens
ctcgcgccggctatggccgtgccctggggctgagccctcaggaattcatgatttgttcctgtagctgaaacatacattgaat

SEQ ID NO: 53240 - DNA, 83 bp, Homo sapiens
ccgcgtgcagccggtgaaggacactgcccacgactttcggtgagagggtccaagcctggtaagaatgtccagcttcaggagaa

SEQ ID NO: 53241 - DNA, 134 bp, Homo sapiens
ggacaggcagagtgctgatgtgaaaaataccacgacaaaaccaccctattctggacatggcaagacatgtgccactctatcgggcactgctggaattgcttcgggccattgcttcttgtgctgccatggtgccc

SEQ ID NO: 53242 - DNA, 98 bp, Homo sapiens
gagtccatagctgaagaggagcgccagatggtggaggaatacacttatttatgaagaagatgagaatgtgcctactgctcctgatcctccaagtcaac

SEQ ID NO: 53243 - DNA, 100 bp, Homo sapiens
gaagctcctgtctctggaggtgcgaaaacgtagacgacggagtagcagattgagggcaatgaggccaaaatacccaggatctgcctacaaactggtttgc

SEQ ID NO: 53244 - DNA, 100 bp, Homo sapiens
gtggagtgtccgctgtgcccgggcctgcaccatgagcgtcccggccttcatcgacatcagtgaagaagatcaggtcctcttcctgatggatgggaacaag

SEQ ID NO: 53245 - DNA, 100 bp, Homo sapiens
gcggggagcgcgggcgtccggggctggagtcgcgcaggagattacctggggcaattgatgttatcggtcagactataactatcagccgagtagaaggcag

SEQ ID NO: 53246 - DNA, 75 bp, Homo sapiens
cgtcaaggtcacaacagtgtctttctgatcaaggtgcgagacaagaagcttctcaatgacctgaatggagccgtg

SEQ ID NO: 53247 - DNA, 75 bp, Homo sapiens
tgagcagctgtcctcatgtctctccagcagtggcagctagactgtcttgcttgcttgctgaagttaatatgccag

SEQ ID NO: 53248 - DNA, 100 bp, Homo sapiens
cggaagtgcgcgcggccccgcccccgccggttcgcgtctctctgctgcggcgcggggaccgctgtgctctcggcataccaacgtttacaaatccagcagc

SEQ ID NO: 53249 - DNA, 73 bp, Homo sapiens
tcgacttgtacaccgaagaacggccgcgtgaaaaggatgcgcctccacttagcaaggctgggcaggatgtggt

SEQ ID NO: 53250 - DNA, 83 bp, Homo sapiens
ggagcagatcaagaccctcaacaacaagtttgcctccttcatagacaagtttggtgccctggttgtcagatgttggaaagcag

SEQ ID NO: 53251 - DNA, 100 bp, Homo sapiens
tgaaggaaagagctcaaagatttggtttgaatgtctcttcaatctccagaaagacacgatgaggcgagtggtacgacagagcaagtttcggcatgtattt

SEQ ID NO: 53252 - DNA, 100 bp, Homo sapiens
cagtggctgacctcgtgttcccgtgccggttgctgaaccaatccccatctgtagtttctgtcttggtacaaaagaacaaaaccgagaaaagaagccagag

SEQ ID NO: 53253 - DNA, 100 bp, Homo sapiens
tgtcagccttcccagtagctggaactacaggcatgcggctaccaagggcatccttgtggctatggtctgtactttcttcgacgctttcaacgtcccggtg

SEQ ID NO: 53254 - DNA, 51 bp, Homo sapiens
tatcaaagcagagatgatggggaatatggactgttctgatggctacatgtg

SEQ ID NO: 53255 - DNA, 101 bp, Homo sapiens
tttgtttatttgtattgatgccctttgcctttttctttctggaatcagaaggctttgctggcctgaaaaaggcttctctacagtttagcctttaatgccag

SEQ ID NO: 53256 - DNA, 82 bp, Homo sapiens
ggtgcaggcgctgcgccgcaacgccgagcgcaccgacatctgcctgctcaaaggtaactaggatttctacctcaaccgcgag

SEQ ID NO: 53257 - DNA, 75 bp, Homo sapiens
tggagagcttcatcaaaaatagtgatagctttgataaagcctgagaaattggtgcatcatattctccaggatatg

SEQ ID NO: 53258 - DNA, 100 bp, Homo sapiens
tcccgcgtccgccgattcctcctccttggtcgccgcgtccttggctggcgtgggggcaacaacgccggccacacggtggtggtggatgggaaagagtacg

SEQ ID NO: 53259 - DNA, 140 bp, Homo sapiens
atcagtgctgtgttcgccttgcttcagcagccacttttcatggcgatggtgggacccctgaaaggagagcccttctgggggacggtattcagaattcgagcgcaggagctccgcttctccacctgctcccggggagctat

SEQ ID NO: 53260 - DNA, 90 bp, Homo sapiens
cccaagccctccttcgtgtcgtacgtacgccctgaggcctggcgcaagcgctggtttgtcctccggcgaggccgcatgagcggcaacccc

SEQ ID NO: 53261 - DNA, 100 bp, Homo sapiens
aaagactaaactgccaaagttcaccatcctccaaacaagtgaagtggattatgtatttacagataagactggaacactcactgaaaacagcatggaattc

SEQ ID NO: 53262 - DNA, 60 bp, Homo sapiens
agaacctggagcaggaatgcggggaagctggtcatgcaagacaagataatctgccttccg

SEQ ID NO: 53263 - DNA, 80 bp, Homo sapiens
atggaaattttttgatcatgcggcacatcttgggggagctctttttggaatttgagccccatatgggggttggcaggcag

SEQ ID NO: 53264 - DNA, 75 bp, Homo sapiens
tgcctacttgcaacagggttgcaaactgtcttccagtgccggtggtggtgtgcacattgagccccggtatagaca

SEQ ID NO: 53265 - DNA, 100 bp, Homo sapiens
ggagtgcctccaaaggttgctgaggacaggaagatgtcacccaagcgcatagctaaaagaaggtcccccccagcagatgccatccccaaaagcaagaagg

SEQ ID NO: 53266 - DNA, 78 bp, Homo sapiens
tggctcggagcagcagcctctgagctgcaagctttcttcctggtggcagatgacatcatggattcatcccttacccgc

SEQ ID NO: 53267 - DNA, 98 bp, Homo sapiens
aaggatggggtggtgaccatcggctgtgtggtcctggaatcaagatgtgagaccaagaaattatttctgaagaaagaaatttatgaaatagaatcaac

SEQ ID NO: 53268 - DNA, 74 bp, Homo sapiens
ggggagcagaaggactcggacacagagaagctgctggtgatcactgtggccacagctgaaaccgaggggtacct

SEQ ID NO: 53269 - DNA, 51 bp, Homo sapiens
agatcatcacgtttgccgagtcaggtctctaaggacatctccatgcggctg

SEQ ID NO: 53270 - DNA, 75 bp, Homo sapiens
ctgatgttacaaatgaacaaggatctcccagcctgatgtgtgagaagcggatattggcggcagtgaccagtgcgg

SEQ ID NO: 53271 - DNA, 96 bp, Homo sapiens
cagttcgctacacagcaatgcatcgagatgcggaaaacgccatgcggtacataaatgggacgcgtctggatgaccgaatcattcgcacagactggg

SEQ ID NO: 53272 - DNA, 131 bp, Homo sapiens
gacctactgcagccacgcgggcgagcggctgtgtggatgtcggcgaagccgcgggcgaggtgctggagaatctggtaaaagcaccattgtgaagcagatgaggatcctgcatgttaatgggtttaatggag

SEQ ID NO: 53273 - DNA, 99 bp, Homo sapiens
gtgattgtctttgtgttgtctgcatttggaggagcaacaatgtgggactatacgacggctttttttcgccaacatggatgcacagccaatgatgccaac

SEQ ID NO: 53274 - DNA, 98 bp, Homo sapiens
tttgtactatcctcggtgctgtggtgcagagctagttcctctccagctcagccgcgtaggtacgacagtgccagcccacagggccatcctggtggccc

SEQ ID NO: 53275 - DNA, 90 bp, Homo sapiens
gcaaaaccaacgcctggctcggagcagcagcctctgaggtctcctctgagcctccggcctccataagacccaaaacagatgacacctctt

SEQ ID NO: 53276 - DNA, 100 bp, Homo sapiens
tggaaagctttaggagttcacagtaactggcctatgatctggatgtggatgatgcgcctggaaacagtcagcaggcaactccgaaggacaacgagataag

SEQ ID NO: 53277 - DNA, 100 bp, Homo sapiens
agggtctacaagaacgagtgcgccttctcctacgactctcccgtgtacaagggagaagaagccacattccaaatctcaggcctccagaccaacacagact

SEQ ID NO: 53278 - DNA, 100 bp, Homo sapiens
tatgccaagaaaggagactaccagaaggcttatgaggatggctgcaagactgtcgacctaaagcctgactggggcaaggaggaggaagccaagaatctgg

SEQ ID NO: 53279 - DNA, 100 bp, Homo sapiens
attctgtcgtgtcgtcgctgctggcacttcaggctctgcatctgcaggggctgctgagagtaaatacttggcgcctccagctgctggccaaggagacaga

SEQ ID NO: 53280 - DNA, 100 bp, Homo sapiens
ggaatctatgatgctgatggtgatggagattttgatgtggatgatgccaaagttttattaggtgactctcctattccatctgtttcttcgggatcatctt

SEQ ID NO: 53281 - DNA, 92 bp, Homo sapiens
acttcggttcgggtgcgctgctcaaggacacggtctacaccgacttcgacggctgaccccgcactacatctacccaccagccatcgtgcagc

SEQ ID NO: 53282 - DNA, 83 bp, Homo sapiens
gtagaggctcacggtcttttcaaccatctttggcgaggccttgcttccttccactcgagctttatcctgtggataaacgcaga

SEQ ID NO: 53283 - DNA, 96 bp, Homo sapiens
ggggttcctccaagatggcggcgcagaggaggagcttgctgcagagtagttacactgttagaccttatgatagccaagataacgagtgatgagcca

SEQ ID NO: 53284 - DNA, 75 bp, Homo sapiens
ctactgttgattttgactatcttcttagtggccggcttttcctccaaatgcgatcattgtatttttctactgcag

SEQ ID NO: 53285 - DNA, 100 bp, Homo sapiens
gagatttgataacactggagatcagcaccaaatcccacagaggcatctgagcctcaagctcgaatgtgacaagttggccagtgagaagtcagagatgcag

SEQ ID NO: 53286 - DNA, 100 bp, Homo sapiens
aagaggtgtgaagagctagagcgaatattgggtattcaggagtctccggtgccgaacggccactcgcttccgggcagagacttcctccggaagcagatgc

SEQ ID NO: 53287 - DNA, 75 bp, Homo sapiens
tcttttgatgtcaccggagttgtgcggcagtggttgagccgtggaggccctgtgcaccaaggtgccggaactgat

SEQ ID NO: 53288 - DNA, 100 bp, Homo sapiens
cgggagttgggaggacccgggacaccgcacagccgggaaatgcactattcctgatcagagaactccagttgcttcaacacacagtatcagtagtgcagcc

SEQ ID NO: 53289 - DNA, 50 bp, Homo sapiens
ttcccgttacaatcactagtgttgcaggatacagttgatatattagttgg

SEQ ID NO: 53290 - DNA, 100 bp, Homo sapiens
ccacctcacagattccagcttcggaacaagagaccctggagccaggaggaactctctcccagtccgcctttgttgaatccatccacgccacagtccacag

SEQ ID NO: 53291 - DNA, 100 bp, Homo sapiens
ctgtgtgctgaagagatcgctattattcttggaatctgaacccgagcaacttcccgagaagagaagaacctccaaggctttctggaacagcccaaggaga

SEQ ID NO: 53292 - DNA, 75 bp, Homo sapiens
atttcactcctggacaaacccctctgatgggacaattctgagattgttgggtggtgaattcctcaagtacatgga

SEQ ID NO: 53293 - DNA, 100 bp, Homo sapiens
cagcactggagttataaactgcatctgctggaaaaagttgaatactgagtctgtatcagaaaatctgcagctgtgcctaggggagtttctacccagactt

SEQ ID NO: 53294 - DNA, 100 bp, Homo sapiens
ccgcggctggggttccctcctccgtttctgtatccccacgagttctgtcaggccaagcagaaggcagccttgctggagctgctgcatgaactctacaatt

SEQ ID NO: 53295 - DNA, 100 bp, Homo sapiens
catagctaaatatttagcacagtggtatagtgaagttccaagagtccaggacatatggtaatactagaccaaactaaaggagatcattgtagaccatcaa

SEQ ID NO: 53296 - DNA, 101 bp, Homo sapiens
ccaccagcaacttctaatggatcctcttccaaaaccacaaacttgcctacgtcagtaacagccaccaagtaggactttgctataaaacacgtgaccctagg

SEQ ID NO: 53297 - DNA, 101 bp, Homo sapiens
gaaggagtttgaggaggatctgacaggcatagatgaccgcaagtgcatgtctgtgtctgtgtggagtgttgcaggacgagtggaaatgactgtttccaagt

SEQ ID NO: 53298 - DNA, 100 bp, Homo sapiens
tgcaggaacccctggtgccccacccctggctggcatggccattgtcaagccgattccacgactcttctttgcgggagaacatacgatccgtaactaccca

SEQ ID NO: 53299 - DNA, 100 bp, Homo sapiens
aaaataaccacttaccccttctcaccgaggaagagcgggagaaagggccatggttgcttgttatccgggcaatggaacgggttatgtacgtcatgttgat

SEQ ID NO: 53300 - DNA, 101 bp, Homo sapiens
gcgctgcactaacgcaggatccggctgccgaaggtcctcgccaggcatcagcaatgcagaagcacggcagccagggaaggcccccaacttcagtgtcaact

SEQ ID NO: 53301 - DNA, 100 bp, Homo sapiens
ggacgtgaaggaggaatggcaggacgaagatcttcccaggtggtttcatggccccctgaacagggcggatgcagagagcctcctgtccctctgcaaggaa

SEQ ID NO: 53302 - DNA, 75 bp, Homo sapiens
ttttcctgatagatctcaacagtagaacgtcaaggtcgtgggaaataaaaggcagttctacacagactgcagcaa

SEQ ID NO: 53303 - DNA, 90 bp, Homo sapiens
ggaggacaacagctacaaccgggggcgccccagcgggatcccagagaaggatctgcacagtgttatggcaccctacttcctgcagcaacg

SEQ ID NO: 53304 - DNA, 100 bp, Homo sapiens
gtgaactttatggagccctgttatggcagctgcacggagagacagcatcattactacctcagttacattgaggaatggaatgatgagaagacagcagctg

SEQ ID NO: 53305 - DNA, 97 bp, Homo sapiens
gggaagaaggcggaacatccggaggctgggaaatgagtgttgcggagataggaacatgggagagaaacaatctgggtaacatgaaagtgatgctggt

SEQ ID NO: 53306 - DNA, 88 bp, Homo sapiens
tgacatcagcaccaaaacaggcatcaccctcaagagctgccggagacagaggagaagcgcatctaccgggtgcctgttttcacagcgc

SEQ ID NO: 53307 - DNA, 100 bp, Homo sapiens
cgaagagcctatcaagtgaagccccctgaaatacggagaataagaatcttagaggcctggagctgctgaagactgctattgggaaagctggctacactga

SEQ ID NO: 53308 - DNA, 90 bp, Homo sapiens
cctccgtcacactcactctcttccagcaaggccccaaggaaacctcgacaaatggtcctgtaagccaagaagccttctcggtgacaggcc

SEQ ID NO: 53309 - DNA, 83 bp, Homo sapiens
ctccatgatgagccatctccacttaatgactgtctcacattggccggcaacttgttccagctgaggcaacttctcctagaatc

SEQ ID NO: 53310 - DNA, 50 bp, Homo sapiens
ctcaaccggctgtacggaatccaaggtggaagcagggaaaggcctggaga

SEQ ID NO: 53311 - DNA, 100 bp, Homo sapiens
ctacggagcacgagaaatacggcgtgggtttggaataaattgcctcatccaatttgaagacttcgccaatgccaatgccttccgcctgctcaacaaatac

SEQ ID NO: 53312 - DNA, 98 bp, Homo sapiens
gccggagccatggaggacgaagtggtccgctttgccaagaagatggacaagatggtgcagaagaagaacgcggatataagtatccagtatatggtgtc

SEQ ID NO: 53313 - DNA, 98 bp, Homo sapiens
aaccctcctcctgaggcaccacgtctctaccgagcacaaactccacgaagccaacgcccagtattgaaatggctgatggcaagtgcaggaagatcctt

SEQ ID NO: 53314 - DNA, 100 bp, Homo sapiens
cagcccgtggagtcggctgagggaaaagcgaggcaaggcaggcggatatatttttgccatcatggatcagtttggagatatattagaaggtgaagtggac

SEQ ID NO: 53315 - DNA, 104 bp, Homo sapiens
catttccatttctaccttgtatgcctcaatttgctggatttaagcactgctgcactttatgagaccattcctcaagaattttgtatccaaggcccaaaagtttg

SEQ ID NO: 53316 - DNA, 100 bp, Homo sapiens
cagaaacccaggaaatcgagactcatgactcccagagaggatggcatctagaagatttgacgtggagaaggaatgtttaaaaattgatgaagattacaaa

SEQ ID NO: 53317 - DNA, 100 bp, Homo sapiens
gaagccacaagagcttcaggtgatgataaatctaaggtaataattctcataggaaataaagcagatttggaggcacagagagatgttacatatgaagaag

SEQ ID NO: 53318 - DNA, 75 bp, Homo sapiens
ccagtggaagatgatcacatcccagcagcctcgtcttacagcgtgactgcaaagaaaaagacttttgttttgcaa

SEQ ID NO: 53319 - DNA, 83 bp, Homo sapiens
gtttgaatgaccgctctcagctggtgaagacatgacgaccctggactccaacaacaacacagcaataccaagaaggagggtga

SEQ ID NO: 53320 - DNA, 101 bp, Homo sapiens
tgcgctgagccctacaacacccccagcggccgccggctcccccacgaggcctcatgcattgtgcgtcagcagcaatgtttatggtgaaaaatggcaacggg

SEQ ID NO: 53321 - DNA, 109 bp, Homo sapiens
tatgcgtttgtcactttttgtacaaaagaagcagctcaggaggctgttaaactggtacaaaaggaagttacctctgtgacatcttggatgtaaacacttggatttggta

SEQ ID NO: 53322 - DNA, 97 bp, Homo sapiens
ggtccatccccatcttggactttgtggaacagaaatgtgaagatctggcaccactccttctacaatgagctgcgtgtagcacctgaagagcacccca

SEQ ID NO: 53323 - DNA, 50 bp, Homo sapiens
gaggaactggcccggaaacaggaggactgcctccggagccagcgtggtgg

SEQ ID NO: 53324 - DNA, 82 bp, Homo sapiens
gggccccgggacctgggctgggaacccgcggtggagcgggacacgaacgtgcttccccgggcgctgcctggacaggcctgcc

SEQ ID NO: 53325 - DNA, 100 bp, Homo sapiens
accaccctcatcgagcctgcgcccaggattcggacggagagcgcgaggactcggcggctgagcgcgcccgacagcagctagaggcgctgctcaacaagac

SEQ ID NO: 53326 - DNA, 90 bp, Homo sapiens
ttatctcatacatgctggtacatgctgggtggagtaaccttactgagagctgcagccaaaaaccacgctcgagtgacagtggtgtgtgaa

SEQ ID NO: 53327 - DNA, 100 bp, Homo sapiens
gaaaagctgagatatgatgattttgaagtcatttcacatcgaagccatgatttaaatatcggcgttaaggacatgtattcctctgagaaaccttggacag

SEQ ID NO: 53328 - DNA, 100 bp, Homo sapiens
ggcagaggcttaccacttctttatacttgcacagaggcagctctatgagggatgtgtggacactgcactgaagacagtacgaggatgtcgtccaggaaag

SEQ ID NO: 53329 - DNA, 74 bp, Homo sapiens
gactaagcgtcccgttggccagtgcaacgaagaacggaggaagcgacggccatgaagcccccaggaggagaatc

SEQ ID NO: 53330 - DNA, 90 bp, Homo sapiens
attggatgaagtggctccggagataccacctggtggcccatggtagaatggcagaaaaggaggcacgtcggaagttcaaacagatcgtca

SEQ ID NO: 53331 - DNA, 99 bp, Homo sapiens
cgctctttgctgccgccttcctgtgcggggccgtggcggccgcggcgatgactcggacccagtacctgtttgaaaatggtagaatagataacattttta

SEQ ID NO: 53332 - DNA, 75 bp, Homo sapiens
cgccaagaccgctgcagccgctggctgaacccaacatgagtgaagtttcctgcaagaaacgggacgactatttgg

SEQ ID NO: 53333 - DNA, 75 bp, Homo sapiens
caacatctcctgctattccttgggctgcctttcctgcaggacactttcttcatgagcaacaaaccccaaagatac

SEQ ID NO: 53334 - DNA, 83 bp, Homo sapiens
gctggtctctgccgcacactgctacatcgatgacagaggattcaggactcagtggcctttgaggatgtggctgtgaacttcac

SEQ ID NO: 53335 - DNA, 80 bp, Homo sapiens
accgtggcccagcagcagcaggaggagctcaaggggatgcagctgctgcgggagcttcctgcctgacacagctcacttca

SEQ ID NO: 53336 - DNA, 100 bp, Homo sapiens
gggctgctctcggccctgcctctggctgtggaaacaggcctccaagtacccaagtgggccacagttacatttcatcttcctcatcatgtgttgaagtcca

SEQ ID NO: 53337 - DNA, 100 bp, Homo sapiens
gactcaaccgacacttagcagaagtcctagaacgggacataagcagctctatgaccaatagcacagctgccagtagacccccggtcaccctgaggctggt

SEQ ID NO: 53338 - DNA, 80 bp, Homo sapiens
tgagttctagtagcacacactctgcacctcgaaggctgacaagtcatctgggaaccaagtctttggagccattgctgaaa

SEQ ID NO: 53339 - DNA, 73 bp, Homo sapiens
aaggcgcgagtgaggaaaggaggtactgtagctgccgcagcgggaaccgcaagagcttggtggtaggaacgcc

SEQ ID NO: 53340 - DNA, 100 bp, Homo sapiens
cagcatcacccacggagctggtggcactaaagcccctcgggggactctgagcagatttgggccaggcttagtcatctattggtatggatttatccaggag

SEQ ID NO: 53341 - DNA, 83 bp, Homo sapiens
gaaaccagccgaacttcagggtttccaccgttcgttcaagcgggctgacgcacgaggcacacaggaaggaggtggagcaggtg

SEQ ID NO: 53342 - DNA, 75 bp, Homo sapiens
ttattttgggtcttcttcttaatcccatatctggacatctggaacatccatggtgctggagaatctggtaaaagc

SEQ ID NO: 53343 - DNA, 88 bp, Homo sapiens
cggatggaaatcctaatgacagtctccaaattcgcctccatctgtaccatggttgaactcccaccacctgatcttggaccaagttctg

SEQ ID NO: 53344 - DNA, 99 bp, Homo sapiens
cagacagtgacgattatagcacaatatcaacctgaagatccttcctgggcatcagtaaataggggaacgtttttatgtgatgagtgctgcagtgtccat

SEQ ID NO: 53345 - DNA, 97 bp, Homo sapiens
gaaggtgcaagatactatataaatcgtgagatggagaataaagaaactctcaaagggttgcacaagatggatgatcgtccagaggaacgaatgatca

SEQ ID NO: 53346 - DNA, 98 bp, Homo sapiens
gcacgtagcccggcgctcggcatggctctcctggtgctcgctggctgcaccttcgaggaggcaagtgacccagcagtgccctgcgagtacagccaggc

SEQ ID NO: 53347 - DNA, 98 bp, Homo sapiens
tgttgaaatccgaaatttcttgggtgaaaaatatatccgcagggttcggatgagaccaggttataagcacatgtccttggccctgaataggactggca

SEQ ID NO: 53348 - DNA, 100 bp, Homo sapiens
tggcaatgcattccaacagcattacatgaggcaccaggccactgcagaacaaattagacttgcacagatgatttcggaccataatgatgctgactttgag

SEQ ID NO: 53349 - DNA, 98 bp, Homo sapiens
acagggatgataattgggcctccaagaattggccatctgcaagcttcccttctccgtggagagcaggaagacagtcatgggacctcagggagccagga

SEQ ID NO: 53350 - DNA, 87 bp, Homo sapiens
agagaagctacaaaatatgctcgatggatagcattcactggaagcttacgagaggccccagaaacattcaactctccattatgacac

SEQ ID NO: 53351 - DNA, 51 bp, Homo sapiens
caggaatctggaattttattaaacatgggctacttctacaagtccgaacag

SEQ ID NO: 53352 - DNA, 100 bp, Homo sapiens
tgggtatcaactatgtccacgatccagtgacaggaaagacaaaattagttggagatgtggacttcgaagatattgatgatgttaagaagttcaaaccggg

SEQ ID NO: 53353 - DNA, 74 bp, Homo sapiens
aggagaaattcaaggagagcatggatgctaacaagcccacaaaggcagtcatggatcaggtaatgcagtttgtt

SEQ ID NO: 53354 - DNA, 74 bp, Homo sapiens
atgaagacctgtgttgatacctataccaaccgtttaaggcagaagaaatccttagacaagagctggagaaaaaa

SEQ ID NO: 53355 - DNA, 50 bp, Homo sapiens
gtcacatctctagattggaatgtttctgctttgggacaaccatacatcta

SEQ ID NO: 53356 - DNA, 75 bp, Homo sapiens
ccaagccagaagaaatcaacctgctcaccggggagtctgatacacagggaagtcgagacaacatgagtgtgattt

SEQ ID NO: 53357 - DNA, 128 bp, Homo sapiens
tcacccaggcctgcctcatggaggacatcgagcagtggctgtccactgacgtgacctggtcctgtagacgggaaggagcctggacacagtgacacattctcaaaggccctgcaggaccaccatggctt

SEQ ID NO: 53358 - DNA, 75 bp, Homo sapiens
caccacaagatgttgtttgcattgacttggatacgaacatgttatatgtgttgtgggctgcacactgcagaaaga

SEQ ID NO: 53359 - DNA, 80 bp, Homo sapiens
gcggagctgacggtggaggttcgcggctctaacggggctttctacaaggttaagacatcagaattttatagatactcccg

SEQ ID NO: 53360 - DNA, 74 bp, Homo sapiens
cacagaaataaaagatgaacaaaaatctgggacaggttcatctttgtcatgcctcctgtggaggcacctccccc

SEQ ID NO: 53361 - DNA, 48 bp, Homo sapiens
atgtcaggagacggagccacggagcagatctgaagaaaacccttgctg

SEQ ID NO: 53362 - DNA, 100 bp, Homo sapiens
ttggatttaaagaagatccatttgtatttattcctgaagatgacccattatttccacctattgagccttatgatgggaaatggagtaaaacaatggtggg

SEQ ID NO: 53363 - DNA, 74 bp, Homo sapiens
aggaccagtatttcccatggagggtcagcccaaggccaaccccactgtcactctgttcccgccctcctctgagg

SEQ ID NO: 53364 - DNA, 103 bp, Homo sapiens
taaaaagatgacaaactcatgtggaatgtggatttaaggaggaaggaaatccctttggaccaggtggacatagacaaagagaatgagatgcttgtcacagtgg

SEQ ID NO: 53365 - DNA, 138 bp, Homo sapiens
caagactcctgggatagttttcctcttttccaactgcttaataatttcctccgaaatgacaaaagatgtgcgggacatcctcaccccaattcagattgaagctgcttaccaccttggtcctcatgtcatcagtaaacg

SEQ ID NO: 53366 - DNA, 82 bp, Homo sapiens
ctgggattacaggcacccgccaccacgcccagacaatgcagatcttcgtgaagactctgactggtaagaccatcaccctcga

SEQ ID NO: 53367 - DNA, 83 bp, Homo sapiens
gcttgttgtcttcaattaaaaaatttattaaaggaagcacacctaaggaggcaagtgaggcctatctggttggcctttttgaa

SEQ ID NO: 53368 - DNA, 90 bp, Homo sapiens
agacagcaatggatagatgccattgaacagcacaagacaaacatcatatctgaactaagtaaatggagacttaattttattgactggcac

SEQ ID NO: 53369 - DNA, 75 bp, Homo sapiens
gaaaggagcaagagcaagatcaccgtgacatccgaggtgcctttctccaaaaggccgccgactcgaagcgtgagc

SEQ ID NO: 53370 - DNA, 80 bp, Homo sapiens
gcggcgttggcggcggcggcggcggcagcggcagcgcggcggggccgggactccatgttttcgttggccctgaaatgcct

SEQ ID NO: 53371 - DNA, 95 bp, Homo sapiens
gtgggcagcaaatgttgtaaacatcctgaagcaaaaagaatgccctgtgcagaagactatggtaaaatccagtacaaggaatatatcattgaagg

SEQ ID NO: 53372 - DNA, 75 bp, Homo sapiens
aagtggtatcatgagagatatagcccacttagaaatcacaatttctcgaatgctggcagccaaaaccgttttggc

SEQ ID NO: 53373 - DNA, 75 bp, Homo sapiens
gctgactccacttctatggtgagagagaggagtgcatcaaagattactcccaggctggacatactgcaccaggtt

SEQ ID NO: 53374 - DNA, 90 bp, Homo sapiens
aagcagttcagaagagccaaggaataaacatgcaatgaacccaaaagggaggagatgttaaagtaacccatcttgcaggacgacattgaa

SEQ ID NO: 53375 - DNA, 75 bp, Homo sapiens
agccaaactgtccaaggctttggcatggcagctctcgccgtcgggattactatgacagaggatatgatcggggct

SEQ ID NO: 53376 - DNA, 74 bp, Homo sapiens
ggcgtctaccgctttgccactgataggaatgacttccggagggcagctgcaatgactctccgcacggtattatt

SEQ ID NO: 53377 - DNA, 100 bp, Homo sapiens
ccgcacttccgggtgccattgcagggaacaggcacggtctcctggtacccaacaataccaccgaccaggagctgcaacacattcgcaacagcctcccaga

SEQ ID NO: 53378 - DNA, 100 bp, Homo sapiens
cagccttcagcttttggcagcatgaaagttagcaatgtcatttgtcagagtgaaccgctgtggtccccgagttggtgtaagaaagacaccgaaagtaaag

SEQ ID NO: 53379 - DNA, 100 bp, Homo sapiens
aagcacagaagcctgaggagggtgatggggtggctgcgggcgatcagctgagctggccaggaatagttgctgaacaccccaggcctgctgaggtccctcc

SEQ ID NO: 53380 - DNA, 51 bp, Homo sapiens
gaaggttgggttcagaagaggggtacaccaggggttggaaaaaccacacta

SEQ ID NO: 53381 - DNA, 90 bp, Homo sapiens
atcgtctttccgtcctctgaggcgacggccgcggctgcacagcaacacagatgtacacacggtggcatcacttcttaagctgtacctccg

SEQ ID NO: 53382 - DNA, 90 bp, Homo sapiens
tgacatttaattttagggtcctttatatagaagggagagtagatgatagaggtactgacaacaactgactctcagaaactgctacaccag

SEQ ID NO: 53383 - DNA, 98 bp, Homo sapiens
ggcgggagcggcgccgagaggccgtgcgggacgcgggcgccaggaccggccgaacgcagagatgtcgacgtacaagcgggccacgctggacgaggagg

SEQ ID NO: 53384 - DNA, 98 bp, Homo sapiens
gcggcggcggcggcgcgcgggggcgacgcgcgggaacaacgcgagtcggcgcgcgggacgaagaacatccagtcatggataaaaatgagctggttcag

SEQ ID NO: 53385 - DNA, 100 bp, Homo sapiens
acttctgcgcgcgggagttcgaggccctgcggagctgcttcgccgctgcgacaatgcagatcttcgtgaagactctgactggtaagaccatcaccctcga

SEQ ID NO: 53386 - DNA, 75 bp, Homo sapiens
aaggcggaagtggaggtggctgacgagctgctggaaagaagcttccggttctgaggtcctggaggtgccatttcc

SEQ ID NO: 53387 - DNA, 96 bp, Homo sapiens
gcgacgcaagatggcagccaccacgggctcggaaagcataacccctactgtagaactaaatgcactgtgcatgaaacttggaaaaaaaccaatgta

SEQ ID NO: 53388 - DNA, 100 bp, Homo sapiens
ggcgtgcggtgatagccaagccatgggagacaagaagagccccaccaggtgagaagccctaccactgcaactgggacggctgcggctggaagtttgcgcg

SEQ ID NO: 53389 - DNA, 99 bp, Homo sapiens
gtgcgttctccccgtccgcccgaagaggatgccagcccccatcagattgcgggagctgatccggaccatccggacagcccgaacccaagctgaagaacg

SEQ ID NO: 53390 - DNA, 82 bp, Homo sapiens
tcgccgtccgagtcgtttattgactcaatgatgaggcacggcggctcattgctgatttggggagcacatctattactaatct

SEQ ID NO: 53391 - DNA, 83 bp, Homo sapiens
accctgggcagctcttcggccgcatccccatgcgcttctcggtgctggattttttatcaagcagaaatgcatcgaacaacgag

SEQ ID NO: 53392 - DNA, 82 bp, Homo sapiens
gcgccctctactcagcatggatatccaggtgctgagccaggagcagcagcctttctagatgtaacctagaagtcaagcggta

SEQ ID NO: 53393 - DNA, 83 bp, Homo sapiens
cgaagttccggcgcatcctccacaccgacaccatctggaggaggcgttgccgtgagggtcagctggccgccggcacctgtgag

SEQ ID NO: 53394 - DNA, 98 bp, Homo sapiens
atcctgagcaccattgattcccaaaggatggccttgacccttcatcacgttgtccttctgcaagctgaccccttagattgtaagcaaaagaaatcaag

SEQ ID NO: 53395 - DNA, 100 bp, Homo sapiens
tccagaactgctggaagctgagggcaaacttgaagataaatcttttgactccagctctttagaggatctaaagtgaccttgatggacagtggaagaaatc

SEQ ID NO: 53396 - DNA, 142 bp, Homo sapiens
accagtttgagaactgctgtggtctgcgggaaggtgccatcctcaccttgctgagtgacattgaccatcatcaaagaggggatgctgaccaaacagaacaattcattccagcgatcaaaaaggagatactttaagcttcgag

SEQ ID NO: 53397 - DNA, 100 bp, Homo sapiens
gccaggctaaggacattttctataagaactccttgttccgacatcccaaacaggctttcttgatcatggatggtgaagatataccagatttttcaagttt

SEQ ID NO: 53398 - DNA, 74 bp, Homo sapiens
ggacttccagctgtggatgaacaccgtgaacctcagttattgatcctacgagttcttggtgaaaatgcaattgc

SEQ ID NO: 53399 - DNA, 100 bp, Homo sapiens
gggcagatgagggcagtcgaaacagccgatttcagatgctcttcacatcctttcaagaacgaggtccagatggttcctgtgactccagcttcagtagcgg

SEQ ID NO: 53400 - DNA, 110 bp, Homo sapiens
atcgagaggatctggtgtaccaggcgaagctggccgagcaggctgagcgatacgacggtgagaagccctaccactgcaactgggacggctgcggctggaagtttgcgcgc

SEQ ID NO: 53401 - DNA, 75 bp, Homo sapiens
taaaccacatcatgcctcgggatgacattttcgtcgggccaatccgagcctacatccttgcccacaaggatgcca

SEQ ID NO: 53402 - DNA, 87 bp, Homo sapiens
agaaaagagagccagccgagcaccctccaagcagaggaccaagaatcgccttcagccctgtctggtgcatccttggcagaaagtgag

SEQ ID NO: 53403 - DNA, 98 bp, Homo sapiens
gctgaccctgggagacatcgacgacctggaatggccaaatatcaaggtgaagttcaaagtttgaaactggatgatgattcagttatagaaggagtaag

SEQ ID NO: 53404 - DNA, 100 bp, Homo sapiens
ggatgtctccagcctgtgtctcgtgtgtcctgctgtggtggtgctagagaatgaattgatgtatggggttccttttgaatttcctccggaagctcagtca

SEQ ID NO: 53405 - DNA, 87 bp, Homo sapiens
tccgggaagatggtgctgatcaaggaattgttgcacagagcattgaggatcaccatcaggaagtgattggtttctgcagagagaatg

SEQ ID NO: 53406 - DNA, 82 bp, Homo sapiens
ttctccacgcattctagactcccgaagagtgtctccagaacgctatagctatggcacctccagctcttcaaagaggacagag

SEQ ID NO: 53407 - DNA, 100 bp, Homo sapiens
tgcagctgcctcagttcttagcgcagattgtctaaagccccaggaaaaatggtggaaaattcaccgtcgccattgccagaaagagcgatttatggctttg

SEQ ID NO: 53408 - DNA, 75 bp, Homo sapiens
ctgaccttgaaacatacgtgctggtacacacctctgctggacctgcctagagctggaacgttacctccagagcga

SEQ ID NO: 53409 - DNA, 100 bp, Homo sapiens
gaaggaaatcatgtcaagcgaagccttgaaaaagctgccctgagacggtgtcccgccgaaagatacgaccatatgtgggatgtttggtacaatatttgcc

SEQ ID NO: 53410 - DNA, 100 bp, Homo sapiens
attaatgaaaactgggatagattgcaccctggagagactcaaatccagtacctcaagcaagtccagcagccgagcgttgcccaactgagatcaacaatgg

SEQ ID NO: 53411 - DNA, 82 bp, Homo sapiens
tgggttctattttccctcctcaaactgactttgcagccacggagagaactcttcatcttggcttatacctatactgcctgat

SEQ ID NO: 53412 - DNA, 75 bp, Homo sapiens
cttcctcctcaacgccagcgggagcacatcgagacgagttgtactgctgtcacaggaaatggacgctggattaca

SEQ ID NO: 53413 - DNA, 76 bp, Homo sapiens
agggcggccggcgctacatgatgatcgtggtcctggtgaacgagggcggtggctttgaccgggcctctggctcctt

SEQ ID NO: 53414 - DNA, 87 bp, Homo sapiens
ttatgtttcatcaggaccatctgttcggaaccccagagcacgagtagtagtcttaagagtgactcgccgggccctattccctggaga

SEQ ID NO: 53415 - DNA, 100 bp, Homo sapiens
atcacgggcactagtgtggctctcctgttccagcaattggcgagtggcatcgtgttccagtgggggactggtttggcatcatgtggacgacggttgtgcc

SEQ ID NO: 53416 - DNA, 97 bp, Homo sapiens
gggacacccgggagtcaggaaatggaggagaaggagaagcggcgcctcgaccagctggaacgtaagaaggagacgcagcgcctactggaggaggagg

SEQ ID NO: 53417 - DNA, 82 bp, Homo sapiens
tcaggccagtcgcctccaggccaagagggatccttcacccgtgtctgtgtctccagaacgctatagctatggcacctccagc

SEQ ID NO: 53418 - DNA, 100 bp, Homo sapiens
gcattgtccatgggcttctctgtgaaagaagttgctgaagcagaagattgttataatacagctctccgtctgtgtcccacccatgcagactctctgaata

SEQ ID NO: 53419 - DNA, 101 bp, Homo sapiens
aaagatgcagaggaaagaaaagaatacattcctgattacctgccacccattgtgtcttctcaagaagatcggacagctggcttttaaaggaatgaagagac

SEQ ID NO: 53420 - DNA, 100 bp, Homo sapiens
tcaaactatgttttaactgatgagcaatcactttggattgaagatactacaaaatcagtttatcaaaacctaacagtttccttaagaaggctgatatttt

SEQ ID NO: 53421 - DNA, 82 bp, Homo sapiens
cttgctgtcagctcctcgagaagccccagccgcttacaaacacgcagatggcaagaagattgatggcaggagggtccttgtg

SEQ ID NO: 53422 - DNA, 100 bp, Homo sapiens
gcgccacaacgtccgactgcactcacacgacgtgcgctatgggtcagggacccgtgacattaaaggatgttattgtggaattcaccaaggaagaatggaa

SEQ ID NO: 53423 - DNA, 100 bp, Homo sapiens
gtcccagctgtgaaacgtacatctgattttaaaaacttcggatgagaaagaaagtaaaagatgtcattgtgaaattactgatagcaacaaaggtcggaag

SEQ ID NO: 53424 - DNA, 100 bp, Homo sapiens
ccgagccgagcctcccgccgtcgccatgggccagaacgacctgatgggcacggccgaggacttcgccgaccaggaccaagaatcgccttcagccctgtct

SEQ ID NO: 53425 - DNA, 82 bp, Homo sapiens
cgcccgcttcgatcgcctcgcgccggctgctctttccgggtcaccgacgatgagggcgcacctgctgtcctggagcttccga

SEQ ID NO: 53426 - DNA, 83 bp, Homo sapiens
ctgcggttcgccccgggcggcgtcggcgactcgggccccggagaggaatcaaagatcaactcccactgaggacaaatggacct

SEQ ID NO: 53427 - DNA, 98 bp, Homo sapiens
attcacagcatcaatatcaccattgagaatgagtgagatgatatttcgaagaataaagatgccctggctttggcttgatctctggtaccttatgttta

SEQ ID NO: 53428 - DNA, 98 bp, Homo sapiens
agacatggaagccagtgattatgagcttgaagatgaaacaagacctgctaagataaggagacaaggaggcatccagctcctggtggacctgttggatc

SEQ ID NO: 53429 - DNA, 82 bp, Homo sapiens
tttctcccttgatccgggagtctttccactgggtgtcgtgaaaactacccctaaaagccaaaatgggaaaggaaaagactca

SEQ ID NO: 53430 - DNA, 74 bp, Homo sapiens
gaaaatctccccggtgactttcagtgtcacatttgaagacgagcactgaggatgaggaaccaactgaagaatat

SEQ ID NO: 53431 - DNA, 82 bp, Homo sapiens
gacaagccgctggcagccgcggatctcaccgccgctcagggtgctcgcggtgaggatcgatgacctggaccacctcccggag

SEQ ID NO: 53432 - DNA, 90 bp, Homo sapiens
agaaattccaagttcagattctccagggtgtgctctgtgcaactcccctcatttttatcattccatcagcctgttatctgaaactgtctg

SEQ ID NO: 53433 - DNA, 123 bp, Homo sapiens
tgaaatctcagacggtggcccggaaccggagtggggtcacaaatgtgcagcggaactgctgcctgacgctctgcaacttcagcatccccgaggagctggaattccagtaccgccgggtcaacg

SEQ ID NO: 53434 - DNA, 75 bp, Homo sapiens
acgcccatccttggacttcctgaaaatgacccagatcatgtttgagaccttcaacaccccagccatgtacgttgc

SEQ ID NO: 53435 - DNA, 100 bp, Homo sapiens
gagcaaaccaaaaacagtggcactgagcactgaacctgacttccatgcggttgaaccctacacgaagaaagaactttctgctgttactttccctgacatc

SEQ ID NO: 53436 - DNA, 100 bp, Homo sapiens
cctcaacctggtgcagtgcgagacgctagagggtggagagtatagtgaagatgatgtaaatgaattagtgaaggaagatgaagtggatggtgaagagcag

SEQ ID NO: 53437 - DNA, 75 bp, Homo sapiens
cacctttataacaaccgctatgctgggcacgtggaggagttcagccccagagctgtctacaccagtggtaaagcg

SEQ ID NO: 53438 - DNA, 153 bp, Homo sapiens
cccaggcttctgcgcagaatgcttctcagcagcaacatccccaaacagcggcgtttcacggtggcacatacatggcaccgaccgtcacgagctaacttcctggaagagctttccgtctattttcaaattctttaccgaagcctcagaggccaa

SEQ ID NO: 53439 - DNA, 100 bp, Homo sapiens
ctggtgctcatccccaaagccaagccactcactctgctctgggtgagaaaagctagaatgtggagtcctgtcatcagatgatgtgactacatggaatgag

SEQ ID NO: 53440 - DNA, 75 bp, Homo sapiens
tgacactcagcactttgcgccaccttactctaaccagtttatgtaataagaacgggcaaacagctgaagatctcg

SEQ ID NO: 53441 - DNA, 51 bp, Homo sapiens
tccgggcagggctgggaaggaaagatggagaacatcattgcaacagtaaga

SEQ ID NO: 53442 - DNA, 50 bp, Homo sapiens
gcacgccggcggcaccatggtccacctcaattgtctccagctttaagacc

SEQ ID NO: 53443 - DNA, 80 bp, Homo sapiens
tcgctggcagccgctgtacttgtggtgatcatgtgtgcgagcagtgacaccatccggagcatcatgctggtggcgcacag

SEQ ID NO: 53444 - DNA, 90 bp, Homo sapiens
gttactgatggtgctgctcacatctgtggtccagggcagggccactccagtttctccacagacactacccaaagcagtccttcactacag

SEQ ID NO: 53445 - DNA, 50 bp, Homo sapiens
cgaaagaaaccaccttctccagcaaaggccaatgatgaggccaatcagag

SEQ ID NO: 53446 - DNA, 129 bp, Homo sapiens
aactccagcgagatccgggccgtgaacgaaagcagtgacggaggagcttgtaccaccgaggcacagttgaatgctgttgatgctttgattgactccatgagcttggcaaagaaagatgagaagacagac

SEQ ID NO: 53447 - DNA, 80 bp, Homo sapiens
cgcgcgcagggcctgcagcgggagctggacggcgagcgcgagcggcgcgagaaaggttggggtgctggaggactgcttca

SEQ ID NO: 53448 - DNA, 100 bp, Homo sapiens
tggctgaaaagctgaagcaacagatgttggatcaggatgaggaagtgttgatggcgtctctgaatccaagttgcaaatctgtgttgaaccaacttcccaa

SEQ ID NO: 53449 - DNA, 88 bp, Homo sapiens
gatgatggtgacgcttctcactcacgtgtgaaggacaaattgatggccaggagatcactgccaccgccgtgctggccccctggcctag

SEQ ID NO: 53450 - DNA, 75 bp, Homo sapiens
tatgcaaacttgggccaaaggacagttagaagacagtaggtgtctgatgatttgtgagcctcaagtgactactct

SEQ ID NO: 53451 - DNA, 74 bp, Homo sapiens
ttggacttgggagtatctccgtattctggagcagtatttcatgaagtttcatccatgaggaccacctccgggag

SEQ ID NO: 53452 - DNA, 100 bp, Homo sapiens
cggcgtctcgtttcatcctcacaacagccaggaagacagtgacccgcccattcatgaaagtctcagcatagaaaatacattgtgggcaagcaccattgtt

SEQ ID NO: 53453 - DNA, 100 bp, Homo sapiens
gccaattgtgtggccttagcgatctatattccctttccagaagatgattccaacgccaccaattccaacctgcacatgcagatgacaatccaggctctcc

SEQ ID NO: 53454 - DNA, 100 bp, Homo sapiens
cctggccatcgttttcttcgcctccatagcctctgaagagccaatccattcaggatgggaaaccacgcaggcaaacgagaattaaatgccgagaaggcca

SEQ ID NO: 53455 - DNA, 90 bp, Homo sapiens
agaccttgctggccaaccttggtaccacggcctcctgtcccgccaggaggaacaaggtgctgaaccacttcagcatcatgcagcagcggc

SEQ ID NO: 53456 - DNA, 90 bp, Homo sapiens
acagcttcggcggcgaaggtcagcgccgacggcagccggcacctgacggcgtgaccgacccgagccgattggaaagaagactgatgaaga

SEQ ID NO: 53457 - DNA, 75 bp, Homo sapiens
cagcctcaaacaggagctggagcagctcaaagagggattttccggggcaaggtgccagagcagctgtggacaagt

SEQ ID NO: 53458 - DNA, 98 bp, Homo sapiens
atgatttataccatagaagatgttcctccctggtacctgtgtatatttctggggctacaggcccgaaagaatgaacttgccattgaagatatggatgg

SEQ ID NO: 53459 - DNA, 100 bp, Homo sapiens
cggtgctctgtggcttctgccagccttgcaggaggactctggcacctacgtctgcactactagatcgcagtaatatagttccggttcttcttggaccaaa

SEQ ID NO: 53460 - DNA, 98 bp, Homo sapiens
tggcacaggaccagactcaagacacacaactcataacagttgatgaaaaattgagttgtctctgtgggaagtttgtcctccgtccattgcgaccatgc

SEQ ID NO: 53461 - DNA, 75 bp, Homo sapiens
gcggagaggtgtttggtgcagaaggaccgcctggcccggtgcaccatgcattgcaacgacaaagccaaagattca

SEQ ID NO: 53462 - DNA, 100 bp, Homo sapiens
agaagaataccatgaggtcaaaaaggaaatcaccctgcttgagcaaaggaaaaaagaggcacagttagatgaagaaggacagtttcttgtcagaataata

SEQ ID NO: 53463 - DNA, 74 bp, Homo sapiens
cgaactgtctcaccacttccctgcagctcccgatgcttatagaattttatgagtcaccagatccagaaagaaga

SEQ ID NO: 53464 - DNA, 99 bp, Homo sapiens
ggaattctttgccaaggcacgggctggctctgtgcggctcatcaaggttgtgattgaggacggtgtgctgggcatcaaggtgaagatcatgctgccctg

SEQ ID NO: 53465 - DNA, 100 bp, Homo sapiens
actaagggtggacgtgatcggatgtccttcggccttctccgtgtgttctccattgtgatcccctttctctatgtcgggacactcattagcaagaactttg

SEQ ID NO: 53466 - DNA, 100 bp, Homo sapiens
ctttgtgaaacaccagactgtcccacagaacactggggaggcaccaaataatgtcatctgaaatgttgccagcatttattgaaacttctaatgttgacaa

SEQ ID NO: 53467 - DNA, 75 bp, Homo sapiens
tcgcagtggtcgcttcttctccttgggcattgacactgagaggcccattctgcaagtggacagctgtgtctttgc

SEQ ID NO: 53468 - DNA, 83 bp, Homo sapiens
ctcgcctcccctctgaggaccgaagatgagcttcctcttacaatgcagatcttcgtgaagactctgactggtaagaccatcac

SEQ ID NO: 53469 - DNA, 100 bp, Homo sapiens
cgactcgctacgcgggtcttgcgagatatctggccgcctctgccgcagctggagaagctccaccatgaggcgaggtggatggaggaagcgagctgaaaat

SEQ ID NO: 53470 - DNA, 101 bp, Homo sapiens
gcttctgcctgttcagaagcattaccaacttgatgatcaagagggcatttcgatgaggagaacaatccccttgagacagaatatggcctttctgtctacaa

SEQ ID NO: 53471 - DNA, 75 bp, Homo sapiens
gcgcccctccgagctggggttggacgctgccagtttgcacagcagcagcaagcagctcacacccaggaagccctg

SEQ ID NO: 53472 - DNA, 100 bp, Homo sapiens
ttacgaatgcttttcaagcgaaatcctgcaaacagattaggggcccatcctgatggagctgcagacttaccgttaccacggacacagtatgagtgaccct

SEQ ID NO: 53473 - DNA, 51 bp, Homo sapiens
ctgacatttcactcatctttgcggttggagtaatagatttttccctctacc

SEQ ID NO: 53474 - DNA, 100 bp, Homo sapiens
cgtacctcctcaccatacacctgaaggaaggccggaacctggttgtccgagatcgctgtgccaaaactggacaagccaaggcatctgtagccaaagtaaa

SEQ ID NO: 53475 - DNA, 100 bp, Homo sapiens
acaaatgggaagcaagagaaaaagaacattactgtcttgatgttcgaagaagaacaatttatgaataccaccgagtagagctacaaatgtcaaaaattac

SEQ ID NO: 53476 - DNA, 100 bp, Homo sapiens
aaagaggatcatctatgattcagggcaaaagttggtgatcttctgccccacgtttcttctcctaagatccatttgcagtatgccaaagccaaggaagcag

SEQ ID NO: 53477 - DNA, 75 bp, Homo sapiens
tccaggggaacaatgaggcctacgcagagctcatcgtccttggcaccgcatgcgtggggagaccaccctgtggaa

SEQ ID NO: 53478 - DNA, 75 bp, Homo sapiens
atttgttaaggattccaagtaactcttatttgacctgagcttggcaaagcaaggatatgaacaattgtgcaggtg

SEQ ID NO: 53479 - DNA, 50 bp, Homo sapiens
gctgtgaactgtgaacagaagcaaggaaggtgtcttgctgcaggtaacta

SEQ ID NO: 53480 - DNA, 96 bp, Homo sapiens
cagcgcgcattcggccccggacgaaggtactcgcagcacttggagcgcagaaccggccgcgcccggttgtccttctattcaggccactcttcgttt

SEQ ID NO: 53481 - DNA, 49 bp, Homo sapiens
ctcatggaggctgagcatttattcagaaatgcatcattggaacgcgtcc

SEQ ID NO: 53482 - DNA, 100 bp, Homo sapiens
cgcagtggtcgcttcttctccttggctttcttctagtcaagatgagtgataaaccagacttgtcggaagtggagaagtttgacaggtcaaaactgaagaa

SEQ ID NO: 53483 - DNA, 100 bp, Homo sapiens
gaaaaatcctgctaattgaggacgaggtggatgttatctggtggatgttatagtgcacgatctgattttctggagagatgtgaagaagactgggtttgtc

SEQ ID NO: 53484 - DNA, 83 bp, Homo sapiens
cccgaagaagactcccccacatctgggtgaatgaaaactttgccattgatttgatagcagagcagcccgtgagcgaggtggag

SEQ ID NO: 53485 - DNA, 110 bp, Homo sapiens
ccttctggcaccttaagaaattatccactcacctgcaaagttgtttattcctacaaggtacctgaatctctctcatccatggagtgtcaccattttctgaggctgaaagt

SEQ ID NO: 53486 - DNA, 98 bp, Homo sapiens
ctcctgaccaggccaggggagggtggcactggctctcctggtccagctctcaggacaagaacaaagtgtgctgtacatcgcggtgcacgtggtcccgg

SEQ ID NO: 53487 - DNA, 100 bp, Homo sapiens
gagatcatagcagagtacgatactcaggtcaaagcaccaatgttgttatgaattattcagagatcgagtctaaggttcgagaggcaacgaacgatgatcc

SEQ ID NO: 53488 - DNA, 83 bp, Homo sapiens
ctcgctgggagagaggtacctctccttttccctctccctttccctaagattattttcgaaataccagtatttcgactccaggg

SEQ ID NO: 53489 - DNA, 82 bp, Homo sapiens
tttgaccccagaacaaagccgcgggcctctcagcaaacggggattcagcgtccgatcctttggaacagggactcacgtgaag

SEQ ID NO: 53490 - DNA, 100 bp, Homo sapiens
ccccagtgtatggtcagcttctagctttatatttgctccataatgacattaagcactatcctttgtactccctcaacgtggcctccatgtggttgaagct

SEQ ID NO: 53491 - DNA, 75 bp, Homo sapiens
agtcaaccacgttctcataccagcctgaaggtctccaattgagaaacatggcactgtttttcctgcactctaccc

SEQ ID NO: 53492 - DNA, 75 bp, Homo sapiens
ggattctcgacctgctaacagaactggaccttttcggttgggttcaatatacggagagtgccctgtgccaaagcc

SEQ ID NO: 53493 - DNA, 100 bp, Homo sapiens
tccggcgcgggcactgctttccactcggctcctgtcgtccgttctctcaggctcccgttcagggctgaagtgattctggggagcatcatcaagaagaaag

SEQ ID NO: 53494 - DNA, 100 bp, Homo sapiens
gtctactgcttgcagagcctccattgaagtttcttgcaaaccacactaacatattactggcatcttcaatctggggcctttatcatctgctggactcctg

SEQ ID NO: 53495 - DNA, 100 bp, Homo sapiens
taatcactgaccatcccaatatacaggaaaagaccagtgccctcagtctgagcaacgttgctggagtattctacatccttgtcgggggccttggtttggc

SEQ ID NO: 53496 - DNA, 83 bp, Homo sapiens
tgcgctggcgcggcttttggcggcctttctgctcctcgcggcccagatcagtcgcatcgaatacattcattcaaagaacttca

SEQ ID NO: 53497 - DNA, 50 bp, Homo sapiens
ggatgatgctgactttgatgaaggtacaagaaaattccccaggacacaga

SEQ ID NO: 53498 - DNA, 100 bp, Homo sapiens
tttactgggataattatccaaataaattgcaagcattctatccaaatgggtgttgtcaatggaaatatggattcttctacagcaaacatgtacatctata

SEQ ID NO: 53499 - DNA, 90 bp, Homo sapiens
tccggaccggagactttggggcctaactagatttgggaatggatgatgaaggagatgatgacccagttcctctaccaaatgtgaatgcag

SEQ ID NO: 53500 - DNA, 100 bp, Homo sapiens
gcgcccgccagttgcttgatcaggtggaacagattcagaaggagcaggattaccaaaggattctggatgaaattgaagaacataacatcaaaatctatca

SEQ ID NO: 53501 - DNA, 74 bp, Homo sapiens
ccgcgctcgtcgtcgacaacggctccggcatgtgcaaggccacgttccactaccggacgctgcacagtgacgac

SEQ ID NO: 53502 - DNA, 100 bp, Homo sapiens
cataactctgccaaatatagaaaatcgagagctccagatcatgagaaagctagatcactgtaacatagtccgattgcgttatttcttctactccagtggt

SEQ ID NO: 53503 - DNA, 128 bp, Homo sapiens
tttggaagccgtgcggagcgagttacgagaattcccggccgctgcaagggatgatgaagatgatgaagaggaagatgaagaggaagaaatcgacgtggtcactgtggagaagcggcgttcctcctcca

SEQ ID NO: 53504 - DNA, 75 bp, Homo sapiens
gctttggccatcggagatctggtttcggctgaagttggacccaggaggccatgatggaccacgccctgcatacca

SEQ ID NO: 53505 - DNA, 100 bp, Homo sapiens
ggaactctgcagaccaactgccgtgattaagtataagcaatcagcagaaatggagaaagccaatttcacttctgtggttgatactccagagatcattcat

SEQ ID NO: 53506 - DNA, 83 bp, Homo sapiens
ctcttcctggtgtcccgcccagtaggattttttatcaagcagaaatgcatcgaacaacgagaatcaagatcactgagctaaat

SEQ ID NO: 53507 - DNA, 100 bp, Homo sapiens
gaagagggaagacacgcggaaacaggcagagtggcatgattccgactggatactctcagtgccagccaaattacctgaaattgaagaatattatgatgga

SEQ ID NO: 53508 - DNA, 100 bp, Homo sapiens
ccagagattcatctttcatgcagtgacatgttgataaaaaatgatggtaaaataccatgaagattttgaaaaaacaaaggggagaggctttactcccgtc

SEQ ID NO: 53509 - DNA, 90 bp, Homo sapiens
ctggaggctgagtacgacagcctcaaacaggagctggagcagctcaaagaggcagcagtacctgtccaaagatcgctttagttccacctt

SEQ ID NO: 53510 - DNA, 90 bp, Homo sapiens
gcagccggtgtgacctgtcccttcagggactgcatcatgctctgttgcctgaacagcggcaccagcttcgtggctgggtttgccatcttc

SEQ ID NO: 53511 - DNA, 100 bp, Homo sapiens
atatgacagcttcattgaacttcaggagaaattacatcagaatatttgcaggcaccatcatgactccaagcggaggagatccgatgaatttaggcctcaa

SEQ ID NO: 53512 - DNA, 90 bp, Homo sapiens
ccttccgggcagagaccagagggaaggtatggcagatcccagaaaatggactcaccctttccctgactgaacctgtggtgattttggaag

SEQ ID NO: 53513 - DNA, 74 bp, Homo sapiens
tgtatttgaaaggcttccccaaaatgggcaacttcagcttaagagaatggggagaaggaacccccgacaacact

SEQ ID NO: 53514 - DNA, 149 bp, Homo sapiens
ccaagtttcacatccttgtctgtgaagctaaactcaatgctgctgtgtgggaagaagatttgtaaagaaaactcttaggtgctggagaatctggtaaaagcaccattgtgaagcagatgaggatcctgcatgttaatgggtttaatgga

SEQ ID NO: 53515 - DNA, 75 bp, Homo sapiens
agctcttcttgaaaaatgcaaagatgtagatgagagaaatgagcccaaacaaattcgaatatcttctaaaacagg

SEQ ID NO: 53516 - DNA, 103 bp, Homo sapiens
gaacggcgacctcaagaagcagctccacgaaaggcagccgcggatcgccgcgctcagcgacaaacaaataaggatgacattcggctgctgccgtcagcattgg

SEQ ID NO: 53517 - DNA, 74 bp, Homo sapiens
ctgtcagagcccggggacggcgaggccctcatgtaccacacgacagtgggagtagctcaccgttacccaagtat

SEQ ID NO: 53518 - DNA, 75 bp, Homo sapiens
agctattggaaagtttttttaatgtggttggaacaactgagaatcgccctgaaatctggctatggaaaatatctt

SEQ ID NO: 53519 - DNA, 98 bp, Homo sapiens
aagaacggcggtacccgggtggttaaacttcgcaaaatggctgaactcacgggaatcaaatggcgtaggtacaattttggagggcatggggactgtgg

SEQ ID NO: 53520 - DNA, 100 bp, Homo sapiens
tgaatttgaaccaagtggtccaaacggcccggtcacctgagcaacccctctgcaggaaccgcagaataatcatgggccagactgggaagaaatctgagaa

SEQ ID NO: 53521 - DNA, 75 bp, Homo sapiens
aataaggagaaggataagtcgaaggggaaggcgcctgaagaggacgaaggatgctttcattggatttggaggaaa

SEQ ID NO: 53522 - DNA, 75 bp, Homo sapiens
tctagccaaggatctcagagtgctttacagacatcggagtttaagagagctgtgaaagtagcaacaggacaagaa

SEQ ID NO: 53523 - DNA, 100 bp, Homo sapiens
agacgatctgcacttcgcattttggcattgacatttaattttagggtcctttatatagaagggagagtagattgccagtagaaagccaacagacggtgct

SEQ ID NO: 53524 - DNA, 118 bp, Homo sapiens
cttcctaacatccaggccgtgcttctgcctaagaagaccgagagtcaccacaaggccaagggcaagtgatttgacaggaatgtatacaaagactatcgcttccttgagctggcatgtg

SEQ ID NO: 53525 - DNA, 75 bp, Homo sapiens
gctacatggccccctggtttagggaggactatggcagctggcagatggtaacgggctgtggcagtattcaggagc

SEQ ID NO: 53526 - DNA, 100 bp, Homo sapiens
aaaagatttgtctgccaaacaactgcagaaagacgagaatccaggacttgaatcgtatcttcccactttctgaggactactctggatcaggcttcggctc

SEQ ID NO: 53527 - DNA, 75 bp, Homo sapiens
gagtgccagaagaggatcgacgcctatgtcgacgagcagaagtgcatcgccatgtgcatggaccgctacatggac

SEQ ID NO: 53528 - DNA, 80 bp, Homo sapiens
ggatggcgcctgtgggcacagacaaggagctcagtgacctcctggacttcagcatgatgctgtgggccctgagggaaagg

SEQ ID NO: 53529 - DNA, 88 bp, Homo sapiens
tctgtggagaacacccccccatggaggcgaggtagagttggggtcgcaggtatggtgctgggtgcagatgcagtgtggctctggatag

SEQ ID NO: 53530 - DNA, 100 bp, Homo sapiens
aactgcattgtgtacagcaaaggacactgccttaggaaaaccacgagaggtgtttcgacttcctacagatttgacagcatgtgacaaccgtctttgtgca

SEQ ID NO: 53531 - DNA, 47 bp, Homo sapiens
ccaactgctcctgcgccgccggtgtctcctgcacctgcgctggttcc

SEQ ID NO: 53532 - DNA, 90 bp, Homo sapiens
ctcgggtcgttgtggtgcgctgtcttcccgcttgcgtcagggacctgcccgactcagtgatgctcccataatactctcagatagtgaaga

SEQ ID NO: 53533 - DNA, 49 bp, Homo sapiens
ccggtttctcggcgaatgacagcacaggaacttctgcaatgtcccatca

SEQ ID NO: 53534 - DNA, 98 bp, Homo sapiens
ccgaaccgatccaggcctacatcatcccatcgggagatgctcatcagtgccgtggaggtcccagcccccgctgcggttctcggaggtccggagcccct

SEQ ID NO: 53535 - DNA, 75 bp, Homo sapiens
tcgagagcaagctcctgggctccaattcctccaggatgtacttcacccagtgctgttgcaaatattctggtgaat

SEQ ID NO: 53536 - DNA, 90 bp, Homo sapiens
aggcgtttttcatcgagtcggtgtgcgacgaccctacagttgtggcctccaatatcatggaccctgatgctcccataagacagaaaatgc

SEQ ID NO: 53537 - DNA, 74 bp, Homo sapiens
taatcctgaagttctgcctattgtctcagaattattagagtatttgattttcatcaagcagctgatggtatcca

SEQ ID NO: 53538 - DNA, 76 bp, Homo sapiens
gctggggcgacgaggcgattgcgggggcctgggctagtggagatggctatttcgaaaacagcccactgatgtccca

SEQ ID NO: 53539 - DNA, 95 bp, Homo sapiens
ggatgataaacacccaggacaggttctgtgactccccgaccagtgacctggaaatgcgcaatggccggggtagaggcaaacgcatgcgtcccaac

SEQ ID NO: 53540 - DNA, 75 bp, Homo sapiens
acgggaagggccggcccgcctccctggccggggcgcagttcggaggttcaggtacacggtcctcttctcgcacgg

SEQ ID NO: 53541 - DNA, 80 bp, Homo sapiens
ttgagagagattgctcctggccccctcaccacaccctctgtcccagctcccatcccagatctcaaagtgtttgagcgtga

SEQ ID NO: 53542 - DNA, 100 bp, Homo sapiens
aactccagcgagatccgggccgtgaacgaaagcagtgacggaggagcttgtaccaccggtgatgatgaacagtctacacagatggctgcaagttgggaag

SEQ ID NO: 53543 - DNA, 100 bp, Homo sapiens
acttttgttggtgttatgggaatgagatcctactactatggaaaattcatgcctgtaggtttaattgcaggtgccaggtctgccatcatggatgttctcg

SEQ ID NO: 53544 - DNA, 100 bp, Homo sapiens
ccaacatcaccatcaacatcgtggacgaccacacgccgtgggtgaagggcagtgtgccccctcccctggatcaatggaaggaagccatgctgaagcaccg

SEQ ID NO: 53545 - DNA, 102 bp, Homo sapiens
cctctccatggggttccccagagcccgcgcgtcaggaatatcccgctatagtagaatttgcaccttttcaaaaagctgcaaaaaagaagactaagaaaagag

SEQ ID NO: 53546 - DNA, 50 bp, Homo sapiens
cagaggaggagcgcagcccggcctcgggcttttttccagacttcaagctc

SEQ ID NO: 53547 - DNA, 100 bp, Homo sapiens
ggaagatacagaaatcggtgctgctcccaacagcagatcaaggcagtcgtcaggaactcaggatccgggcccagatgacttactcaatgccttgaatgag

SEQ ID NO: 53548 - DNA, 100 bp, Homo sapiens
caggacatggagtatgaaagacgacatgcgtcgggatgtccaggaaatttttcgcatgaccccccacgagaagcaggtcatgatgttcagtgctaccttg

SEQ ID NO: 53549 - DNA, 82 bp, Homo sapiens
taagaaaggaaaatatcccaaggactaatctgatcgggtcttccttcatgaactgtggctgcaccatctgtcttcatcttcc

SEQ ID NO: 53550 - DNA, 75 bp, Homo sapiens
gaagtttctaggaaaggccggacaccagaaatggtggagtcaatgaagaaagtagcagggatggatgtggagctg

SEQ ID NO: 53551 - DNA, 90 bp, Homo sapiens
gatttgcaccccgtggggtggtgcacacagaacaacaaggtgttgatgccgccggacggtgtaaattttgataccaccattgccgccttc

SEQ ID NO: 53552 - DNA, 75 bp, Homo sapiens
gcacagatcgacagacattgtttgaaaatgtccaaagtggctgaaaggctcggggaccagttctacaaggaagcc

SEQ ID NO: 53553 - DNA, 100 bp, Homo sapiens
caaagcctgcccagacggctcacctgtgcgggatggaacaaaagggggcaatggcggcttcctgtgttctactgcacactgggcagaagatgcctctgat

SEQ ID NO: 53554 - DNA, 90 bp, Homo sapiens
ccggacccctgcccctgtctaatctgctaagaccagagtgaactccgagcaggaacacttcctcattgtcccttttgggcttctttacag

SEQ ID NO: 53555 - DNA, 100 bp, Homo sapiens
cagctgtggaaagaagttgcaaaacactggttcaactagagagaaattgagaagaagcatccactgaagtatcacatggcttcttagaatttattacaca

SEQ ID NO: 53556 - DNA, 51 bp, Homo sapiens
ttgacatgttagccgctaacagtgtctgtaaaacgtgtattgttcgttacc

SEQ ID NO: 53557 - DNA, 75 bp, Homo sapiens
acagaattacgcatttccacttctaatgtggtggacttgctttgtgaagagacagttcatgaacaagagtctttc

SEQ ID NO: 53558 - DNA, 98 bp, Homo sapiens
aacagtttgaaacatttattccatattctcagctacttcttacaactcagtttccctttaaaataaatgaaaaagtattacaggttctgaccaacatc

SEQ ID NO: 53559 - DNA, 93 bp, Homo sapiens
cacggtctctacaccagagtcactactttaggcggattcgcgaaggtgagaagccctaccactgcaactgggacggctgcggctggaagtttg

SEQ ID NO: 53560 - DNA, 100 bp, Homo sapiens
cgctggcgttgcagctaggccagcggctcggcggtgagatcgtcagcgctgactccatgcagaaagaagagattttatcgacatcgaaagtaaatttgcc

SEQ ID NO: 53561 - DNA, 98 bp, Homo sapiens
cccaatcttgtgtgggcactgaagggggactacaggttcgagactgcaagctttcttcctggtggcagatgacatcatggattcatcccttacccgcc

SEQ ID NO: 53562 - DNA, 77 bp, Homo sapiens
aacgaaagcagtgacggaggagcttgtaccaccgttttccaagagataacttcaccaagatgtccagtgataggcaa

SEQ ID NO: 53563 - DNA, 100 bp, Homo sapiens
tcccccgagttcattgtgaattgcacggtgaacgttcaagacatgtgtcagaaagaagtgatggagcaaagtgccggctacagtggtggctgtgttgcca

SEQ ID NO: 53564 - DNA, 100 bp, Homo sapiens
gacctatgatagaacaacttagcaaaatgttctttactactaagcaccgttggtatcctcatggacggtctacttccccagcaggacagcatcattctcc

SEQ ID NO: 53565 - DNA, 90 bp, Homo sapiens
gttggagttggaatttgtgcaatgtttagccaacccaaattaccttaattctctaagcgaaagacatgaggcctcagcctgaaatgaggt

SEQ ID NO: 53566 - DNA, 74 bp, Homo sapiens
gccaacagtacctcattgctctttggcgactcttattggagcttgtacctccaggcccatacatccttccaaag

SEQ ID NO: 53567 - DNA, 75 bp, Homo sapiens
attcaggagatgtacgccgcgatcaaggctgaccctgatggtgacgctgaggagtacctgtcatttgcctttgag

SEQ ID NO: 53568 - DNA, 74 bp, Homo sapiens
gaaggaaaaggtggcctggccgcggcttaccaaggaggatatcaagacatttgtccgactccataaccagaaga

SEQ ID NO: 53569 - DNA, 75 bp, Homo sapiens
gggacaattgcatttatggcacctgaggatgacgactcatttaatttacataacagcaatagtactcaccaagaa

SEQ ID NO: 53570 - DNA, 78 bp, Homo sapiens
ttgccgcttccttttagttactaccctcaaactgacacaagacctacagagaaaaccctttgccaaatctgctctcag

SEQ ID NO: 53571 - DNA, 75 bp, Homo sapiens
tatgggtacccctgaatatgtgggagcaagtaatactgcagacacattgtttcaagaagtattaggtcggaaaga

SEQ ID NO: 53572 - DNA, 100 bp, Homo sapiens
aagggtatctgatcaagccaacaacagtgacggaatgcctccatacatgtcagatgtaccaacagtaccagcaacaggccggctatggtgcacagcagcc

SEQ ID NO: 53573 - DNA, 74 bp, Homo sapiens
aattgagatcttatccctatatgatgctgagtatgccaagtacatggaaaaccatagcattgaaggagtgaggc

SEQ ID NO: 53574 - DNA, 75 bp, Homo sapiens
ggcgcagacgcagggcacccggaggaaagtctgttactactacgacgttgctgctgacacgccgaccgcctgctg

SEQ ID NO: 53575 - DNA, 75 bp, Homo sapiens
ctcagatgctgccagggtccctgaagagggaagacacgcggaaacagggttccattcagagccgatacatcagca

SEQ ID NO: 53576 - DNA, 83 bp, Homo sapiens
ggccccccaacatggactgtctctgtatagtgacaaccaagaataccctctaccatctgctttggtcagggtgccgctcgagg

SEQ ID NO: 53577 - DNA, 125 bp, Homo sapiens
gaagcagcaatgcctgttgtgtggccaacccttctggatctcagcagggatgaatgcaaaagaattcttcgaaaattggtgacagacatcacacctccagtgcaatccctgttcctaagagacaa

SEQ ID NO: 53578 - DNA, 100 bp, Homo sapiens
atcctgcaccacaaggtgtacgatttgaccaaatttctggaagaggagtggcaaaattctattcagaagaatgcaggccttgcttttatcgaacttgtca

SEQ ID NO: 53579 - DNA, 89 bp, Homo sapiens
ggacacccagcggtctgacatcgcgacgctgctcaaaacctcgctccggaaaggggacacctgagccccccaagatgaacccagtggtg

SEQ ID NO: 53580 - DNA, 90 bp, Homo sapiens
tacagccagaaaaattagaacttattatggatgaaatgaaacagattctaactccaatggcccaaaaatttgcagataatggaataggac

SEQ ID NO: 53581 - DNA, 76 bp, Homo sapiens
caggcagtctatgctgcggagaaggtgattggtgctgggaagggattggagtttggaatcctgccttcgatgtcac

SEQ ID NO: 53582 - DNA, 101 bp, Homo sapiens
gaattggttgagcatctgcagtttctgctgtccagttatcaacatgttttaagagttgggggcagccagaacctgcgcttctactggaaggagtttgtgag

SEQ ID NO: 53583 - DNA, 83 bp, Homo sapiens
agaacaagtagcactctctcagaagatcagatgagccgtcttgccaagttgttataccacatttgcataagttagccttggtg

SEQ ID NO: 53584 - DNA, 48 bp, Homo sapiens
actagtgtctagaaggcactaaggaagccctacaggtggcaactacta

SEQ ID NO: 53585 - DNA, 75 bp, Homo sapiens
agtacgaacacgagcgagacatgcactacacatctttgccatcgtggcatcagcctatgacctggctcagaatac

SEQ ID NO: 53586 - DNA, 100 bp, Homo sapiens
aaagaggaggaaggagggacttcttggcttctcccagcatagccccagcaattcagtttgttctcagtgatgagtttagtcatcttcgtccagaacagcg

SEQ ID NO: 53587 - DNA, 75 bp, Homo sapiens
cgccaacagcagctaccagggctgcttttcctggtatgatctcgtgaaaccttgagagaaactgaatgacgaatg

SEQ ID NO: 53588 - DNA, 98 bp, Homo sapiens
gaaatccccactcctccaagaaccaacccccaaattggctgggacagttggaggagagcagattagtgccattggaaggggcatatgtgtgttgctgg

SEQ ID NO: 53589 - DNA, 50 bp, Homo sapiens
ggccctccagatacactttagaatcaggagcttcttttgctgttcttctg

SEQ ID NO: 53590 - DNA, 82 bp, Homo sapiens
aagacatcttaattgggcacgaaagagataacgaaggaggcccaacttcattcaataaggagcctgacggatttatcccaga

SEQ ID NO: 53591 - DNA, 98 bp, Homo sapiens
cgaatatcgtcatcgttagaaggcttgaaaaagataatgccaagttaaaagttacagtcaaaaagcaaatggacaaaattgaggagcttcagaaaaac

SEQ ID NO: 53592 - DNA, 119 bp, Homo sapiens
agcagcgccagcggccgagcgggcggcttcctggcctgggcgctccggtggcggcggagggcagcgggtggcatgagacgtgggaacatgggccacctcacacggatcgccaacgcggt

SEQ ID NO: 53593 - DNA, 82 bp, Homo sapiens
cgcgagtgggagcaccaggatctcgggctcggaacgagactgcacgggtttgaatgccggtgtggaaatgtttactgtggtg

SEQ ID NO: 53594 - DNA, 75 bp, Homo sapiens
ctacaaaattggatctaagcgggccaactttgatgaagaaaatgcgagccagatgaccaggatgccccagatgag

SEQ ID NO: 53595 - DNA, 100 bp, Homo sapiens
gttgtgtcatccgccccccgctcaatggcgactccctcaccgagtacgaagcgggcgtttgcgaagagctatccatcacactcctcagcagacatcaatt

SEQ ID NO: 53596 - DNA, 100 bp, Homo sapiens
ttggaagagggagtcaccactggacctccaaggaagccacgtgcagacatctacaaccttcgatctcctgacgagtgaatacatcaagacctggaggcca

SEQ ID NO: 53597 - DNA, 88 bp, Homo sapiens
agggtccaacagggcctggtccgtgtccggtcccccaaatctgtcgtccctgcccccaggctgcaagctttcttcctggtggcagatg

SEQ ID NO: 53598 - DNA, 102 bp, Homo sapiens
tacatcaatccttgagtatcctattgaacctagtggtgtattaggttttacagacatttcaccagaggaattgaggcttgaataccataacttcttaaccag

SEQ ID NO: 53599 - DNA, 98 bp, Homo sapiens
tgaaaaggaaaagtcagccccatcacgtacaaaacaaactgaaaacgcaagccaggctaaacagttggcaggaaaattgcctaagaattatgacccaa

SEQ ID NO: 53600 - DNA, 124 bp, Homo sapiens
ggcggacggcggggtccgggccggagtacgtcgttcccgctgcgctaggggaagcgggcagtactatactggcaattgctggagaagattttgcaattgttgcttctgatactcgattgagtga

SEQ ID NO: 53601 - DNA, 100 bp, Homo sapiens
gcttggtttggaaaaatttcattagagacgttccatcctcagagcagcctgaactgttcctaaagaaacttcagcagtgctgtgtcatttttgacttcat

SEQ ID NO: 53602 - DNA, 100 bp, Homo sapiens
gaagagaggttttgaattcacgcttatggtagtgggtgatctgcaactctttcaccatctgtaatgcggagatgcaggaagttggtgttggcctatatcc

SEQ ID NO: 53603 - DNA, 75 bp, Homo sapiens
caaaaccatgtccaaaccaggaaatggacagatttctgcatgaatccccagacagtgctgctcctgcgggtcatc

SEQ ID NO: 53604 - DNA, 75 bp, Homo sapiens
cacaggaggctgtgcgggccccgctccgcttcgaatgggtatgatctcgtgaaatcttgagagaaactgaatgac

SEQ ID NO: 53605 - DNA, 100 bp, Homo sapiens
agatggatctttacgaaaagttttattttggcaagagttggatcaacccagagctattgccttagatccttcaagtggctgataggaagatgtcttcagg

SEQ ID NO: 53606 - DNA, 76 bp, Homo sapiens
tacccgcttcactggcaccatggccttcccttcttcttggtggtgttcttgagtaagataatctggactggccccc

SEQ ID NO: 53607 - DNA, 100 bp, Homo sapiens
ctagaggaatcccatgaccagcatgcggtgctagggctcgaagggagtattgggagaatctgctgccagcttcaggcagacctttctgtccttcgctgtc

SEQ ID NO: 53608 - DNA, 50 bp, Homo sapiens
acctgtcgggtagaaacctcagtgaagggtgatgatgatgcttatctgtg

SEQ ID NO: 53609 - DNA, 75 bp, Homo sapiens
ctgcatccactacaacattgtcatgccagatgtaaatgaagaccctggagaagatgtggccctcctctctgttag

SEQ ID NO: 53610 - DNA, 74 bp, Homo sapiens
ctggaactagcgtcaaccttgaaggcatcgtgtggcaggaaacagaagatgattgaacacatatctagtctcat

SEQ ID NO: 53611 - DNA, 75 bp, Homo sapiens
ctggcatccaggcagagcagctgtagggggaactccatctcaggaaacttggccaggtatttcttcaaatgagga

SEQ ID NO: 53612 - DNA, 75 bp, Homo sapiens
tgccagtccatccatcacgaccacatttgtcatgatgacagtgacaaggaactctattttaagaacctctcaaaa

SEQ ID NO: 53613 - DNA, 75 bp, Homo sapiens
gtcaagacaacagtgatgaggaaagctgtgaaagttctcaagagtgatcagcagctggactgtgccttggaccta

SEQ ID NO: 53614 - DNA, 75 bp, Homo sapiens
aagcggaaaccagtggccacagcatctttgtctagccccagtgcaggtaaacgccctgcagaagatatggaagag

SEQ ID NO: 53615 - DNA, 100 bp, Homo sapiens
gccaacactgctgacatttctcagagatttcaaatcatgaaggttgatagggtacttcttgcaagggatatgcattagcacatactcaagaaggggaaga

SEQ ID NO: 53616 - DNA, 83 bp, Homo sapiens
gcccgcgctgcccgcactcctggtcctgctcggggctctgttcccaggtgaaatgacaatggatgctctgttggctcgattga

SEQ ID NO: 53617 - DNA, 74 bp, Homo sapiens
gccctcatcctggttctggaatcctcagttcaaggcatccaattcttctggagtccctttttgctattttgtca

SEQ ID NO: 53618 - DNA, 90 bp, Homo sapiens
cgatacctattttctagtgctgagatcctgagacaatggtgatctgcaactctttcaccatctgtaatgcggagatgcaggaagttggtg

SEQ ID NO: 53619 - DNA, 100 bp, Homo sapiens
ctcgtcacttgcctcccgggagtcgctgtggcaaaaggtgtgtagctgggacggtgctggtctgagctggaccttgtctgatggcttcctccaaccctcc

SEQ ID NO: 53620 - DNA, 75 bp, Homo sapiens
cattgctgctacatatacattctctggcatgaagaggaaccacctcagaatatgaaaccacaatcaggaaacgat

SEQ ID NO: 53621 - DNA, 50 bp, Homo sapiens
taacatcacaaggtgctggtacttattgcatgacgacagagatgatggtg

SEQ ID NO: 53622 - DNA, 100 bp, Homo sapiens
ttcatgagaatgaaactgcctcggccgtatactaacaaggtaattactttatggtaccgtccacctgaactgctactgggagaagaacgatacacaccag

SEQ ID NO: 53623 - DNA, 91 bp, Homo sapiens
ctttctgctgctgaagtaatgcaatggtctcaatctctggaaaaacttcttgccaaccaaagaatacaaacagaagcttgcacgagtaacc

SEQ ID NO: 53624 - DNA, 100 bp, Homo sapiens
tgaaggccgagggcttcgtggatgccctgcaccgggtccggcagaaccaagcgcctccaggtctctacacgaagacccaggacccagccaaagcccccaa

SEQ ID NO: 53625 - DNA, 100 bp, Homo sapiens
cttgacctaaatgcatttgagcgacaaaacaaagctgaaggtcttgggatggtgacagaggaaggatcagtcctgaatggggagcttacaggaggggcct

SEQ ID NO: 53626 - DNA, 100 bp, Homo sapiens
attatctccactttggagagcccaagtcttggagttcccaaaagtcgacgaggagaaatttggcagtttctggctttacagtaccgactcagacacagat

SEQ ID NO: 53627 - DNA, 144 bp, Homo sapiens
gaacacccatttcctggagacggttgcactggaccaatttttaaacttatgaacatccaacagcaactaatgatccaagttgatgaagtcagaaggctggtatattttgaaggcaccaaagactcccctttagagcatcacctg

SEQ ID NO: 53628 - DNA, 75 bp, Homo sapiens
gttcattcagggcctgctgtggaagaccagccccaaagagactctacaggggcaggtaattcactggtccacaag

SEQ ID NO: 53629 - DNA, 75 bp, Homo sapiens
ctggaccaagatcgagcccagcgtcaacttcctcaagtcgcccaaagataagaccatcatcatgtggaaactgac

SEQ ID NO: 53630 - DNA, 100 bp, Homo sapiens
gtgggcctggagcagctgcggcggctcggggtgctctactggaaggtctgagaaagaaccccagtttaagtttatctacttcaaccacatgaatctcgcc

SEQ ID NO: 53631 - DNA, 100 bp, Homo sapiens
gtcgaagcgagggtctgaagttcacgactactagaaggggaggggagtggaaaggctctcagtgaaaaaggagcctctttcagaattcttcaagccagaa

SEQ ID NO: 53632 - DNA, 88 bp, Homo sapiens
tcagactgacccctcgggcacataccatgcctggaagctctttccttcggggaacaagccgggcccttgctggccgggccccagctca

SEQ ID NO: 53633 - DNA, 95 bp, Homo sapiens
aaagctgccttcgggggaggggctgactgccagatgacttgtgagaaccaaaacccatgttttcccatacaagtgaaaggtgtagcagtcactcg

SEQ ID NO: 53634 - DNA, 101 bp, Homo sapiens
ctgtcactggagtggccttcaacccatcagcgccccaggttccacacagtaggactgaaggtttaaagccaagggagaggatttcagatgacatcattatt

SEQ ID NO: 53635 - DNA, 50 bp, Homo sapiens
gtcagaactcagatactgaccggcaagttaagtgggcagaccaacatcca

SEQ ID NO: 53636 - DNA, 82 bp, Homo sapiens
aaaagcaggagtgtgatgacggtgatggctgatgatgtgttggggatgtcctttgcactgaccctgaactgccagattgaca

SEQ ID NO: 53637 - DNA, 99 bp, Homo sapiens
acatccttcggaatgtgttcagaacgattggatagctttagtcaaagcagctgctgcagctgcagccaagaacaaaacagggagtaaacctcgaaccag

SEQ ID NO: 53638 - DNA, 98 bp, Homo sapiens
gtggatctgacagatgccagcgtagctgaatccagtaccaaaaacgtcaacaacagttttacgtcatatttgatcagaaattggatgaaccttcggga

SEQ ID NO: 53639 - DNA, 100 bp, Homo sapiens
gattccagtgtgcctggctctccctccagcatcgtgcacctacaggacttgggctgcttcaggctgaacgctgggagaccacttcctgtgctgacacaca

SEQ ID NO: 53640 - DNA, 82 bp, Homo sapiens
ccttcctgagcggcctggcccagcgcgtgtgcatccagcgcaagcccctcaggtgaaaggtgtagcagtcactcggcctaca

SEQ ID NO: 53641 - DNA, 90 bp, Homo sapiens
atgagcacatttttcacatagctagtgctgcagagagtgacgagtagcacagcccctctatggtttagatggcagtgctgcaaaggaggc

SEQ ID NO: 53642 - DNA, 75 bp, Homo sapiens
tcactcgcgactgacggagctgcggtggcgtctccacacgaaacatggaagttttctttccgaagttcaagctag

SEQ ID NO: 53643 - DNA, 100 bp, Homo sapiens
caacacggtggcaagcaagtttaatcagacctgctcacacttcagaatagagaagggcactccacagaaggatgttattatcaagtcagatgcaccggac

SEQ ID NO: 53644 - DNA, 90 bp, Homo sapiens
cacttggacttggtgttcaagaagaatctgaaaacgagttgtactaatgaaaaaatttcctctggatggagagaagatgggcagagaagc

SEQ ID NO: 53645 - DNA, 82 bp, Homo sapiens
ccccaggcagctcgccgctccctagcaccttctccagtcgacactctcgcgcccggaggttggggtgactcagtgggaacgc

SEQ ID NO: 53646 - DNA, 96 bp, Homo sapiens
gttgcattgcctgcaagctctgcgaggccatctgccccgcccaggtatttggcaccaatgtgatggtgacagtggccaagtccttcgaggcaccaa

SEQ ID NO: 53647 - DNA, 75 bp, Homo sapiens
ccgcgagcccgctttccaccccgacctctgcccaggccgcagggtccctgatgggcctgggtgacattatctcac

SEQ ID NO: 53648 - DNA, 75 bp, Homo sapiens
ctggaggcggcggagcgcgagagcttcgagcggactcaggtgtgagagggttgctgttgtattgcaatcatggtg

SEQ ID NO: 53649 - DNA, 90 bp, Homo sapiens
actcaggctgaacgcaagattcgtatcattatggcagagcccctgatgaggaaatatctgatgaggaagggtctggagatgaagattcag

SEQ ID NO: 53650 - DNA, 75 bp, Homo sapiens
ttccagaacctgttcccctccatcaacgtgcacaagatgaggcctgcctgtgttaatacacctagtgaggagtgg

SEQ ID NO: 53651 - DNA, 82 bp, Homo sapiens
agaacatttccatcaaaccctgagagctttattaccagacatgatctttcaggaaaactaggtgtctgtgttcactccaggc

SEQ ID NO: 53652 - DNA, 50 bp, Homo sapiens
ctgagacactaaaagaacctggatgctgaaaacgccattcaacagatggg

SEQ ID NO: 53653 - DNA, 82 bp, Homo sapiens
cggtatgagcgggagcagtatgccgatcgggcgcggtactcagccttttaaagcttgaggtctgaaggggcgtctcgattac

SEQ ID NO: 53654 - DNA, 75 bp, Homo sapiens
caccaccctggtggcctttccctccagctctgtctatcctaccaaggccaaatcctacatccagtccctgccaca

SEQ ID NO: 53655 - DNA, 100 bp, Homo sapiens
tggttgaaagttttccttcttacagagatgtgactctgtttgaggccttccaggtattagcacaacttataaaagaatctttatgaagaaattaaactag

SEQ ID NO: 53656 - DNA, 98 bp, Homo sapiens
tcccacctcagcctcccgaatagctgggaccacagaaatctcctgcaaagaagctgagccatgcaattagtaaatctttggggtgtgtacccacgaga

SEQ ID NO: 53657 - DNA, 75 bp, Homo sapiens
ttgttcgctttcacaggctgaagaagtccatataatgcttgatggcctgttacctcctgacacctattttagatt

SEQ ID NO: 53658 - DNA, 85 bp, Homo sapiens
actcaacaaatgctgtggcctttgtgtctgcccatgtaatagctcagaagtgtcatactctgcaaagcatgaataatcatttgga

SEQ ID NO: 53659 - DNA, 75 bp, Homo sapiens
gccgtgaagcaagtgcagatagatggcctttgccggtggtggtgtgcacattgagccccggtatagacagttccc

SEQ ID NO: 53660 - DNA, 75 bp, Homo sapiens
catgtttctctttccaccgatgaccccatgcagttccactacacgaagtctacaggtttctaggcccttggtgag

SEQ ID NO: 53661 - DNA, 75 bp, Homo sapiens
tgcggccaattcggtggaacgaggacgcggactgcgaaggcagctccagtgatccacaagctcagaaatacatcg

SEQ ID NO: 53662 - DNA, 100 bp, Homo sapiens
caagtcacagtcgtcgatgccagcttcttcttgaaatgtatccacaaattacccattatcaaaaacaaatagttcatcaaatgatttggaagttgaagat

SEQ ID NO: 53663 - DNA, 97 bp, Homo sapiens
tgctgtcaaaagaattcatagatttcagtgatacaggtggccgtcagacccaagagcaacgaactcagagaaatgtaataaatgtacctggagaaaa

SEQ ID NO: 53664 - DNA, 51 bp, Homo sapiens
tgatgcccgtctcttcacagagtccacagatcctggtccctacaaataagc

SEQ ID NO: 53665 - DNA, 99 bp, Homo sapiens
gttctcacatctatctcagagggactcactactcttgtaggattggctacaaagaaacctgtaagtagtggcagaaaacactcccttggtaaagaatat

SEQ ID NO: 53666 - DNA, 83 bp, Homo sapiens
acagcgggctggagcctgacgagctggcgggtgatgtgtccaatctagatcccaacttctcatttgaaggcaccaaactggat

SEQ ID NO: 53667 - DNA, 75 bp, Homo sapiens
gtgaatttccatgtcaacatagtccagtggagacctttggcgacttggcctttggcgacatcttcctccacctgc

SEQ ID NO: 53668 - DNA, 50 bp, Homo sapiens
agttcaagaagaacactccagaggtgagatcggactggaactgttcggct

SEQ ID NO: 53669 - DNA, 98 bp, Homo sapiens
tgcttcggccttggtcccagcgccttcccacggagcagcactcttcaccctgcacagccttgttagtcttccgctctgggccccacgaccaaatcatg

SEQ ID NO: 53670 - DNA, 98 bp, Homo sapiens
tgataccaaaaatacaagacaggataattccattcttaaagtgcaagtgtaatctccatgccactgtatgtgtgtatgacaacagcaaattgacatgc

SEQ ID NO: 53671 - DNA, 90 bp, Homo sapiens
accggcctgaggtcaaggagaaattgaactaaactctcctttgaagacttctttcccagggaactccgatgaagtgttccaacaaaatga

SEQ ID NO: 53672 - DNA, 83 bp, Homo sapiens
cccgcccgcccaaggtctctcgcgggcgggagaacggaaaactcccaacttcctgacaatgcagatcttcgtgaagactctga

SEQ ID NO: 53673 - DNA, 100 bp, Homo sapiens
gggaaggcgcctgaagaggacgaaggttggatggcaagcatgtggtgtttggcaaagtgaaagaaggcatgaatattgtggaggccatggagcgctttgg

SEQ ID NO: 53674 - DNA, 95 bp, Homo sapiens
cccgcgtccgccgattcctcctccttggtcgccgcgtccttggctggcgtggaaatcctcattgacgattcaatttgttgaaggccaatttgtgg

SEQ ID NO: 53675 - DNA, 74 bp, Homo sapiens
tcagtggcccagtcttaccgttcagtggcttcctgaagtgactaaagtatttggagctggttatccaagtctgc

SEQ ID NO: 53676 - DNA, 90 bp, Homo sapiens
cgcgcgcggggaccccacggggacagagcgggatgccaccagcttgtccaaagggaagttccaggagctcctggtgggcatcgttgtgga

SEQ ID NO: 53677 - DNA, 83 bp, Homo sapiens
acccggttgtcctcaggcgctgtcagacaatgcagatcttcgtgaagactctgactggtaagaccatcaccctcgaggttgag

SEQ ID NO: 53678 - DNA, 74 bp, Homo sapiens
ctcaggacacggcctacaacaccaagagaaatgagccgtcagactgctacagcattacctaccggtacctcgaa

SEQ ID NO: 53679 - DNA, 82 bp, Homo sapiens
gagagagtccgggagcccgagcttgagatctggtggctggacccagagctgacctatggctgcgccaagcccttcgtcttca

SEQ ID NO: 53680 - DNA, 83 bp, Homo sapiens
agtcagagaagtttggcatataatcgaatagttgatgccctaaatgaattcagatgagctttgatccaaaccttctccacaac

SEQ ID NO: 53681 - DNA, 82 bp, Homo sapiens
cagaagttgaagcagcagcttatgcagagaactggaccccatcctgactgaggtcaccctgatgaatgcccgcagtgagcta

SEQ ID NO: 53682 - DNA, 90 bp, Homo sapiens
aagagaatccccttcaccagcaccgaagcctagaaaagtagagttatctgaatcggaatgaattcccagttcctgagcagttcaagaccc

SEQ ID NO: 53683 - DNA, 127 bp, Homo sapiens
acgagctgttcgtgggccgcgcgggttacctgtgtgccgcgctggtgctcaagcagaaactcgcccaggaggtgttttgaagtcttctgcatctactttcagtcaggcaacaatgaagagccttatg

SEQ ID NO: 53684 - DNA, 100 bp, Homo sapiens
ggagccgctcttaggcgacacacctggaagcagatccaaaggcagaaaccaggttatacatcacagtcaatgactttgaatttcatgtctataatcgctc

SEQ ID NO: 53685 - DNA, 82 bp, Homo sapiens
aaagcctattttctgtatatgtattccagatatctggttggtcaaagaaaaagtgatgtatgaaaaagaggcaaaacaacaa

SEQ ID NO: 53686 - DNA, 126 bp, Homo sapiens
tccttcgattttccattttatggccacttcctacgtgaaatcactgtggcaaccggggttgctgatagtccaactccaccgccaccacctccaccagatgacattcccatgtttgatgactctcca

SEQ ID NO: 53687 - DNA, 51 bp, Homo sapiens
atcgttaaacatctgaaagggtcaggtgcagcttcaagcttaggaccaccc

SEQ ID NO: 53688 - DNA, 96 bp, Homo sapiens
acacaaacaacttacagacttccacaagcaagtcactaggaaaatatatgcagatgatgaacattcttaagccaattgcctttgatgttattcatt

SEQ ID NO: 53689 - DNA, 100 bp, Homo sapiens
tggctgacaacatgaagaagatcatcctctcgcacaggcaacctccaagtcccagatcatgtctctgtggggtctggtctccaagatgcccccagaaaaa

SEQ ID NO: 53690 - DNA, 82 bp, Homo sapiens
ttatacataagccattttccgaatatacagggtaagggactgttctgaagaacctttccatttagtgatcaagatatggaag

SEQ ID NO: 53691 - DNA, 96 bp, Homo sapiens
atggcttccagaatcactgagctgtaacaaagcactctgtgctagtgatgtgagcaaatgcctcattcaggatggcactggatctttaaaacgcag

SEQ ID NO: 53692 - DNA, 90 bp, Homo sapiens
ccgggatcgtgaccgagaccgtgaccgagagcgtgaccgagagcgcgaatatcgtcatcgttagaagctcttgaagtcctattggctgga

SEQ ID NO: 53693 - DNA, 82 bp, Homo sapiens
gagaacccagagcacaatgactttctgaagctgagaaccatgctcatgctttggggtgagcctgttaatctgcgtgaacaac

SEQ ID NO: 53694 - DNA, 50 bp, Homo sapiens
ttagagaccactggattagcagaccctggaaccaatcttaaacatccatg

SEQ ID NO: 53695 - DNA, 50 bp, Homo sapiens
agtgcgtcaatcagagcgtcctgtgcggtccctgtgcgttttattgcgac

SEQ ID NO: 53696 - DNA, 100 bp, Homo sapiens
tgatttctccagtgctcatcttgttctcgagttttctctgccatgttgctattgcaggacggattggaaatctacatttctgaaggaacccactcaacag

SEQ ID NO: 53697 - DNA, 101 bp, Homo sapiens
agaaaatgtgaagagagagcaagatgaggcctatcgcctttcacttgaggctgacagagcaaaggtgtcccgacccaggctaagcttgagcatggctgagc

SEQ ID NO: 53698 - DNA, 100 bp, Homo sapiens
gactcaagcacgagctcatcagatgatgatgaagaggtttcagggagcagcaagacaatcactgcagagataccagatgcctttgaagatgagaaacccc

SEQ ID NO: 53699 - DNA, 75 bp, Homo sapiens
ggaggtgagccgagaggagctcaaacaggcagaaagctgagcccatgaggatagttcgccagccaacgcctccac

SEQ ID NO: 53700 - DNA, 75 bp, Homo sapiens
gagactttcacaataagagcagaggatggaacacttcagtgcattcaagatatttggagttcttacaacatggca

SEQ ID NO: 53701 - DNA, 100 bp, Homo sapiens
cattttgctgtctcctcctaatacggtctcctcctacctggatctcattacttgggccgttttcaggatcgtttaatgtggataatgattctggaatgtg

SEQ ID NO: 53702 - DNA, 83 bp, Homo sapiens
cggcacgtcctgttacaccaaaagtggcatgatcctttgcagaaatgactacattagaaacctgtttccctccaatcttgtgg

SEQ ID NO: 53703 - DNA, 100 bp, Homo sapiens
gctaattaaaacatttttcagggacgtagccatccagaggtgctggagaatctggtaaaagcaccattgtgaagcagatgaggatcctgcatgttaatgg

SEQ ID NO: 53704 - DNA, 100 bp, Homo sapiens
gtcggggcggtaaaaggccggcagaagggaggcacttgaggaccatggccaacctggagcgcaccttcatcgccatcaagccggacggcgtgcagcgcgg

SEQ ID NO: 53705 - DNA, 76 bp, Homo sapiens
ctgctggagctgacttcctcatgtgttactctgttgcagaagggaagatcagttttcctgccatccaggctgctcc

SEQ ID NO: 53706 - DNA, 74 bp, Homo sapiens
gggggacgacacggtgcaggtggtggatgggatggtgcatccttacaaaggaggcacgcggacctccagtggcc

SEQ ID NO: 53707 - DNA, 99 bp, Homo sapiens
tgctcccctgagcccaggcggagggcggaaggctgctggggtgcgcaggcctgccttgctctgccaggaaccatgagtgaggcccgcagggacagcacg

SEQ ID NO: 53708 - DNA, 90 bp, Homo sapiens
cgctggacgtgctcctctccatggggttccccagagcccgcgctaatctatgccagcaattatgacaatgttagcagaccatgcagctcg

SEQ ID NO: 53709 - DNA, 100 bp, Homo sapiens
ggtctggaggctcgtcaccaacttcctcttcttcgggcccctgggattcagcttcttcttcaacatgctcttcgttggcctggacaatgctggaaagaca

SEQ ID NO: 53710 - DNA, 74 bp, Homo sapiens
aggaaattgacacctggcgtggtggccactaacacggacaccagccgaaatgccggaaatgcggtcctgtttga

SEQ ID NO: 53711 - DNA, 100 bp, Homo sapiens
agagttgccaaccccagagctgccgagcaaggatgcctgagactgcagtgagaagaggagtttgttactttaaacagaggctgaagaaactatagaatta

SEQ ID NO: 53712 - DNA, 51 bp, Homo sapiens
gttacatgtgaaagaagatatattccagggcgagagaggctggctgaggat

SEQ ID NO: 53713 - DNA, 75 bp, Homo sapiens
cagttttgccaggtgtttgttaccttggcctatatgaacccaatagcaatggcgagatcaaggggtccaatccag

SEQ ID NO: 53714 - DNA, 100 bp, Homo sapiens
cccagcactgctgtcccacctgtgccgtgacgagtagcacagcccctctatggtttagatggcagtgctgcaaaggaggcaacagaggagcagtctgctc

SEQ ID NO: 53715 - DNA, 101 bp, Homo sapiens
cgggagcgcgggcgccctggggtcctcggagtgtttgtaaaatgtatgaagaacatctgaaaagaatgaatcccaacagtccctctatcacatatgacatc

SEQ ID NO: 53716 - DNA, 83 bp, Homo sapiens
gtccccggcacacgcgcagccccggcctctcggcctctgccggagaaacagtacctggagtagaacagaaaaattattatgtc

SEQ ID NO: 53717 - DNA, 100 bp, Homo sapiens
ctcaagatggacaaccgggatgttgcagtgtctctttctgcacattcctggcacatgagtacccagacctagtgcacaaggtgatcatgatcaatggcgg

SEQ ID NO: 53718 - DNA, 138 bp, Homo sapiens
agagcgctcgaggtcgtatgaacgcacaggccgtcgctatgagcgggaccaccctgggcacagcaggcatcggaggtctcctctgagcctccggcctccataagacccaaaacagatgacacctcttcccagtccccc

SEQ ID NO: 53719 - DNA, 101 bp, Homo sapiens
gggaagatggcgaaggtctcagagctttacgatgtcacttgggaagaggcgtagaggctccggtgttttttgtgccaattgcctgaccacaaagacctctc

SEQ ID NO: 53720 - DNA, 82 bp, Homo sapiens
tcagagatgccaagaagaatctagacagacaggcctttctaggttaatgactccagagagtaagatcagattcgtccacaaa

SEQ ID NO: 53721 - DNA, 101 bp, Homo sapiens
cttgcgtccgctacagtatgtcaatcgcttgccccagcacagccttatgccagcctggaccatcttggaggcagtgtaggatcatggaagaactttgaatt

SEQ ID NO: 53722 - DNA, 88 bp, Homo sapiens
gaccattcagatgggatctttccggatcaatccagatggcagccagtcagtggtggaggtctgggacctgcgccagaacaagctaacc

SEQ ID NO: 53723 - DNA, 101 bp, Homo sapiens
gcagcccgcgcacagctgctcccttcgccttcgccctttccacctcgcggcagttcggttaaacccatccagagtaatggctgcggccttacccaggaccc

SEQ ID NO: 53724 - DNA, 90 bp, Homo sapiens
gcgggggcaccgagggctaccacgttctgcggcttccaaaggaactgtcttcagagacttttgacaagaccatcttaagagccctgaatc

SEQ ID NO: 53725 - DNA, 100 bp, Homo sapiens
cgcttgtccactgtccgccagacctgctgctgcttcaatgtccgcatcgcaaccaccgccctggccatctaccatgtgggaaggacaccactggtaccag

SEQ ID NO: 53726 - DNA, 101 bp, Homo sapiens
tcacgcacgggatccagagcgccgcgcacttcgtcatgttcttcgcgccctggcgccatgtcagaaccggctggggatgtccgtcagaacccatgcggcag

SEQ ID NO: 53727 - DNA, 53 bp, Homo sapiens
cagcctccagagtagctgggactacagaaatcacatcagtccgggcgtggtgg

SEQ ID NO: 53728 - DNA, 82 bp, Homo sapiens
ggagaccccgcgccgacggctgctcaaacatcagggttaacacagaaatctgcctcctgggccatgccgcttctaaggcctg

SEQ ID NO: 53729 - DNA, 100 bp, Homo sapiens
ccatggcgtccgagcggctccctaacaggcccgcctgtctgctcgtggccagcggcgccgccgaagcttccccgggcgctgcctggacaggcctgcctgc

SEQ ID NO: 53730 - DNA, 82 bp, Homo sapiens
agaacaatgagagatcagcgagccatgatgatccaaacacctgtgctgtgattgtctccacgccccaggacatcgcattgat

SEQ ID NO: 53731 - DNA, 77 bp, Homo sapiens
ccatttggttgcagcaaagaggaaatagttcagttctttcaagggtgagtggaagccccggcagatcgacaacccag

SEQ ID NO: 53732 - DNA, 100 bp, Homo sapiens
cgggcggcggcgccggcaggaagaacaccttccaccatgaccacctcagcaagttcccacttaaataaaggcatcaagcaggtgtacatgtccctgcctc

SEQ ID NO: 53733 - DNA, 100 bp, Homo sapiens
tatgttactttgccacttcttcacggaccagtttcagttcgccgatgggaaacccggagaccaaatccttgtggtgccaccgaacatcgcagaactgaag

SEQ ID NO: 53734 - DNA, 50 bp, Homo sapiens
agagtgcagtcatgggccaccgcagagatcctgaaggagctagacgagtg

SEQ ID NO: 53735 - DNA, 74 bp, Homo sapiens
caagtccttagagatccagaaacccgctgtgtaccacatgaaggaagatggttgggtgaaagtagaaagtacag

SEQ ID NO: 53736 - DNA, 97 bp, Homo sapiens
ggaatggctgaagccatctcagaaggatttatacagagatgtcatgttggagaactacaggaacttggattccagtggaatgacactggtgatgctt

SEQ ID NO: 53737 - DNA, 90 bp, Homo sapiens
agagggaagacacgcggaaacagctgctccaatgaaaacgtccataaagagttcaagaaagccctgggagccaactgcatctttctcaac

SEQ ID NO: 53738 - DNA, 98 bp, Homo sapiens
aatgagaaccctacttgcctaaatgaggaatgtctttcctaccatctaaaatacgaaggtttctggctggatggcttcccagttacgactcttcgatc

SEQ ID NO: 53739 - DNA, 83 bp, Homo sapiens
gcgaacggggcgagcctggaggattgtcactccaacctcttttcgctggtgtggacactgccagcggctgcagccgacttgga

SEQ ID NO: 53740 - DNA, 75 bp, Homo sapiens
aaaacttatattcgtgcatgaagagttatccaagcctccaaaatctcttgaaagctctcaaaggtctatggccct

SEQ ID NO: 53741 - DNA, 100 bp, Homo sapiens
gtgggctgcgtgtgggacgggtttagcggcagcctcttcgtttctctgtttgaagaacataaggacatttctcacggcctgttgtgagacgtttggaatg

SEQ ID NO: 53742 - DNA, 82 bp, Homo sapiens
cagagcctcgcctttgccgatccgccgcccgtccacacccgccgccaggtcactatcatatgacaaaggctttgccgcagtt

SEQ ID NO: 53743 - DNA, 100 bp, Homo sapiens
tgagtcactgcctgcgcagctccggccgcctggctccccatactagtcgccggttagcgtccccaaaatgaaacataagccaaccaggcaacagaagaaa

SEQ ID NO: 53744 - DNA, 83 bp, Homo sapiens
ccagttcctgccgtctgctcttctgcctcttgatctccgccaccgtcttcaggccagtgagacggtttaagcggaagcatctt

SEQ ID NO: 53745 - DNA, 100 bp, Homo sapiens
ggtgaccggccaggaaacggtcgcccagatcaagaaacccttcgctgaagcagcagctgttctcatatgctatcctgggatttgccttgtctgaagctat

SEQ ID NO: 53746 - DNA, 87 bp, Homo sapiens
accctcccacacttcctctccgagccctaccagtacaccttggccagcactgccactgaggcggctcccagctgcgttggcgacatg

SEQ ID NO: 53747 - DNA, 50 bp, Homo sapiens
aggacatggagtatgaaagacggcactttgaggtgaatgaccggaaggac

SEQ ID NO: 53748 - DNA, 74 bp, Homo sapiens
tggagcccagagccacgtcaaaattgaagaaggtattgttgtaatggaagatgattctccagtggaggctgtga

SEQ ID NO: 53749 - DNA, 83 bp, Homo sapiens
cgaggaggcgcgggaggtgttcgagaacgaccccgagacgttgctggatttgtgcgactcggtgaaggatgatgcccggaggg

SEQ ID NO: 53750 - DNA, 98 bp, Homo sapiens
agaaagcaggcgaacccgcggcgcaataacgttgatattcactgatggactccaaagaatcattaactcctggtagagaagaaaaccccagcagtgtg

SEQ ID NO: 53751 - DNA, 98 bp, Homo sapiens
gaggatgatgcggaaattaaccccaagcaaatggttatgagccttagagtttctgaactccaagtactgttgggctacgccgggagaaacaagcacgg

SEQ ID NO: 53752 - DNA, 98 bp, Homo sapiens
ctctacagaaggaagcacaaaaagggacagtcgagcttttgtgctgccttgcaccaggaactcagagaatactatcgattgctctctgttttacattc

SEQ ID NO: 53753 - DNA, 100 bp, Homo sapiens
ctgcgggcggcttgggcagcccgcgggcgcctcaggtgtgccacgtcatcaccgaggtgaaatctggaaatttctagctgagcaattccaccttaaacac

SEQ ID NO: 53754 - DNA, 104 bp, Homo sapiens
tcgaacaccccgaacattgtttaccttggaagaactccgtgcccagatgctcataaggattgtcctctttctacaaaagtagagatggggtttcgccatgttgg

SEQ ID NO: 53755 - DNA, 76 bp, Homo sapiens
gtgcgaggctagccacgcaggcggggccctgggcaaataagggcgagactgaaaaatcaagtcactcagttgaagg

SEQ ID NO: 53756 - DNA, 83 bp, Homo sapiens
ccactcagagtcgcccgagaagttctgcggggagtgtctccagccctgcctgcaggtgccatccccgctgtgcccactctgcc

SEQ ID NO: 53757 - DNA, 100 bp, Homo sapiens
gttttgaaaagttcatgctgtcccttcattgaattttaggacccactgatctcagcatgaagagacaattggcgactagctcaggatcctccagcagctc

SEQ ID NO: 53758 - DNA, 96 bp, Homo sapiens
gagccggggcccgagccccgcccggcccgggccatgtcggtgggcgagctctacagccaggtttgaacttgttctggaagctgtgcgtcaccgtaa

SEQ ID NO: 53759 - DNA, 50 bp, Homo sapiens
cagcagtgtccagggagcggcagcagcctgtgccatatttcgggaggctg

SEQ ID NO: 53760 - DNA, 78 bp, Homo sapiens
agaaacaaatcttgaagcacctctccagatgaagcccggggcaagaactgtggtgtcttggtacattgcttggctggc

SEQ ID NO: 53761 - DNA, 100 bp, Homo sapiens
tcagcgtgtacctgacatggctcccagggcttggcaacccccaggatgtgacctattttgtggcctatcagagcaccaaatcagatgaaagccaaggaag

SEQ ID NO: 53762 - DNA, 74 bp, Homo sapiens
atgttgtcaaggtggcctaccaggaggccaggggtgtcgccatgcacttctaccctagccgggcccagcccccg

SEQ ID NO: 53763 - DNA, 74 bp, Homo sapiens
ctaactttaacacccctcaagctctacgtactatactggcaattgctggagaagattttgcaattgttgcttct

SEQ ID NO: 53764 - DNA, 75 bp, Homo sapiens
gcacttggagtccggacatctgaaacttgaaatggtggagtcaatgaagaaagtagcagggatggatgtggagct

SEQ ID NO: 53765 - DNA, 82 bp, Homo sapiens
tctcagccacgaagtacagccggaggccctgctgctcctgggggccgccgccctggcctgcctcgccctggacctcctcttc

SEQ ID NO: 53766 - DNA, 74 bp, Homo sapiens
ccaggtgtgggggatgatggtgacgcttctcactcacgtgtgaagatcatggaagggaagtggttgctgtgtat

SEQ ID NO: 53767 - DNA, 52 bp, Homo sapiens
ttgaaagccttgatcaggggaaagctggatcagctcctttgtggcagtaaag

SEQ ID NO: 53768 - DNA, 74 bp, Homo sapiens
cctcccaagtatctgggactacaggtacacctgagagcctggcagaaaaagaacggcagctctccaccatgatt

SEQ ID NO: 53769 - DNA, 50 bp, Homo sapiens
gcccgcgcctagaccccattcaaacatctgctcaaattaatgaccatggg

SEQ ID NO: 53770 - DNA, 83 bp, Homo sapiens
cccaggtgatgcctgaagctcaagggactgtgtccaccctcaggttttaaaatcaaagatgggaaaatcggagaaaattgccc

SEQ ID NO: 53771 - DNA, 98 bp, Homo sapiens
tttggaaccacagggtactttatttgcagagtccctacagatgaagaagatgaaatggaggagtccacaaatcgaccaagaaagaaacagaagacaga

SEQ ID NO: 53772 - DNA, 50 bp, Homo sapiens
gtggatatttacaaccatgccaaggtagagctgagtaaagaagaagtaaa

SEQ ID NO: 53773 - DNA, 50 bp, Homo sapiens
actatggaataaggtttactcagccaccttttgtggtgacattggatgag

SEQ ID NO: 53774 - DNA, 51 bp, Homo sapiens
aaacacacctgggagcttcagacgtgggtgcttcaaggatgaccgcatcgt

SEQ ID NO: 53775 - DNA, 101 bp, Homo sapiens
cgcgccgctgccctccggctccgcgggcggcccacggcgaggtactccaaagattcaggtttactcacgtcatccagcagagaatggaaagtcaaatttcc

SEQ ID NO: 53776 - DNA, 75 bp, Homo sapiens
tacaagcttacgtctctgctcttcagtacaatcctgctggttggaaggaaaatcatgcaacattcatgagcgaac

SEQ ID NO: 53777 - DNA, 100 bp, Homo sapiens
atacttcattgctccttcaggacatgggtatagactatgtgatacctaaaacagggttttactgtaagctgtgttcactcttttatacaaatgaagaagt

SEQ ID NO: 53778 - DNA, 50 bp, Homo sapiens
aactggcccggaaacaggaggacgatatgggtctgcaggatggagttctt

SEQ ID NO: 53779 - DNA, 98 bp, Homo sapiens
tccctgcctcaggcctgcccggacggtgtgcggcaccagtggcagttcgcagcctccaggacttggctcgcatcgccatccggggcaccattaaaaag

SEQ ID NO: 53780 - DNA, 100 bp, Homo sapiens
accgagtcccgacctaaggtcgaatcatcaggcgtccccgtcacccaacaacccactcaggcacttccgatggatgatgatgacgacgacgatgacgtag

SEQ ID NO: 53781 - DNA, 73 bp, Homo sapiens
attgtggacagtgacagcgatgctgaggatcgaggaacgttgtctgcctcagtaccacgggctgcaggtggcc

SEQ ID NO: 53782 - DNA, 100 bp, Homo sapiens
cgccgccgccgccgctgccgctgccgctgccgcacctccgtagctgactcggtgatatcgtgggcctgtacgatgctgctaatgagggcagtcagctggc

SEQ ID NO: 53783 - DNA, 83 bp, Homo sapiens
cctgagcccagcccccagaaaggattgtgacatatcgttggacccagaattgagtgattcgcctttgccagtctcatctcgtg

SEQ ID NO: 53784 - DNA, 100 bp, Homo sapiens
ctgctgggcaccttcatctggaataaggccttcctggatgctctgcagaaccaggctgaggccagcagcaagatcatcggccagtttggagtgggtttct

SEQ ID NO: 53785 - DNA, 100 bp, Homo sapiens
cagtccttcgaagctttgaccaagcttccagcggttattactgtcctcctgcacttgtaaccattacaaacagtgcatcagagaatttagatgagctgtc

SEQ ID NO: 53786 - DNA, 100 bp, Homo sapiens
ttatcatcccaatgtcaaagttgtgtccaattttatggattttgatgaaactgaccctgatgctcccataagacagaaaatgccccttgatgatctggat

SEQ ID NO: 53787 - DNA, 98 bp, Homo sapiens
gtggacattcctctggttatgatagtcgttctgcacgtgcatttccatatggcaatggacattcacacatcccgtgttgttgctcatgtcttgccatg

SEQ ID NO: 53788 - DNA, 87 bp, Homo sapiens
ccagcatggggagtcggaaggggacaaatccgcgatcccagtcatgcatggacatgagagatggctttagaagaaaaagtttctact

SEQ ID NO: 53789 - DNA, 100 bp, Homo sapiens
gtcgggctgcaggagaagatggcggtctccacagattgcagagggaatggcatacatcgagcggaagaactacattcaccgggacctgcgagcagctaat

SEQ ID NO: 53790 - DNA, 100 bp, Homo sapiens
tttgttcaaatgttcagactttgttgtggtacagtttaaagatatggactccagttatgcaaaaagagccggggaaatgtctgatgaggagataaaaaag

SEQ ID NO: 53791 - DNA, 83 bp, Homo sapiens
ctcacagctgatgacctgctgctcgtgctgatctcaggtgacccagggcctggtcatcgggcagctgagcagccacttctcgg

SEQ ID NO: 53792 - DNA, 75 bp, Homo sapiens
ccaccgacatcatgctccagttcctggagcatattaatgaaaagtgccataaactgaaaaaccaaacatgagggt

SEQ ID NO: 53793 - DNA, 96 bp, Homo sapiens
ccacttttgctagagagcaaggctttgagatttcttataggaaagacgtgcaggacacccacacgtacagtgcagaacttgaccgaccagacatca

SEQ ID NO: 53794 - DNA, 98 bp, Homo sapiens
ggccaaagcctgcccagacggctcacctgtgcgggatggaacaaaagtggcctccagaagacactcccctgattcctacaccgagggaacacacagca

SEQ ID NO: 53795 - DNA, 90 bp, Homo sapiens
gcaaggaggccgtcaccttcaaggccgtcagacaagaaatggagatcttcacccttttcaacaaaccgaagagccatcagaagtgccggc

SEQ ID NO: 53796 - DNA, 110 bp, Homo sapiens
gagtgccaggtgccgcgagcgccgagttccgcgcattggaaagaagcgaccgcggcggctgataaacaggggtcacatgacgacagaagccaagagggctgcaaagatgg

SEQ ID NO: 53797 - DNA, 100 bp, Homo sapiens
cacaaaccttgtgtctcaatttggctacaaaaggttcatcctaagttccactataaacaggctcatgactcgggcacagacacttcttgcgtgacttttt

SEQ ID NO: 53798 - DNA, 100 bp, Homo sapiens
cacaaatgcacgcgacaggaaccaggatctatctggttcaatagatgacctccccatggggacagaaggagctctgagtcctggagtgagcacatcaggg

SEQ ID NO: 53799 - DNA, 105 bp, Homo sapiens
ccattatctggaaaaggaacaatattattctaaataatttagatttggaagacatcaataactcatcccaagaacagtatccataaggaagatggaaaaggggga

SEQ ID NO: 53800 - DNA, 118 bp, Homo sapiens
cgggtcctcctagaaattccccccgaagaagactcccccacatctgggtatcgagaaccttccctgcgaacttcagaggaacttccagctgatgcgagagctggaccagaggacggaa

SEQ ID NO: 53801 - DNA, 100 bp, Homo sapiens
cctgcaacacgagcatggcatggccccgcaggtcttcacccaggccctggagtgcatgcgcagggaaaggaaaacctcttcagcgcaaggtgaaaccacc

SEQ ID NO: 53802 - DNA, 97 bp, Homo sapiens
acggtgaagagtcaaaaaccagtgctcaagtatttgaggagccagatgaccaggatgccccagatgagcatgagccctctccatcagaagatgcccc

SEQ ID NO: 53803 - DNA, 75 bp, Homo sapiens
cttcagcgcagtatattactgcagaaactggcgatggaatatgagaggagccctctggaaagaaaaggacagacc

SEQ ID NO: 53804 - DNA, 100 bp, Homo sapiens
tggcaccagagtcaacattctggaagtggcctcgggggccgtgctgcggagtctggagcagcttcctgcctgacacagctcacttcaagaagtgcacaat

SEQ ID NO: 53805 - DNA, 95 bp, Homo sapiens
accgccgccccctccggcgtgttcatgcccccggggctgaaggtgatgtggccgccctcaaccgacgcatccagctcgttgaggaggagttggac

SEQ ID NO: 53806 - DNA, 90 bp, Homo sapiens
ctggaacgagttataggaagatgtagtccaacccacatcagcagccaggtcagcaatcctctgctcattggccatggggctctgtctact

SEQ ID NO: 53807 - DNA, 83 bp, Homo sapiens
cttcgatgcaaatcaaccagagggaagaaaatgcaaactgaaacctgggaaacagtgcagactggaacgtgagaaacgagccc

SEQ ID NO: 53808 - DNA, 105 bp, Homo sapiens
cgacgaggaagttttctactgtaaagtcaccaacgagatcttccgccactacgaacaatgcagatcttcgtgaagactctgactggtaagaccatcaccctcgag

SEQ ID NO: 53809 - DNA, 75 bp, Homo sapiens
gagaaactttatgtgcctgtaaaagaatacccagatgctgtggaatgggagtgtgatgaagctaccaaaaaggcc

SEQ ID NO: 53810 - DNA, 98 bp, Homo sapiens
caacagtggccttctgatgaatactttaagaagtaacagctagcagtcgccactatgttgacaggctatttgaccctgatccccagaaagttctacaa

SEQ ID NO: 53811 - DNA, 100 bp, Homo sapiens
ctgctcattgccatgaaggaactcaagcagtcgatgatgtgaagaaaggttacatcaaagcagaagaaaagtcctatcaattacagaagctatacgaaca

SEQ ID NO: 53812 - DNA, 75 bp, Homo sapiens
caccacaggaatcatgactcctggagaacggatcaagtgcttattacaggtcatactccctgtcacaaactccag

SEQ ID NO: 53813 - DNA, 96 bp, Homo sapiens
ataaaatcttttgtgaaagtgtataactacaatcacctaatgcccacaagaatcggttggtgcgtcttgtgtgtgtgtttctccaatccttgatcc

SEQ ID NO: 53814 - DNA, 87 bp, Homo sapiens
gaaagatacatggcttgcaaaaagtaaaccacgatcgttatgctgacttacagttgaacatgagtcttcttatgattagtgagaatg

SEQ ID NO: 53815 - DNA, 75 bp, Homo sapiens
ggaattcggctctataattcactgaagtcaagtaccttggttgtgaagcagaagctaccaggcgtctatgtgcag

SEQ ID NO: 53816 - DNA, 100 bp, Homo sapiens
aaaccccaatctcagtggacaagggacaggggcagacccggtggtcagcgccaagagcaaccattgcctggatgctgccaaggcctgcaacctgaatgac

SEQ ID NO: 53817 - DNA, 90 bp, Homo sapiens
aaaaaaaccacaaatgtttttctgttttgcctgaatacatgatttaaacaagagatttccacagaagggaagatggctttatgctttatt

SEQ ID NO: 53818 - DNA, 75 bp, Homo sapiens
cggggagctgcgcgaagccggggcggagcacgcgagctatggtttctgaaacagatcgtgagcttcatcaagaga

SEQ ID NO: 53819 - DNA, 82 bp, Homo sapiens
gggtgcgctgctcaaggacacggtctacaccgacttcgacggatgatcggctgaatgtaacagaggaactaacgtccaacga

SEQ ID NO: 53820 - DNA, 81 bp, Homo sapiens
tgatgaggaggaagaagaagaagaagaaaaagtttctcaaccagaggtcaaaatgcagatcttcgtgaaaacccttaccgg

SEQ ID NO: 53821 - DNA, 100 bp, Homo sapiens
tctagctattgccttattttttctcatggatgttcttcttcgagtatttgtagaagggagcattggtttgaaaaggccctacgagacaagaagggcttca

SEQ ID NO: 53822 - DNA, 98 bp, Homo sapiens
gcccggcctgacaccctgctctcaggcagcaccagtggttggaaggacatgttcaatacatggcccatgaacatggacatgagcatggacatcataaa

SEQ ID NO: 53823 - DNA, 149 bp, Homo sapiens
cttgtgattccgcaggagaaggctctgaaagaatacatcaagattctgaatctggtgatgaacttagcagcagctccactgaacagataaggaggatggcattccctgtggatatgctggaaaattgcagccatgaggaattggaaaat

SEQ ID NO: 53824 - DNA, 106 bp, Homo sapiens
gccttcctcaacgacgcggacatggtcatgagctttgtgaacctggacaccattcgcttttcacccaagatgatttgatgtcttataaaactctgatgaaccatga

SEQ ID NO: 53825 - DNA, 99 bp, Homo sapiens
tggccccaggtctcactatacaggctatgtggttgatgttgcagaatgatgagccggaggacttcgttatagctactggggaggtccatagtgtccggg

SEQ ID NO: 53826 - DNA, 89 bp, Homo sapiens
ttgtaacaccattgctcctaatgcgggatcacggatgactcagacagttatgcctgaagggtcactcaggatgtgtcaactgtctggag

SEQ ID NO: 53827 - DNA, 50 bp, Homo sapiens
aaaacatggcggatccagaattctgactagacgcttgaagcaaagctgcc

SEQ ID NO: 53828 - DNA, 100 bp, Homo sapiens
ccccgggccaggccgcggccggggcaggagcgcagctgagatgagtgaactgagtgtggcacagaaaccagaaaaacttttggagcgctgcaagtactgg

SEQ ID NO: 53829 - DNA, 100 bp, Homo sapiens
gccagctgggacaggggagatggagtaattttgctgtggaaagacttcacgtcttgccgaatgaaacagaagaaggaggaggagtcggcgggcggcacca

SEQ ID NO: 53830 - DNA, 90 bp, Homo sapiens
ctcccacctcctcgccatcatcttgctactgctcaaaatctggaagtcccgctcgtgcgccggctccaggaggccagagctctactgaag

SEQ ID NO: 53831 - DNA, 114 bp, Homo sapiens
ggaaactaggtcgatggtcggcggcgcccggatgggcagctgagcgtggagattggtgaaagcgtgagaggggaagatgtctacatcatccagagcggctgcggggaaattaac

SEQ ID NO: 53832 - DNA, 83 bp, Homo sapiens
cccggtgggcactgtgatctcagacttccagccttcagaactgttgatgataattagaagcatgctttccactgaacttcccg

SEQ ID NO: 53833 - DNA, 100 bp, Homo sapiens
ctgggtctggagacgccgtggcagcctgaacggagtgtgcgacggattgggagatgtggacgagtgtcaggacaataatggtggctgccagcagatctgc

SEQ ID NO: 53834 - DNA, 96 bp, Homo sapiens
tccccaagtagctacctatcacagagcaattaaagttacagtagatggacctcgggaacccagaagtatattcgaattgttgggactcacaacaca

SEQ ID NO: 53835 - DNA, 76 bp, Homo sapiens
ttgggcccatacatgagagaaacctcacattgctcctgctgctgctgcaggatgagcaattcttaggttttggctc

SEQ ID NO: 53836 - DNA, 75 bp, Homo sapiens
ggatgtagaaaatgagcagatactgaatgtaaaccctgcagaaagtgttgtgaagagcgaagacttttcgctccc

SEQ ID NO: 53837 - DNA, 74 bp, Homo sapiens
gagaactcctcatgctcttctgggcacaccccacccacctgtggccagtacgaattggagcaatgttggcttat

SEQ ID NO: 53838 - DNA, 74 bp, Homo sapiens
ctcaaagtggtcagctgagagcaactccctgaagatcatcgtcacaggaattaaggataacctagacgacataa

SEQ ID NO: 53839 - DNA, 75 bp, Homo sapiens
gtcattatagcgggatactgtgtagaagggacacttgccaagaacgtcgaaatgctgagcagcatggattctgca

SEQ ID NO: 53840 - DNA, 100 bp, Homo sapiens
ctgattgataatggagaggagttttctggaagaggcaattccccaatatctcaaagaattactaaaggacttggaactttgctgccacaatacctcggcc

SEQ ID NO: 53841 - DNA, 97 bp, Homo sapiens
ccagtgggaagtccaacctgaccgtcctcagggagccagggtatgatgtgattgctcaagctcagtcaggtactggcaagacagccacatttgctat

SEQ ID NO: 53842 - DNA, 75 bp, Homo sapiens
aaagcatgcccatacgattaaacctgcatgtacattgaagatgtcagtttctacatgtgggaagtagacattgaa

SEQ ID NO: 53843 - DNA, 102 bp, Homo sapiens
cagaaggaacttgcagaaatcacattggaccctcctcccaactgtagttttatgtgctgaaagagttggccagatgactaagacatataatgacatagatgc

SEQ ID NO: 53844 - DNA, 73 bp, Homo sapiens
tgaaatgcaaagactgtgaggagagaccatagtcttgagtttacttatgaggtcaattggaaataagaacacc

SEQ ID NO: 53845 - DNA, 51 bp, Homo sapiens
ctacctgcattaagtcaggactgagcctgctgatcttaagaagagaataga

SEQ ID NO: 53846 - DNA, 89 bp, Homo sapiens
cgcctcctcctcctcagtaacgcggaatcagacacaagtttggcagaaggaagtgtcagctgcttagatgaaagtcttggacataacag

SEQ ID NO: 53847 - DNA, 100 bp, Homo sapiens
tcctgttccctgtgagctgcctggtcctgctgcaggtggcaagctctgttcgttcccacatgcagggcagcacaaggagaatgggcgtcatgactgatgt

SEQ ID NO: 53848 - DNA, 105 bp, Homo sapiens
ttgatgaggtggatctgacagatgccagcgtagctgaatccagtaccaaaaacgtcaacaacagttttacgctgttcgggggtcttgtctggattttggttgcct

SEQ ID NO: 53849 - DNA, 75 bp, Homo sapiens
agaaatgttgaatgttcctttgagccgccaagctgagccaccaaagaaggaggctgccaccacggggccgcaggt

SEQ ID NO: 53850 - DNA, 83 bp, Homo sapiens
agtgaaaggaaaagttgctggagcactcctgagagccatcttcaaaggtcccgttcaagaagttcttccagttcgcagtcaag

SEQ ID NO: 53851 - DNA, 100 bp, Homo sapiens
ggattttgagaatcttttctcaaaaccccccaacccggccctcggcaaaacggccacggactctgacgaaagacctcctgccccccgaggtctgcagtct

SEQ ID NO: 53852 - DNA, 75 bp, Homo sapiens
caatttaagcctgatctaacccctagaaacagtcggcgtggcacaagcctaatggaagatgatgaagagccaatt

SEQ ID NO: 53853 - DNA, 103 bp, Homo sapiens
ggaatcggggcgcttcgccccgggccccccagcatgaagaccccggcggacacaggtgagaagccctaccactgcaactgggacggctgcggctggaagtttg

SEQ ID NO: 53854 - DNA, 82 bp, Homo sapiens
agccctccatcttgcagcccagaagaattggagcgttattcagtatattaatgtcttattgataatggcagaacatccacca

SEQ ID NO: 53855 - DNA, 100 bp, Homo sapiens
acctgaataggaactttgcttccaaacactggtgtggtattcagaaacgtgaagccagcaattgtttcgcaattcggcattttgaaaacaaatttgccgt

SEQ ID NO: 53856 - DNA, 75 bp, Homo sapiens
gatactattccaagaggactttcaaatggtgaagaaacaccccggagagtaatctatgccagcaattatgacaat

SEQ ID NO: 53857 - DNA, 83 bp, Homo sapiens
caacaacgatgccggatacaggagggacgtgcaccagacaatgcagatcttcgtgaagactctgactggtaagaccatcaccc

SEQ ID NO: 53858 - DNA, 123 bp, Homo sapiens
cagggactttctgcagtgcctctgagaacttacgcagatcagccgagaactgcaagcacatgttgaccagataactgaaatggcagcagtaatgaggaaagccattgaaattgacgagcaaca

SEQ ID NO: 53859 - DNA, 82 bp, Homo sapiens
cagaaattctggaacacctatatgagctaaaacgtcatcctctcttcagtgatgtggactgggaaaatctgcagcatcagac

SEQ ID NO: 53860 - DNA, 75 bp, Homo sapiens
gacttgtcaccaaaggcgatgtcgagaaactcttctcttccaagcgagcaagaaactccagaaaatcttgccaaa

SEQ ID NO: 53861 - DNA, 100 bp, Homo sapiens
ctggccccgggcaacgatcggaactcggacacggatctatcttgggatcccatggctttctttactgggctctggggccccttcacctgtgtaagcagag

SEQ ID NO: 53862 - DNA, 83 bp, Homo sapiens
gccagtattgtcgatttcacaagtgcctttctgtcgggatgtcacacaacgacctaatctgggagcctgcaagtgacaacagc

SEQ ID NO: 53863 - DNA, 100 bp, Homo sapiens
gatccagcatgtgatgacctcggacacttcaggcatctgcaacctccgtggcagtaagaaagacttggtcaggtactttcagggcctgggccccccaccg

SEQ ID NO: 53864 - DNA, 96 bp, Homo sapiens
aatccaaccagaaggtacaagggtcgtgtgtgggcactgtggaaacacattcctggtaagaaccttgatgctgtccatgatatcactgtggcgtat

SEQ ID NO: 53865 - DNA, 100 bp, Homo sapiens
acacctaccttagcctcgtaagccagaagacttgaaaaggttctggtccacatctcaggctgacacattaaaggagaggtatcagaaaattggagataca

SEQ ID NO: 53866 - DNA, 100 bp, Homo sapiens
agctgactgaaagattcttcaagaatacaccttggcccgaggctgaagccattgctccacaggttggcaatgcttgtactcccagagtacctcatccacg

SEQ ID NO: 53867 - DNA, 51 bp, Homo sapiens
ctttcctttccgtctggcggcagccatcagtaacaacatgctgtaccccaa

SEQ ID NO: 53868 - DNA, 84 bp, Homo sapiens
tggaattgctactgctgcctctgtcactcctggtgaccagcattcaagaaacaaaaccatgggcagtgtatgctgggctgttag

SEQ ID NO: 53869 - DNA, 50 bp, Homo sapiens
agaaaattgctcactttgatctcaaggaaggatttgatgccctggatccc

SEQ ID NO: 53870 - DNA, 100 bp, Homo sapiens
tacgggactcattgctaacccatatccagaacttgaaagacttgtcacctgttattgtaacgcaggttcattttccagacactgaaagagcagaatggct

SEQ ID NO: 53871 - DNA, 50 bp, Homo sapiens
aaggattccaagtaactcttatttgcatacggtgaacatttattggttac

SEQ ID NO: 53872 - DNA, 96 bp, Homo sapiens
ctcacggccagccctggggtgttccccgtcactgtacgtcaagctgagtgtacaaagactgcacgaattcaggccgcattacccgcggctaaacca

SEQ ID NO: 53873 - DNA, 49 bp, Homo sapiens
aggattccaagtaactcttatttgaacatccagtcatggataaaaatga

SEQ ID NO: 53874 - DNA, 100 bp, Homo sapiens
aatgtgcaggtttcttacatgggtacattggatgacactgaggtttggggtactgttgatcccatcatgcagggtgattgtgacaaaacttatggatcag

SEQ ID NO: 53875 - DNA, 100 bp, Homo sapiens
agttaggagactgaatcaaggtccagagaaggtggaggaatcctgatactgagcggaattgaatgatctggcacgggaccctccagcacagtgttcagca

SEQ ID NO: 53876 - DNA, 82 bp, Homo sapiens
ggctggactcggattcgttgcctgaggttttgcactgattgcaaaaataaagtcctccgagcatacaatatccttattggtg

SEQ ID NO: 53877 - DNA, 98 bp, Homo sapiens
agcaaacgatccagacggcagggagtgcatcaaaggtgtgaacacagccagcagacatcaaggacttctgaggagcctggtaccttgcataggcacta

SEQ ID NO: 53878 - DNA, 100 bp, Homo sapiens
ttgatttgaaagtttctgagaaaatcttcagctcagacttgagggtcaactttaccagctgaagattcttcaggagagaggatcgcggatgtaaactaag

SEQ ID NO: 53879 - DNA, 132 bp, Homo sapiens
atggtgttcagggatttcctaccattaagatttttggatccaacaaaaacagaccagaagattaccaaggtaatgcacaggtgacacaaacaaagtttctccccaatgctccgaaagctctcattgttgaac

SEQ ID NO: 53880 - DNA, 80 bp, Homo sapiens
caagagattcagtatcactcgctcccttgatgatcttgaggagcagtgaggagaatgaataccttccaagaccagagtgg

SEQ ID NO: 53881 - DNA, 98 bp, Homo sapiens
ttttgttattacacttactgatggtcattcagcatggactgggacaggttgcaaattcgtgaagaatcagcatcatgtttggcagctgagtattggag

SEQ ID NO: 53882 - DNA, 50 bp, Homo sapiens
ccgtgtggcaccgcgagctccgcaaaggtgccaacaagctgcaggaggag

SEQ ID NO: 53883 - DNA, 74 bp, Homo sapiens
tgagcggagcccggtgacaggatggcaaaactgaagctccacgatggcccaaatgatgttgtgtttagtattac

SEQ ID NO: 53884 - DNA, 75 bp, Homo sapiens
acgtctcagggtcttcagccgagaggagggcagcccagagccggaaggtcctggcggcagagaccacgtcccagc

SEQ ID NO: 53885 - DNA, 50 bp, Homo sapiens
cagaacccccagaccatcatctggagagaaaagacccctctgaagacaag

SEQ ID NO: 53886 - DNA, 75 bp, Homo sapiens
gagtgccggaccccagcacacagaagccgagacggcatagaatgtcaagctaaccaggcgtccgctacttcagaa

SEQ ID NO: 53887 - DNA, 98 bp, Homo sapiens
agatacattaaatgcaatagcccttcagtactgttgtacgggttcagaaagacaggcaaaaactggagctactggacagcgcctaaaggaagctacaa

SEQ ID NO: 53888 - DNA, 88 bp, Homo sapiens
aacagagaatcaatttggatcggcttatcataaccagagaagatggcgaattagaagatggtgaaatagacgatgcaggatttgaaga

SEQ ID NO: 53889 - DNA, 75 bp, Homo sapiens
agctctaccaggatcaagaggtgcccaagccaaaatcctggaaatatattcttccctctctcctgcctttatgag

SEQ ID NO: 53890 - DNA, 74 bp, Homo sapiens
cggcctggagccagtgcccaagtacggtttgaactgttgggaatcaaagagctttccaaacctgcctacgggga

SEQ ID NO: 53891 - DNA, 75 bp, Homo sapiens
gctgtcctccccgccaccaccggtgccgggcaccaggaaaatcagaggctccttaaaaatatgttcaaaatcggt

SEQ ID NO: 53892 - DNA, 75 bp, Homo sapiens
ccagggtccaccagattctagaagttttcaccatggagcagctgagctcagcaaacacccgcttcgccttggacc

SEQ ID NO: 53893 - DNA, 60 bp, Homo sapiens
cttcgagttcaaagagaccctcggaaccactgtgacttctgccgtgttcaccgtgggaga

SEQ ID NO: 53894 - DNA, 100 bp, Homo sapiens
cccgagcggcaccaacagcggcgcgggcaagaagcgctttgaagtgaaaaagacatggctccttactatgaagccttgtgcaaatccctcgactggcaga

SEQ ID NO: 53895 - DNA, 100 bp, Homo sapiens
gagctcactgtgaggagaatgcacctctttgtggttttccttggtatcttccagtgcactttctgatcagtgagctttctcttaagtgtgccaagctgcc

SEQ ID NO: 53896 - DNA, 50 bp, Homo sapiens
tgccgtgaataggcagcctaaaggactgtagaagcggccaggaagaaaac

SEQ ID NO: 53897 - DNA, 90 bp, Homo sapiens
cggcgccgctgcccatggagggagtggacatcagccccaaacaggacgaaggcgtgctgaagagtacaggggctcaggtccaggtggcag

SEQ ID NO: 53898 - DNA, 101 bp, Homo sapiens
gagacaaaaagtgcttctaatgtgccatcagggaagagcactgatgaagaagaggaggcaactttggctttggggattcacgtggtggcggtggaaatttc

SEQ ID NO: 53899 - DNA, 50 bp, Homo sapiens
cagcaacagctcggcgggctggaagacagagtttcactcctgttacccag

SEQ ID NO: 53900 - DNA, 75 bp, Homo sapiens
aagaaaggccttagtaggcctttctaagtctcctaaaggatgtggtcttcaaagcttcacctttctccaaaggca

SEQ ID NO: 53901 - DNA, 100 bp, Homo sapiens
aaccagtgagcctgtggcaggactgggaccagccctggcttggaaaggaggagacccacccggtggacttgagctcgctctccagtaagctactcccagg

SEQ ID NO: 53902 - DNA, 100 bp, Homo sapiens
catgggcaccgggatgctgtgaaattctttgtggcagtcccagtacagaacgttgtgtgccctgtgtctgtgacagagaggggattccccagcctgttct

SEQ ID NO: 53903 - DNA, 90 bp, Homo sapiens
gaatgatcctgaattgctgaaggaaacaactgaagcaaggaatgccttaattgaacaaggaactgctcgcagaaagaagaaggtggttca

SEQ ID NO: 53904 - DNA, 100 bp, Homo sapiens
ctggtccatcggaggatccgagtgtgaatttcctgaagaacgttggggagagtgtggcagctgcccttagccctctgggaacgccacagaagtatgatcc

SEQ ID NO: 53905 - DNA, 111 bp, Homo sapiens
gtcgcgggagccacgcagaggacgccggaacaccctggaagccgagaaatgctctccttgaggaggcggcagatgcttctgttagaaaccctgaaggtgaaacagaccatt

SEQ ID NO: 53906 - DNA, 100 bp, Homo sapiens
atgacgtctccagccaaattcaaaaaggataaggagatcatagcagagtacgatactcaggtcaaagtggattttgctctgaaggttctccagtggtctg

SEQ ID NO: 53907 - DNA, 82 bp, Homo sapiens
tgaaaatcaggaagagccagcggggagtgtgtgttgccatcgcgtctccgcctgcagggcgaccattgacgaggtggagacg

SEQ ID NO: 53908 - DNA, 154 bp, Homo sapiens
gagcttcattcagatgtggtggaatatgccaaggaaaaactggagagcttcatcaaaaatagtgatagctttgataagccccttcacagatgtagtcactacaaatcttaaattgcgaaatccatcggatagaaaagtgtgtttcaaagtgaag

SEQ ID NO: 53909 - DNA, 100 bp, Homo sapiens
tctgcatttgtctgtttgatatcaccaaactggaggatgcctatgtattccctggggatggcgcatcacacaccaaaggattttttatcaagcagaaatg

SEQ ID NO: 53910 - DNA, 98 bp, Homo sapiens
ccaggaagctatgcagatggtgcctaaattctgcttcccttttgatgtggaaaggcgtggtgaccaagatgaagatgcagaggaccattgtcatccgc

SEQ ID NO: 53911 - DNA, 82 bp, Homo sapiens
caccccgcggccgcaccttcccgccttctcagctgggatggaaattctatgatgctgatgattatcacccggaggaaaatcg

SEQ ID NO: 53912 - DNA, 82 bp, Homo sapiens
caggaactttcttggctctggggtttccttgtctgtcaaatgaccaggttgacaatggtctccaggatggtctctaccatgc

SEQ ID NO: 53913 - DNA, 100 bp, Homo sapiens
ggacaccctcaacagaatggggaaggggagcctgtcacattatttgaggtggtgaaactggggaaaagtgcaatgcaggccctttctggttactgtggct

SEQ ID NO: 53914 - DNA, 98 bp, Homo sapiens
cgacatgtggaaaatgacggttataagaccatttatttctttggagacaaaactatgccaccttgaccttatgtcatgggttcaacttggacactgaa

SEQ ID NO: 53915 - DNA, 98 bp, Homo sapiens
gcgggatcccagcctcaggcgtgcgcggacggtgtgcggatattctctaagccgctttcatcatgggagaaatagagcagaggccgaccccaggatca

SEQ ID NO: 53916 - DNA, 100 bp, Homo sapiens
tgcagagcataggttttgtgctggtaccactgcggcccccctcacccgcccgcagttccctgacatcgtggagttctgcgaggccatggccaacgccggg

SEQ ID NO: 53917 - DNA, 90 bp, Homo sapiens
caacagtgatgaggaaagctgtgaaagttctcaaggctcttgcagccaatgccggaacaggatttgctgttgctgagcctcaaatcgcaa

SEQ ID NO: 53918 - DNA, 100 bp, Homo sapiens
aagaaagctcagctggtggtgattgcacacgacgtggatcccatcgaggaacaagatcttgatatttggcctctttgaagagacagccctggctgctttc

SEQ ID NO: 53919 - DNA, 100 bp, Homo sapiens
atgggggtccatcctcttcaagtaagactacaaacaagtttgagggactatcccagcagtcgaggtagtgacttgtcaggaggatcaatatgaaggacgg

SEQ ID NO: 53920 - DNA, 100 bp, Homo sapiens
gagggcgtccgcgtgtacagccagctcaccatgcagaaggccttcctggagcgggctgacgcacgaggcacacaggaaggaggtggagcaggtgtatctg

SEQ ID NO: 53921 - DNA, 100 bp, Homo sapiens
ctctgggtagcagggtggtgtgatagcggcagcgaggggctcggagaggtgctcggattctcgtagctgtgccgggtttctgctttgggacaaccataca

SEQ ID NO: 53922 - DNA, 104 bp, Homo sapiens
cccccagacaagatggacaccgcggaggaagaatggcttcctttgggtggaagaggaaaattggtgagaaggtctcaaaggtcacttcccagcagtttgaagct

SEQ ID NO: 53923 - DNA, 75 bp, Homo sapiens
tttggatgattcaaaatgggacactaattgaaagccggttgctgaaccaatccccatctgtagtttctgtcttgg

SEQ ID NO: 53924 - DNA, 83 bp, Homo sapiens
tggcacagaaaccgctgcgcctatgtcagaggatttagcaaagcagctggcaagctacaaagctcagctccagcaagttgaag

SEQ ID NO: 53925 - DNA, 90 bp, Homo sapiens
cctctgctctgcttcccttcggaggaaaatttcaggctgaaggtttagcgggtgccggttatttccagaaagaagagaatggcaaagtat

SEQ ID NO: 53926 - DNA, 96 bp, Homo sapiens
agagtggacgcacatacagaagacagccatgcactgagctggggacatgcaacaataacagatctgaattctacaaacacattgtgctttctggag

SEQ ID NO: 53927 - DNA, 82 bp, Homo sapiens
agttgtatttagtgtgacgactgttgacctgaaaagattcctggtcgggtggcttccagtggtcttcagtctgtcgtgcacc

SEQ ID NO: 53928 - DNA, 87 bp, Homo sapiens
gagcggaaatgaggaggagatggtggaggaggctgaagggaaggacatggagcccaacggcccgtcgctgcccagggatgaagggcc

SEQ ID NO: 53929 - DNA, 75 bp, Homo sapiens
tgctttaacatacagccactaggaagctatgaagcagataacccagctcctaccagaggacctcagaaaggagct

SEQ ID NO: 53930 - DNA, 100 bp, Homo sapiens
gtccactaacaaaagatggctacgagggtaacatgttcgattcaagtcaatctgaaagtcccagccagccaagtgacgctgacattaaggaccagccaga

SEQ ID NO: 53931 - DNA, 90 bp, Homo sapiens
cagcatgttgcaaggtctcctgccagtcagtctcctcctctctgttgcaggtgttggagcgggccggagagaagtagagtgggctgcgag

SEQ ID NO: 53932 - DNA, 99 bp, Homo sapiens
tcagcgagctgcggcagaagggctacgaagaagtgcttcagcgggccaggaagcgcatccaggaggttggtcaaagaaaaagtgatgtatgaaaaagag

SEQ ID NO: 53933 - DNA, 73 bp, Homo sapiens
cccagctgaccggaccggtcatgcccgtccggaacagatggacagagacgtatgtgcgttggtctcctaaggg

SEQ ID NO: 53934 - DNA, 100 bp, Homo sapiens
cctggaacactctcatccagcagccctgatctcctgcagcctaccaccagtatgttggatttttccaatccttcaggggatggagaagtttatgtttggg

SEQ ID NO: 53935 - DNA, 74 bp, Homo sapiens
ccattcactagaagcactgagagatgcggccccctcgcagggagttcaaagaaggacgcagagccagccacaca

SEQ ID NO: 53936 - DNA, 82 bp, Homo sapiens
gtctcgccgcaagcaaggcaaaccccagcacttaagcaaacgggaattctcgcctgggatctagcaattgggaggcagcaga

SEQ ID NO: 53937 - DNA, 50 bp, Homo sapiens
gccgacaacagcctggcgtccgccacgcagaatggggaaatggagagaga

SEQ ID NO: 53938 - DNA, 128 bp, Homo sapiens
tcggagagacgcaataaaccaagcactctagatgccctcaactatgctctccgctgtgtccacagcgttcaagctgtgtgccaaccacgatgcaaacatggtgaatgtatcgggccaaacaagtgcaa

SEQ ID NO: 53939 - DNA, 50 bp, Homo sapiens
ctgagctgcgaggaaaatggcggcgggagatccacattgtttgaagttat

SEQ ID NO: 53940 - DNA, 50 bp, Homo sapiens
cttcttcgctccctagcttagaagagcattgtcttcagtgttaagaaatg

SEQ ID NO: 53941 - DNA, 75 bp, Homo sapiens
gatgtctcatatgtctcaggcttccatgcagcctgccttaccggtaaagaagcttcttaataaagtagtgctccg

SEQ ID NO: 53942 - DNA, 116 bp, Homo sapiens
ggagagagcgagctgagtggttgtgtggtcgcgtctcggaaaccggtagcgcttgcagcatggtcgcaatggaagaagagatcgccgcgctggtcattgacaatggctccggcatg

SEQ ID NO: 53943 - DNA, 100 bp, Homo sapiens
cctcaagcaatctgcttgcctcagcctcctgaagggctgggattacagattttggctatggaaaggggaaatgttctaagcagagcccgtcaggagccca

SEQ ID NO: 53944 - DNA, 90 bp, Homo sapiens
cttcgaacttagacttccggaaggactttggcgaggcgttttaccaacgaggatcatttggctgtccataaacataaacatgagatgaca

SEQ ID NO: 53945 - DNA, 75 bp, Homo sapiens
agtgtctgggatccagtacgagttgaatcattgttcaaataagctcctcaagagttactgatctatgaaatggca

SEQ ID NO: 53946 - DNA, 100 bp, Homo sapiens
cggcgtccgcaaccagcagacccttgtgcagggctcgcggcctggcaagaatgtacagctgacagagaacgagatccgcggtctgtgcctgaaatcccgg

SEQ ID NO: 53947 - DNA, 96 bp, Homo sapiens
ttgaatgactggaaactgattggaaactctttgggaaagccactcgaaaaggcagtggagctactgctgtggttcaggcagccctatgcaaaccca

SEQ ID NO: 53948 - DNA, 75 bp, Homo sapiens
ataagaaaggtgatattgtagacatcaaggaagagagaagggcacagttacctaagtatcaacgtaatcttcctc

SEQ ID NO: 53949 - DNA, 80 bp, Homo sapiens
tgaagaagaaaatgtagaatgggaaactaatagagatgaatgtttcatccatttgtggaccaaaagatggagttggtttt

SEQ ID NO: 53950 - DNA, 98 bp, Homo sapiens
agcagctgagtgatgggcagcccccaccacccgcccaggccagccccagcagcaacagcagcacaggttcctgggtggagctacccatgaacagcagc

SEQ ID NO: 53951 - DNA, 101 bp, Homo sapiens
tttttccctctaccttaaggatgtgcaggatcttgatggtggcaaggaaatgcagagagctggaattccttgtccaacagttgtactactgaagaaacaca

SEQ ID NO: 53952 - DNA, 75 bp, Homo sapiens
taatgaatgtcgaatgtgactgactagcagcttcattttgaatgggctacggctcctggtttgagcacgtgcagg

SEQ ID NO: 53953 - DNA, 75 bp, Homo sapiens
cggcggccgagctgacggccccggcccaggacaggctgcgggaggagctgcaggactgaggtacagaggccaggg

SEQ ID NO: 53954 - DNA, 98 bp, Homo sapiens
gtgccacctgctgcacccacgaatctgcccacccctcctgtaacccagcctgtttcacttcttgacctcctgccccccgaggtctgcagtctcctgaa

SEQ ID NO: 53955 - DNA, 75 bp, Homo sapiens
gctaaaatatgccgttcagatttgtaaggctgaccggttccctgatgtgttacctgcttctgctactgatccaaa

SEQ ID NO: 53956 - DNA, 75 bp, Homo sapiens
catcgatggacgcattcagaaggatgagagccactcagagtgggtgtcttgtgtccgcttctcgcccaacagcag

SEQ ID NO: 53957 - DNA, 97 bp, Homo sapiens
accaagggagaaactggctgcagcagagcgagtacttcgttccaacatggacatcctgaagccaatcctggttgtatctgcagcaaacgctcaatga

SEQ ID NO: 53958 - DNA, 75 bp, Homo sapiens
ggagaagttagcttcagagttctttgtggatggacttgattctgatgagagggtgtcttttatgaataatcaaaa

SEQ ID NO: 53959 - DNA, 51 bp, Homo sapiens
ggaccaggcaccttctgtggaagataaacaatcagattctgtatggaagaa

SEQ ID NO: 53960 - DNA, 83 bp, Homo sapiens
ctcactttccagctgaggacacggataccctgcagtgcactgtagaacagaagataagaacttttctctgaatttgggtcttc

SEQ ID NO: 53961 - DNA, 100 bp, Homo sapiens
acattggaccctcctcccaactgtagttggagtcattcgttgcccagtttgcagccaagaatgtgcagagagacacatcatagataacttttttgtgaag

SEQ ID NO: 53962 - DNA, 75 bp, Homo sapiens
ggagccaccagcctctccctggtagacgaagttcctgatggagctgtaaagccacccacaaacaaactacccatt

SEQ ID NO: 53963 - DNA, 82 bp, Homo sapiens
ttacaaccagaagctcagggagaagttgaaggaggaggagaacacagtgggaacttaatgagctgagagagacagaaggggg

SEQ ID NO: 53964 - DNA, 75 bp, Homo sapiens
ttgtgttaaccaaagccagcctggcatactttgaagatcgtcatggggtaaattaaaagatcttgggaacttggt

SEQ ID NO: 53965 - DNA, 98 bp, Homo sapiens
tggcgctgcgccgggccccgggccccgatggccccgaccgcgtgctggagctcttcgacccacccaaggtgctgctagctgaggaggggatagctcct

SEQ ID NO: 53966 - DNA, 101 bp, Homo sapiens
agcgtagctgaatccagtaccaaaaacgtcaacaacagttttacggcggaagcccggctcgctgcaaaacgggcggcccgcgcggaggctcgcgagatccg

SEQ ID NO: 53967 - DNA, 74 bp, Homo sapiens
cgtaccgcagcccccgggcacgacctctcggacacggtgcaggcagcattcgttcagtcagagagcataataga

SEQ ID NO: 53968 - DNA, 100 bp, Homo sapiens
gtgaatgctgctaaaaacaagactggggctgctcccatcattgatgtggtgcgatcgattgctcgctgtaagcagctcatctgtgaccccagctacgtaa

SEQ ID NO: 53969 - DNA, 98 bp, Homo sapiens
gtctttatctgctgtcaaggatcttgtgtgctccatagtttatcaaaaggcagcatggtgattcatttgatgcttccagaaaccagagaaatctatga

SEQ ID NO: 53970 - DNA, 100 bp, Homo sapiens
gtcgcggacctgggctctgtgcgttgggaaagggaagtggaggactggatggaggacctgaagacgtgaggtggaggcacaggtagaagagaagattctc

SEQ ID NO: 53971 - DNA, 90 bp, Homo sapiens
attttgcagagcatcccccaaagacagattgaagaaatgcagagacagggttccccactgaaggacttggtccagctgtctggcagggag

SEQ ID NO: 53972 - DNA, 100 bp, Homo sapiens
gaggccttggtccaacacaaattgcctccttatgtctccaacatggaccgcctgggggactcggaactggaggaaaatttggagctcaagaagttgttga

SEQ ID NO: 53973 - DNA, 123 bp, Homo sapiens
gcggatctggacacccagcggtctgacatcgcgacgctgctcaaaacctcgctccggaaaggggacacctgccagagcctacagaggaggacattgagaagcatccagagctaaagaagttac

SEQ ID NO: 53974 - DNA, 87 bp, Homo sapiens
agagtgagatactggagactcatgggaccatgaactttctagagaggctgatcatcaggggttcactttcagagaagttgagaatgc

SEQ ID NO: 53975 - DNA, 82 bp, Homo sapiens
tctccgccccccaggaggggcgagagggagccgcagctgatgtcaggttgttatggagttgatggagagagtgactctatta

SEQ ID NO: 53976 - DNA, 76 bp, Homo sapiens
agactctcggctatggagtccccatgttgcactattcctgatcagagaactccagttgcttcaacacacagtatca

SEQ ID NO: 53977 - DNA, 100 bp, Homo sapiens
agcagttccagtcaaatcccggtggttggggtggtgacggaggacgatgaggcgcagtaccaaatatgccccaacagcggcaagaccagcatcatcagag

SEQ ID NO: 53978 - DNA, 82 bp, Homo sapiens
atcccctgtttgagaaaaggcctaagaattttggcattggacatttcatatatatggatttcacagctacactcgatccacg

SEQ ID NO: 53979 - DNA, 90 bp, Homo sapiens
atggccggtcccaccggggtatcttcagccgcctccttgacagtcttcggcaggaaggtccctacagttcagtccccccgccttctgctc

SEQ ID NO: 53980 - DNA, 83 bp, Homo sapiens
tcaacaagaggacccaggagaaattcgccctcaaaccaggcccagacatgtccgtccttgtaagttaaaagcttccatgggag

SEQ ID NO: 53981 - DNA, 95 bp, Homo sapiens
tgacgctcgctccgctcgtcccgctcgtcatggcctacccgggatacggaggagggagagaactcgatgccaccgcaacggtattggcgaaccgg

SEQ ID NO: 53982 - DNA, 71 bp, Homo sapiens
aagagtgaggagaccatagctgcacagccagagatgcccgagtggtaaaagacatggcaacaggaaagtct

SEQ ID NO: 53983 - DNA, 100 bp, Homo sapiens
ctgttgacctgaccatggaactttaccagcacctggaatctaaggagtggtttgtgcagctctattaccacgggaaggtgaaggtgtggttccagaaccg

SEQ ID NO: 53984 - DNA, 89 bp, Homo sapiens
ccttgaaccagattgatgaagtaaaggtgtggcctcagaatggagaagctgatgccatgagcttggatggagggtttgtctacatagcg

SEQ ID NO: 53985 - DNA, 90 bp, Homo sapiens
gagacaagcccgcgcccaacaccttctatgtagcgctagtcctgctgatgggcaaagaaggtgtccacggtggtttgatcaacaagaaat

SEQ ID NO: 53986 - DNA, 101 bp, Homo sapiens
gacggagcggccggggcctggggctgcctgccgggcggccgggcgcggcgagcccagcatcccagccatcactcttccacctgctccttagagaagggaag

SEQ ID NO: 53987 - DNA, 74 bp, Homo sapiens
gacttaccttaacatgttcttgaagtaccatggcgtggattaaaagtagagacggggtttcgccgtgttagcca

SEQ ID NO: 53988 - DNA, 82 bp, Homo sapiens
tgtccagttactctaacaagtctggaggcattttttactgtctacagaaacttattgtaattcatttttcctcactccagta

SEQ ID NO: 53989 - DNA, 100 bp, Homo sapiens
caacacataaaaattatttatccaacagctcctcccagcctaaaatgaccaatgtgtgatttcagtggaataaatggcgtccaaagtcacagatgctata

SEQ ID NO: 53990 - DNA, 83 bp, Homo sapiens
gggaaagcagcatgttggccaggatatattgcctgatgtaaatgctgacattgtgcattggctctcttggactgcccaaggct

SEQ ID NO: 53991 - DNA, 74 bp, Homo sapiens
cctgtgcagggcagagcaggaggccccccgagtggatgatctcttcagggaagcagatatcgaacccaatggca

SEQ ID NO: 53992 - DNA, 127 bp, Homo sapiens
gcgcgcgcaagcggcggcgtggaagctgtgagcgcccccatcccggaggtctccgccggctcccggtccagttacaacacagggatcacaacaaacacaaccgccacagaagcactatggcattact

SEQ ID NO: 53993 - DNA, 87 bp, Homo sapiens
cagatctaatctttaagactggtgggaggaaaggctccagtggttcttacttgatccaaaaaatgtcaagaattaatctaggaggcc

SEQ ID NO: 53994 - DNA, 82 bp, Homo sapiens
ttcgtgatcttcagaccccaggttctttggggcaatttgaaattcgatatgcaccgtggttccagtggacaagttttccaga

SEQ ID NO: 53995 - DNA, 102 bp, Homo sapiens
ggatgaagttgttcattgtttgtcaccacaaaaaggacagagaaagaatcagcatatcccttacagaaatagtaagcttactcgcttgttaaaggattctct

SEQ ID NO: 53996 - DNA, 100 bp, Homo sapiens
gtgggggttgctgacccagaggagagttctccaaacatgatcgtttactgcaaatggtattattcagcacgacttgattttctcccttcaacaaacagaa

SEQ ID NO: 53997 - DNA, 75 bp, Homo sapiens
gagtgtatgcactttactacaaagatggacttctctgtacagttctgggaaatgccagtgcaaagtgggtgtcat

SEQ ID NO: 53998 - DNA, 74 bp, Homo sapiens
gcggaacagccacagcagcctcccaaggagtctgcaagttgacttaattcagtgcacaaatgagatgaatgtga

SEQ ID NO: 53999 - DNA, 100 bp, Homo sapiens
ccaatatccaagaagcagtagagggtgccatgcacattcaggacccagatgatgtggtaccagttggccaaagaagagcctggtgttggtgcatgtgctt

SEQ ID NO: 54000 - DNA, 90 bp, Homo sapiens
ctttacctcgctgaccctatgaagaaaacatcggttgtgaagagaaagccaaaaagaatgccaacaagcctttgctggatgagattgtgc

SEQ ID NO: 54001 - DNA, 90 bp, Homo sapiens
acagagtataacaatcagtgccgagcaattgtgatgagatattctgctgagtggaagggtccccagccccaccccagccccaaaggaggc

SEQ ID NO: 54002 - DNA, 90 bp, Homo sapiens
cattgatgatgatatcattatgctgacctctgacgagctgcaatttggttatgaggtgaagccttgaaaggaaaggtcacagttcacaag

SEQ ID NO: 54003 - DNA, 100 bp, Homo sapiens
aacacgtgcccctacgtgcacaacatcacccgcaaggagagcaagccctggaggttcactctttcaagaagtcgtgtgctgaggtgtaatgctacacaag

SEQ ID NO: 54004 - DNA, 100 bp, Homo sapiens
cagcaagtttaaaaatttggaatgcaaattacttcctggtcatcacactgaaacggtgttcaaccgggttttgccagggcctattgcaccagagagcagc

SEQ ID NO: 54005 - DNA, 83 bp, Homo sapiens
tgagtgttttcatttgcggagagctccctggtgactgccagcccaagtgcctggaatacttattaagaaacgatgcaaatcca

SEQ ID NO: 54006 - DNA, 82 bp, Homo sapiens
tggacctgaaacagaaattctggaacacctatatgatgtgaagttcatttccaatccgccctccatggtggcagcggggagc

SEQ ID NO: 54007 - DNA, 98 bp, Homo sapiens
gatcttggaggtggtgtaaaggaagctcaagtatatcaagcattcaaattgctcacagctgatcctaaggctggtggggtagcaggtgtttctgttga

SEQ ID NO: 54008 - DNA, 100 bp, Homo sapiens
cggacaaccagcccctgagctgggcgagaggtgccaagggagcttctgtcccgaggaccaggggatgcgaagggcaaataagggcgagactgaaaaatca

SEQ ID NO: 54009 - DNA, 100 bp, Homo sapiens
taaggattccaagtaactcttatttgggaaggcagtaaacaagatgctaactgatggagtgaaatccccaggagatgcagaaggcaagtgcagctaactg

SEQ ID NO: 54010 - DNA, 82 bp, Homo sapiens
tggcctgggcgctccggtggcggcggaggttggaagtactccatgacacacactcggagaaagtcccttcccatgctgagtt

SEQ ID NO: 54011 - DNA, 106 bp, Homo sapiens
cgcctcctcggagtccttggggacggagcagcgcgtcgtggggcgagcggcagggtttccaggcctgaggtgcccgccctggccccaggagaatgaaccagccgca

SEQ ID NO: 54012 - DNA, 98 bp, Homo sapiens
gcggctctcggagccggcgcgaatccggcccccgcagcgggacccggaaaatgaaactgaagccgtggtcacgtgacaggacatgtagtatatagcag

SEQ ID NO: 54013 - DNA, 90 bp, Homo sapiens
ggaggaggaggaggtggagttgctgcccttccggagtccgccccgtgaggagaatgcaatcccacagagtattgatgaggaaactgaagt

SEQ ID NO: 54014 - DNA, 49 bp, Homo sapiens
atccagtatctgaatataagagacaggggacaggcaaatggtatgaatt

SEQ ID NO: 54015 - DNA, 100 bp, Homo sapiens
ccgagaatagctccgtccagcaggctcatcagattcaagagatgtttccccaggttccataccatctggtactgcaggacctccagctgacacgctcagt

SEQ ID NO: 54016 - DNA, 83 bp, Homo sapiens
cccagctgagccgagggctcgcactcttctggtctcccaggcccaacccacctgaaggagtcggagaagctggaaagtgtgaa

SEQ ID NO: 54017 - DNA, 100 bp, Homo sapiens
cagaatcagctgttccctgcgaaaggaggaaatctctgacatcaaagaggaggggaacctagaagctgtcttgaatgccttggataaaattgtggaagaa

SEQ ID NO: 54018 - DNA, 98 bp, Homo sapiens
gaccgctgcagccgctggctgaggtctaggtgctggagtgcgcacggaggccgatgtagaggaggaggccctgaggaggaagctggaggagctgacca

SEQ ID NO: 54019 - DNA, 82 bp, Homo sapiens
ggctgggcaagcactacaagaaggagtcagaaataccatcagaggaggggtactgtgactttaatagtaggccaaatgagaa

SEQ ID NO: 54020 - DNA, 90 bp, Homo sapiens
aataggtgtatcaagtaatggtgcaaagcctgaaaaaaaaacttcaggctttcatgacctacagctcagaccctgcaacaccctcacccc

SEQ ID NO: 54021 - DNA, 82 bp, Homo sapiens
ctcagcccacatgcccgctcacctgcgctgtgatgcctgcagagctgtggcttaccagggctgaaggcctttcggcagcagc

SEQ ID NO: 54022 - DNA, 101 bp, Homo sapiens
cgcacacgggccgcggcatcctcagcatggccaactccgggcccaacagcaacaggtctcaattgcattggacaaaatccggtatgaaagcttgacagatc

SEQ ID NO: 54023 - DNA, 100 bp, Homo sapiens
ccggccccgtagggtccccggcgccaggccacccggccgtcagcagcatgcaggtagactatgccagttactaccagggcctatgggattgccatggtga

SEQ ID NO: 54024 - DNA, 75 bp, Homo sapiens
gcttggtggatgacaaggaggcctgagtagaccgcaggtattgcagttggacacatatattttttcttggaagat

SEQ ID NO: 54025 - DNA, 100 bp, Homo sapiens
atggcatccctgagaggtggtgactgagactagatgcgggtgcagagcctcagcttaagggtatagttaccaagctatacagccgacaaggctaccactt

SEQ ID NO: 54026 - DNA, 99 bp, Homo sapiens
gacaggacttctgaaggtgttcttcggaatagaaagtcacaccattataagaaacattaccctaatgagtttggatttaggtggcgagtagaaaaagaa

SEQ ID NO: 54027 - DNA, 101 bp, Homo sapiens
tcacatccttgtctgtgaagctaaactcaatgctgctgtgtgggaagaagatttgtaaagaaaactcttagccagatgacgtgtactactgtggaataaag

SEQ ID NO: 54028 - DNA, 100 bp, Homo sapiens
tctgtacaccaatggaaagtgcgtcatcctaaggaacatcgacgtactccaaagattcaggtttactcacgtcatccagcagagaatggaaagtcaaatt

SEQ ID NO: 54029 - DNA, 98 bp, Homo sapiens
atcgagcagctgaacgagtgcaagcagctgtccgagtcccaggtcaagagcctctgcgagaagaagggcgctatatacctcctcacttaaggaacaga

SEQ ID NO: 54030 - DNA, 108 bp, Homo sapiens
ctgcagagacgtccaacctcgtgcgcatgcgcagccaggccctgggccagtcggcgccctcgctcaccgccagcctggcagagatcctacaagaatccaggatgatga

SEQ ID NO: 54031 - DNA, 83 bp, Homo sapiens
ctccagccctgccacctgctgcggatgcccctgtgacacagattcatggaaacagctattctcataaagtggacatcttttct

SEQ ID NO: 54032 - DNA, 98 bp, Homo sapiens
gcagcagagcgcggcgcagaagagttcttggagtctctgcggagtccctgggccagatctcacagtgaaagctgcaggatcttccttctgaccccagc

SEQ ID NO: 54033 - DNA, 88 bp, Homo sapiens
cccgccgcccggagaggctctgcagccatgaagccaaccgtcccgaggtgggaaagcagtgccactctccgcttcacagatgccccct

SEQ ID NO: 54034 - DNA, 100 bp, Homo sapiens
ccgacctccctatcataccacactcttcagcgaccacgcaggcactttcccggtccccagcttcccatcgacggtcagtgcgcacgttgtaatcagctga

SEQ ID NO: 54035 - DNA, 88 bp, Homo sapiens
ctcaccgagacggcgatccgggcgctcgagacttaccagagccacaagttctccaaggagaagtacatcctggactcatcgccagaga

SEQ ID NO: 54036 - DNA, 100 bp, Homo sapiens
tgggggtcggcaccttcggcaaagtgaaggcttttgtctggtcctctgagccccagtgagagtttcctgaggtacctcacccttccacaagacaacaggc

SEQ ID NO: 54037 - DNA, 82 bp, Homo sapiens
cgcaggtcttcacccaggccctggagtgcatgcgcagactgctgagaaggaagaatttgaacatcaacagaaagagctggag

SEQ ID NO: 54038 - DNA, 100 bp, Homo sapiens
atggcggctgcgctgttcgtgctgctgggattcgcgctgctgggcacccacggagcctccggggctgaactgaagcgctgcggcatggcgcgcgcctgcc

SEQ ID NO: 54039 - DNA, 90 bp, Homo sapiens
agggaggagaccggcacccagacaggtggcgacggcagaggatgccggtggtggtgtgcacattgagccccggtatagacagttccccca

SEQ ID NO: 54040 - DNA, 88 bp, Homo sapiens
gaagttactgccgcgccaccgagtccggaccggagactttggggcctaactagatataattgaccctgcaatcctgcgcccgggccgc

SEQ ID NO: 54041 - DNA, 96 bp, Homo sapiens
tgcgcagtgcccaaccagccagtgctgagatgctgtgtgctgtggacccacctggggttcatggagtgggccacggggcccagccctaagcactgc

SEQ ID NO: 54042 - DNA, 73 bp, Homo sapiens
taatgaaggcattgctatttttgcacttcagttcacatactatttatgggttgccatgtcaaatcttagcgag

SEQ ID NO: 54043 - DNA, 97 bp, Homo sapiens
cctccattcccgggaggggggagcggcgttggaggccaccgtttccagggaaatcctcattgacgattcaatttgttgaaggccaatttgtggactc

SEQ ID NO: 54044 - DNA, 90 bp, Homo sapiens
cgtgccgcagatgcccaccggaatggagaaggaagaggagtcggacaccagtaggtagaggaagagcctggcttcgtttggcattaatgc

SEQ ID NO: 54045 - DNA, 105 bp, Homo sapiens
aaggatcatgtctgcgagccaggattcccggagcaggccgggctctcgccatgggtcactgtcgcctctgccacgggaagttttcctcgagaagcctgcgcagca

SEQ ID NO: 54046 - DNA, 98 bp, Homo sapiens
gtcaattaggtcacttcaacctcttattggaagattatccaaaaggcaagaggcgcagatgttccagagattcctggagatcttactcttaagacgtg

SEQ ID NO: 54047 - DNA, 50 bp, Homo sapiens
agttttttctaatggctattcaaggtgtttgatcagtatgtaaagaccag

SEQ ID NO: 54048 - DNA, 82 bp, Homo sapiens
tgtcacctccatgggaccaggaccgtaggatgatgtttcctccgccaggttgtctgcattcaaaagagcattctattaaagc

SEQ ID NO: 54049 - DNA, 98 bp, Homo sapiens
tctcacaaataaacatggtgcttggggagcagtttctcatagggcctaaggatcattttctcggatgcatcacggctcatcttccggctcagttcctc

SEQ ID NO: 54050 - DNA, 122 bp, Homo sapiens
agctgcacaacttccgcgcgctgtgcgagctcgagtctggcatccccgcagccgagagccaggtttttcgttggaatatacgttgcacatttatggcgattctgagtgtgagggcagacttc

SEQ ID NO: 54051 - DNA, 101 bp, Homo sapiens
tctgtctgatgggagccagcgttgaggcgctgaccacggtctatagtaaagagatgtggcatctgatgaaaaggaagacaagaagatgcggcagccctaca

SEQ ID NO: 54052 - DNA, 100 bp, Homo sapiens
cccttagcgggtgggggaagctggtaggcacgggcggctccgcagtgaccggactcgggggaggagttcaaagaaggacgcagagccagccacacagccc

SEQ ID NO: 54053 - DNA, 98 bp, Homo sapiens
gcggcggcggctgctgctgctgctgcccgcgtccgaggctcgcgggcggcgggcccgggttttataggatcacattgacaaaagtaccatggagtttt

SEQ ID NO: 54054 - DNA, 100 bp, Homo sapiens
acaagggatgttgctgaacagttggagaagatctatgggtcagacagaattaggaatatgtcacttgtcacacatgccgatcaccggacacaatcctgca

SEQ ID NO: 54055 - DNA, 50 bp, Homo sapiens
cctgctcggggctctgttcccagctgagtcagtgctgattctctcaaata

SEQ ID NO: 54056 - DNA, 75 bp, Homo sapiens
aaactgatggctaagtttgcatgaaaactgcactttattgcaaaaaatgggaagcttcccttcatggccatgctt

SEQ ID NO: 54057 - DNA, 98 bp, Homo sapiens
aaggacagcctcttctcaatggagcggcctattgccaattcatggacatgctcttccctggctgcattagtttgaagaaagtaaaatttcaagcaaag

SEQ ID NO: 54058 - DNA, 97 bp, Homo sapiens
ctggactcatggaggctgagcatttattcagttgaggagctcaagcttgggaaaatggtgtgcattccttgtatcgtcattccagttctgctctgga

SEQ ID NO: 54059 - DNA, 80 bp, Homo sapiens
gtggagaatatagatatggacacaagcctcattttggaatattgcaggttggaaagggcaaagaaattacaagaacagcg

SEQ ID NO: 54060 - DNA, 96 bp, Homo sapiens
tgaagttgaagaccagattacagctgtcaggttatggaggttttgatgactatggtggctataataattacggctatgggaatgatggctttgatg

SEQ ID NO: 54061 - DNA, 98 bp, Homo sapiens
gggacaggacggcggggcgagccagtgccctgcaggagtcattaaatcaaaacttcatgctgatcatcacccaccgagaagtccagcgggagtacaac

SEQ ID NO: 54062 - DNA, 99 bp, Homo sapiens
ggaagatatcaccaccttcgtcaagggcaagatacacgtggttgctgtatatggaactttatctgatttgctttctgtggccagcagtaaactcggcat

SEQ ID NO: 54063 - DNA, 100 bp, Homo sapiens
ggctccaagacctcatcaacaattaaggcatccagggcattgtggatgcctaccgccaagccctgccccaagttcgcctctatggccctaccaactttgc

SEQ ID NO: 54064 - DNA, 100 bp, Homo sapiens
gccagactgagaacaaagtgcctgtgccccagggataccctggaggggtccccaccttcttccgggtgcgggacacgcaggctgtgcggcactacaagat

SEQ ID NO: 54065 - DNA, 101 bp, Homo sapiens
ctgattgaattactcaaggctgcctctctgcaaagttgagtactatactggcaattgctggagaagattttgcaattgttgcttctgatactcgattgagt

SEQ ID NO: 54066 - DNA, 83 bp, Homo sapiens
cttggactgagtcctgcaggacacagctgaagagtctgctgcttctggagcaaagggagatctggctgctagtgaccgatgtc

SEQ ID NO: 54067 - DNA, 75 bp, Homo sapiens
ggcccagaggctggagctgcgagagtgataaaaagttgattgcagaaggacctggggaaacagtattggttgcag

SEQ ID NO: 54068 - DNA, 75 bp, Homo sapiens
tggatgccctgcaccgggtccggcaggctttaatgactgatgaaacaatatccaatgtgccaatccttatcttgg

SEQ ID NO: 54069 - DNA, 100 bp, Homo sapiens
cgtgaaccactgcacccggcgaggaattccatatttaaatcaggaagaagaaagacagttaagagagcagtatgatgaaaaacgttcacaggcgaatggt

SEQ ID NO: 54070 - DNA, 75 bp, Homo sapiens
taattacacctcctcctccaccaccctcaccagaaaggcccactgcagtagcagaatcaccctactgctctgtgg

SEQ ID NO: 54071 - DNA, 100 bp, Homo sapiens
gaccgagctgcggctgctgtggctatcatggtgaacttacttcagattgtgcgggaccactgggttcatgttcttgtccctatgggatttgtcattggat

SEQ ID NO: 54072 - DNA, 82 bp, Homo sapiens
atacaaatcatggagccgctggggtcccttttgcctcagatactattttgaagttgcatccaagaattgatgcccggagagc

SEQ ID NO: 54073 - DNA, 88 bp, Homo sapiens
gaggacctggtccagcttcccttcctcaaataaggaaattgacacctggcgtggtttctaccatgaatgaaatgaagagttattctca

SEQ ID NO: 54074 - DNA, 82 bp, Homo sapiens
ggatttcgacagtaacccgtttgccgacccggatctcaacaatcccttcaagtgtcaacagcatctccaccctggagcctgt

SEQ ID NO: 54075 - DNA, 82 bp, Homo sapiens
tgagcgcgccggaccaagcgggcccagaagcgggttttaaaatcaaagatgggaaaatcggagaaaattgcccttccccatg

SEQ ID NO: 54076 - DNA, 100 bp, Homo sapiens
aggctgttcttcagtggaccaagcatgatgattcttcagataacttctgtgaagctgatggctgccaaacgagggattctttcatctggtcggggcagag

SEQ ID NO: 54077 - DNA, 100 bp, Homo sapiens
gggggactggcctggcgtgcactccgcacctcggggacattattgcgcgtggaacggctgcttttggaaggaagatgttaccgagtacttcagtgaattc

SEQ ID NO: 54078 - DNA, 100 bp, Homo sapiens
ctacgaacccctggacgggagagtctgccggcggagaatataaggacttaaagagagatctacttcagagccagcagtcccgccagaagaggctgagcca

SEQ ID NO: 54079 - DNA, 89 bp, Homo sapiens
tggctgccctgagctggcagtacctgaccactctctcccaggtggtccgtactgagaagaacagtttgaacaaccgattcttaccctgg

SEQ ID NO: 54080 - DNA, 100 bp, Homo sapiens
cgactgtgctcgctgctcagcgccgcacccggaagatgaggctcgccgtgggagccctgctggtctgcgccgtcctggatccctttcagctccctgcaaa

SEQ ID NO: 54081 - DNA, 80 bp, Homo sapiens
ccaaagcctgaacaggcagggccagacccagactcggtgaaatacctggagtgctcagctctcacccagagaggcctgaa

SEQ ID NO: 54082 - DNA, 101 bp, Homo sapiens
gggatggaaccgcacagagccgcgggccctttgcagctgcgattttcgccctacgttttcaacggagggggaaaggccatacaaatgtcagacctgcgagc

SEQ ID NO: 54083 - DNA, 82 bp, Homo sapiens
accttcgcaagaagcaccagttcaagtggccctcagggcatccccgttttcggttttggcacaaataccagtgggaatagta

SEQ ID NO: 54084 - DNA, 100 bp, Homo sapiens
cttcaaccctgagggcaaagccttgctgaagaaaaccaagaactctgaggagtttgctgcagccatgtccagtgagggccccaaggctgttgcagctcct

SEQ ID NO: 54085 - DNA, 74 bp, Homo sapiens
acccaccaacaacaccacaataatccacagccaagatctcacattcttgaaggtggcattgaagagcactaaga

SEQ ID NO: 54086 - DNA, 97 bp, Homo sapiens
gtttggttgaagttggagaagtatccaatagggatattgtagaaactgtctttaacctggagttcattttgaatcaggattggaatgaccccaaatc

SEQ ID NO: 54087 - DNA, 74 bp, Homo sapiens
gggttcttggtctcactgacttcaagaatgaagccgcggaccctcgcagcccggaggctgtttgatgtcctgca

SEQ ID NO: 54088 - DNA, 98 bp, Homo sapiens
gtggtccagcctgcgcggcgggaagcggcggcggcggctccagcgtcctaagagcccggaagctgaagaaacttggtaatctgaaactacaggaggaa

SEQ ID NO: 54089 - DNA, 75 bp, Homo sapiens
gaaacttccacgccttctaccaagccctgctgctcctgggggccgccgccctggcctgcctcgccctggacctcc

SEQ ID NO: 54090 - DNA, 74 bp, Homo sapiens
aggacttccgcaggacccgcaacagcgcagagggtaaatacggcatcatctgcatggaggatttgattcatgag

SEQ ID NO: 54091 - DNA, 100 bp, Homo sapiens
tctcagctacttgggactcctctctcaagagaagctgcaagagcaacatctttcctcaccccaaggtatttcaggacagccaggagggggcgcacatccg

SEQ ID NO: 54092 - DNA, 101 bp, Homo sapiens
gcaatgtctactacagcaaaatcatcagtgagttctgcctcagtcagctcccaagtgaggacgcagtcacctttgaagactccggaggctgagttgctgtg

SEQ ID NO: 54093 - DNA, 88 bp, Homo sapiens
gtggatttctaccatttgatgatgataatgtaatggctttatacaagaagattatgggaatggaagaaatccgaagacaggttgggca

SEQ ID NO: 54094 - DNA, 50 bp, Homo sapiens
ttgacctttttgaagcctttgcaaaaagtgatgtgcagctgatcaagact

SEQ ID NO: 54095 - DNA, 75 bp, Homo sapiens
aagaatcgcatctcttgggtcggagaagccgtcaagggcttcgtgctgtgtcactccatcgctgggggtacgggt

SEQ ID NO: 54096 - DNA, 75 bp, Homo sapiens
acacagcaagacgttgagttacatgttcagaaggtgaatgaaaactttgccattgatttgatagcagagcagccc

SEQ ID NO: 54097 - DNA, 88 bp, Homo sapiens
cagccccacgcgcggggccatgcagttaattggccttggtcctcacagctccaaaaagaaacaggatctcgataagctctatgagctg

SEQ ID NO: 54098 - DNA, 87 bp, Homo sapiens
taaaaaacccagctgaagaccactttagaaactcaattaagtctatgaaaattatcctacttatgatttaactgaaagaaaagattt

SEQ ID NO: 54099 - DNA, 50 bp, Homo sapiens
ctgtgtttcatcaccgccgaaaggaagaagctgtttgttttgattctgag

SEQ ID NO: 54100 - DNA, 82 bp, Homo sapiens
ctcgtcagcactgactttcagctatggaatcgggaactgtacctggggaatgaattgtaggtttatacaccctggagtgaac

SEQ ID NO: 54101 - DNA, 75 bp, Homo sapiens
cgccgaggaggctttcctgctggtggcaaccgcctacgagacactcaaggttggctcaaaaacagaagttgctga

SEQ ID NO: 54102 - DNA, 74 bp, Homo sapiens
tcgcctttgccgatccgccgcccgtccacacccgccgccagcctgcctgctccgcttcagcggactctcgctgg

SEQ ID NO: 54103 - DNA, 75 bp, Homo sapiens
gagaactcaaggtcttcatagaccagaaccttagtcccgggaaaggacttcctccgtcaggcagctggcaggacc

SEQ ID NO: 54104 - DNA, 83 bp, Homo sapiens
ccggccgcggggccaggaagtcggagtttgagccccggaggcagagcggctgccatgcacttttgggagtgtggaagtccata

SEQ ID NO: 54105 - DNA, 82 bp, Homo sapiens
ggcccgcccaccagttcgcccgtccccctgccccgttcacaatgttatggaaacaaaggacatgctttacatcgtcactgaa

SEQ ID NO: 54106 - DNA, 100 bp, Homo sapiens
ctggacccggacccaaagtgccatgtctttaatgtgatgggcgacagatgcgaaagaaacgagttccagtgccaagacgggaaatgcatctcctacaagt

SEQ ID NO: 54107 - DNA, 96 bp, Homo sapiens
agtctgtgtccttccagctgcagatacggaggcgctccaggcccctgcctgtcacgagaacatggtgaaggttggcggctacatccttggggagtt

SEQ ID NO: 54108 - DNA, 98 bp, Homo sapiens
cgccgcccccacccccgccacctcccagactcctctccgccccagctgaaccttagccggccgatcgaggagcagggccccctggacgtcatcatcca

SEQ ID NO: 54109 - DNA, 75 bp, Homo sapiens
aatgaatttggaatcttcccttgaagagactttagttgctggtcttacatcaaataagcccacagacaaactccg

SEQ ID NO: 54110 - DNA, 99 bp, Homo sapiens
cagaaggtgtatgagatccaggacatctatgagaacagcaaagtggaagatgctttctacaaaggtgaactcaggctgaatgaggaaaaattatggaag

SEQ ID NO: 54111 - DNA, 82 bp, Homo sapiens
acgagttgaatcattgttcaaataaggagggcatcctggctgtttcacccgtggacttgaacttgccattggactgagctct

SEQ ID NO: 54112 - DNA, 74 bp, Homo sapiens
acgctgccagtttgcacagcagcagattagtgatgatgaaccaggttatgaccttgatttattttgcataccta

SEQ ID NO: 54113 - DNA, 90 bp, Homo sapiens
caccgccttgggctcccgcggccactcgggtacgacaccgagcttctggtcaggtgatggctcttaagatgaacacattgagcagtaacc

SEQ ID NO: 54114 - DNA, 100 bp, Homo sapiens
atgagctaatatcttttcctctggctgaaggggatgctaagggagataaagcaaaggtgaaggacgaagtaagtcattctctcttcaagggtcaaagcct

SEQ ID NO: 54115 - DNA, 100 bp, Homo sapiens
ttacaaactggccaagaagggccttactccttcacagatcgatttctgagagagcagacaccatcttatttctgttgaattgtatttagtaactcaaaag

SEQ ID NO: 54116 - DNA, 59 bp, Homo sapiens
tggaaccttgtgttcatccagtataacagcagcaaagtggggcaccaaggccctgtgct

SEQ ID NO: 54117 - DNA, 100 bp, Homo sapiens
ctggggctcttatgctcagaagaagggcagtgccattgataggctgcaagctttcttcctggtggcagatgacatcatggattcatcccttacccgccgg

SEQ ID NO: 54118 - DNA, 90 bp, Homo sapiens
attctttttattttctttccaagtacatgaaaaatccattctcttggtgtcactgcattaagaagaaatgcactcaccatgagcaccaac

SEQ ID NO: 54119 - DNA, 75 bp, Homo sapiens
tggaccaaggtgcacgagctcaaggagcacaacgggcaggtgacaggccctggagggacaggaaagccagaaatg

SEQ ID NO: 54120 - DNA, 97 bp, Homo sapiens
cgcacgcggatttggctggcgtcccgcacaaggcgcctctgtcgaagagccttctgctggtccccagtgccctctccctcctgctcgccctcctcct

SEQ ID NO: 54121 - DNA, 51 bp, Homo sapiens
gtggtttcttctgatttctgccattggggtgagaattatgaagatgatgac

SEQ ID NO: 54122 - DNA, 51 bp, Homo sapiens
cctttatatagaagggagagtaggatttcaaatatgcgtgcattagagaat

SEQ ID NO: 54123 - DNA, 75 bp, Homo sapiens
aagtactggaatcatacttcctttcaggctcacctccacctccagtaaaagtttcttctgaacctcccacacaag

SEQ ID NO: 54124 - DNA, 71 bp, Homo sapiens
aaataaggctaaacttgcaatatggatctttctcctggcctgccctccatgtcggggagctatcgtcgtct

SEQ ID NO: 54125 - DNA, 100 bp, Homo sapiens
atgttttttgaccgctttctccagtggaagtggttggaaagtaagcactatcctttgtactccctcaacgtggcctccatgtggttgaagctagggagac

SEQ ID NO: 54126 - DNA, 75 bp, Homo sapiens
ggtcaatttgttgtatagctgaggggatgtacgtatttttgcatgcagtgaaaggaacacctttcgaaactcctg

SEQ ID NO: 54127 - DNA, 75 bp, Homo sapiens
gatctttcagagaaagcgcctgttcaactttgtcctctctcaggcttaccactcttctctcatggatcctgatac

SEQ ID NO: 54128 - DNA, 98 bp, Homo sapiens
ctgcagcagtcagcccaaaggaagataacaacgaacttgatgcaagtgataggtttgccaaggtcagacctctcatcatccggatgaactgcaatttc

SEQ ID NO: 54129 - DNA, 88 bp, Homo sapiens
tttcagttagccttgattgactgtaatccatgtactttgtccaatgctgaaagttttgcggctagttggctattcaagaaacctcgcc

SEQ ID NO: 54130 - DNA, 82 bp, Homo sapiens
cctcccaagtagttggaattacagctacgtacaagccagagcttccaggaaagcagtccttcctctacaacgaggacaagaa

SEQ ID NO: 54131 - DNA, 83 bp, Homo sapiens
ccgccggcgtcgccgccatggacctaggcagcaagaattattgccaagttagcagcttggggaaaagaactgatggaaggcag

SEQ ID NO: 54132 - DNA, 90 bp, Homo sapiens
tgactaatgtacagatgttaaacaaagaaccggaagacatgatcacagtccttcagccaaaccaaggacagaatgcacctgttcataggc

SEQ ID NO: 54133 - DNA, 75 bp, Homo sapiens
caaaagaccatctttcagcagttgcctcaattaaggccttggaaccagatctgttacctaaagcaataaaaaatg

SEQ ID NO: 54134 - DNA, 100 bp, Homo sapiens
ctattttacactggctggaaatcaacttctgtttcaaaaaggaaagtctgactcagcccaggagagtgttattactcgagatattcatcgtacatttccc

SEQ ID NO: 54135 - DNA, 117 bp, Homo sapiens
tgcagccaccctcgctccctctgctcttcctcccttcgctcgcaccatgggccaattcctgtccccccagcagcatggcatcgtgtgctgaaccctctgagccctctgccccactgc

SEQ ID NO: 54136 - DNA, 83 bp, Homo sapiens
cgggactggctagttaaacaaagaggctggtttggtgccctggttgtcagatgttggaaagcagtaggacggaacatactctt

SEQ ID NO: 54137 - DNA, 100 bp, Homo sapiens
gggatttggaaatgtcatccgatggcacaatcaggattctttctactaatccagatacttgttgaagtgctgactagtttcttggggaaagatgtcaagg

SEQ ID NO: 54138 - DNA, 148 bp, Homo sapiens
cagattgcaaagagttatggatattctggtggggagatgaacccaacctagtgggtgtaatacatcatgaactgcaggggtgaggatccacgacctccgcagtggtaacatcgccctgtcgctctccgcccatcagctcagggtctct

SEQ ID NO: 54139 - DNA, 100 bp, Homo sapiens
caagatgaaaactacttcaactaaaagccaaccacttgaacaagaacacagatatgtagaactcttcttgaattctacagcaggagcaagcggtggtgct

SEQ ID NO: 54140 - DNA, 75 bp, Homo sapiens
caggcggatctcagaaggccagttcaaagcaattttccagattattcaaagtatcaggatgggcatgtgaagtga

SEQ ID NO: 54141 - DNA, 82 bp, Homo sapiens
agctttcttcttggacacctaatacccagggtcctccagcggagcgtgctttggacaccatgaattttgatgttataaaggg

SEQ ID NO: 54142 - DNA, 100 bp, Homo sapiens
tttctctgctgcaccgacctcgacgtcttgcctgtgtcccacttgttcgcggcctataggttgtgaccgagattcccgacgagagagactgaggggaaga

SEQ ID NO: 54143 - DNA, 97 bp, Homo sapiens
tcctcaacgacgcggacatggtcatgagctttgtgaacctgggaaggatcagaatgttctctctccagtcaactgctggaatctcctcttaaaccag

SEQ ID NO: 54144 - DNA, 75 bp, Homo sapiens
tggactctaatttcacggacactgaaagcagagaccatggagcttcttggctgaactcacgggaatcaaatggcg

SEQ ID NO: 54145 - DNA, 51 bp, Homo sapiens
cattgtgcaggcttgttgaacttctcaagatgctgcacttaaaaggatgct

SEQ ID NO: 54146 - DNA, 100 bp, Homo sapiens
aaacatgacgtctccagccaaattcaaaaaggataaggagatcatagcagagtacgatactcaggtcaaaggatcagtgaatgcttgtgaaaagacctca

SEQ ID NO: 54147 - DNA, 100 bp, Homo sapiens
ccgtggaggcagaggtggcatggggtttggtgcacctcgatttggaggaagtagggcagggcccttatctggaaagaagtttggaaaccctggggagaaa

SEQ ID NO: 54148 - DNA, 50 bp, Homo sapiens
cagcgaggcctggcggctagtggaggctgcaaggtgtgactgttgtaaat

SEQ ID NO: 54149 - DNA, 50 bp, Homo sapiens
ctcccaagtagctgggactgcagtgcacacatggtcttctgaagaagcca

SEQ ID NO: 54150 - DNA, 90 bp, Homo sapiens
gaggaaagcgggaagactcatcggagcgtgtggatttgagccgccgcattttttaaccctagatctcgggattgaggaatgatttgaaag

SEQ ID NO: 54151 - DNA, 96 bp, Homo sapiens
agggacctcgaatgtgggaccccagcccctctccagctcgaaatcaaaccaatagagccatggcgactccctctgctgccttcgaggcccttatga

SEQ ID NO: 54152 - DNA, 100 bp, Homo sapiens
gaacctttgctgtctatggatctgctctaaaccttatagcctgcttatgggggaaggtaaaaagatggcctatcagaaggtccatgcagatcaaagagct

SEQ ID NO: 54153 - DNA, 100 bp, Homo sapiens
ttcaccgtcaacgacgatttcagaagttattccgatggtgccagtcagcagtttttgaactccatcaaaaaggggaaaagagcactggttgccattggta

SEQ ID NO: 54154 - DNA, 50 bp, Homo sapiens
cagcatcttcacacactactagatcacaggttggagctgaaggagtgccc

SEQ ID NO: 54155 - DNA, 96 bp, Homo sapiens
ggagcaccagggcatcttcaccttcctctgcgaggtggggaagctgaggcaggaagccctttagtcacttgccgaaggccacgctgttacccatgg

SEQ ID NO: 54156 - DNA, 100 bp, Homo sapiens
ttggagaatgtgggctcatatccttttcagactacattttcctcacaactgttctttccacggatgacggaggctttgagagtggcgcgtacaacaacag

SEQ ID NO: 54157 - DNA, 96 bp, Homo sapiens
ctgactgcacttcttttttgagaaaggaaggaatatatcctgactgattaaggaacccagccagccggcggaatgcaagcagcagtaggaagcgga

SEQ ID NO: 54158 - DNA, 96 bp, Homo sapiens
ttcgcttggtgtcctcctggcctcagcaacctgacaattctgtcgtgtcccggactgttgggaaagatcctgatggctatccgagatgcaggtttt

SEQ ID NO: 54159 - DNA, 98 bp, Homo sapiens
tttgcaccatcttgccatattcaaaaaccttgtgcttaagtgttttgaaagaaccactcgttttgactattattttatcactctttgtgaaacttcac

SEQ ID NO: 54160 - DNA, 75 bp, Homo sapiens
ccaggaccccctagaagcctagaaatgctcaaatcccagccttctatatggacacaagtcatttattcaataccc

SEQ ID NO: 54161 - DNA, 98 bp, Homo sapiens
ctgggatctttgaaatgctaagattcttggataccacagtatcataaaattcctctaaatgcaagtgatagattcgtgtggcctttcaaatgattgtg

SEQ ID NO: 54162 - DNA, 100 bp, Homo sapiens
tctatagccaaggaaggcttcgagaagattagcaaaggtgctaatccagtggaaatcaggagaggggatggagaagtttatgtttgggatgtgaactcaa

SEQ ID NO: 54163 - DNA, 121 bp, Homo sapiens
cgcagcgatgatcttccccagcagcagtggcaaccccgggggcagcagcaactgccggacgccctatcgcaagcagaagagaagctgaatttggacgacagccagtgggaggacatccacg

SEQ ID NO: 54164 - DNA, 98 bp, Homo sapiens
caattcgggaacaaatactactacatcccgcagtacaagaactggagaggagtggaaacaaaatgtcagtcagtgtgcatgagaaccgcaagtccagg

SEQ ID NO: 54165 - DNA, 82 bp, Homo sapiens
cctttacttttacctacgttggcggccccagaaggtttgccagaacccaataaagatgccatcttccaaggcctgacgcagg

SEQ ID NO: 54166 - DNA, 82 bp, Homo sapiens
ttcgccttcgttgagttcgaggacccgcggtactccaaagattcaggtttactcacgtcatccagcagagaatggaaagtca

SEQ ID NO: 54167 - DNA, 100 bp, Homo sapiens
ccgagacgcagatgcccgggccgtggctctagcaggctccactaactggggctacgactctgatgggcaggcgctgagatgcgtctggagagccagaggg

SEQ ID NO: 54168 - DNA, 83 bp, Homo sapiens
tcaagagtataatgtctatggtgaagtcttttgtacagtggttagctgaagaaaaggtgactggtctcatgagccctgaagaa

SEQ ID NO: 54169 - DNA, 82 bp, Homo sapiens
cgtgctgcggacggcgctgcggtacatccaggtcccgcgcggccccgggtgaggcacgcccgcgcgcccgccggcgccatgg

SEQ ID NO: 54170 - DNA, 90 bp, Homo sapiens
acggtccacagctcatcatgatggacttggagctgccgccgccgggactcccgtcccagcaggctgtggaaaatctctgttctcacaaag

SEQ ID NO: 54171 - DNA, 76 bp, Homo sapiens
ctgaaaagtcgcagcgagctggagccgccggagacgctgaccggaaaggagattgagattgacattgaacctacag

SEQ ID NO: 54172 - DNA, 100 bp, Homo sapiens
ccgcgtccgaggctcgcgggcggcgggcccggaaccgcatgcacgagtctctcatgctcttcgactccatctgtaacaacaagttcttcatcgatacctc

SEQ ID NO: 54173 - DNA, 90 bp, Homo sapiens
ccagcagatggcggatgccctgcagtacctgcagaaggtctctggagacatcttcagcagcccgtgtcccagcccacccaggtaactctg

SEQ ID NO: 54174 - DNA, 75 bp, Homo sapiens
cgccaatgtggacggactcactgccctgcaccagctgctgcagaagaatattttgcctgctggaacctgctgtat

SEQ ID NO: 54175 - DNA, 100 bp, Homo sapiens
tcctcggggtctccacaggaaattaccctgactatctccggactcacaccacccggcaagaactgctcactacggctccctgccccagaagtcacacggc

SEQ ID NO: 54176 - DNA, 100 bp, Homo sapiens
gggatcttcgcactatcccaagattcacaatgacatcctttcaagaagtcccattgcagacttccaactttgcccatgtcatctttcaaaatgtggccaa

SEQ ID NO: 54177 - DNA, 75 bp, Homo sapiens
tattccactggattgggaaagaccatggcagatactaatggaccatactaccaaggaccagtccacctgaaccac

SEQ ID NO: 54178 - DNA, 90 bp, Homo sapiens
tacaagaaggagccttccgggtgcccggtgtgtggcaagcccagcagaccgggttatcccagtccgaggtccagcgaaggattttatccc

SEQ ID NO: 54179 - DNA, 98 bp, Homo sapiens
aaacatgtaaaaactgtacttcggacagcgtgagagagaaatttcttcaagaagcctgcacgcacagaggctgggctgcggtccagatgcgtttgctc

SEQ ID NO: 54180 - DNA, 83 bp, Homo sapiens
gccccccgtgccagacaatgcggacctctctgggctggctattaagatcatggaagggaagtggttgctgtgtatgttactgg

SEQ ID NO: 54181 - DNA, 90 bp, Homo sapiens
agcaaataacatcagcaacattgatgaagctggaagaaattaaggagagaacagctacagtgtggcaaaggagcagagaactttgacaag

SEQ ID NO: 54182 - DNA, 83 bp, Homo sapiens
ctgaagctcaagggactgtgtccaccctcaggtctcctccgggctggggctgagcaagccctcggagtgaccgtgggtgacag

SEQ ID NO: 54183 - DNA, 100 bp, Homo sapiens
atttgttaaggattccaagtaactcttatttggctaaaacactgtcttatgaaccattatcttcagcaactgtttccactgggagccttttaagttatga

SEQ ID NO: 54184 - DNA, 97 bp, Homo sapiens
attctgccaattcgttttcaggagcatctccagtgaaaccagcagtgtgtgtagcagcagtgacactgggctctttaccaatgatgaagggcgacaa

SEQ ID NO: 54185 - DNA, 98 bp, Homo sapiens
atccctaacatcagaagagtttgctaagcttgtgggaatgtctgtcctcctagccaaagaaagcattggggacatcatagatcactatcgaaaagaac

SEQ ID NO: 54186 - DNA, 98 bp, Homo sapiens
ttcttatgcttataagagtggaacagatgatcatgacgcagtcctgaggtttaatggggcacccacagccaacttccaacaagatgtgggcacaaaaa

SEQ ID NO: 54187 - DNA, 75 bp, Homo sapiens
gtcggtggaggtataaataactacatgtaaaattaatgcagttcccggcttgcagatgggtcaagggttgtggag

SEQ ID NO: 54188 - DNA, 80 bp, Homo sapiens
tgagcccgtccgtccgccgccaccacccactccggacacagggacccagacatggagctgcgggaagaagcctggtctcc

SEQ ID NO: 54189 - DNA, 82 bp, Homo sapiens
gcaccgggagtcagcagagtgaaggccatcagcatcagcaaagccatcaacacccaggaggcccccgtgaaggagaagcacg

SEQ ID NO: 54190 - DNA, 100 bp, Homo sapiens
tgccctgtggcctcgctcctcggaggggttctccaaaaaatgtggaatcctttgcatctatgctgagacattctcctcttacacagatgggacctgcaaa

SEQ ID NO: 54191 - DNA, 75 bp, Homo sapiens
caagtgcagatagatggccttagcattggggagtcagcaatgtccgttgtgttaaatcagctgctgcccatgatt

SEQ ID NO: 54192 - DNA, 98 bp, Homo sapiens
tccctgtctgggaccttctccctgcctggacccctactattgcaacaagagtaaacatcagtctccaaagataactacatcccttcttcccatcaaca

SEQ ID NO: 54193 - DNA, 101 bp, Homo sapiens
aaaacattgcgctactgtgcaggttgggctgacaagatccagggccgtacaataccaattggtatcatgaactgatcactaaatatgggaagttggagcct

SEQ ID NO: 54194 - DNA, 101 bp, Homo sapiens
cagggttcctggggcatcgacgatctccatatttcattgcaagataagtttataccatggatagcacaaaggagaagtgtgacagttacaaagatgatctt

SEQ ID NO: 54195 - DNA, 82 bp, Homo sapiens
gggtggcttacagacgctgccagcatcgccgccgccagcagttggaattgatcacaccttttcagttgtacttcaatcctga

SEQ ID NO: 54196 - DNA, 100 bp, Homo sapiens
cccggaacctgcaggcccaggaaaggaggggtgccagtccagccctagccaccaggaacctggaaccctgcagagcgggaacagcttccacgtgttcgac

SEQ ID NO: 54197 - DNA, 100 bp, Homo sapiens
ctccggggacccttccgtatctgcctaggcattttgctgtctcctcctaatacggcatcacagttgataggcatggatttatttactttgtggatgggac

SEQ ID NO: 54198 - DNA, 95 bp, Homo sapiens
ggacgatagagatcagtgggctttgactgcccagcatgcagtctccattcttagatgatggtggtgctaccccagtacaggatgaacgggattca

SEQ ID NO: 54199 - DNA, 100 bp, Homo sapiens
gggaggtgaaggaccggatcctggagaacatctcgctgtcggtgaagaaggcatgtactggcattgaaaacattgacgaagctattacattgcttgaaca

SEQ ID NO: 54200 - DNA, 50 bp, Homo sapiens
atcggagacatcctgctgttcgggctttcttagaaatggcttctgaggaa

SEQ ID NO: 54201 - DNA, 89 bp, Homo sapiens
cttagctgtgctcgcgctactctctctttctggcctggaggctatccagcgtctctaattaacagaagatggcaaagcccagccacagc

SEQ ID NO: 54202 - DNA, 96 bp, Homo sapiens
ttcaagactgtctttgctgagcacatcagtgatgaatgcaagaggcgtttctataagaattggtagccgggctgagaggccctgtgctgcgcctgc

SEQ ID NO: 54203 - DNA, 101 bp, Homo sapiens
actccccggcggcagcacgaaagtaccatgagttcaaagaaggacgcagagccagccacacagccccacaggtcctctttagccacagggaacctcctctg

SEQ ID NO: 54204 - DNA, 50 bp, Homo sapiens
tgaggactcagaccagtctctgcaagaccacctgtctttaccagtttcca

SEQ ID NO: 54205 - DNA, 90 bp, Homo sapiens
ggttcttggtctcactgacttcaagaatgaagctgcggaccctcgcgaccctgaaggaagattgggaatctgaaaaagatttatgtttag

SEQ ID NO: 54206 - DNA, 74 bp, Homo sapiens
gaatttttaagtaaaaattttcagaagcacatgtattataacaggaatactcccccagttgcaagaggcgcagg

SEQ ID NO: 54207 - DNA, 140 bp, Homo sapiens
gtggctacatcggaagagtcttcggcatcgggcgacagcaggtcacagtggacgaggtgttggcggaaggtgttctttgacctaatgagagaaatcagaacaaagaagatgtcagaaaacaaagacaagaatggcaagaa

SEQ ID NO: 54208 - DNA, 75 bp, Homo sapiens
gcgagaggctgcggctgtaccaggtggagcagttctggaggttttatagccacatggtacgtcctggggacctga

SEQ ID NO: 54209 - DNA, 101 bp, Homo sapiens
tcccagcactttgggaggcagaggcaggaggagcagcagcgcctggccgagctctccaagtccaacaagcagaacctcttccttggctccctcaccagccg

SEQ ID NO: 54210 - DNA, 75 bp, Homo sapiens
aagctgagcttgccgcacaaaaagctagagagatggtcatccagactcagagctctctctacagagaggaaattc

SEQ ID NO: 54211 - DNA, 100 bp, Homo sapiens
tgggagcttcaggctcgctccgtgcggaagagaagctgaatttggacgacagccagtgggaggacatccacgttgtcaccggagcactgaagatgttttt

SEQ ID NO: 54212 - DNA, 103 bp, Homo sapiens
cttacctgaagtaactcggatggccagaaagtttactcatatttcagctctgttacagggcttccgttacaagatgaggtctgtgtatgctcacttccccatc

SEQ ID NO: 54213 - DNA, 80 bp, Homo sapiens
aatcaggatggaggccgtggcgacggcgacggcggcgaaggaacccgataagggtgtgctgatgtatcgggactaccccc

SEQ ID NO: 54214 - DNA, 98 bp, Homo sapiens
caaggatattcaggccgcctccggcgtcgcagtgtcttgggccgctggaaggaggaagagcaagcaggccctgagggactataagaaggttcagatcc

SEQ ID NO: 54215 - DNA, 73 bp, Homo sapiens
tgacatggaggatgatttcatgtgcgatgatgaggaggactacgacctgtgaaggcctcccccgtcgccgcgc

SEQ ID NO: 54216 - DNA, 101 bp, Homo sapiens
ggtgtgcctcaccatgcgcaggccagcaccactgccggaactgtggccacatcttctgcaacacctgctccagcaacgagctggccctgccctcctacccc

SEQ ID NO: 54217 - DNA, 100 bp, Homo sapiens
acctccagagcaggagaccttctacgagcagcccccactgttttctggatatgccgcagaaggatccgtgccagaagcaagcctgtgagatacagaaatg

SEQ ID NO: 54218 - DNA, 94 bp, Homo sapiens
gagaacctcaccatgccgggcctcaggttcgacaacatccagatcacagattctgctggccatattctctactccaaagaggatgcaaccaagg

SEQ ID NO: 54219 - DNA, 100 bp, Homo sapiens
aaaaatactgcactaaagaccattcagaaggcagctctcctttctccagcttgccaattctgtaactccttgggatatcttgctgagcttaattgcagct

SEQ ID NO: 54220 - DNA, 75 bp, Homo sapiens
acctgagcaagctgagccagagcccacagaagcatggaagtgatggtggcctgcgttttggagaaatggaacgag

SEQ ID NO: 54221 - DNA, 75 bp, Homo sapiens
tgacaatacaggaaatgtttttctggagagtcttggcttctgggaggaagtcagagggattatctcaggatcaga

SEQ ID NO: 54222 - DNA, 75 bp, Homo sapiens
tcctggctggccaagttactggagccgatctagagaccgttggatggcagcttaaccttcagatggctcactctg

SEQ ID NO: 54223 - DNA, 83 bp, Homo sapiens
tcttaatgagacaactggtcccaaggcaaatgtggagttcatggatgatagagattccttctgccatcagatgtctttctgct

SEQ ID NO: 54224 - DNA, 75 bp, Homo sapiens
gtccttcatcctcaacgccctcacctgaatcaagatttatttgctacatcacaaagtaaagaatttgatcctctt

SEQ ID NO: 54225 - DNA, 100 bp, Homo sapiens
tgcaacgtcagctatcccttcttccgggccaaggccaaggcaaccccagctttccagacagtcacttttcccagtggtcatacctggtctggaagattcc

SEQ ID NO: 54226 - DNA, 100 bp, Homo sapiens
atgggccagtgcggcatcacctcctccaagaccgtgctggtctttctcaacctcatcttctggattgatcattcttagaagagctgctgtaacacatagg

SEQ ID NO: 54227 - DNA, 88 bp, Homo sapiens
atccatcatcttcagtggaagaccatattgaatatcatgggcttcgtgggacacatatgcaacatgcctatgatttttacaagcctga

SEQ ID NO: 54228 - DNA, 100 bp, Homo sapiens
ttcttgccccagaaagccccagacggaaagagctacttgctgagtagacaacaccaagtttacgatggactgcgtagcgcctacgatccacgtgtacgag

SEQ ID NO: 54229 - DNA, 80 bp, Homo sapiens
ctttccgggacaacatggcgccgtccacgccgctcttgacaggtaaaagtgcagttttaaagtgtctcctggatattcac

SEQ ID NO: 54230 - DNA, 100 bp, Homo sapiens
tactgcgcccgggactctgctctcaaggcccagagtgcactgcacgagcagaagaccctgccaggggacagagcgggatgccaccagcttgtccaaaggg

SEQ ID NO: 54231 - DNA, 75 bp, Homo sapiens
cccagagctattgccttagatccttcaagtgggtgctagaaagcttcaagatcatggattatagccttctgttgg

SEQ ID NO: 54232 - DNA, 96 bp, Homo sapiens
tctcggcctctgccggagaaacaggttcagcagactgtacaggatctttttggcagagccccaagtaaagctgtcaatcctgatgaggctgtggcc

SEQ ID NO: 54233 - DNA, 100 bp, Homo sapiens
tgcctgttgctgctagagaagcctctatttatactgacggtactcacccttcttgcgatgatgtgagatgataaaatgcctacatgatgagatgaagtga

SEQ ID NO: 54234 - DNA, 75 bp, Homo sapiens
agaattctgtgttgctgttggagcagatttcttctctgtgtagcaagtttcagctcctggcatcagctctattca

SEQ ID NO: 54235 - DNA, 90 bp, Homo sapiens
agaaccgctcgctgcagtccgagaacgccgcgctgcgcatctccaacagcgacctgagcggtcatattgaacattccagatacctatcat

SEQ ID NO: 54236 - DNA, 100 bp, Homo sapiens
tggacccccaggctgccatcccggtgcaatatcagctacttagaagaatggcttaaagataagaacttgcagaacagcttagcaaaggaaactttggagc

SEQ ID NO: 54237 - DNA, 101 bp, Homo sapiens
tggaagttataacgctacacgaagaactaagaatattattagcacaagagcaccatactttgaggggacgattccaaggctgcttagccccagacatcagg

SEQ ID NO: 54238 - DNA, 100 bp, Homo sapiens
catggtttctccctatgttacgtggatgtttgtaacactgtatgaaaacaagggagaggctgacttcgtggaatctttgctgcagctcttcaggtccatc

SEQ ID NO: 54239 - DNA, 100 bp, Homo sapiens
gagagccatggacattggagagagtggtattatggtgtaaacaacgattctttggaggtgacagagttagtccttgataattgcctgtgtgtcaatgggg

SEQ ID NO: 54240 - DNA, 75 bp, Homo sapiens
agctctttcagcccaccgtcagcgggatcatccagcacataggagtccaatgtgctgattgctgctaacagtcag

SEQ ID NO: 54241 - DNA, 101 bp, Homo sapiens
tccgacacgccggggcgcccgcgcgcggggaccccacgggatcttagcaaagcaatgtctcaagatggtgcttctcagttccaagaagtcattcggcaaga

SEQ ID NO: 54242 - DNA, 100 bp, Homo sapiens
caagaatttggctcacccattccccctgcaagcctccagcgtcgcgctgcagtattgaagtatgagaacaatgttatgaatatcaggcaattcaactgtt

SEQ ID NO: 54243 - DNA, 82 bp, Homo sapiens
aaggaactgatagcttatggttctccattgtgatgaaagcacatggtacaggagctcgaggccatgagcagatataccagcc

SEQ ID NO: 54244 - DNA, 117 bp, Homo sapiens
ggctcctgtcccgctggccctctgtctgcctgtgtccctgaccatggctccctgcagtaccctttaacgcaacatggccaacgccctggccagcgccacttgcgagcgctgcaaggg

SEQ ID NO: 54245 - DNA, 74 bp, Homo sapiens
caacacaccagcccagacagctgcaagtcaccatggacgctgaagatgaagatctccttcaacgacaaaagcct

SEQ ID NO: 54246 - DNA, 100 bp, Homo sapiens
attgtcagatttcgctttgatgaatcaggtcccgaaagtgctaaaaaggttggaagctttcttagaatctatagccttcataccaaacttcaatcaatga

SEQ ID NO: 54247 - DNA, 51 bp, Homo sapiens
aatatctcatggagtgtattattcagatggagtctcccaggcgggaatgca

SEQ ID NO: 54248 - DNA, 80 bp, Homo sapiens
cgcctcccgccgcgcccgggatgtattcgtccccgctctgcctcacccaggcgagcccacaccttaaccgtgctcttcat

SEQ ID NO: 54249 - DNA, 98 bp, Homo sapiens
gggtcggggccggctgaccaggaacctgggcgagcagcggcgggggcccgaggggctcttgcagccaatgccggaacaggatttgctgttgctgagcc

SEQ ID NO: 54250 - DNA, 75 bp, Homo sapiens
gccttgttccagcagggcctgatccagggattaaagcctgtggtttccacagaagcaccacctatcatatttgcc

SEQ ID NO: 54251 - DNA, 100 bp, Homo sapiens
gagctgagtggttgtgtggtcgcgtctcggaaaccggtagcgcttgcagcatggtgatggcttggacaacagtgtagcttcccccagcacaggtgacgat

SEQ ID NO: 54252 - DNA, 81 bp, Homo sapiens
cgtgatgtagttcatcttgatttgaagtggtctggaactgaaagtgatgcgtatttctgagttatgcctgtatttaagaag

SEQ ID NO: 54253 - DNA, 74 bp, Homo sapiens
ttcaatgcagacaagacggatgtgatgctggtgtgggccatgtttgaggattgccccagcattcagttctatga

SEQ ID NO: 54254 - DNA, 85 bp, Homo sapiens
tgatgagaccttaaacttcatcgcacctaataaatatgagacttgcacacctacccctgtggagcgtgcaccctataagggagaa

SEQ ID NO: 54255 - DNA, 50 bp, Homo sapiens
taaaacaggaaatcagtttgctccaggcaaggatatcctgaaggatacta

SEQ ID NO: 54256 - DNA, 83 bp, Homo sapiens
gcggtgctgctggtcacggccaacgtgggctcgctcttcgacgacatggccaccatgtctgggagatggaagcgaaaactgac

SEQ ID NO: 54257 - DNA, 126 bp, Homo sapiens
cgccaagagcgacgccgccgtgtgcccaacggtcggtgtccccggctgaggcagcgcggccgcagcagccctttgcctgacctggtaccccagctggggacactctaccagttaatggaaagcaga

SEQ ID NO: 54258 - DNA, 50 bp, Homo sapiens
cctggaccaggttgagctgcgcgcaggctttttgctgctgcagcccattg

SEQ ID NO: 54259 - DNA, 100 bp, Homo sapiens
aagatctataccatctcttgttgatgaacatcgatatattgaactcttcttgaattctactcctggaggcggctctggcatgggaggttctggaatggga

SEQ ID NO: 54260 - DNA, 74 bp, Homo sapiens
gttgatttcggatcctttgcagcagtgcttcaaaaaagatgatccaaaattaacgggacaggctcttattccag

SEQ ID NO: 54261 - DNA, 95 bp, Homo sapiens
aatgctaaaggagagcaaccagtctgctgtccagaaattggaaacaaacacgacggagtgtggcgatgagcagatcctgcctcccacagtcaccc

SEQ ID NO: 54262 - DNA, 100 bp, Homo sapiens
agcccgagaaaccgcagcactacacgacatggttttaaactttaaaatgaaaatgtgaaactaggaatgttgctgtgagaccccttggacaaacagattt

SEQ ID NO: 54263 - DNA, 97 bp, Homo sapiens
gcgattatccatcagcatctcggccgtcgagaaatgacagatgtgatcattgagaccatgaagtccaacccagggtcaactgctatgatgtgtttgg

SEQ ID NO: 54264 - DNA, 101 bp, Homo sapiens
gctgtggcaaccgaaatgagactccctcagatccagtgataattgacagagatgcagaggatgctatttatggaagaaatggttatgattatggccagtgt

SEQ ID NO: 54265 - DNA, 75 bp, Homo sapiens
tttgtagcgtggtgcttctgttgctcacaggttggatggagtactgctcgtgattattacacgtttttatggtcc

SEQ ID NO: 54266 - DNA, 75 bp, Homo sapiens
agcataggagaagctcctgctccagacatgaagatcgaaagccttcagagtgaatattacttcagtgtagaaaat

SEQ ID NO: 54267 - DNA, 80 bp, Homo sapiens
agcctactatctgtctggagaagagctcctggactgttttgtgatcccagtcgtgattttgctctcctggttcttcctgc

SEQ ID NO: 54268 - DNA, 100 bp, Homo sapiens
agccgcggagcctccagacggccgggaagaagtccctgacctacttccaccgtgaccccagggctgccttgcaggaggccaccttcgacccgcaggaagt

SEQ ID NO: 54269 - DNA, 100 bp, Homo sapiens
ccatcggacatggtgtttcttaggacttcagaaaaagcaggttcgatacaagaggctgttttcctagcgtggcttgctgcctttggtaagaacatgtcgt

SEQ ID NO: 54270 - DNA, 76 bp, Homo sapiens
aaagaagtgaagctgctgctactcgacttaattcagtgcacaaatgagatgaatgtgaacatcccacagttggcag

SEQ ID NO: 54271 - DNA, 90 bp, Homo sapiens
gcaggaatcccaatttgcctccacttagtgagcggaagaatggaatactcccccagttgcaagaggcgcaggaccgtggaagacttcaac

SEQ ID NO: 54272 - DNA, 80 bp, Homo sapiens
atctctcttccgaggttctcacagagttcagtgtgccacatttatgttcacgatctcatttaattcttgccacaacccta

SEQ ID NO: 54273 - DNA, 75 bp, Homo sapiens
caccatgagcgtcccggccttcatcgacatcagtgaagaagatcaggtgcccctcccagggtacatcgaggccta

SEQ ID NO: 54274 - DNA, 75 bp, Homo sapiens
cagaaagtgaacttggcattttagatctaattcaagctgctttgtaccgcctcagtggagactggaatcccttac

SEQ ID NO: 54275 - DNA, 98 bp, Homo sapiens
tgcctcaaatcgtcgtagtgggaacgcagaacaatgagatggtggagctacagagaatacggatgaaggatgaaatccgagaatataagttccgggag

SEQ ID NO: 54276 - DNA, 100 bp, Homo sapiens
ggtggagccaccagcctctccctggtaaggtactcaactgtgtggggtactacataaatcctgaaagactacaataaagtggtgatgtctcgggaaccca

SEQ ID NO: 54277 - DNA, 88 bp, Homo sapiens
agaggaagaaaatatgatgatgagaattgcccagaaatgtaatatcaaccttctccctttaccaggtttcctatcctgggagcaggag

SEQ ID NO: 54278 - DNA, 98 bp, Homo sapiens
aacactgttattgtaaacaaagggtggctttggatcagattattcacgaagctctagaaaggtaatgaaaattatcactaaactcaacaaatatatta

SEQ ID NO: 54279 - DNA, 100 bp, Homo sapiens
ctattagccatggtcaaccccaccgtgttcttcgacattgccgtcgacggcgagcccttgggccgcgtctcctttgagatcctcgttcctagctgcctgc

SEQ ID NO: 54280 - DNA, 51 bp, Homo sapiens
atcattgtccaggcctgcagaggtggaagggatgagaccatgcagcctgcg

SEQ ID NO: 54281 - DNA, 75 bp, Homo sapiens
caactctttgatgatgcatccaggttggagattgcaaccctgaatcgggcagatgcagatctggaggcttgtcga

SEQ ID NO: 54282 - DNA, 71 bp, Homo sapiens
tcccttcgccttcgccctttccacctcgcggcagttcggccaatgaaacctgtaagtgtaatggctggaaa

SEQ ID NO: 54283 - DNA, 50 bp, Homo sapiens
gcggtgacagagtggagccatggctagagtctgtgtggtgtcagtttggt

SEQ ID NO: 54284 - DNA, 98 bp, Homo sapiens
ctcctccggcttcccgcaatgaggagggcccttcacagaaccggggttgggcagatgcagattctgagacaacagattgccaatgaattaaattattc

SEQ ID NO: 54285 - DNA, 100 bp, Homo sapiens
gccgctctgtggagtttgaggagatggacattttggaccagggagccctacagcgtctcttcaaaaaggccctgtgcaccaaggtgccggaactgatcag

SEQ ID NO: 54286 - DNA, 101 bp, Homo sapiens
ttgatgtgcagaccgcccagatcttcttcaccaaaaatgggaagcggatcatgctcagtggtgccggtgccctcacccctcaggacattcaggccctggcc

SEQ ID NO: 54287 - DNA, 89 bp, Homo sapiens
taccacaggatggagactacgagtttaatgccagaggattcaacatgagcatacctatgcctgggcatccagtgaacttctccagtgtc

SEQ ID NO: 54288 - DNA, 75 bp, Homo sapiens
agcatcctgaatcttaacctgggactcaagcacagagggttcggaaaccgcgttgctgcacggggccccaggggc

SEQ ID NO: 54289 - DNA, 75 bp, Homo sapiens
cagaaggttctctggtggaggcgctcttcctggtgtcccgcccagtagacatcaacgagtgtgtgacggacctgc

SEQ ID NO: 54290 - DNA, 75 bp, Homo sapiens
ctaaatttgaggaagaacgcgccagagcaaaatgggacacaggttctgcagcattccagaccttgagcactgaat

SEQ ID NO: 54291 - DNA, 75 bp, Homo sapiens
ttatggtctttgtgcacatttacatcaagcaaaagatacagatattgtggatgaagccatctattacttcaaggc

SEQ ID NO: 54292 - DNA, 100 bp, Homo sapiens
gagccgccggccaggacgcccccgagggtgtagaccgcgcccctggaggtgtgggcaagagcagtttactgttgcgttttgcagacaacactttctcagg

SEQ ID NO: 54293 - DNA, 100 bp, Homo sapiens
ctccaggccagccactcagagctccaggtgcccacccctggcagagccggcctactgaacacctctggtgatgtgtccaatctagatcccaacttctcat

SEQ ID NO: 54294 - DNA, 83 bp, Homo sapiens
cagcgcctcagctctgtggaggagcagcagtagtcggagggtgcaggtttacccaaggtccagcctagcccctaggcaccatg

SEQ ID NO: 54295 - DNA, 100 bp, Homo sapiens
caattaccaaacagaatggacaagcttaataaaataaccgtccccgccagtcagaagttgagacaggtgctctagttcacagctataggggaacaggtgg

SEQ ID NO: 54296 - DNA, 89 bp, Homo sapiens
gggagagagacagcgatcgagagagaccggagaggtggagagtcgtccctcatggaccttgctgacgtcttcacggccccagctcctgc

SEQ ID NO: 54297 - DNA, 76 bp, Homo sapiens
ctggccccaagggctaccgtggacagaagactgaacccggtgcctggctcctaccccacacagagctgccaccctc

SEQ ID NO: 54298 - DNA, 50 bp, Homo sapiens
tttttggggaactggtgtggaggttccaaggagcaggggcctcgacaaag

SEQ ID NO: 54299 - DNA, 101 bp, Homo sapiens
ccccctctccagccggccccccacctccccccggagccaggctggtttcggaaatgcccttacagcagcagagagtaaaacttgtctcggcacagagtcaa

SEQ ID NO: 54300 - DNA, 74 bp, Homo sapiens
aggaaggaacttggttccccctccctcagcttccgccccaaaagatagggccagatttgagtgtgtgaattttt

SEQ ID NO: 54301 - DNA, 100 bp, Homo sapiens
ccgtcagaaaccagtaaaccatctatggagagtggagatggcaacacagctgtatgcaggagctattcttgaagtttgtggatgaaaattgggaaggttc

SEQ ID NO: 54302 - DNA, 98 bp, Homo sapiens
ccgtccatcatagtcaactgcgtggaagagaaggcaatggatttagaagtaccggtattggccaggaacatccccgggaatgctgccgtggtgaagca

SEQ ID NO: 54303 - DNA, 100 bp, Homo sapiens
gaactttaggagagctgtgttctctgcagattctaagaattgaatgatctggcacgggaccctccagcacagtgttcagcaggtcctgttggagatgata

SEQ ID NO: 54304 - DNA, 82 bp, Homo sapiens
tcttggcaatgaaggaacttaatgagcatgcagactgtgtattgcccattgacaatcaagcaaatttagcgatcaacccagc

SEQ ID NO: 54305 - DNA, 83 bp, Homo sapiens
agccgatccagcctgcggagcctgtggggcagggccagcagtcctcaggcgaggacatggagatctcggatgacgagatgccc

SEQ ID NO: 54306 - DNA, 83 bp, Homo sapiens
ttgcagcagcacaagctgaagatgctgggagtgtccactcgccttccaccagcatggcaacgtcttcacagtaccgccagctg

SEQ ID NO: 54307 - DNA, 98 bp, Homo sapiens
acggaaaccattgcacccaaaattgcaagacctttcatagaggttactgaaatctgtccatcacaatccttcaaaatttggaattcaggaagaaaaat

SEQ ID NO: 54308 - DNA, 74 bp, Homo sapiens
ccatcttctatagcttttttaacaacattggaaagatataactgtgcgatcagcagttctgatgaccgtagtct

SEQ ID NO: 54309 - DNA, 75 bp, Homo sapiens
gggtccctgaagagggaagacacgcggaaacagattgaagatctcaaacagacaaatcatggcttggaagaatat

SEQ ID NO: 54310 - DNA, 83 bp, Homo sapiens
ccagcagatggcggatgccctgcagtacctgcagaaggtctctggagacatcttcagcagccccaggaccaaattaccatcac

SEQ ID NO: 54311 - DNA, 100 bp, Homo sapiens
gcaggatttgaccagagcaaggaggaaggccaaggcggccaggacggatgcagcatccctgagaaagaatcttcaagagggagacatagggaaaaggaag

SEQ ID NO: 54312 - DNA, 82 bp, Homo sapiens
ataacaccctgtaacagctgagcattggaatggatacttgtgtcattcctttgaggcacggtgggctttccttggttcaaac

SEQ ID NO: 54313 - DNA, 49 bp, Homo sapiens
aagcgggcggcgcgggggagatgatctcacattcttgaaggtggcattg

SEQ ID NO: 54314 - DNA, 100 bp, Homo sapiens
gagcctttattcatcgactcagtcagtctcttggtttggtctctaaaagtaaagggtggttgatttgctgagatatttttcctgggccgagccccagttg

SEQ ID NO: 54315 - DNA, 51 bp, Homo sapiens
gcaagaagtatgagcagctcaaggtcgcaatggaagaagagatcgccgcgc

SEQ ID NO: 54316 - DNA, 100 bp, Homo sapiens
ccatggcgtacgcctatctcttcaagtacatcataatcggcgacacaggctgctgatactttggctgtgaggcaaaaaaggagaatttatgatatcacca

SEQ ID NO: 54317 - DNA, 83 bp, Homo sapiens
gctggctcagccgcaagtacccgtccatcatagtcaactgcgtggaagagaaggtcttgccccagaagctgcgggcacatcca

SEQ ID NO: 54318 - DNA, 101 bp, Homo sapiens
agaaaatgaagaaagctcataaaaagatgcacaagcaccaaaagcaccacaagtaccacaagcatggcaaggaccctgatgggctgagggagctcctagaa

SEQ ID NO: 54319 - DNA, 82 bp, Homo sapiens
cggcgagcgcgagcggcgcgagaaagacactcatgaggaccatgatacttccactgagaatacagacgagtccaaccatgac

SEQ ID NO: 54320 - DNA, 75 bp, Homo sapiens
agaaaactttctgggtagttggtgcgggagtatgagttaagaaaaaacaacttctcagatactggaaactttggt

SEQ ID NO: 54321 - DNA, 101 bp, Homo sapiens
attggactgacttttcttatgctgggatgtgccttagaggattatggcctcctctcaagtcctcactgccatctcttccaaacactttctgatgactgcca

SEQ ID NO: 54322 - DNA, 100 bp, Homo sapiens
cacgtgccccttcttttgcttgagtgtgggccctgctgtccccagaaagcctcattacagggatatgctctgtgaggacctggctcatgccactgagcag

SEQ ID NO: 54323 - DNA, 101 bp, Homo sapiens
agcagcttccccccgcgcctctcttcgcctcgcctcgggacccgcggtccccgctcttgctggcaagtagcctgcagtatgaaatgctgctgctgacggat

SEQ ID NO: 54324 - DNA, 85 bp, Homo sapiens
tccgaggtctatggccccatgaagggtggcctttcagcagcccctgcgcgggctgtgtctgctgtgaaaaacatcaacctgccag

SEQ ID NO: 54325 - DNA, 88 bp, Homo sapiens
ccgctttccgggagactggagtcgaaggccgtgaggtatttttctaagagacgtctcagagaggctgtgcagctgctggaggactata

SEQ ID NO: 54326 - DNA, 101 bp, Homo sapiens
aattaattggtcctgctgaagctcactcagattccctcattgatacctttcctgagtgtagtacggaagcccctcatatggaaaatttgaaatgcagaggg

SEQ ID NO: 54327 - DNA, 100 bp, Homo sapiens
caggagccataatgtcgacctgccggagtcgaggattccagggtcgaacactcggtggctattatcatggaaaactaatttttcccagagaatttccttt

SEQ ID NO: 54328 - DNA, 100 bp, Homo sapiens
ctgggcggtgcggacaagcgcctgcggtgagttaccttgcgaggcagaaggagaagacagcctgaagaagatgcagctgatggagcttgcgattctgaat

SEQ ID NO: 54329 - DNA, 75 bp, Homo sapiens
tcagtcttcagtgggttcagactacctaccgggacctgaaggatcgtcaacagttgctagcatacaggagtaagg

SEQ ID NO: 54330 - DNA, 101 bp, Homo sapiens
acaaagcactactggctattggaaatgtagttggcaaaaaaggagaaagccactaaggtacaaaagacactggacaaccatattgcaatcagatctacagc

SEQ ID NO: 54331 - DNA, 98 bp, Homo sapiens
tccccgctgacgagaaggaagtcctacgaccgagggcagcccattagcacatcaaagctgcccaatgatctgcttgatttgcagcagccaacttttca

SEQ ID NO: 54332 - DNA, 100 bp, Homo sapiens
tacagcttcagaagaccgaagcgttcgtatctggaagaaatgagccgtcagactgctacagcattacctaccggtacctcgaagtgtccaccatcccaga

SEQ ID NO: 54333 - DNA, 100 bp, Homo sapiens
tccggagctgcccgcgccatgtccgcgcacaatcggggcaccgagctcggtatgtcgagagtaccaacgtggcaattgcaaccgaggagaaaatgattgt

SEQ ID NO: 54334 - DNA, 97 bp, Homo sapiens
cccctggtaactgacaaggaggccaggaagaaggttctcaaacaaggctcagatccacctacttggaaacatagtgatctgggtttcgggcagcctc

SEQ ID NO: 54335 - DNA, 97 bp, Homo sapiens
gcgtgctcccctctgagactggagtgagagggtcttctggacccttgaacatctgtgaagaaatgactattctgcatggaggcttcttgctggccga

SEQ ID NO: 54336 - DNA, 100 bp, Homo sapiens
ctggagacggcaacgtggacaggaagaagcggagggcgaggaggagcagaggagcacacagatgaagcagtatcaccttttgccatgatagcatttcttt

SEQ ID NO: 54337 - DNA, 73 bp, Homo sapiens
aagaaggttaagctggctgtcctgaaatattataaggtggacaacgcgtactggctgtggactttccagggac

SEQ ID NO: 54338 - DNA, 75 bp, Homo sapiens
cgtcgttcccgctgcgctaggggaagcgggcagttcaaatctgaacatcaatgatgtactagggaactactcatt

SEQ ID NO: 54339 - DNA, 82 bp, Homo sapiens
cactcccgctgtctcagcagtctacagcacggtgagaagccctaccactgcaactgggacggctgcggctggaagtttgcgc

SEQ ID NO: 54340 - DNA, 96 bp, Homo sapiens
atcccccactctttccgccctaatggaggtctccagtttcgagtgcctggtgaagaatgtgatgggatcactagcatgtctgcggagagcggccct

SEQ ID NO: 54341 - DNA, 75 bp, Homo sapiens
cagatttggatgtagatacgttagccagtttacttaggagatgttaatctctgtggccctaggccaggtgttatc

SEQ ID NO: 54342 - DNA, 75 bp, Homo sapiens
tggccacagcacacatcgatggagcagtgatcatcaccactccccaggctgggccctgtctcaggcccccaggct

SEQ ID NO: 54343 - DNA, 98 bp, Homo sapiens
ggccgaagccccgccagcccagctaaagcagacggctcgcactgcgacccgaaggagaacctccatttctaccagaatcctttgaccgaattcttctg

SEQ ID NO: 54344 - DNA, 83 bp, Homo sapiens
ccaagcccgggcgccaccgctgccacctccgcgagggaaccctactctggaaactgtcagtcccagggcactggggagggctg

SEQ ID NO: 54345 - DNA, 96 bp, Homo sapiens
ttttgtcagaagtgtattgataaatgtacttcctcgcgtattgctaaaggaggagttgaccacaccaaaatgagtctacatggtgctagtggggga

SEQ ID NO: 54346 - DNA, 75 bp, Homo sapiens
aaccgggaccgtggcttcggcttcatccgcttgattttgcaagaacgaggctcaaggatgtgagggacacagtat

SEQ ID NO: 54347 - DNA, 80 bp, Homo sapiens
cagtccacccaccgccgccgcctcccagtgctccctaccctcacctcaagacgaccatggccaccatcccagactggaag

SEQ ID NO: 54348 - DNA, 75 bp, Homo sapiens
caccagcaagctgttcaatgaggagtgtgtactgtaagcacggtcacctgtgtcccatcgacaccggcctcatcg

SEQ ID NO: 54349 - DNA, 83 bp, Homo sapiens
gccgctcctaagcctgcacagccgcggcggcagcagcagtgagagcaaaatgatgcttcaacacccaggccaggtctctgcct

SEQ ID NO: 54350 - DNA, 73 bp, Homo sapiens
ccaatggtgcttcagaagtttcatactttcagggtttagatgtagattctctggtcattgagcatatccaagt

SEQ ID NO: 54351 - DNA, 90 bp, Homo sapiens
agcacaaccatcgcagttggaagcccatggggcaggtcctggatggtcgccggcccacaggggggcgactggaggtaatggtccggattc

SEQ ID NO: 54352 - DNA, 89 bp, Homo sapiens
aaagaatatccaaccgataataggtttaggagacgcgtggggacagccgagccgcgccgggcccctggacggcgtcgccaaggagctgg

SEQ ID NO: 54353 - DNA, 98 bp, Homo sapiens
cgacctcaagaagcagctccacgaaaggcagccgcggatcgccgcgctcagcgacaaacaacaacgaaggttttgggaacagtaaaatggttcaatgt

SEQ ID NO: 54354 - DNA, 83 bp, Homo sapiens
ctcagcccctttcaactctacttcaacccgcaccttgtgttccggaagttccagggattccggttcacaatggatgctgataa

SEQ ID NO: 54355 - DNA, 83 bp, Homo sapiens
tggaatcacaaacggcgcacattggtatgatgtggaagatcgagacgctccctccggagctcttccagtgccggaagctgcgg

SEQ ID NO: 54356 - DNA, 90 bp, Homo sapiens
ctcttacatacgaagtcacttgacatagagattccaaaacatattcccgaaaggtgctgactgggttacttttttaaacactaggaatgg

SEQ ID NO: 54357 - DNA, 90 bp, Homo sapiens
aaaaagcaagagtttgttatatagcagaaagaccacagcaagattctttcattcgtctcctcctagcctgggggaccaggctcgaactga

SEQ ID NO: 54358 - DNA, 127 bp, Homo sapiens
gttggcgtggcccagcatctaactaacacggtttttattgacagagctctgatagttgttccttgtgcagaagttcgttcccacatgcagggcagcacaaggagaatgggcgtcatgactgatgtcc

SEQ ID NO: 54359 - DNA, 75 bp, Homo sapiens
cactgaggagcgcggccagccctgctcgcagaattaccgcctcttctttactccagtgatccacaagctcagaaa

SEQ ID NO: 54360 - DNA, 75 bp, Homo sapiens
tcttctgaaggctacttatagtaataacttcatagatgaacagcatgattcagataccttagatagaactttagg

SEQ ID NO: 54361 - DNA, 75 bp, Homo sapiens
acaaagactttgtgattgtccgcaggcctaagctaaatcgagagaactttccagcatcccagccatcactcttcc

SEQ ID NO: 54362 - DNA, 75 bp, Homo sapiens
cgagatcaatgaacctttagatgaatttacagttattcagcttctcaaggctggaaaagcgaaggaagtttccta

SEQ ID NO: 54363 - DNA, 83 bp, Homo sapiens
caaaagaaatagcaagaactgaggagcaccaggagacgcaactcatcgggtgctgctgttttttcaaacgaaggaaaaggaaa

SEQ ID NO: 54364 - DNA, 100 bp, Homo sapiens
ctccatcgcctcagggcgcctcggaaaccaggagatcatgagattccaacaatgtctcacccatcttggctgccacccaaaagcactggtgagcccctcg

SEQ ID NO: 54365 - DNA, 100 bp, Homo sapiens
ctgaggaagagctgataacaccttaaacctcctctggattcaagttaaagatagtcaaagaggttggtcaactggcagaaacccaacgcttcgaatgcac

SEQ ID NO: 54366 - DNA, 96 bp, Homo sapiens
ggcgcccgccgccccggccccgcgcctggacgccgctgacggccccgagcacggccgcccggccacgttaattggccttggtcctcacagctccaa

SEQ ID NO: 54367 - DNA, 58 bp, Homo sapiens
aagctgctcagagtctcaatgaacttgactctaaaatagagctcaagcttgagaagag

SEQ ID NO: 54368 - DNA, 100 bp, Homo sapiens
agatggacttcaaatgctgtttgtattccagagactagtcccagagccctttgggggggccatcatcattggacaggagtcaatcacctatcacaatggt

SEQ ID NO: 54369 - DNA, 75 bp, Homo sapiens
cacaggcctttagtgatgtggtggtaagatgtatggggcggagaaactcatcatccacctgcggaaacatggcat

SEQ ID NO: 54370 - DNA, 101 bp, Homo sapiens
tgagagaacagggtggccgcttggtccaggaaggatcagaatgttctctctccagtcaactgctggaatctcctcttaaaccaggtgaagcgggaaagcag

SEQ ID NO: 54371 - DNA, 82 bp, Homo sapiens
tgagaccctccagcgctgcctggaggagaatcaagagctccgagggtgaggtggctttgaccccgggttgcccggccagcac

SEQ ID NO: 54372 - DNA, 100 bp, Homo sapiens
cgttccggaggcccggccacctctgagaagggagacgacgctgctgggtccgctgagcggggcgacccgagatgcctgaaaacttcatgcctcctgttcc

SEQ ID NO: 54373 - DNA, 100 bp, Homo sapiens
tccacactgccaaccggccagaggacgagtgtgcctgggcagctacgccgcgctgcacggggagttctactgcaaaccccacttccagcagctgtttaag

SEQ ID NO: 54374 - DNA, 82 bp, Homo sapiens
gctggagaatatggtgcagaggccctccacggtttactcctggcttgggggcattaggaagcactggaggctcttcgggaac

SEQ ID NO: 54375 - DNA, 101 bp, Homo sapiens
ggagagtggacggtgtgagggggaccgggagaggcaccaaatctggcctgggggcccgagaagcttcctctcaggtgaaggcttccataattaccatcaca

SEQ ID NO: 54376 - DNA, 75 bp, Homo sapiens
gcagccctgaaatcagctcgagacatgtgggctgattacatcctgagggtattgaaagtgccgagatcctgcagg

SEQ ID NO: 54377 - DNA, 82 bp, Homo sapiens
ccgatttaaagctgagctgcgaggaaaatggcggcgggagctgctgatgcaaggaatcccctgggctcccgtccactccact

SEQ ID NO: 54378 - DNA, 90 bp, Homo sapiens
atgcctttcaccaaggagccccactggctgtttgggaccatggagcgtctattatcctcccagtccacaacgctgaaccgtggctggacg

SEQ ID NO: 54379 - DNA, 100 bp, Homo sapiens
tttcaagaccaaaaaacacaataccaggcatacatttggcagaataaatgaaccagctcaacctgaattcctgaagcagcctactaatatatatgctcac

SEQ ID NO: 54380 - DNA, 75 bp, Homo sapiens
aacaagccaatcccaggaggaaaaacgctctaactgaggaactggattctataaccagtgagctacatgcagtag

SEQ ID NO: 54381 - DNA, 51 bp, Homo sapiens
cctggttctgggaaaacaacattgtctcgggcaattgaaggaacagactaa

SEQ ID NO: 54382 - DNA, 75 bp, Homo sapiens
catgagtagggaggagaaacagaagcttgggtgtcgtgaaaactacccctaaaagccaaaatgggaaaggaaaag

SEQ ID NO: 54383 - DNA, 100 bp, Homo sapiens
ttcaattcgtctttctggagtggaagaccacgtgaaaaactttagcttcttggacacttaatgattgttggcaagaaatgtgctgctgatctgggcctga

SEQ ID NO: 54384 - DNA, 123 bp, Homo sapiens
gccgatcatggcggatggcccccggtgcaagaggcgcaaacaagccaatcccaggaggaaaaacgtgaatggtagtgtctagaaagggtatgtcccttcaagagagaggtgccaatgtccaac

SEQ ID NO: 54385 - DNA, 97 bp, Homo sapiens
ctggaggggggccgggtgctgctggacggcaagcccatcagcgcctacgaccacaagtacttgcaccgtgtgagtgaagatgaagctggatgtagct

SEQ ID NO: 54386 - DNA, 100 bp, Homo sapiens
aaagacacaatgtgtcccagccacttttcccctggtcttcaatgccagaatggtgtttgaaaagttctccaaatgacaagaagtctttttgctcaattga

SEQ ID NO: 54387 - DNA, 90 bp, Homo sapiens
catttaccgtaaccctcaaaactcttcccagtctgctgacggtttgcgctagccagccccagtgcctgctgagccgtttgacaacactac

SEQ ID NO: 54388 - DNA, 95 bp, Homo sapiens
gggtggaagtcaccagcatgaaggcgatggagagagaaaaggaacagttccgtaagctctttattggtggcttaagctttgaaaccacagaagaa

SEQ ID NO: 54389 - DNA, 75 bp, Homo sapiens
gcttaataaaataaccgtccccgccagtcagaagttgagataaagtggagaattttcatgaagaacatgaaaaga

SEQ ID NO: 54390 - DNA, 100 bp, Homo sapiens
aagaaagaaaagaaaaaaaagagcaagaaacagaaatatgaaaaaaacaatgagtcatctgatagctcatcagacatggaggagtgaatcagcttggggg

SEQ ID NO: 54391 - DNA, 100 bp, Homo sapiens
ctcacatccgatgcaccctttttgtcagattatcaggatgaggaccccatatcatgtgaacctcctcctggctggctatgatgagcatgaagggccagcg

SEQ ID NO: 54392 - DNA, 82 bp, Homo sapiens
gctggccaaagcctgcccagacggctcacctgtgcgggatggaacaaaagtatcctagaaggaaaacatcaccatggctaca

SEQ ID NO: 54393 - DNA, 100 bp, Homo sapiens
cctctccagcgggccctgcaggtcactgtccctcatttcctggactggagtggagaggcgcttcagcccaccagaaactggcgatggaatatgagaggag

SEQ ID NO: 54394 - DNA, 102 bp, Homo sapiens
gacggcggctcggacgccgactcggaggtgggtccggggagcccgactcggaccgcggagatttttgaaacatgaatccttcactcctcctggctgcctttt

SEQ ID NO: 54395 - DNA, 100 bp, Homo sapiens
cgtccttactgcggaaagcttgtcctggtataaagatgatgaggtcacaaacatgtcagacaaaagtgaattaaaggctgagttggaacgtaagaagcag

SEQ ID NO: 54396 - DNA, 110 bp, Homo sapiens
gacgctgtcacaggttccagggtataccccgcgaatgaagggcgtgatggtgggcatgggtcagaaggattcctatgtgggcgacgaggcccagagcaagagaggcatcc

SEQ ID NO: 54397 - DNA, 82 bp, Homo sapiens
ctaaatgatgggcagtcatggtcccagaaacgtcactatcaagaagctgtccagaccaaaacgaagaagacgttagccaaac

SEQ ID NO: 54398 - DNA, 121 bp, Homo sapiens
cgagcctgggaggccggccggtgccagcacctttcggcttctgagacggcggcagcagcggcattcagagtgtgaacatggctacgcctcttcattcccgtccatgccgagcccccgactg

SEQ ID NO: 54399 - DNA, 50 bp, Homo sapiens
tgacagtctgcatgtgcagttttcaggatgccaaccctgtggtaattgag

SEQ ID NO: 54400 - DNA, 75 bp, Homo sapiens
cgcgggggagccccgggagccgcacgtcaggatggctaaaggtgaccccaagaaaccaaagggcaagatgtccgc

SEQ ID NO: 54401 - DNA, 75 bp, Homo sapiens
tcccaggttgccttggaaaatgccaacgccgtgtctgaagctcctgtgtcctaccgacctctccactgtatctgg

SEQ ID NO: 54402 - DNA, 75 bp, Homo sapiens
ttcagcctttggaagttttttggtgttccttgatgatctccctgaggattttagtgatgctttagatgaatataa

SEQ ID NO: 54403 - DNA, 100 bp, Homo sapiens
acatttcctgcatgtccaaaatgggagacaggcgcctgagtaacccggggcaagctttaggttggtctcagccttgtgatgtttggagcataggttgcat

SEQ ID NO: 54404 - DNA, 75 bp, Homo sapiens
attttagggtcctttatatagaagggagagtaggatcccaaaatggctgggcgaaaacttgctctaaaaaccatt

SEQ ID NO: 54405 - DNA, 98 bp, Homo sapiens
ggcaccttactcgcctgggcattccagccggcacagcaaccccccgctataccctagcaggccgtctgtgggaatagccaggtctggctgggtcggca

SEQ ID NO: 54406 - DNA, 95 bp, Homo sapiens
ttttgccagacattactacttcctaggcagaatgcttggaaagagtaaacatcagtctccaaagataactacatcccttcttcccatcaacaatg

SEQ ID NO: 54407 - DNA, 51 bp, Homo sapiens
acgggatggcggaggcgcctcctgtctcagctccagggcctggaatggatg

SEQ ID NO: 54408 - DNA, 82 bp, Homo sapiens
ggaccatcctgggtgctggccctgtgctggagagtgcctggtgaagaatgtgatgggatcactagcatgtctgcggagagcg

SEQ ID NO: 54409 - DNA, 75 bp, Homo sapiens
ttggtgtcatccagccttagcaaaccagaggataaaattgtccatggaccacgtgtgccttggtcactactgaag

SEQ ID NO: 54410 - DNA, 100 bp, Homo sapiens
cagtgacgagagggagagcaagaccatcatgctgcgcggccttcccatcaccatcacagagagcgatgctgtcattatttgtatcaaaaacaaagaattt

SEQ ID NO: 54411 - DNA, 90 bp, Homo sapiens
ggggagcctgatcctatcgttttgacgccagcatcaattcctgaagattgccaagcccctctccagcctcactccactgattgctgcagc

SEQ ID NO: 54412 - DNA, 75 bp, Homo sapiens
tatagcaggagatcaacttatcaatcagaaaaatgctggacagttggaagcaaggtatcattctttcaaccagat

SEQ ID NO: 54413 - DNA, 75 bp, Homo sapiens
tggacgctatgctggaagaatttaagaaaggcctatgagagctacaagaagaaggactacacccaggtggactac

SEQ ID NO: 54414 - DNA, 100 bp, Homo sapiens
gcgcgaggtctaccccgtgggcatcttccagaaacgcaagaagtacaacgtgccggtccagattgactggggcgactttggggtagaggcagtgtctgag

SEQ ID NO: 54415 - DNA, 75 bp, Homo sapiens
tcaatcaggctgaggagagcacaggcgaggccttcttgggcagctttgtggccagcgggatggggccctcggcct

SEQ ID NO: 54416 - DNA, 101 bp, Homo sapiens
tccggcccccgcagcgggacccggagtgtgaacatggctacgcctcttcattcccgtccatgccgagcccccgactgcagcattcaaagcccccacggagg

SEQ ID NO: 54417 - DNA, 100 bp, Homo sapiens
gacgggcgcctatcagtacacaataagggcgacaggcagcatccccattacggtgcggcacatcgagtccatgatccgcatggcggaggcccacgcgcgc

SEQ ID NO: 54418 - DNA, 75 bp, Homo sapiens
accgcagtcgtgcaggatctgaaggaggaaactgttaaggcagcaataatagaagagcagaaacgaagtgaaaag

SEQ ID NO: 54419 - DNA, 75 bp, Homo sapiens
cgctgctcaaaacctcgctccggaaaggggacacctgttcctccgtgtcacaaagcagtacctgccccacgtggc

SEQ ID NO: 54420 - DNA, 100 bp, Homo sapiens
taccacaacacatccatggcccttgagggagttcctgagctgctccaaaaaattctcgaggtgttcttccagagagcaaagccctgaggactggatttcc

SEQ ID NO: 54421 - DNA, 100 bp, Homo sapiens
ccagaagatcctggtcccctgctttaaccatcgaaaatgaggttggatccatgccgtctacacccctgtagactctttggtgttcggcggaaacatcctg

SEQ ID NO: 54422 - DNA, 138 bp, Homo sapiens
agagttttctagtccctcttacttgaagcatgtctttcagagcccggcaccacccatcttgagtatctggctgcctctaagaatcaaacttcactcttgggagaaccaccaaaagaaattcggctcagtaaaaatcca

SEQ ID NO: 54423 - DNA, 100 bp, Homo sapiens
gtgatgcgatgaaagaatataacagggctcgagtctacctggatgaaaactacaaatcccaggagcacttcacggtggcatcaaagattccctctgccac

SEQ ID NO: 54424 - DNA, 51 bp, Homo sapiens
tccctgtcctacctcacgggggcggcgaacactcgtgaaactgctcaggcc

SEQ ID NO: 54425 - DNA, 82 bp, Homo sapiens
gaagtttgtcctgtcctggatcagtttctttgtcatgtagccaagactggagaaacaatctcagaggctgagaatggtgtgg

SEQ ID NO: 54426 - DNA, 75 bp, Homo sapiens
cctgctgctcatcccggtggccgccgcgcaggagcctcccggagctggacagaactgtaccgctctctttttggc

SEQ ID NO: 54427 - DNA, 50 bp, Homo sapiens
cagcatcggcgaggacgggaaggtacctgtgtgacaaggtcgtccctggg

SEQ ID NO: 54428 - DNA, 75 bp, Homo sapiens
ctcacgaattgctgaacttgaaagcaaaaccaatacactccgtttatcacagattcttggatgaagtacagtcct

SEQ ID NO: 54429 - DNA, 101 bp, Homo sapiens
cagaagtggagaccagcagaactccaccaggagggccgtgtagccatcacccgagtggccaaccttctgctgtgtatgtatgccaaggagaccgtgggctt

SEQ ID NO: 54430 - DNA, 101 bp, Homo sapiens
acgaaggtgaagccacggaagataaggtacatgtcccagagcaagcacacggaggcccgggagctcatgtactcgggagccctgctcttcttcagccatgg

SEQ ID NO: 54431 - DNA, 75 bp, Homo sapiens
gcattttttccagaacacaaaagcattgatctggtagccttgctccagaagcctgttcctcacagtcaagcctca

SEQ ID NO: 54432 - DNA, 100 bp, Homo sapiens
cgaccaggggcgccggggcagcagcgaccccacagtgcagcgctccgtgtttgcatcggtggacaaggtgccagtcaggatggctaaaggtgaccccaag

SEQ ID NO: 54433 - DNA, 87 bp, Homo sapiens
gagttctagaatgaagctgcagaccctcgcaatgaggacggggacttggttgccttttccagtgacgaggaattgacaatggccatg

SEQ ID NO: 54434 - DNA, 74 bp, Homo sapiens
taattgaacaaatggagatgaaattggatactggcattgatagagtgaagtaattgggaaactgttcatttgag

SEQ ID NO: 54435 - DNA, 100 bp, Homo sapiens
gcctaacatcgtgcgcgccctcaatgacaagctgtacgaaaagcggaaggtggcagcgctggagatcgagaaatcttggccctgattgcattcatctgca

SEQ ID NO: 54436 - DNA, 75 bp, Homo sapiens
gctggaggcataacaatgggaaacattggtcgacaactggcaatgcagctcttcagtgggtcatctgtgtgtcac

SEQ ID NO: 54437 - DNA, 96 bp, Homo sapiens
agccggcggggccctagcgcagaaattcagaaccccctgtcctgaagcaggattcctggttttcaagcctgagctgatctctcggctggagcaggg

SEQ ID NO: 54438 - DNA, 100 bp, Homo sapiens
ggccaatagagaggaacggaggcctgcaacaaccatatgtgtatggactcagaaaaacatatgatctacacttttggtggtagaattttgacttgtaatg

SEQ ID NO: 54439 - DNA, 97 bp, Homo sapiens
tgttaccattgtgaaagaaggttgggttcagaagagggtattggatgaacgaatatacctcatccattggaattggagtttttcattcaggaattga

SEQ ID NO: 54440 - DNA, 98 bp, Homo sapiens
ggcagaggagctcaagactcaggccaatgactacttcaaagagaggtaaagcattatttgacagatgtatggattcaagcaagaaactgaggtccaat

SEQ ID NO: 54441 - DNA, 90 bp, Homo sapiens
gggcagcccgggcccgtccgctgccctcccggctcccgtcctgcggcggcggggcgtgcaggtacttaaagctttcaccaaaacacccag

SEQ ID NO: 54442 - DNA, 80 bp, Homo sapiens
cttggccagcgacagatcctttgctgctctgtctgccggttcttgagttttcggctttgtgagaaaccttaccatcaaac

SEQ ID NO: 54443 - DNA, 76 bp, Homo sapiens
tgagtcatttccttcgtacccacagtgcttcatgagaggtatagctaggcacttccgttttggaaaccaagaagat

SEQ ID NO: 54444 - DNA, 75 bp, Homo sapiens
ccaagtgcggggacctccggcgaataaaggcaaggggagagccagttgcgcagagccctgcaaccagcagtccag

SEQ ID NO: 54445 - DNA, 100 bp, Homo sapiens
gcgagatggacattctgaaatcagagatccttcggaagcggcagctggtggaggacaggaacctgctggtgatattgatgatgttaagaagttcaaaccg

SEQ ID NO: 54446 - DNA, 100 bp, Homo sapiens
tccggggaggtcacctgacgaggagatttggagcaagaggtggtggtggccttcccccgaagaaatttggtaatcctggggagcgtttgcgtaaaaaaaa

SEQ ID NO: 54447 - DNA, 101 bp, Homo sapiens
gcattctttcttggcatttttgaatacgcctaccgatgctctggatcaatttgaaattttgtatcagattgtaccatctcataaattgatgttggaattcc

SEQ ID NO: 54448 - DNA, 100 bp, Homo sapiens
gtcttgagggggctgttgagtggtcgcggacctgggctctgtgcgttgggaaagggaagtggagcattagtgccagcagtagttcccaagggctgtctca

SEQ ID NO: 54449 - DNA, 82 bp, Homo sapiens
ttagagctgcggaacaggacgccctctgatatggtcatcatgggccagtgctactacaacgagaccatcggcttcttctata

SEQ ID NO: 54450 - DNA, 97 bp, Homo sapiens
ttcccattgtgctccctctaccttattgctgtgctagattatgtttgagaccttcaacaccccggccatgtacgtggccatccaggccgtgctgtcc

SEQ ID NO: 54451 - DNA, 97 bp, Homo sapiens
acccggcagtacggcaaatatggcggagatcggcttcagctccccaggaatatgattgaaaacagcatgtttgaggaagaaccagatgtggtggatt

SEQ ID NO: 54452 - DNA, 50 bp, Homo sapiens
gcaggcgctcaccatgttccctggaggttttgggatttgagattgacgcg

SEQ ID NO: 54453 - DNA, 75 bp, Homo sapiens
cagtatctcgctcacagagagctgggctacagattcaagtcaatctgaaagtcccagccagccaagtgacgctga

SEQ ID NO: 54454 - DNA, 100 bp, Homo sapiens
aacaaatatcatgagagcatggctcttccagcatctcacatatggtgactacgaccccagtgttcacaagcggggatttttggcccaagaggaattgctt

SEQ ID NO: 54455 - DNA, 100 bp, Homo sapiens
tctggattctaaggcaacacttccttgaagaaacaagcttacaggttgaaaacgttagcggaagaacttatgcaaacacagcagatgcttttaaacaagg

SEQ ID NO: 54456 - DNA, 50 bp, Homo sapiens
agtctgtgatgtctaaacttgcatgtctccggataactgtgctcctgaca

SEQ ID NO: 54457 - DNA, 90 bp, Homo sapiens
cgcggggacctcggagggagcccggcggcttcggaataccctctaccatctgctttggtcagggtgccgctcgaggatttaaaagcaaca

SEQ ID NO: 54458 - DNA, 51 bp, Homo sapiens
cgctcctgcatctgcctccccatatcgagacatgtaagcagcatcatggag

SEQ ID NO: 54459 - DNA, 100 bp, Homo sapiens
acatcctgggaggctgccagctcatgttcaccgtggcttctggcacagcagcttaattgaccggaacctcattgattattttgttcccttcctccccctg

SEQ ID NO: 54460 - DNA, 100 bp, Homo sapiens
gacagggaactctgaagagctgccacagcctgtgccagggtgacatcaggattccactgtgtaaagtaattagattcaacatagactacacgattcattt

SEQ ID NO: 54461 - DNA, 100 bp, Homo sapiens
gtattaaatgaatattgtgtggtttgtgatgagccacatgtgtttcaaaatggccctatgcttagggtgtcatcaatcttacagaagaagtgctgtgggt

SEQ ID NO: 54462 - DNA, 100 bp, Homo sapiens
aactggcttcggatggcgtcccgcgtagacgcagtggcctccaaggtgcagacagctgtgactatgaagggggtggtgttcccactgatgaagagcaggc

SEQ ID NO: 54463 - DNA, 90 bp, Homo sapiens
atgaaatcacagctacatatttgttattggggagaaaatcttcagaggttcggactaaggatcaccgctttgaaagtgtcagtcacctta

SEQ ID NO: 54464 - DNA, 100 bp, Homo sapiens
gtaaatgtaagcctattagagctacacagaagacctatttccggaacaattacaactatggttggtcatcattttatccaagcttgactgtggtacagca

SEQ ID NO: 54465 - DNA, 82 bp, Homo sapiens
ggaacagcagagacacagagggcagtcatgaggaatccagcactacgccctgccctctactgactggaggcaggcctctgcc

SEQ ID NO: 54466 - DNA, 100 bp, Homo sapiens
gcagtggtcgcttcttctccttgaaccttttgcccagagtagcagccaaacttgaggttgccccgatttctgacatcattgcaatcaagtcacctgacac

SEQ ID NO: 54467 - DNA, 90 bp, Homo sapiens
caacagttctgggtgaatatgctttacccaaaggatcccaagaggaattacaagagtactgcagacatcatgaaatcacctatgtggccc

SEQ ID NO: 54468 - DNA, 50 bp, Homo sapiens
gttgatgggcacctcccgggacggccactacgaaggaggtgaaggactcc

SEQ ID NO: 54469 - DNA, 83 bp, Homo sapiens
gatgggcacggccgaggacttcgccgaccagatgatatcatcaagttgaatcgaaaggaagggaagaagcagaattttccaag

SEQ ID NO: 54470 - DNA, 95 bp, Homo sapiens
gtcctggacgccctgcacgtgctcgagggcctcttccgcaccgaccccgaggccaaggttcctgggctatataagtccagttctgcagactctct

SEQ ID NO: 54471 - DNA, 80 bp, Homo sapiens
ctgcgcggcgcggcggccgggccctcgagacggggacgcaaaatgatgcttcaacacccaggccaggtctctgcctcgga

SEQ ID NO: 54472 - DNA, 71 bp, Homo sapiens
agattggcacctttgcctctcaagtctggaaaagtttgaaattccagtaaaaattcgtttgagtcctgaac

SEQ ID NO: 54473 - DNA, 110 bp, Homo sapiens
acattggaacaaggagaagatccatggttattagagaaagagaaaggatttctaagcaggaactccccagggtactgctgtttcaaaccagaggtgatcttcaagttgga

SEQ ID NO: 54474 - DNA, 100 bp, Homo sapiens
ggtgatagacttcgggccttgaaaagcagaagacaatccaaaacaaacgctattcctctcacggtgttgaaagcagcaggggcctagaagacattaaacc

SEQ ID NO: 54475 - DNA, 100 bp, Homo sapiens
gaatgttggtgtggaccctcccgatgtggtgaagaccacgccctgtgcacgcttggaatgctggatcggaagcctacattgcagacctcgatgccaaaag

SEQ ID NO: 54476 - DNA, 96 bp, Homo sapiens
cgcctcgcccgccgtgagcgcccggagcggtccgcgagccaccgaggcccagatctcacattcttgaaggtggcattgaagagcactaagatcgga

SEQ ID NO: 54477 - DNA, 75 bp, Homo sapiens
tttttctcatggatgttcttcttcgagtatttgtagaaggctctggacttattggacaaaatgttgacattcaac

SEQ ID NO: 54478 - DNA, 90 bp, Homo sapiens
agcacccatgtcatctaggaagaagaaactgtatttgcagcaacactgtgaggacctcagcagccatgtcgaagccccatagtgaagccg

SEQ ID NO: 54479 - DNA, 83 bp, Homo sapiens
cttgctcgtgccttagacaagaaactcctttccttaaagtactgccaaatctgtcgaaagggagataatgaagaactgcttct

SEQ ID NO: 54480 - DNA, 51 bp, Homo sapiens
cagattcgcagtggtcgcttcttctccttgcaggtgagctcaggagataag

SEQ ID NO: 54481 - DNA, 74 bp, Homo sapiens
gtgctgtcagcgcggccgtcggagacatgggagacccggggtcggaagtgttgacttcaaaatcaaaactgtag

SEQ ID NO: 54482 - DNA, 83 bp, Homo sapiens
gggccacgccggcgatggaggcggcggcggcggactggcggatattgatgatgttaagaagttcaaaccgggttacctggaag

SEQ ID NO: 54483 - DNA, 100 bp, Homo sapiens
cacacagagttgcaggatctgcagagacagctctcccagaatcaggaagcacccaagaaaacctcatttggctcgctgaaggatgaagaccggattttca

SEQ ID NO: 54484 - DNA, 100 bp, Homo sapiens
tggtcccgcctcacctggggtatggagaggaaggaagagatgctgagtttgtgtgtgaacggacactgaaatattttctaggaattgcgggaggaaaatg

SEQ ID NO: 54485 - DNA, 95 bp, Homo sapiens
tgtaaacatgagaatagctgctggtgaatctttggcacttctctttgaattggccagaggaatagagagttcagaagaagaagttgtagaaggag

SEQ ID NO: 54486 - DNA, 99 bp, Homo sapiens
ccgagggggacgtctgcatcgccatgacgccgcccaatgccaccgaagcctccaagccccaagattgcaggatacctatatggggtgagcccaccagat

SEQ ID NO: 54487 - DNA, 98 bp, Homo sapiens
aaggtggagcaggtcctgagcctcgagccgcagcacgagctcaaattccgaggccgccgcccaccgcccgccgccatggggctgaaggccgcccagaa

SEQ ID NO: 54488 - DNA, 100 bp, Homo sapiens
caggcttccagtacgagctggttaggaggcacagggcgtcggacctgcacgagctgtctggatgaaacgaggaggaagagatagtgaccgtaattcatca

SEQ ID NO: 54489 - DNA, 90 bp, Homo sapiens
ccactgcagccatgatctccttaacggacacgcagaggcagcagaagaagcctttgtaaatgacattgacgagtcgtccccaggcactga

SEQ ID NO: 54490 - DNA, 83 bp, Homo sapiens
aggcgggggtcgccgccgtcgccgccgccaccgcggccgagaccgcgcagccggcgggaaatctggcattttttaaagtttgc

SEQ ID NO: 54491 - DNA, 100 bp, Homo sapiens
cggaccccagcacacagaagccgagacggttgctgaacatcgagagcgaaatgatcaaatttgccagttactatgctggaattgctgtcgcagtacttat

SEQ ID NO: 54492 - DNA, 83 bp, Homo sapiens
atcgggctgaagcgactgagtccgcgatggaggcccattacgcagtccaggcaagaagatcccggagcatcactaggaaaaga

SEQ ID NO: 54493 - DNA, 50 bp, Homo sapiens
cttaccctgaagtagttagaatgaaacatacagcttttgccacattccct

SEQ ID NO: 54494 - DNA, 100 bp, Homo sapiens
cacaacttgcttctctccagacttgggcttaagaggatgacggccgaggcgcaccggcgcgtggtggtggagtacctgcgggcggtcatgcagaagcgca

SEQ ID NO: 54495 - DNA, 73 bp, Homo sapiens
ggtgattcggacctcatggagcctgtattccgatacctggccaagctcttcaccaccaggagtgttccttgag

SEQ ID NO: 54496 - DNA, 50 bp, Homo sapiens
tccgtggcctccttctccatctacaggtgctgtacttctttgcagtatac

SEQ ID NO: 54497 - DNA, 75 bp, Homo sapiens
taagaagcacctggatgagacatttgctacagcatcccacattaagtcaacgaaataggaaggttgttgattact

SEQ ID NO: 54498 - DNA, 75 bp, Homo sapiens
cttagcttgccccatccccatttgaggtctgtcggagctgcccttcagtgtggcactaccgggaaggcgccgtcc

SEQ ID NO: 54499 - DNA, 100 bp, Homo sapiens
gtcgctcggcggcgggagtcgatgcctttgaagatgagaaacccccaaagaagagccttctctccaaagtttcacaaggaaagaggaaaagaggctgcag

SEQ ID NO: 54500 - DNA, 119 bp, Homo sapiens
gtaggatgctgtacaccaggccggccgctcctgccgtgcaaatgttcctcagcagcacatagcacctatcgggcagctgaaaaagttggatgaagatagtttaaccaaacaaccagaag

SEQ ID NO: 54501 - DNA, 74 bp, Homo sapiens
gaagatgaggaggtcgctgagagctgggaagaggcggcagacagcgggatttggtgcttccagatgtgagttat

SEQ ID NO: 54502 - DNA, 100 bp, Homo sapiens
ttaagaaacatccacagcagcgactggcccaagttctttgaaaagatggaggtgacacgagcagtgatgaggataaagaagaacatgaaactcctgtgga

SEQ ID NO: 54503 - DNA, 100 bp, Homo sapiens
aagcactctgtgctagtgatgtgagcaaatgcctcattcagatcatggagctttgtggtgcaacaagacttggttattttggaagaagtcagttctacat

SEQ ID NO: 54504 - DNA, 50 bp, Homo sapiens
gacgcagagtgggcggcggtggtggtttgtggtaaatatgccagctctag

SEQ ID NO: 54505 - DNA, 58 bp, Homo sapiens
gagcttgtggcatccattccccaagttcagatgtgtcttgctgaatcagggctctctt

SEQ ID NO: 54506 - DNA, 74 bp, Homo sapiens
ttgtcatgtagccaagactggagaaacaatgaacacgtggccatcagtaatcatgagcaacccattcgcacacc

SEQ ID NO: 54507 - DNA, 51 bp, Homo sapiens
ggatcctgccaacattttacagggtgatcagcccatgacctaaacctccag

SEQ ID NO: 54508 - DNA, 100 bp, Homo sapiens
ttcaatgtcatttatcagagcgcggcggtcttcaagctctcaggagaagaaatgggtgaccgttggtgacacatccctacgaatctacaaatgggtccct

SEQ ID NO: 54509 - DNA, 134 bp, Homo sapiens
cttgcaagggtgaagtgcttcgggtccagaccaaacatttccacatcaagtgtttcacctgcaaagacatccacgacagcgatggcagttccagcagcagccaccagagcctcaagagcacagccaaatgggcg

SEQ ID NO: 54510 - DNA, 91 bp, Homo sapiens
caaaggcagcaaaaacaagagtccctctaaagcagctcaaaaggttttgcacactagggaccaagaagccctcggggacactgctgagaaa

SEQ ID NO: 54511 - DNA, 100 bp, Homo sapiens
ttccagaattagaccagcagctacaggagcggcctattgccaattcatggacatgctcttccctggctgcattagtttgaagaaagtaaaatttcaagca

SEQ ID NO: 54512 - DNA, 87 bp, Homo sapiens
gccgctgctctgcctcccggttctgccgcgcgggccctgcatgtggagctgccgtctcagcaggtatctgccctgtcagccgggaca

SEQ ID NO: 54513 - DNA, 82 bp, Homo sapiens
gcggcttatcgaacagagccgggagttcaagaagaacactccagagggcgaactttctgaccaagtatacaactacccagag

SEQ ID NO: 54514 - DNA, 88 bp, Homo sapiens
agcgcttctgtgcctgctgctcatggcagccactttcagccctcagggacttgctcagccagcctatatataaagcagatctgatacc

SEQ ID NO: 54515 - DNA, 75 bp, Homo sapiens
ggcggccggccgacccttcctgtcgctgacggcgactgcgggaggccagtgccggtggtggtgtgcacattgagc

SEQ ID NO: 54516 - DNA, 100 bp, Homo sapiens
agtcatgaagatggaacctctgaataacctccaggtgtggcggggcaccctggcccgcatgcggtacaaaagaaccaaggcagctctgacaataatcagg

SEQ ID NO: 54517 - DNA, 82 bp, Homo sapiens
aggatattcgcgattacaatgatgcagacatggcgcgtcttctggagcaatgggagacaatgcagatcttcgtgaagactct

SEQ ID NO: 54518 - DNA, 96 bp, Homo sapiens
ttctcctaccttcgggaatctgactactctgccctcccagggcccactgcagagacccagccggctggtgtttaccgatgtggccaatgccatcca

SEQ ID NO: 54519 - DNA, 75 bp, Homo sapiens
ctgaggctgcaccaagtggcgaaggagccggctccaagtgcctccggagccagcgtggtggccatagacaacaag

SEQ ID NO: 54520 - DNA, 75 bp, Homo sapiens
ccgaagcgggcggcctgcactcgggctgaagaaaaagtcccagtcggtggatattaatgctccagggttcaaccc

SEQ ID NO: 54521 - DNA, 100 bp, Homo sapiens
tttggttattacctgttctgaagcaactatacttctttgctatttccacctatgtgcagaggctttcaactggcttctgtgtaatgtcatccaaaccact

SEQ ID NO: 54522 - DNA, 75 bp, Homo sapiens
agacaccaaagaagagaaagacaaggatgaccaggaatgggaaagccccaggtatcctgaagaacttgcctggca

SEQ ID NO: 54523 - DNA, 100 bp, Homo sapiens
tgtattctgacgtttacaaaactacagagcccagaaggatgtggatgctgtggacaaggtgatgaaggagctagacgagaatggagacggggaggtggac

SEQ ID NO: 54524 - DNA, 75 bp, Homo sapiens
tccacaccccctccgtgggtgtgtgctgggattctgtccctgaccgtcttcacagtccaggtgatcttgactact

SEQ ID NO: 54525 - DNA, 82 bp, Homo sapiens
tccattccacctggccaggcagcacttcctgtccaatcgctgcctcaaggtgtccctggccagtgtccttccacctgtccac

SEQ ID NO: 54526 - DNA, 75 bp, Homo sapiens
actccgacatcaacacctctaagactggagaagacatgcgtcgggatgtccaggaaatttttcgcatgacccccc

SEQ ID NO: 54527 - DNA, 52 bp, Homo sapiens
cagaagaagacacaaggttatgcgaatcatctcccctgccccacaaacatga

SEQ ID NO: 54528 - DNA, 98 bp, Homo sapiens
aatatggaaaggcaggcgaagtcttcattcataaggataaaggatttggctttatccgcttggtgctgtaccttctcagccagctgcagcaaagccaa

SEQ ID NO: 54529 - DNA, 75 bp, Homo sapiens
acctcccagcatcagtgcccagtttcaggaatgtaacaacccctgctgcaatgcctctaattgtaccctgaggcc

SEQ ID NO: 54530 - DNA, 83 bp, Homo sapiens
ggataacgggaggtgaatttccatgtcaacatagtcctgtcttattgccagcagttttgaagatgactcccgtgtagcctcac

SEQ ID NO: 54531 - DNA, 83 bp, Homo sapiens
tcgttccctcagcaatatgattgtcacaatccaaggtccggctcctccgcgtcccagggccggacggagggatgaggcagggg

SEQ ID NO: 54532 - DNA, 138 bp, Homo sapiens
tcggggtcggttctgcagcgctgtatcgtgtcgccggcagggaggcatagcgcctctctgatcttcctgcatggctcagatgttggtcccattccaagatactcctgtggaagttgaacagaacacagagctacctga

SEQ ID NO: 54533 - DNA, 104 bp, Homo sapiens
cagccggaggtccagagatcctgagagcccgagcgcccagcgccgcgccgggagaacatccagtcatggataaaaatgagctggttcagaaggccaaactggcc

SEQ ID NO: 54534 - DNA, 100 bp, Homo sapiens
gaggaggatagagcctcacatgcaagctctagtgactggactccaaggccacggataggttcctcatgccatgcacctgctgtcacccagcatgcaccct

SEQ ID NO: 54535 - DNA, 98 bp, Homo sapiens
cgggtgatctttggtctcttcggaaagactgttccaaaaacagtggataattttgtggccttagctacaggagagctaaacaagcattgaggaagcag

SEQ ID NO: 54536 - DNA, 50 bp, Homo sapiens
tgagcactcggtcccaaaaaggcaaaggtttggtgcacctcgatttggag

SEQ ID NO: 54537 - DNA, 75 bp, Homo sapiens
gttccatccaaactcttgccctttgagggaccaggcctgtttaaagaagaaaacccgtatgctagatttgaaaac

SEQ ID NO: 54538 - DNA, 100 bp, Homo sapiens
aaggcgaagcccagcttgctcgggtctgcacaacagggtttcgtggctgtcccaacaaaaaatcccgatggcacgatgaacctcatgaactgggagtgcg

SEQ ID NO: 54539 - DNA, 100 bp, Homo sapiens
tcacatcaagtccagggttaagtacagaaggtgcagtagacattgttgcaatcatgatcggcaatctgaaaggcacaaaaattctgcaatctattcaaag

SEQ ID NO: 54540 - DNA, 101 bp, Homo sapiens
caggcctccgcttctccggcctccctgctcttaccgggagatcctgataacttaagtgactctctcttttccggtgatgaagaaaatgctgggactgagga

SEQ ID NO: 54541 - DNA, 90 bp, Homo sapiens
cgcgctgctggacgaagagctctcctccttcttcctcaactatctcgctgacacgcagggctctgatacttgtgctcaatgtgcccattt

SEQ ID NO: 54542 - DNA, 98 bp, Homo sapiens
gatcgcccaatccacatgcttttccaggcggctatgagaggttttcctccgagtacccagaattctgttctaaaaccaaggccctggcagccatccca

SEQ ID NO: 54543 - DNA, 88 bp, Homo sapiens
ggtcaacctcactctggatggggtcaagtcctggctgaagccacggctgggacaggaagccacagcctccaagactgcagagaatgcc

SEQ ID NO: 54544 - DNA, 98 bp, Homo sapiens
cagcgcgaacatggacgccgtcaacgccttcaaccaggaggtgaaaggtgtagcagtcactcggcctacacccacagcatcgaccttgtgaacccagc

SEQ ID NO: 54545 - DNA, 83 bp, Homo sapiens
aaggacatggagcgcttgaaagagtttgtacccttccgggactacgtggaccgcacaggcaaccacgtgctgagcatggcccg

SEQ ID NO: 54546 - DNA, 83 bp, Homo sapiens
aagagccggcggctgcccgggcgtactaggttttgacaagcttgcatcatgcgtgagtataagctagtcgttcttggctcagg

SEQ ID NO: 54547 - DNA, 75 bp, Homo sapiens
ctcaggagctgtggggtcccctgctagaagtgggggactcggcgggattatatctgggtgttggcacccagccac

SEQ ID NO: 54548 - DNA, 100 bp, Homo sapiens
gtggcgtctgatgctgaactggatgctaaacttgaggcagccaatcctttctttaagttgttgactatgctaatggagtttgctggtggacctccaggaa

SEQ ID NO: 54549 - DNA, 90 bp, Homo sapiens
tctattctgaactcaacttctgaaatttacagaaacaaactacatctcagggttgacttccccagaaatctggccaagtctgtaactgtg

SEQ ID NO: 54550 - DNA, 100 bp, Homo sapiens
gcgtgatgtggctaagatgctgccgactctgggcggcgaggaaggcgtctcccggcttccaaactacaaaaactttaaaggcacgattcaagaacttggt

SEQ ID NO: 54551 - DNA, 100 bp, Homo sapiens
cggtgttggaacttcgttgcttgcttgcctgtgcgcgcgtgcgcggacatggcctcaaacggagctgaaggtggtggatcatcgtctggaaatgtgtctg

SEQ ID NO: 54552 - DNA, 83 bp, Homo sapiens
ggagcgtcccggtgcggctgcacgtctcgcggatcatgcttaacctttggaaacatcagaagctactctccattgacctggac

SEQ ID NO: 54553 - DNA, 97 bp, Homo sapiens
cacaaatgaagatgtttccagccctgcctcggcggaccaaagggaggagcagagcgagatcatggagtactcggtgctgctgcctcgaacactcttc

SEQ ID NO: 54554 - DNA, 100 bp, Homo sapiens
ctggactgctcagggtgccagacctcatcgaggttcccatgatccctcggccccactatgcccaacctggctgtgtctacttcatctgtttgctccgaga

SEQ ID NO: 54555 - DNA, 98 bp, Homo sapiens
gcaggagccactgagatgaggaggcgtcgcgcgcgcctgtagctcgcgggcctcgcagggtttggattcaggatttgttcctagtgtccaagattttg

SEQ ID NO: 54556 - DNA, 98 bp, Homo sapiens
ttcatcctcaaacaggtcgcttctcgggagttcttggtgttggaatattttacagcaaagcagtcgcaggacagaagacttcagctgccctgtccaca

SEQ ID NO: 54557 - DNA, 100 bp, Homo sapiens
ggtattggatgattggtagctaagactcccgaatacttcagaagtggggaaatgtgtaggaagaatgatgatggagacacagttgttgtggttgagaaag

SEQ ID NO: 54558 - DNA, 101 bp, Homo sapiens
tggcgaacggggcgagcctggaggattgtcactccaacctcttttcgctggaggagagggcagtgagagataggaatctcctccaggttcatgaccataat

SEQ ID NO: 54559 - DNA, 100 bp, Homo sapiens
aaggaagaaaaaacttgatttggtgactgcaggaagcaacacgttgctgcttttattctacagataatgctcctctggtgcaagtgtggtagctattgac

SEQ ID NO: 54560 - DNA, 75 bp, Homo sapiens
agcccctcctttggtgacccacagctatcccctgaggcccgacccaggatatggctttagttgcccctgaagctc

SEQ ID NO: 54561 - DNA, 98 bp, Homo sapiens
aaataccgagtttgtaatgtgactagacggccagccagtcatcaaacatattgatgatgttaagaagttcaaaccgggttacctggaagctactctta

SEQ ID NO: 54562 - DNA, 83 bp, Homo sapiens
agaaggtctctggagacatcttcagcagattagcctgaggcctgctcagtcgttcctaatgaataaaaatcaagtgccaaagc

SEQ ID NO: 54563 - DNA, 82 bp, Homo sapiens
cccgaagaagactcccccacatctggggccactgtgcatgtgcgggtcaacgatgtgaacgagtttgccccagtgtttgtgg

SEQ ID NO: 54564 - DNA, 75 bp, Homo sapiens
acattctcaaaattggcttcctgaatgacaaggtggacgcggagcgtgacggcgtgaaggtgcccaccacgctgg

SEQ ID NO: 54565 - DNA, 75 bp, Homo sapiens
gagagcctgggcaagactggagagtttgaaaatctgaacacagttgctgagtgtctgttttctctggtcaacggt

SEQ ID NO: 54566 - DNA, 100 bp, Homo sapiens
gttactgggataccacctcatgttgttaaagtaccagcttcacaggtctgtgcagacttttgcagacaaatcaaaacaagaagctctgaagaatgacctg

SEQ ID NO: 54567 - DNA, 100 bp, Homo sapiens
gcgcaaagttctgagaacattacagcagatcaagaaatccagctcaagtgagcatgcctacaagtgttcttggtgctcattctccaccatgacaatcagc

SEQ ID NO: 54568 - DNA, 78 bp, Homo sapiens
tgaactgtttctcttctgcagaaaaagaggctcttcctcctcctcccgcgacgaagtccaaggcttgcgagaaggtca

SEQ ID NO: 54569 - DNA, 100 bp, Homo sapiens
accgagagcgcgaatatcgtcatcgttagaaggtggttgtgagacaacttcaacaagaagtggctgattcccttaaaaaattaactatgttagagtctcc

SEQ ID NO: 54570 - DNA, 83 bp, Homo sapiens
ctcttctttcagatctgctggcgcttcgtctctcccgccatcatcttcgcccagctgagagccagcctggaggttacccagca

SEQ ID NO: 54571 - DNA, 73 bp, Homo sapiens
ggagcccgaccagcggaggaccgacttttgctcaaaggtgaagaacaccatctactgcaacgtggagccatcg

SEQ ID NO: 54572 - DNA, 75 bp, Homo sapiens
cggatcatgtctggtggctccgcggattataacagtgttctaagaacggaagcatctgggctggatggaatttag

SEQ ID NO: 54573 - DNA, 98 bp, Homo sapiens
aggaaagtagtgaaaatgattttgaagttattggaagataaaaatggagaggtacagaatttagctgtcaaatgcagagagactttcaagcagctggc

SEQ ID NO: 54574 - DNA, 100 bp, Homo sapiens
gagattgacgcagagtgggcggcggtggtgatctaccttctgagatatcatccttcttcagggagataaggaaaaaaagccacagggtcccggagagcca

SEQ ID NO: 54575 - DNA, 75 bp, Homo sapiens
atagccaatgagactgtgaacgtgctgtggaatatatggactggtaccatcagtcctatgactgcgtctgtgtca

SEQ ID NO: 54576 - DNA, 75 bp, Homo sapiens
cagaggatgcagtggaggccatcaggggccttgataacacagagtttcaagttcccagtgacctgacagcagagg

SEQ ID NO: 54577 - DNA, 90 bp, Homo sapiens
gccgacccgcgccctgctccctctcagcacctgggcggacgaaaattcttgctgctgtattgagaacagattgagaaaacaagggcagaa

SEQ ID NO: 54578 - DNA, 95 bp, Homo sapiens
ctgtcaactccatctgcagtgttcaagccaaactggcaagacgcagtcaagaacgggacaatcttggcatgttggtctggtcacccaatcaaaat

SEQ ID NO: 54579 - DNA, 100 bp, Homo sapiens
gagagggaaggtcttcattgttgggggagcaaatccaaacagaagcttctcagacgtgcacaccatggatctgggtgaaagacccctgacaaaagacaat

SEQ ID NO: 54580 - DNA, 100 bp, Homo sapiens
atggaaaacattgagctcgggctgagtgaggcccaggcctccagaggaagaagtccaagttccgcttgtccaagatctggtcaccaaaaagcaaaagcag

SEQ ID NO: 54581 - DNA, 82 bp, Homo sapiens
gatgatgcagttcaaataactaaggaacaggagtacagctgtgtagtaaagatgccttctggtgaatttgcacgtatatgcc

SEQ ID NO: 54582 - DNA, 75 bp, Homo sapiens
gacctcttaggcgccgggaccctcaggctcagatcagtggccgaggccccagagattcttctgatgtagagcgac

SEQ ID NO: 54583 - DNA, 75 bp, Homo sapiens
tggggagaccccgacgtggagtgccgaggtggctgactgttcttgggatgaaacaataaagatctatgaccctgc

SEQ ID NO: 54584 - DNA, 73 bp, Homo sapiens
aaggctgtgcaacgcggagcgtgagaggaaggtcaaaatgcagatcttcgtgaaaacccttaccggcaagacc

SEQ ID NO: 54585 - DNA, 97 bp, Homo sapiens
tatttatgccaacaccatcaatacttttcggattaaatctggaaatgaaaatggagagttctacctacgagattactacagcatcccatttcccaca

SEQ ID NO: 54586 - DNA, 95 bp, Homo sapiens
cgggctgcgtgagggaggaggttcactgagacttttttgacggagagggacaaacaatccaagtggagtggaattcctcagctgctcctcaagct

SEQ ID NO: 54587 - DNA, 76 bp, Homo sapiens
aggttgtcctgagggatggacgcgatgtgaaggaatggacaagagttgagcagcctttctgctgattatcacacat

SEQ ID NO: 54588 - DNA, 50 bp, Homo sapiens
ctttacctcgctgaccctatgaagctaatggttgcagagaagaatggaac

SEQ ID NO: 54589 - DNA, 75 bp, Homo sapiens
atagtcctcgagtccctgaagagagaaggcaaagaacctctggtgttgaaagttgctgccaaacaaggtgaatcc

SEQ ID NO: 54590 - DNA, 111 bp, Homo sapiens
gaaaaagcaagctgaagacatcaagaagatcttcgagttcaaagagaccctcggaacgggaaggtgtggctcattgactttaatccatttggtgaagtcacagattcactg

SEQ ID NO: 54591 - DNA, 99 bp, Homo sapiens
caggccccctcaccatcctagaggtcaagatcagctctggctaggagccaagccgccatggcctaccacagcttcctggtggagcccatcagctgccac

SEQ ID NO: 54592 - DNA, 100 bp, Homo sapiens
ctcctctccatctgctcacttcttacagattgcaaccctggtggagccgccaccaaaatgcagattttcgtgaaaacccttacggggaagaccatcaccc

SEQ ID NO: 54593 - DNA, 90 bp, Homo sapiens
gaggtcgtataactgcactcccgtcagcagcccgcgtctgccgcccacgtacatgcacgccatgtgtgacatattcgatgccatgttccc

SEQ ID NO: 54594 - DNA, 82 bp, Homo sapiens
tgtatgacgatgtggaacccagagatgactccagccccagccccaagggcagagcaccaacctgaggttccacagccagtgt

SEQ ID NO: 54595 - DNA, 100 bp, Homo sapiens
ctcaaagaccttgccgatggcgcaggagattttccgcctgtctcgtcaccacatccagactggcccgggagcaagcgcgagtgtgcgaactgcagagtgg

SEQ ID NO: 54596 - DNA, 83 bp, Homo sapiens
aagcatgtggaggatctgttgaccaaattaaaagaggcagtaaagagggatatattgaacacagttgctgatcgttgtgaaat

SEQ ID NO: 54597 - DNA, 100 bp, Homo sapiens
agatgttgtcctgtgctggggctgacagggattcccctgaaaccaatgttggcccatcccacccggggcatcagcgaggtcctgaaacgctttgaggagg

SEQ ID NO: 54598 - DNA, 100 bp, Homo sapiens
actcttacctaccaccttagtcgtttatttcttccgagttagaaatcctacaaaggaccttgttgctgcttttgctcagaggacatccatgaccctaatg

SEQ ID NO: 54599 - DNA, 96 bp, Homo sapiens
tgacatcaagcacacgactcttggtgagcgaggagctctccgagaagcaatgagttccttccgcagaggtcacatcctgccaaccccacctgcgtg

SEQ ID NO: 54600 - DNA, 98 bp, Homo sapiens
gaataacggctgcacctggagattgacgcagagtgggcggcggtggtggtgtcatggagaaactccagctgggcccagagattctgcagcgggaaaat

SEQ ID NO: 54601 - DNA, 100 bp, Homo sapiens
agagcgtgaccgagagcgcgaatatcgtcatcgttagaaggaaaattctgtttgaagatttccggtcctggctttctgatatttctaaaattgacctgga

SEQ ID NO: 54602 - DNA, 100 bp, Homo sapiens
ggaaatagaaatggggcttaagttccgtgaactcagtactgatgcccagtggggcattcgtcttggtaaacttggtgaaaaaagtaatcctcttggaaag

SEQ ID NO: 54603 - DNA, 83 bp, Homo sapiens
accggctgttcgaggccttgactgtaggctctgtgtgctccgggatggagcaggtgtgcagagggtgagaacccagctctggg

SEQ ID NO: 54604 - DNA, 75 bp, Homo sapiens
gcgtctcagcagagctgtcttcccaagcctttgatgacaaaccacggaaggcagacagattgctgccaacatgag

SEQ ID NO: 54605 - DNA, 116 bp, Homo sapiens
atttaatcactgtgcaatgaccgtgaactgtacagttacctccgtgtgtcacaggaagactcttcaatcttcctgagctcttttcgggtgccatatgaggaaatcagaatgatgat

SEQ ID NO: 54606 - DNA, 99 bp, Homo sapiens
caccgatggaatcccagaggaaactgacggagacgcagatgtggacttgaaagaagctgcagcggaggaaggcgaggctgtcacccttgacccaaactt

SEQ ID NO: 54607 - DNA, 74 bp, Homo sapiens
ccaggcaccttctccatgcattgcaaggaatgatgagaagacagcagctgattacaagattttaggtggttcag

SEQ ID NO: 54608 - DNA, 96 bp, Homo sapiens
cgcagtctattaacatcacggagctgaatctgccgcagctagaaatgctcaagaaccagctggaccaggccccggacacccgctctgctgcaggag

SEQ ID NO: 54609 - DNA, 51 bp, Homo sapiens
tcaacttgaacgaatatttctggccagaaaaagagacgtattgctaatacc

SEQ ID NO: 54610 - DNA, 97 bp, Homo sapiens
agaaggcaccaccacagccgcccacttctggaaggttccatcccctgcaggcccagcagccaccacagcgcctgcttcctcggccctgaaatcatgc

SEQ ID NO: 54611 - DNA, 98 bp, Homo sapiens
ccggagcccgggaggggccgcgccgccaccgtctgaactaggatgtcccgacatgaagcaaagcgagctgaattccttcttgtggaccattaagcgag

SEQ ID NO: 54612 - DNA, 88 bp, Homo sapiens
gttttttcatattacatctacaagaggggacaagtacctttatgaaccagtgtatcccaaccaccaactgctgtccccaaggaaatgg

SEQ ID NO: 54613 - DNA, 95 bp, Homo sapiens
tcttcaaagcacataaaaacactttctgaagctcatgaagactgtgtaaataatatcagggtaacccagagaacacagccgaagtggaatgtggg

SEQ ID NO: 54614 - DNA, 96 bp, Homo sapiens
gaaggctagtttggatgtggaggggaatagactccatctatccatatgaggtgttggagcgggccggagagaagtagagtgggctgcgaggagaag

SEQ ID NO: 54615 - DNA, 100 bp, Homo sapiens
gagtacgacagtatttcctggacttagctttgtcatgcaaagctgtcatttgctgtcggaagttctactacatcaccctgctacgagaccccgtgtcccg

SEQ ID NO: 54616 - DNA, 98 bp, Homo sapiens
tggagtctgatggaaagagataggcgcatctctggagttgatcgttactatgtgtcaaagctcacggatgattgatatccagaccaggatggctgggc

SEQ ID NO: 54617 - DNA, 98 bp, Homo sapiens
ggccgcccgggaactgctgacgcttgatgagaaggacccacggcgtctgttcgaaggtcaagagcaatctgaatccaaatgcaaaggagtttgttcct

SEQ ID NO: 54618 - DNA, 109 bp, Homo sapiens
cgagaacgaagtaggccgtctcgctctgggtctccaggcccgcgaccgtccgccagtcgtcccgagaaactggcgatggaatatgagaggagccctctggaaagaaaag

SEQ ID NO: 54619 - DNA, 98 bp, Homo sapiens
ggctacaggactggggacttccagctacacactaatgttacaaaactttttaccaacaaaaaaaagcaagtagttatactcaggaagaacttcaagac

SEQ ID NO: 54620 - DNA, 100 bp, Homo sapiens
ctgcagcttcgaagcctcacaggcgcagttgtgtagcagttgagtaatgctggttagctgttaaggtggcgtgttgcagtgcagagtgcttggctgtttc

SEQ ID NO: 54621 - DNA, 74 bp, Homo sapiens
gtattaaaagacctgagaacctggtgtggagccgccaccaaaatgcagattttcgtgaaaacccttacggggaa

SEQ ID NO: 54622 - DNA, 74 bp, Homo sapiens
cacatgcagatgagaagtccttagacatatctgaagagatggattaagaatgctttggattaaggattgtggag

SEQ ID NO: 54623 - DNA, 76 bp, Homo sapiens
ggatactggagtgactggagtgaagaagcaagtgggatcacctatgaagatatttaacaggcgtcatcattgtcgc

SEQ ID NO: 54624 - DNA, 98 bp, Homo sapiens
cgatacaccgagctgcgcacggtgcccagcgcagggagaacaaatgatcatctgtccaacgcgcccatttacagcgaccgggacacacagctggcacg

SEQ ID NO: 54625 - DNA, 74 bp, Homo sapiens
tgccagggtccctgaagagggaagacacgcggaaacaggtagagtacagagagatggatgaaagcttggccaac

SEQ ID NO: 54626 - DNA, 90 bp, Homo sapiens
ttgtaaggatagaacctaagaatccaccaccacccatcaattttcaggagagaagtggatgggccctatacctccagccgtgaatgccag

SEQ ID NO: 54627 - DNA, 98 bp, Homo sapiens
gatcctgactcgaggaaccttggatgaagaggatgaggaagcagacagcgatactgatgacattgaccacagaggcaaatacgccatgcgagacctag

SEQ ID NO: 54628 - DNA, 98 bp, Homo sapiens
cgcgggagcacggcgacgccagcggcggtgaaacaaagagtcctcttcgtggaaaagaaaaaaatacgctccctttaaacggtggattgaaaatgact

SEQ ID NO: 54629 - DNA, 88 bp, Homo sapiens
aaagcggaagcggcctggcaggggaaggatcgaggtacatgtcccagagcaagcacacggaggcccgggagctcatgtactcgggagc

SEQ ID NO: 54630 - DNA, 100 bp, Homo sapiens
gcagagacgccacagcagcaacacggataacattccacctgaaagaatcgcaaaggtgccgtgagcgagctggagcatgttcctgacacagttttgtgtg

SEQ ID NO: 54631 - DNA, 82 bp, Homo sapiens
ggaccgggccgcgcacgccgcctcagcatggctattatctatggagtgttctctgcttcaaatttgattacaccgtcagtgg

SEQ ID NO: 54632 - DNA, 75 bp, Homo sapiens
ttttgccggaggagcccctcaggccgtattagaaaactactcggatgctccaatgacaccaaaacagattctgca

SEQ ID NO: 54633 - DNA, 100 bp, Homo sapiens
cgcatcgcctcagtgtggtttgggcccaaagaggtgtccacagcttgtgccaccgccgtgctgggcaatcagtttaaactcatatcccaggcatatgaag

SEQ ID NO: 54634 - DNA, 130 bp, Homo sapiens
tccagccaacactgatcttgcaaactcagatgcgctgaagctagctaaagaagttgatcctcaaggacccagatgatgtggtaccagttggccaaagaagagcctggtgttggtgcatgtgctttggact

SEQ ID NO: 54635 - DNA, 100 bp, Homo sapiens
gcccgtgcctgtcttcagatcttcacagcacagttcctgggaaggtggagccaccagcctctccctggaaacccttctagtagttggccttcacccactg

SEQ ID NO: 54636 - DNA, 100 bp, Homo sapiens
agccagggtcaccatcaaaatggaatgtaaccctagccaggtgaatggctcaaggaataggaggccttcaagattttgtgctgaaatctgcaacactgtg

SEQ ID NO: 54637 - DNA, 100 bp, Homo sapiens
tacagctgatggcggaggccgagaagcgagtcaaggcctcccactccttcctccgagggctgtttggattgaaaaggaagatcaggccaaccccaaagaa

SEQ ID NO: 54638 - DNA, 100 bp, Homo sapiens
ccgctcaaagccgggagatcgactgtttgagcccggaagcgcagaagctgattctcgctgaagtctgttaattctactttttgagtacttatgaataacc

SEQ ID NO: 54639 - DNA, 74 bp, Homo sapiens
ggcagacaagaatgtgcccaaccttcatgtcatgaaggccatgcagattatgcggatcaaacctcaccaaggcc

SEQ ID NO: 54640 - DNA, 50 bp, Homo sapiens
tgccaccaaagacctgcgactttgctcagctgaataccactagaaacata

SEQ ID NO: 54641 - DNA, 74 bp, Homo sapiens
cagcatggcaccgatgccgagaggagacacgtaccagatcatcagtcaattaagttaagtaatctaggtgagaa

SEQ ID NO: 54642 - DNA, 100 bp, Homo sapiens
ggaacggaggaagaatccattcacactccccaaaccaggtatattacagctaatactgacacagaagaacagagttttccagtccctaaggcatttaaca

SEQ ID NO: 54643 - DNA, 100 bp, Homo sapiens
tggagataaggcaagatgggagccaacgtctgtcagaagcccagtggtatcctggccagctctatgggggcctcaccgactgcatggtgaagatctggcg

SEQ ID NO: 54644 - DNA, 74 bp, Homo sapiens
gatgaagattttaaagagcagactagacttctcaaggctgacatctggtccctggggatcacagccatcgagct

SEQ ID NO: 54645 - DNA, 82 bp, Homo sapiens
tggaattaggcaaatatggacaggtatcttggagatggccgcttccatctggagtctgtcatgattgccaaccccaatgtcc

SEQ ID NO: 54646 - DNA, 74 bp, Homo sapiens
ttgaggactttgtctctgatgagctgagaaacaaagccacccagccaatgaagatcccagcttctgcagtggaa

SEQ ID NO: 54647 - DNA, 100 bp, Homo sapiens
cgcgaggccgacaagagccacccggagcagcttcgtgaccaccacctttgtgatagaggccatggctgcagccaacgcgcagctccactggaagaggatg

SEQ ID NO: 54648 - DNA, 100 bp, Homo sapiens
ctcatattctacttcattcagaagatcaggtacacaaatgcacgcgacaggaaccaggatcaccagccttttgcaaatgcacacgatgtgctagcccgct

SEQ ID NO: 54649 - DNA, 100 bp, Homo sapiens
gaggaaactcgcagataccgacctactaagaactacctgagctacctgacagccccggattattctgcctttgaagaaaagaagatatgcttcttaaaca

SEQ ID NO: 54650 - DNA, 83 bp, Homo sapiens
ccccggcacacgcgcagccccggcctctcggcctctgccggagaaacaggtgtgaacccacatccctgcccccagggccacct

SEQ ID NO: 54651 - DNA, 87 bp, Homo sapiens
aaggccacaaagctgcgatcacctccttggacctcagccccaacggcaagcaacttggcatcccgggcccaaatcctagacaaagcc

SEQ ID NO: 54652 - DNA, 76 bp, Homo sapiens
agtatttctttggcatcactgcagctagtaatttgccttctggattgtacaacaaataacactgtgactccaacct

SEQ ID NO: 54653 - DNA, 100 bp, Homo sapiens
ggcgcggggtctgcaggacgtgctgaggaccaacctggggcccaaagggaccataaagatatggggtcgaggatttggtcttttgggttccatttttgga

SEQ ID NO: 54654 - DNA, 103 bp, Homo sapiens
tggaactctggggctatgttgctgccaggtgtttgtggcttgatcgtcccccaggaagacatgccattttgtgattctggcatctgtccggacatcatcatga

SEQ ID NO: 54655 - DNA, 98 bp, Homo sapiens
gaaacgatcctttttggatctctgctcctatactttccaaatgaccagtccatgggtgagatgcagataatcggaggcgatgatctttcaacgctggc

SEQ ID NO: 54656 - DNA, 75 bp, Homo sapiens
agaagaaaataagataaattcatcggtgaaattcgcttctggtaatactgtagtgtcttctcagaaacaaccagc

SEQ ID NO: 54657 - DNA, 74 bp, Homo sapiens
actactgaggattctgtggcagtgcccaggtaccacaagttgatttgggggccttataaaatggattccaaagg

SEQ ID NO: 54658 - DNA, 100 bp, Homo sapiens
cggatgtctgtcctcaaggagcagatgagggtttcccatgaagaaaatcagtttgcagtgttgatgtgggtatttacctatgttggtgccttgtttaatg

SEQ ID NO: 54659 - DNA, 50 bp, Homo sapiens
ctggaaggagactggatgatagaattgtttttggattcaaagcataaaaa

SEQ ID NO: 54660 - DNA, 75 bp, Homo sapiens
cgagcccgcctccagctccaggccggtccgctgccagcaaaatgatgcttcaacacccaggccaggtctctgcct

SEQ ID NO: 54661 - DNA, 98 bp, Homo sapiens
ccccggccttctcgcggccgtgatgcacctccctctgcggtggggtccgggacatggcagacaatgcagatcttcgtgaagactctgactggtaagac

SEQ ID NO: 54662 - DNA, 74 bp, Homo sapiens
cggagccgagccggaactgcggcagtctctccctgccaggctcttcatccaagatgctgtctttgcatttcaac

SEQ ID NO: 54663 - DNA, 100 bp, Homo sapiens
ccaacgcagtggcggcagtcggtgtaaacaaggcctcgcgccgctgcgggtcctgcgaccgctcctggctgggccacctcctccccagcccctcctgcag

SEQ ID NO: 54664 - DNA, 82 bp, Homo sapiens
gcagtcggcactgctactgcgaagacagctggcagatcacacaaaccctgaactggctggtgaggatgacatcagaaataga

SEQ ID NO: 54665 - DNA, 50 bp, Homo sapiens
gctgaatcctggctgtgtgaccccaagtatcgagaaccttccctgcgaac

SEQ ID NO: 54666 - DNA, 85 bp, Homo sapiens
tcaactatgctctccgctgtgtccacagcgttcaaggaaggagatcctgcaggaatacctggagattagcagcctggtgcaggat

SEQ ID NO: 54667 - DNA, 100 bp, Homo sapiens
cgagcagcgccagcggccgagcgggcggcttcctggcctgggcgctccggtggcggcggaggccttctggcggccgcccctggtttctcctggggggtga

SEQ ID NO: 54668 - DNA, 75 bp, Homo sapiens
aaggccagtgactaccaacgtttggaccagaagcatgtgtttgatgatctcagaggctcagtatccttgtcctgg

SEQ ID NO: 54669 - DNA, 101 bp, Homo sapiens
gtgatctacgtgtgctttttcaagggagctgataaagaacttcttcccaaaatggtgttctggacttggtgcctctttctgttatatgctttcctatttag

SEQ ID NO: 54670 - DNA, 89 bp, Homo sapiens
gcggcaccggaggggagggccgggcgcggcggcggcggcggtggaggagccggagcataatgggccacaggagaatggtatgctgctcg

SEQ ID NO: 54671 - DNA, 75 bp, Homo sapiens
gttgcttgcttgcctgtgcgcgcgtgcgcggacatggcctcaaacgaccatgctcgacagctgaccaaggccatg

SEQ ID NO: 54672 - DNA, 100 bp, Homo sapiens
aaattttgataccaccattgccgccttcccctcaaaaaagtacaaggcgagtggataattccaacacaagactggcagtccaaattgaaagagatccagg

SEQ ID NO: 54673 - DNA, 149 bp, Homo sapiens
agctttgcagaatgctcagagaaagcgaaaaatggaacatgatggttcactttttcaagcagtaggaatttctattatcctcccagtccacaacgctgaaccgtggctggacgaatgtttgaggtctgttttgcaacaggactttgaag

SEQ ID NO: 54674 - DNA, 50 bp, Homo sapiens
ggaacggtgccacagcatcaggttcagcatcactgcaaaacttgaaagag

SEQ ID NO: 54675 - DNA, 98 bp, Homo sapiens
ccagcaccgacgcagccctggagccacacccactcgcccgggtctatggccacggtcggagagtggtcctgtgtgcgctgcaccttcctgaacccggc

SEQ ID NO: 54676 - DNA, 101 bp, Homo sapiens
ggcgtgagccaccgtgcctggctgaagctatggttgatactaaaggaggttttcccactatccgtatgcatcttctctgttttgagattgcaactatggac

SEQ ID NO: 54677 - DNA, 51 bp, Homo sapiens
aggagaggctgcttcttgtagagacatcaactagtcaggcagtcttccgtc

SEQ ID NO: 54678 - DNA, 100 bp, Homo sapiens
caaggagcggcgcagggcggtcctggagctgctgcagcggccggggaacgcgcgctgcgcggactgcggcgccccggaggctgggaggcggcagaatgca

SEQ ID NO: 54679 - DNA, 50 bp, Homo sapiens
ttccagctgttacatcttgtggtcaccgagacttggagccagaatctgag

SEQ ID NO: 54680 - DNA, 95 bp, Homo sapiens
cgggcgcgctgctgctggcgctgctgctgcacgggcggctgctggcgcctgcatgatatacttaacaatctgagatcaaaatatgccaagcaaat

SEQ ID NO: 54681 - DNA, 100 bp, Homo sapiens
ctggagacggcctgggtgctggcgaagcggaggccggagcaatggctgccatccggaagaaactggtgattgttggtgatggagcctgtggaaagacatg

SEQ ID NO: 54682 - DNA, 90 bp, Homo sapiens
cacagcctgaaaatgaaaaggaagcttcaggtggagacagcccgaaggggctgataacatccggaaatactggagccgctactaccaagg

SEQ ID NO: 54683 - DNA, 51 bp, Homo sapiens
gagttggctgtgcagatccagaagttacatattattgaagttggcacacca

SEQ ID NO: 54684 - DNA, 74 bp, Homo sapiens
acaagaggcataaaacagttctcactgaactacaggcagaggcaaggctggcagcaaaacgggctgcccgggca

SEQ ID NO: 54685 - DNA, 101 bp, Homo sapiens
gcggaaacagagcaacccccggcagatcaagcctgtcgcctggttgggcccggaaatgggacgtcgcgctttctcagggagcgtagaagcagccagggcct

SEQ ID NO: 54686 - DNA, 49 bp, Homo sapiens
cccttcttccacatgaaaaggataaggtccgggcactataaaggggcct

SEQ ID NO: 54687 - DNA, 138 bp, Homo sapiens
cgaggttatcgttaggcatctcccaggcgaccggctccgcagcaagatggcggacgagaaggacagggaaggtgatctgcaactctttcaccatctgtaatgcggagatgcaggaagttggtgttggcctatatccca

SEQ ID NO: 54688 - DNA, 75 bp, Homo sapiens
ctgcctcgggccctgcccctacatttggagcctggacacgcagtacagcaaggatttttagactctgaggagcag

SEQ ID NO: 54689 - DNA, 80 bp, Homo sapiens
ggcacccgggagtcatcttcaaagccctgaagactgctgcagtaagaatgtcttttccacctcatttgaatcgccctccc

SEQ ID NO: 54690 - DNA, 82 bp, Homo sapiens
taacactcaagcctttctacatgagggataatgaagatggccctcagcacacggtttttcacgactgaaaacaacatagcaa

SEQ ID NO: 54691 - DNA, 95 bp, Homo sapiens
cgtcgtgatccagaagtccagagctgaggactgcctgtttgcagggagcccaagcaatctttaatgagctaccttgtgaatatgtggagccccat

SEQ ID NO: 54692 - DNA, 97 bp, Homo sapiens
gcctctgttgacctatgatctgcagggagacgcacagccaggacatcctggaacctgggaaagggatactgtcatgaagcagacacatgctgacaca

SEQ ID NO: 54693 - DNA, 75 bp, Homo sapiens
gccctggtcttgctcggccgatgaagtgcagaggtttttttctggattacatcccagtagaccaagaagagttaa

SEQ ID NO: 54694 - DNA, 100 bp, Homo sapiens
agaatcctaggatacaactctctggaaattcttgctgttacctagaaaagtacgagaaagttcatcattttggggaggatgatgatgaggtaccaccagg

SEQ ID NO: 54695 - DNA, 110 bp, Homo sapiens
gagagtctgagtgcagccaccacctttgagcctcttgagcctgtgaaggacactgacattcaggctcatcagattcaagagatgtttccccaggttccataccatctggt

SEQ ID NO: 54696 - DNA, 100 bp, Homo sapiens
agcgggccctgcgcgcctgatgggtcgaggcggacgcgcggctgcgtcaggtaccccaagaagctagtgcagacttattcagtgtttccctaccaggacg

SEQ ID NO: 54697 - DNA, 96 bp, Homo sapiens
ctttggggatatctgggacaagatgctgcagaagccctggtacctgacagtgtaaagaaggagctcctacaaagaataagaacattccttgctcag

SEQ ID NO: 54698 - DNA, 75 bp, Homo sapiens
ggaaccgcactgcagagaaaaccatgctcgacagctgaccaaggccatgatgcgaaaggccacggccagccgcct

SEQ ID NO: 54699 - DNA, 82 bp, Homo sapiens
tgagattaggcgagaacgagagaggcagacaaacccatcagccatggtctcggtccagctcgacttccagctcaggctccag

SEQ ID NO: 54700 - DNA, 101 bp, Homo sapiens
aagagaagcaaggcaaagtcttttgtgctcccctcccccatcaaaggaaaggggaaaatgtctcagtcgaaaggtatcagcagatgttgcacacaaacttg

SEQ ID NO: 54701 - DNA, 75 bp, Homo sapiens
tcatggatgttcttcttcgagtatttgtagaaggattttgcctgcctgagctcctctagtagtggccacaattgc

SEQ ID NO: 54702 - DNA, 100 bp, Homo sapiens
cagcaaaatccagtagttcttctaatccaaaatgggatgaacagctaactgtgtgcaggttttgcagcatttggacaaacaaagccagtagtaacccctt

SEQ ID NO: 54703 - DNA, 95 bp, Homo sapiens
tggattggatatggttggagtggcacagactggatctgggaaaacattgtctaaaacatccagtacagacctttctgatatccctgctctccctg

SEQ ID NO: 54704 - DNA, 98 bp, Homo sapiens
tgggtcagtccgccgctcaccccgcggccgcaccttcccgccttctcaggttccgaggattctgaagacgacggggagacattgctggaggtagcggg

SEQ ID NO: 54705 - DNA, 100 bp, Homo sapiens
tatgcccaccctccaactttgcgacggaaatgtgtcatcgaaagccaggcctatggcatgtctgcgttacctttaaatctgataaaaggcactagaagcg

SEQ ID NO: 54706 - DNA, 100 bp, Homo sapiens
ttgcagaagccgtggagacgggtgaggaggatgtgattatggaagctctgcggtcatacaaccaggagggaccaaagcagtatccttacaataatctgta

SEQ ID NO: 54707 - DNA, 100 bp, Homo sapiens
gttattagaaagcttggatgggggcacttctctactgtctggctgtgctgggatatgcataagtacaaggtggactgtgcatgcctcaaagaaaacccag

SEQ ID NO: 54708 - DNA, 100 bp, Homo sapiens
gttatgatcagcacaaccttgttgcatgccagataaatgatcaggaattgaatgatctggcacgggaccctccagcacagtgttcagcaggtcctgttgg

SEQ ID NO: 54709 - DNA, 74 bp, Homo sapiens
gcctcccaagtagctgggattacagacgaccagagccccgctgaaaagaagggactgcgctgtcagaaccccgc

SEQ ID NO: 54710 - DNA, 100 bp, Homo sapiens
ctactcgttctaattccacgcgctccaaaatatccgccatggagaaatcttggtgggcattcacgctgatcatcatctcatcctacacggccaacctggc

SEQ ID NO: 54711 - DNA, 50 bp, Homo sapiens
ggtggacgctaatgtcgccgcgcagagataacgaaggaggcccaacttca

SEQ ID NO: 54712 - DNA, 105 bp, Homo sapiens
cgcagcgtctagtccctggccatagctccgccgctgcccggtcaaaatgcagatcttcgtgaaaacccttaccggcaagaccatcacccttgaggtggagcccag

SEQ ID NO: 54713 - DNA, 100 bp, Homo sapiens
ggaggatctgaaacttgcgaaatccctggtgccaaaggctttagaaggttatatcacaggaaggtgggagtcaatcattttgacaagtctcctgaaagga

SEQ ID NO: 54714 - DNA, 50 bp, Homo sapiens
ccgccctggccatctaccatgtgcaaaactggttgaacagcggatgaaga

SEQ ID NO: 54715 - DNA, 98 bp, Homo sapiens
ggatgttcggtgcagctgccagatccgctgatctagtgcttctcgaaaaaaaccttcaggcggcccatggaatatgcttataggcgtggaattgcaga

SEQ ID NO: 54716 - DNA, 98 bp, Homo sapiens
cgcagagggtgcccctcgaggactgctctgagatcaactgcatgatccgggtgaagaagcagtgctattaccacagctactggcactccatggtctat

SEQ ID NO: 54717 - DNA, 51 bp, Homo sapiens
atgcaaggacactgacaactctgagggagggctcagtaaagagacaagcac

SEQ ID NO: 54718 - DNA, 75 bp, Homo sapiens
tcagtccctgatcagatcagaggagagtataacaaagccatccggaactacacccgcttcgatgactggtacctg

SEQ ID NO: 54719 - DNA, 73 bp, Homo sapiens
aatcctcaacagatgccactgtaagtggggagagaagctgctcaggcactgaagatgctggccgtcgccagct

SEQ ID NO: 54720 - DNA, 98 bp, Homo sapiens
tactcccctgctatccccaacaagaggaaagacacacctaccaagaagccagtcaagcggccagactcagtgactatctcttcacgctagccagatat

SEQ ID NO: 54721 - DNA, 100 bp, Homo sapiens
gctgaggattgtagagccatatattgcatggggctgtgaccagcaaccacgacggaggctgtgactgctacgtccaagggagtgtggccaataggaccgg

SEQ ID NO: 54722 - DNA, 74 bp, Homo sapiens
cgaaagcatgtcatggaagttcgacaacagcctaagagtttgaagtgaaaatgcctcgtgtaaaagcagctcaa

SEQ ID NO: 54723 - DNA, 80 bp, Homo sapiens
cagccagggcttctgcttcaacatcctgtgcgtgggtgctggagaatctggtaaaagcaccattgtgaagcagatgagga

SEQ ID NO: 54724 - DNA, 100 bp, Homo sapiens
atctgccaaatccggagccaacctcctgacaaggtgatccgggcgggccccgcaggaattttatcccctcaccggcctcacactagtatcgcatgtccac

SEQ ID NO: 54725 - DNA, 83 bp, Homo sapiens
cctggacaaaggagagaatgggactctcaggtcatgcaagacaagataatctgccttccgaaaagagtgcagcctgctcagaa

SEQ ID NO: 54726 - DNA, 83 bp, Homo sapiens
atgaaaaagtcaccttgtctttccctagtactctgcaaacagaaaggagaatcacttgaacccaggaggaggaggttgtggtg

SEQ ID NO: 54727 - DNA, 74 bp, Homo sapiens
ccgcacgacctcagcaaggcaagtgtgaacatggctacgcctcttcattcccgtccatgccgagcccccgactg

SEQ ID NO: 54728 - DNA, 97 bp, Homo sapiens
cagacagaacagttaatcctcaatttaagcctgatctaacccctagaaacaggtcccctcttgctgttggctgcacatcaggaaggctgtgatggga

SEQ ID NO: 54729 - DNA, 100 bp, Homo sapiens
aaagccaggttgaccattgctgccgttctgtacttgcttttcatgattggagaacttgtagactcctcagacccctgcacaattgagagaaaagcccgaa

SEQ ID NO: 54730 - DNA, 75 bp, Homo sapiens
gtgacctcggctgaaaagaagaagccagtgtttgagaaaagcttcgtggtatatgagtagaccagtgatgagtgg

SEQ ID NO: 54731 - DNA, 101 bp, Homo sapiens
ccagcctccagcagcagaagcagcgcctgatcgagtccctccggaactcacactccaggctgcccggcagctctgacagactcagaggacgagtccccaga

SEQ ID NO: 54732 - DNA, 75 bp, Homo sapiens
aggtggagaaagtggtggagattgtccgctcgagcctgaaggaccctgagaaagcacttgaaaagtcttatgaca

SEQ ID NO: 54733 - DNA, 74 bp, Homo sapiens
tttcttcgaggacctcagcaaggtttggtgcacctcgatttggaggaagtagggcagggcccttatctggaaag

SEQ ID NO: 54734 - DNA, 100 bp, Homo sapiens
acgctggaaagtcggccaagaaagacaaagacccagtgaacaaatccgggggcaaggccaaaaagaagaacattactactggatggaaatccattccgag

SEQ ID NO: 54735 - DNA, 100 bp, Homo sapiens
aaaaaatataataaggctgagtgcggagccaagctctgcgtacgtgtcctatgggggcctgctcatgaggctgcagggggatgccaacaacctgcatgga

SEQ ID NO: 54736 - DNA, 75 bp, Homo sapiens
aaaggtcgcctttgctactaccgcgactggctgctgcggcgcgaggtgagcccaggccaggatgggggactccag

SEQ ID NO: 54737 - DNA, 99 bp, Homo sapiens
ggcggctgctgctgctgctgcccgcgtccgaggctcgcgggcggcgggcccgggctttaccgccagcacctgttcagaatcacacaaataagcatcagg

SEQ ID NO: 54738 - DNA, 157 bp, Homo sapiens
tgcagtgccctcccagagaccaacgttcaagcagttggtagaagacttggatcgaattctcactctcacaaccaatgagagagaggctgctcacccaacagacgtctccatctccaaaacagccttgtactcccgcatcgggaccgctgaggtggag

SEQ ID NO: 54739 - DNA, 75 bp, Homo sapiens
atttttggatgatgatggatccatttctcctattgaggagtcaacgatgtatcaggacaaactggcttctctcaa

SEQ ID NO: 54740 - DNA, 50 bp, Homo sapiens
cgctggcaagtctcaaagtcgccacaggacctccggctagcctgtttcag

SEQ ID NO: 54741 - DNA, 83 bp, Homo sapiens
gtggctcctcgagcaaaaatgaaccagcagcgtgggaggcgttttagccctggtacctgacagtgtaaagaaggagctcctac

SEQ ID NO: 54742 - DNA, 100 bp, Homo sapiens
gttctgcagagggaacaggccagagggaggaggactcagaatgcttgaaagagtctgtgctgagacctataaccctgatgaggaagaggaagatacagat

SEQ ID NO: 54743 - DNA, 100 bp, Homo sapiens
cagggacgtgatgctggagaattataggaacctggtctccctgggtgagccgttctccaaccctttggcccccgatggccacgatgtggatgatcctcac

SEQ ID NO: 54744 - DNA, 75 bp, Homo sapiens
aagctgctggacaacaccatggaaatatttgacattgagctggaagagcctgtattgtcctcacaatagtataga

SEQ ID NO: 54745 - DNA, 100 bp, Homo sapiens
tggagggtggcatcatgcaaagaaattaccacccatagtgcgaggaggagccatcgacagatactggcccaccgccgacgggcgcctggttgaatatgac

SEQ ID NO: 54746 - DNA, 82 bp, Homo sapiens
ttttgagcaggagtccgggccctcgtgtcaccgctctgaagtcaaggagggtttccaggcctgaggtgcccgccctggcccc

SEQ ID NO: 54747 - DNA, 83 bp, Homo sapiens
ctgcatcattccttggggcaaaatgtggacaagggtcgcttatgatgaagctacagatgaatttgcttcttacttcaacaaac

SEQ ID NO: 54748 - DNA, 97 bp, Homo sapiens
acagagttatcaggttccagaccctgccttctcttctgaaagtgtaaacaggaacatcgataagtagtgtaaaaacttgcacaatgaaatccgaagc

SEQ ID NO: 54749 - DNA, 87 bp, Homo sapiens
ccacagcacagtacagagtatctaagagcaaagaatggctcaagaagtactgacacatttaaaggagcatcctgatgcttggacaag

SEQ ID NO: 54750 - DNA, 100 bp, Homo sapiens
tcaaagggtttttcgggaaaaagcacctgacttccttcctcttctgaacaaagacatatctgaagagatggattaagaatgctttggattaaggattgtg

SEQ ID NO: 54751 - DNA, 100 bp, Homo sapiens
tatgaaacaccaagaaaaagagaaggaaaaaaaggaggaaacaaccacatatgtcacctttccaaggataaacggaggaacctgcagcaacatgagcatt

SEQ ID NO: 54752 - DNA, 83 bp, Homo sapiens
caacgggcagtttgtcgaacgatgttggactcatagtcactgccagaaaggctgaaggtgatgtggccgccctcaaccgacgc

SEQ ID NO: 54753 - DNA, 100 bp, Homo sapiens
gagaaagttgctgaaggcaggagggggcatccgcttcgatcctgaaattccgcaaacactacgactagagtttgctaaggcaaacacgaagatggccaag

SEQ ID NO: 54754 - DNA, 75 bp, Homo sapiens
tttttcaagggagctgataaagaacttcttcccaaaatggttgtctggcgccgggagtgagaccctaaaacaaag

SEQ ID NO: 54755 - DNA, 100 bp, Homo sapiens
cgtacctctttgctaaatcgaacactgtatacaatccagtgatttatgtcttcatgatcagaaagtatgccatggaacctaattatctgcatatttggcc

SEQ ID NO: 54756 - DNA, 75 bp, Homo sapiens
gttcaaatccatcaaatcttctagaactttacacacaggctctggaatgggcactctccttatcagcaagatccg

SEQ ID NO: 54757 - DNA, 101 bp, Homo sapiens
aattgaatatgtgcatggatacttttctagtgaacaggtcttctggatttggcgacatcttactgtgaaaacagactgaaaaaactttgtcagcacattat

SEQ ID NO: 54758 - DNA, 97 bp, Homo sapiens
ccgtcctctgaggcgacggccgcggctgcacagaagtgtatgctgacttgtaaagtgaagaagccagtggtgctgcgggtgttcttttggggtagtg

SEQ ID NO: 54759 - DNA, 75 bp, Homo sapiens
ttgctgtccaccgtggccgcggtggtgctaggtactccaaagattcaggtttactcacgtcatccagcagagaat

SEQ ID NO: 54760 - DNA, 83 bp, Homo sapiens
ctgcgggaagaagttcacgcggcgcgagcacatgaagcgccacacgctggtgagaagccctaccactgcaactgggacggctg

SEQ ID NO: 54761 - DNA, 50 bp, Homo sapiens
ggagctcggggactcccccaaagacaagtttcacgccatggataccttgc

SEQ ID NO: 54762 - DNA, 114 bp, Homo sapiens
acacatctacaagtgttcaggcatcacagagcattggaggttccagtgctttcggatttgattacctctctagtgacccttcagctgttaaccctggttggccatgacgatcag

SEQ ID NO: 54763 - DNA, 73 bp, Homo sapiens
atcaacggcaggagaggtttgttccctgacaactttgtaagaattagtgatgatgaaccaggttatgaccttg

SEQ ID NO: 54764 - DNA, 100 bp, Homo sapiens
cctgaaatgccttatcagtctgtccaccatcatccttttgggcttgatcatcgcctaccacacacgtgaagtccaggagtcataccctgctgtgcccccc

SEQ ID NO: 54765 - DNA, 145 bp, Homo sapiens
tttacaactgtgtaactgtcttcatctttacagaggaatagtctacaaaggaagacttgtaacctggagaagaggttgcttgctccccctgttatgtacaaccacaagtcagccacagaattctgcaaacaacccactgtgcaag

SEQ ID NO: 54766 - DNA, 100 bp, Homo sapiens
ggacttcatctcattgctcagcgcggacctagacctggaatcgcccaagtccctctactcgcgaggaagtactagccggacatcatgagtggctgtcggg

SEQ ID NO: 54767 - DNA, 75 bp, Homo sapiens
catgaattgagtagacacttaacaaggacctgtgaaaagagcaagagaagaaacagacaaagaagaacctgcatc

SEQ ID NO: 54768 - DNA, 100 bp, Homo sapiens
ggatccgggtgatgagcatgacgcacacaggagagccaggattcatgctctacatccccatagaggatgtgtttcacatggtagttgaagtaccacgctg

SEQ ID NO: 54769 - DNA, 100 bp, Homo sapiens
gcgattcggtgaagcgattcctgcaggcgttggttcccctctttgacctgaaaaccgcctgattcccactgagttacgccgagaggctctggccttacag

SEQ ID NO: 54770 - DNA, 82 bp, Homo sapiens
gggaggtaggcgctgggccgaggagacaatgcagatcttcgtgaagactctgactggtaagaccatcaccctcgaggttgag

SEQ ID NO: 54771 - DNA, 75 bp, Homo sapiens
ctctagaggcgttttttggccaagggcgcgttcgttcacatagctcccagttttaacatttcgccacctactgaa

SEQ ID NO: 54772 - DNA, 100 bp, Homo sapiens
ttagcacttcaagtagaaggagaatgttgcaaatattcatataaagggcttcggaggagtgtacctcacagccttctaggatctccagagtggacaggaa

SEQ ID NO: 54773 - DNA, 74 bp, Homo sapiens
cgtggctggggaggcgaggccggacgcacctctgtttgggggtcctcaggtggtatgcattgggtcagtggcgg

SEQ ID NO: 54774 - DNA, 90 bp, Homo sapiens
gaagcatgggaaggaggccgagccgggatctcaggtcctcgggggcggcggccacgccaaggacggattctggaacttttcaaagcctga

SEQ ID NO: 54775 - DNA, 82 bp, Homo sapiens
gcaggagccctctatcttttgttctctggcatggaaggggtcctcagagttactggggtgggaatgatggttagatgctgcc

SEQ ID NO: 54776 - DNA, 75 bp, Homo sapiens
aaatattcaggagaccgtcgttgccttgtatttccagagaacaggttcaaaccttgtactactcagctgatcaca

SEQ ID NO: 54777 - DNA, 100 bp, Homo sapiens
gtggatttcacaccccattctcaaaaacaaagagtatcatcaacgggaagtgagagacagagctttttgtacatgccttcaaggatcaacttgtcaggag

SEQ ID NO: 54778 - DNA, 100 bp, Homo sapiens
ctgcttggagacggacttgcttccggaagtactagccggacatcatgagtggctgtcgggtattcatcgggagactaaatccagcggccagggagaagga

SEQ ID NO: 54779 - DNA, 98 bp, Homo sapiens
acgacatgtcaatctatctagccttgttcctagcctttgttgagattttatgagggtgtggtggaactttctcttacggctgcagagaaaaaagatcc

SEQ ID NO: 54780 - DNA, 97 bp, Homo sapiens
tgcatcagcaagtttgcaagtgaagatattgaagcacagattcgagaaattcaaggcaagaaggcagctcttgatgaagctcaaggagtgggcctcg

SEQ ID NO: 54781 - DNA, 75 bp, Homo sapiens
ttcgcctcgcctcgggacccgcggtccccgctcttgctggatcctcatgcggaagaatttgaagacaaagagtgg

SEQ ID NO: 54782 - DNA, 75 bp, Homo sapiens
caaattcaagagtgaccagggatgttgcacgtgcattatttaatcacatagacaagtcaggattgaaggatagtt

SEQ ID NO: 54783 - DNA, 100 bp, Homo sapiens
ctacgcccgggctggctcctttaccacaaaggtagcaacacaagtcggaatagaatggaacctgtcccctgttggcagagttaccccaaaggaatggagg

SEQ ID NO: 54784 - DNA, 144 bp, Homo sapiens
ggacggtacacggagcacaaagacattccccttggcatcagggctgaagtggctgcgatttatgagccacctcaggacgccaagagtgccgaggatgaggctccttccagacacttgggaaagcaccagccccgctcagcacag

SEQ ID NO: 54785 - DNA, 82 bp, Homo sapiens
cagctgcagggcggcagtaatgaggtctgtgcagacttttgcagacaaatcaaaacaagaagctctgaagaatgacctggtg

SEQ ID NO: 54786 - DNA, 109 bp, Homo sapiens
aaccattgacgccatgtcgggttattcgagtgaccgagaccgcggccgggaccgaggaccatggtgaatccgggcagcagctcgcagccgcccccggtgacggccggct

SEQ ID NO: 54787 - DNA, 78 bp, Homo sapiens
tctggagggatgcagagcctttccttaggacaaacaaggtcgtcacgctgtggtacagagcacccgaagtcttgctcc

SEQ ID NO: 54788 - DNA, 124 bp, Homo sapiens
gctagcaggctgtcataacaatgaccacctggtagagaaataccgcattcttatcacaaagccggcattttgcacagaggccgtgtcttatgcggaatacagggtgggtgtgcatggattcggg

SEQ ID NO: 54789 - DNA, 75 bp, Homo sapiens
gcaccagcgccttcgagcagctgcagaggtcccggtattaccagagaaacggagtctgaaactcttgaagagcca

SEQ ID NO: 54790 - DNA, 100 bp, Homo sapiens
taaatgttggaattacagacatgggccactacacctggcgatctgtgtcttatacggcctccccatggccacccatggaccagtcggcattcacttcctc

SEQ ID NO: 54791 - DNA, 114 bp, Homo sapiens
tgcaagtggaaggaaactcttcaccaaagaattgatcacatcatgaaaggttaacagaaccttctggatatttaacagatggcccaattaactataaatataaaactaaatgta

SEQ ID NO: 54792 - DNA, 50 bp, Homo sapiens
cagtgctcaaactcaccgaccaggtgctttacaaggccaagtacggtcca

SEQ ID NO: 54793 - DNA, 96 bp, Homo sapiens
ggcaacacagcacaagcaactgatttctcagaccaagaagaagcagtggctctgtgcagtgtgcctagaagacttcaagcctcgagatgagttggg

SEQ ID NO: 54794 - DNA, 82 bp, Homo sapiens
tttgatttccggagtcagtcattttactgtcaagacatttcttcggcattctgcaacagggctcacaacaacattaaaccag

SEQ ID NO: 54795 - DNA, 100 bp, Homo sapiens
tttccaccaccacctgctcctggccgcctgcatgcacagtggctttaagatcctcaactgccaaaaggcaatggcaaactcagtcgtggctttggagatc

SEQ ID NO: 54796 - DNA, 100 bp, Homo sapiens
tgggtctttcttgtcaactgctcacgacagaaggcgtctcatggcgttggaataccggctctcagcggcttggtggacttgctttgtgaagagacagttc

SEQ ID NO: 54797 - DNA, 82 bp, Homo sapiens
gccctaatggaggtctccagtttcggattttttatcaagcagaaatgcatcgaacaacgagaatcaagatcactgagctaaa

SEQ ID NO: 54798 - DNA, 74 bp, Homo sapiens
ggagaacttcaaccaggcactcaaggagttcaaagaaggacgcagagccagccacacagccccacaggtcctct

SEQ ID NO: 54799 - DNA, 75 bp, Homo sapiens
tcgcgcttttcgccgtcgccgctctccatcaaacaattcctggacttcggagccatatattgaagaccatgtctg

SEQ ID NO: 54800 - DNA, 100 bp, Homo sapiens
ccgcgccgcgctccaaccgcctcctcctcctcagtaacgcggctatccagtcagttcgctgctattcccatgggtcacaggagacagatgaggagtttga

SEQ ID NO: 54801 - DNA, 133 bp, Homo sapiens
ggaagacatggccactccagtcggtgttgagcacggcgagcagtctcaggcctttagtgatgatgacgcaaacatgcagatctttgtgaagaccctcactggcaaaaccatcacccttgaggtcgagcccagt

SEQ ID NO: 54802 - DNA, 75 bp, Homo sapiens
acatcacattttcatgcatcattttttcaaaatagggagtatagtcatggccaacagcaaaaaactcaagagggg

SEQ ID NO: 54803 - DNA, 82 bp, Homo sapiens
agaccctggagcctcagttggaagcagccgatccagcctgcggagcctgtggggcaggatgatcctttcaaaaataaagcct

SEQ ID NO: 54804 - DNA, 82 bp, Homo sapiens
aagtgactgggcggtgccggcgccggagacgatgccgttgtcacagtgctgtcgatatcaccaaggtggctagaagacatcg

SEQ ID NO: 54805 - DNA, 75 bp, Homo sapiens
ttttcttatcactaaaacagcagcactcaaggagttgcccctggtcctgtaattggacttcaggcaccatctact

SEQ ID NO: 54806 - DNA, 75 bp, Homo sapiens
tccaatgagacagggcacaccaaactccatctgagtcatcttagtgggatttggggaagcaacagggctgtgtgg

SEQ ID NO: 54807 - DNA, 75 bp, Homo sapiens
acttggactgagtcctgcaggacacagatcccatttaaaattctgagtgggcacgagcacgctgtgagcacctgc

SEQ ID NO: 54808 - DNA, 100 bp, Homo sapiens
agaagctcccccgacagcagcggaaggaaagcatgaagcagaagatggaggagcacacgcagaaaaagcagcttcttggttattttggagctgttggagc

SEQ ID NO: 54809 - DNA, 50 bp, Homo sapiens
ggattttcagcttcagcaagcagcttgccgaactaaagcaagaatgtctt

SEQ ID NO: 54810 - DNA, 101 bp, Homo sapiens
gaaggccctggacacagcaatatctctgggctttcacaggccataaaattttgagtagaaaaatccagaaatttgaaaatcagtatcgtggtagagagctg

SEQ ID NO: 54811 - DNA, 73 bp, Homo sapiens
tttcttccagcttctgctgtccttctttgtggagagcaaggttggatggcaagcatgtggtgtttggcaaagt

SEQ ID NO: 54812 - DNA, 99 bp, Homo sapiens
gctggagctgtgtgaggagatcgtggtctatgggatggtcagcgacagctactgcaggtatcatgatattagctggtttgacatcaagtcatttgtgag

SEQ ID NO: 54813 - DNA, 82 bp, Homo sapiens
aggattcgttggctgccgtccccgctgctgtgcattgggtggtggtgaagtttattaagaaggagaaggtcttggaggattg

SEQ ID NO: 54814 - DNA, 100 bp, Homo sapiens
cagatgcccctgggggccgactgtgcccggtacaccacgctgagcctgctgcgccgtgccaggatgcacatccaggagcaaatggaatgatgactttgaa

SEQ ID NO: 54815 - DNA, 82 bp, Homo sapiens
gagcatggcatggccccgcaggtcttcacccaggccctggagtgcatgcgcagctctccctgtccagccgcctgcagctgac

SEQ ID NO: 54816 - DNA, 98 bp, Homo sapiens
aagccaacaacagtgacggaatgcctccatacatgtggttgtgtcaaaccgattggtgacatctccatgctgtattgtcacaagcacatatggctgga

SEQ ID NO: 54817 - DNA, 75 bp, Homo sapiens
gaccagcatctctgcttgctcaccagacaacatctctagaccagatgatgtgcttctgcatcgcactcatgatga

SEQ ID NO: 54818 - DNA, 133 bp, Homo sapiens
ggatctcaagttcgcttttcagcacctccaaattctttggtttctttttttgatgcatctctacctggaactttgccgggtgcaatatgtgacttctgtgaagcttgggtttgccatggtaggaaatgtctca

SEQ ID NO: 54819 - DNA, 99 bp, Homo sapiens
ctcctcgcaaaaaatgccaaaacttataatgagcctggctctcaagtattcaagtgtttggtgtataaaacagaccaagctcaagatgtaaagaagatt

SEQ ID NO: 54820 - DNA, 50 bp, Homo sapiens
gatgtgaggaaaggcacctccaccaggaggtatatcgaattccaaagaaa

SEQ ID NO: 54821 - DNA, 75 bp, Homo sapiens
ttccagcttctgctgtccttctttgtggagagcaagtgttagaaattgattttgcggagctcaccttggaagaga

SEQ ID NO: 54822 - DNA, 75 bp, Homo sapiens
tgctctgagctttggctttggaatgtacaatacagctttatggcggtcatccactttgcggggctcaaggccgtg

SEQ ID NO: 54823 - DNA, 76 bp, Homo sapiens
gtccaatctgagcgtgctgcggacggcgctgcggtacatccaggttgcttatggaaccacagagaacagtcccgtg

SEQ ID NO: 54824 - DNA, 83 bp, Homo sapiens
gaaaataattaaatattcttaccgaggtagagctgaagtttcctgcaccaggcaagcctggaaattatcagtatactgtgttt

SEQ ID NO: 54825 - DNA, 100 bp, Homo sapiens
gcaattccaaaatgtgtaagacgggatattctcttctgtgctgtcaaggcttaaagaaagtggttattgtacaggtcatgaaccagattccctggagttc

SEQ ID NO: 54826 - DNA, 101 bp, Homo sapiens
cgtggtccggaatggaaaagtgggactggatgctacaaactgtttgaggataactgacttaaaatctgggtactaggttttgacaagcttgcatcatgcgt

SEQ ID NO: 54827 - DNA, 82 bp, Homo sapiens
ctgcagtggaccacagtcatcgagaggaccttccacgtggattctccagacgagagccttatgccagcctggaccatcttgg

SEQ ID NO: 54828 - DNA, 83 bp, Homo sapiens
cactcaggagcacgagcgaagtacagcttatggatggcttctttgcccaaaatgcagtgccaagttgggttccttcaactggt

SEQ ID NO: 54829 - DNA, 82 bp, Homo sapiens
ctgaaaccacagacatgactgagtcctccatgaagaagccagccccagtgcctgctgagccgtttgacaacactacctacaa

SEQ ID NO: 54830 - DNA, 82 bp, Homo sapiens
ggagaaggtctacagagcggcctgcgccagcgaccgccaccggcacggccaggccagcatggtggaccacttacttccagtg

SEQ ID NO: 54831 - DNA, 73 bp, Homo sapiens
gcaggggaggaagccacctcgagagactgcaaataggacatttcaagaaaaaggcatcctggtaggagagagc

SEQ ID NO: 54832 - DNA, 100 bp, Homo sapiens
gtcatgaagaaatatcctgtgaagaaaatctttgcagggcacctgaactcccaaagccactgaggagaaggccctgccctgggagaagccctgccacacg

SEQ ID NO: 54833 - DNA, 49 bp, Homo sapiens
gtggacatcggcatgatgaaggagtctgatgaagagtatgaagatggaa

SEQ ID NO: 54834 - DNA, 100 bp, Homo sapiens
atgaccctaatggtctttttgttcaagataaagtgattttttgcctttgttgattaactggacaaattcagaggtcctgctgtactagccaccaaagcag

SEQ ID NO: 54835 - DNA, 100 bp, Homo sapiens
ctggaactatacacctctgcatgaagctgctattaaagggaagatcgatgtgtgcattgagccacatgcagggttcagaatagctttcaacatgtttgac

SEQ ID NO: 54836 - DNA, 83 bp, Homo sapiens
agagatagagcgtttggaagatctggatacctgtatggctatagaaagcgcaattggtggtaacgcttatcaacacagcaaag

SEQ ID NO: 54837 - DNA, 51 bp, Homo sapiens
ccaggaggccaggggtgtcgccatgttcaaacaagctgtatataaacagac

SEQ ID NO: 54838 - DNA, 100 bp, Homo sapiens
cccacaaagagtataagcgagggaagtcgtgcacgaacaccaaggtcaaaatgcagatcttcgtgaaaacccttaccggcaagaccatcacccttgaggt

SEQ ID NO: 54839 - DNA, 81 bp, Homo sapiens
cgacgttacaatggtggagttggcaggtgtgcgcaggcccagatgaaggactgcatgcgcgagctggatgacacccgcgcc

SEQ ID NO: 54840 - DNA, 99 bp, Homo sapiens
gttccaccatcttcctctgaagacgtagccatcttgctccatgaagactattgtgtcaaagaatgcactgcagtaccggggaaattcccaacatgatgc

SEQ ID NO: 54841 - DNA, 101 bp, Homo sapiens
acgaggagcgcacgatgattgaccccacttccaaggaagaccccaagttcaaggaactggtcaagggccggtgcataaacttctcccgagttccatctcag

SEQ ID NO: 54842 - DNA, 73 bp, Homo sapiens
agtttgctcgaagccttcagtccgttgcagaggagcagcgaccacccgaattaagccctggggcaggggacag

SEQ ID NO: 54843 - DNA, 101 bp, Homo sapiens
ctggctaatggttgcattttatcaggaggaagccttttcaactggatagtgtcaattattccctgaatatcctatacacgacaccaaatggattgcttctg

SEQ ID NO: 54844 - DNA, 98 bp, Homo sapiens
tttctccttggagaacacttattattggttggcaaccaggtgttgactttaaggtgaaaacaatttcagtggatggaaataaggctaaacttgcaata

SEQ ID NO: 54845 - DNA, 75 bp, Homo sapiens
cttgtcctggctcttgccctcatcctggttctggaatcctcagttcaaggggctatctgatgggttagagtgcct

SEQ ID NO: 54846 - DNA, 82 bp, Homo sapiens
atcaaaatgaagttgaagcatcagagccaggctttcgaggactgactcctccaattccttgggaacatgcaccgcgtcccca

SEQ ID NO: 54847 - DNA, 82 bp, Homo sapiens
cactcctcaagaggagcagaccaaagagggagccggtgaaacctgaagaaggcagagatatggcaaacaggattggcgcttt

SEQ ID NO: 54848 - DNA, 75 bp, Homo sapiens
accacagaccggtatattcagcaggttgacaaggtcacaggcaggtttaatggccagtttaaaacttatgctatc

SEQ ID NO: 54849 - DNA, 98 bp, Homo sapiens
tgatcctgaaaggaaagagttcctggatgacctcttcgtctttatgcagaagaggggacttaaacaggcacaatcaaaaccatctcagtcagaagtca

SEQ ID NO: 54850 - DNA, 90 bp, Homo sapiens
cagaagaactggcttcgggaattttaccaggaattggattcaagtacgtggctctgggagacctcatcatcctcatcacttttggcccgc

SEQ ID NO: 54851 - DNA, 80 bp, Homo sapiens
gttgccactgctgttttagaacatataaaggtgaccaagaatatggcccaggtgaccaaagccctggacaaggccctgag

SEQ ID NO: 54852 - DNA, 100 bp, Homo sapiens
cgcggggtccgcgcccggagcgccccgccgcgcacaatgatatcatcaagttgaatcgaaaggaagggaagaagcagaattttccaagactaaatagaag

SEQ ID NO: 54853 - DNA, 96 bp, Homo sapiens
gaagcatacatgggtaatgttctacaaggaggtgaaggacaagctcctacaaggcaggcagtattgggtgcaggtgcatgtgagggaaccctggct

SEQ ID NO: 54854 - DNA, 78 bp, Homo sapiens
tcacccagggagttctgacagctctgcgtctcaggtcacacctgggtcctgagctggcgccatcaccggagacgccag

SEQ ID NO: 54855 - DNA, 82 bp, Homo sapiens
gagaagcctgtataaagatgtcatgatggagaattatggaaacctggtctcactggccctggtacctgacagtgtaaagaag

SEQ ID NO: 54856 - DNA, 75 bp, Homo sapiens
gtccctggagacgctctgccagccagacaatgcagatcttcgtgaagactctgactggtaagaccatcaccctcg

SEQ ID NO: 54857 - DNA, 82 bp, Homo sapiens
cggtggctgtccaagtgcctgggatgcaggtgtgagttcttgatacgaatgaaaggccaagagtttgttgatgagattcaag

SEQ ID NO: 54858 - DNA, 75 bp, Homo sapiens
caagcccctcttcaggagtaagttaagtgggcagaccaacatccacctcagcaaaaacttcttcctgacgaatcg

SEQ ID NO: 54859 - DNA, 75 bp, Homo sapiens
caagatctcagtcagagtaggaaataattttcacaaccttcaagaaattcggggcaccatgccggtggaaaggat

SEQ ID NO: 54860 - DNA, 82 bp, Homo sapiens
gagcagagacatcccgatctggggaagttttaaaatcaaagatgggaaaatcggagaaaattgcccttccccatggccagct

SEQ ID NO: 54861 - DNA, 140 bp, Homo sapiens
gccacgttcacaatcaacatcaaagtgaagctggatttctcctgccaggagaatctcctgcaggatctcagtgatgggaaatcctcattgacgattcaatttgttgaaggccaatttgtggactcctacgatccaaccat

SEQ ID NO: 54862 - DNA, 75 bp, Homo sapiens
cagtggaacaatcttttgttggattgaaacagctaatcggtttgtgaaacaggatctgataatcaacctcttggt

SEQ ID NO: 54863 - DNA, 83 bp, Homo sapiens
tccaaccctacatgcgcagaatggtggccacctggatgctggaggcctatgaaaggaggttccctacatgtcctttgattccg

SEQ ID NO: 54864 - DNA, 100 bp, Homo sapiens
gacgaaattccacaaaacctcttctggaaacattcataattggacccttgaagacactcttcagtggttgatagagtttgttgaactaccccaatatgag

SEQ ID NO: 54865 - DNA, 100 bp, Homo sapiens
tcgcacatttgacttggaagcaatgtttgaacaaactcgaagaacagctgtggaaagaagttgcaaaacactggggtcaaagaattgactgtagatccaa

SEQ ID NO: 54866 - DNA, 97 bp, Homo sapiens
aacttagcagtcacagacaagttgaagatgaccttggtggacccccaaaagtacaagggcatatttaacggattctcagttacacttaaagaggatg

SEQ ID NO: 54867 - DNA, 101 bp, Homo sapiens
tgcggccggcgccccctcgcccggagacagctgtcctcttgcagggtctgccgtgctggagggaaggctgctgttggaggagtggagtcaacatatcaatg

SEQ ID NO: 54868 - DNA, 97 bp, Homo sapiens
atcaagatcttcctggtgtccgagtgcgccctgatgctggcgcagggcacggtgggcgcctacctgaatccagcaactatcacaagaatactcctta

SEQ ID NO: 54869 - DNA, 59 bp, Homo sapiens
ttttccacctcctgacacaacaccactcaatttctcgaatgctggcagccaaaaccgtt

SEQ ID NO: 54870 - DNA, 100 bp, Homo sapiens
caaggaggtgctgggaatcctggtgtcctacagggtcaaggtgaagctggtggtgtctcgaggcgggtttgaggaactactggccaacctactaaatgaa

SEQ ID NO: 54871 - DNA, 100 bp, Homo sapiens
cgcttcccacccccccgcgtttcctatgtctgaattaggtgacttagatacctggcaggaaaataccaatgcatgggaagaagaagaagatgcagcctgg

SEQ ID NO: 54872 - DNA, 100 bp, Homo sapiens
gacatttcctgctcggaaccttgtttactaattgaagggaaaaggccgaggcatcagcgtgtgaagaccgcaaagacgatcccgagtacagttgtgaaca

SEQ ID NO: 54873 - DNA, 139 bp, Homo sapiens
atgaccatgtatttgtggcttaaactcttggcatttggctttgcctttctggacacagaagtatttgtgacagaggttggagcaatcactgaagaaactgaagcctgtgattggtggagtttgggtgctgtcctctttg

SEQ ID NO: 54874 - DNA, 75 bp, Homo sapiens
tatcgacgtcgtgatccagaagtccagagctgaggactgcctgtttgcagagattattttgcagaggatgatggg

SEQ ID NO: 54875 - DNA, 82 bp, Homo sapiens
ctcctggcgggcccggcggctctcactatccagtgatcagggccaaagcggtcagtgagaaggaagtggactctggaaacga

SEQ ID NO: 54876 - DNA, 75 bp, Homo sapiens
catatttcagagcaacctctttcaggctttaatagaagacttgcactatctgccagatgctgcttcctaaccagt

SEQ ID NO: 54877 - DNA, 80 bp, Homo sapiens
caggatcaacttgaacgaatatttctgctctccacacaaggagatgcaagtcaggtgattgggcctcttactgaaggaca

SEQ ID NO: 54878 - DNA, 100 bp, Homo sapiens
cgggagctgtgcagctccttatcatggaaacttccattttagaagaatacagtatcaattggactcagaagctgggagctggaattagtggtccagttag

SEQ ID NO: 54879 - DNA, 74 bp, Homo sapiens
agtggtacctgcacctgtctggcctgggcgccagcgcggctgcaggccaagattcaaccctatgaaaagataaa

SEQ ID NO: 54880 - DNA, 100 bp, Homo sapiens
agcaagagcatttcgtgggaatcctgctgctgtttgcctcctagaaaatggtgacgaggaaacatttgaaaactattatcgaaaacaaagaaagaaacaa

SEQ ID NO: 54881 - DNA, 75 bp, Homo sapiens
ctgacttgagcctgcagtgtgctgtgagagatctaccactaggtggatggaagtttgcttagttgaagaattgcc

SEQ ID NO: 54882 - DNA, 83 bp, Homo sapiens
actttacatccgagtccaaagttgtgtttactgagaagaccacagatcttgatgtggaagaaatggaggactcagaaccaagg

SEQ ID NO: 54883 - DNA, 100 bp, Homo sapiens
gctggctcagcggggccggaacatggctgcgtccggtctggtattaatctctggagaagacacatccacagttagcactttcttcagatgctgacgctcg

SEQ ID NO: 54884 - DNA, 74 bp, Homo sapiens
agaccttacctgtcaccttggctctcccacccaatggagatggctctaatggtctataagggagaattccaact

SEQ ID NO: 54885 - DNA, 100 bp, Homo sapiens
ggggaagtgggacaagatggtttacatctcgaacgaaatttgcccttggccattgggatttctatgccaattgtgacgctcatctacatcctgaccaatg

SEQ ID NO: 54886 - DNA, 75 bp, Homo sapiens
ctccacccccggttcggccacctacgtgagatacaagccatccccagaaagaactccgagctgcaactaaattaa

SEQ ID NO: 54887 - DNA, 100 bp, Homo sapiens
tccctccagctggccctgaggcatctgagtcaacaacggatgaaaatgaagacgacattcagtttgtcagtgtatgcaaccactcatgtattcggttcag

SEQ ID NO: 54888 - DNA, 74 bp, Homo sapiens
tttcttctcttggcaagagagctctgcatcaatgcgccggccatagacaagttggatggcttgaggactggtac

SEQ ID NO: 54889 - DNA, 75 bp, Homo sapiens
gcgtcgtcctgctctgcacggccctggtcgagatactcatcgacccctggaccacctgctgctcccagccatcag

SEQ ID NO: 54890 - DNA, 100 bp, Homo sapiens
agcgggagaggagtctccaccaggactgaccgctgccgcccagcacgtccaggtgtgttgaggctcctggaacacggggaggagtacgtattcaccctgc

SEQ ID NO: 54891 - DNA, 75 bp, Homo sapiens
agccttcccagtagctggaactacagattgagaggatccagaatccagatctctggaatagctaccaggcaaaga

SEQ ID NO: 54892 - DNA, 74 bp, Homo sapiens
tttattgtattcagttacagaacctgtgggaagttaaatgaagttcgaaagagattgaatgagctaagagaatt

SEQ ID NO: 54893 - DNA, 50 bp, Homo sapiens
gcagcagatggactgcgactcccgtcagctcaccatggatgatgatatcg

SEQ ID NO: 54894 - DNA, 90 bp, Homo sapiens
cttggctgaccttgagtgcagctccccctataagcctcggcctccacagcattcagagagaagaatcgacctgcactgccatccacacag

SEQ ID NO: 54895 - DNA, 98 bp, Homo sapiens
tgagtcccggtgcctcagctgcccagtgcccacgggctgttttgctgcagcttctgaagtgttaaagcacttgaaggaacgatttccgcctaatagtc

SEQ ID NO: 54896 - DNA, 100 bp, Homo sapiens
ctgttgagtatatcaataccctgttcccaaccgagcaaatacagcctgcaagatggtccgctggctgtctgccaagctcggccccacagtggcctctcgc

SEQ ID NO: 54897 - DNA, 101 bp, Homo sapiens
tgcaggtgccctcgcgcccctcccggggtccccagaacatggacttcccgtgcctctggctagggctgttgctgcctttggtagctgcgctggatttcaac

SEQ ID NO: 54898 - DNA, 90 bp, Homo sapiens
aaaacctccttatgctgatatacatccaatgagggaaagaccacagcaagattctttcattcgtctcctcctagcctgggggaccaggct

SEQ ID NO: 54899 - DNA, 75 bp, Homo sapiens
gcgccgtgtaactgtgaatctttcaaagggccatgctatgatagtggaagcttatccaaaataatagatccagaa

SEQ ID NO: 54900 - DNA, 95 bp, Homo sapiens
ggggaaaatgcccaggaggaagcaggagcagcccaagcgccttccctcacctattgtggacgatgaaaggctctctgcagaggagatggatgaga

SEQ ID NO: 54901 - DNA, 98 bp, Homo sapiens
attgaagtagaaaatgactttctgccggtagaaaaggggcggagaaactcatcatccacctgcggaaacatggcatcccctttgcactggccaccagc

SEQ ID NO: 54902 - DNA, 50 bp, Homo sapiens
cccggccctgctgccacagcagggaagagcatggaggaaatcaagaaggt

SEQ ID NO: 54903 - DNA, 82 bp, Homo sapiens
tgcatctggctgttagaagaattcatgctcatccgggagctggtcaggctcaccatcgagaagcagggacgtccgtctccga

SEQ ID NO: 54904 - DNA, 51 bp, Homo sapiens
tgaacatcatgaattcccaagaaggagacatgggaaagtctctttctcatt

SEQ ID NO: 54905 - DNA, 101 bp, Homo sapiens
ctgctagtgactggcgcgtacgagatctccgaccagtctgggggcgctggcggcctgcgcagccacctcaaggaggagagcattcccattgctttatctgg

SEQ ID NO: 54906 - DNA, 96 bp, Homo sapiens
ccaactacacttggcctttcgacgacatcatcgtcttcgcctatgcctgccaggctgctgactggggcagcacctactccgtgtcagtggtggaga

SEQ ID NO: 54907 - DNA, 96 bp, Homo sapiens
atttagttctggggagcgcctcgtcgacatgagtgatgtggaggaaaacaacttcgagggcagagaccccaaaatgtatgtacagacagtgcttga

SEQ ID NO: 54908 - DNA, 90 bp, Homo sapiens
gcattacaagccagcctctgggaccgaggattacagtttaaagacaatttctgtgatcaagttgtcatttggaagattaaacccatttca

SEQ ID NO: 54909 - DNA, 100 bp, Homo sapiens
gatgaagaagtgatgtgtttaaatggaaactggacggaaccacctcaatgcaaagtggctgacaagattttgaaaaagaaagaataccctctttatataa

SEQ ID NO: 54910 - DNA, 90 bp, Homo sapiens
ccctgggccctctcgacgcagcaaatcaccagcttcagaaactatgttccaacttcctgtcaacaatcttggcagtttaagaaaagcccg

SEQ ID NO: 54911 - DNA, 90 bp, Homo sapiens
gggtgcggcacctggaggaggagaaccgagggtgtggatgaatggaacatagctcgcctcaatacagtcttggatgtggttgaagaagag

SEQ ID NO: 54912 - DNA, 80 bp, Homo sapiens
cctgattcaagtgttggcggatggaagggaggagactcctgaccctcagaatggttgtggcagcactgcctgaaggtatg

SEQ ID NO: 54913 - DNA, 74 bp, Homo sapiens
cagacgttagcgtgagtgatcactctcaatcccggaataatcatgggccagactgggaagaaatctgagaaggg

SEQ ID NO: 54914 - DNA, 98 bp, Homo sapiens
agagccatggatcataaagagacacataccaaattggatctatccagctgctctgttaaaagcgaaaatgaaacaattgcctgcggcaacagttcgac

SEQ ID NO: 54915 - DNA, 80 bp, Homo sapiens
cttgtgggagcaaaaccaacgcctggctcggagcagcagcctctgaggaagggaaaaggccgaggcatcagcgtgtgaag

SEQ ID NO: 54916 - DNA, 153 bp, Homo sapiens
cagaacagctaaacggagtcgccacaccactgtttgtgctggatcgcagcgctgcctttccttatgaagaagacacaaatgacctctcccgacaggatgacaatgatcccccaaaagaatatgatcctgggcaatttgcaggcctgctccatg

SEQ ID NO: 54917 - DNA, 101 bp, Homo sapiens
agctgccgtttctgggactggctctgagctcccgcaaaaacttgtgtattcaccctgaggcgcccgctccggccggcaccatggacagcgaggcattccag

SEQ ID NO: 54918 - DNA, 118 bp, Homo sapiens
cgcgacccggcggcgggacaggcttgctgcttcctcctcctcggcctcaccccctgtatgatgagattcgtcagtttcgcaaggcctgtggggaggctcatcttaaaactatattagc

SEQ ID NO: 54919 - DNA, 75 bp, Homo sapiens
cgcagtcatgagtcgcttcaagtttatcggaggagacatcacagctttcccagatcgggaggaaaaatatggaat

SEQ ID NO: 54920 - DNA, 78 bp, Homo sapiens
ccggggccacttctgtccccagcgtcttctcgggtcgtgcagaacccagcgggtgccgcttctccacccgaggcttcc

SEQ ID NO: 54921 - DNA, 98 bp, Homo sapiens
gcagctctacgtgtaccgcctcaaccgcgacgccgagtgaatggtagtgtctagaaagggtatgtcccttcaagagagaggtgccaatgtccaaccgg

SEQ ID NO: 54922 - DNA, 100 bp, Homo sapiens
tgcatctttttaccttttgtgctgagccaactcgagccaggctgcaaaaaggagcacgtgaattgcctctgcttacgttcaggccctgtcctaaacccag

SEQ ID NO: 54923 - DNA, 111 bp, Homo sapiens
ccagggcggcaccggctcatcactcaggtttatctctcccacaccgcttggacagtaccaaaagaattggtggagctccatttgaagctgatgaggaaaattggcaaatct

SEQ ID NO: 54924 - DNA, 75 bp, Homo sapiens
cctgcattggttccatccttgactgttactacagaaaaaatacagtttatgtaacttgatggaagaaaatggaat

SEQ ID NO: 54925 - DNA, 100 bp, Homo sapiens
ccaaggagaagctatagactacttctactccaccaggaaggcattagatggcttcattatcgcagtgacaacagacggcagcatcatctatgtctctgac

SEQ ID NO: 54926 - DNA, 82 bp, Homo sapiens
ctgggcccagagacgcggggacgggccgtgggcccccggaacgaggttcgagaacttgtcttggacaattgcaaatcaaatg

SEQ ID NO: 54927 - DNA, 82 bp, Homo sapiens
cggctgagaccccgcagcctggaggagggctgtccggggctttggtattggtaaaggttttcaaggtgtcatgaaaagatgg

SEQ ID NO: 54928 - DNA, 98 bp, Homo sapiens
gatgaagggcccccgaccccaagctctgccacgaaggtgccaccggtctcctctgagcctccggcctccataagacccaaaacagatgacacctcttc

SEQ ID NO: 54929 - DNA, 90 bp, Homo sapiens
agaagacacacccaaaggattaccctcacaagttggatggcttgaggactggtactaaaaggaaacgtgactgggaggccattgccagca

SEQ ID NO: 54930 - DNA, 100 bp, Homo sapiens
tctacctccatcaggaccccagatgtctgacagccctgtgtgacaccaagataagtaacgtactggttcttgcacctacaagagagttggcaaatcaagt

SEQ ID NO: 54931 - DNA, 97 bp, Homo sapiens
cgagaacaagtttaacgacaagcacatcaccactctgcaggtgctggagaatctggtaaaagcaccattgtgaagcagatgaggatcctgcatgtta

SEQ ID NO: 54932 - DNA, 98 bp, Homo sapiens
ctcctatcgtctccacccacctggacactcgtaatgtggcctttgagagggtcatcacactgaaacggtgttcaaccgggttttgccagggcctattg

SEQ ID NO: 54933 - DNA, 75 bp, Homo sapiens
cgagatccgggccgtgaacgaaagcagtgacggaggagcttgtaccaccgggcatatctggaatctgaagttgct

SEQ ID NO: 54934 - DNA, 75 bp, Homo sapiens
tacccgggatacggaggaggggtgaggaattttaaattggaacaagagcaagaaaaaaacaaaatcttgtcagaa

SEQ ID NO: 54935 - DNA, 146 bp, Homo sapiens
ggcggcttgtccctgtttcgccacagttcctaccttatgagctcggttttcttatgcttataagagtggaacaggagatggtaacctgcacctcaatgtgacggcggaggccttcagcccctcgctcctggctgccctggagcccc

SEQ ID NO: 54936 - DNA, 100 bp, Homo sapiens
gagctgctggagagcttcctcgagggcttccatgacgagagcacacagagacattccataagtggaccaatctcaacatccaaacccctgacagccctgt

SEQ ID NO: 54937 - DNA, 75 bp, Homo sapiens
ccgcggtggagcgggacacgaacgtgttcttcacctgcctggtcatcctgtttgcctgtgaggtggccgccggca

SEQ ID NO: 54938 - DNA, 100 bp, Homo sapiens
caggggtccttgtaccatgagatggtgagtgagatcattggccgagacctgagtggcttccctgcacctcctggagaagagcctcctgcctgaaccacgt

SEQ ID NO: 54939 - DNA, 82 bp, Homo sapiens
gacctgggctgggaacccgcggtggagcgggacacgaacgtgataacgaaggaggcccaacttcattcaataaggagcctga

SEQ ID NO: 54940 - DNA, 100 bp, Homo sapiens
cgcagctggctggcttcagtggaccactgttaggcaattttcttcagtggtatggcattttctcaaataaaactctgcaagagttatcaatagatggttt

SEQ ID NO: 54941 - DNA, 75 bp, Homo sapiens
ctcagttggaagcagccgatccagcctgcggagcctgtggggcaggctacaagatcaagctgcagagaccattga

SEQ ID NO: 54942 - DNA, 90 bp, Homo sapiens
gagtgaagatggcattgaaggtgatgagataattgacgaccttgccaacctagtggagaacacagatgaaaaacttcgcaatgaaaccag

SEQ ID NO: 54943 - DNA, 82 bp, Homo sapiens
ggctgacatgcccgtcctatatgacaggtcaatgagtggtcattgaagataagaaaggaaatgagagttgttgacaggcaaa

SEQ ID NO: 54944 - DNA, 96 bp, Homo sapiens
gctacagctccgcgcccgccagttgcttgatcaggtggaacagattcagaaggagcaggattaccaaaggctattgcattaatgaccacagcggtc

SEQ ID NO: 54945 - DNA, 74 bp, Homo sapiens
ggatatggagcctttggtgttgtctggttcaaaatgagcctgtttggaacaacctcaggttttggaaccagtgg

SEQ ID NO: 54946 - DNA, 82 bp, Homo sapiens
catggccgcagccgctctggggcaggtccctgtgcgttttattgcgacctgccggtgggaactttgtctccgagtcggagca

SEQ ID NO: 54947 - DNA, 99 bp, Homo sapiens
tgaaatcttggatactgcaggaacggcagcctggcatcctcgctacaacctcattgttgtgggccgatacccagatcctaatttcaaaagttgtacccc

SEQ ID NO: 54948 - DNA, 83 bp, Homo sapiens
ctgctgggcacccacggagcctccggggctggtgtttgagaagtcccccctgcgggtgaagaacttcgggatctggctgcgct

SEQ ID NO: 54949 - DNA, 75 bp, Homo sapiens
cttgctcaacaagggcctgccgcttgactgattcttgctattccaaatcctcttccacgttgacagcccttcaga

SEQ ID NO: 54950 - DNA, 82 bp, Homo sapiens
aggagttcgagcagatcgacaagtccgggagctgggcggccatttaccagcttcctgcctgacacagctcacttcaagaagt

SEQ ID NO: 54951 - DNA, 75 bp, Homo sapiens
tcaaccagtctattgttgtcagtggagagagtggtgctggaaagaagtttccaagggtcacttgtgtctcgtccg

SEQ ID NO: 54952 - DNA, 88 bp, Homo sapiens
gcagcgacagagccaaaatcagagctggaacctgaggagagagatattcttactgattctccgggctctgcagctcttgacccggctg

SEQ ID NO: 54953 - DNA, 111 bp, Homo sapiens
ttgggcttcatcatggaggactacctgcagggttgtcgagctgctctgcagaatcctcactatggatgggctcattgaggacattaagcatcggcggtattatgagaagcc

SEQ ID NO: 54954 - DNA, 100 bp, Homo sapiens
tgcgaaatccctggtgccaaaggctttagaaggttatatcacagcaacttgagttggtggaaccaagtggctggattcatgttcccttaactgacaatca

SEQ ID NO: 54955 - DNA, 71 bp, Homo sapiens
cgacggtccccactttcccctgagcctcagcacctgcttgtttggaagaaaaatggctacaaacttcctag

SEQ ID NO: 54956 - DNA, 100 bp, Homo sapiens
caagtcctgcgcttggggatcctctgtacgcccgttcactgtttctgatgaagaattgaaaagaagagtagctgaggagctggcattggagcaagccaag

SEQ ID NO: 54957 - DNA, 116 bp, Homo sapiens
agaactggagagaggcactggctttgctactgacatactcaggcacagagaaatttcccgagctctgtggtgggctgggggccctgactggacctggcctggccagcttactgggg

SEQ ID NO: 54958 - DNA, 82 bp, Homo sapiens
ctcagttggaagcagccgatccagcctgcggagcctgtggggcaggtagacaacaccaagtttacgatggactgcgtagcgc

SEQ ID NO: 54959 - DNA, 100 bp, Homo sapiens
gaacgtcatgagcatagtgatcccattgggggttgatacagcagagacgtcatacttggaaatggctgcaggttcagagcactcaaggagttgcccctgg

SEQ ID NO: 54960 - DNA, 90 bp, Homo sapiens
tggggtcctctggctgttgttcttttcttttccatgatatcattatatggacagtttaggggcatacatcacagaaggaagccatggaag

SEQ ID NO: 54961 - DNA, 101 bp, Homo sapiens
cggaagacgcgaccaactccaggcacagcggagccggcgcggggtccacaaagcccgtggaacacagagcattcctaatgacagtcctgcccggggtgagg

SEQ ID NO: 54962 - DNA, 74 bp, Homo sapiens
ggagacaaacctcatatgcagacttatgaagttgaccttaataagtgtggatgaggtcaccattgtcaacattt

SEQ ID NO: 54963 - DNA, 80 bp, Homo sapiens
ctcctcctgtcgctgcccgtgtgattactgagactcaggtctgtcgagttgcttatgaaattatgcaaacactacatcct

SEQ ID NO: 54964 - DNA, 74 bp, Homo sapiens
attctcgacctgctaacagaactggaccttttcgtttgctaatccagactttacacaacctatctcagaagttg

SEQ ID NO: 54965 - DNA, 90 bp, Homo sapiens
cagaatcgaaccaggaagcagctctccaagactagtctcttccaaggaagatcttgcagttaaacacagtgggaatatcacttttgatga

SEQ ID NO: 54966 - DNA, 74 bp, Homo sapiens
tcaacccgagtgcagtttcgatggaaaatgaaggtcctgggaactccaacaagggagcaaatcagagaaatgaa

SEQ ID NO: 54967 - DNA, 100 bp, Homo sapiens
atacaggagacaccaaagaagagaaagacaaggatgaccaggaatgggaaagccccagtgggcaggcttggctgaaatgagaactgctgaagcaagacag

SEQ ID NO: 54968 - DNA, 73 bp, Homo sapiens
gacaaaagaaccattgaaaaatttgagaaggaggctgctgagatggctcccgcaaagaagggtggcgagaaga

SEQ ID NO: 54969 - DNA, 90 bp, Homo sapiens
tgcagatatgctacatgacaaagacagagaatttcttcacatggctcctggagaagtgaccatcacagttcgcctcatccgttcctttga

SEQ ID NO: 54970 - DNA, 112 bp, Homo sapiens
caagaaaaatataaaaatcactggtatccagaaaaaccatcgaaaggacaggcctacagacagaaacagtctccgccagtcaagaaaccctcaaaagtattttgccatggat

SEQ ID NO: 54971 - DNA, 83 bp, Homo sapiens
cttctccggcccctccagctgccccctgtgtggcaaacctttcttgagctcagttgcttctgcaggaagcctttttggtggca

SEQ ID NO: 54972 - DNA, 100 bp, Homo sapiens
tggaggacctcttcaacttctgctccaggaaattcagcctcaaaaccgtcctgctgcttgctgaccaaatgtgtgtttcctgtaacaaatcgttcaagaa

SEQ ID NO: 54973 - DNA, 101 bp, Homo sapiens
gatgctgaaagaggctcatgcagagaagaaccggctcatggagtcgagggtccagtgcacgtgccaacattacactgtcagggaagaagcgcagaaaactc

SEQ ID NO: 54974 - DNA, 82 bp, Homo sapiens
cacgaccagctgaaccgcctcaagagatggacagagacgtatgtgcgttggtctcctaagggcacctacctggctacctttc

SEQ ID NO: 54975 - DNA, 51 bp, Homo sapiens
gattcgcagtggtcgcttcttctccttggtcatgcaagacaagataatctg

SEQ ID NO: 54976 - DNA, 89 bp, Homo sapiens
gaaaaccttacgctatggaaagattatgattatgaccgatcaggaggagatgttaaagtaacccatcttgcaggacgacattgaagatt

SEQ ID NO: 54977 - DNA, 83 bp, Homo sapiens
ggagaaagtttcatctgtggatggagtattggattttttatcaagcagaaatgcatcgaacaacgagaatcaagatcactgag

SEQ ID NO: 54978 - DNA, 97 bp, Homo sapiens
ctggcgctttcctgggttgcttctggcggccatggtgttgctgctgtactccttctccggtttattcttcagtccaaggaagcaattcacagtcagc

SEQ ID NO: 54979 - DNA, 75 bp, Homo sapiens
aaggagaccatcaaaggattccagcagattttggcaggtgagaacatgatgaagggttcagagttgactccaaag

SEQ ID NO: 54980 - DNA, 50 bp, Homo sapiens
gtggaaccaacccagccgaccccccagcattcgcaacgacaggcgcctcc

SEQ ID NO: 54981 - DNA, 75 bp, Homo sapiens
tgaaagagaagacattgaattcatttgtaaggtcgttccaggggtagaggaggcatgaaggatgaccgtcgggac

SEQ ID NO: 54982 - DNA, 83 bp, Homo sapiens
ctcggctatgacagccatcattttgtacccttggtgaccctgaaggacagtgggcctgcaattctgtggtgttcttggtcaca

SEQ ID NO: 54983 - DNA, 98 bp, Homo sapiens
catccatgtgcaccgagaaattcacaagatggtgtctcaccctgttgcccaggctggaatacagtggcacgatcctggctcactgcaatctccatctc

SEQ ID NO: 54984 - DNA, 74 bp, Homo sapiens
tgcaacccctctccttgatgccagctcactggagtatctgtttgctcaggctgctcaaacagcggaagatgcca

SEQ ID NO: 54985 - DNA, 98 bp, Homo sapiens
ctgcctcccagagaggggagccggcgaggatcaaaatcttcgaaggagggcataatcaccagcaacacccgggacaataatacgggggccacctaccc

SEQ ID NO: 54986 - DNA, 83 bp, Homo sapiens
caaggcgtggctgatcacggcccgcagcctctacccggcagactttaacatccaggcatggaagaggagatggttcgtgttac

SEQ ID NO: 54987 - DNA, 74 bp, Homo sapiens
aacgaacatcttctggacctttgtccagggaggtggggaagacagggctccagctaccacaggacgggctctgg

SEQ ID NO: 54988 - DNA, 51 bp, Homo sapiens
ggaaaggtgtgctgtgcctgaggccaggggatgtggagacgctggtagcgg

SEQ ID NO: 54989 - DNA, 50 bp, Homo sapiens
atcaccggagcgtcccagctgcgaggaggagctctttgttcaatgcctag

SEQ ID NO: 54990 - DNA, 82 bp, Homo sapiens
ctgacctcggtttcctggacccattccgactcagagttgtctgctggttctcagcttgaagaagattctgcagtccttattg

SEQ ID NO: 54991 - DNA, 76 bp, Homo sapiens
aaagcaccagtaaaatatggtgaactcattgtcttagggaccaagaagctgataattgatgtgatccggaaccagc

SEQ ID NO: 54992 - DNA, 82 bp, Homo sapiens
ctgcctcagcctccagagtagctgggattacaggtggttttggaatgtatgcttaaaaaagacctcatttataataaggtca

SEQ ID NO: 54993 - DNA, 95 bp, Homo sapiens
ccccagtgttcccgacaacgccgagctggtgctgctcaccttgggccaggcctggcagggctgtgctggagaatctggtaaaagcaccattgtga

SEQ ID NO: 54994 - DNA, 118 bp, Homo sapiens
accgccgcccccccagacaagatggacaccgcggaggaagatcttgtagaaaatttcagctgtagcccttggactagaagctgaaataacagaagctgtgtacgatgcattagggtat

SEQ ID NO: 54995 - DNA, 102 bp, Homo sapiens
gaagccatggatgggaaagaacctggaaacagaagtacctgtgcgccagcagaaatgattgcactattgataaattccgaaggaaaaattgtccatcttgtc

SEQ ID NO: 54996 - DNA, 75 bp, Homo sapiens
tttgtgaaacagagaaagataggcggccatggtccaaccttgaagtgatggtcattgtcctccagagcagtgatg

SEQ ID NO: 54997 - DNA, 98 bp, Homo sapiens
cctggagaagaaagatgttttgcctactgttgatccggacttggaaaaggagagtgacacacccctccagcaagtatccattgaagaaattctagaag

SEQ ID NO: 54998 - DNA, 90 bp, Homo sapiens
caaaaatccctactacttttggtctgtgatgagcttaattatgcaaacttcatgggagactgtagggtgtaagaaaaagaattttgcaaa

SEQ ID NO: 54999 - DNA, 75 bp, Homo sapiens
ccctgaagagggaagacacgcggaaacaggtgcgtctaatgctagtgttggcacctgttatgtgcattctctctg

SEQ ID NO: 55000 - DNA, 97 bp, Homo sapiens
cttagctgtgctcgcgctactctctctttctggcctggaggctatccagctgcagggctcgcggcctggcaagaatgtacagctgacagagaacgag

SEQ ID NO: 55001 - DNA, 83 bp, Homo sapiens
gaatgcatcacatctgcatcgagtttccaaggcaggaaaggtaaagagacaaagaaagtgccttgtacagatgcaaacggagg

SEQ ID NO: 55002 - DNA, 100 bp, Homo sapiens
taatgggagcatctgcatgagaatggagatcctgggctgcccactgccagcccaaaatggagttaatcctgactgggagaagaaagtaattgagtatttt

SEQ ID NO: 55003 - DNA, 76 bp, Homo sapiens
tgcttctgggccagaggaagagaatgaggtccatggctaatgaaacacagaaggttggtgccatccattttccttt

SEQ ID NO: 55004 - DNA, 75 bp, Homo sapiens
gaatgaacactgtccttcaaaacgaatttggagcaagaggtggtggtggccttcccccgaagaaatttggtaatc

SEQ ID NO: 55005 - DNA, 74 bp, Homo sapiens
tgaagaacactgcatggcctttgagggcattcatctgcctcagggagcaccaagaactactgaaacaaatgaag

SEQ ID NO: 55006 - DNA, 123 bp, Homo sapiens
gtaaactatacctactgtccctcaagagaacacaagaagtgctttaagagccagtcgtctgggattgtattccaaaacttcccagtcagtctcaggagaagaaatagatgcaatggatgttca

SEQ ID NO: 55007 - DNA, 50 bp, Homo sapiens
cctcctgctgctcctgtttgtggggtctccgtctctccaccgggggcttc

SEQ ID NO: 55008 - DNA, 90 bp, Homo sapiens
aaagaattttaagaaacgatggttctgcttaacaagcagagagctcacctaccacaaacagccaggcccgctgcccaggtatgcacaagt

SEQ ID NO: 55009 - DNA, 99 bp, Homo sapiens
tcacttaaaggagtggacattgctagcaatgagctcccaaagccatccagatgccatggacaatattaccaggcagaaccaattctacgatacccaagt

SEQ ID NO: 55010 - DNA, 98 bp, Homo sapiens
tatttgcacagaacagtgtacccttagtgaccagcactatgttggccatggaaatgctatcaatgagctgaaattccatccaagagatccaaatcttc

SEQ ID NO: 55011 - DNA, 73 bp, Homo sapiens
tccgcagaaaatgctaggtgcaaagtttgtcgaaagaaaggtggactggctgacggagaaaatgagggaagcc

SEQ ID NO: 55012 - DNA, 141 bp, Homo sapiens
ggccaaagatttatttctcttgacaaccaagggcctccgtctggatttccaaggaagaatttcctctgaagcaccgaggctgggaggcggcagaatgcagccagaggagggcacaggctggctgctggagctgctgtccga

SEQ ID NO: 55013 - DNA, 101 bp, Homo sapiens
ctcactttcgtccaggacagtatgtggatgtcacagccaaaacggaatgacagaggaagaggaagacaaacttctggcactgaaagacttcatgatgaaat

SEQ ID NO: 55014 - DNA, 100 bp, Homo sapiens
aatgtgataaaaacaaggtggaagattcttccaaggaaccagtgcgaagggtcacctgcagctagtcctcaaagcagtgataatagcgatacacatcaaa

SEQ ID NO: 55015 - DNA, 100 bp, Homo sapiens
tcttagagcagggtaaagccaagaatccttggcccaatgtagatgctcacagtggggtgctgctccagctgctccaagcttttctgccatttgaagcttc

SEQ ID NO: 55016 - DNA, 75 bp, Homo sapiens
ctggaattttggcatcaaggacaaacccaccttcatcaaaggggtttctaccatgaatgaaatgaagagttattc

SEQ ID NO: 55017 - DNA, 81 bp, Homo sapiens
ggagcctcagttggaagcagccgatccagcctgcggagcctgtggggcaggatacttttgtggaactctatgggaacaatg

SEQ ID NO: 55018 - DNA, 74 bp, Homo sapiens
ctgccccagcctgtcttctggcccctcctgaaagctgtcacccacaagaagagagaagggcacagttacctaag

SEQ ID NO: 55019 - DNA, 100 bp, Homo sapiens
gcagagggagcttgccttgaaggacaagaacagcgccgtcaccagcagaaggatatggccctgaagccacatgagcggaaggagaagtgggagcgtcgtc

SEQ ID NO: 55020 - DNA, 75 bp, Homo sapiens
ttcttacatatactatgtttcgtctacagttgttatgagttgcagaaacgaattgctgaaatggaaactcaaaag

SEQ ID NO: 55021 - DNA, 90 bp, Homo sapiens
gccactagccagctcggaagcccaggagcttgatcctggatagtgtttgtatgatgtgcacacgtctctgcaaatgcttgtttgaagatt

SEQ ID NO: 55022 - DNA, 100 bp, Homo sapiens
cggctaagtcaagcttgtatggacacagagtctgggatctaataattcagtcattttggatggactaaaaagaagacagaattttctgcaaaatgtcgaa

SEQ ID NO: 55023 - DNA, 101 bp, Homo sapiens
gaaggttcactatttattcccagacggcaaggaaatggctgaagaatatgacgagaagacgagtgaactacttgatcaatgaactgagccatgttcaaatc

SEQ ID NO: 55024 - DNA, 100 bp, Homo sapiens
ttacagaaaaagaagaagcggaaacaacgttctcccgcaaaagccagggagctggagagcagagaggcagagctaagacgccgtgacaccttctacaagg

SEQ ID NO: 55025 - DNA, 100 bp, Homo sapiens
gttccttctcggagccggctgtcccgcgccactggaaaccgcacctccccgcaggtggaggatgcgctatcttatcttgaccaggtgaagctgcagtttg

SEQ ID NO: 55026 - DNA, 75 bp, Homo sapiens
cctgtgagctggaggaaaggttcgccctggtgctggtaaagtgttgagagaggagaaccagtgcattgctcctgt

SEQ ID NO: 55027 - DNA, 75 bp, Homo sapiens
cctttattcatcgactcagtcagtctcttggtttggtctctaaaagtaaaggggaggaagatgagtactcagaac

SEQ ID NO: 55028 - DNA, 75 bp, Homo sapiens
aacaattcttcgacatactctccagcttcaatgagaaagatcagtctaaagaaaaggagaagaaagtgaaaaaaa

SEQ ID NO: 55029 - DNA, 90 bp, Homo sapiens
cctcgttgcggccatcgccctgccggaccgcgcctcaggctcccccagatggggtcgaggatttggtcttttgggttccatttttggaaa

SEQ ID NO: 55030 - DNA, 100 bp, Homo sapiens
cacgccctgctggaggggcggaccaaggagctgggctacacgggcttccgttacaagatgaggtctgtgtatgctcacttccccatcaacgttgttatcc

SEQ ID NO: 55031 - DNA, 100 bp, Homo sapiens
ctgtgactacaacatattgctgcaatcaggaccattgcaataaaatagaacttccaactactgatatcgtagtaaagtgttatcccgttggctggctggc

SEQ ID NO: 55032 - DNA, 100 bp, Homo sapiens
ttctacggcgcggctctcacggactcaggccaggccactcgcagattggactactagagtgaagcaaattgccaaattgtggagaaaagcaagctcacaa

SEQ ID NO: 55033 - DNA, 82 bp, Homo sapiens
aaataacttcgatgacaccattgcagaaggaataaccttcatcaagttttatgctccatgtacaagccagctgccatgttgt

SEQ ID NO: 55034 - DNA, 75 bp, Homo sapiens
ggcgggctccgtggaagcgtggccggcagcgtcccggacgaggagtttgtgtttaaggagaaactaacaatgaaa

SEQ ID NO: 55035 - DNA, 50 bp, Homo sapiens
gccatggccgccgccgatgccgagaattcaattcgccacaatctctctct

SEQ ID NO: 55036 - DNA, 75 bp, Homo sapiens
ttgatagattatattccagaaaaatcagaaagcagcttgttcatcataaacagatgctagtgatcaaagagaaga

SEQ ID NO: 55037 - DNA, 100 bp, Homo sapiens
cgcgccgctgcatcccgcgtccagcacctacgtcccgctgccgtcgccgccgccaccatgcccaagagaaaggagatggtaacctgcacctcaatgtgac

SEQ ID NO: 55038 - DNA, 100 bp, Homo sapiens
attatcctctgtttctctgctgcaccgacctcgacgtcttgcctgtgtcccacttgttcgcggcctataggccaccagcttgggctccccacggagggca

SEQ ID NO: 55039 - DNA, 100 bp, Homo sapiens
ccgagagcgtgaccgagagcgcgaatatcgtcatcgttagaagactatcaagaaatccaagtggtaatgggcgaagtttattcagcatccggcaatggac

SEQ ID NO: 55040 - DNA, 82 bp, Homo sapiens
aagactatcagccactaatgaagttgggaactcagaccgtaccttgcaacaaggttatttcacagttgaggattttgggcag

SEQ ID NO: 55041 - DNA, 74 bp, Homo sapiens
tagtccattgactatgcagcctaatggctctcaaaattagagagatgtgtaattgtccaccactgtctaatcca

SEQ ID NO: 55042 - DNA, 104 bp, Homo sapiens
ctccaccctggcaggaatcccaatttgcctccacttagtgagcggaagaatgatggggccactgaggtgcaaagagtttaacttatcccaagtcacacagtttg

SEQ ID NO: 55043 - DNA, 50 bp, Homo sapiens
ctgtggtggaggagaaggaaagcttccgggaggatttccattataatgac

SEQ ID NO: 55044 - DNA, 98 bp, Homo sapiens
tcgcagagcaccaggcccaccgtgaaaggattgttaaaatgagtcttcggaagcaaacccctagtgacttcttaaagcaaatcatcggacgaccagtt

SEQ ID NO: 55045 - DNA, 75 bp, Homo sapiens
ctccacagcaggacagccgaactggaatctggatgagcagctcaagcagggggcagctggcattttatgctatgt

SEQ ID NO: 55046 - DNA, 100 bp, Homo sapiens
ctcatcttaggctgtgctgtgaactgtgaacagaagcaagggggacttgatctcatcttcatgccaggccttgggtttgacaaacatggcaaccgactgg

SEQ ID NO: 55047 - DNA, 96 bp, Homo sapiens
gtggatgttgaacctaaggtgaaatctaagaaaagggaagctggaaaacctggaagcacaatgggagatgacagtgagtggttgaaactgccagtt

SEQ ID NO: 55048 - DNA, 75 bp, Homo sapiens
gcaacttgttcctgagctgtgcaaccaatcagagtccagtggagaaggtgctggaggtggtgagagccaactatg

SEQ ID NO: 55049 - DNA, 100 bp, Homo sapiens
catgggattctaaacatgaggcagcgtggagattggtgaaagcgtgagaggggaagatgtctacatcatccagagcggctgcggggaaattaacgacaac

SEQ ID NO: 55050 - DNA, 75 bp, Homo sapiens
ccccgaaggccctatcaggacatggagtatgaaagacggagagcgacttgcagttgtggaggtacagtgtgaacg

SEQ ID NO: 55051 - DNA, 100 bp, Homo sapiens
cggatcctgctggtgggagaacacacttctgagaaattcatcaggctgtgaagcgcgccgtgatgaatatcgaacagagtttaccacagctttgcagcgc

SEQ ID NO: 55052 - DNA, 83 bp, Homo sapiens
cttggaggacttgctgatatgtttggacaaatgccaggtcacgcatgaagggagcaccgtggagaagacagtggcccctacag

SEQ ID NO: 55053 - DNA, 74 bp, Homo sapiens
aaacatctgccagtttctcttggaggtgttcaggcgcttcgtggaggttggccgggtggcctatgtctcctttg

SEQ ID NO: 55054 - DNA, 75 bp, Homo sapiens
gttctgatcactactgacttgttgtgcagctctccggctgggatcctggttgacgccatgtcccagaagcacctt

SEQ ID NO: 55055 - DNA, 97 bp, Homo sapiens
atgcctccaacctcatctaccccatctttgtcacaaattccagatccaagcacctggaacctcaacccagatgcctcctacgtgtattattgcgcaa

SEQ ID NO: 55056 - DNA, 101 bp, Homo sapiens
ccacccttggtgtgtagtccagttagcaaggcttgtaaacatataacataaaaatggcttccaaaagagctctggtcatcctggctaaaggagcagaggaa

SEQ ID NO: 55057 - DNA, 98 bp, Homo sapiens
tgcaagtaggatgtttaccaaccctgataatgatcattcagtttcccagccaatcatggtgcagagaagacctggtcagagtttccatgtgaacagtg

SEQ ID NO: 55058 - DNA, 82 bp, Homo sapiens
actggagcgagctccccgacgaggagcgcggcgagatctacgtgccagaaatgaagctgttgtcatttctggaaggaaactg

SEQ ID NO: 55059 - DNA, 97 bp, Homo sapiens
tactcactccattccagaaaacactaacttcccagcaggaattgagccacagagtaattatattccaggtcccctcttgctgttggctgcacatcag

SEQ ID NO: 55060 - DNA, 83 bp, Homo sapiens
ttttgaagggaggtagcatccgttggatatccacaccatccttctcgctgcaggtgtgtactgtaagcacggtcacctgtgtc

SEQ ID NO: 55061 - DNA, 101 bp, Homo sapiens
aagaaaacacagcagttgcaccctgttttgcaaaaaccatcagtgtttgggaatgattctgatgatgatgatgaggtttaagttactgagccaggaggaag

SEQ ID NO: 55062 - DNA, 96 bp, Homo sapiens
taaatacttgctttactggaaagacccagaatatgccaagtatctaaagtggagtctcactcttgttgcccaggctggagtgcaatggcgcggtct

SEQ ID NO: 55063 - DNA, 80 bp, Homo sapiens
gtattctggtgcttatggtgcctcagatgatgactttgaccagtttgataagcctggcgcggaacggtcgtggagaagaa

SEQ ID NO: 55064 - DNA, 75 bp, Homo sapiens
ttggcagatcaactacatgctgcagcttgtagaccctggagttaaggcatggacacccactaaaggaaaacaaaa

SEQ ID NO: 55065 - DNA, 98 bp, Homo sapiens
aatcagctttgaagtgggagcccagttggaagcccgggaccgtttaaaaaactgcagcaaagtggggcaccaaggccctgtgctaagcactcataatc

SEQ ID NO: 55066 - DNA, 90 bp, Homo sapiens
cccggagtccgactcgctacgcgggtcttgcgagatatctggccgcctctgccgcagctggaggatgctcacaactgtattcctgagctg

SEQ ID NO: 55067 - DNA, 74 bp, Homo sapiens
cgcccttggagtaccgttcggatgcttgctctgtcaaggcacagcctattgtctcctttgctcagtgtgacatc

SEQ ID NO: 55068 - DNA, 95 bp, Homo sapiens
tggcgcccagcgcgcccgtggccgctgccgcctccgccccagactgaacattcttcacgatctgaaaggaaaagaagagattctttcgggatgtt

SEQ ID NO: 55069 - DNA, 100 bp, Homo sapiens
aagactgagaaatggatggaacgaatacacctcaatgtctctgacagtgatgtgtgttctgaaattgtgaaccatgagtctagtacttaatgatctgctt

SEQ ID NO: 55070 - DNA, 100 bp, Homo sapiens
gcaagaggttgtgtatttctcggctgctgatcacgaaccggagagcaaggttgagatcatcactgttgaagaggcaaagcgcaggaagagcacatgcagc

SEQ ID NO: 55071 - DNA, 90 bp, Homo sapiens
aagaaacctcaggacttgagtaacagcaacatggagttcaaagaaggacgcagagccagccacacagccccacaggtcctctttagccac

SEQ ID NO: 55072 - DNA, 87 bp, Homo sapiens
gagccggagcagaagcaaagaggtatgataagtattatcagcaacataatagttctgggcatcttcattaagtacaaggaacttcgg

SEQ ID NO: 55073 - DNA, 73 bp, Homo sapiens
aagggttcggccgtgccctccgacagccaggcccgcgagaagtcgtcttcccgtgacgcccagatctgtcctg

SEQ ID NO: 55074 - DNA, 100 bp, Homo sapiens
tccagcgggtccccggcaaactccttccacttcaagtggtatgtgtgcaacagagagaaattatgcgaatcactccaggctgtctttgttcagagttacc

SEQ ID NO: 55075 - DNA, 75 bp, Homo sapiens
ggagtacagcccagtaacccggtatattctggattccagcagtatcctcaagctccactttgaggctctgatgaa

SEQ ID NO: 55076 - DNA, 71 bp, Homo sapiens
gggaagtgtgaagcggccaatggcacggaggcctgcgtggcgcaccctacgacgcgcacaccaccggcatg

SEQ ID NO: 55077 - DNA, 100 bp, Homo sapiens
gcccaatttgtccgtaaccttgtggagaagaccccggcgctggtgaacgctgccagagtctctcctggaggcggatcttagctttctgtctctggaagtt

SEQ ID NO: 55078 - DNA, 83 bp, Homo sapiens
gcgaaggcggcggctcctgccctctcgctttccctctcgcgtctctggctgcaggtgcgcgcggagccatggttatcatgtcg

SEQ ID NO: 55079 - DNA, 100 bp, Homo sapiens
agctttcactatggggtggagacgtggtactcagcaagctcgagttaaagttggatgtgctggaacagatgggtgagtcaagtgaagacatagaccaaat

SEQ ID NO: 55080 - DNA, 88 bp, Homo sapiens
cttccaagtctcaataaaaacatccccgtcatcgagtatgagcagttcatcgcagggaggtggggaagacagggctccagctaccaca

SEQ ID NO: 55081 - DNA, 100 bp, Homo sapiens
cgctgctggactacaaggacgagttctcgggcagaggcgacctccccgcgttccatgcgcacagggacaggggtttcacgcatgtgtgctgcagctccca

SEQ ID NO: 55082 - DNA, 75 bp, Homo sapiens
tccaaaaccagtcatgaccactagacccacagctgttaaagcaacaggtgccaggtcgacctgtcagccctcagt

SEQ ID NO: 55083 - DNA, 83 bp, Homo sapiens
aaagactgggcttgtccttgctggtgcatgcgtcgtcggcctctgggcagcagacagcatcaactgggcaagtggtgaggatg

SEQ ID NO: 55084 - DNA, 75 bp, Homo sapiens
tgaatcctctaaaggccccatacaatgaagtagacattggtggaaacatttaaataaaagccgccctcattctag

SEQ ID NO: 55085 - DNA, 98 bp, Homo sapiens
aacgtcccaccaaaattggacgtcgctctttgtctcgttccatttctcagtcatctactgacagctacagctcagggacagaagatgagcctgtcggt

SEQ ID NO: 55086 - DNA, 100 bp, Homo sapiens
caaggtgatgcttttgctacgacctcattttctgctggaactgtcttcccaagggattgttgaagaaacttctgaagagggaaactctgtacctgcttca

SEQ ID NO: 55087 - DNA, 118 bp, Homo sapiens
ctcaacttgaaggtcatttaaccaacctcagctttacaaaccctgaatttataactgaaaataagcgggttttgaaaacaaaaaaaagaaggagtggaagagggggccaggatccagg

SEQ ID NO: 55088 - DNA, 75 bp, Homo sapiens
ctcgagacttaccagagccacaagtctctgctttctatccgtcaagatgataaagtcgtgtgcccgagaaccaaa

SEQ ID NO: 55089 - DNA, 82 bp, Homo sapiens
cagcgtcaccctgctcaacgagaccgagtcgctcaagtcctacctggagcgggagacctgggagatcttggtgagcaatgag

SEQ ID NO: 55090 - DNA, 100 bp, Homo sapiens
tagatacatggagcccatcagaatggcagatggcttatgaaccacagttttttgctccactcaagcctgttagaatcaccatggaatacagctccagtgg

SEQ ID NO: 55091 - DNA, 100 bp, Homo sapiens
tttgcagaagtattgctgagaactggaaaattggcagaggctaaaaataaaggagaagtatttccaacaactgaaggtgaatggagtgaggccctttacc

SEQ ID NO: 55092 - DNA, 98 bp, Homo sapiens
aataagattaagggttgtacaggctctttgaatatgactctgcaaagcaccagaattatggaacatttatcaacagcctaaaataaagacaacacgag

SEQ ID NO: 55093 - DNA, 74 bp, Homo sapiens
ccagatcatgcggtcttagaaatgaaagattctggggagcaggtcctggtggatgtggagaccaagagcaataa

SEQ ID NO: 55094 - DNA, 75 bp, Homo sapiens
gccacaaccataatagaatgtctacattcctctcctggtaacgtttttatccatggatgacttgcttgggtaagg

SEQ ID NO: 55095 - DNA, 101 bp, Homo sapiens
ggaagcaggtttaaaattttacataagaagttacctttttcagcatcaacaacagcaacttgtgattggcggtgaccggatattcagttgcacatccccac

SEQ ID NO: 55096 - DNA, 82 bp, Homo sapiens
ggagaaggatggcatcaccgttgtgaaacttcagtgctctcaagaaggaaaatatttatgaaaacaataaactggtgagtgg

SEQ ID NO: 55097 - DNA, 75 bp, Homo sapiens
agtgaagatgtgcacctgcacacgcccccggcacctgaatgtggccccgtcccagagcaccacccgagacatcag

SEQ ID NO: 55098 - DNA, 75 bp, Homo sapiens
caagtcctcgctggactgctcagggtgccagacctcatcaccatgctcgacagctgaccaaggccatgatgcgaa

SEQ ID NO: 55099 - DNA, 73 bp, Homo sapiens
ggagaggatatgtagcgaggaggaacgcgctaaggcaaagcacctggtcaatgtgacggtggactacattaga

SEQ ID NO: 55100 - DNA, 100 bp, Homo sapiens
tactagtccaacctctacccttgaaagcagagatagtggcatcattggtcctcttcctgatggatgggaacaagccatgactcaggatggagaaatttac

SEQ ID NO: 55101 - DNA, 75 bp, Homo sapiens
ttagtgtgcttactggaagacaatggttttgcacactagggaccaagaagccctcggggacactgctgagaaaag

SEQ ID NO: 55102 - DNA, 76 bp, Homo sapiens
cttgtctcatgtcgtcagccagcaccaagccttgttgggcactatcaggatgtggctgatgaagaaattgctgccc

SEQ ID NO: 55103 - DNA, 97 bp, Homo sapiens
aagatcggcttgaaattaccaactgctttcctttccctcagcacacagaggatgatgctgactttgatgaagattctctcgggcctagccgtccttg

SEQ ID NO: 55104 - DNA, 51 bp, Homo sapiens
taacaagactgtccttcggacaagttttagtgtgctggaattgatgttcgt

SEQ ID NO: 55105 - DNA, 83 bp, Homo sapiens
ggctgcgcgaggagcaggaaaaggaccaagaatcgccttcagccctgtctggtgcatccttggcagaaagtgaggaggaaaac

SEQ ID NO: 55106 - DNA, 74 bp, Homo sapiens
agatccctctatgactgcaatgtgagaaaaagcttgtggtgaaggggggcaaaaaaaagaagcaagttctgaag

SEQ ID NO: 55107 - DNA, 100 bp, Homo sapiens
ccaaccactccccaaacaggctggctcccgtctccaggccccaaggagccacacctggaccagaccccaggaaaggacctcagcagccatgtcgaagccc

SEQ ID NO: 55108 - DNA, 73 bp, Homo sapiens
gatgatgaagcctggaatggattcgtggctgctgctgaactgcccagccgatctcctgttggagccgtacaac

SEQ ID NO: 55109 - DNA, 51 bp, Homo sapiens
gggcactgtcatggatgctagagaggctcagatgtgaccgtccagctggac

SEQ ID NO: 55110 - DNA, 90 bp, Homo sapiens
gaaaaagcagaaagtagatgaagatgagattcagaagatgcaaaggccaatgatgaggccaatcagagtgatacaagtgtctccttgtca

SEQ ID NO: 55111 - DNA, 105 bp, Homo sapiens
tccggcgcctccactccgtcccccgcgggtctgctctgtgtgccatggacgggtcaaaatgcagatcttcgtgaaaacccttaccggcaagaccatcacccttga

SEQ ID NO: 55112 - DNA, 90 bp, Homo sapiens
tacccacccaacattgactgcacatggaacattgaggtaccctgcatgcatatagctgctgattctactcctgctattgctcacaaccct

SEQ ID NO: 55113 - DNA, 98 bp, Homo sapiens
aggattccaagtaactcttatttgattttaggtgatgggcaagtcagaaagtcagatggatataactgatatcaacactccaaagccaaagaagaaac

SEQ ID NO: 55114 - DNA, 74 bp, Homo sapiens
ttcgcagtggtcgcttcttctccttggtaaggtacacagatttgaggctatggacagcaaccctgagctggcca

SEQ ID NO: 55115 - DNA, 50 bp, Homo sapiens
taacccgtgtgactttgactggtgcacgctaggcggctttgaggagctgc

SEQ ID NO: 55116 - DNA, 100 bp, Homo sapiens
gcctggcaggtcatcaaaggtgtgctgtttaggtcctgttattgccttggagtttaatggggatggtgctgtagaagtatgtcaacttattgtaaacgag

SEQ ID NO: 55117 - DNA, 141 bp, Homo sapiens
cagaatccgtgtctgggagaaacctcgtggcctggtctccattatttgagatgagttacatcttggagtaccttccactggaagaatctcaaacagcgctacttactcaggatcagtggcaccagccaactcagctttggg

SEQ ID NO: 55118 - DNA, 80 bp, Homo sapiens
caagtatgccaccaacagtgaagaggtttatgctaaaactatcgatgggcaacagactattattgcatgtattgaaagcc

SEQ ID NO: 55119 - DNA, 100 bp, Homo sapiens
cagacgttagcgtgagtgatcactctcaatcccgggtttgacagatgaaaaagtgaaggcatatctttctcttcacccccaggtattagatgaatttgta

SEQ ID NO: 55120 - DNA, 103 bp, Homo sapiens
gcctcagttggaagcagccgatccagcctgcggagcctgtggggcaggtgttggagcgggccggagagaagtagagtgggctgcgaggagaaggaaacaggcc

SEQ ID NO: 55121 - DNA, 74 bp, Homo sapiens
caggtgcaggagctcttccatgaggcagcccagcagggagactcatgcatctgtatgccgtgtgcgtggactgc

SEQ ID NO: 55122 - DNA, 100 bp, Homo sapiens
aaaaaggcctcgcacattcagttggacagatcctgaggaggatgaaggggctggccctggaggccgagagtgagctggagagacaagacgaagccctgga

SEQ ID NO: 55123 - DNA, 51 bp, Homo sapiens
catcatgaaggacgtgcccgactggaagagttgaagtattgataacaccaa

SEQ ID NO: 55124 - DNA, 96 bp, Homo sapiens
ggattgtagctgcatatgcccattttgctgtgtgttacagttttcagcattgcaaataacaatctcagctactgggatgcccccctgggaagttct

SEQ ID NO: 55125 - DNA, 101 bp, Homo sapiens
ctctgtcttggcacctgcaggaaacaagctcctacttccagaaaaagtgctcctgggactccaggataccagataggactgaggctttcagtgcatactgg

SEQ ID NO: 55126 - DNA, 50 bp, Homo sapiens
cggtttcctggacccattccgactcagtttgcagttaacatgtttcgaac

SEQ ID NO: 55127 - DNA, 100 bp, Homo sapiens
gacctgtcttgccgtggatggcataccattctcatcgttgaggatgtccggcttccagatcaacctcaacccgctcaaggagccactcggcttcatcaag

SEQ ID NO: 55128 - DNA, 82 bp, Homo sapiens
gggaactgctgacgcttgatgagaaggacccacggcgtctgttcgaagttatggctgattgtcctcacacaattggtgttga

SEQ ID NO: 55129 - DNA, 145 bp, Homo sapiens
gaaattccagacaagtttgttgtaggatatgcccttgactataatgaatacttcagggatttgaatattgccaaaatgctttggagtttttaactgaatctaagaaaagtccaaaatagatttgagactgtaaaaacagaaactg

SEQ ID NO: 55130 - DNA, 96 bp, Homo sapiens
acgtgtaatgaccaataagaagatggtcacaccatatgcaaatgccagtgatgatcagccagagaagcctcactttgactctcgcagtgtgatatt

SEQ ID NO: 55131 - DNA, 100 bp, Homo sapiens
aaggcaggggaggaagccacctcgagagagaagaagaaggaggttcctgctgtgccagaaacccttaagaaaaagcgaaggaatttcgcagagctgaaga

SEQ ID NO: 55132 - DNA, 75 bp, Homo sapiens
tgacacgagcctcggcgcggcttccgcttccgatgcctggagttactgtaaaagacgtgaaccagcaggagttcg

SEQ ID NO: 55133 - DNA, 100 bp, Homo sapiens
cattttttcatccatactgcaatgctggtggaggaggagaaagagttttatggtgtgctttaagagccctgcagaaaaaattttgtggaagtataatact

SEQ ID NO: 55134 - DNA, 50 bp, Homo sapiens
cgggcgctcatcaactccgtccaacacgtgaacgagtgcgccgagggcag

SEQ ID NO: 55135 - DNA, 90 bp, Homo sapiens
ggtgggtggaaaagtgttcgccgaggtgcaatggatgagcttcatagtctggatccaagaaggcaagagttattggaagctagatttact

SEQ ID NO: 55136 - DNA, 75 bp, Homo sapiens
ccggagcgggcggctgagacaaaggcgacggtgtcgtgaaaactacccctaaaagccaaaatgggaaaggaaaag

SEQ ID NO: 55137 - DNA, 97 bp, Homo sapiens
aggactcagaggccgccatcaaccgccagatcaacctggagctctacgcctcctacgtttacctgtccatggttatcaatagtctggctgtctatcg

SEQ ID NO: 55138 - DNA, 75 bp, Homo sapiens
tcatgcggcacatcttgggggagctctttttggaataagaaagccagcttccctctacaagtgctctgggaaaag

SEQ ID NO: 55139 - DNA, 82 bp, Homo sapiens
cctcgggtctcgggggccgctctgggatcccggccaccagcaattgtccggtactggctgtgatcgaacttctcaaccctca

SEQ ID NO: 55140 - DNA, 100 bp, Homo sapiens
ttggattgaagccgcctctgtattacttaccaggtgaccctggcaaagatgagagtgcacatttcgtcctgcctgaaggtccaggagcagatggccaact

SEQ ID NO: 55141 - DNA, 82 bp, Homo sapiens
cagcacaatcgggcggaggtggcgctgccccttcaggcctcatgcattgtgcgtcagcagcaatgtttatggtgaaaaatgg

SEQ ID NO: 55142 - DNA, 82 bp, Homo sapiens
atacaatcccagatgagtatagaattggaccatatcagcccaatgttcctgttgggaatgaaagctactggttgattttaaa

SEQ ID NO: 55143 - DNA, 75 bp, Homo sapiens
gtttttgatgaaattgtagagaactatgactttgggaaattgctgctggctgaggccctcctggagcagtgtttg

SEQ ID NO: 55144 - DNA, 100 bp, Homo sapiens
ctgggcgggggtgatgatatccgcccagacactgactggcagagtcctgtcccaagagtactatgatccctattttcaagatgtggcatctgagatgttg

SEQ ID NO: 55145 - DNA, 50 bp, Homo sapiens
cggcagcggcctggggacccagcaaggtgcttcctttcacaactttttcc

SEQ ID NO: 55146 - DNA, 82 bp, Homo sapiens
ccgccgcggcggccggcgatagcccggcgctcatgacagattttcagctgaactctcatctctcaacactggcaaatattca

SEQ ID NO: 55147 - DNA, 75 bp, Homo sapiens
gggcctggcggccaacgtgggaccctatggctccggagacagtgcacccctcatcaaggcggataagaaggcggc

SEQ ID NO: 55148 - DNA, 83 bp, Homo sapiens
tcaccactgaggaggaattcaccctgttcgtctatgagctgagcagctagccagtgtacagtatacacttccaaaaacagcag

SEQ ID NO: 55149 - DNA, 101 bp, Homo sapiens
aaggacctctccagcaatgattacttcagaattaccagtgttacaatgacttcaaacctgcttctattgacacttcttctgaaggataccttgaggttggt

SEQ ID NO: 55150 - DNA, 83 bp, Homo sapiens
gggcgaggccgtcatctgcaactccccaagcagcatccccgtcacaccgccaggccagggtaacctgtgtatggtgactggag

SEQ ID NO: 55151 - DNA, 75 bp, Homo sapiens
aagccactgattagcaatttaaagatcctctccaagcattagtgccagcagtagttcccaagggctgtctcagcc

SEQ ID NO: 55152 - DNA, 96 bp, Homo sapiens
ctgaaaatcaacgcagctggaatgttaaccttagaaagtttccaggcctctgtgtcctttgtcccaatagtaacaactccctcctggcctttccgg

SEQ ID NO: 55153 - DNA, 75 bp, Homo sapiens
cccggcaacccagggctcggcgtcgctgccaccatgacgggaaggaagctctatgcagaactgtgccaaggcatc

SEQ ID NO: 55154 - DNA, 82 bp, Homo sapiens
gcgcgctcccgcggagccggagccgcagaggctcccgggctggactcaggcttctcagatgccatggacaatattaccaggc

SEQ ID NO: 55155 - DNA, 90 bp, Homo sapiens
cgcagatggcctgccacgttttccgcgccacagaccccagccaggaattggcagcaatgaaacagattctcgttaagatgcatagtaaac

SEQ ID NO: 55156 - DNA, 75 bp, Homo sapiens
gagaaacctgggtgaactttcacggacaacctcagaggacaacgaagtgttcggaaagaccacagcaagattctt

SEQ ID NO: 55157 - DNA, 83 bp, Homo sapiens
gcaacatgacgctggaagagctcgtggcgtgcgacaacgcggcgcagaacagcgtccgtctccaagagagtatgaagagagtg

SEQ ID NO: 55158 - DNA, 121 bp, Homo sapiens
tgagacttcgagagccctgtcatcttctaaacagagcagcagcagcagagatgataacatgtttcaggctatggagttactagtagagaaagcaatcagcagtgcttctagccctcagagc

SEQ ID NO: 55159 - DNA, 95 bp, Homo sapiens
tagccaaaattgcacaatacaagaggaaactcatggatctttcccatagaactttacagagctggaagtcgagtgtgctactcaactcaggagat

SEQ ID NO: 55160 - DNA, 100 bp, Homo sapiens
ttctcttgatgtagaacctatctatacattcagagcccataagtccgagtgaagctgaagaattccagcttgaggtgagtgggctactaggggagatgaa

SEQ ID NO: 55161 - DNA, 75 bp, Homo sapiens
gacgctgccagtttgcacagcagcagtagtttatgccaacgtgacttcattcatacagatgaaccaaggatcggg

SEQ ID NO: 55162 - DNA, 82 bp, Homo sapiens
cgcaagggcggcggggagcacacggagcactgcaggcgccgggatttggggtggaaggcaggcatggtcaaacccatttcac

SEQ ID NO: 55163 - DNA, 83 bp, Homo sapiens
tccagagctgaggactgcctgtttgcagggcaagcccgacctgaacacggcgctgcccgtgcgccagacggcgtccatcttca

SEQ ID NO: 55164 - DNA, 99 bp, Homo sapiens
gccaggtccctgctgaatcacacgccgccatccgggaggcccagggaagggggggccctcagcctcttggccttgaacgggctgttcatcttgattcac

SEQ ID NO: 55165 - DNA, 75 bp, Homo sapiens
cacgtacctggcagagtccacaggcgaaaaatgatgtctcatgctgaaggacaacaaagagacttaattagacga

SEQ ID NO: 55166 - DNA, 95 bp, Homo sapiens
cagaatccaagagatgagagaggacccaacatggggcagaagcttgaaatcctcattaaagatactctcggatcgccccaggacattcgacatgc

SEQ ID NO: 55167 - DNA, 75 bp, Homo sapiens
ctgaccatggctccctgcagtaccctttaacggcatgcccaagagaatcgtaaatgcaaaaattgcttgccttga

SEQ ID NO: 55168 - DNA, 113 bp, Homo sapiens
tccactgttcctggaggaatccgagaagagcagagcggagggagccccagacacgatgtgaagttcatttccaatccgccctccatggtggcagcggggagcgtggtggccgc

SEQ ID NO: 55169 - DNA, 83 bp, Homo sapiens
ctggaggacatttcgaacacaccgtgagggggaagggaagctgctgtgttgaaggttttgactggatcatctcgtcaaagtta

SEQ ID NO: 55170 - DNA, 88 bp, Homo sapiens
aacctgggcagacctcacacagactctccacgccttcctagcagtggtggcacaaaggctgaggaagctagaatttcctgtgaaggac

SEQ ID NO: 55171 - DNA, 75 bp, Homo sapiens
gtcgtaaacttcctatgatagaactgcaagcacatgttgaccagataactgaaatggcagcagtaatgaggaaag

SEQ ID NO: 55172 - DNA, 100 bp, Homo sapiens
gttgatatttgtgctgtcagctgttcatcctgataagatgcaccttgtcttacaaaacatttacaagggagaggagcggaagaccttctggtgtgggctg

SEQ ID NO: 55173 - DNA, 71 bp, Homo sapiens
aatgagctgggccaggtggaggaggagtacaagctgcggaagggccctggcctcacaaccacagagtcccg

SEQ ID NO: 55174 - DNA, 100 bp, Homo sapiens
accgagaccgtgaccgagagcgtgaccgagagcgcgaatatcgtcatcgttagaaggttacttcttgctgcagattctgcgcaggatcggagctgtgggc

SEQ ID NO: 55175 - DNA, 75 bp, Homo sapiens
tcctgctcagtgtagcattaaggaagaaggtagataatgactataatgcccttcgagaaagactcagcaccttgc

SEQ ID NO: 55176 - DNA, 101 bp, Homo sapiens
ggcctcccttttaggaaaaaattgggaagaacatagcgttaaagacaagcacaacaccaaggagagacatttgaggactcagtggtctttgaggatgtggc

SEQ ID NO: 55177 - DNA, 82 bp, Homo sapiens
atcacagacaccgcctacaggagtatgatgcaaggaccaggaatcaccttcaagcctatgtcgtgaggctttggcagaaatt

SEQ ID NO: 55178 - DNA, 51 bp, Homo sapiens
tgaggtggtgcgcggctccgtgctcctgtctaaagaaggtgcatttattgt

SEQ ID NO: 55179 - DNA, 90 bp, Homo sapiens
gcggcggcggcggcggctgctgctgctgctgcccgcgtccgaggctcgcgggcggcgggcccgggtgcttttgaagatgatgatatcacg

SEQ ID NO: 55180 - DNA, 100 bp, Homo sapiens
cagcccgtggtccttctccatattcgaggcatgagccatgagcccaagtccccttcgctagggatgctttccaccgcgaccaggaccaccgccaccgtca

SEQ ID NO: 55181 - DNA, 99 bp, Homo sapiens
gggccacaatacgaattgaaaaaggaaccccaaaggagtcgattcttaaaaactctgcttctgttgattttcagctgaactctcatctctcaacactgg

SEQ ID NO: 55182 - DNA, 82 bp, Homo sapiens
gggactccaattgcttggatgacagtcaccgacagaaggacaatgcagatcttcgtgaagactctgactggtaagaccatca

SEQ ID NO: 55183 - DNA, 74 bp, Homo sapiens
atttgacattgatccgatggtggttactgagtggaatgttggctgtccgtgaaaaccgctacattgtcctggcc

SEQ ID NO: 55184 - DNA, 101 bp, Homo sapiens
agcggggcggcggcggcggcggctgcggcccaatataggtggaacggccgccttctccattctccatggccccacaagcttcccttcccccggtgccacca

SEQ ID NO: 55185 - DNA, 90 bp, Homo sapiens
tcaactgaaaaaccaaatacaggagccatgcaagaagtttgccattgcagatgcaaccagagaaggtctttttggagttcctgagctgag

SEQ ID NO: 55186 - DNA, 90 bp, Homo sapiens
gctactacttaataatgacaatctcctcagggaaggggcagcacaggccctcatctttgtgtcccatggagccggagagcacagtggccg

SEQ ID NO: 55187 - DNA, 100 bp, Homo sapiens
ggctgaagtcagcatcgaccagtccaagctgcctggagtcaaggaaggatccagtttatggaaaaggaaaacttggagaaatccagggacttatcttggg

SEQ ID NO: 55188 - DNA, 82 bp, Homo sapiens
cgaacggggcgagcctggaggattgtcactccaacctcttttcgctggcgagaaccactgtctctgatcaacgtgcggaaga

SEQ ID NO: 55189 - DNA, 73 bp, Homo sapiens
tcctaaagagcaagcctaactcaagccattggcacacaggcatcaactcaattgtggccattgcatcatacac

SEQ ID NO: 55190 - DNA, 80 bp, Homo sapiens
gacacaaacttcctggcaccttgattttggacttcatagcctctagaacttacgagctcaactggaggcagtcctgtgcg

SEQ ID NO: 55191 - DNA, 74 bp, Homo sapiens
caaaatcagtgattctacatctcaagctcatattttgaagtgtttacggcatatgctactttgattgaaaatga

SEQ ID NO: 55192 - DNA, 98 bp, Homo sapiens
catggatgactgcaaaaatgacatcaacattctgaaatgtggcagtattcggcttggagaaaaggatcgaagagcagtcataaaaccacaaagtcaac

SEQ ID NO: 55193 - DNA, 83 bp, Homo sapiens
ctggactcttcacaccagagcttgatcgtcttcagattgctgctgtgacttactcgaagcctcgattggccacattttggtac

SEQ ID NO: 55194 - DNA, 50 bp, Homo sapiens
ggaacaatagagctcgaccttatctcttaccttaccagtaacaaatgtgg

SEQ ID NO: 55195 - DNA, 83 bp, Homo sapiens
cggaaagactgttccaaaaacagtggataattttgtggccttagctacaggagaggtgctgacggtggatgctcgtaaccacg

SEQ ID NO: 55196 - DNA, 100 bp, Homo sapiens
gatcgatgacaagctcaacaaaattaacgatcgttggcaacatctttttgatgtcatcggatcaaggtaagaatgattgatgttggctgatattggagtg

SEQ ID NO: 55197 - DNA, 100 bp, Homo sapiens
cgatcacaaagatacgaatctcttaaggggtttcagatgcttcatcaagatgaatcaaataaaagagaaaagatcaagacaaagggaatggactctgaag

SEQ ID NO: 55198 - DNA, 97 bp, Homo sapiens
gataatcaaccaactgttacaatcaaggtctatgaaggttattgttcaaaactacaactccattttgacactttctcacttgtaccgatcttcagac

SEQ ID NO: 55199 - DNA, 74 bp, Homo sapiens
agagcatggagcagttcattgtcagccagcgaaccatgcaagaagcgcagccaccagaagtccttaaaacagca

SEQ ID NO: 55200 - DNA, 83 bp, Homo sapiens
ccgggcgcggggaagtcatgctcgcttcacggaggcaatagctagccgcggggccttttccgaagtggttttagctgaagaga

SEQ ID NO: 55201 - DNA, 100 bp, Homo sapiens
cgggcggcgggcgcgcgcaccatgggggagaaacccgggaccagaatcctggccctcttatacctcagccttcgagtcaacagactcctgagaggaaacc

SEQ ID NO: 55202 - DNA, 90 bp, Homo sapiens
aaaggatcatgaactagtgacctggaaagatcctgataacttaagtgactctctcttttccggtgatgaagaaaatgctgggactgagga

SEQ ID NO: 55203 - DNA, 59 bp, Homo sapiens
agaccagatcttgctggaaaaagaagctgagcagaaggtgatttactacctctgcatct

SEQ ID NO: 55204 - DNA, 82 bp, Homo sapiens
tggagacagcaatctcaacttcagaagatggctgtgccacccacgtatgccgatcttggcaaatctgccagggatgtcttca

SEQ ID NO: 55205 - DNA, 98 bp, Homo sapiens
ccgacacgccggggcgcccgcgcgcggggaccccacggggagcctgcagacagggggatttgcctgggaaggagaagtagaaaacaacgtgtacagcc

SEQ ID NO: 55206 - DNA, 100 bp, Homo sapiens
tagagttcaacaccaatggatctgacaccgaccaaggttttcaactcacctataccagattaaagcaaggagagccaatcatgactggcaaaacacagac

SEQ ID NO: 55207 - DNA, 100 bp, Homo sapiens
agcagaatagacacttcattgttccagcttctcgcttcaagctcctgaagaagagcccacagaacgggagaaagtggagctggcagccgagtgctgccgg

SEQ ID NO: 55208 - DNA, 100 bp, Homo sapiens
gtaaacttcacaacatgatagttgatctggataatgtggtcaaaaagggttcttgatggtgctagacattccccaggagcgggggctcagctctctggac

SEQ ID NO: 55209 - DNA, 98 bp, Homo sapiens
catcaagctgtctaagtccaaagatttttacccagacctagaggatcaagacataatgggagcatttttagacaagccaaagatggaaaagcataatg

SEQ ID NO: 55210 - DNA, 75 bp, Homo sapiens
ccagagtgcagagccgcctttccagcatgcaggggctgctcagatacagtttatgtaacttgatggaagaaaatg

SEQ ID NO: 55211 - DNA, 100 bp, Homo sapiens
aacactgaatcaacatgggcaatgagaacagcacctcggacaaccagaatctgaattatccagaacagaaagttgtgactgttggacagttcaaaattgg

SEQ ID NO: 55212 - DNA, 74 bp, Homo sapiens
gaatcgctgagcgatatcacagaacacaagattaatcaatgtcaactgacagtttctccacagacactacccaa

SEQ ID NO: 55213 - DNA, 75 bp, Homo sapiens
tgatgcgcttctcagaaatgtccaggtgctggagaatctggtaaaagcaccattgtgaagcagatgaggatcctg

SEQ ID NO: 55214 - DNA, 83 bp, Homo sapiens
ccgcgagcagccgtgctgtgccggcctgcgagcttttatgacaagaagacagcaattcacaaagccctctgtgacaatgttga

SEQ ID NO: 55215 - DNA, 75 bp, Homo sapiens
ctcaatttaagcctgatctaacccctagaaacaggtccagtggcattgcagagcacggatggttgcaggagccaa

SEQ ID NO: 55216 - DNA, 100 bp, Homo sapiens
gactagccactttgcattgactggaaacaatggcatttacagaaagagtcaacagcagtggcaacagggtgtactctgtgtgaccgcgcctatccctcgg

SEQ ID NO: 55217 - DNA, 125 bp, Homo sapiens
tccaaggagtactggtttgtgctgactgccgagtcactgtcctggtacaaggatgaggaggtggccaagcaagaggagttcttcaacctgtcccactgccaactggtgaccctcatcagccggga

SEQ ID NO: 55218 - DNA, 82 bp, Homo sapiens
ccggacggtacttctgccactgctgctccgtggagatcgtcccgcgcctgccggtttggctcagaagaaggcggccccaaca

SEQ ID NO: 55219 - DNA, 75 bp, Homo sapiens
tcagcaacaccgcctccggccctccgatgggaaagtggaggccggagatcttgaaaggaggggtcttgatccagc

SEQ ID NO: 55220 - DNA, 50 bp, Homo sapiens
ttcgtacccacagtgcttcatgagaggctgcaagcatcaggacagcagag

SEQ ID NO: 55221 - DNA, 90 bp, Homo sapiens
gctccgttctctatcaccacaccaagaacagcgagcaggcgcgcagccacctggagaaggcggtgtggcgctcttggccaatgcccctga

SEQ ID NO: 55222 - DNA, 100 bp, Homo sapiens
acctgcatcatctggggttccaatgcagatgctggaggaacataaggctgtgatcctacagaaatacgcacgggcgtggctggccagacgcagattccag

SEQ ID NO: 55223 - DNA, 90 bp, Homo sapiens
ggacggtcgcgcggcggcaggcacagtcattcctgtattccatcaaccagacaatctgcttgcggttggatagcattgaagccaaattgc

SEQ ID NO: 55224 - DNA, 98 bp, Homo sapiens
gacgcgcgtctacagggacacagctgagccaaactggaacgagacagcacccaagaaaacctcatttggctcgctgaaggatgaagaccggattttca

SEQ ID NO: 55225 - DNA, 90 bp, Homo sapiens
ctgttccccgcgctgcggcctggcggcttccaggcgcactaccgcggtattgttgcagcatctggcagtgagactgaggatgaggacagc

SEQ ID NO: 55226 - DNA, 90 bp, Homo sapiens
gagaaaatgaatgccaaatgggacacgggtgcctctgccaactggtggaatcatcgccacttccagcaccacgccaagcctaacatcttc

SEQ ID NO: 55227 - DNA, 75 bp, Homo sapiens
gttcgcggctctaacggggctttctacaaggtcacagtaatgaaaggcagtaatagaaataaggatcattcagca

SEQ ID NO: 55228 - DNA, 98 bp, Homo sapiens
tctgcttaaaccaagaaacagtatgtttagcaagcactgctatgaagactgagaattgtgtggccaaagaagacagagatgtcaatgaccccatgccc

SEQ ID NO: 55229 - DNA, 100 bp, Homo sapiens
ggcgctacgggacccgagccgtcccagaaaccaaagggcaggcacggcagcaaacgcctgaggaatggaagttggatacactttgtgacttgtacgagac

SEQ ID NO: 55230 - DNA, 75 bp, Homo sapiens
ctcccgggctggactcaggcttctcagggtgcttcaaggatgaccgcatcgtcttctggacttggatgttctcca

SEQ ID NO: 55231 - DNA, 75 bp, Homo sapiens
ggcgtccaaagtcacagatgctatagtctggtatcaaaagaagaataatcatgggccagactgggaagaaatctg

SEQ ID NO: 55232 - DNA, 89 bp, Homo sapiens
caaccctgccaatctcaagcacctgcctctacaggccatgttggggccccgatgccgtgcaatttgataaaacttgttgatgtggaaga

SEQ ID NO: 55233 - DNA, 75 bp, Homo sapiens
gccggctgcacctgactttggccaacgtggacaatgcagatcttcgtgaagactctgactggtaagaccatcacc

SEQ ID NO: 55234 - DNA, 101 bp, Homo sapiens
cagtgaagtgcctcattccagacaggctgctttcagtagccccattgacccagatgatgtggtaccagttggccaaagaagagcctggtgttggtgcatgt

SEQ ID NO: 55235 - DNA, 74 bp, Homo sapiens
cagctccaagaaagtcacctttgggctgaacagaaacatgactgccggcagtaagctcctacaggacattttaa

SEQ ID NO: 55236 - DNA, 75 bp, Homo sapiens
cgggctcctgcgcacgccgcggccgaaaccggccgcttacaaacacgcagatggcaagaagattgatggcaggag

SEQ ID NO: 55237 - DNA, 83 bp, Homo sapiens
cagaagcttcagggggcagagtcacaaagctgtaagaagctggctgaaggcggtgcaggtcctcatggtgctctccctcattc

SEQ ID NO: 55238 - DNA, 82 bp, Homo sapiens
gcacctcatcccctggatgggggaccacaagatcctcatcgacagcgggctgacgcacgaggcacacaggaaggaggtggag

SEQ ID NO: 55239 - DNA, 90 bp, Homo sapiens
cttgagcagaggaacctatacaaagaagtgatgctggaaaatctcaggaatctggtctcattgggtgtggatgaggtcaccattgtcaac

SEQ ID NO: 55240 - DNA, 50 bp, Homo sapiens
gttcagcctccctgactccaagacatcgggctggggagtgactccgtgtg

SEQ ID NO: 55241 - DNA, 100 bp, Homo sapiens
caggagcgggtagtgccagctacggtccgcggctggggttccctcctccgtttctgtatccccacgagacctacaacggccagagcgagaacaacgaaga

SEQ ID NO: 55242 - DNA, 75 bp, Homo sapiens
caccaatggaccaaaatgaacacagtcactgggccgtttccctggggagatggtaaccatactctattccataac

SEQ ID NO: 55243 - DNA, 100 bp, Homo sapiens
gcactctgtgaccagctggagctgtgcctgggggtgaagccagccagttttgacaaagtagcaattcctgaagtgaaggaaattattgaaggatgcatac

SEQ ID NO: 55244 - DNA, 74 bp, Homo sapiens
aatgatagaccacctggttaccatgaagatcagccactgggatggttatgcaaagggtgacctggacatatctt

SEQ ID NO: 55245 - DNA, 90 bp, Homo sapiens
gcgcagccttcgaggcgctcaggaagcagtctaacaaagtgccagtggtgcagcaccctcaccatgtccaccccctcacgcctcttatca

SEQ ID NO: 55246 - DNA, 75 bp, Homo sapiens
tcattcaagaagtttgcttcatggagttaggacctggaaatgtacagaaagaagtctcatcttcctttgaccacg

SEQ ID NO: 55247 - DNA, 100 bp, Homo sapiens
ggggaagtctggaaaacaacgccttaccaagtggctgctgaaattagccctgactataatgtggaatttttccgacagtttatactggttatgaatgctt

SEQ ID NO: 55248 - DNA, 80 bp, Homo sapiens
accctcatgagcatggtggccaacctcttgtatgagaaacgctgcctactgaatcactcttctatcgtgctgttcttcag

SEQ ID NO: 55249 - DNA, 80 bp, Homo sapiens
tcatgaatagactctcccatcccaacatccttagtgggccccatgctgattgagtttaacatgcctgtggacctggagct

SEQ ID NO: 55250 - DNA, 74 bp, Homo sapiens
tggagcctcagttggaagcagccgatccagcctgcggagcctgtggggcagtacctcctaaatggctctacttt

SEQ ID NO: 55251 - DNA, 90 bp, Homo sapiens
ggagcgcgcgtgtggtccttgcgccgctgacttctccactggttcctgggcaccgaaaggtgcgtatagcagcaaaattcatcattcatg

SEQ ID NO: 55252 - DNA, 74 bp, Homo sapiens
tacatcgtgctcagcggcagcggcaagagcatgaacgcgcctatgttgtccttggccagtttctggtgctaaag

SEQ ID NO: 55253 - DNA, 95 bp, Homo sapiens
gaaagctttcctaggccaaaaagagatgcctgtgaggagccaccaacatttgaagctatggagctcattggtaaaccaaaaccctactatgagat

SEQ ID NO: 55254 - DNA, 74 bp, Homo sapiens
ggccagcaccttctctctaaagcccaagaggagtttgagctccggaccaaaatttaacagtgccatccgaggaa

SEQ ID NO: 55255 - DNA, 100 bp, Homo sapiens
cggcgtcgggtttgggctggaggtcgccatggggcgaggcagcggcaccttcgagcgtctcctaggaagatgttaccgagtacttcagtgaattccttag

SEQ ID NO: 55256 - DNA, 98 bp, Homo sapiens
acagtttgtaccaatgaaagaggctggataacctaccagggattcctttcccagtggacggtgataaaagaaaatgtggctgaagttacccgaagttc

SEQ ID NO: 55257 - DNA, 90 bp, Homo sapiens
ggaaaagcacatggcggccgccagcgccgagtgccagaactacgccaaggaggtggcaggggactcagaattcatgattgaagaaatgca

SEQ ID NO: 55258 - DNA, 75 bp, Homo sapiens
ggtggttgaacttctgcacaaagaaatcattctagaaacgacaaccaaggttaatagcaatgaacttacaaatgg

SEQ ID NO: 55259 - DNA, 100 bp, Homo sapiens
agtctcttggtttggtctctaaaagtaaagggctggcttagcaggagctccagcccgtgctgtatcagctgtaaagaatatgaatcttcctgagatccca

SEQ ID NO: 55260 - DNA, 100 bp, Homo sapiens
agttaccgcctccgtagttacaaggattgtggagaatattgaagtacttgctacagccaagagacaatggaaacaagtcatccaaaactgatgacctggg

SEQ ID NO: 55261 - DNA, 87 bp, Homo sapiens
ttgaatctggtgttatcaacttaaaagatgccacctctaaggaccctgatgctcccataagacagaaaatgccccttgatgatctgg

SEQ ID NO: 55262 - DNA, 82 bp, Homo sapiens
ctcgatcttgggacccaccgctgccctcagctccgagtccagggcgaggtactctctgaagatggcagaagctcaccaagct

SEQ ID NO: 55263 - DNA, 101 bp, Homo sapiens
catgaggccaaaggcagttgtattgcttcagctttagctgcagctgcctctgttcagccacttgcaacacaatgtttccaactctctaacatgtttaaccc

SEQ ID NO: 55264 - DNA, 82 bp, Homo sapiens
gggcttacgcagaaggacctggccacgctcctggactggattgagggcaaggagcggaacatccgggccctgctgtccacgc

SEQ ID NO: 55265 - DNA, 75 bp, Homo sapiens
agcgaagccgaaaaaggcagcagcgaaggagaccagcataaacactttggggactgagaggataagccatatcat

SEQ ID NO: 55266 - DNA, 100 bp, Homo sapiens
gagccgccgcgggcaggacgcgcgctgcagggaaatcctcattgacgattcaatttgttgaaggccaatttgtggactcctacgatccaaccatagaaaa

SEQ ID NO: 55267 - DNA, 98 bp, Homo sapiens
aaacagaaccaatgatgtggatttctccacttccagtttttcaagaagtaagtggaaggagaacatgaatctctcagaggcccaagtacaggcgttag

SEQ ID NO: 55268 - DNA, 89 bp, Homo sapiens
cgtctgcggctctccgccgtccccagccctgcctctccctgggctctgtcccatgaagctgaggtcttgaagcagctggctgagaaacg

SEQ ID NO: 55269 - DNA, 128 bp, Homo sapiens
gctgagtgtgcctgggcctccagtcttgtccctggaggcctctgaggaagtggagcttgccggaagtcggtgcagcccacctcagaggagcgcatccccaagaccatcgagatcaagtccatcacgca

SEQ ID NO: 55270 - DNA, 98 bp, Homo sapiens
cggagtaagatgatcgaccgcaacctccgtgaggacggcgagaaggcggcgcgcgaggtcaagctgctgctgctcgattatctttctcaaggaataga

SEQ ID NO: 55271 - DNA, 100 bp, Homo sapiens
tgtagaaacactactaactttttcagctttgaaaaggtatgcagtaattttggccttcgatgtgagaattgaacgagatgcacaagaaatggctgatagt

SEQ ID NO: 55272 - DNA, 75 bp, Homo sapiens
ccggccggctggcggtcacctggcacaccagcgcccgcaggatgcccaggcaagaagttatgaaatggaatggat

SEQ ID NO: 55273 - DNA, 104 bp, Homo sapiens
atatcgacgtcgtgatccagaagtccagagctgaggactgcctgtttgcagacctgcctagagctggaacgttacctccagagcgagccctgctatgtttcagc

SEQ ID NO: 55274 - DNA, 100 bp, Homo sapiens
ccaattctgcgcttctcagtaactacgaggagacatatactgcctggactgcctggctgatgtgagctagtttgtctggttgagttggatgtttaaatag

SEQ ID NO: 55275 - DNA, 75 bp, Homo sapiens
cgaacgcttcgctggccatttaggagctctgctcaaagccagacggtgctttgtaacagagccagactggtttcc

SEQ ID NO: 55276 - DNA, 75 bp, Homo sapiens
acctcatcccctggatgggggaccacaagatcctcatcgacagctcattgctatggacagtgctatcaccctgtg

SEQ ID NO: 55277 - DNA, 100 bp, Homo sapiens
cacctgaagccagcccgctaccgccgtggcttcatccacaatggcatcatggagcatccccccggtccttcagaatccaaacacgctttccgtcctacca

SEQ ID NO: 55278 - DNA, 101 bp, Homo sapiens
aagttactgccgcgccaccgagtccggaccggagactttggggcctaactagctgacaagctctctactgatgatctgaactccctcattgctcatgcaca

SEQ ID NO: 55279 - DNA, 90 bp, Homo sapiens
taccagcatttttcctgcaacataagaaacattcaccatcatcagagtcctgtgtatggaaactcacatgagtcagctcagtctagaagg

SEQ ID NO: 55280 - DNA, 75 bp, Homo sapiens
attgacagctgcattcaatcttttgtaatagttatgcacgagtgcgagctgtggtgatgacccgagatgactcaa

SEQ ID NO: 55281 - DNA, 98 bp, Homo sapiens
cgtctctctgctgcggcgcggggaccgctgtgctctcgggatgccaaggcctgcgtgatccacggcaccgacctcaaggacttcacctccgagcaaat

SEQ ID NO: 55282 - DNA, 100 bp, Homo sapiens
gccgggcagggaggagaccggcacccagacaggtggcgacggcagaggagacctgaaggagaagaaggagaaggtggaggagaaggcaagccggaaagag

SEQ ID NO: 55283 - DNA, 101 bp, Homo sapiens
gtgctactgagcaatatcaagcccattcaaacagaggcatggtttcattcattggctcccatgtactatcgaggctcagctgcagctgttatcgtgtatga

SEQ ID NO: 55284 - DNA, 100 bp, Homo sapiens
ggaaagcgacaccgaggaattctatgatgcccctgaagatgtgcacctagggggcggctaccccgtgggcagtccagagcgtgagtccattcacatcctg

SEQ ID NO: 55285 - DNA, 75 bp, Homo sapiens
acttaagagaatctcaagctgctaagggcatatcgatgcatttacttcaaaactttttctactggaagaaattac

SEQ ID NO: 55286 - DNA, 82 bp, Homo sapiens
gaccgactccgcacggcactgccgacctccgggagcagcgcaggtcaaaatgcagatcttcgtgaaaacccttaccggcaag

SEQ ID NO: 55287 - DNA, 100 bp, Homo sapiens
ggtttcccctgtaccctgcattttcgagtaagattttttatacctgatcccaacacactgcagcaagaacaaaccaggatggacgtggtagaggtcgcgg

SEQ ID NO: 55288 - DNA, 100 bp, Homo sapiens
tgacattcaaccgtacccgccaagctgtcatcacaaaagagttgattgaaattatctctggtgctgcagctctgtatcacagcctgtacctgaaggtgaa

SEQ ID NO: 55289 - DNA, 75 bp, Homo sapiens
ggctgcagcccaagtggccccaggccccgtgggagaggtcttgaggaccggcccagctcaggctcctggggcagc

SEQ ID NO: 55290 - DNA, 100 bp, Homo sapiens
cactgcctcagtatctgaacacaagtattggtaaaggttttcaaggtgtcatgaaaagatggggatttaaaggccagcctgctacgcatggtcaaacgaa

SEQ ID NO: 55291 - DNA, 83 bp, Homo sapiens
cccagctttaccgcaaccaccgccaccagtccacggagggcatgaggaagctcttcgtgggcggtcttgactggagcacgacc

SEQ ID NO: 55292 - DNA, 100 bp, Homo sapiens
acctcaacctggttcagcagttcagggagctcacatttctcatattgctcaacagcttgtattggttggtgatggtggtactggaaaaacgaccttcgtg

SEQ ID NO: 55293 - DNA, 75 bp, Homo sapiens
ggtggcctttccactggagttgcttcacttagctctacaatcaacccatgtgaaatctcctgcaaagaagctgag

SEQ ID NO: 55294 - DNA, 74 bp, Homo sapiens
aagactggggctgctcccatcattgatgtggtgcgatcggaacgtcaaggtcgtgggaaataaaaggcagttct

SEQ ID NO: 55295 - DNA, 96 bp, Homo sapiens
ccagagactgctgagcccgtccgtccgccgccaccacccactccggacacagccttatgccagcctggaccatcttggaggcagtgtaggatcatg

SEQ ID NO: 55296 - DNA, 57 bp, Homo sapiens
gcccggtttctcggcgaatgacagcacagaactgtggacaacggaaggctgagcccc

SEQ ID NO: 55297 - DNA, 100 bp, Homo sapiens
taacatttatacaaccgattgtcaaagaggacagggcctccatgctttgagtggacatactgatactaatggaccatactaccaaggaccagtccacctg

SEQ ID NO: 55298 - DNA, 100 bp, Homo sapiens
ccaggctgcagagcccatagccaccttctatgggttaaggcaacagacactacaacaacaggagtgcaaacttctctacagccgaaaagagggtcaaagg

SEQ ID NO: 55299 - DNA, 100 bp, Homo sapiens
tagtgatcccattgggggttgatacagcagagacgtcatacttggaaatggctgcaggttcagagtctccatcatcaccagttccagtagtgaaaaacag

SEQ ID NO: 55300 - DNA, 112 bp, Homo sapiens
ctgggcgcgggcgtgacggcgctcagccatcccctgctctacgtgaagctgctcatccaggattatattccatcacaacaagatattctgcttgccagaagacccaccaaag

SEQ ID NO: 55301 - DNA, 51 bp, Homo sapiens
cccggagtgattgcccggcagagcgcgttacagaatgtctgaaggggacag

SEQ ID NO: 55302 - DNA, 50 bp, Homo sapiens
attcagaaggagcaggattaccaaaggattatggatgattggccagggta

SEQ ID NO: 55303 - DNA, 106 bp, Homo sapiens
ccgcgagcacagagcctcgcctttgccgatccgccgcccgtccacacccgccgccagggagtgcatccgccccaacccttttccccctcgtctcctgtgagaattc

SEQ ID NO: 55304 - DNA, 98 bp, Homo sapiens
cctggaggacctcttcaacttctgctccaggaaattcagcctcaaaaccgtcctgctgcttgctgaccaaatgctatgtgttctcatttcacccaaga

SEQ ID NO: 55305 - DNA, 95 bp, Homo sapiens
cctgacttcatctccaaagaagaggaggagtatttgcttcgacagagactcaccgcactgtgttaaaccagatcctacggcagtccacgacccac

SEQ ID NO: 55306 - DNA, 75 bp, Homo sapiens
gagatctttctgctgtctatactcttggaaagcacatcctaaggtctgtgagctttacttctctatataatttgc

SEQ ID NO: 55307 - DNA, 100 bp, Homo sapiens
ccactttttctatctggttgaatgctatcttgtggatcttctgagtaacggaggacaattcaccatagttttctttaagtggctagaagtgaccccagga

SEQ ID NO: 55308 - DNA, 116 bp, Homo sapiens
caaccccagccgaccttgagctccaggagttcgtctcttacgtctgcggaagtgcagctgcctcagttcttagcgcaggatgaagatgagctggattcccacaccatggtgaagac

SEQ ID NO: 55309 - DNA, 100 bp, Homo sapiens
attccttttctctttagttttttaggtggtggcggcagtcggatagacaataccacaacaacacattttgcagaggcatataaaacctttgctaaccgag

SEQ ID NO: 55310 - DNA, 88 bp, Homo sapiens
ctcaaacaaaaaatcactgcattacatcagcaggagagaagatgactgaggaggaggtggagaccgttctggcaggacacgaggacag

SEQ ID NO: 55311 - DNA, 100 bp, Homo sapiens
tcacggggtgactccaagcagggccccctttgcattcagcctgcccttctctcagcccaggcttctgggaacttggcagacgcagcttagagagactcac

SEQ ID NO: 55312 - DNA, 90 bp, Homo sapiens
gaggtgttggtgaagaccttggactctcaaactcgtacctttattgtgggggcccagacacccaaggacaatgctgctactctacaacca

SEQ ID NO: 55313 - DNA, 98 bp, Homo sapiens
aagacttcaacaaatacgtggcctacatagagtcgcagggagcccaccgggcgggcctggccaaggcaagcctgggacctggctgttgacatctgtct

SEQ ID NO: 55314 - DNA, 96 bp, Homo sapiens
ccgacagtaaacagaatgtcccttcaggaggccccgtgccatcgccacagacctacagctctacgtctcctccgagagccgcttcaacaccctggc

SEQ ID NO: 55315 - DNA, 100 bp, Homo sapiens
gtgctgctgttgatgctggctttgttcccaatgacatgcaagttggacagacgggaaaaatagtagcaccagtgctttacaaggccaagtacggtccaat

SEQ ID NO: 55316 - DNA, 75 bp, Homo sapiens
tgcagaagaaaccagccgaacttcagggtttccaccgttcgttcaaggccctgtctctgcccctggtggtcatcg

SEQ ID NO: 55317 - DNA, 113 bp, Homo sapiens
ggccgctgtgtggttgcaacggagataaattcccggaaccgcgattcggcgtgtcaggtgttggagagcacaatggctgaacaagtccttcctcaggctttgtatttgagcaa

SEQ ID NO: 55318 - DNA, 75 bp, Homo sapiens
aggaggaggaggaggggctccggctggtctgtggtgaggtactacctttcccaagccaggtggtgtacaacaggg

SEQ ID NO: 55319 - DNA, 74 bp, Homo sapiens
gcccactctgcggagttagcagtcacgacctccagcacagtgcccttaaagatagccgttttcccccaatgaca

SEQ ID NO: 55320 - DNA, 124 bp, Homo sapiens
ctcatgctggcggctctgcgtacgctggttggcatttgctctgagcatcagtcacgggatgaatttttagatgtgatctactggttccgacagatcattgctgtggtcctgggtgtcatttggg

SEQ ID NO: 55321 - DNA, 82 bp, Homo sapiens
tgtgacattttctggctgcaacagcgttacagtgtttctgccacctctgtacaaaagacaattttacttgtgtgacagatgg

SEQ ID NO: 55322 - DNA, 83 bp, Homo sapiens
actgaagatcctggtgtcgccatgggccgccgccccgcccgttgcaaccaaccagtggttcatcccagccgtgaggggggaca

SEQ ID NO: 55323 - DNA, 98 bp, Homo sapiens
gcagtgagcaccttttggcccaatgaatatcagcatcaacaacagcaacttgtgattggcggtgaccggatattcagttgcacatccccacatcaatg

SEQ ID NO: 55324 - DNA, 100 bp, Homo sapiens
aaggtcaactcgatccaatacagaccacctctcaagctggatccaaggataaaaagatggaccaaccaccccaagccaagaaggcaaaagtgaagaccag

SEQ ID NO: 55325 - DNA, 75 bp, Homo sapiens
tgactcatgcattctttcttcaaacaacctccctaccaaggatcttctttcagagtgaaattcacatgtctgaag

SEQ ID NO: 55326 - DNA, 51 bp, Homo sapiens
ggaaatctgcaagcccggaagtttcagaagactcatgatagtaaagagcac

SEQ ID NO: 55327 - DNA, 50 bp, Homo sapiens
acatctacaaccttcgatctcctgacgagaccgccgggagagcctgccca

SEQ ID NO: 55328 - DNA, 97 bp, Homo sapiens
cgtggatctgccgccgggttgctgtgcgactattctccgggagccgtccgtgtcaccgccggaacctggcgcagctgcagaaccttggcctgaaaat

SEQ ID NO: 55329 - DNA, 75 bp, Homo sapiens
tggaatttgtgcaatgtttagccaacccaaattaccttaattgacacattcagctaacgtattttagcaggtgga

SEQ ID NO: 55330 - DNA, 82 bp, Homo sapiens
cgaaccaaagctgaacaaggcaactgttcaaccaggagaaaagacagcaatggaccgagagaaacttttccatgtctgtaaa

SEQ ID NO: 55331 - DNA, 82 bp, Homo sapiens
agcgggtttatgaggaattcacgaaagtggttcaggaagatgagaatgtgcctactgctcctgatcctccaagtcaacattt

SEQ ID NO: 55332 - DNA, 101 bp, Homo sapiens
ctggggttgggaaatcaagcatcgtgtgtcgatttgtccaggatcactttgaccacaacatcagccctactattggcttagaccatgctcagcctccaagc

SEQ ID NO: 55333 - DNA, 75 bp, Homo sapiens
ctctcctccttcttcctcaactatctcgctgacacgcagcaattcaattaaaccccagctatatcagggcaatat

SEQ ID NO: 55334 - DNA, 100 bp, Homo sapiens
accaggactcagaggccgccatcaaccgccagatcaacctggagctctacgcctcctacgtttacctgtccatgggtcccctcctaaccgcaagcgtcct

SEQ ID NO: 55335 - DNA, 100 bp, Homo sapiens
atttgaatttgctagtaacgtcatggaggatgaacgacagaaaggagaagatgagtatgccaacgttgatgccattgttgtatcagtgggtgttgatgaa

SEQ ID NO: 55336 - DNA, 99 bp, Homo sapiens
gaaaaaccagctggagattgagagactggaggagcagaaactggcagacctttcacttcgtatccaacaaattgaaacaactctcaatattttagatgc

SEQ ID NO: 55337 - DNA, 98 bp, Homo sapiens
ctcccccctccggcgcggaccccgcgtgcgccttgctcgcccgcagccccgagaccgcagatatggatcagaaactttcgaagttggtagaagagctc

SEQ ID NO: 55338 - DNA, 106 bp, Homo sapiens
gtcaggagatcgagaccatcccggctaaaacgacagcctctggagatcctgtgttgctacttgtcatgtttcttaggatcagctatcaagaataatctacttgctg

SEQ ID NO: 55339 - DNA, 100 bp, Homo sapiens
tgtcaatggaggaggacattgatacccgcaaaatcaacaacagtttcctgcgcgaccacagctatgcgaccgaagcattaaatgagatggaagacatcgt

SEQ ID NO: 55340 - DNA, 102 bp, Homo sapiens
ccgacaacagagtcgtaatcgctctacccagtcccaggacgtggcgcgggtctccagtgcttcagggcactgtgttggcactcactgaaaataacttcgatg

SEQ ID NO: 55341 - DNA, 100 bp, Homo sapiens
acggcgtgcgcggctatcccaccatcaagttcttcaggaatggagacacggcttcccccaaggaatatacaggtacatgtactggacagactggggtgag

SEQ ID NO: 55342 - DNA, 107 bp, Homo sapiens
aattaggtcacttcaacctcttgttggaagattattcaaaaggcaatgaatcgctccctggctaatgtgattcttggaggctatggcaccacttcaacagctggtgg

SEQ ID NO: 55343 - DNA, 90 bp, Homo sapiens
gggcgagccagagagggcccacacgactagaaggacgactgcctggcgcgatacaaaaatgtatctggcataattttgtccttgcactct

SEQ ID NO: 55344 - DNA, 89 bp, Homo sapiens
ttcgggaagccatccatttagccaggttcaaaccttgtactactcagctgatcacaagctgcttgatgggaacctactagatggacagg

SEQ ID NO: 55345 - DNA, 82 bp, Homo sapiens
cgaagagcccgccgcccgcgcgagacaatgcagatcttcgtgaagactctgactggtaagaccatcaccctcgaggttgagc

SEQ ID NO: 55346 - DNA, 97 bp, Homo sapiens
tagactcatcagaacttcctacgagtttcaactagtggccccactgtgtccggaattgatgggttcttggtctcactgacttcaagaatgaagccgc

SEQ ID NO: 55347 - DNA, 89 bp, Homo sapiens
ccttcagcagcaccgagactggctctgcggaggcactgtgcatccccacctttcagctcctagaacagcagaatggtctccagaatcac

SEQ ID NO: 55348 - DNA, 74 bp, Homo sapiens
aggcgagggtgcagagcctggagagcatgccccggccccctgagcagacctctggtgccccggggagcccccaa

SEQ ID NO: 55349 - DNA, 50 bp, Homo sapiens
tttcctgcaaggactccaaagtggtgagaccaactgaagaagaagctgag

SEQ ID NO: 55350 - DNA, 100 bp, Homo sapiens
agctccccactggctttggctggggacacccgacaatgagatgctggaggaaggacatgagtatgcggtcatgctgtacacctggcgcagctgttcccgg

SEQ ID NO: 55351 - DNA, 95 bp, Homo sapiens
actcaaccttcacagttctcaagcgctaccagaatctaaagcctattggctctggggctcagggcatagtttggaatgccccagtggtgttgtta

SEQ ID NO: 55352 - DNA, 75 bp, Homo sapiens
tctgccgatgatcaaggaacacattatgcaaatgcttcaaaatcgctgctttgctggctctgcaagaaaatggac

SEQ ID NO: 55353 - DNA, 75 bp, Homo sapiens
gggatttgagattgacgcggtgaactctgtccagttttcaaaccacacaggcatgaatgctttacagttgcagaa

SEQ ID NO: 55354 - DNA, 98 bp, Homo sapiens
cgatggcagcggctgtgccgaggcgcccaactcaggactctgtgtgggggatgaaccacagtacactccattcagtatttcagaccaatcaaagcaac

SEQ ID NO: 55355 - DNA, 73 bp, Homo sapiens
aaaatgatcccttgaaagacagttacggggatcatcgtcttgctcttcttttatctcagtttgtgggtagcca

SEQ ID NO: 55356 - DNA, 100 bp, Homo sapiens
tggagagggactgacgtgtttggagggaaatgggaatgtacacgataattaaagagtaaagttgtgctcaacgtggcttttcatggcctgccactgaaaa

SEQ ID NO: 55357 - DNA, 102 bp, Homo sapiens
aggcggagagcgctgaggcgggggccgtgccctcggaggcggcgtgggcggcagagagcggggcggcggcaggaagctcttcgtgggcggtcttgactggag

SEQ ID NO: 55358 - DNA, 75 bp, Homo sapiens
agctgagtcaggcactgggtcagggatgaggtcctcaaggagacagtatctcagcgccctggagccacagtaccc

SEQ ID NO: 55359 - DNA, 100 bp, Homo sapiens
ctctgagaagcactatggtcgtgagagtcgtcagtgccctattccttcacatgtaattcagaaattagggacagatgagactgatcgtggggttgaccaa

SEQ ID NO: 55360 - DNA, 75 bp, Homo sapiens
gctcagcaaggtgttgtgaatttcccatatgatgatctgtcatagtctcagcccgcatggcccccgaggagatca

SEQ ID NO: 55361 - DNA, 90 bp, Homo sapiens
aaaacagttacagatttttgttatcttctggataaatctaagcaactgttcaatgggttaaggcattcccatcaagagcaccatggacaa

SEQ ID NO: 55362 - DNA, 82 bp, Homo sapiens
tcacctatcccccagccatgaagaatgcccatgccaaggcctcccgcacctcgtccaagtcctacgagggcactctgtacaa

SEQ ID NO: 55363 - DNA, 100 bp, Homo sapiens
ggagtccggacatctgaaacttgggaaagcaggcaggatgggagagtcgccgatagaaccacctcttccctgcctcctgggcttgggggaagcttgaatg

SEQ ID NO: 55364 - DNA, 75 bp, Homo sapiens
cgccagctccagagccacgtacggcctctccttccgatgaaaagagaaaggaagaatggactacagccaccaaac

SEQ ID NO: 55365 - DNA, 83 bp, Homo sapiens
agatgggcatctattacattccactgatgctggcacccccacgggaactcttcaaaaagacgcctcgccagattgcactgatg

SEQ ID NO: 55366 - DNA, 75 bp, Homo sapiens
gggtggccctaggggcagcgagcaagacagcaagcaggctgctctttggcgtaaattgcaatcgattagggatcg

SEQ ID NO: 55367 - DNA, 74 bp, Homo sapiens
ccttggcgaggcctttcaccaagtccatgggggtgagtggtgcactgacagtgcttatgaaggacgcaatcaag

SEQ ID NO: 55368 - DNA, 75 bp, Homo sapiens
cgcccgccgacccgcgccctgctccctctcagcacctgggcggacggtttgtttgaataagagatctgacctgac

SEQ ID NO: 55369 - DNA, 100 bp, Homo sapiens
atctcctcctccactgccactacagggaagtgcatcacatgtcaggaccgtataatagacgctggccccaaaggaaactactctcgatttatgaatcaca

SEQ ID NO: 55370 - DNA, 100 bp, Homo sapiens
ccctccttcgtgtcgtacgtacgccctgagaccaaagagaaccctgtacagtaagaaatatggtgtggacctcatcagatacactcatgcagcaaacaca

SEQ ID NO: 55371 - DNA, 82 bp, Homo sapiens
gcgccatggcgaccggagcgaacgccacgccgttggaattcagcggggtgccaagtcgttttctgtgtgggttgagagacag

SEQ ID NO: 55372 - DNA, 82 bp, Homo sapiens
ccagtatgggaaagatctaccttctggaagctactactacgtggtgcttggaaaggatcgaatcatcaatttagttgttggc

SEQ ID NO: 55373 - DNA, 74 bp, Homo sapiens
attggccttctctagaagactcttgtgaaatgacaatggatgctctgttggctcgattgaaacttctgaatcca

SEQ ID NO: 55374 - DNA, 100 bp, Homo sapiens
cgtgccctcccgctcggccccgccagcagcactgtggaggccgtcctcgtgtactaatggtcacttgatgtgcgctggctgttttatccacctactagca

SEQ ID NO: 55375 - DNA, 82 bp, Homo sapiens
cttagctgtgctcgcgctactctctctttctggcctggaggctatccagcctcccggagccctgcctgttccctgtccatcc

SEQ ID NO: 55376 - DNA, 100 bp, Homo sapiens
tctcaaccttgtgggatgtgaaaactctgttactgaagaaagtgaagtcactgcttttgctgtcttggatcaagaccagaaagaaattattgataccaat

SEQ ID NO: 55377 - DNA, 51 bp, Homo sapiens
gtgcagaacctcatcaaggacaaaggtttttcgttggaatatacgttgcac

SEQ ID NO: 55378 - DNA, 100 bp, Homo sapiens
aggacctggtcttcactgacgcctctccccagggtaagatcacagatgaggaggctacgaagtccagctacctgaacattgtgggcctggttgggtcaat

SEQ ID NO: 55379 - DNA, 98 bp, Homo sapiens
ctactttgaccgtaatggacatcagcccacccagccgttatgtcaagccctccaacatcctagtcaactcccgtggggagatcaagctctgtgacttt

SEQ ID NO: 55380 - DNA, 82 bp, Homo sapiens
caacgagaaactggacaaccaacggctcaagaatttcaagaacaaaggccgcgacttggagagatcctgaaggagctagacg

SEQ ID NO: 55381 - DNA, 97 bp, Homo sapiens
agaagccaagtgcttgatgctagctgaaggcatcagcaggactcagacctctcagcagcgtgctctgacgctgacctccacagacacaaaaaaaaga

SEQ ID NO: 55382 - DNA, 80 bp, Homo sapiens
gctggagcggggtagagaccgccgggtctcggcccgcaccaggagcggaacaaggtggcccagttgaaatccttcccttc

SEQ ID NO: 55383 - DNA, 83 bp, Homo sapiens
catcttcctccctgtgtactttccatttgccttcctggcttcggaaggagtatggggccaatgtgcttcctgcattcccccca

SEQ ID NO: 55384 - DNA, 100 bp, Homo sapiens
caagagggccccgctgaccaggtggctgcagacgccttctggcaagaggggagagcctctggaacagtgtacagtggggaggagaagctcactgagctcc

SEQ ID NO: 55385 - DNA, 100 bp, Homo sapiens
gctcaggaacagggacagcacctcatcccctggatgggggaccacaagatcctcatcgacaggtacactggctttctcaaaggactattgcaagtctttg

SEQ ID NO: 55386 - DNA, 53 bp, Homo sapiens
cgcaaagcttgcgaggtggcgttaggcattcttacacagaatgaaccagtgtg

SEQ ID NO: 55387 - DNA, 100 bp, Homo sapiens
aatggcctatccaaggacatgagcagtttacacatctcacccaattcagggccacactgcgttactgagcatgttctgaccgggccgtcttgggcatcac

SEQ ID NO: 55388 - DNA, 82 bp, Homo sapiens
aggagaccgaggccaagtactaccgcaccctggaggacattgagaaggccaccagcttgggctccccacggagggcagcaag

SEQ ID NO: 55389 - DNA, 90 bp, Homo sapiens
cgccggcgagatgcctttgttcaccgccaaccccttcgagcaagacgtgggttgatctcctatcaagagtttttggcatttgaatctgtt

SEQ ID NO: 55390 - DNA, 74 bp, Homo sapiens
gtcgaaggggaaggcgcctgaagaggacgaaggaacagtccctaccagcctggaaaacagaccagcctctgtca

SEQ ID NO: 55391 - DNA, 90 bp, Homo sapiens
agttctgcaaggagcacggtttcgtaggatggtttgaaacatcagcaaagctgacatagcccagagatacaggataagcaaatacccaac

SEQ ID NO: 55392 - DNA, 100 bp, Homo sapiens
gcctcgggcaggaggagggcggcttctgcgagggcagcctgagattcaagtcaatctgaaagtcccagccagccaagtgacgctgacattaaggaccagc

SEQ ID NO: 55393 - DNA, 98 bp, Homo sapiens
ccttgtcagccagggctgaacccccgcaggcaggtgacaaacattaccaccccagctgtgcacgatgcagcagatgcaaccagatgttcacagaagga

SEQ ID NO: 55394 - DNA, 75 bp, Homo sapiens
cgatccagcctgcggagcctgtggggcaggcaaaacaacgagtggatgagaaacccagcctgggagccgtgaagc

SEQ ID NO: 55395 - DNA, 108 bp, Homo sapiens
ccaggaatgccagtgcatcttttgcacagctgtcatggcaaaaccccaaaagatgccgcgtcagttcgagccacgcatccaataccagcagcctgtgggatttattat

SEQ ID NO: 55396 - DNA, 74 bp, Homo sapiens
ttacagcttctcagtgtcaacagccagcagaaaatccgtctcttgctcaagtgaaaattgaagaagcaaagcga

SEQ ID NO: 55397 - DNA, 100 bp, Homo sapiens
gtggaaccatatccgtggacctccatatgctcataagaacccacacaatggacaagtgtcagctacggtgaagctatctaaaccggtggctctatggacc

SEQ ID NO: 55398 - DNA, 100 bp, Homo sapiens
gctctcctgtctgccaccatcctgggttgacaattctacacaaggagaccctcaaactgacacaagacctacagagaaaaccctttgccaaatctgctct

SEQ ID NO: 55399 - DNA, 98 bp, Homo sapiens
tctggagacgccgtggcagcctgaacggagtgtgcgacggattgggaggctccagcaggagaagacagacacggtccgctgcatcaagtcctgccgcc

SEQ ID NO: 55400 - DNA, 90 bp, Homo sapiens
atttgatcctgattctacccaagtacatatgatttcagctgcaatggcaggtattcctccacctcgtcctggcatgatgcgcccaccttt

SEQ ID NO: 55401 - DNA, 50 bp, Homo sapiens
cggtcttgctgaaagccagggaaggtgacttaagagattaaaattaattt

SEQ ID NO: 55402 - DNA, 100 bp, Homo sapiens
gcaagccgtctcctgctcaacaacggcgccaagatgcccatcctggggttgggtacctggaaggctaggcagctggaagagaaagaccgagtgctaaaga

SEQ ID NO: 55403 - DNA, 75 bp, Homo sapiens
acaagaggacgcacactggagaaaagccttttcagtgtgatgttttacagaaggcgacacatgttgttcagagtg

SEQ ID NO: 55404 - DNA, 129 bp, Homo sapiens
actttacaagttaattgaagagtcttgtccacagctggcaaattcagtgcagatcagaactagtgtttatgattctcgagcacgagaaagattgcgccagattgaagaacagaaggcattggccttaca

SEQ ID NO: 55405 - DNA, 100 bp, Homo sapiens
aacatgcagcaaccactattttcttcctgcccctcgttgatgagagcattcgaagtgacctcagcagggcatccaggatctgtgccagttcagaagcagg

SEQ ID NO: 55406 - DNA, 100 bp, Homo sapiens
cggggcagcaaccaggagattccctgggcctgcaggaagcccttccgcggaccgaaaggattttttatcaagcagaaatgcatcgaacaacgagaatcaa

SEQ ID NO: 55407 - DNA, 83 bp, Homo sapiens
ccgccgccgcctctccttgctgcagccatggaaagcaaggtctcgctgtgttaccctggctggagtgcagtggctacttacag

SEQ ID NO: 55408 - DNA, 75 bp, Homo sapiens
tctgggagcagaagggaggctccaagacctcatcaacaattaagagacggtgctgagataggatcatgaaggaag

SEQ ID NO: 55409 - DNA, 83 bp, Homo sapiens
gcctgcgcgcggcgcgagggaggctacacgtgcgtctgccgcccgcgcttcaccggtactccaaagattcaggtttactcacg

SEQ ID NO: 55410 - DNA, 100 bp, Homo sapiens
cgaaagcctacaaaagtgtggagaggttccttcaggaggatcaggcactacctggcagcaccatctaaacctgtatcatctgctgtggtcccagttactc

SEQ ID NO: 55411 - DNA, 100 bp, Homo sapiens
agagccatgtaatcatgccaacatcctgaccaagcccgatccaagaaccttctggactaatgatgatccagtttggaaattttagcattcaggtgccagg

SEQ ID NO: 55412 - DNA, 75 bp, Homo sapiens
gctggggttggacgctgccagtttgcacagcagcaggagctctgtgtgtcgtctgagcagtcgcgagaagatttc

SEQ ID NO: 55413 - DNA, 75 bp, Homo sapiens
actaccccgcagttcccggacatgatcctctccgcctctcgagagtggatgaggatgaggatgacctggaggaag

SEQ ID NO: 55414 - DNA, 100 bp, Homo sapiens
ccaaaacatcgagacgctgcagaacgcggggcgtctgtgaggagctgacctacgaggagatcagggacacctaccctgaggagtatgcgctgcgggagca

SEQ ID NO: 55415 - DNA, 83 bp, Homo sapiens
ctggagcctcagttggaagcagccgatccagcctgcggagcctgtggggcagtccaaaagaaactcttccttcaaaacctgtg

SEQ ID NO: 55416 - DNA, 100 bp, Homo sapiens
gcacgcgcttccgcatcccttggaagcacggcctacggcaggatgcacagcaggaggatttcggaatcttccaggtgctccgagagatgctccctctccc

SEQ ID NO: 55417 - DNA, 51 bp, Homo sapiens
gttggtctgaaaatgcttgcacaggaaatcatcgagttccccatcctaaag

SEQ ID NO: 55418 - DNA, 75 bp, Homo sapiens
cgcagcccgggcccaggccccggcagcgcctgggacaagacctgcctagagctggaacgttacctccagagcgag

SEQ ID NO: 55419 - DNA, 98 bp, Homo sapiens
ccattggatttaaaagacagtcctcgtcagcactgactttcagctatggaatcgaacctgcaaccatggtcgtgccactagccagctcggaagcccag

SEQ ID NO: 55420 - DNA, 100 bp, Homo sapiens
ctctcaccgcgcatgtttggagagagactagcttgcaaaattttcctcatattgaggtggttcggaaaaaagaggagagaagaaaactgcttgggcacac

SEQ ID NO: 55421 - DNA, 124 bp, Homo sapiens
gcgagctttcccgggataagtagctttagcgatcgggagacagccgggcgctgcaagactgctctggcccatttagagtctcttgcagtggatgttgaggtggccaatccaccagctagtaagg

SEQ ID NO: 55422 - DNA, 90 bp, Homo sapiens
ggggagcccaagggtgcacagcccctggctacgactactggtgcctggatgatctgtaccgggagatggtgagatgctatgtggaaatcg

SEQ ID NO: 55423 - DNA, 75 bp, Homo sapiens
cgggagacaggcggccttccgagagggactggagcaggccgtgcggattattgcatcgagcttttagtgtcttct

SEQ ID NO: 55424 - DNA, 50 bp, Homo sapiens
atcaaatcgagtcactgtcaagacccagatgatgtggtaccagttggcca

SEQ ID NO: 55425 - DNA, 50 bp, Homo sapiens
acagatgggaaaaatatttgatcaaggttgggggccgtcccgctcctaag

SEQ ID NO: 55426 - DNA, 83 bp, Homo sapiens
cgccggctatggccgtgccctggggctgagccctcagcgtttgcctcagcatggagggcggggccgcggcagccacccccaca

SEQ ID NO: 55427 - DNA, 140 bp, Homo sapiens
agaccgatgtctactccatggctctggtgctctgggaaatgacatctcgctgtaatgcagtgggagcatatagcactttctacattgtgggtttaatattatcaatgcagataccttttgtgggattccagccaatcaga

SEQ ID NO: 55428 - DNA, 83 bp, Homo sapiens
ctgcgactctaaacggactcatgtactttgtcaggtctgcgaggaacagaagtgcgaggaggaggtcttcccgctggccatga

SEQ ID NO: 55429 - DNA, 101 bp, Homo sapiens
ggccccggatgctgcggcgcccgctggccgggctggctgcggccgccctgggccgggccccaccggacgagtgtgaacatggctacgcctcttcattcccg

SEQ ID NO: 55430 - DNA, 75 bp, Homo sapiens
cagcaggcggggaagatgaaaggaccgagacatgggtgcccggcaccgcgcccgagcccactccattcagatcat

SEQ ID NO: 55431 - DNA, 50 bp, Homo sapiens
ccaaagtgatcctttttttatgcccgaggatcaaccacaggtttgtctgc

SEQ ID NO: 55432 - DNA, 101 bp, Homo sapiens
ctcttacgtctgcggaagtgcagctgcctcagttcttagcgcaggaagagagaagggcacagttacctaagtatcaacgtaatcttcctcggccaggacag

SEQ ID NO: 55433 - DNA, 72 bp, Homo sapiens
tgtaccaaggcaccgggtccctcgcccaggtccccttggacaaatgggatattaccttccaaatgatgatgg

SEQ ID NO: 55434 - DNA, 100 bp, Homo sapiens
acagctccctgggcaccaggcagctaacagggctgaagctgccctcgaggacctggtctccaccattcgagtctgaagattctcagaagcacaaccagag

SEQ ID NO: 55435 - DNA, 98 bp, Homo sapiens
ttcagaaaactgaaacccgattagctcgtgtcaatgagcagagaatgaagactgaaactgttgaggagcccatggaggaagaagaagcagccaaagaa

SEQ ID NO: 55436 - DNA, 82 bp, Homo sapiens
agtcctgaccacaatggggaggacaacttcgcccgggacttcatggtacaggtttgcagattccgccagcagcacagcaagc

SEQ ID NO: 55437 - DNA, 100 bp, Homo sapiens
atctcatattagtgcctgtgatggcatctttcatctaacacggcaaagtatgtttagtccagcaagtatcggtcagccacgaaagacgacattatctcct

SEQ ID NO: 55438 - DNA, 75 bp, Homo sapiens
gctctctcaatctctgtctgaactggatcataaatgacaggttttcttccgccgtctgtgacagcttcttgatct

SEQ ID NO: 55439 - DNA, 109 bp, Homo sapiens
gaagaagtcttgaatgactggaaactgattggaaactctttgggaaagccactcgaaaagacatatctgaagagatggattaagaatgctttggattaaggattgtgga

SEQ ID NO: 55440 - DNA, 90 bp, Homo sapiens
cactatggtgcttcagccaagtgaaaggcactatcgagattggaaccacagaagacaaattggagacaatctgattgttcctggaggagt

SEQ ID NO: 55441 - DNA, 82 bp, Homo sapiens
tctgtattcccacttccttccagtgagaaagatcagtctaaagaaaaggagaagaaagtgaaaaaaacaattccttcctggg

SEQ ID NO: 55442 - DNA, 90 bp, Homo sapiens
cgcgaggaaaatgcgggacgcccaggctactgcagcactggggtgtcagttgttggtccgacccagaacgcttcagttctgctctgcaag

SEQ ID NO: 55443 - DNA, 96 bp, Homo sapiens
cacggggacctgaagctgcttcgggaggtgtcagctgtgatgcatgtttaaaaggaaattttcgaggtcgcagatataagtgtttaatttgctacg

SEQ ID NO: 55444 - DNA, 102 bp, Homo sapiens
gaagaccgcgcgcagggcctgcagcgggagctggacggcgagcgcgagcggcgcgagaaaagtaacagttacccctcaatgagcgacccctacctgtccagc

SEQ ID NO: 55445 - DNA, 83 bp, Homo sapiens
tgagcccgtccgtccgccgccaccacccactccggacacaggttagagcagccagcgggtacagaatggattttggaagaggg

SEQ ID NO: 55446 - DNA, 51 bp, Homo sapiens
cttttgcctcagatactattttgaagaacaatgctaaagtagctgtgctag

SEQ ID NO: 55447 - DNA, 83 bp, Homo sapiens
ctataatacaacctcccacaccgaccaatcctcacgattgagtgtcaaagaaggtgatcagcttgaaattcagctaaccgagc

SEQ ID NO: 55448 - DNA, 100 bp, Homo sapiens
ctctgaaatagtagaggaagatgtcaacaagttcaagtttgatcttggctcaaagggaattgcaacccagtgaagaagttacctggaagtaaagactggc

SEQ ID NO: 55449 - DNA, 100 bp, Homo sapiens
gttcagtatcttcaacaagaatacctgccctccttgcaagtagctccagaaataattcaggatgagttccacccgttcatcgaggccctgctgcctcacg

SEQ ID NO: 55450 - DNA, 90 bp, Homo sapiens
gaaacctggatctgcgatctgtttgtgcttgcaggagggaacaggcaggcctgtggcttccaacaaggccattacctgtgcggagctcgt

SEQ ID NO: 55451 - DNA, 73 bp, Homo sapiens
gcggatgggtgagtgagcggacaaaggaatgtcggattgcacaccctgttgtgaagtgcacctactgcaggac

SEQ ID NO: 55452 - DNA, 83 bp, Homo sapiens
gcgctgctcaaggacacggtctacaccgacttcgacgggctcagtgctgtcagagagggactacgagagcctcgtcatgatgc

SEQ ID NO: 55453 - DNA, 75 bp, Homo sapiens
tgagctggaccactggagcctcggtgaggggtacatgtcccagagcaagcacacggaggcccgggagctcatgta

SEQ ID NO: 55454 - DNA, 127 bp, Homo sapiens
ctatatgcattacctggatttctgcgagaagaatgatacccaacctgtcaatgctgccagctttggaaagaaactctgtgaaggcatatttaaagtccttataaaggacatcccaacaacatgtcaa

SEQ ID NO: 55455 - DNA, 60 bp, Homo sapiens
ccagttcattcttagtgtcttctgaaataaaattagtttctagctctagctggaattgtg

SEQ ID NO: 55456 - DNA, 100 bp, Homo sapiens
agcccggcgagccactgcttcaggtcacgctggtcgactgccccgggcacgcctccctcatccggaccatcatcggcgatgcatactctcattcctcaag

SEQ ID NO: 55457 - DNA, 100 bp, Homo sapiens
ctgggggatgatgtggagtacgcacccctggtactgtcccaactgtaagaagcatcaacaggccacaaaaaagtttgacctatggtccttgcccaagatc

SEQ ID NO: 55458 - DNA, 75 bp, Homo sapiens
cggaggtgcccacgcagctgcctggacaaatggcccactgcgtgaccttggttcagctgtccatttcctgtgacc

SEQ ID NO: 55459 - DNA, 82 bp, Homo sapiens
gccctgcattcgcggcgtgtgcagagggaagtgtaacatctcccatttttctgacatatttgctgctagagagtttaaagcc

SEQ ID NO: 55460 - DNA, 144 bp, Homo sapiens
caagcttatgcgggaaagagggagggggactccaggaaaagccgttgagaggaccatcacaacctgagcagcacaggaatactcccccagttgcaagaggcgcaggaccgtggaagacttcaacaaattctgcacctttgtctt

SEQ ID NO: 55461 - DNA, 82 bp, Homo sapiens
gaaaattctgcagatgaacatttgattccacagctgggctatgtggcaacaacttatagttgcaacaacatgtatgggaata

SEQ ID NO: 55462 - DNA, 82 bp, Homo sapiens
aggatacaacatagaacctattatgctctatcaggttgaactcccaccacctgatcttggaccaagttctgcactaaatcag

SEQ ID NO: 55463 - DNA, 50 bp, Homo sapiens
aaaaaaaccttcaggcggcccatgggctggaggctctcaggtcattttta

SEQ ID NO: 55464 - DNA, 83 bp, Homo sapiens
aggagcgcctggctcttctccacaaagacacgtgcgcgcggagccatggttatcatgtcggagttcagcgcggaccccgcggg

SEQ ID NO: 55465 - DNA, 100 bp, Homo sapiens
agcttctccgggtctcagcatggtagctttggatatgttaaatcctcatgttactttgcctgttttttacccacatcttaagcatggtggtgtatgtgct

SEQ ID NO: 55466 - DNA, 99 bp, Homo sapiens
gctgacgactgtgcaggaagaaaacgagccagtgatttacaatagagcaagtctgaaggaattcctgcccaaagaatatatcaagcagagaggagctga

SEQ ID NO: 55467 - DNA, 78 bp, Homo sapiens
tccccaagtcgacgccgcaacccggggaaagcaggagcatcagatccatgctgctgctgactcggagccccacagctt

SEQ ID NO: 55468 - DNA, 100 bp, Homo sapiens
gaccgagaccgcggccgggaccgagggttcgtgctggccgtgggcagcgccgtctttgatgccatgttcaacgggggaatggccacaacatccacggaga

SEQ ID NO: 55469 - DNA, 51 bp, Homo sapiens
ccgccccagacctgtcggcgaaaggaataaccaagtgctgggaattggaag

SEQ ID NO: 55470 - DNA, 78 bp, Homo sapiens
ggaggaaagtggaatttgtaaagttcatcctgctctgaatgtgcaattaaaaactagcatttctagtcagtatgtaat

SEQ ID NO: 55471 - DNA, 50 bp, Homo sapiens
tctctcagacacttggtcggtagatatttggagttcttacaacatggcag

SEQ ID NO: 55472 - DNA, 98 bp, Homo sapiens
ggattataagccgattggttatattaatactcctggacctgtgtgtcagttaatgtggtctcccatgtctcatgtatgagaaagtgccagtcatcttg

SEQ ID NO: 55473 - DNA, 98 bp, Homo sapiens
gcgggaggctcggcggcgggcggcagcatgtcggtggcggggctgaagaagcagttctacaaggcgagccaggctggagtacagtggcacgatctcgg

SEQ ID NO: 55474 - DNA, 100 bp, Homo sapiens
gttggcccctgagccagagctccagcagccttgttagggcgtggcctgaggcttggataagtggggacctcagcagccatgtcgaagccccatagtgaag

SEQ ID NO: 55475 - DNA, 100 bp, Homo sapiens
tggcccacaagcagatctactactcggacaagtacttcgacgaacactacgagtaccgacaatgagttacaaggcactaatagttctggatccttgggtg

SEQ ID NO: 55476 - DNA, 98 bp, Homo sapiens
tcacatacagtgatgttggtggctgtaaggaacagattgagaaactgcgagaagtagttgaaaccccattacttcattcattatattttggagagaac

SEQ ID NO: 55477 - DNA, 75 bp, Homo sapiens
tggggactacgacgtccctcaaaccttgcttctaggagataaaaaggtcccccacggcccttcaggatgaaagct

SEQ ID NO: 55478 - DNA, 100 bp, Homo sapiens
ggaaacaaagttattttgctcgggatggaagcttcctggcgccaggtggccggtggccgaggccgatcccggggacgggccactgccgccccctcaggaa

SEQ ID NO: 55479 - DNA, 83 bp, Homo sapiens
cccaggcctgcgtccgagtctccgccgctgcgggcccgctccgacgcggaaggtgtggaaacaggaagagaactagaactgga

SEQ ID NO: 55480 - DNA, 75 bp, Homo sapiens
ggactcagactgtggaacttccgtgccccccaccctcaccaagccgccaagctgagccaccaaagaaggaggctg

SEQ ID NO: 55481 - DNA, 100 bp, Homo sapiens
agctttgtaggagcatggcttggagcacttcctattccactggattgggaaagaccatggcagtcctcagccaccagactgttatactgcaccacgggag

SEQ ID NO: 55482 - DNA, 100 bp, Homo sapiens
cggatagcactggcgaccctagcgggtgagaggcccttcagggccgcggcggctgaaacagaaccgcatgagggaaagaggaaagtggaatctctgtggc

SEQ ID NO: 55483 - DNA, 75 bp, Homo sapiens
ccatcctgatcaagaaaaccgacaggaacaagcacatcatgattgacttggggactggcaacaacaacaagatta

SEQ ID NO: 55484 - DNA, 83 bp, Homo sapiens
cacggccagttttgaaatcgacacacaaagaatagagttgagcctgtgggacacttcggatgcctgctctgtgcctgtatctg

SEQ ID NO: 55485 - DNA, 75 bp, Homo sapiens
gtgggatcgatgtttcaatattggaagcgctttgatttacagcagctgcaggaacgaatgcaggaatttgggaac

SEQ ID NO: 55486 - DNA, 75 bp, Homo sapiens
agtttacttgctgtcatcttctgcaagggaccacgggatcattcgaactctggatttacccatctatgtcacacg

SEQ ID NO: 55487 - DNA, 87 bp, Homo sapiens
gtccagttactctaacaagtctggagttttatgtgctgaaagagttggccagatgactaagacatataatgacatagatgctgtcac

SEQ ID NO: 55488 - DNA, 75 bp, Homo sapiens
ggcctctggtgccaaatacattgtcttaacttccaaacatcatgaagttccgatgaagttaaattccgtcaagat

SEQ ID NO: 55489 - DNA, 51 bp, Homo sapiens
gaacagtacgcagtgaatgttgtacatgatgttgattgatggcacaaatga

SEQ ID NO: 55490 - DNA, 100 bp, Homo sapiens
tgttatatcctccaggaatactggccagctttctaaaaccaatttttccaacaacaacgatttccgtgctcttctgcagtctttgtatgctactttcaag

SEQ ID NO: 55491 - DNA, 51 bp, Homo sapiens
cttacgtagataagacactgcaacacaaccagcaggcctttttactggaga

SEQ ID NO: 55492 - DNA, 97 bp, Homo sapiens
gcacggactgctggagatggtggagtccgtcagtttaagaattgtttaagctgcatcaatggagcacatacagggagcttggaagacgatcagcaat

SEQ ID NO: 55493 - DNA, 98 bp, Homo sapiens
gatcatcctggcgatctacttcctctggcaggcaaaaacgtccccgaagccagcagttgtagagactgttacaacagccaagccacagcagatacaag

SEQ ID NO: 55494 - DNA, 74 bp, Homo sapiens
cttcctccctgtgtactttccatttgccttcctggccgagagacacacaagattgcagtattttatgttgctga

SEQ ID NO: 55495 - DNA, 82 bp, Homo sapiens
gtcatgtggcagtggaaaatgcgctcgggctggaccagcaggagaagtacagcatcggggagcccacagtgccatccaccct

SEQ ID NO: 55496 - DNA, 98 bp, Homo sapiens
ctggatcaccgacagcacagacagaatccctgctaccaaatgccgggacattctgcttcctgtcatcaccaaagagctgaaggagctgctggagcaga

SEQ ID NO: 55497 - DNA, 83 bp, Homo sapiens
caaaaatcccatctaccgcaactctcagttcgagagtaaagttttccaagagataacttcaccaagatgtccagtgataggca

SEQ ID NO: 55498 - DNA, 50 bp, Homo sapiens
ccagattcgagacttggaaagaggcaagtgaaccggagcaaacgacttcc

SEQ ID NO: 55499 - DNA, 100 bp, Homo sapiens
agcagaattgagtctgttttacgacaaatgctgaataactctggaaacctggaaataaacccttcaactgagataacatttttcaccatggagcagctga

SEQ ID NO: 55500 - DNA, 100 bp, Homo sapiens
cacggccgccgcgctgctggtcggctccagcaccctcttcttcgtgttcacggtctccgtctctccaccgggggcttcatccttccagggaggagaagag

SEQ ID NO: 55501 - DNA, 82 bp, Homo sapiens
gctggccggatggaaatcctaatgacagtctccaaattcgcctccatctgtaccatggcacaaatcctgaagagcccgtggg

SEQ ID NO: 55502 - DNA, 96 bp, Homo sapiens
gagattctggggcagtatcaacggagtctccggggtgacaaacagcatgtttggtgcttcaagaaagaagtttgtagagggggtcgacagtgacta

SEQ ID NO: 55503 - DNA, 100 bp, Homo sapiens
aacctccttcgccctgtgcgccaggtacgcaaagagaaccagtggtgtgaagagaagtgaaatgttgtgcctgacactgtaacactgtaaggattgttcc

SEQ ID NO: 55504 - DNA, 75 bp, Homo sapiens
cccttccggatcctgcgcgcagaatttattgctaaacatgggtgcatttttggataaacccaaaactgaaaaaca

SEQ ID NO: 55505 - DNA, 100 bp, Homo sapiens
cctgacaatgggcagaacgaattcagtgatatcattaagtccagatctgaacattctagtatgccagtagaaaaaaatatcactttagaaaggccttcta

SEQ ID NO: 55506 - DNA, 50 bp, Homo sapiens
caccagaagaaattgccaacccttgcagccattgatctgatgtacggagg

SEQ ID NO: 55507 - DNA, 100 bp, Homo sapiens
gtgcttcaacgctctgctgcccgctgtgagggaaaaggtaaaatctgtaaaaactgggtcagttttttggacaatgtgctgctgcttatcctatttctat

SEQ ID NO: 55508 - DNA, 124 bp, Homo sapiens
aaactttttttttaatgtgggttttctgtttccttttggcctactcccaagaagatattggtcaaaatgcagatcttcgtgaaaacccttaccggcaagaccatcacccttgaggtggagccca

SEQ ID NO: 55509 - DNA, 75 bp, Homo sapiens
ttgactgtgattcactagtgtgcctctgcgaatttaaagctcatgaaaacagggtgaaaatcctatttataagag

SEQ ID NO: 55510 - DNA, 100 bp, Homo sapiens
cacgagcctgctgcagctctatgatgcctccaacagcgagtggcagctggggaagaccaagatcacccctgagtacctccagagcgtctgtgtccgcctg

SEQ ID NO: 55511 - DNA, 98 bp, Homo sapiens
cctggaggtggatctgaagaacggcacaagcccaccgtactgttgtgtggatctgtattcacttcgtactggggagatggtcaagtccattcaattta

SEQ ID NO: 55512 - DNA, 98 bp, Homo sapiens
ggaaggggcaagttcgcccaggatgtcagtcacataccataaagtctccaaaggatggcacagtaaagaaagtgttctacagagaaggtgctcaggcc

SEQ ID NO: 55513 - DNA, 100 bp, Homo sapiens
gccaacccaaattaccttaattgcattgaatgccccagaggagcccgaaacctcccaggcttggtgcaggaaggagagcccttcagcgaggaagctacac

SEQ ID NO: 55514 - DNA, 74 bp, Homo sapiens
gcaaagctgtacaagagatcatgcagaatccaaaggccctattgtgcctttaaatgtagctgaccaaaagcttc

SEQ ID NO: 55515 - DNA, 83 bp, Homo sapiens
acagcggcatacagaatgcctatgaccggcgtcgagaatttcaactgggtccaccaaaatatactaaatctgttctgaaaaag

SEQ ID NO: 55516 - DNA, 50 bp, Homo sapiens
agcgtcgtgcacgcgggccagaggcgggttttgactctgggaggagggct

SEQ ID NO: 55517 - DNA, 75 bp, Homo sapiens
ttccgtccagagcaggatcctgtacccagaatgccgtttgagagcttgatgcattagatgccaatgatgagttga

SEQ ID NO: 55518 - DNA, 100 bp, Homo sapiens
acagaatcagctgttccctgcgaaagggcaagtgtccagagaatggctgggatgaaagtacacttgaactctttttacatgaacttgcaatcatggacag

SEQ ID NO: 55519 - DNA, 50 bp, Homo sapiens
acctgtgtgccgagtgtgggaaaggtttggtgcacctcgatttggaggaa

SEQ ID NO: 55520 - DNA, 96 bp, Homo sapiens
ccgacatggaacagggactcactgggggatgctcacaactgtattcctgagctggacagtgagacagccatgttttctgtctacgatggacatgga

SEQ ID NO: 55521 - DNA, 98 bp, Homo sapiens
ttagtgggggtagccccttccagacatgtcatgctgcccaaggacatagccaagctggtccctaaaacccatctgatgtctgaatctgaatggaggaa

SEQ ID NO: 55522 - DNA, 100 bp, Homo sapiens
tgccctcatcctggttctggaatcctcagttcaagctcctgcagctctgggagaaaaacggctacttcgatgactccatcattcagcagctacagagccc

SEQ ID NO: 55523 - DNA, 75 bp, Homo sapiens
ttcaagtcctattcccagtcctatgcaacaatacatcatagttttgcggcctccaggtggtggatccaatttttc

SEQ ID NO: 55524 - DNA, 110 bp, Homo sapiens
ctctggccgcgcctggcctggccgggaccatgggcgccctgcgtccggcagaggaggcgagcatcccgctcaggtgatgaggaacccctcgcgcacccagcgcagaaggc

SEQ ID NO: 55525 - DNA, 80 bp, Homo sapiens
ggcggagctgacggtggaggttcgcggctctaacggggctttctacaagaacatacatatgatagttgagaaagacacat

SEQ ID NO: 55526 - DNA, 102 bp, Homo sapiens
agcagctgcgggtgttccgggagcaccggggctccgtcatctgtctggagggaaatcctcattgacgattcaatttgttgaaggccaatttgtggactccta

SEQ ID NO: 55527 - DNA, 75 bp, Homo sapiens
caagtgatgaaaaacacccacctgaaaatatcattgatgggcagctgttgtgctgtgtatggacgtgggctttac

SEQ ID NO: 55528 - DNA, 74 bp, Homo sapiens
attttcctgttccattttgtgcctcctggacacctcaggtcctgtactcacatctctgcagatgaaaaagcagc

SEQ ID NO: 55529 - DNA, 100 bp, Homo sapiens
ccaggccacccacgaccaggccgtgcaggcgctgaagcgcgcgggcaaggaggtgctgctggaggaatttcgctaaggagtttgtgatcagtgatcggaa

SEQ ID NO: 55530 - DNA, 75 bp, Homo sapiens
cagtcacccaagtgcattgcctttggaaacgaggcaaaagtcaacaactctagcttaattggagtaggctatact

SEQ ID NO: 55531 - DNA, 119 bp, Homo sapiens
cagaggggagtcatcatgagcgatgttaccattgtgaaagaaggttgggttcagaagagggatgttgatcttgtctcagaatattgcccaactggaggcccaggtggaaaaggttacaa

SEQ ID NO: 55532 - DNA, 100 bp, Homo sapiens
tgccggcacgcgactccccccgggcccaaagtacactgaggaggggacggctccgtcttcacattgtgcacagatctgaggatgggattagcgaagctgt

SEQ ID NO: 55533 - DNA, 100 bp, Homo sapiens
gggggaccgcttgcagcggggacgcgaggacccgggctgggctttcctcacccgggtattattaacccaaagaatccaaaggaagctccaaagtccttca

SEQ ID NO: 55534 - DNA, 75 bp, Homo sapiens
gcatcgtctttccgtcctctgaggcgacggccgcggctgcacaggactcagcccaggagagtgttattactcgag

SEQ ID NO: 55535 - DNA, 100 bp, Homo sapiens
cattgttaagcacaagttcacgaaagcctacaaaagtgtggagaggttccttcaggaggatcagcataaccagtgtgcagcgttcagacaatgggtcgta

SEQ ID NO: 55536 - DNA, 83 bp, Homo sapiens
cagccggcagcccgggcgggtcccggggtgcgagcagcgcacttccgatgccccttggtgtggccactgcaaggctctggccc

SEQ ID NO: 55537 - DNA, 82 bp, Homo sapiens
ctcgtcagcaacatgctcctagcagaagcctatggatctggagcctggtccgacccccagtggcactaacgtgggatcctca

SEQ ID NO: 55538 - DNA, 100 bp, Homo sapiens
cggctggcatcatcattgttggagatgagatccttaaggatgcttctcagctgcttcagatattacagagtctccatcctcctttgaaaattgatggcaa

SEQ ID NO: 55539 - DNA, 132 bp, Homo sapiens
aaagctgacctccaggaagctctgagactgggagagactgaagtaactgagaagtgcaatcacattaggcacccagaggcctccattcaggctgttttttcagatgcccaaatgcatatttgggcattagaa

SEQ ID NO: 55540 - DNA, 74 bp, Homo sapiens
ctctctgagttcttgggcacgttcatcttgattggccgtgggcaagacctgccttctcatcagctacaccacca

SEQ ID NO: 55541 - DNA, 75 bp, Homo sapiens
tgaactacctgagacacggcaagctggtgattaacaaagacctcgcggaggaagcttgctgagcgagagcgagaa

SEQ ID NO: 55542 - DNA, 75 bp, Homo sapiens
gtgagtcaggagctgtatgaccttaacgtggagctctccaagccgattcgaagacagtctcttacacctcctcct

SEQ ID NO: 55543 - DNA, 74 bp, Homo sapiens
cggtactggagccaatcagcgcgggcagcgaaccgggggagcgaggcacgacaagagtgagaatggtgaggcat

SEQ ID NO: 55544 - DNA, 98 bp, Homo sapiens
cacacaatgtcggggatggacctccagatttccttactggctgcccggcagctctgacagactcagaggacgagtccccagaagacatgaggctccca

SEQ ID NO: 55545 - DNA, 86 bp, Homo sapiens
accaatattagcatgtggcaatgatgattgcagaattcacatatttgctcaacaaaatgatcagactttgaatcctcctcttccac

SEQ ID NO: 55546 - DNA, 102 bp, Homo sapiens
ccctggagcttatgcggacaaagctgcaggctgctggtggtctacccttggacccagaggttctttgagtcctttggggatctgtccactcctgatgctgtt

SEQ ID NO: 55547 - DNA, 101 bp, Homo sapiens
tctggagccactcaggtttttcctaagctcaactctagccagctaggttcctggtgctttggggacaatgattgaagctcacgttgatgtcaagactaccg

SEQ ID NO: 55548 - DNA, 80 bp, Homo sapiens
acgcgcccgggacgcgcggcggcaccgggaggccgggccgagcggtcctgcaaccctggttccagtctggcaagcattgt

SEQ ID NO: 55549 - DNA, 100 bp, Homo sapiens
gcaaaagtccattcagaaaagacaagagccctgtgaggatctccctaatactatgaacgcggcagagataacggacaagctcggcctccattccctccgc

SEQ ID NO: 55550 - DNA, 74 bp, Homo sapiens
cagcgacgccttgctaacaaagatcctctggaccttctccatctacctggagtcagtggccatcttgccgcagc

SEQ ID NO: 55551 - DNA, 74 bp, Homo sapiens
catcgtctcccgagcctgctcctgccgccgagctgcagtattgaagtatgagaacaatgttatgaatatcaggc

SEQ ID NO: 55552 - DNA, 101 bp, Homo sapiens
agaacgtgaggctcggatatgtcgacttctgaaacatccaaacatcgccaagtgcaaggtggttatcaccttcaaccaaggactccggggtgggcgcgtgg

SEQ ID NO: 55553 - DNA, 100 bp, Homo sapiens
cagcggccccgaagcgggcggcctgcactcggatacttccaggctttggtgaataatatgtcctttgtaagatataaagaagtgtatgccgctgcagcag

SEQ ID NO: 55554 - DNA, 75 bp, Homo sapiens
ctctgccccacccacctccaggactgcaatgattcgtgtgaataccttctctcaagtggcagatttcttggagag

SEQ ID NO: 55555 - DNA, 78 bp, Homo sapiens
acagccagaagaaaccttccctaacactgaaaccaatggtgaatttggtcctggacccaagccagaagcctctgcaaa

SEQ ID NO: 55556 - DNA, 97 bp, Homo sapiens
gggagaccgggttgggctgtgacgctgctgctggggtcagacaatgcagatcttcgtgaagactctgactggtaagaccatcaccctcgaggttgag

SEQ ID NO: 55557 - DNA, 51 bp, Homo sapiens
ctcattttcatagtgctgtacaagaactggaagaagttcgggaactcagag

SEQ ID NO: 55558 - DNA, 82 bp, Homo sapiens
aaggaggattgaggaggatcagatcaataatggaggcaatgacaacaaaggaggctttgaaaatgttttagaagaaattgct

SEQ ID NO: 55559 - DNA, 75 bp, Homo sapiens
ctccgaggccgagagccgacccaacgatctgaactcctcaggtgtttcccattaaacactaccaggacaaaatca

SEQ ID NO: 55560 - DNA, 80 bp, Homo sapiens
gtgatcccttccttcatgtgccaggcaaactgtccttggaagaattcatcagaggtgccaagagcgacccctccatcgtc

SEQ ID NO: 55561 - DNA, 90 bp, Homo sapiens
gaaatcctccccacttatgtttgtaaatgtgagtggaagccatgaggccaaaggcagttgtattggaataaacatcatcctgaccttcat

SEQ ID NO: 55562 - DNA, 74 bp, Homo sapiens
cctcctgagtagctgtgattacagatccatgaccagaactgtcctttggcaaatgtcatctgtgaatactgcaa

SEQ ID NO: 55563 - DNA, 101 bp, Homo sapiens
ccgctccgaggcctcgcgaccgccgagcctgcagcctgccccgcggccaacatgagcttcttgttgagatacaactcgtcaacgaatcaaattcagtgatg

SEQ ID NO: 55564 - DNA, 100 bp, Homo sapiens
cataggaggaaaattcatcatctgggacatcaaagacgtcagactggatggcgagtcccagtgaggcgatgtgggcagaggagctccgagccgcccaccc

SEQ ID NO: 55565 - DNA, 75 bp, Homo sapiens
gctgcctctcctcctcctccacaggcaccattcattacccagaacgccatggaggaccagagcgccacggccggg

SEQ ID NO: 55566 - DNA, 100 bp, Homo sapiens
ctcatcctggttctggtaaagaagtgagggtaccagctactgccttgtgtgtcttcgattccagacagcattggaaaagacatagaaaaggcttgccaat

SEQ ID NO: 55567 - DNA, 90 bp, Homo sapiens
gtgaaccggagaccccgaaaacggaagcgcagggagaaggaagaggtgtttgaaaagttttttgctccactcaagcctgttagaatcacc

SEQ ID NO: 55568 - DNA, 83 bp, Homo sapiens
ctccagactccgttcgacttcttggcagagttgtcttcaaacttgtcctatggcagcgtatacaaagctattcataaagagac

SEQ ID NO: 55569 - DNA, 100 bp, Homo sapiens
agctggaggggtgtctgaatgtatctgcaatgccagattctccggccagttctgtgaagtggcgtctctggctgatgaacttgctcttgtggatgttttg

SEQ ID NO: 55570 - DNA, 100 bp, Homo sapiens
acggatgccgtctggatgggaagttacggtttacagcgaagtccacccagcgtttccgagatggggcattctcttctcccaccctcgggactttacccca

SEQ ID NO: 55571 - DNA, 83 bp, Homo sapiens
ccacacgcccctccacatggctgccctcctcctgcttccctggctcatgttgctcacagataacgaaggaggcccaacttcat

SEQ ID NO: 55572 - DNA, 101 bp, Homo sapiens
tttgccatttttattggctctttaggtgatcaagcaaccaggtttgaagacagtgaaaaacaaatagattataagtcatttttctctgccctgaactggag

SEQ ID NO: 55573 - DNA, 75 bp, Homo sapiens
tcaagtccacctcctgactccgcagagaaccagccccttggatctcccttcgtggagacgacaccggggtcctcc

SEQ ID NO: 55574 - DNA, 106 bp, Homo sapiens
cggctctgcgctggccgggggcgcgggcggcggcgccggcaggaaggtttggtgcacctcgatttggaggaagtagggcagggcccttatctggaaagaagtttgg

SEQ ID NO: 55575 - DNA, 82 bp, Homo sapiens
gtattacacactgctgaaccaggccccagacatgctgcatagggtcggcactcttcaccctcccgagccctgcccgtctcgg

SEQ ID NO: 55576 - DNA, 75 bp, Homo sapiens
acgaaattagccagctccgcctggcacaacagcaacgccatgaaagagacttggccctcttgaaactaaaggctg

SEQ ID NO: 55577 - DNA, 75 bp, Homo sapiens
accaggctgtgggtctgcacctctggaaggaatgcatcctgtcgggcatcatgtctgtgaacgggaagaaggtgc

SEQ ID NO: 55578 - DNA, 100 bp, Homo sapiens
tgcagcagcagcaggaacaggtgaggctgctgcaccaggagaagctggagcgggaacagcagcagctgcggacccagaagagacggaggatgcaaatgaa

SEQ ID NO: 55579 - DNA, 90 bp, Homo sapiens
atcaactgatgagacaattgcagaggcatattaatgaggataagagaaaaacagaagctcaaaagcaaatttttgatgttgtttatgaag

SEQ ID NO: 55580 - DNA, 101 bp, Homo sapiens
gagaagaggattggaggtgtcagtgttaaaggaacctctacaacgaaggtgaagccacggaagataagggaaatcctcattgacgattcaatttgttgaag

SEQ ID NO: 55581 - DNA, 100 bp, Homo sapiens
ctggatggtggagagtggagttccccaaggcgcacatctcggccactactacgtgcccctcctgagagcggaagagacttcttctccagtcatcggggag

SEQ ID NO: 55582 - DNA, 100 bp, Homo sapiens
gcaaatcatgcgctttgcaatgaaatctcgaaggggacctcatgtccctgtgggacacaatgcccccaagagaatgtgatcaatgggcaggactacgaag

SEQ ID NO: 55583 - DNA, 51 bp, Homo sapiens
ccaggggtcttgtgcaggacctgaaagtccattcaaactcctccccacgac

SEQ ID NO: 55584 - DNA, 96 bp, Homo sapiens
gctgggcctgtgtgcctggaaaggaattgttttggcctaggatcatccaggaagggaaaaggccgaggcatcagcgtgtgaagaccgcaaagacga

SEQ ID NO: 55585 - DNA, 75 bp, Homo sapiens
gcggccttcccatcaccatcacagagagcgatatggccgccctgctcccccaatgaaaggccagcttcgaagaaa

SEQ ID NO: 55586 - DNA, 100 bp, Homo sapiens
cctcgtccagcctaggttccacccttttctgggaacagctacagagacttctgaagtggagagtctgcgacctcctcggttcttcaatgaagatggagtt

SEQ ID NO: 55587 - DNA, 111 bp, Homo sapiens
ggacgtgaaggggaagaggcccaccctggagtaaccctcactggagaatccagagagaaacttgcccaggccaaagaagagaacgtgggcttacatcagacactggatcag

SEQ ID NO: 55588 - DNA, 50 bp, Homo sapiens
aaggggccagtctggagacagtcaagggaagctgccaaagaatgtcgacg

SEQ ID NO: 55589 - DNA, 95 bp, Homo sapiens
tctcatctgaagatatagaagggatgcgacttgtatgtaggaaccaaaaacttttgctagaaaatcagcttttacgagagaaaactcatggcctt

SEQ ID NO: 55590 - DNA, 74 bp, Homo sapiens
aaagagttgtatttactcaagaaatcaagtacttcagtaagagatgggtatatgactgctgctgctcctatgca

SEQ ID NO: 55591 - DNA, 96 bp, Homo sapiens
gggattttgccttttggtaatgctgtttctgcttaagttggcaagacactccaagtttggcatgaaagccaaaattgaccaagaggcagaggaaaa

SEQ ID NO: 55592 - DNA, 99 bp, Homo sapiens
ggcgaaagccaacggcgaggactgcctcaaccagctcatttagaggcgagttttgaggaggtagagaacaacctgctgcatctggaagacttatgtggg

SEQ ID NO: 55593 - DNA, 82 bp, Homo sapiens
aagccgaaaaaggcagcagcgaagtggacccatcaacttgtgccagtacagggtctgtgcagtggagtaggcacttcagtgg

SEQ ID NO: 55594 - DNA, 96 bp, Homo sapiens
aaaaacaatcgcttcaatgatgggaaggtggatcccgccgggaggtactttgctggggttggtgccatctacatccgtcgccggccccgtgtgcgt

SEQ ID NO: 55595 - DNA, 83 bp, Homo sapiens
cgcggggaccgctgtgctctcgatgcagctgactttgcctgtagcctcatagaacccatcccatggctgcagtggaagcttgc

SEQ ID NO: 55596 - DNA, 100 bp, Homo sapiens
cgtcacactacgacagtgagaaaggagcacgtgtggagtgagagcgaggactgcctgcctttcttgcagctagcacaggattacatctcctcctgcggca

SEQ ID NO: 55597 - DNA, 96 bp, Homo sapiens
gtgggaacatgacgcaggtgcaggtgtctcttctcgccctggcggggaagtaagactttgaccccgacgcaggcttcagtgattgccgcggatcag

SEQ ID NO: 55598 - DNA, 87 bp, Homo sapiens
cgatcttcagctggccaacagcaccatcattgcatttacctcggatcatgggttgtggtctcctgaacagaagtctgtctccaaaca

SEQ ID NO: 55599 - DNA, 50 bp, Homo sapiens
ggaccagcctgccccggcgccgagattgccacggcagtgaagtttctaca

SEQ ID NO: 55600 - DNA, 50 bp, Homo sapiens
ctcctaaatagctgggattacaggagaacggcctcaaggaagactaacca

SEQ ID NO: 55601 - DNA, 82 bp, Homo sapiens
ccaacgccaccgagagggcgcctggaatgtgagaagccctaccactgcaactgggacggctgcggctggaagtttgcgcgct

SEQ ID NO: 55602 - DNA, 100 bp, Homo sapiens
ccatttcgagggtgaagctcctcgacaccatggtggacacttttcttcagaagctggtcgccgccggcaggatgtgggctctcttgatgagaagatgaag

SEQ ID NO: 55603 - DNA, 51 bp, Homo sapiens
gggaaaacaaggctcagacaggatttggattcctagacttgcccaagcact

SEQ ID NO: 55604 - DNA, 100 bp, Homo sapiens
tcttggccgccttggagtattgtttacacccggagccgcagtctcagcatgaacttgggaatgttttcttaaaattcaagcagctgacacaggatgatga

SEQ ID NO: 55605 - DNA, 50 bp, Homo sapiens
tcgaggagctgcggctctaccccccggacatcttcatgatacagttaaga

SEQ ID NO: 55606 - DNA, 100 bp, Homo sapiens
ttgtcacgagtgaattgttctcagtttctcggtttatgtgctcttccagccaggtctaaactgcagtaatccatttactcagctggagaggagacatcaa

SEQ ID NO: 55607 - DNA, 83 bp, Homo sapiens
gtcctgctgcgagccggcggcccggagtggggcggcgggtgtggacactgccagcggctgcagccgacttggaatgacctggg

SEQ ID NO: 55608 - DNA, 50 bp, Homo sapiens
atcttctaattttcattccttcaaaggtgctggagaatctggtaaaagca

SEQ ID NO: 55609 - DNA, 101 bp, Homo sapiens
ggacgacgccggcaggccccagactgcctacctgcagtgcaagcaggtcaatggccagcaaggaggggggtccgagccggcggcggcggcggcagtggtgg

SEQ ID NO: 55610 - DNA, 87 bp, Homo sapiens
acaggccagtggatcggaatggtggagaacttcaaccaggcactcaagaacaagcgagtgagcatcaataaagatgagctgaagtca

SEQ ID NO: 55611 - DNA, 75 bp, Homo sapiens
agcaggtgtatgatcttttggaggaggaggatgaatttgatagagagtagagacggggtttcgccgtgttagcca

SEQ ID NO: 55612 - DNA, 82 bp, Homo sapiens
ccccgcggcggcggccggcagcggcgagatcgtccaactgaacgtaggggggaccagtgggtaattccagaattgattggcc

SEQ ID NO: 55613 - DNA, 100 bp, Homo sapiens
cggtgacgtccctcccgctggtcaccactccggcaccagtgggtaattccagaattgattggccataccattgtcactgtattactgctcatgtcattgc

SEQ ID NO: 55614 - DNA, 78 bp, Homo sapiens
tagctgtaaggaggagccagaaattgacagcccaggggtggagcccacagtgaccatctccccatccaggacagaggc

SEQ ID NO: 55615 - DNA, 107 bp, Homo sapiens
ctgcctgtcatgtatgcagtagcgcttgaccttcgagtgtttgccaataatgctgtggaaaatctctgttctcacaaagtctccccaatgctctacaagcaactgcg

SEQ ID NO: 55616 - DNA, 74 bp, Homo sapiens
gggtttctctactatgtccaggaagatcagttttcctgccatccaggctgctccctccttcagcaactcattcc

SEQ ID NO: 55617 - DNA, 98 bp, Homo sapiens
gaagatggcggccgtgcaggcggccgaggtgaaagtggatggcagcgagccgaaactgagcaagaagtgcagctattgctggagtttaccgagcagca

SEQ ID NO: 55618 - DNA, 110 bp, Homo sapiens
gacagtcttctgataggtttcctcggcatcagaagtccttcaaccctgcaggtcacgagaagagaatgccttctagatgcaaaatcacctccaaaccagaccacttttct

SEQ ID NO: 55619 - DNA, 100 bp, Homo sapiens
tcatcgtctccatcctctacctcaagtatgagccaggcatcaccaacatgagcttccccttgtccgaccagcctgtgttgggagaatggttcatttttgt

SEQ ID NO: 55620 - DNA, 78 bp, Homo sapiens
tctgggggtcctctctgagtcaaatccagtgcaacatgtcatggtttagtggcctcctggtccctaaagtggatgaac

SEQ ID NO: 55621 - DNA, 90 bp, Homo sapiens
gctcctttaatttttgaacgagatggctgatcactgggaaactgcacctcgtcacatgatgcgtctagatattcgttctttgctgcaaga

SEQ ID NO: 55622 - DNA, 100 bp, Homo sapiens
gcacaagccagaccctggcacgccccagcacacgagatttgctgtgagctggaagagtgtcagaacccttgcctagaactggagccctttgactgtggct

SEQ ID NO: 55623 - DNA, 82 bp, Homo sapiens
gggaccaaggtggaaatcaaacatgtggaagatgtgaaatttgtcatcaattatgactaccctaactcctcagaggattata

SEQ ID NO: 55624 - DNA, 75 bp, Homo sapiens
attctcagggattgatcgcctcttcagatgagcgggatcgtgtgcagaagaaaaccttcaccaagtgggtcaaca

SEQ ID NO: 55625 - DNA, 98 bp, Homo sapiens
ggaacatggccctggagcggctctgctcggtcctcaaaggccaagtcctgtatctgccatgtctgtggcgtccacctcaacaggctgcattcctgcct

SEQ ID NO: 55626 - DNA, 90 bp, Homo sapiens
gctgcattcactgcagagctcacttggccaatcatgatgaactaatttccaaggctgaccggttccctgatgtgttacctgcttctgcta

SEQ ID NO: 55627 - DNA, 75 bp, Homo sapiens
tggggaggcaccggcagctgtgacctctgcccagaggatgtcacccccatcccctctgacagcactcgcaggaag

SEQ ID NO: 55628 - DNA, 74 bp, Homo sapiens
gcccagccaatgaagatgaagacataggagtcccagttgatccaagcctcattatagtggttcaagccaaagaa

SEQ ID NO: 55629 - DNA, 75 bp, Homo sapiens
ctgcccacaaggcttcactggacccagctgtgaaacggattttcacccgatggaagactaattgtgtcatgtagt

SEQ ID NO: 55630 - DNA, 75 bp, Homo sapiens
tgaagacttgaacttaatacagcaagaaagaccatcaagtttaccagatctatcttgggatcccatggctttctt

SEQ ID NO: 55631 - DNA, 75 bp, Homo sapiens
tgtgcgagagcctcctcacttggaccaaatacacgctgatcgatgagcaggacatcccgctggtggagagctact

SEQ ID NO: 55632 - DNA, 50 bp, Homo sapiens
atagcctcaaccatgaaggaaaccagttttagctaaagaagatactgagg

SEQ ID NO: 55633 - DNA, 51 bp, Homo sapiens
atcaacacggagcatggaggcagtcaggccataggaaaaggatacagagta

SEQ ID NO: 55634 - DNA, 78 bp, Homo sapiens
gcttagagcgtctggccaagaatcagaggaagtggcggagcgggcactggacacaatgaactttgagatgctcaaagg

SEQ ID NO: 55635 - DNA, 101 bp, Homo sapiens
ctggaacaaaccatagcattgggtcagcagatccctgtcacccagaggatggaggttctctggatcaagtcctgaagaaagctggaagaattcctgaacaa

SEQ ID NO: 55636 - DNA, 80 bp, Homo sapiens
gtcactgcagctgaagccgctgcccctgctacaggttcttccaggttggaaagagaatatgctggagagctgtctcccac

SEQ ID NO: 55637 - DNA, 80 bp, Homo sapiens
agagaagggaatgctaagaactgctgggaggatgacagattttttatcaagcagaaatgcatcgaacaacgagaatcaag

SEQ ID NO: 55638 - DNA, 100 bp, Homo sapiens
agggattcgtggtgaaggtccggggcttgccctggtcttgctcggccgatgaagtgcagaggtttttttctggttgccacatgaacatcttccagcatct

SEQ ID NO: 55639 - DNA, 100 bp, Homo sapiens
cctctgcaacggcgactacgatcggggaaatggtgtcctgctggagggagaactgatcgatgtatctcggcacagcatcttggacactcatggcaggaag

SEQ ID NO: 55640 - DNA, 83 bp, Homo sapiens
aaccataaagacatcttaattgggcacgaaagagccatcactggtgcaagctatatttaacggagatcctgatgaagttcgag

SEQ ID NO: 55641 - DNA, 73 bp, Homo sapiens
ccagcgctgcctggaggagaatcaagagctccgagtgtccttgaatccgacccctactttgggtttgaagaag

SEQ ID NO: 55642 - DNA, 109 bp, Homo sapiens
gccagggtccctgaagagggaagacacgcggaaacaggctcctcctgctggaccctccagccccgggcctcaggagcccgagaaggaggagaggagggtctggactatg

SEQ ID NO: 55643 - DNA, 75 bp, Homo sapiens
gcgacagcggcttggaagtgctctaccagagttgcgagctggagataagatgggtagactgctacttccctttta

SEQ ID NO: 55644 - DNA, 98 bp, Homo sapiens
tctggtgattgatggtcaacagaaaagattttgctgtcaaagttgtgtcagtgaatacaaacagatccagctccaggtcccacaggggctcttcttcc

SEQ ID NO: 55645 - DNA, 74 bp, Homo sapiens
gcggcaactcgcgcactcaaagtaagactttgaccccgacgcaggcttcagtgattgccgcggatcagaagcct

SEQ ID NO: 55646 - DNA, 83 bp, Homo sapiens
acgccatgagggccctgtgggtgctgggcctctgctgcgtcctgctgaccttcgggtcctgggcccagtctgccctgactcag

SEQ ID NO: 55647 - DNA, 96 bp, Homo sapiens
gtcggatagacaataccacaacaacacattttgcagaggaggaggaagccaagaatctggtgagcgaagccatcgcagctggcatcttcaacgacc

SEQ ID NO: 55648 - DNA, 100 bp, Homo sapiens
gcctcattcacatacgtcaaggaaattgagaaccatgtgtgctcagtattgcatctcctttgctgatgttgaaaaagctcatatcaacattcgagattct

SEQ ID NO: 55649 - DNA, 82 bp, Homo sapiens
ggaaagtagccaccagtccaactcgggtcgcccccaccattatttcggtgagaagccctaccactgcaactgggacggctgc

SEQ ID NO: 55650 - DNA, 50 bp, Homo sapiens
gctggctgtcctgaaatattataaggtggacgcggatctgtcaacatggg

SEQ ID NO: 55651 - DNA, 74 bp, Homo sapiens
ttttgcacttgtgcagaccgggcgagcagagtaagaagcagttcaaggagcagggacaagttacaggaatgttc

SEQ ID NO: 55652 - DNA, 82 bp, Homo sapiens
tgagggtgaagtggcaggaggaggaggaggggctccggctggtctgtggtgagggagcaaagcttgtattggcttgcaattc

SEQ ID NO: 55653 - DNA, 75 bp, Homo sapiens
cggatgtcggcgaagagttcaaccagggaggtggggaagacagggctccagctaccacaggacgggctctgggta

SEQ ID NO: 55654 - DNA, 90 bp, Homo sapiens
aaatacatgggcagccacatccctgggcccaatgtaaaggctgttgctactgctgtggaacagatttacccatttgtgtttgaaagcagg

SEQ ID NO: 55655 - DNA, 90 bp, Homo sapiens
ggagacggatgggcatttccgagagaagctgcaggctgccaatgcggaggacatcaagtcttactgttaacagtcccaggaatggaagag

SEQ ID NO: 55656 - DNA, 100 bp, Homo sapiens
ctgcagaccggcctcgcggagcccgcgcgccgagccccactttatcgatggtcgactggcaaaactaaatgcaggaaggggtttctctgatgtatttgaa

SEQ ID NO: 55657 - DNA, 100 bp, Homo sapiens
tgatctgaatagtattaaaataaaatacctggatgaggaagatgaagagcctactttggggataaaggattatttggtcttctggatttggaggcaatca

SEQ ID NO: 55658 - DNA, 100 bp, Homo sapiens
ccttcgccacttacagtatgcaacacattttcctatacctctggaagagagaagggcacagttacctaagtatcaacgtaatcttcctcggccaggacag

SEQ ID NO: 55659 - DNA, 98 bp, Homo sapiens
cagtatggccaccatgtgtattatacaaccataaaaaatgtggagcccaagcaggaactgaagtggaatgcagtagccctctgggcctgggatattgt

SEQ ID NO: 55660 - DNA, 95 bp, Homo sapiens
aggactaaggacaagcaggagctgggagccccaggagccagtgctgatagcagtgcaacccctctttggcccacgggcaggaggcacctgtctca

SEQ ID NO: 55661 - DNA, 100 bp, Homo sapiens
cacagatgtccaagctgccaatgtgaagcagtattctggaaagtttttctaagactagtgaagaactgaaggagtcctgcatctttttttttttatctgc

SEQ ID NO: 55662 - DNA, 91 bp, Homo sapiens
ctcaggcgtgcgcggacggtgtgcgggaaatgcttccagactgcacacttttacttagaggacagtacatcccctagagttatatccacac

SEQ ID NO: 55663 - DNA, 74 bp, Homo sapiens
gatgctatagcattgtcagtatactaaaatgtctgatgatgctggtgacaccttagccactggagacaaagcag

SEQ ID NO: 55664 - DNA, 129 bp, Homo sapiens
ctcggctgtgaagtggggaggctggcaacagttttcttcagcgcccaggatgcagccggctaagcaagagtgagccatggagctacgtgtggggaacaagtaccgcctgggacggaagatcgggagcgg

SEQ ID NO: 55665 - DNA, 50 bp, Homo sapiens
cgggggtcttcctcctccgccgttgacagaacaccgaaaatctctcccag

SEQ ID NO: 55666 - DNA, 75 bp, Homo sapiens
accaccaccatctccatcacccaccaacaacaccacaataatccacagccaaggctatgattaaaagtttcatgg

SEQ ID NO: 55667 - DNA, 76 bp, Homo sapiens
cataggagtggtcatatcatcctacatgcatttcaccaacgtctcagccagcttagcagtgtctgcaaaaacgaat

SEQ ID NO: 55668 - DNA, 100 bp, Homo sapiens
agcaagtggccatggggagcctcagcggtctgcgcctggcagcaggtctccggataactgtgctcctgacatccttccttatggttttgggaactggtct

SEQ ID NO: 55669 - DNA, 101 bp, Homo sapiens
gtggtttttgcatgctgattcatcttcatatttgacacctatgaaacatatgttggctgcctctgctggagaagtgacagatttgaccagttttgggccat

SEQ ID NO: 55670 - DNA, 75 bp, Homo sapiens
accgaggtggctatggaggcaaaatgggaggaaggtactgcgtgggcatgtgcggagacggcgccaatgactgtg

SEQ ID NO: 55671 - DNA, 138 bp, Homo sapiens
gaagaagcaggaggctaagaaagtggtgaatcccctgtttgagaaaaggcctaagaattttggcattgcgtgcctgccagtgtagagccggtggagcagctgggctcggcgctgaggtttcgccctggctacaacgac

SEQ ID NO: 55672 - DNA, 73 bp, Homo sapiens
acactgagtataccaaactgtgggccgtaggcagccatggcgcccagccggaatggcatggtcttgaagcccc

SEQ ID NO: 55673 - DNA, 101 bp, Homo sapiens
gaaagagagctccaaggagaaaatccagaagagcaaaggcgatgatgccacattacctgcctcttctgaagagctgaaagctgcctaccggaggctctgta

SEQ ID NO: 55674 - DNA, 98 bp, Homo sapiens
tgaactccaaaaaatgaaggcaattcagagagagaagacaaaaggatgccacggagaaagaaaaaagttaaagaagtctccgaatctcggaacctgga

SEQ ID NO: 55675 - DNA, 75 bp, Homo sapiens
ctcagatgagactgatcacagcagcaagtgctgctgcagcacggagctgacccaaacattcggaacactgatggg

SEQ ID NO: 55676 - DNA, 75 bp, Homo sapiens
ctcctccacaggcgcagggaccaccctatcccacctatccaggatatcctggaatatgagttggaagtaaagagg

SEQ ID NO: 55677 - DNA, 109 bp, Homo sapiens
gcatggaaagtcgggggctttcgcccgggtcctcctagaaattccccccgaagaagactcccccacatctgggttttaaaatcaaagatgggaaaatcggagaaaattg

SEQ ID NO: 55678 - DNA, 50 bp, Homo sapiens
gtgaggcttcccgtcatattccagtactatactggcaattgctggagaag

SEQ ID NO: 55679 - DNA, 74 bp, Homo sapiens
gacgtcttgcctgtgtcccacttgttcgcggcctataggcattttccctgaagatgagatcccagagaaggcct

SEQ ID NO: 55680 - DNA, 82 bp, Homo sapiens
tacctggggatattatcaaatctactactgttcatggcagtaatctcaggggcgatataatcaatgaggtggtcctaaagtt

SEQ ID NO: 55681 - DNA, 97 bp, Homo sapiens
gaccgggctgggcgcgcccggccgcgacgcccgggacccagattgcgggttcagaaaaggcgacggcggattgacagaagtatgattggagagccca

SEQ ID NO: 55682 - DNA, 82 bp, Homo sapiens
gctacttctcggcgctgccgtctctggaggagtactggcaacaggtagattggggtcaactggactacttagttgtagacat

SEQ ID NO: 55683 - DNA, 96 bp, Homo sapiens
cacgagctgccacacggcctgcactctgcgctttgagctactgggctgtgagctgaacggcctttccacagaagaaaacctgtctgcctccatcac

SEQ ID NO: 55684 - DNA, 106 bp, Homo sapiens
ggcacctgcgcgaagctggccaaagcctgcccagacggctcacctgtgcgggatggaacaaaaggtgcagcggaactgctgcctgacgctctgcaacttcagcatc

SEQ ID NO: 55685 - DNA, 75 bp, Homo sapiens
tgcacaacatcctgaagaaataccaccaggcttctccagggaaagtgaccgaggcagtgaaagaggccattgacg

SEQ ID NO: 55686 - DNA, 75 bp, Homo sapiens
cgaggaccagtgggaggatggagcagaggacattctagagaaagcaatggtggatgtgatctttgctgatgtggc

SEQ ID NO: 55687 - DNA, 101 bp, Homo sapiens
gaggcaccgggatcgtgaccgagaccgtgaccgagagcgtgaccgagagcgcgaatatcgtcatcgttagaagacctcccagtgccaagtgtataagcgtg

SEQ ID NO: 55688 - DNA, 100 bp, Homo sapiens
cggcggcctggtcggcagagagtagcctgcaacattcggccgtggttacgatgggaaatcctcattgacgattcaatttgttgaaggccaatttgtggac

SEQ ID NO: 55689 - DNA, 75 bp, Homo sapiens
acgatgattgcagatgacatgtctaattatgatgaagaagttgaagactgggatagtttccaagctattttggat

SEQ ID NO: 55690 - DNA, 75 bp, Homo sapiens
aagagagaagaacattctcgaatacctagaatggggtttactcctggcttgggggcattaggaagcactggaggc

SEQ ID NO: 55691 - DNA, 100 bp, Homo sapiens
cggacgacgtgaccagaagtcccgccgcttaaaggtttttggctttcacccccaaccagtgaccaaagacttgaccactcaaagtccagctccccagaac

SEQ ID NO: 55692 - DNA, 100 bp, Homo sapiens
gctgctggttagtgtgctctgagggagggtccgagccagccgctgttttgccggaggagcccctcaggccgtttgaattttgggaagattttgaagaaga

SEQ ID NO: 55693 - DNA, 97 bp, Homo sapiens
ctgggggccggggcgcgtcgcagcaccacaccccactctggccggagcacgccaagcagctccccatcgctccggaaacggctgcagctcctgcccc

SEQ ID NO: 55694 - DNA, 83 bp, Homo sapiens
actagcggcgggtcgtgggcacctccagttcctccgtgtcacaaagcagtacctgccccacgtggcgcgcctctgtctgatca

SEQ ID NO: 55695 - DNA, 100 bp, Homo sapiens
gccatgagcgagcgcctccgtcccaggttctcttgccacatcaatatcccagatggtaaagactgaagggaaaggagcaaagagaaaaacctccgaggaa

SEQ ID NO: 55696 - DNA, 101 bp, Homo sapiens
gatgcccaatgtatctaacgacctctcacagaaactatatgccaccatggagaagcataaagaggagcttcctggacgatttaacaggtcctcaagcgagt

SEQ ID NO: 55697 - DNA, 82 bp, Homo sapiens
gaatggcaatggcacaaagttctctcgatcagggcatacatctttcttcgacaaaggtactatactggcaattgctggagaa

SEQ ID NO: 55698 - DNA, 101 bp, Homo sapiens
catgctggccaagaagatcatcattaaggacggaggcacggtttttcgttggaatatacgttgcacatttatggcgattctgagtgtgagggcagacttct

SEQ ID NO: 55699 - DNA, 78 bp, Homo sapiens
ttgcaccccgtggggtggtgcacacagaacaacaaggtgttgatgccgccggacggtatgaacgctgccgtccgtgcc

SEQ ID NO: 55700 - DNA, 100 bp, Homo sapiens
tttttctggaatcaatagcacacaatataacctgggatcccacaggtgtcgcacctccttcttttgtagccattaaggcaggaacaacactgtatcaact

SEQ ID NO: 55701 - DNA, 75 bp, Homo sapiens
ccttcagtccttagggacaccgagtgacacgcaggagcttcgggacagcctgactggggttttaaggggtgtggc

SEQ ID NO: 55702 - DNA, 98 bp, Homo sapiens
tcgccgccccagcctggcgggagaaggaggaggagcagcaggcctccgggcccggcgccgccgcccgcagacatatgtagagtgtgtcggtcagaagg

SEQ ID NO: 55703 - DNA, 96 bp, Homo sapiens
gcaagatggcggacagtgcggaactaaagtgttgtgaagagcgaagacttttcgctcccagcttatatggatcggcgtgaccaccccttgccggag

SEQ ID NO: 55704 - DNA, 98 bp, Homo sapiens
cggcggcgcgcggacccaggcgcggatggcgaggccagcaggctactgcagcactggggtgtcagttgttggtccgacccagaacgcttcagttctgc

SEQ ID NO: 55705 - DNA, 75 bp, Homo sapiens
tcctcgtccactacgggcatcggaatactctgaagatagtaactccgagccaaatgtggatttggaaaatcagta

SEQ ID NO: 55706 - DNA, 126 bp, Homo sapiens
cctacttgcctaaatgaggaatgtctttcctaccatctaaaatacgaaggtttctggctggaaatctcctgcaaagaagctgagccatgcaattagtaaatctttggggtgtgtacccacgagaga

SEQ ID NO: 55707 - DNA, 83 bp, Homo sapiens
gggtactacacaaccgtctccagccttggtctgagtggactgtcctgcaggactgcctccgggcctgccaggagcagatcgaa

SEQ ID NO: 55708 - DNA, 100 bp, Homo sapiens
aggcagcccctaagggcccttcgcgggagagcgtcgtgcacgcgggccagaggcggtcctactgctctgttggctcatgaaataggttttggaagtaaag

SEQ ID NO: 55709 - DNA, 74 bp, Homo sapiens
caaatgcatttgcacagaagcatctccggtctataatcctgaatgttctgtacagagtaatgagatgtgtgacg

SEQ ID NO: 55710 - DNA, 97 bp, Homo sapiens
tatatttttgagaccaaattaatcagcacattgatttataagtcgtcattgaattttgagaagcattctgaaaactttgcatggacagagaatcgtt

SEQ ID NO: 55711 - DNA, 100 bp, Homo sapiens
ctcgcagcacttggagcgcagaaccggccgcgcccggcaagtatatcgcgtcaacacagcgacctgacgggacctggcgcaagcagcggagggtgaaaga

SEQ ID NO: 55712 - DNA, 82 bp, Homo sapiens
acttgatcacatcaatatctgcagttccaatttcccaaaaagagatgaaatactggagctgttgtagaagaaaaacttctga

SEQ ID NO: 55713 - DNA, 100 bp, Homo sapiens
ggcatcgtgctgaatcggccggttttgagaggggaagatggggacaaagccgctccacctcccatgtcggcacagatggtgtggtcctggtggatcctga

SEQ ID NO: 55714 - DNA, 90 bp, Homo sapiens
cagcacttcagtcggaaagttggaacctctgacaagaccaagtactaccttcaagaaagatgttgtgtccctcctggtgagcgctgtccc

SEQ ID NO: 55715 - DNA, 97 bp, Homo sapiens
cttttgccacgaccgaccgaccataagtttcctgaggccaccccagacctgcagaattcacctgtgagaatatgaacttctcttggaggaatgaatg

SEQ ID NO: 55716 - DNA, 101 bp, Homo sapiens
tcgtcctcggcggccccggcgccggcaaggggacccagtgcgcccgcatcgtcgaggtgttacctcattttgaaagtcttgggaaacaggaaaaaattcct

SEQ ID NO: 55717 - DNA, 75 bp, Homo sapiens
gtccctgaagagggaagacacgcggaaacagtgagggccccaaggctgttgcagctcctcgacctgatcggttgg

SEQ ID NO: 55718 - DNA, 99 bp, Homo sapiens
cgggcacatatgtccaggaggagtctccggaaggtacttgaagaagcagaagctcaacatttatatcagtccatcttgcctgatatggtgaaaattgca

SEQ ID NO: 55719 - DNA, 100 bp, Homo sapiens
accttgaattcagcttcatgaaccaggagcagggaaaccagctgagccaacccacattctgacctaaggagcactgagccgagaccgacccgcccgcccg

SEQ ID NO: 55720 - DNA, 75 bp, Homo sapiens
cagggcagcaagatgtttgtgaaggagcacgtgaattgcctctgcttacgttcaggccctgtcctaaacccagcc

SEQ ID NO: 55721 - DNA, 98 bp, Homo sapiens
gtgcaagagtccacaaagggacctgatgaagcgaagatcaagatggaggagatgtataagaaagctcatgctgctatacgagagaatccagtctatga

SEQ ID NO: 55722 - DNA, 107 bp, Homo sapiens
gctgggtcagtccgccgctcaccccgcggccgcaccttcccgccttctcaggctgcttctgatgcttggaagatatcctctcagccacaaagatggtaataaatctt

SEQ ID NO: 55723 - DNA, 75 bp, Homo sapiens
ccgggggacgagctcggagcagcagccagtgccggtggtggtgtgcacattgagccccggtatagacagttcccc

SEQ ID NO: 55724 - DNA, 75 bp, Homo sapiens
tagcatcacctctcagcacgattttcccgagagttcacagttctggacttcagtgaccccttcagcactgaagtg

SEQ ID NO: 55725 - DNA, 100 bp, Homo sapiens
agagaatactcgaagggctctcctgatactaacagttttacgatttaaaacttcgccagaatttgtctcctaaaaacccagaacagaagatcattaagag

SEQ ID NO: 55726 - DNA, 73 bp, Homo sapiens
cgcgatgagtggtctcggcaggctcttcgggaagggttagaaaatggatttctgactggaatctcaccactga

SEQ ID NO: 55727 - DNA, 100 bp, Homo sapiens
cgctgctgcgtgggacagtgcaacaatgccatccctgttgacaccgtccttaccatgaagaagctgcccatcacctatggaccccaacaccatcttccga

SEQ ID NO: 55728 - DNA, 100 bp, Homo sapiens
gaatggcatccagagagaggctctttgaactttggatgctttattgtacaaaggaaagaccacagcaagattctttcattcgtctcctcctagcctgggg

SEQ ID NO: 55729 - DNA, 75 bp, Homo sapiens
gatctgcaaaagaagatagaagagaatgaacggttgcatatacaatctctggcatctctatcccctatgaggcac

SEQ ID NO: 55730 - DNA, 98 bp, Homo sapiens
atctgcctaggcattttgctgtctcctcctaatacggtgagggttcagagtatggtgccagtggagaagatgcgctcagcaggatccagaggctgatg

SEQ ID NO: 55731 - DNA, 98 bp, Homo sapiens
tgcagatgcagtgtggctctggatagcaccttatggacagggaattcacaattgaaactgaagggaaaacatttcagttaacaaaagacatgatcaat

SEQ ID NO: 55732 - DNA, 75 bp, Homo sapiens
gcgcgtccaggcctgacagctctgcggctcgggccctgagattgatatcagtaaatgccattatttagtggattt

SEQ ID NO: 55733 - DNA, 152 bp, Homo sapiens
agcaggcggacgaggcggaagaccgcgcgcagggcctgcagcgggagctggacggcgagcgcgagcggcgcgagaaaagacaagaggagcagcagcggcaccgcccctcaccctggagggtcctgtacaatctcatcatgggactcctgccc

SEQ ID NO: 55734 - DNA, 114 bp, Homo sapiens
cacagatgaaggtgggaaggatggtccagaattcacttttactaccccaaagtttggaagaagtttcttgcccaaatgcctggatgtgtctgcttgactttcagaacttctcac

SEQ ID NO: 55735 - DNA, 100 bp, Homo sapiens
gaaaggagacccgactgcaactgctggattgctgcaaggctgagggacgagaacgagtgacagctggagtatcagccttggaagtatatacgccaaaaga

SEQ ID NO: 55736 - DNA, 74 bp, Homo sapiens
ttctatttcgttttaactgttggcgaaaattatttggctctagaggacaaaatcccagtccttggcacaaactc

SEQ ID NO: 55737 - DNA, 50 bp, Homo sapiens
gagtggccaacttccagctggcaagagacgagttgtactgctgtcacagg

SEQ ID NO: 55738 - DNA, 50 bp, Homo sapiens
ccaactaccttttagagtgggatgagtgattcgcctttgccagtctcatc

SEQ ID NO: 55739 - DNA, 75 bp, Homo sapiens
ctggacacagcaatatctctgggctttcacagcacctatttgccctggctgtggatgatgaccccgaggtgcgga

SEQ ID NO: 55740 - DNA, 74 bp, Homo sapiens
tgggttcgcctgcccagcaaatgcgaagctcccaagcctgtgagcaagatgcgcatggccaccccgctgctgat

SEQ ID NO: 55741 - DNA, 99 bp, Homo sapiens
atgctgtggaggaagaacatgcatatttgggtccaactgtgaagccagatgataaggccctgggcagtgacggggttcgggtgaccatggagagtgcgc

SEQ ID NO: 55742 - DNA, 90 bp, Homo sapiens
ttgaggaacatggcgttgctggtgcgagtccttttgtctgtgctgtgaatgccctcgcccaccatgtgctcaacaaggacctcaaggaca

SEQ ID NO: 55743 - DNA, 96 bp, Homo sapiens
gttagacttctcaagtgcaattcaagatatccgaaggttcaattatgtggtcaaacaatgcagcaaaaaagcctctcccctgctcatgtggctttt

SEQ ID NO: 55744 - DNA, 82 bp, Homo sapiens
caagactaagattctcaaaatggcacccgacaggaggatcctttattcgtccgaacaaggtaaattttggaacagactttct

SEQ ID NO: 55745 - DNA, 50 bp, Homo sapiens
aggacccacggcgtctgttcgaaggtctgtgggttctggcaccacctgag

SEQ ID NO: 55746 - DNA, 97 bp, Homo sapiens
agccttgaggcagaggcagctggaccgagctgcggctgctgtggggactttcagttaccttgatgatgtcccatttaagacaggagacaaattcaaa

SEQ ID NO: 55747 - DNA, 75 bp, Homo sapiens
gcactgtgacatgtctgatcccttgctcccatccctgcagcatgaacaaggtcagaagacatgtcttcatctaca

SEQ ID NO: 55748 - DNA, 100 bp, Homo sapiens
tgagagtgaccctaatctcttcgttgcactttatgattttgtagcaagtggtgataacacactcagcatcactaaagattcgttttgtaatgaaggccca

SEQ ID NO: 55749 - DNA, 90 bp, Homo sapiens
acgaggttggcgacgccgccccgccgggccccagatcaggtggcccgggagagtggcccaccccacatgaagaactttgtgaccaaggtt

SEQ ID NO: 55750 - DNA, 82 bp, Homo sapiens
tctcaccatgttcagcataaagtaccattcttaatgattatcctcaacaagacaggaaacccctcctggagtttccccaaag

SEQ ID NO: 55751 - DNA, 82 bp, Homo sapiens
tggttcacccgctgccgggcaccgaggaccagctcaatgacaggttgcttataaaaagggagtcaaacatctttctgctctt

SEQ ID NO: 55752 - DNA, 74 bp, Homo sapiens
agaccttggagtaattcgtcgacagggcctggggactcgggacaacaccctgatccgcatcatggtctcccgta

SEQ ID NO: 55753 - DNA, 82 bp, Homo sapiens
gtacccagagtgcagagccgcctttccagcatgcaggggctgctcagactacatgaggaaataattgacttttataacttca

SEQ ID NO: 55754 - DNA, 100 bp, Homo sapiens
ctgctgaggccgatttgcactcggggagcagcaatgatctgttcacaaccgagatgagatatggtgcacaatgcccaccttcacagcaggaaggactcaa

SEQ ID NO: 55755 - DNA, 75 bp, Homo sapiens
cacgtcgcagtcctaggaagtccactagcagcttctaagggaatatgcactttctggttggaatttgaataacat

SEQ ID NO: 55756 - DNA, 76 bp, Homo sapiens
ggggaagaatgtgatggtggagccgcatcggcatgaggaattcgtacagatgatgactgcaaaatgaagacctact

SEQ ID NO: 55757 - DNA, 100 bp, Homo sapiens
aaggggacccagtgcgcccgcatcgtcgaggccgtggagaagtgtaaagatgcaggattggccaagtccatcggggtgtccaacttcaaccgcaggcagc

SEQ ID NO: 55758 - DNA, 128 bp, Homo sapiens
ccaggatccctcagatctgtggagcagatccgatggagaggctgagctgctccaggacttggggccctgacccacgtgtcagaggactgtttccctttgctagatggctgcagaaagaacaggcagaa

SEQ ID NO: 55759 - DNA, 100 bp, Homo sapiens
ccgactcgggcttggcgcggcggccagaggaaccccgagactcagcccacctgcacccaggtgaaataaacagctttattgctcacacgaagcctgtttg

SEQ ID NO: 55760 - DNA, 100 bp, Homo sapiens
ctttccctcaacagacagctttttctcaacagcccaatgggttcagcggattcctacacaagcaggccgtctgactccgatgtctctttggaagaggacc

SEQ ID NO: 55761 - DNA, 100 bp, Homo sapiens
cgtcaatgttccaggccgctgggcatttaaagttgatggaaaggaaattgacccagccaatggctgcacctcaagggaaagaacatgtgctgggtccttc

SEQ ID NO: 55762 - DNA, 73 bp, Homo sapiens
ctacagaaacctgatcttccttgaaagcatgctctgaattgccatcggatgaagcctgctctgttcagcgtgc

SEQ ID NO: 55763 - DNA, 75 bp, Homo sapiens
gcaagagcctcaaactcaacactgcagaagatgataatgaaggttctggaagcaaaaggcccaaggtggagtatt

SEQ ID NO: 55764 - DNA, 82 bp, Homo sapiens
gggaccagcagttactgggaagagtccagaggaagtatttatggcaatccggaatcctctggagtggcactgcaagcaaatg

SEQ ID NO: 55765 - DNA, 75 bp, Homo sapiens
acatggacaccaaacatttcctgccgctcgtgcgccaacctgcaggccgccattgctgatgctgagcagcgtggg

SEQ ID NO: 55766 - DNA, 75 bp, Homo sapiens
ccgaattcctgtgccgaagaggcctgcagtgggagagcagggtagtgaagcgcgcagtggcgagccagccagact

SEQ ID NO: 55767 - DNA, 75 bp, Homo sapiens
aggctggaacttgccctgtctcctcgcagatgaggcacctgaatggacagaagaggacctcagccaactgacaag

SEQ ID NO: 55768 - DNA, 100 bp, Homo sapiens
agcccagatattgtggctgaacaaaagaagctggaagccgcagaccttgtgatattccagcaccctggaggagaagaggttctgctggaacaagctggtg

SEQ ID NO: 55769 - DNA, 83 bp, Homo sapiens
gcacggagtcgccgcggagcgcagcacatggattaattgatgtatgttgagtttatggagctgccttttggtggcttgcttta

SEQ ID NO: 55770 - DNA, 75 bp, Homo sapiens
ccaaggtgtttccaggaagttcagagagaacaggaacctagaaagattgtacaatgaatggtgattctcgtgctg

SEQ ID NO: 55771 - DNA, 100 bp, Homo sapiens
ccttgccaggtgcctgtctggaaggccagatacacatctattatcctcccagtccacaacgctgaaccgtggctggacgaatgtttgaggtctgttttgc

SEQ ID NO: 55772 - DNA, 100 bp, Homo sapiens
accagcaaccatgagtggttccatgatgggaagtgacatgtttgaaaaagtaccagaaggtcctatccctccatctacaccaaagtttgcatatggaaag

SEQ ID NO: 55773 - DNA, 51 bp, Homo sapiens
tccatcctgtggatcccattgtaggaggtggtcaagaagaatacgtcttat

SEQ ID NO: 55774 - DNA, 98 bp, Homo sapiens
taaatctgtactcgtgcctcatggatccaaattaaagttgttataccacatttgcataagttagccttggtgaacaacttacagattgtggattctaa

SEQ ID NO: 55775 - DNA, 82 bp, Homo sapiens
gggaaccctggtcaccgtctcctcagtttttcagaagaagtgaagtcaagatgaagaaccatttgcttttctggggagtcct

SEQ ID NO: 55776 - DNA, 75 bp, Homo sapiens
cgccctggtgctcaccaagcaagcctgacttcacccagtccaatccacagtgcaaagagcgagtccattataacc

SEQ ID NO: 55777 - DNA, 120 bp, Homo sapiens
gccatcaaccgccagatcaacctggagctctacgcctcctacgtttacctgtccatgatcaaggagttgttgaagaagctggagcagctttcagaagaggttctagcaattcggggagaa

SEQ ID NO: 55778 - DNA, 83 bp, Homo sapiens
ggcagcaatggctgtatttgaagataagtttaggccagacatggaggctactgcagcactggggtgtcagttgttggtccgac

SEQ ID NO: 55779 - DNA, 117 bp, Homo sapiens
tcccggcagcagcccgacgcaaaccaaggatctggggatcttcgcactatcccaaggttttaaaatcaaagatgggaaaatcggagaaaattgcccttccccatggccagcttgttc

SEQ ID NO: 55780 - DNA, 90 bp, Homo sapiens
ttctggaattcccatagatatgtggaatgcagtatttggcagtcgtattcagagataaacccctggagctatgggatgttaggacttgta

SEQ ID NO: 55781 - DNA, 100 bp, Homo sapiens
tctctggagtgttggctgcatatttgcagaaatgtttcgtagaaaaaatcgacttaaagcctccagagaagtagaatctgtagaccttccacactgccac

SEQ ID NO: 55782 - DNA, 83 bp, Homo sapiens
cgggccaagagaagaggcggtggaggacacgacgcgcttaaaggctggggatgttcaaaagaagtctggctaaacatgttaaa

SEQ ID NO: 55783 - DNA, 101 bp, Homo sapiens
cttttgcaagaccaagaaggggccccccttggacgggactatgtgtgcacctggcaagggtgtccgcaatgttgccagtgtctgtctgcagattggctacc

SEQ ID NO: 55784 - DNA, 90 bp, Homo sapiens
cttcatagtagtgtatttatttggcgctgtgttacaggcttatcaggagggcagacttcaaaagctactaaaaatgaacggccctgaaga

SEQ ID NO: 55785 - DNA, 90 bp, Homo sapiens
tgccaatgttgttgtattatttgatcctacttggaatccagccaatgatcttcaagccattgacaggtgctgttccagaattcaaagaag

SEQ ID NO: 55786 - DNA, 100 bp, Homo sapiens
aaaagccaagaggaggacagttcgctacacagcaatgcatcgagagagctcagaaatatgctcagcaagtcttgcagaaggaatgtcgtcccaagtttgc

SEQ ID NO: 55787 - DNA, 82 bp, Homo sapiens
agtgaaagttgtggtggatgtcttaagacaagcttctaagtgccgccaagccagacgaactaggtctgaggtcacattgttg

SEQ ID NO: 55788 - DNA, 100 bp, Homo sapiens
atacatgaaaatgaatatgttcatggtgatataaaagcagcaaatctacttttgggttacaaaaatccagaccagtttgtggagatgagtgcactggcct

SEQ ID NO: 55789 - DNA, 76 bp, Homo sapiens
cctcagtgctgatcgtcggagcttgggagcaggaagatgtcgaatgaacttgactattcaggattatgaaactgct

SEQ ID NO: 55790 - DNA, 100 bp, Homo sapiens
cggctctggaaaatccgcaagaccatcatgcaggctccagcccccttttggacatcgttggcggccggaaggcgaggccccgccagttcccgttcctggc

SEQ ID NO: 55791 - DNA, 74 bp, Homo sapiens
gcagcctcacatggtgtgggccgacatcaagagctgcgagatccaacaggattggaacatcagttaacatctga

SEQ ID NO: 55792 - DNA, 75 bp, Homo sapiens
agacagacaagaccatctacacccctggctccacagtttggaagagacttttggatgtgggtacctgaatgactt

SEQ ID NO: 55793 - DNA, 100 bp, Homo sapiens
gcagccccccaacatcctgctcctgctcatggacgactgtactaatggtcacttgatgtgcgctggctgttttatccacctactagcagatgcccggctg

SEQ ID NO: 55794 - DNA, 97 bp, Homo sapiens
cgctacttgcctagtagcctcagccgctgtgggctcctggggagatggaggggccggggctgggctcgcaggtttctgagtcccttcaacatgatcc

SEQ ID NO: 55795 - DNA, 75 bp, Homo sapiens
ttcttccacatgaaaaggataaggtattcttcagcggaaataaggaaacagtttactctcccaccaaaccttggc

SEQ ID NO: 55796 - DNA, 100 bp, Homo sapiens
tcagaagtcaattcaaaggacctgcccccagagagatactcgcttcccactcccaaagggggcaaatacgccatcaacccccatctcaccgaggatcagc

SEQ ID NO: 55797 - DNA, 100 bp, Homo sapiens
ctggcaggacgtgaaggggaagaggcccaccctggagtaaccctcactggagaatccagagatgtggaagtctgtagtgggccatgatgtgtctgtttcc

SEQ ID NO: 55798 - DNA, 95 bp, Homo sapiens
aagagggagtcaccactggacctccaaggaagccacgtgcagacatctacaaccttcgatctcctgacgagctttggtgaagcacgtgcagtcta

SEQ ID NO: 55799 - DNA, 90 bp, Homo sapiens
ccctcagccaaagggcaagaacaagaaaaataagaagaagaaaggagacagagtcaacaattcaattgagccatgggaccacaccaccac

SEQ ID NO: 55800 - DNA, 78 bp, Homo sapiens
gacagtctgcatgtgcagttttcagctcccctcccacccggtcactccgtccagcaagcacgcagacagcaagcccgc

SEQ ID NO: 55801 - DNA, 130 bp, Homo sapiens
gagactgcagagggagtagtgcgatcctgcgcgcgggggaactagctggagggcaaggcgggaacaccaccttccaaacctttccttctgagcaccccgccattctactcggcgtgctgcggtgggtcct

SEQ ID NO: 55802 - DNA, 75 bp, Homo sapiens
gggatcccagcctcaggcgtgcgcggacggtgtgcgggttctaagctggtctatgtccatcaccttcttggagaa

SEQ ID NO: 55803 - DNA, 100 bp, Homo sapiens
agccaacccaaattaccttaattgtgatgaacagcctccttctaaatcattgaccacatttcttattctttcctgaggataaatttcaagatatcctgaa

SEQ ID NO: 55804 - DNA, 75 bp, Homo sapiens
ctgtcgccttcgcctcctaatccctagccactatgtatacgctcaacggcaagaaagtggaagttgccgtcaaac

SEQ ID NO: 55805 - DNA, 98 bp, Homo sapiens
agtatacaccatgagcaaagctcaccctcccgagttgaaaaaattggcacagcaacgaggggacagtgaggacggaagcccaagtggcacaaatgcag

SEQ ID NO: 55806 - DNA, 100 bp, Homo sapiens
ttgctgcaacagaaagaacactgctaggttttttccttgcaaaagttcacaaaattgatcctgatatcattgtggtaattaaatgtcgtaatgagatcat

SEQ ID NO: 55807 - DNA, 82 bp, Homo sapiens
gtagaatgtgactacttcgggatggagtttcaaaatactcagtcctactgggcggttcagctgctgaagccagagggtgtgc

SEQ ID NO: 55808 - DNA, 100 bp, Homo sapiens
ccaggaaggggacgggacggacggtgatggtggtcgccgcggcggcgtgtgcgcccctcagtttcaccagtgatcattaaagaatgggcagcttacaaag

SEQ ID NO: 55809 - DNA, 82 bp, Homo sapiens
agaccacctgggcggaggctacagcatcgtggcgctgggcaatgacatctacgtgacgggctgaccccgcactacatctacc

SEQ ID NO: 55810 - DNA, 100 bp, Homo sapiens
gtctgaatcaggctttaaactgttgtgccagtgcttaggctttggaagtggtcatttcagatgtgattcatctactgcagaaccttggcctgaaaatgct

SEQ ID NO: 55811 - DNA, 74 bp, Homo sapiens
aaaacttgatcctcgaagagaaggtggtgatcaaagggcagttatttggcagaaaagcagagtatcagatcaca

SEQ ID NO: 55812 - DNA, 146 bp, Homo sapiens
ccaagttggaaaaagaaatggaacagaaacatagagaggaactggagcaattgaagctgactactaaggagaataagccctggtacctgacagtgtaaagaaggagctcctacaaagaataagaacattccttgctcagcatgcca

SEQ ID NO: 55813 - DNA, 75 bp, Homo sapiens
cagtggcgcttgagttggtcgggggcagcggcagaattatatccagatcgagagacagaagattctgaaagggtt

SEQ ID NO: 55814 - DNA, 75 bp, Homo sapiens
gaggaggagacgtaccggctctggaaaatccgcaagaccatcatgcagactcggtgaaatacctggagtgctcag

SEQ ID NO: 55815 - DNA, 101 bp, Homo sapiens
ctttgacttggtgttgaaagtgaaatgtcatgcctctgaaaatgaaggctttttgaaagcaaagatgagcaacactcaagctgagaggtccataataggca

SEQ ID NO: 55816 - DNA, 100 bp, Homo sapiens
aggaggaagaaacctcagacagatcgccggggaggcagcgcgggatcccagcctcaggcgtgcgcggacggtgtgcggaaatgcactcggtgatggaaag

SEQ ID NO: 55817 - DNA, 75 bp, Homo sapiens
ggttttccccacatatatgtaaaagaaatttgcaagactactgggaacgtcaaggtcgtgggaaataaaaggcag

SEQ ID NO: 55818 - DNA, 75 bp, Homo sapiens
aagtagttcttgcattggatgcaatccattccatgggttttattcacaggactaatttattattgtgcaactgcc

SEQ ID NO: 55819 - DNA, 98 bp, Homo sapiens
gcgtctccacgtgcaagaggaactggagcgagctccccgacgaggagcgcggcgagatctacgtgccagccactgaagatcctggtgtcgccatgggc

SEQ ID NO: 55820 - DNA, 82 bp, Homo sapiens
tgggcttctctgaggcggcgagagatggtcaggtctggagctcgaccgggccaggagtacttcttgcaagcagagctgacaa

SEQ ID NO: 55821 - DNA, 90 bp, Homo sapiens
ttctggagacctgggtgtgggtcaagcaaccaggcattgaatgccccagaggagcccgaaacctcccaggcttggtgcaggaaggagagc

SEQ ID NO: 55822 - DNA, 50 bp, Homo sapiens
actccagttatggctcaacccaaagaagattctcctgagaatgatattcc

SEQ ID NO: 55823 - DNA, 100 bp, Homo sapiens
agaaaagatggaaactttggacttcaagaacttggattaaagaacttgacaggcccctcaccgttccccaaccaacaaactcctccctcaatgatgccag

SEQ ID NO: 55824 - DNA, 100 bp, Homo sapiens
accagaactgcctgaagaatgcggggaatcccagagacatgcgccgcttccaggcctgggccgaggccactggtgcatatgttcccgggagggataagcc

SEQ ID NO: 55825 - DNA, 98 bp, Homo sapiens
tgtctacctggtaatagaggacttgaagcagaaagcaagtgaatacgagtcagaagtgtcccttttgatgagaagaataagcctcattctgattcaac

SEQ ID NO: 55826 - DNA, 75 bp, Homo sapiens
tcaactaaaaacaaaattgccagaaaatctttcctctaaagtcaaactggtaactataactacccaatattgcag

SEQ ID NO: 55827 - DNA, 99 bp, Homo sapiens
cgatcggcgttggccgccgacatgacgcccgaggacccagaggaaacccagccgcttctggggcctcctggcggcaggaccatggccaacctggagcgc

SEQ ID NO: 55828 - DNA, 99 bp, Homo sapiens
cgcggggttggacggcgacgagaagctgccccgggccgtaacgcttacgggtcgagcccttctctataacggtcattacaaacaaccctgaagtggctg

SEQ ID NO: 55829 - DNA, 83 bp, Homo sapiens
gggttttcttagccctctacttttcaagacaccaagtgagaggccaaccaggagaccaagacacattccaccccagtgggggg

SEQ ID NO: 55830 - DNA, 75 bp, Homo sapiens
gcagacgctgtgctcgctggcaccccgaacgggttgcttcccccgctgcgaggtcgccatgggctactcacactc

SEQ ID NO: 55831 - DNA, 119 bp, Homo sapiens
agagggaaagggataggagaaggatgtggactgcagtgctgcagtgccaggtagacgttacatccaagaggaaataatccaggcaaggaagcacaagctgatcaagatgtgtagttctg

SEQ ID NO: 55832 - DNA, 75 bp, Homo sapiens
actgcagaggtgctggagctggcagcaactttcatcctttgaaacgtgtgctgaaaaagaagaatcagcaaatac

SEQ ID NO: 55833 - DNA, 96 bp, Homo sapiens
tgggacaagatcccgtccatgaatcagcttgcattgaaaggctctagttacagtggacttcttgaacgacatcatattcacaccaaaaatgtagaa

SEQ ID NO: 55834 - DNA, 98 bp, Homo sapiens
aggccgtaatgccttggctgctctcagcccccaagctggttcccgctgtagcaaacgtccgcggcctctcaggacttgattattcttagaaatgcact

SEQ ID NO: 55835 - DNA, 75 bp, Homo sapiens
tggacccctactattgcaacaaggctcaaactgctttttctgcaaaccctgccaatccagcaattttgtcagaag

SEQ ID NO: 55836 - DNA, 80 bp, Homo sapiens
gctgctgcttcaatgtccgcatcgcaaccaccgccctggccatctaccatgtgatgccatggacaatattaccaggcaga

SEQ ID NO: 55837 - DNA, 50 bp, Homo sapiens
cccaggttaccactaaaaatgccagactctccagaatccgatgctgagcg

SEQ ID NO: 55838 - DNA, 75 bp, Homo sapiens
tggacaggtctacgccacatcacttagaaaatatttacaccagcagctccagttcataccaataaagaagatcct

SEQ ID NO: 55839 - DNA, 100 bp, Homo sapiens
cattcatcaaagggccaatgatgaccttgcagatgctgggctagaaaaactccatcttagtttgcaaattcctctctgcccgtgactttggagaacgatg

SEQ ID NO: 55840 - DNA, 82 bp, Homo sapiens
gcgagcagcggcgggggcccgagggagtcgtccttgtctactccactaccaaatgttgaagttcttcaagaatcagtccttt

SEQ ID NO: 55841 - DNA, 75 bp, Homo sapiens
tgactacggtgatctgtgtgaggatctgaagacaccaccatggcaaacacagagcccacggaaggccaacggacg

SEQ ID NO: 55842 - DNA, 100 bp, Homo sapiens
ggcagtgaccgtgtgtcagaacaatcttgaatcatgaagctactaaccagagccggctctttctcgttggaagtccattattgaccatcttttgactcat

SEQ ID NO: 55843 - DNA, 78 bp, Homo sapiens
ggaggtggaggcggagctggcccagagggtggcagcgctttccaagacaatgactgatgtggtgggtaacccagagga

SEQ ID NO: 55844 - DNA, 100 bp, Homo sapiens
gcactgtcaaggagctgcttgatggagcctcgccgctcctgctatttgccaaccgccgggacgtacggctggtggacgccggcggagtcaagctggagtc

SEQ ID NO: 55845 - DNA, 95 bp, Homo sapiens
tgggattaaaagcagcgaacctcgagaccaacgtggaggagctgtgggtggaagatatccctcggggacactggctccagacactgaagcatatt

SEQ ID NO: 55846 - DNA, 75 bp, Homo sapiens
cttcaccctgccgtcatgtctaagtcagaggtggcctctgtcagcctcttgcagctgggccaggagactgacaag

SEQ ID NO: 55847 - DNA, 100 bp, Homo sapiens
cggaggcgccggcggagcccgaccacgacggccccagggaggatgacgaacccaacctggtgcccggcccgcagtctgcgggccaggcatcgacatccgc

SEQ ID NO: 55848 - DNA, 83 bp, Homo sapiens
ttaagagataccaagtgaaatttagaagacgacgagtgccaaacccaagtctgaaatccacgtgtctatggccactccggtca

SEQ ID NO: 55849 - DNA, 97 bp, Homo sapiens
aagacttacaggcctcgctacaaggtttatgctaaaactatcgatgggcaacagactattattgcatgtattgaaagccaccagtttcagcctaaaa

SEQ ID NO: 55850 - DNA, 83 bp, Homo sapiens
ccaagagttccatccctcactacagtgccacagacacaaggccagaccacagggctgttttgctgcagcttctgaagtgttaa

SEQ ID NO: 55851 - DNA, 75 bp, Homo sapiens
ttggagggtacctgtttggttccaaaggggcattccagaaagatgaggatatttgctgtctttatattcatgacc

SEQ ID NO: 55852 - DNA, 101 bp, Homo sapiens
gaagaatacagaatttcaacagaggttcattctcaagagagatgatgccagtatggaccgagatgataaccaggaatgaatgtgatttgaactcattcatg

SEQ ID NO: 55853 - DNA, 98 bp, Homo sapiens
gggccacgggcatcggaaaagccatcgtgaaggagctcctggagctggtttctcatcccagtttccccagcctcctgtgaaggtgtcagagaaagaag

SEQ ID NO: 55854 - DNA, 99 bp, Homo sapiens
cgggcgaccccccggcgcagcagcatcatcaaggaacatcatttacagcgagcaatttcagcacagcaagtgtttagagaaaaaaaagagagtatggtc

SEQ ID NO: 55855 - DNA, 78 bp, Homo sapiens
gtacaactaccgctgctggaccacaaaccgctgccagaaaagaaacgtgcccaacgagaagatcgcgatatggctcaa

SEQ ID NO: 55856 - DNA, 111 bp, Homo sapiens
aactccttcgtgggcacgcgctcctacatggctattggtgctgaagacatggacggcttccaggcagacacggaggaggaggaagaggaggagggcgactgtatgatcgtg

SEQ ID NO: 55857 - DNA, 83 bp, Homo sapiens
ctacctgcagcgccgtgtggcacgacacaaaaatcaggagcatcagatccatgctgctgctgactcggagccccacagcttgg

SEQ ID NO: 55858 - DNA, 60 bp, Homo sapiens
aagggaggagactcctgaccctcagaatggaattgaatgatctggcacgggaccctccag

SEQ ID NO: 55859 - DNA, 75 bp, Homo sapiens
caagattagacaacagagtcattgatcttagggtgcaaggaaccatcttcccagctcccaatttcaatcccataa

SEQ ID NO: 55860 - DNA, 50 bp, Homo sapiens
ctgctccgatcccactagtgagaggagtggaggcagcacagacagtgagg

SEQ ID NO: 55861 - DNA, 123 bp, Homo sapiens
cattgtcacctcctgtagtggagcagatcatcacctccatgaagtgcatcatggggcaggatggcaccagccttggacaaggagactggctttcacagaggtttgggttgggttcagttttct

SEQ ID NO: 55862 - DNA, 82 bp, Homo sapiens
cggatgtcagcagctctgccttaacaggggagtctctcaggaaaaagaagcccagatctcttcagcaatcgtttcttccgtg

SEQ ID NO: 55863 - DNA, 101 bp, Homo sapiens
aagacttttttgaagccatccgcagaaggggagacacattttatgttgtgtcatttcgaaggggccgttgctccagggagaactgcaaatatcttcatcca

SEQ ID NO: 55864 - DNA, 83 bp, Homo sapiens
cgatcctcaagttcccaagtagaggagaggaagcggcagagggaggttctgcggggagtgtctccagccctgcctgcaggtgc

SEQ ID NO: 55865 - DNA, 100 bp, Homo sapiens
cctgtctcccagctcgactgtctggaagctgtgctgaatggtttggtggccactgaggtgttgatgtggttttatgtcggagagattataggcaagcggg

SEQ ID NO: 55866 - DNA, 75 bp, Homo sapiens
ataagacttcaactcaagatgcagtgtgcaacttgctttggtgtttgctgttttattgccacagatgacattact

SEQ ID NO: 55867 - DNA, 50 bp, Homo sapiens
ctgtgccacctgccaagaccagcagatgccgacaaaaggatcaaggtggc

SEQ ID NO: 55868 - DNA, 82 bp, Homo sapiens
cttacgtctgcggaagtgcagctgcctcagttcttagcgcaggtggacgtggtcttggcatccacgccaatgagaatgtgag

SEQ ID NO: 55869 - DNA, 100 bp, Homo sapiens
agttcacctttgctgggaaagtgatggagaaggtctggtgtggcgtgatggagaacctgtccaggttatccggtgttggctcctgctgcttactatgacc

SEQ ID NO: 55870 - DNA, 98 bp, Homo sapiens
cggagatgtgacccggcagtacggcaaatatggcggagatccgccagatattcctgatgaagtaacctgtgtcatttatgaatattcaggcaacatga

SEQ ID NO: 55871 - DNA, 100 bp, Homo sapiens
ccagcctgccttggagcccttggtgatctatctgtggaacaacccgtgcagttcagatcttttgacagcctcagaagaggaaagtggaaagcctttccag

SEQ ID NO: 55872 - DNA, 90 bp, Homo sapiens
catgtcggaggagaagctgcaggagaaaggctctgtgtgctccgggatggagcaggtgtgcagagggtgagaacccagctctgggaccaa

SEQ ID NO: 55873 - DNA, 101 bp, Homo sapiens
gaggaggccctggagctgatcaacgatgatgataattccgaagaaggcttccacactattcattcaggaaggcatgaatatgcattcagcttcgagcttcc

SEQ ID NO: 55874 - DNA, 90 bp, Homo sapiens
ctctgcaccgctaggccgtccccgaccttgcctgaacaagatacctgcactttaatcagatagaaactttggacccagattcgttccagc

SEQ ID NO: 55875 - DNA, 100 bp, Homo sapiens
cacacatcagttttacaggaaatatatgtgtgctggtgaatcaaagacttctggaagtacagtcacaagttgaagaattacaaaaatctttacaggatca

SEQ ID NO: 55876 - DNA, 80 bp, Homo sapiens
ttctgcacaggaatatcgagagcgtcatgaacccgagctatagagaaaggagatgaggacgtggcccagtggaacatcgg

SEQ ID NO: 55877 - DNA, 100 bp, Homo sapiens
gaagccaggagaggacgcggccagagatgggctcctgcccttgaacccctgctggggtggaagcagaaaacatcctgggatggcacgggtccaagtcaca

SEQ ID NO: 55878 - DNA, 75 bp, Homo sapiens
aggctgcctctctgcaaagttgagccgggggccattgagactgccatggaagacttgaaaggtcacgtagctgag

SEQ ID NO: 55879 - DNA, 75 bp, Homo sapiens
gcggattcgccgaggcaccgaggcactcagaggagagcaccaagctatggatcatcatggagtacctgggcggcg

SEQ ID NO: 55880 - DNA, 100 bp, Homo sapiens
ggcgacggtggcggctctcggagccggcgcgaatccggcccccgcagcgggacccgggaagaggagcaggacttggatggtgagaaggggccatcatcgg

SEQ ID NO: 55881 - DNA, 98 bp, Homo sapiens
gtagaaaaggtggcgtggctggcgattcgtgttcgtgagggccttttctggccagaagcggactcctagaagaggggagcagcaaggatggaatgaca

SEQ ID NO: 55882 - DNA, 90 bp, Homo sapiens
agaaaacattctcagtttatgagattatgtgcaagatcctcaagttggaattaacgacctctggaaagatgccttttatgttaccaggac

SEQ ID NO: 55883 - DNA, 74 bp, Homo sapiens
agcggccgccgccgctgccgcttccaccacagggtttcgaaaaaacgatgaaatgaaagctatggatgttttac

SEQ ID NO: 55884 - DNA, 100 bp, Homo sapiens
gaagaacttcttcagaattagaaaggagctgcttcccaataaggaaacagctgaggctgaggtggcctccttgaaccgtaggatccagctggttgaagaa

SEQ ID NO: 55885 - DNA, 75 bp, Homo sapiens
agatcaatgaacctttagatgaatttacatcaatcctttcccatggtaccgtggcagactgtgctgttgttggca

SEQ ID NO: 55886 - DNA, 83 bp, Homo sapiens
agctaaagcagcgtgcgttcagccctgggattctgaaagtcaagaagacatcatccggaatattgccaggcacctcgcccagg

SEQ ID NO: 55887 - DNA, 100 bp, Homo sapiens
tttataagacaaaagaaatagcaagaactgaggagcaccaggagacgcaactcatcgggggaggagttgtgtggggtaatgacaatctcggactctccaa

SEQ ID NO: 55888 - DNA, 100 bp, Homo sapiens
gggcttgcccggcccgctgccgcccgggaagtacatggccggcctgaatctccatccgcacccggagcgccgccctgtgctgggctgccgggagctcgtc

SEQ ID NO: 55889 - DNA, 100 bp, Homo sapiens
tgatttcagtggaataaatggcgtccaaagtcacagatgctatagtctggtatcaaaagaagcccaataggggcacaaaacgtccccgggatgatgaaga

SEQ ID NO: 55890 - DNA, 100 bp, Homo sapiens
ctctagctcagaaccattagacacatcagtggagtccatgctacctgattgcccccgggtctcagcagctgctgtgacttactcgaagcctcgattggcc

SEQ ID NO: 55891 - DNA, 74 bp, Homo sapiens
caaaggtgaatcttttggttggtgattttgatgatagccacaaagcaagcaggaccctggaagctgtcctgaat

SEQ ID NO: 55892 - DNA, 100 bp, Homo sapiens
ggagcggccggaggagccatggactgcagcctcgtgcggacgctcgtgcacagatacgcacgtgtggttctcaaatataggcattctgatgggaacttgt

SEQ ID NO: 55893 - DNA, 100 bp, Homo sapiens
gtttatttccaaagttgaagaagtcttgaatgactggaaactgattggaaactctttgggaaagccactcgaaaagtgattccaaatctaagaagtcagt

SEQ ID NO: 55894 - DNA, 100 bp, Homo sapiens
aatctaggagagagcgaaattcgcgatgcaatgatggcaaaggccgagtacctctgccggataggtgacaaaggaataccttggcaagcagctccagtcc

SEQ ID NO: 55895 - DNA, 100 bp, Homo sapiens
cagtcgcgccgcgctcgaccgcctggagaagctgctgcgctgctcgcgttgtttaatagaaaatggtcagcttgaaattgtgacaggtggctgggttatg

SEQ ID NO: 55896 - DNA, 97 bp, Homo sapiens
acattcgctctcagactggggttcagattttaatgaagattgaatatatgcagcaaaatttagtaaggtccttttggaataaatcatgggattgagc

SEQ ID NO: 55897 - DNA, 75 bp, Homo sapiens
ctcccaaggtgctgggattacagacataattcaagacatttcctgagtgccttctgtgtgggccgaatgctgtag

SEQ ID NO: 55898 - DNA, 83 bp, Homo sapiens
tggggttggtgtgattagcttcgcagtctggaaagctttaggagttcacagtggagatgcacttatttacatggaaccagaga

SEQ ID NO: 55899 - DNA, 83 bp, Homo sapiens
ctggttctgaagcaagaacaagaggaataccagcgggaagggatcccctggaaacatgttattaacacggggatcaaagtctg

SEQ ID NO: 55900 - DNA, 90 bp, Homo sapiens
ctgaagcgcacgacctccgactactttctccttcaagctgatgtttgagccagcatgtcgcggaggaagcaagcgaagcctcaacatttc

SEQ ID NO: 55901 - DNA, 90 bp, Homo sapiens
ctgaaacagtgacttttactgaagtggtggaaggaaaggaatggggttccttctactactcctttaagctatgtgttctcatttcaccca

SEQ ID NO: 55902 - DNA, 50 bp, Homo sapiens
agaaatctcaaagccatgtctcaggtgccgtggccagcacagaagtgaag

SEQ ID NO: 55903 - DNA, 83 bp, Homo sapiens
ctcagggcttggcctcccctcagatgtataagcattccaataataaggccatgactacgggggcaattgctgcaatgctgtct

SEQ ID NO: 55904 - DNA, 75 bp, Homo sapiens
ctttgatctttgctacggatgctatgcagcgaagaaatactcctacggcctgatttttggggcactgaccatcat

SEQ ID NO: 55905 - DNA, 100 bp, Homo sapiens
ggggctgaatgtgcgagtccatagctgaagaggagcgccagatggtggaggaatacacttatttatgaagagtggaggcagcacagacagtgaggacgaa

SEQ ID NO: 55906 - DNA, 83 bp, Homo sapiens
gagccccggccgccgccagagcgatgttcccgcagagccggcacccggatagctagcggccaggagaaatacagtggaaaatg

SEQ ID NO: 55907 - DNA, 100 bp, Homo sapiens
cgctggcctgcaggatgggacccttgctgcttaccctcggaccagcgatgaggacggggacttggttgccttttccagtgacgaggaattgacaatggcc

SEQ ID NO: 55908 - DNA, 100 bp, Homo sapiens
aataatattgaactgggcacagcatgcggaaaatactacagagtgtgcacactggctatcattgatccaggtacgacaccacagaggaaaagttatttat

SEQ ID NO: 55909 - DNA, 82 bp, Homo sapiens
tatcctagaatcaaggatttcagcaacaatgcctctgttcaaactcccagataaaccacataatcctatggtaaatgctgga

SEQ ID NO: 55910 - DNA, 82 bp, Homo sapiens
cggggctgaccacttaccgcagcatccaagtcggccctggtctcctctgagcctccggcctccataagacccaaaacagatg

SEQ ID NO: 55911 - DNA, 85 bp, Homo sapiens
ctggctcccaataacctgaagcctgtggtggcagagttctatgggtcaaaagagggactggagtccagagttgccaccagatggg

SEQ ID NO: 55912 - DNA, 98 bp, Homo sapiens
gcggaggagaagccggaggaggacaacgactaccaccgcagcgacgagcagccaggtgctgcccacctacgacagcctggatgagccgtcagtgaaaa

SEQ ID NO: 55913 - DNA, 82 bp, Homo sapiens
gcgcagggcctgcagcgggagctggacggcgagcgcgagcggcgcgagaaagaaggcaacagcccccaggggagcaaccagg

SEQ ID NO: 55914 - DNA, 100 bp, Homo sapiens
tacaactgaatttgggcagtcaattaacataaataggctgcttggagaaaatgatggggaaacaagagctttggtacaggtttgcagattccgccagcag

SEQ ID NO: 55915 - DNA, 100 bp, Homo sapiens
ctacatcattcctctgcctgacattgaccctgtccctgaggaggaggacctgggcaagaggaacagacacagacaggagcaggaagatcttgaactgaag

SEQ ID NO: 55916 - DNA, 75 bp, Homo sapiens
ggacacctggaagccgagaaatgcaactgaccaaccacatccgggagtcgctgccggccctacgtagcaaactac

SEQ ID NO: 55917 - DNA, 96 bp, Homo sapiens
gggcaactcacactccggccagactgggcagcacaggccaccacgcacgtgtacgtgaccattgtggatgagaatgataacgcgcccatgttccag

SEQ ID NO: 55918 - DNA, 98 bp, Homo sapiens
tcagttccagtttaaatgaaacctcctgtgagaagtctctcaactcctcccaggttgctgctccaagatagccaaaatgtggaagcactgagaatgca

SEQ ID NO: 55919 - DNA, 98 bp, Homo sapiens
gaaaatagagttcacaaggagccagcggccggcagcatcacacttttatgacagacctggaagtcagagcaccataacatggtgtgggaagtgaagac

SEQ ID NO: 55920 - DNA, 75 bp, Homo sapiens
caatgttggagccgtctgcaaagtgtccccggcaagaagcataatgggagtgttgagtaacaagtgtggctttca

SEQ ID NO: 55921 - DNA, 98 bp, Homo sapiens
gcgctttgagctactgggctgtgagctgaacggttgctccttgagggcaggacagttcttatggctttatccgttgcgtaagcacagagaggtctgcg

SEQ ID NO: 55922 - DNA, 88 bp, Homo sapiens
aaggatcctccgagcgctgtggggagcggcaacgccggtggctcggggccccgcggaaaaggatgaaacaggcgcctatttaatcgac

SEQ ID NO: 55923 - DNA, 90 bp, Homo sapiens
cccaggcgcagatgcgggccctgctggaccagctcatgggcacggctcgggacgagcatggatcattttgatgacattggtcccagtgtt

SEQ ID NO: 55924 - DNA, 87 bp, Homo sapiens
acctgcagaaggtctctggagacatcttcagcagggtactgcgttcaacagatcctgatcgcttccaggtaatgttctgctactttg

SEQ ID NO: 55925 - DNA, 101 bp, Homo sapiens
caacaagtttagggagtccatggccagaaaacttttgggttacagatgaggacacagtaaagaggtattttgccaagtttgaagagaagtttttccaaacc

SEQ ID NO: 55926 - DNA, 99 bp, Homo sapiens
cctggattcccacagtccccaacatcatctgttactagcgagaactcagaagtgttccacgtttcagaggcagccttcggtggcaagctgaagaaccca

SEQ ID NO: 55927 - DNA, 80 bp, Homo sapiens
ggtccctcagcccagccaccatgagcaccaagcagatcacttgcagctgctgaaatgggttgcggattgaacaagttaga

SEQ ID NO: 55928 - DNA, 81 bp, Homo sapiens
acatgggagactattcttgatgggaagaattctcaatcgcaatcctctgactactgtcgaagatccatatctctttgaact

SEQ ID NO: 55929 - DNA, 75 bp, Homo sapiens
acctctggccccgagatcagaatgccgatgccatggacaatattaccaggcagaaccaattctacgatacccaag

SEQ ID NO: 55930 - DNA, 98 bp, Homo sapiens
gctggtctcctgtcttggacacttgctatggcaatattttatggcatcaatagagaagtgttgcctctgaaggatgctgaaaacgccattcaacagat

SEQ ID NO: 55931 - DNA, 99 bp, Homo sapiens
agaattaaaagatgatgagaaataaggacaaaagccaagaggaggacagttcgctacacagcaatgcatcgagaattcctggaaaactcaagcaattcg

SEQ ID NO: 55932 - DNA, 101 bp, Homo sapiens
ctcccaaagtgctggaattacaggacacattcagctaacgtattttagcaggtggagtgaggttgaagattcctgtgacagcgatgccatagagagaatgt

SEQ ID NO: 55933 - DNA, 90 bp, Homo sapiens
gagaccgtgaagattccaagttcaggagaactcgaccggaaaaatgtcctgtttccccttatcctgattgcgtgatccagtgtgagcagc

SEQ ID NO: 55934 - DNA, 97 bp, Homo sapiens
cttttaatgataattcatgacagaagggagtttgctaaatttgaaaaggagaaaatgaatgccaaatgggacacgcagcctgagggaactggcatga

SEQ ID NO: 55935 - DNA, 97 bp, Homo sapiens
ctttccccggagctgggccgcgaacacctcactattgatggtgtagcgctttaggggaaggttaaacccatccagagtaatggctgcggccttaccc

SEQ ID NO: 55936 - DNA, 96 bp, Homo sapiens
ggtctggacactgaaaccaccgtggaagtcgcctggtgtgaactgcagattctgatagttggtggtggtgttgctgggcttgcttctgcaggcgca

SEQ ID NO: 55937 - DNA, 75 bp, Homo sapiens
agacgacaagcacacactatggcgctgaaacggattaataagctgggatagatgggcagcagaagatcatgtgct

SEQ ID NO: 55938 - DNA, 100 bp, Homo sapiens
ccccgttccccacggaggccatgggcgacccagcccccgcccgcagcctggacgacatcgacctgtccgccctgcgggttaaagaactgaatcattatct

SEQ ID NO: 55939 - DNA, 100 bp, Homo sapiens
atgaagctactaaccagagccggctctttctcgcccacggccgccaatcccactctcgctcctgctgacagaagaggaagcagccctctacattcaatcc

SEQ ID NO: 55940 - DNA, 97 bp, Homo sapiens
acgctcacccgcagggcgatcaaatggtcccggctgctgcagggcgggggcgtccccaggagccggacagaacatgacctttgacctgccatcagat

SEQ ID NO: 55941 - DNA, 100 bp, Homo sapiens
gcagaaggtctctggagacatcttcagcagaacttacgctggaaaaactccaacagcttcatatggacagatggacttcaaatgctgtttgtattccaga

SEQ ID NO: 55942 - DNA, 50 bp, Homo sapiens
atcttcattcatgactccagacagaactgtaagagtaaatgggtccagta

SEQ ID NO: 55943 - DNA, 99 bp, Homo sapiens
gaaattcattcacaaacctggcagccttatgtttgatcatcggccaaggtcctggcgagaactgcctctgcggctagctgattttggggtacttcatag

SEQ ID NO: 55944 - DNA, 75 bp, Homo sapiens
ctaatgaaatagactgggaagatcttgctagtgccataggcaattgcttgttcagagctcttggtgatcaattgg

SEQ ID NO: 55945 - DNA, 90 bp, Homo sapiens
cacatgaggatgggacacaggagctcaggttgctccttgagggcaggacagttcttatggctttatccgttgcgtaagcacagagaggtc

SEQ ID NO: 55946 - DNA, 100 bp, Homo sapiens
gcagagcaaggggcttacgcagaaggacctggccacggccgggctctcgccatgggtcactgtcgcctctgccacgggaagttttcctcgagaagcctgc

SEQ ID NO: 55947 - DNA, 87 bp, Homo sapiens
ccacctggtccagctgcccgcaggggtgatcctgataacttaagtgactctctcttttccggtgatgaagaaaatgctgggactgag

SEQ ID NO: 55948 - DNA, 99 bp, Homo sapiens
ggggcgcacttcgacccggaagtttacctagacaaggggacatcctgcaagccagtgacaacctctcccgggtcatcaactcttacaaaacaattattg

SEQ ID NO: 55949 - DNA, 100 bp, Homo sapiens
tttttgatctcaactgcaaaatctgcatagcgaagcagcagttttgggaatttcgatcgttttcggaataattctttatcaaaaccagatgattcaactg

SEQ ID NO: 55950 - DNA, 98 bp, Homo sapiens
ggcaacggctccctctcgggcgactggtaccgcaggaaccaggaactgaaattaccattcacttttttaagtggacatattcatgaattgaggattca

SEQ ID NO: 55951 - DNA, 51 bp, Homo sapiens
caaagagtggatccgacctttggcttcagggccagcttctgagcatcccgg

SEQ ID NO: 55952 - DNA, 100 bp, Homo sapiens
aagatggcatcatttttgccctcaaaagaaatggcagttgtgctgcatggaaacaacctgttagtatttggaggtacgggcatcccatttggagagagca

SEQ ID NO: 55953 - DNA, 50 bp, Homo sapiens
accatctgtttcaaaagaaattagcggcccagctagaaaaaaagcgggat

SEQ ID NO: 55954 - DNA, 75 bp, Homo sapiens
tctggtggagatggtacaggcgctttacgagaattggctgtgaaaggactgaggcagccatctgggggtagcggg

SEQ ID NO: 55955 - DNA, 96 bp, Homo sapiens
gagggaagatctttttcctcaattgggaaatcctcattgacgattcaatttgttgaaggccaatttgtggactcctacgatccaaccatagaaaac

SEQ ID NO: 55956 - DNA, 89 bp, Homo sapiens
gaaccgcagtatcatgctggccaagaagatcatcattaaggacggaggcacggattatatctgtccaagatgcgagtctggttttatcg

SEQ ID NO: 55957 - DNA, 100 bp, Homo sapiens
taaaaagaccactgaggagcaggtgcaggtgccttatgcccgctcagaggcccacctcacagagctgctggaggagatatgtgaccggatgaaggagtat

SEQ ID NO: 55958 - DNA, 100 bp, Homo sapiens
gtaaagaacttgcagttgaaggagtataacacagatacttggcatatcgaaattttatgattgacacgtatcgtctaaacccccaagagtatttaactag

SEQ ID NO: 55959 - DNA, 99 bp, Homo sapiens
tctcaaggaaaagtattgcaagcaacagtagtcgctgttggatcgggttctaaaggaaaggagtctactcttcatcttgtgttgagacttcgtggtggt

SEQ ID NO: 55960 - DNA, 82 bp, Homo sapiens
aaagcagatgatccttcctcctacatggaagttgttcaggctgccaatactagtgacatatctgaagagatggattaagaat

SEQ ID NO: 55961 - DNA, 115 bp, Homo sapiens
cttcaacttctgctccaggaaattcagcctcaaaaccgtcctgctgcttgctgaccaaatgcttagcagtgtctgcaaaaacgaatcttttcctacaacctgttaactgactgga

SEQ ID NO: 55962 - DNA, 100 bp, Homo sapiens
tgatcaggagtgaattcacagtctaccatgaattggaaggatttggtgctatggagaaatttttggtagaatataagagtgcagtggagaagaaactggc

SEQ ID NO: 55963 - DNA, 60 bp, Homo sapiens
accggattgagatgtggagttacgcagcaaagatccattttgctgggcagcaaacagagt

SEQ ID NO: 55964 - DNA, 75 bp, Homo sapiens
ccaggaaggggttcccagaagtcagaatccaagatgtgactgtcgggcctccagaaaacattgaggtgaccccag

SEQ ID NO: 55965 - DNA, 90 bp, Homo sapiens
tggatttatgcaaacttgggccaaaggacagttagaagacagtagggtgaagagggaacagaaatctttgccccctgactttggaaatct

SEQ ID NO: 55966 - DNA, 95 bp, Homo sapiens
tggagtcattcatggcaacagccccctttgtccaaattggcaggtttttcctctcgtcagaaagatggcattcagatggaatcgtgtatcccaaa

SEQ ID NO: 55967 - DNA, 76 bp, Homo sapiens
agataattttattggactgtttgtctttgttctctgcctcttgtattctagacccagattgatcactatgttggca

SEQ ID NO: 55968 - DNA, 101 bp, Homo sapiens
atttctctggcccagcttacaaaggaatgggtaccacagaccatgtcatcgtcctggcgtccacgaaccgagctgacattttggacggtgctctgatgagg

SEQ ID NO: 55969 - DNA, 75 bp, Homo sapiens
agaccatgcactctctcaagaatcctcagagccaggctgtagagaatgtatttagcaagccaaaaggaacaaact

SEQ ID NO: 55970 - DNA, 75 bp, Homo sapiens
gccatctttgctcctccctgcaactaactccattcttaattgtttgaaaatctgaacacagttgctgagtgtctg

SEQ ID NO: 55971 - DNA, 75 bp, Homo sapiens
tacaaccagtggcagcagggtggcattcttagcagggttacagaatctgttaagaatattgtgccagggtggcta

SEQ ID NO: 55972 - DNA, 100 bp, Homo sapiens
aagaggcccttgcccagcgattccagattggccgcgtaatccaggttgctgctgggagcagcaacctcaagagagtgaccttggagctgggggggaagag

SEQ ID NO: 55973 - DNA, 75 bp, Homo sapiens
tcaccgatggaaagtacaactccaccctgctgggaatcccgttcttcgccatggagccctatgagtttgtctctc

SEQ ID NO: 55974 - DNA, 100 bp, Homo sapiens
gcacggcgcagtgccggaacactgtggcggccatcgaggagcatttaaatcaaacggtattgagatggattgggttatgaaacataatggtccaaatgac

SEQ ID NO: 55975 - DNA, 50 bp, Homo sapiens
agcagacttgcatatatttgactgcaaacgatgagatgttctccgacatc

SEQ ID NO: 55976 - DNA, 50 bp, Homo sapiens
ttaaaaaaaattgctgttcatgggcaccagtgtcttgtcacctggactcc

SEQ ID NO: 55977 - DNA, 100 bp, Homo sapiens
acgagatgtgcgtaccaatgaagtggtggccatcaagaaaatgtcttatagtggaaagcagtctactgagacatgctggtgtctacacagcagaagaagt

SEQ ID NO: 55978 - DNA, 75 bp, Homo sapiens
actggattagctggaaacctcctgggagacctacattacaccactgaggtttcccttgggggctttgaaataaca

SEQ ID NO: 55979 - DNA, 100 bp, Homo sapiens
agttcacacataccctcttcttgccaccaggtatacagaagatgggtgtccacataagaaattctttcacacacgttttctcatgcgaatgaggttaaca

SEQ ID NO: 55980 - DNA, 74 bp, Homo sapiens
tcccaattgcaccattaattatggggtcacatccagttgacaataaatgtccaaaagaaactcttccttcaaaa

SEQ ID NO: 55981 - DNA, 101 bp, Homo sapiens
ggaattctgcctctggggttttattttctctcagctgcaacaacttcaatgcagtctttagtcgcatttctaccaggaagctcataaaatggtgagagaag

SEQ ID NO: 55982 - DNA, 101 bp, Homo sapiens
ggagctaaagcagcgtgcgttcagccctgggctgctagtctatggggtccttacaaagacatttggcataaagtgggaaatgctctttggagaagacaacc

SEQ ID NO: 55983 - DNA, 105 bp, Homo sapiens
ggacatctgggggccacaaatgctccttctcctggagacgcaactcaagaggcggggtttcaccatgttgcccagactggtcttgaactcctgagcttaagcaat

SEQ ID NO: 55984 - DNA, 75 bp, Homo sapiens
caataattcaccgggatctgaaggccaacagagcacttatggcaaggcatctcgagggggtggcaatcaccaaaa

SEQ ID NO: 55985 - DNA, 98 bp, Homo sapiens
tgtcttggtatactacatggcaaaatgggaaaggccaagctataacatcagaaatggtgaatgaatacaagaaaattcttttgctgaaaggatttgag

SEQ ID NO: 55986 - DNA, 100 bp, Homo sapiens
tccatccttgactgttactacagaaaaacctgggttactaggtgtctttcagaagctgattgcatccaaagcaaatgaccaccaaggtttttatcttcta

SEQ ID NO: 55987 - DNA, 90 bp, Homo sapiens
atgcgaaaacagccaaaagaaaggccagcacctgaagaattgatggtatgccttgcaatagctcattattcccagccaacagacctccag

SEQ ID NO: 55988 - DNA, 100 bp, Homo sapiens
cttcgccgcgccccacttgctcgtgcactttacacacatgaggccccttcacagatgtagtcactacaaatcttaaattgcgaaatccatcggatagaaa

SEQ ID NO: 55989 - DNA, 100 bp, Homo sapiens
gttctaaaaccatggcccatgtgagcatatgacggaggaggagatgttggattgctttgcttcactgtttggcctgaatcccgagggatggaaatccgag

SEQ ID NO: 55990 - DNA, 82 bp, Homo sapiens
tggtcgccatcaagaaagtattgcaggacaagagatttaaggaggagagacttcagcatgcaaaccttcatctgttcggctt

SEQ ID NO: 55991 - DNA, 83 bp, Homo sapiens
tgaagacacgcacttatcattcagtgggttcgattgagtgaaacagacttcaaagttatggcaagagatgagttaattctaag

SEQ ID NO: 55992 - DNA, 100 bp, Homo sapiens
aaagaagaaaatagccatcagaaatgtttccttttgtgttaaaaaaggtggacccccaaaagtacaagggcatatttaacggattctcagttacacttaa

SEQ ID NO: 55993 - DNA, 100 bp, Homo sapiens
gaatggccaactatcggaacacgagcgagattcctctggttctggtgggaacccaggggagaaaactggttgtcctggatgtttgaaaagttggtcgttg

SEQ ID NO: 55994 - DNA, 100 bp, Homo sapiens
accgacgactaccagctcttcgaggagcttggcaagtagcggaagtgaaattcagtttctctccgaagcccaggatgacccacagaaaagaaaaccagac

SEQ ID NO: 55995 - DNA, 98 bp, Homo sapiens
gaggagtcatcctcacctgttaggtttcttaaacaattaggtctacatcctaactggcaattcgttgatgtatatggaatggatcctgaactccttag

SEQ ID NO: 55996 - DNA, 100 bp, Homo sapiens
taacattacgtcagcgtgatgctgaggtgactcgactaagagaattaaccagagtgtcaatccatatctacaaggacagagactggataatgttgttgca

SEQ ID NO: 55997 - DNA, 98 bp, Homo sapiens
taaaactgaaggagaagcccatgaagagatggtggattctcactgagttttgactagcggaagaaaaggttggaaaagagactgttcaaaccactgag

SEQ ID NO: 55998 - DNA, 101 bp, Homo sapiens
gccaactccgtgcttgttgagtagtgattcttgatcagtcatacgggaagagagagtaagagggatgaggagaatttctgtgccactgtgcccaaggatgg

SEQ ID NO: 55999 - DNA, 73 bp, Homo sapiens
atttccgacaagttcgagataaaactctaaaaagaggctactttcagaaggcagttgagaattttgaaccagc

SEQ ID NO: 56000 - DNA, 100 bp, Homo sapiens
atacatacatgaagagtggcttcaggactgaatgtgaaagatgttgcagaagtgttccagaagtggctgaagatagaaggaaaaaagtgccactgcctat

SEQ ID NO: 56001 - DNA, 90 bp, Homo sapiens
cagcggtctgacatcgcgacgctgctcaaaacctcgctccggaaaggggacacctggtatgactgattttcccaaaatattttgtgaaac

SEQ ID NO: 56002 - DNA, 75 bp, Homo sapiens
ccaagactcaagctaacctacaaagagtgcctggaagagctgggatgtctggttgagtcctatggcatgaatgtt

SEQ ID NO: 56003 - DNA, 82 bp, Homo sapiens
ctggattcaagtcccaggagtcctgaccagagagcagtccacctctggaggtatgaaggaggctatccagccctcacagaag

SEQ ID NO: 56004 - DNA, 100 bp, Homo sapiens
ggcggatcccggagagccccggagtgagcggagtagcgagtcggcaacccggagttggtgagtttgtaagtgatgcccttctcgttcctgacaagtgcaa

SEQ ID NO: 56005 - DNA, 100 bp, Homo sapiens
cgaggccatctcctgggccgcctggcggccatcgtggctaaacagctgggcgccgtgtacacagaaggtgggttcgtggaaggcgtcaataagaagctcg

SEQ ID NO: 56006 - DNA, 75 bp, Homo sapiens
cccgggcagccacccccggccctgctgccacagcaggagcaggaactcaaagcagccgctgatggcgtactatct

SEQ ID NO: 56007 - DNA, 50 bp, Homo sapiens
ggaaaagctggcacagaccgccacggacccctctgccatgaaccagtcca

SEQ ID NO: 56008 - DNA, 96 bp, Homo sapiens
gacttcccctatggtcagtatgtcgttggtgcggcggttcctggcccagggcgacaccttcgcgcagttggagacgctcaagagcgagaacgagca

SEQ ID NO: 56009 - DNA, 83 bp, Homo sapiens
gagcaggatttagaggaccactagttggaccccatcctcgtgctggaggaacagtgccctctggtggtcagaagatgctgtgc

SEQ ID NO: 56010 - DNA, 75 bp, Homo sapiens
cccagagccacttctcaccgagatgattcatgaaaaagtttcctacactactgaggtttaggggcactgtgaagc

SEQ ID NO: 56011 - DNA, 73 bp, Homo sapiens
aatgatccacttccacttgatgaatatactatactggcaattgctggagaagattttgcaattgttgcttctg

SEQ ID NO: 56012 - DNA, 100 bp, Homo sapiens
ttcgtggcatctatgcttacggttttgagaagccttccgctattcagcagagagctattattccctgtattaaagggtgtccgcaatgttgccagtgtct

SEQ ID NO: 56013 - DNA, 100 bp, Homo sapiens
gggaactgctggggaaggcgattggcatcgatctctccatcccttccgaggcccgacttcggtaaatatttccaactacagtctggtgatggagtctgac

SEQ ID NO: 56014 - DNA, 80 bp, Homo sapiens
caccgccccctgcgccgcccagcaccgggaggaagcagggcaaggccgggaaatcctcattgacgattcaatttgttgaa

SEQ ID NO: 56015 - DNA, 83 bp, Homo sapiens
ctgaaggccaggttttgcagtggtctgaggctttcatgttactctgtgatcttctgatgattttcagccaccaattaatgaca

SEQ ID NO: 56016 - DNA, 100 bp, Homo sapiens
ctgttggctcagatacactctctgatttggggatctctagcctacaggatggcttggccttgcacataaggtcaaaatgcagatcttcgtgaaaaccctt

SEQ ID NO: 56017 - DNA, 100 bp, Homo sapiens
cagaaatctgttctacaggaagatgctgagaaactgcggaaagaattgcatgaagaatatcaacttgcaaggccttctgatgcaaacagaaaggaaatgt

SEQ ID NO: 56018 - DNA, 100 bp, Homo sapiens
cctctgttgtagctgttcctctggcaatacaaactttctgctttcatatcctagaaggaaaacatcaccatggctacagaaattggttctcctcctcgtt

SEQ ID NO: 56019 - DNA, 100 bp, Homo sapiens
ggagttgctgcccttccggagtccgccccgtgaggagaatggtgaccagtatgcactgaagatgaggtttgtggaccatgtgtttgatgaacaagtgata

SEQ ID NO: 56020 - DNA, 102 bp, Homo sapiens
ccaaggtcaacaaggacaacaatgagatcgtggacaagatcatgggcaaaggacagatccaggtctggaagaggtcgggggcctggttctacaaagggctcc

SEQ ID NO: 56021 - DNA, 100 bp, Homo sapiens
gcccaggcggcggagcctccgggacggcgagcggcgggcggcggaggaggagacggcaggtcgggttctggctccttggcagcaatggctgtatttgaag

SEQ ID NO: 56022 - DNA, 75 bp, Homo sapiens
tgggaaccaggctgctatcatggaattagatgacactttaaaatattccttgctggagtgcagtggtgtgatctc

SEQ ID NO: 56023 - DNA, 60 bp, Homo sapiens
caaacttggattttttccagtctgatccttttgttggcaaggtctgcggggtttccgaga

SEQ ID NO: 56024 - DNA, 75 bp, Homo sapiens
tacttgtcctgctcctgctgctcgaggacgctggagcccagcaagatcagaacactgaggctcagagaagttaac

SEQ ID NO: 56025 - DNA, 98 bp, Homo sapiens
ccgaaacacaaagtaaatttcgagctaagggttacagtcctttaaatctggaaatttcaaggtgcgtatagcagcaaaattcatcattcatgcccctc

SEQ ID NO: 56026 - DNA, 87 bp, Homo sapiens
gccaggaccacctggaagcctagaaatgtgttttccaagcagtgaagcacttgccgtgttgaactgaatgcactactggagaatgtt

SEQ ID NO: 56027 - DNA, 83 bp, Homo sapiens
aagctagactcagaccctctctgaaagtagaggctccaggaacagtaactataactacccaatattgcagccatggagtccat

SEQ ID NO: 56028 - DNA, 75 bp, Homo sapiens
acagacctcgccattgagtatgagcaattctgacgacaatatgttgaaaaacattgaactgtttgataagctgtc

SEQ ID NO: 56029 - DNA, 75 bp, Homo sapiens
aaaaccgacaaccttcccagaaagtccaagctcgtgggaaatccctaagtcagccaacccctcctcccatgccaa

SEQ ID NO: 56030 - DNA, 75 bp, Homo sapiens
gaaagcgcaaggaatgtcctgaccaacttggacccagattttctctgtgggcagttctttttgttttgggaagac

SEQ ID NO: 56031 - DNA, 100 bp, Homo sapiens
ggctgcataatgggacgaaagcctttctctttcaagaaatggcgaaaagtcttttgaagacagcctctctgtctggaaggacaaaattgctacatcaaac

SEQ ID NO: 56032 - DNA, 100 bp, Homo sapiens
ctgcttctgttggctcagatacactctctgatttggggatctctagcctacaggatggcttggccttgcacataaggattgatctgaagttaaacaaaaa

SEQ ID NO: 56033 - DNA, 75 bp, Homo sapiens
actccaggaaagctgctcccatcacaatccccctgcctgacagccacagtagagacgggggttcaccatgttagc

SEQ ID NO: 56034 - DNA, 75 bp, Homo sapiens
gcgcaggcctggtgcaaacagactcaagaggctcggagaaccagcttggtaagactttgaccccgacgcaggctt

SEQ ID NO: 56035 - DNA, 75 bp, Homo sapiens
cctggaggaggtggagttctgtgtggaagctgctgatgcaaggaatcccctgggctcccgtccactccactgctg

SEQ ID NO: 56036 - DNA, 97 bp, Homo sapiens
gtactattctcggcgcggcgtgatcaccgaccagaactcggacggctactggtgagcacctgcggatctgtccccagggctacacctgctgcaccag

SEQ ID NO: 56037 - DNA, 75 bp, Homo sapiens
aggagccaggaattcccagtttgacaccacaggctgagctccctgaaccagctttgacagatccaaatgcttctg

SEQ ID NO: 56038 - DNA, 73 bp, Homo sapiens
acagttcgaggggccaaggcagaagaaatcttggagaagggtctaaaggtgctggctgctgtctacaaggctc

SEQ ID NO: 56039 - DNA, 83 bp, Homo sapiens
tgtctgactctgactctcggactgagaaacgcaagattcatgatgttgctatcaaaagttgagaaattgtcagaagaaatcat

SEQ ID NO: 56040 - DNA, 101 bp, Homo sapiens
gcactccaaagacatcatgcaaaccctgtctagatattacagcaatgctttttcagatgcacacttgactgaaggaggacagggaatctgaagactccgga

SEQ ID NO: 56041 - DNA, 108 bp, Homo sapiens
ctcgagagctcgccccgaacgggggtcttcctcctccgccgttgacagctggctgtcccaactccttgattaaagagctccatcacttcaggattctgggagaagagc

SEQ ID NO: 56042 - DNA, 83 bp, Homo sapiens
cgacaagccgctggcagccgcggatctcaccgccgctcaggatctctgttgaggagctggcgcggaatctggtcatcaaggtc

SEQ ID NO: 56043 - DNA, 130 bp, Homo sapiens
tgagctcaccgcccagcccaaaccaggagattgcgagggagcgatgcggtgcagcgcgaaaagttgccagacggccagcattgccactgccagtgcatccgcccaggccaggaatcatgtggacgcccag

SEQ ID NO: 56044 - DNA, 75 bp, Homo sapiens
tccctctctccacggtaagggggaggatttccatgtcagctagaaaagttcatccagcctgctaggatggcttgg

SEQ ID NO: 56045 - DNA, 90 bp, Homo sapiens
gggacattcattgcggaataacatcggaggagaagccgcggcccatggagcccgccggcccggcccccggccgcctcgggccgctgctct

SEQ ID NO: 56046 - DNA, 100 bp, Homo sapiens
agaccgaattcagaaggatatcgacgtcgtgatccagaagtccagagctgaggactgcctgtttgcaggtgtgatcccctgggcccgtttgttgtcgggg

SEQ ID NO: 56047 - DNA, 51 bp, Homo sapiens
ctggattgggaaagaccatggcaggctttcttcgagagtcacccagctcct

SEQ ID NO: 56048 - DNA, 100 bp, Homo sapiens
aagaaaagaagaaaaagaaatctgcactggatgaaatcatggagtatacaccaacaagtattccagaagtccaacaagagaatataatcaatcctcaaga

SEQ ID NO: 56049 - DNA, 82 bp, Homo sapiens
tcgaggctataaaagcacagttttaagagagctggagaatgctggaggagaccttaaggatggccaccaccactatgaagga

SEQ ID NO: 56050 - DNA, 100 bp, Homo sapiens
cttgccctggtcttgctcggccgatgaagtgcagaggtttttttctgggacaggtgcctggtgctgctcttcctaaccctctcaacatgctggggcctca

SEQ ID NO: 56051 - DNA, 100 bp, Homo sapiens
gctggagccaagaattcataagatagccatcctgggtcttggcagcagcattgggactcctccagaagggccgcgatgggcctcttggaacattggtgtg

SEQ ID NO: 56052 - DNA, 74 bp, Homo sapiens
cattagcagatatactattgtactatggacttcatcgctttatagtcaaagttggaaattgtaatactcctaaa

SEQ ID NO: 56053 - DNA, 100 bp, Homo sapiens
ctatgtttacgcacagctgcctgtcaccccagatgtcctcatcatcccgtcagagctgaggtacttcgtgaaggtaatagcctgcagctggtgttttgag

SEQ ID NO: 56054 - DNA, 75 bp, Homo sapiens
ccacccagagctcttggacacaaaccggtatctttacttccatttgcagctttcaccaacaatcaccagtggttt

SEQ ID NO: 56055 - DNA, 100 bp, Homo sapiens
cctactgctctttgccctgatccagtggctggcagtgccagatgaggaagaagtgagacggtttaagcggaagcatcttactgccattgactgccagcat

SEQ ID NO: 56056 - DNA, 100 bp, Homo sapiens
gactgaatcaaggtccagagaaggtggaggaatcctgatactgagcgatgccatggacaatattaccaggcagaaccaattctacgatacccaagtcatc

SEQ ID NO: 56057 - DNA, 122 bp, Homo sapiens
ctgcgatagctgcaaggaaggtggagatctcctgtgctgcgaccactgcccggctgccttccacctccagtgctgtgtgagccactgccccatgttgtgttgatgccaatctgccatgctag

SEQ ID NO: 56058 - DNA, 103 bp, Homo sapiens
ggtgaatgtgtcactcccccgcagcttactgagattatgtttgagaccttcaacaccccggccatgtacgtggccatccaggccgtgctgtccctctacgcct

SEQ ID NO: 56059 - DNA, 98 bp, Homo sapiens
ctttaccctcttcttcttctgcaacacggccactgtgtacaagatatgtgcctggatgcagctcacctccgggaggttcccctgaaggatgctaagga

SEQ ID NO: 56060 - DNA, 75 bp, Homo sapiens
ctcccactttgacttgcacgaggagatgctgtgggtggggagccacgggcgtcagcttttctttcgcaaaaagct

SEQ ID NO: 56061 - DNA, 78 bp, Homo sapiens
caaaaaacctggtgaaaaaggattttttccatggaaaaagtggaggcagatctaactagatccaaatctcttcgtgag

SEQ ID NO: 56062 - DNA, 75 bp, Homo sapiens
cctcggattgaggatggtaacaattttggagtggctgtccaggagaagaaggaagttgtggaagaggcagaaaat

SEQ ID NO: 56063 - DNA, 110 bp, Homo sapiens
tgatcacctgtctggagcaaggaaaagatccctggaatatgaagagacacagtatggtagccacacccccaggtgttggagcgggccggagagaagtagagtgggctgcg

SEQ ID NO: 56064 - DNA, 100 bp, Homo sapiens
gcaggcctgcaggatttggtttcagcatgtccttctctgaatgatgaatacttttactactgtgacaacattaacgatatttggagttcttacaacatgg

SEQ ID NO: 56065 - DNA, 75 bp, Homo sapiens
gcaaatggtgcaaggtggaaatatatgacgctgcttaatctggaatctatgggcaaaagttcagatggaaagtcg

SEQ ID NO: 56066 - DNA, 102 bp, Homo sapiens
ggaatgtaaaatgagaataactgcagaagaaatgagtgcactaatagaagaacgggatgctgccttgtctaagccgcctgtcttggttagatggctctggat

SEQ ID NO: 56067 - DNA, 115 bp, Homo sapiens
ggaaatcgacttcggtttcagttggagttggaatttgtgcaatgtttagccaacccaaattaccttaattagagacaagagagacacctccaacttcgacaaagagttcaccaga

SEQ ID NO: 56068 - DNA, 50 bp, Homo sapiens
ccctgaagagggaagacacgcggaaacagcttccctattccctgagacac

SEQ ID NO: 56069 - DNA, 100 bp, Homo sapiens
caccgtgcgccgcgccagctgcccgccgcgcggcttgcttccggcgtcatggctcaaagggccttcccgaatccttatgctgattataacaaatccctgg

SEQ ID NO: 56070 - DNA, 75 bp, Homo sapiens
gccgcggatctcaccgccgctcaggaatcttatggcaagggccttatatgacaatgtcccagagtgtgccgagga

SEQ ID NO: 56071 - DNA, 100 bp, Homo sapiens
tgcctctccctctgcctctgcctctgcctggccgcggctctgggaagtgcgcagtccggagttgataccaagttgaaattcactcttgagccatctttag

SEQ ID NO: 56072 - DNA, 100 bp, Homo sapiens
ctcaaccctctgtgtcctggggccatccgagccaacggagaggtgccccagctgttcagtggtgtttgggggtgtgaactccatcaagtcccacatccag

SEQ ID NO: 56073 - DNA, 96 bp, Homo sapiens
gtggaagacggaggggacactgcccgagcacccagtcagcttgaagagtttcaaatggaccctaccactgagaaatcaagatggcagtctactatg

SEQ ID NO: 56074 - DNA, 100 bp, Homo sapiens
cccggtacctctgcccgcggtcctcgctctcgggcggggcggcggcgacgcggacctgcggactagcgaacccggagaaacagaagcctatcagttgctg

SEQ ID NO: 56075 - DNA, 50 bp, Homo sapiens
ctcttcaaaaatgtcagagaactctgggctcaaaatgcagagaactcaaa

SEQ ID NO: 56076 - DNA, 83 bp, Homo sapiens
cccggctccccggacgcctcgaccccaagggcctgccagggacccggcgcgtcctcggtttctcgcctgtcatcatcgacaga

SEQ ID NO: 56077 - DNA, 101 bp, Homo sapiens
attacctgtctggagcaaggaaaagagccctggaatatgaagagacatgagatggtagctaaacatttagaagcatcaagtgtacctgatttgtgaaccta

SEQ ID NO: 56078 - DNA, 100 bp, Homo sapiens
acaaacgcagcatttatatacagtccattgaggaggaaggaagagacttgagctgttgtgtagcttctcttgttcaagtgatgctggatccctattttag

SEQ ID NO: 56079 - DNA, 98 bp, Homo sapiens
cccccattgctgagccagcggagctgcttgcttcccacatcacaaactttgaggttgatcaatctgtgtttgaaattcccgaatcttactatgttcaa

SEQ ID NO: 56080 - DNA, 101 bp, Homo sapiens
gtgttctcagaagacgttctgtatttcagcttcctgctatgtgccctctttgttcctaaaggccgaatacatcaagcaatggtaacatctttaaatgaaga

SEQ ID NO: 56081 - DNA, 98 bp, Homo sapiens
cctggatttcctattggctgttacattacagataaaggccatgcaaaagatgcctgtgttattagtgaaaactacatctcagacccaactatcttatg

SEQ ID NO: 56082 - DNA, 100 bp, Homo sapiens
tcaggatagtatcttggccagggaactcaaacagcagatgcaggtaagttctcttctacgctgtatgagactggtggctgtgatatgtcacttgtgaatt

SEQ ID NO: 56083 - DNA, 100 bp, Homo sapiens
gcagctgttgttggattttttgctgttctcttttttttgtggagaagttttagatcggtattttgaccaacgtgatttagctgatgagccatcttgatgt

SEQ ID NO: 56084 - DNA, 100 bp, Homo sapiens
tgtacagcagaactgcatgatcaggttgcagatattttattccaaactgcccaaaatgcaggcatcagttttgacaccgtgtgtggagtgccttatacag

SEQ ID NO: 56085 - DNA, 106 bp, Homo sapiens
gatttgttaaggattccaagtaactcttatttggtggaaccgtcccaaaatgtcccttgctcagaagaaggatcgggtagctcaaaagaaggcaagcttcctcaga

SEQ ID NO: 56086 - DNA, 112 bp, Homo sapiens
ggctactcttgatcctctccggctgcttggtctacggcacaggtacttccgaagatcccagtttacagcgatcagtttcggttgcaacgggactgaacatgatgaagaagca

SEQ ID NO: 56087 - DNA, 74 bp, Homo sapiens
tgctgacgtcttcctggaggcattggctcggctcaactatctgctcagagatcagttacagttgtggattcgag

SEQ ID NO: 56088 - DNA, 73 bp, Homo sapiens
cctgggctccccagtgccacccgaagggcctgaggaggccatctgcaggtcaaaatgcagatcttcgtgaaaa

SEQ ID NO: 56089 - DNA, 50 bp, Homo sapiens
cagacgagaccaaagccaactggatgagagtgtatccagaagctactgtc

SEQ ID NO: 56090 - DNA, 82 bp, Homo sapiens
ctgaggcacccggacctcgtcaggccgctgcagatgaccattccagattacaacagcagtgaattgaaaacagcctgcagga

SEQ ID NO: 56091 - DNA, 100 bp, Homo sapiens
ttatacagcttacctctgttggggtgtctgtcttcacactcacggcgctctcggcagacaggtgtcatggagaaactccagctgggcccagagattctgc

SEQ ID NO: 56092 - DNA, 100 bp, Homo sapiens
cgccgccagggtctgcagggcctgggccgccgctgctacctgcagcgccgtgtggcacgacacaaaaatcagattgactggggcgactttggggtagagg

SEQ ID NO: 56093 - DNA, 100 bp, Homo sapiens
ctttactctggggtcccggctgccctgtggcctcgctcctcggagggactattggaaatgcacttcatgcaatgaaatgaatcccccccttccatcacat

SEQ ID NO: 56094 - DNA, 75 bp, Homo sapiens
cagtacaaaaattcttcaagaaatctaaggtacccagactcatggtatcgtgatatcacatccaacaagaagttc

SEQ ID NO: 56095 - DNA, 96 bp, Homo sapiens
ctatttcctctgctatatcctccctcagaccgccccgcaagtactcaggatcggtttttggcgcattctcacagacttagatgaaactgtgatggc

SEQ ID NO: 56096 - DNA, 100 bp, Homo sapiens
tatccgaaggttcaattatgtggtcaaagtctggctctgggagaggagtggacagcagctggttgagatacatccccatctggagacaggactgccactg

SEQ ID NO: 56097 - DNA, 100 bp, Homo sapiens
ggggagatgctcttcggcctagtgcgccagggcctcaagtgcgatgtcgactgaagaaagaaggtgacaagcagttataagttatttatttgttaacgct

SEQ ID NO: 56098 - DNA, 74 bp, Homo sapiens
caaaaatgaagctctctttgacagtggtctccacccagctgttaaaaaaggcctaaagaatgtatttgacgaag

SEQ ID NO: 56099 - DNA, 100 bp, Homo sapiens
ctgccaccattgctgaacggagaggtagccatgatgccccacttggtgaatggagatgcagctcagcaggcactaggtgagctctgtgaaaccaagtttg

SEQ ID NO: 56100 - DNA, 83 bp, Homo sapiens
ccagcagggcgttggctatgtgcccatcacaggttcgagaacttgtcttggacaattgcaaatcaaatgatggaaaaattgag

SEQ ID NO: 56101 - DNA, 87 bp, Homo sapiens
tggacacgtgtgcatcacggacacaaacctgtattttcagcccctcaacggctacccgactttgagaatcactacaagaaaaactcc

SEQ ID NO: 56102 - DNA, 51 bp, Homo sapiens
accgcatgatggtacccaaagtcaggtcctaaacatgcagctttcggatgg

SEQ ID NO: 56103 - DNA, 75 bp, Homo sapiens
aagcacggggtgaaactgaccacagtgctcaccacccaccaccactggttggctcaaaaacagaagttgctgagt

SEQ ID NO: 56104 - DNA, 82 bp, Homo sapiens
gcttggcaaaatcgagcgggccattgttacagaatgtctgaaggggacagtgtgggagaatccgtccatgggaaaccttcgg

SEQ ID NO: 56105 - DNA, 90 bp, Homo sapiens
caaattgttaaagatgccatattgcacctggacttgatatgaaagtaaccatcagaaaatcaacagagatcttaaacttgcctaccacag

SEQ ID NO: 56106 - DNA, 82 bp, Homo sapiens
ggctgcggcaacttcggggagctccgcctaggtaactaggatttctacctcaaccgcgagacctatgcaaggacggtgtgga

SEQ ID NO: 56107 - DNA, 74 bp, Homo sapiens
cggaggccaccacacacacccagctaccaggacgactgggtttggattcagaagaggattattatacaccacaa

SEQ ID NO: 56108 - DNA, 100 bp, Homo sapiens
ggctcagaatgaacgctgcctacacatgttcctgcaagaggaggcaattgacaggaactacgtcccggggaaggttttacctcacaaaaactactacaag

SEQ ID NO: 56109 - DNA, 75 bp, Homo sapiens
ggcctcttgcgctacgccctggatgagatgggttctcatgtatcagccatcttctgtaagggtgcccagtgtgac

SEQ ID NO: 56110 - DNA, 82 bp, Homo sapiens
attgatcaagcagatatgccagaattttgattcagctaaagttccatcagatgagtattgccctgcttgtagagagaaggga

SEQ ID NO: 56111 - DNA, 90 bp, Homo sapiens
agaaggacctggaggaagcccatcgagagaagagcaaaggagactgcaccatccgtaacactctggacctggaggaaactggcgaggctg

SEQ ID NO: 56112 - DNA, 100 bp, Homo sapiens
cagacctccttcaagtggctgataacagaccaagatcactccatggatgaaatgacagctgtggtgaaaattgaaaaaggagttggtggcaataatgggg

SEQ ID NO: 56113 - DNA, 80 bp, Homo sapiens
ctcagggcgcgatttaagaagacagaggtgaaaggtgtagcagtcactcggcctacacccacagcatcgaccttgtgaac

SEQ ID NO: 56114 - DNA, 141 bp, Homo sapiens
tgatggatatgaatggacatattcggttagcagattttggttcttgtctgaagctgatggaagatggaacgcttcacgaggctgacattgtggtcctaggctcacctaagccagaagagattccccttacttggatacaac

SEQ ID NO: 56115 - DNA, 100 bp, Homo sapiens
cactctctgaggaagcccaactcctatgagctcctctctggcagatatgaatgccacaatacgaaggattgaccagttaaccaacatcttagcccccatg

SEQ ID NO: 56116 - DNA, 89 bp, Homo sapiens
ctcgattggttctactgtgggtctggactgatctccatgtcctgttgtggggcttttacagcctttggccctgagtattccctctttgt

SEQ ID NO: 56117 - DNA, 82 bp, Homo sapiens
ccatgcttcctgtacggcctgcagaactgaaaggatccaggccctggaggcggagctgcaggctgtcagtcatagcaagacg

SEQ ID NO: 56118 - DNA, 100 bp, Homo sapiens
tctgtttacgaatgtttgggcgcgaattactctaagcgcggctctcagaagggtgcaagaagaatcagtgaggtctgttaccatctgaagggatagttca

SEQ ID NO: 56119 - DNA, 85 bp, Homo sapiens
ggccggcagtgtatctctgcgtatgaagcaggtggaagaactgaaactggaggcgaccagtgcccagaatatcgagttcctacag

SEQ ID NO: 56120 - DNA, 74 bp, Homo sapiens
cggatttctgctatgatgacaggccaaagatgaagaggaagcctttctggattggagtgatgatgatgatgatg

SEQ ID NO: 56121 - DNA, 98 bp, Homo sapiens
gcgcatgcgcctctttcatcttcccatcatggccgccgcctgtgcgcctctgctgagtcgatggccaggccatgttatgggatctcaacgaaggcaaa

SEQ ID NO: 56122 - DNA, 76 bp, Homo sapiens
gggagctcgtaaggtccctcaaagcgggaaatgcgtcaaaggtcttctctgttggttgaaatgtctatgattttat

SEQ ID NO: 56123 - DNA, 100 bp, Homo sapiens
aaactataaagaaggacagtcaactcaaatttatttaaaaaaaattgctgttcatgcaaaagatacagatattgtggatgaagccatctattacttcaag

SEQ ID NO: 56124 - DNA, 82 bp, Homo sapiens
cggccatggtgttgctgctgtactccttctccgaaatgcactcggtgatggaaagagagccactattctgaagaacacttgg

SEQ ID NO: 56125 - DNA, 74 bp, Homo sapiens
ttctgtccctgctcagtcggccaagaagccctgcccaggtggaagctggaacgcagtcccaagtgtcaatggca

SEQ ID NO: 56126 - DNA, 75 bp, Homo sapiens
ggccgcctagagtggttcagccacaaggaggcttttggaaatgccaagacagcccacaacaacaactccagccgg

SEQ ID NO: 56127 - DNA, 86 bp, Homo sapiens
ctgggcctccatcagagagccctggcatgctgactaagctccagacgctgaccggaaaggagattgagattgacattgaacctaca

SEQ ID NO: 56128 - DNA, 98 bp, Homo sapiens
tccctgctgctaatggagcaatacgtttccattgtgatcccaccttctgggcaaagaatgtagtcaatttagaattggcagagggggtcgatttggga

SEQ ID NO: 56129 - DNA, 96 bp, Homo sapiens
aaacatcaaagaggtctagcaaaggtcccgcaggctcccgatggcgagattacggcgccctggccatcatcatggcaggcattgcatttggctttc

SEQ ID NO: 56130 - DNA, 75 bp, Homo sapiens
cttcctgcattgctttgaagaagattggacaagtccttatgtcgtcagaagatcgagaagctcaggaggatgaat

SEQ ID NO: 56131 - DNA, 100 bp, Homo sapiens
cagtacaaaggcatggggctgtccatgggcaccatgatctgtggctgggataagagaggccctgattcaaggcctcttccagatgtagccctgactggga

SEQ ID NO: 56132 - DNA, 97 bp, Homo sapiens
cgagaactggaaggctatgataaggcatttgcaagtaaaatcactggcatgttgttggaattatccccagctcagctgcttctccttctagcaagtg

SEQ ID NO: 56133 - DNA, 83 bp, Homo sapiens
gccgaagaagcatcgttaaagtctctcttcaccctgccgtcatgtctaagtcagaggataagccagagacatgggaaaaccaa

SEQ ID NO: 56134 - DNA, 77 bp, Homo sapiens
caagagtctgtacatagagctacttcctggaactgaaattaccattcacttttttaagtggacatattcatgaattg

SEQ ID NO: 56135 - DNA, 112 bp, Homo sapiens
atcctgccgtccttctccactttcgccagcccgtgccgcgagcgcggcctgcaggaggagtacgagagggcctccaaagtggaccagtttgtgacgcgcttcctgctgcggg

SEQ ID NO: 56136 - DNA, 74 bp, Homo sapiens
ccagagtttgtagcctattggaggaaaacacaccaagatattgtactccaagatacttggattacgaagatttg

SEQ ID NO: 56137 - DNA, 88 bp, Homo sapiens
ctcaactccaccttctacctccagcctgccgacgtctacgggcacctggtagtggtagcagagaattttgatgaaatagtgaataatg

SEQ ID NO: 56138 - DNA, 100 bp, Homo sapiens
ctcgaccactgaatggaagaaaaggacttttaaccaccattttgtgacttacagaaaggcagggcaagaatcctttcgttccatcacaaggtcgtattac

SEQ ID NO: 56139 - DNA, 100 bp, Homo sapiens
cggtgatcggggaagcatggggatccgggagaagcacccacaaaactagcatcctcctggaggagctcggaaatggtggagtcaatgaagaaagtagcag

SEQ ID NO: 56140 - DNA, 139 bp, Homo sapiens
accgatcccaagttccagctagagaaggtgggcggcagcgccagcccggcgccccctcccagctcccagcgaatgtgacagtgatgataacatgggtgccaaaaatacttcaataggagaagaatttatatccacagaa

SEQ ID NO: 56141 - DNA, 82 bp, Homo sapiens
gaaactcacatgagacaaatgcgctcagcttcaattggtgttggagagcacaatggctgaacaagtccttcctcaggctttg

SEQ ID NO: 56142 - DNA, 50 bp, Homo sapiens
attgcagaacagcctcagcctgagtcttttagtcctgctatacagctgca

SEQ ID NO: 56143 - DNA, 87 bp, Homo sapiens
tggtgggccgcgtcgaagacatggaccagggctacggagttccagggtctccctccactgctgtagtaacccgggtccggggcctcg

SEQ ID NO: 56144 - DNA, 75 bp, Homo sapiens
ggggagggggctgtgccgggcggagagaactcagcgaggattctgaggtggtattaaagataatcaaacattatc

SEQ ID NO: 56145 - DNA, 100 bp, Homo sapiens
ggcggagcaacgttcgcgtcatcacggacgagaactggagagaactgctggaaggagactggatgatagaattgattcaagccaaaactcgagaatttag

SEQ ID NO: 56146 - DNA, 96 bp, Homo sapiens
aaatttggaatctgccttctactccatcgtgggactcagcagccttggtgctcaggtgccagatgcaaaggtatgatctcgtgaaatcttgagaga

SEQ ID NO: 56147 - DNA, 98 bp, Homo sapiens
gaaatctcagactgtgcttcttgtgcaagtaatcagtctttgacaagtgatgagaagctgtcggagcttcccaaggcttgcattgatgacaatgttga

SEQ ID NO: 56148 - DNA, 101 bp, Homo sapiens
catttcctttcatttcccccgtcttctcagtgagatttccttgcaggttcccagtgcccccgacaagcccctgctggtgtctccatctcctgccaagcatc

SEQ ID NO: 56149 - DNA, 87 bp, Homo sapiens
acagcaactctaagactcacacagtgctccagacccatgaggaaacattgtggatatcaagcctgccaatatggaagagctaacaga

SEQ ID NO: 56150 - DNA, 100 bp, Homo sapiens
caaagtccaactgaagaaatatgtaggagctgtccagatgctgaaaagagaaggtcaaacagctgaaggcggtgcgtctttctacgtgaataggattttg

SEQ ID NO: 56151 - DNA, 82 bp, Homo sapiens
cggtgctgtggtgcagagctagttcctctccagctcagccgcgtagttccagttcctagcagatttaatagacgagtatcag

SEQ ID NO: 56152 - DNA, 100 bp, Homo sapiens
cctgtgcatggcacggctcaagacagtcctgaaataccctgagaggatcaacccagagctgaaccagaagggctacaatgtcaagtccgacgtctggagc

SEQ ID NO: 56153 - DNA, 96 bp, Homo sapiens
cttaacctgggaagtggaaccggatatttaagtacaatggtgggcttaattttagaggaacgtgaggaaaaggggcctccacagtccccacagacc

SEQ ID NO: 56154 - DNA, 100 bp, Homo sapiens
agcagacgaggcctgtgcccctgatactgtggtgcttcatgccccacctccaaccaagatcaaacgggagctgcacagcccctcctctgagctgtcgtct

SEQ ID NO: 56155 - DNA, 80 bp, Homo sapiens
ctatctgtgcacaagtcattcctttcctgtcccaagaggctcatgcacaattagttcgagaagttgatgtggagaaggtg

SEQ ID NO: 56156 - DNA, 100 bp, Homo sapiens
gtcgctgagcggccaggccgtgcgccggcctttggtcgcctccgtgggcctcaatgtaatctcaggggcgatataatcaatgaggtggtcctaaagttgc

SEQ ID NO: 56157 - DNA, 87 bp, Homo sapiens
aggacctgggcagagactccaagacaagctcagccgaggtcaccatccaggagcatgtgcccacctggcttcagaacactcatgtct

SEQ ID NO: 56158 - DNA, 80 bp, Homo sapiens
gaactgaaacatgaaaacatcgtggccctgtacgacttccagaaaccaaggtgtatgttggtaacctgggaactggcgct

SEQ ID NO: 56159 - DNA, 48 bp, Homo sapiens
ggcccactgagagccagcagggctagtgtcggagatgtatgcagtgtg

SEQ ID NO: 56160 - DNA, 80 bp, Homo sapiens
cggcgtgttcatgcccccgggctctacgaactcgacggggaccccaagaggaaggaattcctggatgacttgttcagctt

SEQ ID NO: 56161 - DNA, 100 bp, Homo sapiens
cttatttttcctaatactgggactgacttacctaggaatgagagggacaggagtatctgaggatggagaactcagcatataacaagaggattgcctgatc

SEQ ID NO: 56162 - DNA, 100 bp, Homo sapiens
cgcgatgggggcgcaggaccggccgcagtgccacttcgacatcgagatcaaccgggagccgggaccaggaagaacaagcttactttgcagtgtttgatgg

SEQ ID NO: 56163 - DNA, 75 bp, Homo sapiens
aagctggtggaagctatcaggaccaattacaatgacagatacgatgagtgcttaattcaccattatgagaaatgc

SEQ ID NO: 56164 - DNA, 83 bp, Homo sapiens
ctggatgctgcagacactgaacgaggagccagtgatatgggtaagtgtcaccttaccaaaggcaaacaggctctagagattcg

SEQ ID NO: 56165 - DNA, 90 bp, Homo sapiens
atcgccgcctcagccgccgccgccgccgttttcgcctgcagctgctcaccggcccaccgtggtgcacgcaaaccacttcctggccatgcg

SEQ ID NO: 56166 - DNA, 100 bp, Homo sapiens
tggaattacactgtgatacgactgactgagacaaggagaaggccttaggatctactgggggagtccggaggagcagtctcttctgtcccgctggaaccca

SEQ ID NO: 56167 - DNA, 88 bp, Homo sapiens
agggactccaaaccccagtactcctctgcccaacactgtacctcagttcattgccagagagccatggaaatcctcattgacgattcaa

SEQ ID NO: 56168 - DNA, 95 bp, Homo sapiens
aatccccactcctccaagaaccaacccccaaattggctgggacaggcaagtgtcaattgaggagggagagaggaaagccaaagagctgaatgtta

SEQ ID NO: 56169 - DNA, 100 bp, Homo sapiens
cgactgctgcctggtctgcaaagaagtcctttcaagtctctaggactggactcttcctaagcaagtccggtatgtaggctgtgggtgagcgtggaggatg

SEQ ID NO: 56170 - DNA, 82 bp, Homo sapiens
cggtgtctgagcatttcctcctgacggctgtacttgagcagtcacctggcacaggatgttccagcataagaagataccttct

SEQ ID NO: 56171 - DNA, 100 bp, Homo sapiens
ataaggtgtcggtggagttctgctcggcgtgcgcccggaaggcgtcgtcttctcttaaaatatgggcactctggttttttaaaaatgataaaagcaaaac

SEQ ID NO: 56172 - DNA, 74 bp, Homo sapiens
aagtaggggtgcacctcagcactatcccaagactgctggcaacagatgaacaagagaactgggcaacccatgat

SEQ ID NO: 56173 - DNA, 73 bp, Homo sapiens
gaagctgcagccgcacctggccaaggatgagaacgggattcccagtagtccccagaaagtagctctgaccctg

SEQ ID NO: 56174 - DNA, 78 bp, Homo sapiens
gatgactgattctgtcacttgtttgtattgcaattccttttccaagcaaagggtaaaggatttagaggataaacttca

SEQ ID NO: 56175 - DNA, 90 bp, Homo sapiens
gtatggtggtggcaggggccatcgctgccgtctttcacacactgataggtgaactgcgccaggccactgtggccatgatgaacaggaagg

SEQ ID NO: 56176 - DNA, 100 bp, Homo sapiens
ggcagccgtacgccactgcagaggccctttcttcaagctttctggtaaacttacagtaccgccgtctctaccgaagcatgaactcccagtatctgaagct

SEQ ID NO: 56177 - DNA, 100 bp, Homo sapiens
gaggtcgctgctgcacccaaactttgcaaggaattcggtccagaggattacggcgaagagttaacttaccaagactggttacacctggagctggaaattc

SEQ ID NO: 56178 - DNA, 78 bp, Homo sapiens
ctcctcaaactgactttgcagccacggagaggacgacatagacagcctaaacccagttctcagggacaacccgcagct

SEQ ID NO: 56179 - DNA, 100 bp, Homo sapiens
ctacgagtggatggtcaagagcgtgccctacttcaaggataagggtgacagcaacagctcggcgggctggaaggaatactcccccagttgcaagaggcgc

SEQ ID NO: 56180 - DNA, 75 bp, Homo sapiens
tttgtatttggtgatttcaacttccggctggattccaagtccgtcgtggaggcgtccgacctccgatcatgaacg

SEQ ID NO: 56181 - DNA, 50 bp, Homo sapiens
gcgaatatcgtcatcgttagaaggatctcaaagatttcatgagacaagct

SEQ ID NO: 56182 - DNA, 51 bp, Homo sapiens
cacccagaatctttaggtaaatgaggcccagctgtggtccctcaccagtat

SEQ ID NO: 56183 - DNA, 100 bp, Homo sapiens
cgcttcccatcatcgggaacctcttccagttggaattgaagaatattcccaagtccttcacccgggtttctgctttgggacaaccatacatctaattcct

SEQ ID NO: 56184 - DNA, 98 bp, Homo sapiens
gaatccaaagaaaacaaaatggtggtatcatggtttgaagatgccgcatttggattggatgaattccaaattctgcttgcttgctttttaatattgat

SEQ ID NO: 56185 - DNA, 83 bp, Homo sapiens
gccacccgcccgcccaaggtctctcgcgggcgggagaacggaaaactcccaacttcctgacaaatttacatgtattggagacc

SEQ ID NO: 56186 - DNA, 75 bp, Homo sapiens
cctagctgttctcaaggcggattaattagcccaagaaacattatattcatgttgttcggaatcctataattgaaa

SEQ ID NO: 56187 - DNA, 90 bp, Homo sapiens
cggataagtgtccccgtagagtcaaccgctcttgaggctagtgcgcctctaggcaagatgtccctgcccatcgggatataccgccgggca

SEQ ID NO: 56188 - DNA, 83 bp, Homo sapiens
ggccgcacccgccggccccatgaggagggacgtgaacggagtgaccaagagcaggtttgagggaagatcagttttcctgccat

SEQ ID NO: 56189 - DNA, 82 bp, Homo sapiens
ggaggaaaacaacttcgagggcagaattgaggacgagacgcaggtgtcacgggccactcagggtgaacaggacaattacgag

SEQ ID NO: 56190 - DNA, 75 bp, Homo sapiens
gccggaccccagcacacagaagccgagacggtagttgtgtcaactaacatagcagagacgtctttgacaatagat

SEQ ID NO: 56191 - DNA, 82 bp, Homo sapiens
tgggatggtttcgagatcatatgcaggttttcagagaaagatgctgatgaggtgaaaggaatttttgtagataccaacttat

SEQ ID NO: 56192 - DNA, 75 bp, Homo sapiens
agtggcacacagtctactatcaccgacagttacatgggaattggtctttctgctcaaggtgtgaacatgaataga

SEQ ID NO: 56193 - DNA, 74 bp, Homo sapiens
aggaagcccggtttgcccagagcgccccaggatttcaaatatgcgtgcattagagaatgattttttcaattctc

SEQ ID NO: 56194 - DNA, 83 bp, Homo sapiens
gtaccgggtggcccgccacttcaccaaggccaagttgaccatccctatcctctatgtcaaggcccgcaccgccgccatgatgt

SEQ ID NO: 56195 - DNA, 100 bp, Homo sapiens
ctggtcctcatgctgccgaggctgttgctgttgatctgtgaaatgggcaagttcatgaaacctgggaaggtggtgcttgtcctggctggacgctactccg

SEQ ID NO: 56196 - DNA, 82 bp, Homo sapiens
gttgttcagtcagagcgagaacattccagagacccctttgctgatgcaagtaagggtgatgacctgcttcctgctggcactg

SEQ ID NO: 56197 - DNA, 74 bp, Homo sapiens
ccgaggtcttcgggaattccagcgaggatttttgcactgagtggccagccgcactggacagtgacgagaaatgt

SEQ ID NO: 56198 - DNA, 100 bp, Homo sapiens
ctgacgacgggcgcccccgagccgccgccgctgtccggagccccacagctcaaggaatacgaggcccagcaccggcagtcggctgccctggaccctgctg

SEQ ID NO: 56199 - DNA, 100 bp, Homo sapiens
ctgggcttgcttctcgcggcccctgcgcaagcccacctgaaaaagttctgcttgctgagctgtgggatactgacctttttggctgtcttgggccgctacg

SEQ ID NO: 56200 - DNA, 74 bp, Homo sapiens
tcctaccatgtcagccttcccagtagctgggaccacagaagacaaaactgctaaggccaaggtccaacagactc

SEQ ID NO: 56201 - DNA, 141 bp, Homo sapiens
ctcaccctgtggcagaagtgggcaaggtggcagagaaggaaggatggcctctggacatccgagtgggcatcttccttgacttgatgcacctgaagaaacctgggggctttgacatatccttgttctacagagatatcatca

SEQ ID NO: 56202 - DNA, 74 bp, Homo sapiens
ttgctggtctctggctccctcctcccagggccaggcgccgctcagaacggtatgggcactaggaaaagacttct

SEQ ID NO: 56203 - DNA, 141 bp, Homo sapiens
cctcggaaaattgaggaaatcaaggacttcctgctcacagcccgacgaaaggatgccaaatggacccaaccagagcctggcctgggagccaggatggccatccacaaagccttggtgatgtgcctgggactgcctctcttc

SEQ ID NO: 56204 - DNA, 83 bp, Homo sapiens
tggagctcctcagcccctttcaactctacttcaacccgcaccttgtgttccggaagttccagtgtgtaaaggttgccataaag

SEQ ID NO: 56205 - DNA, 75 bp, Homo sapiens
cacaagtgcgcattggtgggaaatctagtgagatgcccaaattaacagaacaattagcaggaccacttcgtcaaa

SEQ ID NO: 56206 - DNA, 75 bp, Homo sapiens
tttctattttaaagagccaagcctcagagatgattctaccagaaaggaatgaagaacagaaccttcaggaattga

SEQ ID NO: 56207 - DNA, 82 bp, Homo sapiens
cctacgcagagctcatcgtccttgactttggcttcatgtttgaaagctcgccgggcggcaatctcggctgggaacccgacat

SEQ ID NO: 56208 - DNA, 75 bp, Homo sapiens
ttggatgaatttttagtgaaaaatgatccctgccgaggcacattgcaagcaacccgtgccttgatggtggttggc

SEQ ID NO: 56209 - DNA, 50 bp, Homo sapiens
ttctggaaactgtacattgaagcagaggggaagaagaggtgaaggtttcg

SEQ ID NO: 56210 - DNA, 96 bp, Homo sapiens
cttccattgaacttcccagcactcgaaagggaccgaaatggagagcaaaggacccagatgatgtggtaccagttggccaaagaagagcctggtgtt

SEQ ID NO: 56211 - DNA, 83 bp, Homo sapiens
gagcccagctgaaacgagagtacctgcttcagtacaacgatcccaaccgccgagggctcatcacatgaagagtatttctggag

SEQ ID NO: 56212 - DNA, 50 bp, Homo sapiens
caaaaagggcctaaagaagatgcaggcactcagaatggtccagcgtttga

SEQ ID NO: 56213 - DNA, 99 bp, Homo sapiens
gcacgtcctcctgaggaagcgggagtggaccatcgggcggagacgagagaggagccatcaaaactcgatcaggatgttttggccgctcttgaatgtgca

SEQ ID NO: 56214 - DNA, 75 bp, Homo sapiens
aggactgcgccgcgtcttcctcaaggttttgggatttgagattgacgcggtgaactctgtccagttttcaaacca

SEQ ID NO: 56215 - DNA, 100 bp, Homo sapiens
aaggaagatgagctgtcctttcaggaaggagccattatttatgtcatcaagaagaatgacgatgaaactggcgatggaatatgagaggagccctctggaa

SEQ ID NO: 56216 - DNA, 100 bp, Homo sapiens
gggaaacctgggggctccctggacaactccgagcagacaccaatgggaatcccaatggggaagtcgatgctggtgcttctcaccttcttggccttcgcct

SEQ ID NO: 56217 - DNA, 83 bp, Homo sapiens
cagggccactgtttagtgagaacaccctgcagttctacaatgagagggtccaatgtgtgacttgctgtggtcagatccagatg

SEQ ID NO: 56218 - DNA, 50 bp, Homo sapiens
gtggccagttatttgcctcagtaaaagaaaaactttagaaactgttcctt

SEQ ID NO: 56219 - DNA, 123 bp, Homo sapiens
gaaaaaagaatgggtcaaccaagaacgtcaaacactccaacgattgagagcatttaaagatatatgattctataacagactcttccagaaatgatatgaagaggaaatttgccctgacaatgg

SEQ ID NO: 56220 - DNA, 137 bp, Homo sapiens
cagctacgtgagcagaacgcccgccctggagcagttaggaccgaaggtctccggagagtcgccggcggtgccagcagagtctccttggaggtgacatggatatgggcaacccaggaaccctttcgcccaccaaacct

SEQ ID NO: 56221 - DNA, 73 bp, Homo sapiens
ggctggacctgttcgagatcagccagccgaccgaggacgtctgctcactggagatgacacgtgcgtggggtgt

SEQ ID NO: 56222 - DNA, 103 bp, Homo sapiens
ctgccttgtttcaccttccatgtcaggctggcctgacatggaaggtgaaacaaggcagcagcccctgcctccaggagaactctgcagactgcagtgccgggga

SEQ ID NO: 56223 - DNA, 100 bp, Homo sapiens
gatgacaaagcggtggtcttgaaaaggatccatgaagtccatgatgctctggagttttggctgcaagctggcgtggatgggttccaggttcgggacatag

SEQ ID NO: 56224 - DNA, 75 bp, Homo sapiens
ggacaaaacgccaggcggatctcagaaggccagttcaaagcctcttagcaaatatccggctgtgatcaatgatat

SEQ ID NO: 56225 - DNA, 118 bp, Homo sapiens
caaaatatcggagaataatttctttctcgctgatcgcctaacttctactgacgaagcttggaagttgcagaagtgtcttgggacaaggtgcgcattcctggtgtgctgcagcgattgg

SEQ ID NO: 56226 - DNA, 75 bp, Homo sapiens
ccctccggttcctgggcagagagaaaggcctctcttctgtggaaactctgaagccgaccagttgggcaaaatctt

SEQ ID NO: 56227 - DNA, 83 bp, Homo sapiens
gacggagcagcgcgtcgtggggcgagcggcagcgtttgcctcagcatggagggcggggccgcggcagccacccccacagcact

SEQ ID NO: 56228 - DNA, 90 bp, Homo sapiens
cagatgacgtacttaccattgaccgtgtgtccacagaggttacccttgcagacccctttgctgatgcaactaagggtgacgacttactcc

SEQ ID NO: 56229 - DNA, 92 bp, Homo sapiens
agagggcggagcggagacgggagtattatgaaaagatcttttaacaacctgggcatccagtgtgtgaggaagaaggagattgaggctgccat

SEQ ID NO: 56230 - DNA, 75 bp, Homo sapiens
ctcctgctgtccctctctgagctgaagacatttcggtggctgaatccacagaggagcctgctggttctaatcggg

SEQ ID NO: 56231 - DNA, 73 bp, Homo sapiens
tccgcaaaggctttctcgcttgtcaccttgccatgtggaagaaactggggagacaccacgaaatcattctttg

SEQ ID NO: 56232 - DNA, 90 bp, Homo sapiens
atcccagaggaaactgacggagacgcagatgtggacttgaaagaagctgcagcggaggaaggcgaggagatgcgctctgtgctgcggaag

SEQ ID NO: 56233 - DNA, 74 bp, Homo sapiens
gacagttcacttagccaatggagtgtatacctcacttcagacgccacaggtcatcatctggatcatcccattct

SEQ ID NO: 56234 - DNA, 75 bp, Homo sapiens
ccagaggcgagccctggtggaggaagaggagatctataaggacaggcagaaattctcagaacaggttttcaaagt

SEQ ID NO: 56235 - DNA, 90 bp, Homo sapiens
cacgcaggcaaacgagaattaaatgccgagaaggccagtacggcagacatctggtccctgggcataacagctattgaacttgcaagaggg

SEQ ID NO: 56236 - DNA, 75 bp, Homo sapiens
ggcgtggtcaacatccctgccgcagaggaatcccgttctgcttccagaagtggaagtgctcacggatcggggaaa

SEQ ID NO: 56237 - DNA, 96 bp, Homo sapiens
ctgagtcggagctcggcaggaagtgggaccggtgtctggcggatgcggtcgtgaagatagaacccgagcaacttcccgagaagagaagaacctcca

SEQ ID NO: 56238 - DNA, 82 bp, Homo sapiens
ggcaagctgtgttccatggcagggaacttttggcagagctcccactagttggaatgttgcatcagcaggtagaagaacatga

SEQ ID NO: 56239 - DNA, 114 bp, Homo sapiens
tattcaccttgaagaggaagacggggcggaagaccaagatcatcgagatggaagatgagaatgtgcctactgctcctgatcctccaagtcaacatttacgtgggcatgggacag

SEQ ID NO: 56240 - DNA, 51 bp, Homo sapiens
gaagccggctccacgcgcagctgctgcccccgccgtggagccgtgtggtgt

SEQ ID NO: 56241 - DNA, 50 bp, Homo sapiens
tggctgctgagctctgtggagccagagggtggttctgggctggactccag

SEQ ID NO: 56242 - DNA, 83 bp, Homo sapiens
tcctcccagtgacgggtctggagtgcgtgggggaccggctgttggcggatataacacgtgggaaccggaggagaacatcctgg

SEQ ID NO: 56243 - DNA, 90 bp, Homo sapiens
cgaggaggagatgaataagtgggttcgttgtatttgtgacatctgtgggtttaatccaacagaagaagataatcagacagctaaatggag

SEQ ID NO: 56244 - DNA, 96 bp, Homo sapiens
caagaagactgccgaagagccagctgcctctggccgcatcatcttctacaggtgtatccagcagctccaaagagacagcaaccagcaagaatgggc

SEQ ID NO: 56245 - DNA, 74 bp, Homo sapiens
aaatggatagccctacacagatatttgagcatgtgttcctgctgcgtttggatgaagcacaggaagcagagtgc

SEQ ID NO: 56246 - DNA, 88 bp, Homo sapiens
gctgcctggtggggatcagacagagattggagagaaggattccccagctttccgttgcacaaacagtgaagtgacagtccagcccagc

SEQ ID NO: 56247 - DNA, 75 bp, Homo sapiens
caggcattagacagaaagctggaagttgaaatggtggttgtgtcaaaccgattggtgacatctccatgctgtatt

SEQ ID NO: 56248 - DNA, 75 bp, Homo sapiens
ggcgctggccatcccccagcttcccagaatacagattctgttcatcttgctctgaaattaaataattctgaactc

SEQ ID NO: 56249 - DNA, 92 bp, Homo sapiens
tctgtctgtccacgatagtgccaggcctatgttggagatgatcaagcggtgctgattcacgagagtggaagcctccagagcttggggctttc

SEQ ID NO: 56250 - DNA, 75 bp, Homo sapiens
gctgtgagtgcccaaggtttcaaagcattatatgaaggttcgctttgtgaacagcacatggatatttgggaaggg

SEQ ID NO: 56251 - DNA, 75 bp, Homo sapiens
ccaccaatcagatgtctgtctgccggctgaccatgaatgacttcagcgtgcatcgcatcattgggcgcgggggct

SEQ ID NO: 56252 - DNA, 50 bp, Homo sapiens
ggaaaattacccggtatcgttagagccaagctctactccaggaagtgaaa

SEQ ID NO: 56253 - DNA, 80 bp, Homo sapiens
gccgtccttctccactttcgccagcccgtgccgcgagcgcggcctgcaggagcacatacccccggcctcatgagtacctg

SEQ ID NO: 56254 - DNA, 50 bp, Homo sapiens
caggaatcctcctcaattacaaggcgctagtcctgctgatgggcaaagaa

SEQ ID NO: 56255 - DNA, 90 bp, Homo sapiens
cggaaaacctaaccatgaagacttgaacttaatacagcaagaaagaccatcaagtttaccactccatgatgcgttatctgggtctggaaa

SEQ ID NO: 56256 - DNA, 100 bp, Homo sapiens
agaggacggagcccttgatgacgagggccacagtgggattaaaaagaccactgaggagcaggtgcagcaggtcaatggccagcaaggaggggggtccgag

SEQ ID NO: 56257 - DNA, 100 bp, Homo sapiens
gtgctggaccgcttttacaatgcagcacttttccagccattaactccaggctctcgagaatttgaagatgttgtaaatattctccattcttcttaccttg

SEQ ID NO: 56258 - DNA, 76 bp, Homo sapiens
cagcggattctacattgcctccggaggtgtggatgtggaagcagccaagcgggcagaagaggaattgctccttcat

SEQ ID NO: 56259 - DNA, 100 bp, Homo sapiens
tgaactaaaacacaaagcaagagaaaaaccttatgatagtaaaagtttgcggactgatatggagaatgcagaaaacattctcacagtgatgagagatgcc

SEQ ID NO: 56260 - DNA, 75 bp, Homo sapiens
ctcgctcggctgcgggaaatcgggctgaagcgactgagtccgcgatggaggtatgggcggagctgccattgcccc

SEQ ID NO: 56261 - DNA, 100 bp, Homo sapiens
ctgcactacaccgcgcacccgctcagcccctacggggagacgctcaccgagcccctcgcccgacagatctcgacatggcaggagctgaggcagctgcagg

SEQ ID NO: 56262 - DNA, 111 bp, Homo sapiens
agtctgcacccaagaggtggaagaggacgggctttaggctggaagcgccttagaggagccatttttccaggcttgctggacgggacggcagacgatgccacgacggtggac

SEQ ID NO: 56263 - DNA, 101 bp, Homo sapiens
caacaacagggacagctcccaggagccagtcaaggttgtctgtctgtccatccactcaggacatctgcagaacttgggaatcagtgaaacgtacaaccagg

SEQ ID NO: 56264 - DNA, 75 bp, Homo sapiens
ggatttgttaaggattccaagtaactcttatttgcattaccgctacattggcaagaccatggattaccggggaac

SEQ ID NO: 56265 - DNA, 87 bp, Homo sapiens
caagtcgatcgaggtcaagaacacgatcacgttctagatcacatactccaagaagacatgtttcctgaggttataggcgggtgtttg

SEQ ID NO: 56266 - DNA, 82 bp, Homo sapiens
tctttgcagactttggttggtggaggctgtggcaatggaacaggcttgagaaacagtgttctaagaacggaagcatctgggc

SEQ ID NO: 56267 - DNA, 80 bp, Homo sapiens
gtcgcccaggagtcatcggacgccagaatctggatattagaaatggctactccccagtcaattttcatctttgcaatctg

SEQ ID NO: 56268 - DNA, 75 bp, Homo sapiens
tgtttaatgactttggtgccctcaacatctctcagagacgaaagttccagctcaaccaagataaaatgaattttt

SEQ ID NO: 56269 - DNA, 73 bp, Homo sapiens
ccgccacgtagtctactggaactccagtaaccccaggtggacgccctgcttcatctggcccgccagaatcggg

SEQ ID NO: 56270 - DNA, 75 bp, Homo sapiens
cccagcacttggggaggccgaggggtccgaggagcaaacagttgtctatgtggtggggaaggcgggccgccagca

SEQ ID NO: 56271 - DNA, 82 bp, Homo sapiens
ctgcgtcccgccaccggccgcttctgtcctcgaaagcgtggatacccatcaacgaagttttgatattggaattcagattggc

SEQ ID NO: 56272 - DNA, 100 bp, Homo sapiens
tgactttcagctatggaatcggtagaggggaagagattgaactttgctgacctttgatgtgaggcgctcagccagggccaaggggagagcctggcaagat

SEQ ID NO: 56273 - DNA, 100 bp, Homo sapiens
cacgctgggcaagggcaacttcgctgtggtgaagctggggcggcaccggatcaccaagacggagctttatcttcaagccaggatgaagggagactgggca

SEQ ID NO: 56274 - DNA, 50 bp, Homo sapiens
cacccttccagatgatttttgaggcacccagattggctgaaaacttctgt

SEQ ID NO: 56275 - DNA, 100 bp, Homo sapiens
gtgactgcttgcgaaccagttcagcagtgcctcaggtataacccggaaaaatcccagaacacctctttctgatctccagggcatgaatgctctaaatgaa

SEQ ID NO: 56276 - DNA, 100 bp, Homo sapiens
gagagcacgagagacccgagttcatcgcctacccccatctccgcatcaggaccaaggccacactggtgtgtctcataagtgacttctacccgggagccgt

SEQ ID NO: 56277 - DNA, 100 bp, Homo sapiens
aaaaagctgcacgcaagtgttaaacttctgccctggtacctgacagtgtaaagaaggagctcctacaaagaataagaacattccttgctcagcatgccag

SEQ ID NO: 56278 - DNA, 90 bp, Homo sapiens
ggacatcctggaagctgggaaatggtgggtcatgataactgggtacgtggagttctgttccattctggggggaagtttattttgagttgt

SEQ ID NO: 56279 - DNA, 74 bp, Homo sapiens
gcggcggctcggcgcaagcctgacgagcaggagccgagctcagcagacaccattcgcttttcacccaagatgat

SEQ ID NO: 56280 - DNA, 83 bp, Homo sapiens
tcatcagaccacacccagcagtcagaaaagagtctattatcctcccagtccacaacgctgaaccgtggctggacgaatgtttg

SEQ ID NO: 56281 - DNA, 75 bp, Homo sapiens
tggttcttgaacagacagaaggatgtaaaggatggaaaatacagccaggccacatgactactccgcagatgggtt

SEQ ID NO: 56282 - DNA, 100 bp, Homo sapiens
agatattcagattcctctggattatgaaacaggatggtgccatgacaatggtgtgaactacaagattggagagaagtgggaccgtcagggagaaaatggc

SEQ ID NO: 56283 - DNA, 85 bp, Homo sapiens
tgcacttgacaaccagcatgccgagatgtgcttttttaggaccaaaggatatatttccttactcagaaaataaggaaaagtatgg

SEQ ID NO: 56284 - DNA, 50 bp, Homo sapiens
tgctgtattggagagagaagtccaggctgttgataatcaggtgtatgtgg

SEQ ID NO: 56285 - DNA, 87 bp, Homo sapiens
aaaagatgcttgtggaagccacccgggagtttgaggaggttgtgtgtaaggcaaacattggtgggcaccgatcttcctgttcattct

SEQ ID NO: 56286 - DNA, 82 bp, Homo sapiens
cgggtaggtactgggcaccacctctctcgcctgctgagacaatgcagatcttcgtgaagactctgactggtaagaccatcac

SEQ ID NO: 56287 - DNA, 74 bp, Homo sapiens
cagcttctgctgtccttctttgtggagagcaagttctcccgaagatgactcggatacaaaaaggctttccaaag

SEQ ID NO: 56288 - DNA, 88 bp, Homo sapiens
gaagatggattgaggggccgagcggggaagcgagctgcaccggggaatcatgacttctgcagccgaattaaacaaccaccatgtcgag

SEQ ID NO: 56289 - DNA, 75 bp, Homo sapiens
cagaagctccaggatattatgaagttataaggttccccatggggtggttgagtttgcctcttatggtgacttaaa

SEQ ID NO: 56290 - DNA, 100 bp, Homo sapiens
ctcgagtgtccagacctgctcgatggtctccgtgaggccgggtgacgctccagaatgggagacaagccaatttgggagcagattggatccagcttcattc

SEQ ID NO: 56291 - DNA, 98 bp, Homo sapiens
ttgaagaccttcatatttcccaagatgccactggtgaagaagtacctggagtagaacagaaaaattattatgtctgtgttcccttgggactcattgga

SEQ ID NO: 56292 - DNA, 101 bp, Homo sapiens
tccggtgcaggtgaggggcgcgcgcctgcccagctttgcagcccccgaacgcggcctcgcacagccaataggagctctgaacccaaaaagagcagcattct

SEQ ID NO: 56293 - DNA, 82 bp, Homo sapiens
ggaccgagcaggaatccgtatctgggaacaggtatcacctcttctgggctcaagatggacaacaagaagcgcctggcctacg

SEQ ID NO: 56294 - DNA, 82 bp, Homo sapiens
tgaagacaaaaatccagaagtacaagcagtctgacatcttcatttgattgtacaccatctcccagcaagacaccagttgaaa

SEQ ID NO: 56295 - DNA, 83 bp, Homo sapiens
gaactcacgtccgtcgctgctgcaaccccaagatgtcggagacacggtggaaacgcttatggccaagaataaggagacgggtg

SEQ ID NO: 56296 - DNA, 98 bp, Homo sapiens
gaatgagaaccctacttgcctaaatgaggaatgtctttcctaccatctaaaatacgaaggtttctggctggtgtcttctacaaatgcttctgggaact

SEQ ID NO: 56297 - DNA, 100 bp, Homo sapiens
atttcatcagactaaaaagttacagggaatgtatcctgtcaggtataatgtcagtgaatggcaagaaagttcttcatatggatcgaaacccttactacgg

SEQ ID NO: 56298 - DNA, 100 bp, Homo sapiens
ttgtgccctagcaccccgagaaccgtcagtttgagccagatgaactctcttgatagagcccaagcagccaagaataaaggcaataaatattttaaagcag

SEQ ID NO: 56299 - DNA, 50 bp, Homo sapiens
gtggagtgtaggtcatatcgccgcggcgtttactgaagcatttgaaaggg

SEQ ID NO: 56300 - DNA, 50 bp, Homo sapiens
cggggccggagccgcccgcggtcagcatggcaccttgggcagtggccgct

SEQ ID NO: 56301 - DNA, 98 bp, Homo sapiens
gaccatctacatctcccacaggaagtgtcacacagcagtcaagtatgtcccaaacgtctgctatggagttactagtagagaaagcaatcagcagtgct

SEQ ID NO: 56302 - DNA, 74 bp, Homo sapiens
agcgaagtccacccagcgtttccgaggatgaaatctttgacatggtaaaaccaaaggatcctttgaaaatctct

SEQ ID NO: 56303 - DNA, 83 bp, Homo sapiens
ggcctgcagcgggagctggacggcgagcgcgagcggcgcgagaaagtgaagatcatgacggagaaggaactcctggccgtggc

SEQ ID NO: 56304 - DNA, 74 bp, Homo sapiens
cggagagttctgcatgttgattcgtcacgagaagagaatgccttctagatgcaaaatcacctccaaaccagacc

SEQ ID NO: 56305 - DNA, 100 bp, Homo sapiens
ggagagtctgtgccgacaagatggcggacggggagctgaacgtggacagcctcatcacccggctgctggaggcacatgcagatgacaatccaggctctcc

SEQ ID NO: 56306 - DNA, 90 bp, Homo sapiens
cgggctgaagcgactgagtccgcgatggaggttagaattgcccctactgtcactacctggagtaacaaaactcctactgcccttcccagc

SEQ ID NO: 56307 - DNA, 51 bp, Homo sapiens
agagcttggacgaggcgcaagcaaagtgcgaggaagtggctggagtggagg

SEQ ID NO: 56308 - DNA, 83 bp, Homo sapiens
aaaatatataccatgatctacaggaacttggtagtagtcaatcagcaggctgaataccactagaaacatacctgtaaccagag

SEQ ID NO: 56309 - DNA, 83 bp, Homo sapiens
aagagagagatcttagaacagtgctgggcacacaacaatgcagatcttcgtgaagactctgactggtaagaccatcaccctcg

SEQ ID NO: 56310 - DNA, 98 bp, Homo sapiens
cgggcggcggcctggtcggcagagagtagcctgcaacattcggccgtggttacgatgttggcaggagccacctacatggaaattcaccaggccggagg

SEQ ID NO: 56311 - DNA, 82 bp, Homo sapiens
gtccccccacccatcggctgttgcaagagctgctcaacatgatgcaaccttaaaatcagtgacaagaaacattccaaacaag

SEQ ID NO: 56312 - DNA, 84 bp, Homo sapiens
gaaggctgctattgaaagagagtatgcacagctgggatggaaattctatgatgctgatgattatcacccggaggaaaatcgaag

SEQ ID NO: 56313 - DNA, 105 bp, Homo sapiens
atcctgatggggctgaagtcggagagcggggagaggccacagatcaccatcaagacctggaggaacttgctttgtaccagatccagctgctgaaggacctcagac

SEQ ID NO: 56314 - DNA, 75 bp, Homo sapiens
caccttttccctgagcttgttgatgattttcagataacgtggttagaaggccattcactggcacagacagtattt

SEQ ID NO: 56315 - DNA, 100 bp, Homo sapiens
atcacttacagtgacgagcacttttctccaggatcacacccgtcacacatcccatcagatgtcaactccaaacaagggctacttctacaagtccgaacag

SEQ ID NO: 56316 - DNA, 92 bp, Homo sapiens
gaatacgtttagcttcaaaaatgacaagttcgataaaagtgtgcagaccaaggtcaatgagtggtcattgaagataagaaaggaaatgagag

SEQ ID NO: 56317 - DNA, 98 bp, Homo sapiens
gccatcagtgccatcaaggctgagaccaagaactcaggcttcaagcgttctcgaacccttgaggggaagttaaaggacataagcagctctatgaccaa

SEQ ID NO: 56318 - DNA, 74 bp, Homo sapiens
ccagagtcacacacggtcctaagagctgggcaccaggaagcgaaggctggaatactcccccagttgcaagaggc

SEQ ID NO: 56319 - DNA, 98 bp, Homo sapiens
tgatgtctgtgggtaccctctatgaaaaacagaatggaaaagagtcttctgccctaccacttatgtcttggatgaagatgaacctcgattccttgaag

SEQ ID NO: 56320 - DNA, 90 bp, Homo sapiens
tccagcctgcgcggcgggaagcggcggcggcggctccagcgtcctaagagttacagaatgtctgaaggggacagtgtgggagaatccgtc

SEQ ID NO: 56321 - DNA, 74 bp, Homo sapiens
ccccaacttcaagaacaggcttcgagaacgccctggccaacgtcaacattgggagcctcatctgcaatgtaggg

SEQ ID NO: 56322 - DNA, 83 bp, Homo sapiens
cttccgccacggccgtctctggagagcagcaggcttcttccccgggagctcgcagggctgcgacgccttcctgcggcataaga

SEQ ID NO: 56323 - DNA, 80 bp, Homo sapiens
caaaattgacactatgggaacctaccatggtatgacactgaaatctgtaacggacttgcaattgtgaccaaatatattac

SEQ ID NO: 56324 - DNA, 90 bp, Homo sapiens
cccacctaactacggaaaacctgatcccaaaattattgaaaacactcgaaggatttcctcctctgatgctcctcttcagcctttggtatc

SEQ ID NO: 56325 - DNA, 90 bp, Homo sapiens
gggaacctgggacccggcaagccagcagaagggttgggcccatgagatgtgtgctctgtatattccggaggtacaatttgccagtgtttc

SEQ ID NO: 56326 - DNA, 90 bp, Homo sapiens
gttagaacgactttccaagtttgaagttggagatgctgaaaatgttgcttcatatgaataacaacgaacttgatgcaagtgataggtttg

SEQ ID NO: 56327 - DNA, 97 bp, Homo sapiens
tggggccgtgtctcagtccacccaaggtctcctcggatcgcctggagaggcactcggacctggtgtcatggagaaactccagctgggcccagagatt

SEQ ID NO: 56328 - DNA, 100 bp, Homo sapiens
cagattgccagcgcaggttggaagccgcatatttggatcttcaacggatactacaaaaatattttgattctggggattacaacatggctaaagcaaaaat

SEQ ID NO: 56329 - DNA, 83 bp, Homo sapiens
agcctagaatgcatcagtgcccttgtggcgaatggggctcacgtcgacgactttccggccagggatactgcttttcagcttcg

SEQ ID NO: 56330 - DNA, 90 bp, Homo sapiens
ctctccagtccttgctgaagagactttccgttacatgagattatggctgctgttcctcaaaataatctacaggagcaactagaacgtcac

SEQ ID NO: 56331 - DNA, 88 bp, Homo sapiens
attcctgaaatacatccaggaaagacatggagattctcttaaaaaggaaacttttgagaagaactttgaaagagaaacccataaaata

SEQ ID NO: 56332 - DNA, 100 bp, Homo sapiens
ggcgaccggcggcgtccgaggagtccagttacaacacagggatcacaacaaacacaaccgccacagaagcactatggcattacttctcctatcagcttag

SEQ ID NO: 56333 - DNA, 100 bp, Homo sapiens
atcatcccaatattgtcaaacttataggagtttgcacacaaagacagcctgtctacatcattatggaactggtttcagtcacaaacataacaatggtcag

SEQ ID NO: 56334 - DNA, 100 bp, Homo sapiens
atgtgcatactcacagagttagagagagggatggtggatatggctttagttgcccctgaagctccttcagaacaagccagaagagtttttcaaacctacg

SEQ ID NO: 56335 - DNA, 83 bp, Homo sapiens
ggaagcgtcgggattaggtgaaagttcttcacacacccccattcggcgtagtacccagagagctcaagatgtgtggcagtttt

SEQ ID NO: 56336 - DNA, 100 bp, Homo sapiens
tggaacctacggacaggtgtacaaggaaatagctcgtctgctggccctggaggaggctaccctgagtaccgatctgcagcagggttatgcccttaaaagt

SEQ ID NO: 56337 - DNA, 88 bp, Homo sapiens
ctgggtcaccagagtttgagagagtatttcgggcacaaacttcagatggtggcaaagtggttggcaccatagaagtcagtgtcgtgaa

SEQ ID NO: 56338 - DNA, 50 bp, Homo sapiens
gcaactgcaaagagaagccgagggaaaccctggatcagatggtcttccag

SEQ ID NO: 56339 - DNA, 76 bp, Homo sapiens
cgcgcctcgcggcatggcgtcggaggggccgcgggagcccgaaagcgagttcgtgccctcgtgaggctggcatgca

SEQ ID NO: 56340 - DNA, 139 bp, Homo sapiens
gcctgccttccatttcaacatcttgaagccttatatgaagattttcaacaagagtgtgaacatcatgcacggattgtcaatgaggtagatcagattcccattcgacgggcaaccagtcaatgaaacagacacacctgca

SEQ ID NO: 56341 - DNA, 75 bp, Homo sapiens
catcggttattaaggagcttcgcaaggctactgaagcactgaagttggactaaatgctcttccttcagaggatta

SEQ ID NO: 56342 - DNA, 98 bp, Homo sapiens
ttcacttcttcgacgttatgagcttttattttacccaggggatggatctgttgaaatggctgaggctgaggtggcctccttgaaccgtaggatccagc

SEQ ID NO: 56343 - DNA, 74 bp, Homo sapiens
gccagaacatcgttctcaatggcaagtgacctaaaacttgacaacgtgatgctcgattctgagggacacatcaa

SEQ ID NO: 56344 - DNA, 82 bp, Homo sapiens
tactgagcctgttggaggaactggcccggaaacaggaggacggggatatgagactttctactcggaatatcctgagtgttgc

SEQ ID NO: 56345 - DNA, 83 bp, Homo sapiens
cgctgctgatcgtcctgctgctgatggtgtgcggttcacagaatgattgcagagttcaagctgatccctggacttaataattt

SEQ ID NO: 56346 - DNA, 98 bp, Homo sapiens
attgagacccggaaggcttcaaaggctgtcgcaaggaggaagtggaagacctggagcggaacaacggctccctggaccggccctactacatgtccaag

SEQ ID NO: 56347 - DNA, 75 bp, Homo sapiens
ggataaaccaaagacagcatctgagcacagaaaggtgtccggctttgctggcccagcaagcctgataagcatgaa

SEQ ID NO: 56348 - DNA, 100 bp, Homo sapiens
cgtgctgtgctaggggatgatccgcaactgatgaagttactaaaagatgtaactgaactgcagatccttggtgaaatatctttcaacaaatctctatatg

SEQ ID NO: 56349 - DNA, 90 bp, Homo sapiens
taccacggtgctgagacaactagacatggaattggtttcagtcaaacgacagcagaaaaatatggctcaggagactaaccagaccccggg

SEQ ID NO: 56350 - DNA, 98 bp, Homo sapiens
gcatgaccctgtgcgggagaggctcaagcgggacctgttccagtttaacaaggtggagccgccaccaaaatgcagattttcgtgaaaacccttacggg

SEQ ID NO: 56351 - DNA, 100 bp, Homo sapiens
aacttcctccagaaactttggcgacaatgttggcctgtctgcaagcttgtgcaggaagaaggacccagcccagttcctgcaggtacatggccgagcttgc

SEQ ID NO: 56352 - DNA, 89 bp, Homo sapiens
agaaggacacgcgaatttgaagatagagacaggtctcatcgggaggaaatggagtgacttctgacagctctctccatggaaggaggcgg

SEQ ID NO: 56353 - DNA, 100 bp, Homo sapiens
ccatcctggttcttccaaagtgcccggacccaaaacaggaaacctcccagtgccaagtgtataagcgtgtccagaattggtgggtctcactgacttcaag

SEQ ID NO: 56354 - DNA, 100 bp, Homo sapiens
cgccactggtgctgagctgctaggaagcccctatcgccgagctcgttggagcttgaacccattgtcacccctccggtcatcatcagatttgaaatattta

SEQ ID NO: 56355 - DNA, 90 bp, Homo sapiens
ctcatgagcagcctgcccaacttctgcgggatcttcaaccacctcgagcggctgctggacgaaggttgtaaagaagaaagttctaccctt

SEQ ID NO: 56356 - DNA, 100 bp, Homo sapiens
cttttttatctcatattagtgcctgtgatggcatctttcatctaacacttgaagctttatatcaaactacatacccagaatatctccagtacatttattt

SEQ ID NO: 56357 - DNA, 75 bp, Homo sapiens
tacatcggcgagggcgcgtacggcatggtcaggtccgctcacaaaaaaacgtgacgaggcgacgctcaatccgcc

SEQ ID NO: 56358 - DNA, 98 bp, Homo sapiens
tggggccgcgtccggtgtgaagacagggagacgctgctgcagctccgggacacctggggccgccgaggcaaaggtgtcatggagaaactccagctggg

SEQ ID NO: 56359 - DNA, 98 bp, Homo sapiens
gcctcagcctcccgagtaggtgggattacagataaccagcccgagtcatgcagtcttttcgagaaaggtgtggtttccatggcaaacaacagaactac

SEQ ID NO: 56360 - DNA, 121 bp, Homo sapiens
atgcctgctaacatggataagcatgccctgaaaaagtatcgtcgagaagcctatcatcggatctagtgaaaagccatttgatgtatgcggtcagagaagaagtggaggtcctcaaagagca

SEQ ID NO: 56361 - DNA, 75 bp, Homo sapiens
atcggccctgaagttgtccatcccttgtccgggacctttgcaatggcgtggaccatggctgtgagttccagtgtg

SEQ ID NO: 56362 - DNA, 83 bp, Homo sapiens
gttcaacatcctcctggccaccgactcctacaaggcgccatgtcagaaccggctggggatgtccgtcagaacccatgcggcag

SEQ ID NO: 56363 - DNA, 50 bp, Homo sapiens
atcagccacgcatctgaccttgttgccgcttacaaacacgcagatggcaa

SEQ ID NO: 56364 - DNA, 96 bp, Homo sapiens
ttgggactcgcctttgccctggcaaacactggaatcctactttttcttgtatttgcatgcccgagtctttgagccgtgctataccagtttgtccag

SEQ ID NO: 56365 - DNA, 51 bp, Homo sapiens
tgcctcccctgggtgctcttcatcttggaccattactgggacttccacccc

SEQ ID NO: 56366 - DNA, 75 bp, Homo sapiens
tgactgaggcagtgcgggccctgctgaagctggaggatcaggagcagcgggcccgacagctcaaggagaggctgc

SEQ ID NO: 56367 - DNA, 109 bp, Homo sapiens
gccagctgacgccgggggcacagaccaccctccactgagtgcggagcagccaagagagatggaaccatgtaaccaccacgaccaagaggccagtaaccaccagagctcc

SEQ ID NO: 56368 - DNA, 73 bp, Homo sapiens
ccggagccgcgccccaccccgccagctccagagccacgttgtatcagagtaagatggacggtagctttgattg

SEQ ID NO: 56369 - DNA, 75 bp, Homo sapiens
gattgttgtccaggcaggacagattcagcagcagctttgagaattcacgtgagtggctccaccatagccatcctg

SEQ ID NO: 56370 - DNA, 93 bp, Homo sapiens
ctctacatctcagactactgtgtgtggattcagaaagtcaagtacttcgtactggatttcgaggctggcatcctgcagtattttgtgaatgag

SEQ ID NO: 56371 - DNA, 82 bp, Homo sapiens
tgagccgcgcacgctacagtacaaggtctcccctgccaaatccaccctagcccactgaagcgctccatgtcactcatcccta

SEQ ID NO: 56372 - DNA, 100 bp, Homo sapiens
gttctcgggcagaggcgacctccccgcgttccatgcgcacagggacaggggaaaaaaccctgatccatgggctaagaatctgaatgaaaaagactatgag

SEQ ID NO: 56373 - DNA, 90 bp, Homo sapiens
aggggttggcactgcatgatatcctgacagagatacacttgtttgtgcatagagatatgagggaaggcaccattggagatatggctatcc

SEQ ID NO: 56374 - DNA, 83 bp, Homo sapiens
cgcaaggacagcgcgaggtccgcgcagcccagcgcagccataaatgcttcggttacccacagtctttcgccagatgagaccgg

SEQ ID NO: 56375 - DNA, 114 bp, Homo sapiens
ctgaaagagaagatggagcatctcattggggcttgccgagacaaggaagccaagagaccccgcaaacaagcgcatcagaggatctgggtggtgcgagagcctcctacagcagcc

SEQ ID NO: 56376 - DNA, 51 bp, Homo sapiens
gcctggatccacgtcttctacaagagttccctgtattgaacactgatatac

SEQ ID NO: 56377 - DNA, 100 bp, Homo sapiens
gtgctcggggcgctcggggcgacgcggcgcttgttggcggcgctgcgaggccagagcctagggctagcggccatgggcgccctgcgtccggcagaggagg

SEQ ID NO: 56378 - DNA, 50 bp, Homo sapiens
gcaggttcatcaggtgtacatcagggcagagtgacatcactgcctctctt

SEQ ID NO: 56379 - DNA, 50 bp, Homo sapiens
gaggccgtggatgcaggcattaaggtgtgtgcagtggcctcagggatccg

SEQ ID NO: 56380 - DNA, 97 bp, Homo sapiens
gtggaccacaatacccgcaccaccacctttaaggatcctcgcccggggtttgagtcgggagacgtcttgagtgaagatgaaaatgacaagaagcaaa

SEQ ID NO: 56381 - DNA, 100 bp, Homo sapiens
ttgaaaagctgagatatgatgattttgaagtcatttcacatcgaagccatgatttaaatatcggcgttaagtgcttatcagattgttgtggaagaactgc

SEQ ID NO: 56382 - DNA, 95 bp, Homo sapiens
atctacaaccttcgatctcctgacgagtgaaagacccctgacaaaagacaatcatcttctgggtacatttgatctgactggaattcctcctgctc

SEQ ID NO: 56383 - DNA, 75 bp, Homo sapiens
tgggacaccgcattcgccatccaggctctgcttgaggatcatatccagagtcccaaacatttctgtacatctgct

SEQ ID NO: 56384 - DNA, 98 bp, Homo sapiens
cctagtatcagcgaggaacaaattaagcaagcagaagtgtgtgggatccatactggccctttagaagactctctgtttttgaatcacagtgaaaggct

SEQ ID NO: 56385 - DNA, 96 bp, Homo sapiens
ctgtctggctgctgcagtgacccagaccctctcctttccctttgagaccgtgaagagaaagatgcaggcatggaggagtgacggcaggaactttct

SEQ ID NO: 56386 - DNA, 75 bp, Homo sapiens
agatccagctttgttgaaaagcgaagccgttagtcccttaatacaaaggaattgagaaagtgactgaccacctgg

SEQ ID NO: 56387 - DNA, 68 bp, Homo sapiens
caggaggatggagctagttagctgtctgttgtctgtagcccaggttttgctgttactgctcagtgtag

SEQ ID NO: 56388 - DNA, 82 bp, Homo sapiens
gtggtggtgcctatgtgaaactgctttctaaaacaccagaactcaacctgaataatgcatatactgccatgtcagattccta

SEQ ID NO: 56389 - DNA, 80 bp, Homo sapiens
ctctggggtcccggctgccctgtggcctcgctcctcggagggtggacgtctgatttatgaagctccccatccacctatct

SEQ ID NO: 56390 - DNA, 82 bp, Homo sapiens
tgcagtttgcaatatgactttggaggaattctcggctggagagcagaagaccgaaagcttgctatggcattgttcaagtacc

SEQ ID NO: 56391 - DNA, 90 bp, Homo sapiens
catcacacagttgaagctccaggaggtcaaaagaaagaacacccaggttaatgcctgataaagaaagcatgtattacccacgggtacaac

SEQ ID NO: 56392 - DNA, 75 bp, Homo sapiens
acgcgccagacgtcgtggatcgacccccgcgaccgatagctgatcagcttccttgggttttgctgatgacacaag

SEQ ID NO: 56393 - DNA, 88 bp, Homo sapiens
caggagatccaagagctcaaggccaggggtccacattcagtcgtcccagactgtggagtcgagtggtttgtacaccttgcagagtatt

SEQ ID NO: 56394 - DNA, 100 bp, Homo sapiens
actcattgagctgaggaagaagaagattgaggaggcgatggacgggtggtggagattgtgaagaagctggagtctcgccagcggggctgggaggaggatg

SEQ ID NO: 56395 - DNA, 100 bp, Homo sapiens
caagttggcgacgtccctgggcgcgtcagaacaggcgctgcggctgatcatctccatcttcctggttgctgctgatgctagaaggactagtagatgaacg

SEQ ID NO: 56396 - DNA, 73 bp, Homo sapiens
catactatggcgtgatggccctgacagcctctccagccattgcctagaatacttcaagtctttcaattttaac

SEQ ID NO: 56397 - DNA, 75 bp, Homo sapiens
ggtctaccctacctggctccatgaagatgccacagggatcctaaaatctaggaagtatcattctgcaaaggaggc

SEQ ID NO: 56398 - DNA, 75 bp, Homo sapiens
gagtggaaactttggtggtagcaggaacatggggggaccatatggtggaggactatcctattaagtgtaatctca

SEQ ID NO: 56399 - DNA, 76 bp, Homo sapiens
cggaaatctggaaccgggatggcgacgtctacactgagtcggaggcgaaggaggagtatttgaagacttctgagcg

SEQ ID NO: 56400 - DNA, 50 bp, Homo sapiens
cggtggtgcccgacttcgaccccgggctcattgtcatccccaagccaggc

SEQ ID NO: 56401 - DNA, 71 bp, Homo sapiens
tccctgccagatagctcttattttgaggtaatctcagccaggaaaggagagtttgaaactggatttgaaaa

SEQ ID NO: 56402 - DNA, 101 bp, Homo sapiens
gaagccaaggctagtggctgggttactgatggattactgatggattcttctcagcatttggaggctacttaagtgaagtagtagaagaaaatactccacca

SEQ ID NO: 56403 - DNA, 78 bp, Homo sapiens
agtggcccagcatgtggtatatgcccactgtttgtaacatggaagattggtcgagacaaaagattacgtggatgcata

SEQ ID NO: 56404 - DNA, 76 bp, Homo sapiens
cgccgccaagagtgagcgagcggacccgcgatggctgggaagttatcaattccaaaccagatgaaagacccaggct

SEQ ID NO: 56405 - DNA, 73 bp, Homo sapiens
gagatctggacagaatcgccggacaggtggacgcggatctgtcaacatgggtaaaggagaccccaacaagccg

SEQ ID NO: 56406 - DNA, 75 bp, Homo sapiens
tggattatgggcctttcagagatgtgcctgcctatagtcaggtcaaagattctaaactgcctgcatataaggatc

SEQ ID NO: 56407 - DNA, 87 bp, Homo sapiens
agactattgtggaagaagcatccattaagcggaaatccgaacgccagcagatctgaatggaatgttctggattgaagaaagtgggaa

SEQ ID NO: 56408 - DNA, 82 bp, Homo sapiens
cctggagcctcagttggaagcagccgatccagcctgcggagcctgtggggcaggagtcctggcaaaataagcatgcaggtag

SEQ ID NO: 56409 - DNA, 74 bp, Homo sapiens
ggactgctttatggacttgcatcaggagtagcaagaaaaatgaggaagctgtgagtaccagtggaaggaacgag

SEQ ID NO: 56410 - DNA, 100 bp, Homo sapiens
tgctattccttgggctgcctttcctgcaggtactaggttttgacaagcttgcatcatgcgtgagtataagctagtcgttcttggctcaggaggcgttgga

SEQ ID NO: 56411 - DNA, 51 bp, Homo sapiens
gagcaacatctttcctcaccccaagacttctgcctggtgtcgaaggtggtg

SEQ ID NO: 56412 - DNA, 83 bp, Homo sapiens
cttcgcctgcacctggccaggctgcggctggagtccacaggtcctggctaccctgggaagagacaagaagtaaatgaagaaag

SEQ ID NO: 56413 - DNA, 100 bp, Homo sapiens
ttcggcttctgagacggcggcagcagcggcattcagggagatggaagggagtcaaggatgttgccatgtatgtgccatctctgccctaagccaatatcat

SEQ ID NO: 56414 - DNA, 100 bp, Homo sapiens
ggagggtctgaggcggcgcggccatggctcacctccggggatttgccaaccagcacctgtgattacagaggaaaccacccttcaactggaagatatcatt

SEQ ID NO: 56415 - DNA, 75 bp, Homo sapiens
atttggataaagaccaagaagtgggattactggattatatggtaaaataccatgaagattttgaaaaaacaaagg

SEQ ID NO: 56416 - DNA, 100 bp, Homo sapiens
agcagcagtgaggaagagctgccgagacggattctggttgatctgaaaaatgaagtttggtatcaaaaatgtcatgaccctgtatgtaaagcagaaaact

SEQ ID NO: 56417 - DNA, 101 bp, Homo sapiens
ctgggcttctctgaggcggcgagagatggtcaggtctggagctcgaccgggccaggtcaagaagaagagagattggccctagaaactgccctgatgtacgg

SEQ ID NO: 56418 - DNA, 100 bp, Homo sapiens
agcagcgcccagccccgtggcccgggcttcgcaggtttgtaaaagaatggacttggtctgccagagaatgttgaatcagggatttctgaaagtggagagg

SEQ ID NO: 56419 - DNA, 80 bp, Homo sapiens
acgggcgagaagccctacgagtgcaacatctgcaaggtccgcttcaccagattattttcgaaataccagtatttcgactc

SEQ ID NO: 56420 - DNA, 50 bp, Homo sapiens
ctcctgagtagctggggctacagagacggggtttcgctcttgtgaccagg

SEQ ID NO: 56421 - DNA, 100 bp, Homo sapiens
gaaagttcagcgacggcggcagcggccggagccgggccgggcagctagcagggcgcttcggagcctggcccaactagagaatctgtgcaaacagctgtat

SEQ ID NO: 56422 - DNA, 95 bp, Homo sapiens
gtgggaatatgtggatcctacagttactctagaattattagatgaatctctacaatcagttcaagtctgcaccatctgacagtttaacatacaaa

SEQ ID NO: 56423 - DNA, 82 bp, Homo sapiens
gtgggacaggccacgctgtccgtccgcagtaccgacgcctgcagttggaatcgaagcctcttaaaatggcagatgacttgga

SEQ ID NO: 56424 - DNA, 101 bp, Homo sapiens
caggagatttttcgggacattaccaaaccactcattttaggggtgaccacggactcagtgagtatgagaacccagatgggaggggtgggcaggcgagggac

SEQ ID NO: 56425 - DNA, 100 bp, Homo sapiens
ttgtggacggcagattgaaatacagtttgcccagggggatcgaaagagttttggctacgggcctccacctccaccgccagatcagtttgcccctccgggg

SEQ ID NO: 56426 - DNA, 100 bp, Homo sapiens
ttgtccacagctggcaaattcagtgcagatcaggtggctctcgggggctggtccatgggcggctgtggcgtcaggatggagtcctagctgtgacctgtgc

SEQ ID NO: 56427 - DNA, 106 bp, Homo sapiens
gcattgtgggcctcatcatcttcctcctgtgcaccctcttcatcagaatcgctgttctggcatccatttgcgttactcaggcatttatgatgtggaagttcattaa

SEQ ID NO: 56428 - DNA, 75 bp, Homo sapiens
gaaagagtcaacagcagtggcaacaggaaacatgccctgaactgtcacagaatgaaaccagcgctcttcagcgtc

SEQ ID NO: 56429 - DNA, 100 bp, Homo sapiens
atagctgcaaggaaggtggagatctcctgtgctgcgaccactgcccggctgccttccacctccagtgctggctatggtgaactaaacggtaatgctggag

SEQ ID NO: 56430 - DNA, 100 bp, Homo sapiens
gcggagtaagatgatcgaccgcaacctccgtgaggacggcgagaaggcggcgcgcgaggtcaagctgctgctgctcgggtttgtggatgcacttagatgt

SEQ ID NO: 56431 - DNA, 50 bp, Homo sapiens
gcgccggagacgatgccgttcaaaatgatgcttcaacacccaggccaggt

SEQ ID NO: 56432 - DNA, 100 bp, Homo sapiens
gtggcctgtggagaggagaaacacagggcaccaactatgaagactctcagggcgcgatttaagaagacagaggtgtttccccccgggccggcctgccgtg

SEQ ID NO: 56433 - DNA, 99 bp, Homo sapiens
cagccgacccactactcagagtgagtgaccttggatcagcctcctagtcctggagggaaaagtgcatatgcctctggaacaacagcgaagataacatct

SEQ ID NO: 56434 - DNA, 100 bp, Homo sapiens
agctccgaagaaacggattggagcctgtgacctaccacaggggcaattgaaggaacagactaaaaatcgtgtcctggaaggaaactacaggtactaccag

SEQ ID NO: 56435 - DNA, 100 bp, Homo sapiens
tggaggtagcctggcccggtgggcactgtgatctcagacttccagccttcagaactgtcaaaatgcagatcttcgtgaaaacccttaccggcaagaccat

SEQ ID NO: 56436 - DNA, 100 bp, Homo sapiens
agatttaacattccaacacataaaaattatttatccaacagctcctcccaggatgacgtagctttgccaaagacttagaagctaagcagaaaatgagctt

SEQ ID NO: 56437 - DNA, 82 bp, Homo sapiens
aaaaagccaaaaagataaaagcccggatgaacttcagacaatgcagatcttcgtgaagactctgactggtaagaccatcacc

SEQ ID NO: 56438 - DNA, 100 bp, Homo sapiens
ccgcccggtcgccagggagagtgaatacagctagggacgtgaaaggcctgacctctcgggacacacccagccctgtggacccagacaccgtggaggtgtt

SEQ ID NO: 56439 - DNA, 96 bp, Homo sapiens
gaaaaagaaagcagcagagaaaaaagggagcggtctcgtagcccaagaaggtagagctgagtaaagaagaagtaaaacgcctcattgctgaggcaa

SEQ ID NO: 56440 - DNA, 100 bp, Homo sapiens
gggaaaagaggaactaaggcggaggaactgagacgtttcgaattccagaggatggcattccctgtggatatgctggaaaattgcagccatgaggaattgg

SEQ ID NO: 56441 - DNA, 50 bp, Homo sapiens
tagtggaatatgatcacatcccaggttcacaaaaaggattctggcttttg

SEQ ID NO: 56442 - DNA, 82 bp, Homo sapiens
caggcactggtggcatccagtggtggccagtagaggaggaggtgaacaaggaggagactgaacccggtgcctggctcctacc

SEQ ID NO: 56443 - DNA, 90 bp, Homo sapiens
gaaaagcctctgggagcagaagggaggctccaagacctcatcaacaattaagacctatgccagatttactggtgctccactgaaggtaca

SEQ ID NO: 56444 - DNA, 74 bp, Homo sapiens
gacaccggcgaggaacttggcaggatttggagttccatggagtgatgagattttattttcaagataaagctgct

SEQ ID NO: 56445 - DNA, 113 bp, Homo sapiens
ttttctgtggcatcctgaagttaatggttctatgaaacagtgtatcaaagtgtggactgagctagaaaattatggcatgccgtttagcagaactgaagatgggaagatttatc

SEQ ID NO: 56446 - DNA, 74 bp, Homo sapiens
tcgctcttgtgccctagcaccccgagaaccgtcagtttgagccagatgtttcaccagtgatcattaaagaatgg

SEQ ID NO: 56447 - DNA, 97 bp, Homo sapiens
tgtacggcaacatgtcctgtgtgctttgcaagtgcttctgaaagattaacaggaaacttccaagatggaaactttgtctttccccagatataatgta

SEQ ID NO: 56448 - DNA, 75 bp, Homo sapiens
caaacgtctaccattacagtggtggatgaagactacatccaggacaaatttaatcttactggactcaatgagcag

SEQ ID NO: 56449 - DNA, 90 bp, Homo sapiens
atccaggaggcttgtgtcatctgccagcatttatgaaactgtgctccaagtagggaactctccgcccagttcgccgcaactactacgacc

SEQ ID NO: 56450 - DNA, 100 bp, Homo sapiens
aggggccatggccagcgacggggccaggaagcaattctggaagcgcagcaacagcaagctcccgggcagaagtctggacagctgatcacctgaaagagag

SEQ ID NO: 56451 - DNA, 75 bp, Homo sapiens
caatgctgcgaaagctgccaaaagtgacatgcagttccctgtattgaacactgatatacaaggaatgaatagaag

SEQ ID NO: 56452 - DNA, 82 bp, Homo sapiens
cgacaagccgctggcagccgcggatctcaccgccgctcaggcttggtgatccagctatttttcctgccgtaattgtggaaca

SEQ ID NO: 56453 - DNA, 75 bp, Homo sapiens
ctgacgaagcattttgcaacgcagttcggagttattatgaggttcattttccagacactgaaagagcagaatggc

SEQ ID NO: 56454 - DNA, 82 bp, Homo sapiens
cctgcactactggggccaggagctccccacagccgggaagattgtcaagtcgcgtggggcaggcagtggcgctgcgggccaa

SEQ ID NO: 56455 - DNA, 83 bp, Homo sapiens
ctcgcgaccgccgagcctgcagcctgccccgcggccaacatgagcttcttgttactagacgcttgaagcaaagctgccatccc

SEQ ID NO: 56456 - DNA, 83 bp, Homo sapiens
gcggacagcgggctggagcctgacgagctggcgggaaaaccaattctgtgtcctcggaggaccacagcccagttgggccccag

SEQ ID NO: 56457 - DNA, 110 bp, Homo sapiens
gacgtcttctccacgccgctccgactccaggggagccgtggcctcctctccgccctagcgctgagctgtcgcctggttgggcccggaaatgggacgtcgcgctttctcag

SEQ ID NO: 56458 - DNA, 75 bp, Homo sapiens
ccgggtgccgaggagcgggaagagttgctggggtgagggttcagagtatggtgccagtggagaagatgcgctcag

SEQ ID NO: 56459 - DNA, 83 bp, Homo sapiens
gtgagtaggttggtccgaagtttgaaccggacagaagcgctggtcggcgtctggcggtgggaaggatacgagcaagataaagc

SEQ ID NO: 56460 - DNA, 75 bp, Homo sapiens
aaaccttcgactatgcagagacatgagatggtagccaacccctcagggcaaacttgaagataaatcttttgactc

SEQ ID NO: 56461 - DNA, 82 bp, Homo sapiens
tggttggcttggagctggagaacgagggtaagcaggaagagaacgacgtggtggagaagctgaacctcttcttggatctgct

SEQ ID NO: 56462 - DNA, 50 bp, Homo sapiens
actgtactggtatagcaatcaaatgacggcgatctcgatgtcgtgtttgc

SEQ ID NO: 56463 - DNA, 101 bp, Homo sapiens
acgaggcgggacgtcatggaagtggaaaaagacctcgatgaagttctgcagacccactcagtgtttgtaaatgtttctaaaggtcaggttgccaaaaagga

SEQ ID NO: 56464 - DNA, 90 bp, Homo sapiens
ctgccgaacgacgtggtcctacaggtagacttgggccttctgcgctttgtcacggctgtcgggacacagggcgccatttcaaaagaaacc

SEQ ID NO: 56465 - DNA, 80 bp, Homo sapiens
cgactgccagtggatcaccgcgctgcactacgcctttcaggacgagaaccacctgtgtactaatggtcacttgatgtgcg

SEQ ID NO: 56466 - DNA, 90 bp, Homo sapiens
tatagccaaggaaggcttcgagaagattagcaaaggtgctaatccagtggaaatcaggagagctcaaagatcctctcaagacagtatccg

SEQ ID NO: 56467 - DNA, 83 bp, Homo sapiens
agcacatcagcgaccgggagaacatagacgcccaagaagatgaaaggattgttcttgttgacaacaaatgtaagtgtgcccgg

SEQ ID NO: 56468 - DNA, 145 bp, Homo sapiens
tgatcacctgtctggagcaaggaaaagagccctggaatataaagagacatgagatggtagccaaacccccaggagacgttgacatttagggatgtggccatagaattctctctggaggagtgggaatgcctgaaccctgctcagc

SEQ ID NO: 56469 - DNA, 88 bp, Homo sapiens
catggcccggccacagctgtcacacacgatcctcaccgagaagaactggtacaagaagaacttgaaggccctctacgtggtgcacccc

SEQ ID NO: 56470 - DNA, 75 bp, Homo sapiens
ccccagatccatttacactttacaatggacttcagcagaaatctttatgatattggggaacaactggacagtgaa

SEQ ID NO: 56471 - DNA, 90 bp, Homo sapiens
caggactcgcctcctcagggttccctgtgctgccacttttcagccatggccacaagcaagtgcagccgcggagccctgtacacaggcttt

SEQ ID NO: 56472 - DNA, 75 bp, Homo sapiens
cttgggcctcgcgccggctatggccgtgccctggggctgagccctcagattttcagctgaactctcatctctcaa

SEQ ID NO: 56473 - DNA, 98 bp, Homo sapiens
atccgtgtcggagtccttacaggctgacaaacgggctcatcataatgcactggaacgaaaacgtagggaccacatcaaagacagctttcacagtttgc

SEQ ID NO: 56474 - DNA, 97 bp, Homo sapiens
ggtggcaccacaatctcctaccttccaagcctattaaactggaaattgatgaagaaaaaaacctgctgatcaagtttgacccttcctacagaaacga

SEQ ID NO: 56475 - DNA, 82 bp, Homo sapiens
caacgaggaactcaaagtggatgaggaaaggggatatgagactttctactcggaatatcctgagtgttgcgtggatgtaaaa

SEQ ID NO: 56476 - DNA, 98 bp, Homo sapiens
ccggccggagctgggtctggagacgccgtggcagcctgaacggagtgtgcgacggattgggaggtgagcgtcctgaccaccctggagcgtaggttcaa

SEQ ID NO: 56477 - DNA, 82 bp, Homo sapiens
ggacggcggcgcggagaaggcagattttgcaagaacgaggctcaaggatgtgagggacacagtattgacagctgaagaaatg

SEQ ID NO: 56478 - DNA, 76 bp, Homo sapiens
cgccaggccaccaccggccgcctcagccatggacgcgtccctggagaagacaggtgatttggcttctgcacagtta

SEQ ID NO: 56479 - DNA, 75 bp, Homo sapiens
gctggttgttccgttgcgagctgcagctgcgatctctgtggtaggcccaggtggtcctggctctggcaaaggcac

SEQ ID NO: 56480 - DNA, 82 bp, Homo sapiens
caagagggtgttcgactgctagagccgagcgaagctaaaggcatgacttcctggcaccacagggaaaatcgggtgcaagccc

SEQ ID NO: 56481 - DNA, 75 bp, Homo sapiens
ggggggcaagctgcagctggtgtgtttcgacaagttaattggccttggtcctcacagctccaaaaagaaacagga

SEQ ID NO: 56482 - DNA, 76 bp, Homo sapiens
atgattcagggtggggacttcagtgaagcccctggatgaaacactgaagaaagcccttacaggtcaccttgaggag

SEQ ID NO: 56483 - DNA, 100 bp, Homo sapiens
ttcctcctcctcctccccaccaccaccatctccatcacccaccaacaacaccacaataatccacagccaagtgtcaaatcaacagtgccttgacatcttt

SEQ ID NO: 56484 - DNA, 75 bp, Homo sapiens
gccttccatccgcttggccccacagatgagggttactaccagggtggaaaatttcagtttgaaactgaagttccc

SEQ ID NO: 56485 - DNA, 96 bp, Homo sapiens
ctgccggcgcctcaaaacctcacctgttgaagctgctctgttaaaagcgaaaatgaaacaattgcctgcggcaacagttcgactcctttcaagttc

SEQ ID NO: 56486 - DNA, 73 bp, Homo sapiens
acaccttttccacagggaattgagttggcgggcagggctgggcagcggcctgagtctcagcggacttgtccac

SEQ ID NO: 56487 - DNA, 100 bp, Homo sapiens
ttactgggataattatccaaataaattgcaagcattctatccaaatgatgatctcaatgccacccaccaacactgtgttttggccggttcacaacctcgg

SEQ ID NO: 56488 - DNA, 75 bp, Homo sapiens
agcaagctctataagattcttcaaggtggggttggcatcccccacatacgcctggatgtgtaaatacaactgaag

SEQ ID NO: 56489 - DNA, 80 bp, Homo sapiens
cccctgtaggccaaggcgccaggcaggacgacagcagcagcagcacgtctccttcaggtctggagcccgagatccagaag

SEQ ID NO: 56490 - DNA, 98 bp, Homo sapiens
gccgaccaggcctggctcgcgcctctcccaggacccgcctggctgcgagatatatgccatggacaatattaccaggcagaaccaattctacgataccc

SEQ ID NO: 56491 - DNA, 82 bp, Homo sapiens
catgttcgagtctggggctgtcgctgtgctctgatgacactcctgtccaggacactaaaatgtgaagaacagctcattgtgc

SEQ ID NO: 56492 - DNA, 98 bp, Homo sapiens
tcttagaactagaacttagaactttatcttgaaaatgtaccactgttgcagaagctcctcacagagtatgtgtcaggaactaattctgaagcatcaaa

SEQ ID NO: 56493 - DNA, 128 bp, Homo sapiens
gtcaactgctcacgacagaaggcgtctcatggcgttggaataccggctctcagcggctgtatcttggagatggccgcttccatctggagtctgtcatgattgccaaccccaatgtccccgcttaccgg

SEQ ID NO: 56494 - DNA, 82 bp, Homo sapiens
gaacagcacccccttctttaaggagcttgaaattgtaattggagatgagcacatatcttttaccacatcaaaaataggttct

SEQ ID NO: 56495 - DNA, 82 bp, Homo sapiens
cctccttcgtgtcgtacgtacgccctgaggtggcacaagaatggctcaactctccaaatagagagaatttctatcagttgca

SEQ ID NO: 56496 - DNA, 155 bp, Homo sapiens
ctgtacgtgcttgccacaatgcccaactaataatttggacttttcctatacatgggttccaaagggctgactgcgaaacactccagcgggaggaagaagaggcctttgccagcagtcagagcagccaaggggcccaatccctcacattctccaag

SEQ ID NO: 56497 - DNA, 90 bp, Homo sapiens
tttacttgtgaatgaagattcattatgagatatgagatcctgactccaaactccattcccaagggtttcatggacgggaagcaggcgtgc

SEQ ID NO: 56498 - DNA, 74 bp, Homo sapiens
ttctcacgtgcccatcagtgacagcaagtccattcagaagagcaggggagagaagacagaagaggttggagagg

SEQ ID NO: 56499 - DNA, 75 bp, Homo sapiens
ggcgcgagagggcatcgtggccccactgcctggagagtggaaaccatggtacaggatttctccatgttgcccagg

SEQ ID NO: 56500 - DNA, 100 bp, Homo sapiens
cgcctgaggaccggcaacatggtgcggtcggggaataagaacactctgctccagccaaggtggtgagggcagctgttcctaaacagcgcaaaggcagcaa

SEQ ID NO: 56501 - DNA, 100 bp, Homo sapiens
acttttagttgaagatataaataaggataaaaacctggttcctgaagatgaggcaaatataggggcatcagtgacagctatattgtgcgtgtcaaggctg

SEQ ID NO: 56502 - DNA, 98 bp, Homo sapiens
cagacgcagggcacccggaggaaagtctgttactactacgacgtacctccctgcacttggctattcaaaacgggtccatctgatgaatcctatggttc

SEQ ID NO: 56503 - DNA, 100 bp, Homo sapiens
ggccttagctgtgctcgcgctactctctctttctggcctggaggctatccagcaggtggtgggacacacgcaggggccactagatgggagcctgtatgct

SEQ ID NO: 56504 - DNA, 101 bp, Homo sapiens
attttactaagcccctaaaatgtcgagatttgtacaagattttaatgagaatggcttcattgatgaggaggatctgcagaggatcatcctgcgactgctga

SEQ ID NO: 56505 - DNA, 100 bp, Homo sapiens
gtaactgcaaagatgctgtccgtgcgcgttgctgcggccgtggtccgcgcccttcctcggcgggccggactgaaagacgagaatccaggacttgaatcgt

SEQ ID NO: 56506 - DNA, 83 bp, Homo sapiens
tctcagccgccaaagaccccgtccggtagaatctggtgggccctttattgaccaggtttacgtcctgcaaagttacgcagagg

SEQ ID NO: 56507 - DNA, 87 bp, Homo sapiens
ggactgtcccgactgggtcctggcagaaatcagcacgctggccaagatggtgctggctgctgtctacaaggctctgagtgaccacca

SEQ ID NO: 56508 - DNA, 75 bp, Homo sapiens
ctaaagggtggcctggagcacggagaaccattaatcatctctaagcatttgacattgtgcagcaaagaaatggtt

SEQ ID NO: 56509 - DNA, 75 bp, Homo sapiens
cgttgacaaggcactgctttttcatgacgggcccgatgatgcacaacaaaaaatagaacctcatcacacagcagt

SEQ ID NO: 56510 - DNA, 82 bp, Homo sapiens
ttttcttaacctgggaagtggaaccggatatttaagtacaatggacatggatttgattgacatactttggaggcaagatata

SEQ ID NO: 56511 - DNA, 76 bp, Homo sapiens
gcggagaaagattctgccagaagaagagggtgtcgacgtgatcgtgaacgccagcagcgtggaagacatagacgcg

SEQ ID NO: 56512 - DNA, 100 bp, Homo sapiens
ccctaatggaggtctccagtttcggtggggtggaagacaacccgtgagtattacaccttcatgtgggttactttgcccattgacctaaacaacaaatcag

SEQ ID NO: 56513 - DNA, 98 bp, Homo sapiens
atttcttttgcaaccctctgcattccatctctatgagccaccatgctgtgccttcctcacctactgtgccagggattccgccatcaaagctcagactg

SEQ ID NO: 56514 - DNA, 82 bp, Homo sapiens
agcccttccagatacagctaccagaatgattacggacctgaagccaaagaacaagatgcgctagtggacagattgctgacca

SEQ ID NO: 56515 - DNA, 75 bp, Homo sapiens
gtctattctgaactcaacttctgaaatttacagaaacaaactacatctcaggggccgagatggacgaaaaaatgt

SEQ ID NO: 56516 - DNA, 100 bp, Homo sapiens
gccaagtatccgccagtcaataggaagtacgagtgtgaggatggtgaccactatgatgccctgagggactgcctcaaggccatctccctaaacccatgcc

SEQ ID NO: 56517 - DNA, 100 bp, Homo sapiens
ccggcagggcggagcctcccctcgcaggtgcctcatctccagacatggagcccagctatgggggaggtctctttgacatggtaaaaggaggtgcagggag

SEQ ID NO: 56518 - DNA, 100 bp, Homo sapiens
cctgtttgtcttctgctttggcccaggatgccagggatcagctgaccatgtggttagcatctcgggagtgcctcttcagttacaaccaaacagcatacag

SEQ ID NO: 56519 - DNA, 100 bp, Homo sapiens
gattggccagtgtggcaaccagatcggagccaagaggcagttggtgtcaccagccagcgaccagtgttttgtccttttcataaaaaggagcagctgaagc

SEQ ID NO: 56520 - DNA, 75 bp, Homo sapiens
actgacagaagcagtggtcgaatccagtagaaaactggtcaaggaagctactgctgtggatgtttttcgaaggat

SEQ ID NO: 56521 - DNA, 74 bp, Homo sapiens
ggcgcttcaccgagatctacgagttccatgtccatgagctgattccagctgtgatgacctgcatcgtgagcaga

SEQ ID NO: 56522 - DNA, 98 bp, Homo sapiens
atgaaccttgccctggggttaacactccagtgggatgaacagacaaaccccacaagcactgcatacgatcacccggaagttcaggctgaattctgaag

SEQ ID NO: 56523 - DNA, 75 bp, Homo sapiens
gtccagaattcacttttactaccccaaagtttgatattgatgatgttaagaagttcaaaccgggttacctggaag

SEQ ID NO: 56524 - DNA, 100 bp, Homo sapiens
tgccaggcctgcatgaaacgttgttcttttttgtgggcttatgctgcacaattggcagctgataccccaatgtccttctttgactttgtggttgatcctc

SEQ ID NO: 56525 - DNA, 96 bp, Homo sapiens
aacagtgaagatgcaattgaaattacaagcgaagaccgttttatacaggaggaagttaacatccctaataggagggttctggttactggtgccact

SEQ ID NO: 56526 - DNA, 75 bp, Homo sapiens
catggaaacctattgttcgcagaaacacacaagtctgcgggccaggcatcgacatccgcaacgactatcagcagc

SEQ ID NO: 56527 - DNA, 97 bp, Homo sapiens
atggtgggacaggtcttccacctgaagactgtagtgtgtcatcgattactaaagcaaaagatgatggaagcattgctgttgcccttggttatactgc

SEQ ID NO: 56528 - DNA, 98 bp, Homo sapiens
gaaagggtcagaggcttcctaacgcagactcgagtgcgaagcgcgcagtcgccggattatctgactccagaaaaagaacgcgtacaggaagatcttgg

SEQ ID NO: 56529 - DNA, 100 bp, Homo sapiens
tctgcgaacacagtagtggaagatgtaaagcaatatttcgagcagtttggcaagtatgccaccacgggctgttccctgaccctgcaccatacggagaaac

SEQ ID NO: 56530 - DNA, 75 bp, Homo sapiens
ggctgggagctctgcagtccttgaaggccccggagctgcagttctacaccagcgccgctgcggtggccatgctcg

SEQ ID NO: 56531 - DNA, 83 bp, Homo sapiens
ctgcgtggaagcgtttgctgccaccttctgcatcgtagacaatgcagatcttcgtgaagactctgactggtaagaccatcacc

SEQ ID NO: 56532 - DNA, 82 bp, Homo sapiens
agaaatcacattggaccctcctcccaactgtagacagaatgttgctgcgggatgtaaaagctcttaccctccactatgaccg

SEQ ID NO: 56533 - DNA, 100 bp, Homo sapiens
tggacagccttgcatggatcatgatagacaaactggagagaatctaaacagtgggaatgtttgacatctgaatgcagagtgctcctaattgagtctttag

SEQ ID NO: 56534 - DNA, 100 bp, Homo sapiens
ggaggagctagggctggagcctctccagcctcccgcgaaggcccggattgcatttctacaaggcgaaagaaaaggtcaagagaacctgaagaaggactta

SEQ ID NO: 56535 - DNA, 100 bp, Homo sapiens
cagagctgaagcagaagatcgaggacacgctatgtccttttggcttcgaggtttaccccttccaggttgtactcgtaaaacaaggatcatcgatgttgtc

SEQ ID NO: 56536 - DNA, 100 bp, Homo sapiens
cacagttcctgggaaggtggagccaccagcctctccttggttaaagctgaagctcaacaaagatatagtgatctctgtgggcatttataatctggtccag

SEQ ID NO: 56537 - DNA, 96 bp, Homo sapiens
cacggctttactttcacccggggcctttccgtccgagaaattctcgcagagcttacaggaacagggtctgttccacaaaaaagacagtgccaatca

SEQ ID NO: 56538 - DNA, 95 bp, Homo sapiens
cctcctgctgctactgtgtccagcgcaggttcgatacaagaggctgttttcctagcgtggcttgctgcctttggtaagaacatgtcgtccatctt

SEQ ID NO: 56539 - DNA, 100 bp, Homo sapiens
ctcgcggcaggctctgcgggccaggatgagttctaagcacaggtcaccatcagaaaagctaagtttgctgtatagtgaggatcaggagatctgatcctga

SEQ ID NO: 56540 - DNA, 73 bp, Homo sapiens
caatgactctttctttaacttttttgcccctcctgaaggtgaatatgcaggttttgatgagacgcagccaaca

SEQ ID NO: 56541 - DNA, 100 bp, Homo sapiens
cggagatggtgcagaagatggaggagcaaacagtgacgaatctcagcttctgacaccaggaaagatgagtcagcgccaaggaaaagaagcttatccaacg

SEQ ID NO: 56542 - DNA, 100 bp, Homo sapiens
gcggtcagctcgctgcagcttcaacggagacttcgtgtgcggacagtgtgtgtgcagcgagggctgatgtagccgcctgtcccgggagcctggactgtgc

SEQ ID NO: 56543 - DNA, 96 bp, Homo sapiens
tgctgtgctgttggcagcaaggaccgctcgctttctgtctgggtaacagagattcaaaggtaccttcagaaggaaagaaatctctctacacagatg

SEQ ID NO: 56544 - DNA, 100 bp, Homo sapiens
cacctgctgatgtggcaactgctgatgctcatggtccccatggcatgggggcctcagggcagcctgcctggagagccaaatggagaagggtatatttaat

SEQ ID NO: 56545 - DNA, 76 bp, Homo sapiens
tatcactcgctcccttgatgatcttgagttgctctaggtcgtaaccagcctttgaaaaaggagaaaccaaaatgga

SEQ ID NO: 56546 - DNA, 100 bp, Homo sapiens
cggcggcgccgggtggtggttaaaccatgttaaggaggattttacagagggtttgtatttcagcagtcagaaaaatttgcaaaggtggaaaaccaatacc

SEQ ID NO: 56547 - DNA, 95 bp, Homo sapiens
aagcatgaggctaacggcttggcttcagtgaacgcaccgggatgtgcaggccgggagagctagagccggtgcaggccacgcagaacaagacaggg

SEQ ID NO: 56548 - DNA, 100 bp, Homo sapiens
gtgaatatgccaaggacacctctaaacttcccccatgtcagtcagatgaagttactactatatttcaccaccctgcagcaaatggttatgagccttagag

SEQ ID NO: 56549 - DNA, 97 bp, Homo sapiens
tcctgcttcatgcgcgtcagcctgctgccggacgagcagatcgtgggcatttctcggatcactaaggaggaagagcgagagaagaagttttctagaa

SEQ ID NO: 56550 - DNA, 75 bp, Homo sapiens
acagcaacagctctgccggctggaagatctctggaaacatggctacagaacatgttaatggaaatggtactgaag

SEQ ID NO: 56551 - DNA, 101 bp, Homo sapiens
caccgcctatgtggcgcaggtctcccccacggatgaggagaaggctgagtcatcactagagagtgggaagggcagcagcagcagagaatccaaaccctaaa

SEQ ID NO: 56552 - DNA, 46 bp, Homo sapiens
gcgggcccgctccgacgcggaaggcagcacgctggctcttctcctg

SEQ ID NO: 56553 - DNA, 83 bp, Homo sapiens
ctcagggacccagagggaggccagcagggtgctttcttctgcgacctggtactcatctacctcatcaaaaagagagagtttta

SEQ ID NO: 56554 - DNA, 100 bp, Homo sapiens
gccctcaaggacagcagaactaaagaaagctttaaaagaaaaagaaaacagattattattgcaacaaaggaggaacgatgatgaatgtcgggcatttgtg

SEQ ID NO: 56555 - DNA, 75 bp, Homo sapiens
attacagtctgctgggtttttcagcattgaccaggatccttactttagaatgacaagggacgtcgcccccaggat

SEQ ID NO: 56556 - DNA, 83 bp, Homo sapiens
ccgaaaacaccttagtttgcaccgagagaccatttgcagcggacctgcctagagctggaacgttacctccagagcgagccctg

SEQ ID NO: 56557 - DNA, 100 bp, Homo sapiens
ctcctcctcggcgggagccctcgcgacgcgcccggcccggagcccccagcgcagcggccgcgattggcggcagtaagcacacaatgaatgatcacctgca

SEQ ID NO: 56558 - DNA, 100 bp, Homo sapiens
ggggagggtcattctcacagagaagcaggaagtcaacatcttggcacacagcactccgtttaaggaaaaaatctgagaaaaaagataaagacggcaaaag

SEQ ID NO: 56559 - DNA, 100 bp, Homo sapiens
ggctttcagccttgaggcaacattggatattattgaggccctgctacccacaaggcgctggtttaataccatcctggatgattcccaccttctggttcac

SEQ ID NO: 56560 - DNA, 82 bp, Homo sapiens
cctccgagcagcccggggatccagcacgcagataacgaaggaggcccaacttcattcaataaggagcctgacggatttatcc

SEQ ID NO: 56561 - DNA, 83 bp, Homo sapiens
ctggcctgggcgctccggtggcggcggagtgggtaattccagaattgattggccataccattgtcactgtattactgctcatg

SEQ ID NO: 56562 - DNA, 100 bp, Homo sapiens
tccgccactcatcaccaatgtcacggggcttgtgttattgaccgtgatggacgtctatttaaataccttttggattaccttcatggagaagttcagattc

SEQ ID NO: 56563 - DNA, 75 bp, Homo sapiens
ctgcacattaggttgcagtatgtggccagttatttgcctcagtaaaagagatgtgaacactctgcaaggaggtgg

SEQ ID NO: 56564 - DNA, 100 bp, Homo sapiens
caggcacctccgaaacccgattcaggtttgctggatggatttatgacggggttgagcattcatgatggtacctggaagtcagcaatttatggttttggag

SEQ ID NO: 56565 - DNA, 83 bp, Homo sapiens
agtcagtcattttactgtcaagacatttcttcggcattctgcaacaggaatgaattcttccaaaacaaaactagaactgcaaa

SEQ ID NO: 56566 - DNA, 97 bp, Homo sapiens
ggcctagaactccaaggagaaaggcggcgatcccttcccactggaggcatgtgatgagaggaaatcaccgaaaacgtggctgcttcaaggatcctga

SEQ ID NO: 56567 - DNA, 110 bp, Homo sapiens
aaagaagaagagcgaccaggccctgaactgcggtgggactgcctcgactggcagcgcgggaaacgtcaaactcgagggatttcagtcataatcggttgtctaactggaac

SEQ ID NO: 56568 - DNA, 100 bp, Homo sapiens
ctgcgaaagtgctcgggaagagggagagcaaacttggctcagcccaatgccctgatgcagaaggctttcaactcctcgtccttcaactccaacaccttcc

SEQ ID NO: 56569 - DNA, 90 bp, Homo sapiens
cgcactccgcctcccccggctcagcccccggccgcggcgggacccgaggaagattttcagtcaatgacttatggatttaaaatggctaac

SEQ ID NO: 56570 - DNA, 100 bp, Homo sapiens
accgaaatgagactccctcagatccagtgataattgacagtggccacagatgtctttaattccaaaaacctggccgttcaggcacaaaagaagatcttgg

SEQ ID NO: 56571 - DNA, 100 bp, Homo sapiens
cggaggattaccatcaccggaagcattctcatcaccaccatcgcttccaagggtgagctgcagatgtggcccgagctgctgccccagctctgcaacctgc

SEQ ID NO: 56572 - DNA, 74 bp, Homo sapiens
taacatccccgggtccgactacatcaatgccaactacatcaagacctcccctcaactgggggctcgcttagtgt

SEQ ID NO: 56573 - DNA, 101 bp, Homo sapiens
aagcatggggctaactccagaatcccccattgacatgaagacatcttatccatcctcactgctgtcaacgatgatgtgagtcgaagagtggacaaacaggg

SEQ ID NO: 56574 - DNA, 136 bp, Homo sapiens
gtgaaaaggctgatagcttttacatcatagagtctggcgaagtgagcatcttgattagaagcaggcagagcatcctggccagaacaagccaaggagccaagacgagagggacacacggacaaacaacagacagaag

SEQ ID NO: 56575 - DNA, 75 bp, Homo sapiens
cgctatggcgcactggagtaccctgttcctggcatgtctctttctgcacattcctggcacatgagtacccagacc

SEQ ID NO: 56576 - DNA, 75 bp, Homo sapiens
tggactccctttaatccagtgactgtcaggtcgatcatatcaagctaccgactagaaatactataatcagttgga

SEQ ID NO: 56577 - DNA, 100 bp, Homo sapiens
agacgctttgtggttgatgttcggcgctgtgaggagctggagaagaccttcaaccgcagcaggagggagtccaggagccaaggttgccgcggtgtctccg

SEQ ID NO: 56578 - DNA, 51 bp, Homo sapiens
ggaacgaggggtgaagcggcccaggtgaggaactgccattggatgtccaga

SEQ ID NO: 56579 - DNA, 75 bp, Homo sapiens
tggtgtgattagcttcgcagtctggaaagctttaggagttcacagtgccctggagatgtacaaggatgattggaa

SEQ ID NO: 56580 - DNA, 50 bp, Homo sapiens
cggaaaccggtagcgcttgcagcatggagcgggacggtatgcgggccatc

SEQ ID NO: 56581 - DNA, 100 bp, Homo sapiens
gttgagtgaagaaaaagagcaggaagtcattacatggtgcagacaaccatgcgtgaaaacctggccacagttgaggggaactttgccagcattgatgaac

SEQ ID NO: 56582 - DNA, 83 bp, Homo sapiens
ctcaacttcctgatagatgtacactgaaaactggacattataacattaacaatggtacagcagttccatgaaagtcatttgcg

SEQ ID NO: 56583 - DNA, 100 bp, Homo sapiens
tatggccagggggtagtcggacttgggattggagagaaacaggaactgagctgaactgtcccaagcaataaacagtggtacattgttatcaaaaccgtcc

SEQ ID NO: 56584 - DNA, 100 bp, Homo sapiens
ccgctggagcgactctgggattcagacaccgcaagctgctttcggaagggcttcaggaggggattgaggaaacttgaatatttttgtatcctgaagggag

SEQ ID NO: 56585 - DNA, 75 bp, Homo sapiens
tgacccacggccgcctccggagcccgacgcgggggcggaggaaagcgcaaagggaaaagcaagaagtggaaagaa

SEQ ID NO: 56586 - DNA, 100 bp, Homo sapiens
ataatattgaactgggcacagcatgcggaaaatactacagagtgtgcacactggctatcattgatccagagtatgctcaggtaatcaaaatgttgggaaa

SEQ ID NO: 56587 - DNA, 85 bp, Homo sapiens
aaaatcatcttatcagacgaaggcaaaatgtatgctgttcgggggtcttgtctggattttggttgcctcctccaatgttcctcta

SEQ ID NO: 56588 - DNA, 83 bp, Homo sapiens
agttggcggaagcacttggaactcctttataagtgtcagctgtgaggtgtgtgcagtggcctcagggatccggaaagtctagg

SEQ ID NO: 56589 - DNA, 100 bp, Homo sapiens
gtgaacaacctgaacgtcaccgaggagaagtaccaggaggcgttggccaagggatggtgccatgacaatggtgtgaactacaagattggagagaagtggg

SEQ ID NO: 56590 - DNA, 102 bp, Homo sapiens
ggttgggagttgttcctcttacagcatggtcaacagttgtcaccgacagatggctgagattgctgtgaatgccgtcctcactgtagcagatatggagcggag

SEQ ID NO: 56591 - DNA, 90 bp, Homo sapiens
gggagtattatgaaaagatcctgcccctgagcctggacctgcccagcccccggcccttcgctttgcctctgggcagccctcgaatccccc

SEQ ID NO: 56592 - DNA, 100 bp, Homo sapiens
ttctacatcacgtttcttccattcactcactggaatattgacccttatttatccagaagattgatcatcatatgggttgcatttggattcagtcctcagt

SEQ ID NO: 56593 - DNA, 100 bp, Homo sapiens
aatgcttgaggctccttacaagaagctatgatacttgggtccatagtaatgatgttgatgctgaaattgaagatccaccaattccagaaaaaccatggaa

SEQ ID NO: 56594 - DNA, 75 bp, Homo sapiens
atgtcagttaactctgagaagtcgtcctcttcagaaagggagagataatgcatgtgagaaaacttcatatatgtt

SEQ ID NO: 56595 - DNA, 97 bp, Homo sapiens
gtgtataacaaggagttgaaaacagacttcattaaaattgaggagtttttagaacaaaccctggctcctccaaggtctgccatcatggatgttctcg

SEQ ID NO: 56596 - DNA, 83 bp, Homo sapiens
gcaccgacgtcatcatgctgaccaccaatcagatccgtaaggtgagcatgggtttatgcgtcttaggcattattgtgatggcg

SEQ ID NO: 56597 - DNA, 82 bp, Homo sapiens
tcctcaccatgcccttctgcttcaaacaggtggaagttaaacgagctgagcctcgggacagcaagagccaagcgccgggaca

SEQ ID NO: 56598 - DNA, 50 bp, Homo sapiens
aaatcttcgaagacttttcaacctgcctagagctggaacgttacctccag

SEQ ID NO: 56599 - DNA, 101 bp, Homo sapiens
cttgcattaactttaagacctcctccactggcaaagagtcacctaaagttaggcggcactccagccccagctcggttttttggggaaaacaaacaaaaaac

SEQ ID NO: 56600 - DNA, 75 bp, Homo sapiens
ctgggatccagcgagcgacatggactgttatgaacactatccaacaattaatgatgattttaaattcagcaagtg

SEQ ID NO: 56601 - DNA, 82 bp, Homo sapiens
cagctagaattggaaaaccttacaagacgtgcgcagtcaataacggaggctgcgaccggacatgcaaggacacagccactgg

SEQ ID NO: 56602 - DNA, 97 bp, Homo sapiens
ctccctggactttaacacgcgcacgcaggtgaccagacagccgctccgaccgctggtcccagatgccagcaagcagcggctgatggagaacacagag

SEQ ID NO: 56603 - DNA, 83 bp, Homo sapiens
gccgaggccgggaggccgtgcccggagcaaaagactgttgaagtagagagcattttgcccagctcactcggattctttgctgg

SEQ ID NO: 56604 - DNA, 98 bp, Homo sapiens
aaggaagcaagcagttcagaagagccaaggaataaacatgcaatgaacccaaaagggttgctaggaagaggctcaatgtttgtgttttcaccagatca

SEQ ID NO: 56605 - DNA, 74 bp, Homo sapiens
gctggccacacggaatttctcagttcagagggctgtgtacaaggacctggtgctcttgctccagaaagactcac

SEQ ID NO: 56606 - DNA, 100 bp, Homo sapiens
acgccaggatttcctggaagcagagaaatgcttgaaatccatggcccaaaatgactctaccagtggagactctcttctgtgaagaagacgaccagataag

SEQ ID NO: 56607 - DNA, 75 bp, Homo sapiens
gatagtttgagagtaaatgggttaccagaggaagagctaagagcatgaagactttttaacagttgcagagtcact

SEQ ID NO: 56608 - DNA, 99 bp, Homo sapiens
cgtcccaccgggcaggatgaaggcagagcgtgtggcatctccacctcaaggatcgtaaagctgaaaattgaaatcatgaaagtagacaggactaaactg

SEQ ID NO: 56609 - DNA, 83 bp, Homo sapiens
ccacgtagccgtcagcgacgggcgccacatgttcgtctggggcggctacaaggttgtggcagcactgcctgaaggtatgagac

SEQ ID NO: 56610 - DNA, 75 bp, Homo sapiens
tggcaggagcatgggcttcggaggcctatagcccgcagaactctaagaaggagctgatgtggaggagcagctgag

SEQ ID NO: 56611 - DNA, 50 bp, Homo sapiens
aggtggagctccggcagccgccctgatctcccttgagtttagaaatctgg

SEQ ID NO: 56612 - DNA, 98 bp, Homo sapiens
cgctgtcgtgctcctctactcgaccagagggtggcatccttctgcaccctgacagatatgcagcatgggcaggacctggaaggggcccaagagctgcc

SEQ ID NO: 56613 - DNA, 107 bp, Homo sapiens
atgtatcgccagcgcttcctgtattccttgtatcgacatacacactgggtacgctgtgccaagtactaggttttgacaagcttgcatcatgcgtgagtataagctag

SEQ ID NO: 56614 - DNA, 74 bp, Homo sapiens
tggttcttggtcctgcagcttataatgttccattgccaaagaaatcggatgctagacatgcagctgaagaagag

SEQ ID NO: 56615 - DNA, 97 bp, Homo sapiens
ctgaaacagaaattctggaacacctatatgcttgcagatgccagcaagttacctaacctgaaagaacttctccagtcctccggagacaaccacaaac

SEQ ID NO: 56616 - DNA, 100 bp, Homo sapiens
ctgcctgtcgcttgtcttctattcaccatggcttcttctgtgaaaggagatgaccttcaggccattaagaaggagctgacccagataaaacaaaaagtgg

SEQ ID NO: 56617 - DNA, 101 bp, Homo sapiens
taatatttaagaaagaagatgttaactttcaggaagacctccgtgtggatggccgtggctgtgaggactaccgatgtgtcgaagtggaaactgatgtggtg

SEQ ID NO: 56618 - DNA, 52 bp, Homo sapiens
gattccaagtaactcttatttggcttttatcttgagaacatggtgtctggag

SEQ ID NO: 56619 - DNA, 100 bp, Homo sapiens
ggggaagcccttctggggtccgaggccgcgctgcggggccgcccacgctgcgctccaggtcaaaatgcagatcttcgtgaaaacccttaccggcaagacc

SEQ ID NO: 56620 - DNA, 75 bp, Homo sapiens
ccgcccccccagacaagatggacaccgcggaggaagtaagactttgaccccgacgcaggcttcagtgattgccgc

SEQ ID NO: 56621 - DNA, 100 bp, Homo sapiens
cacatgtgatgtaggcgtgagctccgatgatgacaagggggcccaggcagcacgcattagtgaccagaaggatcccaaggatcgaatggttcaggttgtg

SEQ ID NO: 56622 - DNA, 100 bp, Homo sapiens
ccaggaacgaatctctcaggctgcatcaggatgaatgatgacccaagtatggaaccttctcttggagtcaagaagcctaccaaagccctgctctttgtac

SEQ ID NO: 56623 - DNA, 82 bp, Homo sapiens
ccccatcttcggcatgtccttcgcctgccagtcgctccataaaaatacagactcaccagttcctgctttgatgtgacatgtg

SEQ ID NO: 56624 - DNA, 83 bp, Homo sapiens
cccaccgctgccctcagctccgagtccagggcgagctggtctcttgtggctcagcgccgtgcggaggttgaagcgtacctgcg

SEQ ID NO: 56625 - DNA, 82 bp, Homo sapiens
aaagacgcattgcaaacttaattaaagaactggccagatcatatactcctatgaaaggaggaatctccaatgtatggtttga

SEQ ID NO: 56626 - DNA, 90 bp, Homo sapiens
caccgaccggcctcgagcgccccggcgggaggacactttcttcatgagcaacaaaccccaaagatacaaagacaagctaccagatagtgg

SEQ ID NO: 56627 - DNA, 97 bp, Homo sapiens
atcctgaatggtttaacgtgtacaacaagattgcattcatggcttctctggcaacccacttcagcaatcagaacagtgggattatcttcagcagtgt

SEQ ID NO: 56628 - DNA, 100 bp, Homo sapiens
ctcattcaccccccaggagaagctgtggcagcagctcagaagaggacgttctgggaagtcatcagtgatgagcatggcatcgaccccagcggcaactacg

SEQ ID NO: 56629 - DNA, 96 bp, Homo sapiens
ctgaggatcgccaaaaagctggagaagatggtggccaggaagaacacgatttagcatgtagactgctggggcaatcaatggatgaaagtggattac

SEQ ID NO: 56630 - DNA, 100 bp, Homo sapiens
ggggaaaggaggagctggagacagattgtaggaccgagcgcgggcaggcgggaggcaacggagctaccagccggaaactctttatacagtgaaacaggag

SEQ ID NO: 56631 - DNA, 75 bp, Homo sapiens
cttttaacgagtattccaaatttgatggcaaggttttagctgaattttgggacatggccactgcttcaccaaggt

SEQ ID NO: 56632 - DNA, 89 bp, Homo sapiens
ttaatactcatcttgtccagaactctgtcaaatgaagaacactttcaagaaccaggtgatggccggtacggcagcaatgacgaccctgg

SEQ ID NO: 56633 - DNA, 91 bp, Homo sapiens
ggcagcctcacctcaccatttctagcttgttgaaacccaaaactagtggcagtagagaagagcatcacagaagttgctcaggagctgacag

SEQ ID NO: 56634 - DNA, 75 bp, Homo sapiens
ctgaacctctacgacacggccgatttgctcccattcatgctgaggctccagagttcatggaaatgagtgttgagc

SEQ ID NO: 56635 - DNA, 76 bp, Homo sapiens
atcgtcagcgctgactccatgcagaccacacctgtgacaatgcaggttggagaaggtcagcaggtgcagattgtcc

SEQ ID NO: 56636 - DNA, 82 bp, Homo sapiens
tcccgtttctggctccgggctgagcttcctggagaagaggaaggtcttgaggaccggcccagctcaggctcctggggcagcg

SEQ ID NO: 56637 - DNA, 82 bp, Homo sapiens
ctccttgcaccaggcttcttttcagtctaccctgatgggagagtctgcatttccatcctccacgcgccaggcgatgacccca

SEQ ID NO: 56638 - DNA, 97 bp, Homo sapiens
cctgaccccttcttgccatcgccccagacatggggaacgcggcgaccgccaagaaaggcagcgaggtggagagcgaggagagtacaggtcgtgctgc

SEQ ID NO: 56639 - DNA, 100 bp, Homo sapiens
agacaatcgccctttaactggacttgcagctgcaattgccggagcaaaacttaggaaagtgtcacgggatgctgaaaacgccattcaacagatgggtggc

SEQ ID NO: 56640 - DNA, 98 bp, Homo sapiens
gccgttattggctgccgttaaggaccgttacgtttcccgggaactcattatacaatgacaaatggaggcagcattaacagttctacacatttactgga

SEQ ID NO: 56641 - DNA, 82 bp, Homo sapiens
cagacggcggaggaggcgcagccggacatttagccgctcatcttcgataccccatgtttccccatcactcgaggagtctggg

SEQ ID NO: 56642 - DNA, 82 bp, Homo sapiens
gcacgcatgctctggcgcatcctcaacggccacagcctgacccgccgggagcgcaggcagatggagtttcactatgttgccc

SEQ ID NO: 56643 - DNA, 82 bp, Homo sapiens
ccggagcccgagtggatcggggacggagagagcacgagcccatcagacctgcctagagctggaacgttacctccagagcgag

SEQ ID NO: 56644 - DNA, 100 bp, Homo sapiens
atacaatgaagtagacattggtggaaacatttagaaacgtgtccctgatcaccacccctgttaagcattcccacgtgctgtcgatctttggaccagtttc

SEQ ID NO: 56645 - DNA, 83 bp, Homo sapiens
ggccatgtaagatcgtcgagatgtctacttcgaagactggcaagcacggccacgccaagacctttgaaactcacaactctacg

SEQ ID NO: 56646 - DNA, 97 bp, Homo sapiens
tttctgtgttacaggtgcagcttcaagcttaggaccacccaccatgcctatccagggcactccacagaaggatgttattatcaagtcagatgcaccg

SEQ ID NO: 56647 - DNA, 96 bp, Homo sapiens
ggcagcggagccctgggccatcgagctctgagctcttcaccctgacctatggtgccctggtcacccagctatgtaaggactatgaaaatgatgaag

SEQ ID NO: 56648 - DNA, 90 bp, Homo sapiens
ctttctaaacaagagatgcagtctgctggatcacagagaggtgtgctgggcatcaaggtgaagatcatgctgccctgggacccaactggt

SEQ ID NO: 56649 - DNA, 100 bp, Homo sapiens
agcagatggctcgagaatacagagagaaaattgagacggagctaagagatatctgcaatgatgtactgagcggcactgcagaggtggagctgaagaaggg

SEQ ID NO: 56650 - DNA, 100 bp, Homo sapiens
tgcttctcaagatgtggagctctccttgcagatcggtgacacagttcacatcctggagatgtacgaggtgcccactgttgatgtctttcagatttccaca

SEQ ID NO: 56651 - DNA, 87 bp, Homo sapiens
tgttctcagtagtccgaactctaatatgagcagcatggtagttacagaaagggctattgcaagacacgaagtccgagaaattgagca

SEQ ID NO: 56652 - DNA, 100 bp, Homo sapiens
gagaaaactcaccagggcagaaaagatgacagccatggaagcagagctcaaaggactgaagtgctggagaatctggtaaaagcaccattgtgaagcagat

SEQ ID NO: 56653 - DNA, 82 bp, Homo sapiens
ccgatgtctgcgggaataggacctatggcgtggtggcccagtactaccggcccctgcatgctgatcagctgaccgaagaaca

SEQ ID NO: 56654 - DNA, 100 bp, Homo sapiens
cagctcctgaaaggagagacacttgtgaacattcaagtgaagcaaaagcctttcatgattatatggcagaaacggtggacacaagcgaaatggtcaacgg

SEQ ID NO: 56655 - DNA, 126 bp, Homo sapiens
gcagcagatcctcaccaatgccaccatcatggtcgtcagcgtcaccgcctccaccacccagggaccggccagaatttagcttcacttgagagagatctggaatggtcgccatgattgaaaccacgc

SEQ ID NO: 56656 - DNA, 95 bp, Homo sapiens
gcaagaaagacgcctgccccaagtatgtgaacatgcaggatcccgagatggacatgaagtcagtgactgaccgggcagcccgcaccctgctgtgg

SEQ ID NO: 56657 - DNA, 75 bp, Homo sapiens
gcagaggtggccaggatcctgcaccgggtggtggctgggtgaaaccagcagtgtgtgtagcagcagtgacactgg

SEQ ID NO: 56658 - DNA, 50 bp, Homo sapiens
tgactgatgatacacaacgcactagctcaccatggatgatgatatcgccg

SEQ ID NO: 56659 - DNA, 75 bp, Homo sapiens
ccagatccagaaactggaggagtcccgctcgaagctagaacattcagaagattctcggccttgccccttcacgag

SEQ ID NO: 56660 - DNA, 100 bp, Homo sapiens
tgaagatctgtgtgtgtagttcttggaaagattccaggtgcttgaaaacgacgtctcagtgggtcaaggtgttccattggcaagctacaataatggggcc

SEQ ID NO: 56661 - DNA, 100 bp, Homo sapiens
tgcacaaaggcccaacttgataggactaacatcaggggatatggatttgccacccagaggtcatgcaagacaagataatctgccttccgaaaagagtgca

SEQ ID NO: 56662 - DNA, 96 bp, Homo sapiens
gggcgtttctcgccctgctgggatcgctgctcctctctggggtcctggcggccgaccgagaacgcagcatccacgcagtcctgcgttaactgcggc

SEQ ID NO: 56663 - DNA, 74 bp, Homo sapiens
tagagaggaccccggtacatctgaaagccgggaaatgaactttcacgatggccgtaaagcacagcagcacatcg

SEQ ID NO: 56664 - DNA, 99 bp, Homo sapiens
ttttttacatggacttggagacacagggatgcccccgaggagcaactaaaggcgccactgagtgccctgccctctggtcaagtggtgaggcttgtcttc

SEQ ID NO: 56665 - DNA, 75 bp, Homo sapiens
acgacgaggaaccgcccaacatggcctcggaggatgaaaactttcggaagagaaagttgcctgtggtaagttcag

SEQ ID NO: 56666 - DNA, 100 bp, Homo sapiens
gtctcatcaaggtgaacgggcggcccctggagatgattgagccgcgcacgctacagtacaagcagaacagccctgtggcccccacagcccagcccaaagc

SEQ ID NO: 56667 - DNA, 87 bp, Homo sapiens
gcgcgagccccgtcctccttcgccgccgcgcacaaccgcacgtgcaggacggctgtcctcagcgaggggccgtgcacccgctcctga

SEQ ID NO: 56668 - DNA, 75 bp, Homo sapiens
tctgtactacagcagttcaaggaaagtgacttatcacatgttcaggtgctggagaatctggtaaaagcaccattg

SEQ ID NO: 56669 - DNA, 101 bp, Homo sapiens
cgccgcagcagctgatgctgagcgcggcgctgcggaccctgaaggttacaactgatggaaaaccaaaaatcgttgatatcattgatacaacaggaagtggc

SEQ ID NO: 56670 - DNA, 100 bp, Homo sapiens
ggaagtagtagttgttgagcagagggaaagggataggagaaggatgtggactgcagtgctgcagtgccaggaatgttttaaaggaagttgggctactcac

SEQ ID NO: 56671 - DNA, 82 bp, Homo sapiens
tgcctcgcatctgcttgcctacttcttcacggagctcaaccatgaccaagtgcagaaggaagatggatgttttgaaagctac

SEQ ID NO: 56672 - DNA, 101 bp, Homo sapiens
cggagccaggctggtttcggaaatgcccttacagcagcaggaagatgagaatgtgcctactgctcctgatcctccaagtcaacatttacgtgggcatggga

SEQ ID NO: 56673 - DNA, 75 bp, Homo sapiens
tctttcaagaaagttgtttatgaccacaaggaagtgttggttaaggaatccagatgttactgcaataaccactcc

SEQ ID NO: 56674 - DNA, 80 bp, Homo sapiens
ctgggggtgcgcgcctgcgacctgcccgcctgggtgagaagccctaccactgcaactgggacggctgcggctggaagttt

SEQ ID NO: 56675 - DNA, 97 bp, Homo sapiens
gacgccaggacacccgggaagccgaggaatgattcatgatgttgctatcaaaagttgagaaattgtcagaagaaatcatggagataatgcaaaattt

SEQ ID NO: 56676 - DNA, 97 bp, Homo sapiens
aacctactgcctgtagaagcagacattttagcagtgctaactgccaaagaaaggaaaactcaaattgatgatagaaacaaattgactgaacatttta

SEQ ID NO: 56677 - DNA, 75 bp, Homo sapiens
aaacttgactgtatacagaatcttgaatcagaaattgagaagctggtacccactgatggtaatgctggcctgctg

SEQ ID NO: 56678 - DNA, 101 bp, Homo sapiens
atggcgtcggtggtgttggcgctgaggacccggacagccggtctggagaaaatgatgtggaatataacaacatggaattagaagagggagaactcatggaa

SEQ ID NO: 56679 - DNA, 100 bp, Homo sapiens
cagagaggagtgcctgagactaacagaactgctgggcgaatctgagcaccaactgcacctcaccagcatgagaagtttaccattcagcttcagttgtccc

SEQ ID NO: 56680 - DNA, 83 bp, Homo sapiens
gccaagttccccaacggctccccgtcgtcctggtgctgcagcgaattaaacaaccaccatgtcgagcaaaaaggcaaagacca

SEQ ID NO: 56681 - DNA, 100 bp, Homo sapiens
aaaacttctttccattgtcctgcccgtttctgcggacttgttctgaggccgagaaacctgctcctccaaagccagagcccaagcctaaaaaggcccctgc

SEQ ID NO: 56682 - DNA, 75 bp, Homo sapiens
gtgttggcggatggaagggaggagactcctgaccctcagaatgcccccaaatacatcaagatgtttgtactggat

SEQ ID NO: 56683 - DNA, 100 bp, Homo sapiens
tgacttggaaaatgatcacggagtttgggcatcctgcagccattaatgatcccaagataatgacgtccgcggctcccacggccggcaggtctgccgtcgg

SEQ ID NO: 56684 - DNA, 75 bp, Homo sapiens
aagtacatgcttcatagtccttgcgtctctctgaggcaaaaccttcaactgaggacttgggggataagaaggaag

SEQ ID NO: 56685 - DNA, 50 bp, Homo sapiens
ctgcaggcacagttgccgattacagtgaatgtggtggaggcacttcagga

SEQ ID NO: 56686 - DNA, 106 bp, Homo sapiens
cggaactccgcagtttgcgtagacttgaatttcctattcctcggacgatccatgtggaatccgtttttagaacttcagccataaaaatgggcagaattttccttga

SEQ ID NO: 56687 - DNA, 97 bp, Homo sapiens
cggtgcttccctcatctctcccaactggctggtctctgccgcacactgctacatcgatgacagaggattcaggccacatccacgtcctccgagccta

SEQ ID NO: 56688 - DNA, 98 bp, Homo sapiens
ggcggcgtgcccgccggggggctagtggccacgctgcagagcctcggcctccgaccagggagaccttccatcctcctccacctgttccacccagagga

SEQ ID NO: 56689 - DNA, 75 bp, Homo sapiens
gtgacagcgatgctgaggatcgaggaacgttgtctggctgaccccgcactacatctacccaccagccatcgtgca

SEQ ID NO: 56690 - DNA, 75 bp, Homo sapiens
catggatgttcttcttcgagtatttgtagaagggaatttatgttgatgcagttaactccttgggccaaacagcac

SEQ ID NO: 56691 - DNA, 75 bp, Homo sapiens
tctgtggcatcttctacaaacccatttcagaccaatgccagaggagcaacaggacttccttcgctgggcatctgg

SEQ ID NO: 56692 - DNA, 100 bp, Homo sapiens
aaaaattactttaaaaatcgccaaaaattacttggagcaaagggcagtcggcggagcttcgccaaggctggcgcagtcgagatgtcggcttatttatagg

SEQ ID NO: 56693 - DNA, 82 bp, Homo sapiens
ttctcttctacccactgagaccagagttagtggaatccacatatctcctctaccagaacaagttgaaatcatcgcagaagga

SEQ ID NO: 56694 - DNA, 82 bp, Homo sapiens
aggagtgacctggggctgtggagagcgacccgtggccttgtgtttcaggtgtcgtgaaaactacccctaaaagccaaaatgg

SEQ ID NO: 56695 - DNA, 100 bp, Homo sapiens
ctgcccaccagccatcatgtcggaccccgcggtcaacgcgcagctggatgggatcatttcggacttcgaagcaactacccaggtggaagccagattatgt

SEQ ID NO: 56696 - DNA, 145 bp, Homo sapiens
caatgaagcagccgatcatggcggatggcccccggtgcaagaggcgcaaacaagccaatcccaggaggaaaaacgcctcccaaagtgaaatgcctgaccaagatctggcaccccaacatcacagagacaggggaaatatgtctga

SEQ ID NO: 56697 - DNA, 100 bp, Homo sapiens
ggaggagttaacgacgctttcaaagatgcactgcagagagcccggcagggagatacttcaggggattaccggaagattctgctgaagatctgtggtggca

SEQ ID NO: 56698 - DNA, 75 bp, Homo sapiens
tggaaaagtctagagattctgataaggatatgctgcaggctgctagtcattatcgccaaaatagaaactctttgt

SEQ ID NO: 56699 - DNA, 74 bp, Homo sapiens
ttagaaccgcagcagggacgtcggtttgctatcgggactcggcgaggacggttgatgagaacatgaaggtagca

SEQ ID NO: 56700 - DNA, 96 bp, Homo sapiens
gggttgcggccggaagccgggcgccgcggctctgcttccctcggggtcatttatagcaaatacactgacctggttccaaaggaggttatgaatgca

SEQ ID NO: 56701 - DNA, 100 bp, Homo sapiens
gacatgcatcgtcccctggactctctcaagatgttttcactccagaatgcaaattcaaggaatctgtgtttgaaaactactatgtgatctattcttccac

SEQ ID NO: 56702 - DNA, 51 bp, Homo sapiens
gagaggctggctgaggaggagaacaagcaggaagaaccggacccggcgaac

SEQ ID NO: 56703 - DNA, 100 bp, Homo sapiens
aggctgctggcagacgagtacaccttcgccttcccgccccaccacgacacggtgcagagcattgtagaccaaggagccatggataggagaagtatgggtg

SEQ ID NO: 56704 - DNA, 98 bp, Homo sapiens
tttatatcctgacactatgaatgctacttggatgcctcttaagggtgcaacaccggaggatttcagcaacctcccacctgaacaaagaaggaaaaagc

SEQ ID NO: 56705 - DNA, 105 bp, Homo sapiens
gggggtcgctggctctgctgctgccgccggcgaaggaggaggcgttgccgggtaccaggatcatctatgaccggaaattcctgatggagtgtcggaactcacctg

SEQ ID NO: 56706 - DNA, 100 bp, Homo sapiens
tggatgtgtctggtgtgggtttcccaagcaaggttccttggaagaagatgtctgcagagtgcctgatcaactttctagcgggagaacgatcatggaggtg

SEQ ID NO: 56707 - DNA, 82 bp, Homo sapiens
cgcaccgcccggactcaccatggtgttgttagagatacaaaaggaattattagactacaaaggagttggcattagtgttctt

SEQ ID NO: 56708 - DNA, 75 bp, Homo sapiens
tacatcagcttgtaggagacagagacgaagttatacggaagcgtctcctcattgatggagatggtgctggagatg

SEQ ID NO: 56709 - DNA, 99 bp, Homo sapiens
ggaagaggttacattgcacaatatttgaataaggatgtggagagcatcttgtgcgcaccatactggctagagaatgttcacatgctttacaagctgagg

SEQ ID NO: 56710 - DNA, 49 bp, Homo sapiens
aatagcccttcagtactgttgtacggtgtctgctttttcaacgtgggag

SEQ ID NO: 56711 - DNA, 75 bp, Homo sapiens
gaagcagtgcttcgtggtgactgaaaaagctattgttcctgatatagatgaaattgcagctcaggcagaaactat

SEQ ID NO: 56712 - DNA, 100 bp, Homo sapiens
agcatcctcacagcacagtacacgaccagttggttcgactatgcaatgagggcgcccggaagatggaaaggactgagatgatgtacacaattaactccca

SEQ ID NO: 56713 - DNA, 82 bp, Homo sapiens
tccccaaacaatgccaagtccttgggattgtgaccccaggaattgtagacaaactttccagaaatgatgaatagatataagc

SEQ ID NO: 56714 - DNA, 82 bp, Homo sapiens
gaggattgatgtcccttcagcatcatgcagccgccgccgaggaagaaatgagccgtcagactgctacagcattacctaccgg

SEQ ID NO: 56715 - DNA, 112 bp, Homo sapiens
cgcgcgggcgcgcggctggagccggcgccgggcacggcatcgggggcctggactgcacggcccggcagcagccgcttacaaacacgcagatggcaagaagattgatggcagg

SEQ ID NO: 56716 - DNA, 74 bp, Homo sapiens
tctggaagccagagaccaacgagatcctgcacatgtctttctcaggagcatctatcggctgcacgccaacatca

SEQ ID NO: 56717 - DNA, 87 bp, Homo sapiens
aacatccatatcataagtggaattttggagatattcaaagtggatctcttgagcctgtcagctgcatgtgatgccttggaccagcac

SEQ ID NO: 56718 - DNA, 83 bp, Homo sapiens
ttctaatttgaaccatgtttggattgaagccgcctctgtattacttaccaggctgctctttggcgtaaattgcaatcgattag

SEQ ID NO: 56719 - DNA, 75 bp, Homo sapiens
ggcccgcgtgctgagtggaaagttccgcatcccattttttatgtccacaggagaccaagacacattccaccccag

SEQ ID NO: 56720 - DNA, 82 bp, Homo sapiens
gcgtcgctgattccagagagctaaagccgatgtcctcctgcatatgcccaagaggattgggagtggaatggacaccagcaga

SEQ ID NO: 56721 - DNA, 83 bp, Homo sapiens
ttcacgcacgggatccagagcgccgcgcacttcgtcatgttcttcgcgccctgcattccacgcctacgggaaggcaggcaaga

SEQ ID NO: 56722 - DNA, 100 bp, Homo sapiens
taaaggagaaactcctcctcataccttctgcaaagttgacaaaaacttaaattgtggaatgggttatgtggtccgaatcagtggtgggaacgacaaacaa

SEQ ID NO: 56723 - DNA, 75 bp, Homo sapiens
cgggagacgagaagcctgaaaagtcgcagcgagctggagccgccggaggtgcagatgctaatttcagtgtctgga

SEQ ID NO: 56724 - DNA, 100 bp, Homo sapiens
ctgctgaaggatgtgctgtcggtggagagcgcggggacgctgccgtgcgcgccagagatcccagactgcgtggagcagtgagatgaacccagtacctcag

SEQ ID NO: 56725 - DNA, 149 bp, Homo sapiens
cgtctgggcgcggaggagggcgagccgcacgtcctcctgaggaagcgggagtggaccatcgggcggagacgagtgttgacccgaatgatcagaaaaagacagcttgttatgacattgatgttgaagtggatgacaccttgaagacccag

SEQ ID NO: 56726 - DNA, 87 bp, Homo sapiens
gtctcaagattgttctccttggcaaaatttatgctggcacaccacgcttctttcctttaggcaagatgatgatgaatgaagtcctgg

SEQ ID NO: 56727 - DNA, 90 bp, Homo sapiens
cggaggagccgcgagcgctgagggtgagtgccgggagctctgagggtgaccattgtgaggtagatattttgttctaattttccagatgag

SEQ ID NO: 56728 - DNA, 75 bp, Homo sapiens
gctgaagcattgcttcaaagcatggggctaactccagaatcccccattggcccattgctagaagactgggacata

SEQ ID NO: 56729 - DNA, 55 bp, Homo sapiens
ctgcaagaccgcgaggcgagacctcttcgaggtgcagaaggcggtgaacacggcc

SEQ ID NO: 56730 - DNA, 100 bp, Homo sapiens
gtttgtcagcagccaaggtgtttccaggaagttcagagagaacagccatcgacgagtacaagccccaggatgctaccaccaacccgtccctgatcctggc

SEQ ID NO: 56731 - DNA, 121 bp, Homo sapiens
attttaactttcacaacaacatcatcgtattgattgtccctctcatgaatgacatgtcaaaattggagcagtgaggagaatgaataccttccaagaccagagtggcagctccagtaataga

SEQ ID NO: 56732 - DNA, 132 bp, Homo sapiens
gtgaaattggatcaagaatgggtcccatattcaacatctgctagtctgtatattcgtcctacattcattggaactgagggagctgtgatacacaagttgggcatcaccttggtgtctctccttttgtttttg

SEQ ID NO: 56733 - DNA, 97 bp, Homo sapiens
ctgtcattatgacaggggtcatgacagatgaggcagagcccagcaagagcatggtagaatcaattaaacactgcattgtgttgctgcagattgccaa

SEQ ID NO: 56734 - DNA, 82 bp, Homo sapiens
agctgcaagccggtgcagcagccttcagcttttggcagcatgaaagttagcaggtcttttcggaatgatggtttgaaagctt

SEQ ID NO: 56735 - DNA, 90 bp, Homo sapiens
tcagggacatttctgaagcgagcgtcttcgatggaactgggaagtaacagccctccacagagaaactggaagggaattgctattgctctg

SEQ ID NO: 56736 - DNA, 75 bp, Homo sapiens
cgagctgtcagagcccggggacggcgaggccctcatgtaccacacgggttgaaaggaggagcaggaggtactgat

SEQ ID NO: 56737 - DNA, 75 bp, Homo sapiens
attgtaacagctgaagtgtcttcaatgcctgcttatatgtacaaggatatccacaacactgttcgcagctacaag

SEQ ID NO: 56738 - DNA, 51 bp, Homo sapiens
aacttgccctgtctcctcgcagatgagtggtttcagagcacagtgagcaaa

SEQ ID NO: 56739 - DNA, 100 bp, Homo sapiens
gtcagtggaagacggagctggtcggcccgaagataacgaaggaggcccaacttcattcaataaggagcctgacggatttatcccagacggtagaacaaaa

SEQ ID NO: 56740 - DNA, 82 bp, Homo sapiens
cttcggcctgggccttaccatcttcatcatgcacatcttcaagcatgctcagaattaaacaaccaccatgtcgagcaaaaag

SEQ ID NO: 56741 - DNA, 74 bp, Homo sapiens
aaatgccccttaattttgacctctgctctggtgtggagctgctgtgtgatagagatgtagacatggcaactcgg

SEQ ID NO: 56742 - DNA, 100 bp, Homo sapiens
cagcggcgtcctggccacgctgagcctgcgggactgcaagctgcaggaggtgaagatggcgatgtgatttgtttgaattcagatgacattatgccagttg

SEQ ID NO: 56743 - DNA, 100 bp, Homo sapiens
gtttcacatccttgtctgtgaagctaaactcaatgctgctgtgtgggaagaagatttgtaaagaaaactcttaggaggcaagtgaggcctatctggttgg

SEQ ID NO: 56744 - DNA, 87 bp, Homo sapiens
taaactgtgtggggcgcggatgggatccagctgttagtcgggtaggcatagagtcagcaagccgcttacagatgattctgaatgaga

SEQ ID NO: 56745 - DNA, 100 bp, Homo sapiens
cgggtgtgggcgctgttcgacgtgcggcccgaatgccagcgcctcttctaccggggcaagcaggaataaataccttacgtacactttagatgatcaggaa

SEQ ID NO: 56746 - DNA, 101 bp, Homo sapiens
caaagacttggaagggtttaagactctgacattcctggctgtcatgctcattgttctgaactccacggtttctgacgttccgatgactggcaaccccgcag

SEQ ID NO: 56747 - DNA, 76 bp, Homo sapiens
tgggccagagttccaggggctctgggagtggctgccagaaacaccagtttctcaggaggatgccttgaatctcatg

SEQ ID NO: 56748 - DNA, 90 bp, Homo sapiens
gtaccgtttcctcagcggcggagttgaagtattgataacaccaaggaactctatcacaatttgaaaagataagcaaaagtttgatttcca

SEQ ID NO: 56749 - DNA, 75 bp, Homo sapiens
gggctgaattctgactcagccatttactaactgtgtgaccttaggatgttttagaagaatgtatgtctcttccca

SEQ ID NO: 56750 - DNA, 100 bp, Homo sapiens
ggatgaagaacgggatcctctgctgcatagtttcggtcatctaaaggaggttttaaacagtataacagtgattcgcctttgccagtctcatctcgtgtct

SEQ ID NO: 56751 - DNA, 50 bp, Homo sapiens
atccgtaaccacaaggaggacgaggccgagacgcatccagagctttcgtg

SEQ ID NO: 56752 - DNA, 51 bp, Homo sapiens
gcagagtaaactcaagatgctggagaagctcacttctaccctagccgggcc

SEQ ID NO: 56753 - DNA, 75 bp, Homo sapiens
ctcaaagcaataccaggatagctgttgtttcagagaaaggtgtggatgtgtgggggccgcatggaggacatcccc

SEQ ID NO: 56754 - DNA, 82 bp, Homo sapiens
accccttccacgtcatccgcatcaacaagatgttgtcctgtgctggggctgacaggctttatcctgtggataaacgcagagt

SEQ ID NO: 56755 - DNA, 82 bp, Homo sapiens
ccgcatcccctgcctcctggccccatccgtcttcaaagccagcagtggccagtcattgaaattatgagactatcattcaaat

SEQ ID NO: 56756 - DNA, 90 bp, Homo sapiens
ctcgacctcgtgaagatccgcttcgccgctctgcaagtgagtctggttctcaaagcacttgtgatccacttgtgactccaacagccctgg

SEQ ID NO: 56757 - DNA, 82 bp, Homo sapiens
atcctgttcttcaccgttatcatctatgttcggctggacttctccatcaccaaggggaaagtggagatgacattggaaatcc

SEQ ID NO: 56758 - DNA, 50 bp, Homo sapiens
gagactcgaaatgccaccacagggtggagagattcaaccagttagcgtga

SEQ ID NO: 56759 - DNA, 110 bp, Homo sapiens
ttggattcacccacagcggggcggcggcggcggcggctgcggcccaatataggttgtaaacatgttaaaggcatcctgttatatggacccccaggttgtggtaagactct

SEQ ID NO: 56760 - DNA, 100 bp, Homo sapiens
cgccgatcctccaggcatgccccgctacgagctggctttaatcctgaaagccatgcagcgggttaatttggagtggcccctggagtcagtttcctacacc

SEQ ID NO: 56761 - DNA, 99 bp, Homo sapiens
gtcgccgtcaccgccgcggctccggccctggccccgatggctctgtgcaacggagactccaaggttcgagaacttgtcttggacaattgcaaatcaaat

SEQ ID NO: 56762 - DNA, 100 bp, Homo sapiens
ttaaagctaaattacagcagtgcaaagcagagctaaactctaccactgaaggtctcggaggaccccatcctagccctacctgtctcggcccgcaacctcc

SEQ ID NO: 56763 - DNA, 74 bp, Homo sapiens
ggcatctgttctatcttcccatcataaaaaagccaacgcagacccgtcagtgataaactgtctgcataacctgt

SEQ ID NO: 56764 - DNA, 83 bp, Homo sapiens
ctcggagccagaggagaggcgcccccgccggccgccgcgccgcccggcagcctcggcaggattttttatcaagcagaaatgca

SEQ ID NO: 56765 - DNA, 76 bp, Homo sapiens
cagacctgctcacacttcagaatagagaagctactgtttcagctcattattgactacttagctgagttcaattcca

SEQ ID NO: 56766 - DNA, 82 bp, Homo sapiens
ccgagggtttgatgaaggtggaggcagcgcggctctcagctggtaggtgagtgctgtcctcggctcactttcctcaagctct

SEQ ID NO: 56767 - DNA, 100 bp, Homo sapiens
ctattcagcagagagctattattccctgtattaaaggcatcaactgtgaaatctgtgttagaattgattcctgaattaaatgaaaaggaagaagcataca

SEQ ID NO: 56768 - DNA, 50 bp, Homo sapiens
ggctttcagactgctgcttccatcccaggattctgagaaacgaacccctc

SEQ ID NO: 56769 - DNA, 100 bp, Homo sapiens
gaatatcaagaggaggagttgttgcggcgtggcatgaagggcaaggcccgcaagctcttctacaaggccatcgtgcgcggcaaggagatgatccgtatcg

SEQ ID NO: 56770 - DNA, 74 bp, Homo sapiens
aatgttcgtggggagcacatcttcacactggacactctcgtgcagggcagcccaatggatccaatggtgatgaa

SEQ ID NO: 56771 - DNA, 100 bp, Homo sapiens
cctcgctctgggcgtggaaagggctctggcgctacccgagcctgctgctgctactgctgcccgctgctgctctgtggccacccggctcccatggcgggag

SEQ ID NO: 56772 - DNA, 75 bp, Homo sapiens
cagtccgccgctcaccccgcggccgcaccttcccgccttctcagatgatggtggtgctaccccagtacaggatga

SEQ ID NO: 56773 - DNA, 83 bp, Homo sapiens
gcggggagcgcccccggcgcgatgcccttcaggaaagcgccgtgccgtccctgcagtgacaccgaggtgctcctagccgtctg

SEQ ID NO: 56774 - DNA, 90 bp, Homo sapiens
gtgcagccgagtcactactgcctgcctgcctgcctgctacgtattggtaaaggttttcaaggtgtcatgaaaagatggggatttaaaggc

SEQ ID NO: 56775 - DNA, 98 bp, Homo sapiens
aagccaccgcggacctcacagctgcccaggagaagctggctgccatcaaagccaagatcgctgtgaacgcttggccaagccagagcgaggcaagatga

SEQ ID NO: 56776 - DNA, 100 bp, Homo sapiens
tgtggacagaggctatttcagtatagaggacaccatatctcagaagacggtagagattgcatctcctgcaaatatggacaggactatagcactcactgga

SEQ ID NO: 56777 - DNA, 75 bp, Homo sapiens
cacacagagtcccctaaaccaggatgtgatggagctgcttgaagaagatctcacatgccctatttgttgtagtct

SEQ ID NO: 56778 - DNA, 100 bp, Homo sapiens
ccagaagcctgtaggaaagcggaagcggcctggcaggggaaggatcgaggtattaataggggaccctattaccacatgtctttctccctcagtgtatgat

SEQ ID NO: 56779 - DNA, 100 bp, Homo sapiens
agagccaagccggctcgacccctctgacaagggagaacagcaccttcagtataaacgatgctgcttcccacacaagcaaattcaacacccaacagcttcc

SEQ ID NO: 56780 - DNA, 100 bp, Homo sapiens
ttaagaacttggatcccattcacctgaggcacccgaagaagagaccatccatatttccaggctggactctgtgaagctgagcaggagcagatgcggaaga

SEQ ID NO: 56781 - DNA, 100 bp, Homo sapiens
ggcgccggagacgatgccgttgaacaagtggtgatgaacttggacagcaggcttctgatcttccctttatatatctgctgtaacttcttgtatatatcac

SEQ ID NO: 56782 - DNA, 82 bp, Homo sapiens
ggcgcgcgagctggagcactcgccacatgattaagtaccggtacatcccgttcacacatgggaagagaaggtacagaggcaa

SEQ ID NO: 56783 - DNA, 128 bp, Homo sapiens
ctcttccaaggcactaccaatatgttatctccagatgccgcgcaactgtctgatctcagttcatgtgccggtggtggtgtgcacattgagccccggtatagacagttcccccagctgaccagatccca

SEQ ID NO: 56784 - DNA, 100 bp, Homo sapiens
gggtgtctacggcaccagcctcctgcgccacgccaaggtcgtctgggagatgctcaagtttgaagtggcgctcagcccgagcgggaagaagttccgcagc

SEQ ID NO: 56785 - DNA, 50 bp, Homo sapiens
ccagagatattttcaacaaaggatttgtagagacgaggtttcaccgtgtt

SEQ ID NO: 56786 - DNA, 74 bp, Homo sapiens
tggaagcaggactgcgccgcgtcttcctcaagggctgggttacgacccctacaaccctgagctgcccaagcccc

SEQ ID NO: 56787 - DNA, 100 bp, Homo sapiens
caaatacagaatccgtgtctgggagaaacctcgtggcctggtctccattatttgagatgagttacatcttggaggttaaaaagatcaagtggcatgagca

SEQ ID NO: 56788 - DNA, 75 bp, Homo sapiens
gtgattggttccatcagacatgtggttcaggagcaataccgtttctgctatgatgtagctttggagtacctggaa

SEQ ID NO: 56789 - DNA, 75 bp, Homo sapiens
cccttggaaaaattcagaaaagagcaacttggagctgtaaagattgtccgaagatacatcaaggattggcttgag

SEQ ID NO: 56790 - DNA, 100 bp, Homo sapiens
aggtcagatctaagcccaagagcaagtggcggcctcaagccttggacactgtgtttgggcttcctgtagacacccttttcctgcgcaacagagctgggcc

SEQ ID NO: 56791 - DNA, 90 bp, Homo sapiens
agtcactgctgtggctgcgggaaagcctctctcttgcccaaaccacgatgggaatcattgaagataatgatgatgacagcaaaatggcag

SEQ ID NO: 56792 - DNA, 50 bp, Homo sapiens
gaacctcctttacacagtatcagaacgctgtattcatcaccaaagaaaaa

SEQ ID NO: 56793 - DNA, 83 bp, Homo sapiens
aaggatgacaccggagtttgacgaagaggtggtttttgaggtttttagaacttcagccataaaaatgggcagaattttccttg

SEQ ID NO: 56794 - DNA, 100 bp, Homo sapiens
gctaacaactccaaatcacacatctctgagcattctggggaaaagaaactacagtcatcacaatggtctggatgagtttcactcttgttgcccaggctgg

SEQ ID NO: 56795 - DNA, 75 bp, Homo sapiens
gccagggagcaagtctgcatcgcagaggccaggtcaccttcaggccattcagaggaggaaagagaggggaatatg

SEQ ID NO: 56796 - DNA, 98 bp, Homo sapiens
tggagaccattggatgatgcattagattcctctagtattctctatgctagaaagtgaaaatgcctcgtgtaaaagcagctcaagctggaagacagagc

SEQ ID NO: 56797 - DNA, 50 bp, Homo sapiens
ggatcgtgtggcatgaaacagaagaagggtttcgaaaaaacgatgaaatg

SEQ ID NO: 56798 - DNA, 100 bp, Homo sapiens
cgacttcgacgccagcctctcgggcatcgggcaggaactgggcgccggcgcttacagcatgagcaaaaaggcattgggatgaacgagccgctggtggact

SEQ ID NO: 56799 - DNA, 100 bp, Homo sapiens
catctaggaagaacgtgcaaggatgcgaattgtgaatcgcttctccaaacagtctgatgttgtggtcctctgtttttcgattgctaatcccaattcccta

SEQ ID NO: 56800 - DNA, 100 bp, Homo sapiens
actcacagcttatgcatacaggaatcccaaaattggatactgccaggaaattggagaattattacaaacaaggggtagagagtttggtgtaactactgga

SEQ ID NO: 56801 - DNA, 101 bp, Homo sapiens
ctgtaacccagcctgtttcacttcttggctccagtgatcattctacatatattgtacaaacactagattttcacctgggtcataatactatggttaccaaa

SEQ ID NO: 56802 - DNA, 74 bp, Homo sapiens
gccgtttgtcattcccttcctgaagaattaccccctctacattcgcagcacccctacggagaacgagctgaagt

SEQ ID NO: 56803 - DNA, 135 bp, Homo sapiens
gtgcagtggcacctgcgcgaagctggccaaagcctgcccagacggctcacctgtgcgggatggaacaaaaggtgtcatggagaaactccagctgggcccagagattctgcagcgggaaaatccaaggcttattta

SEQ ID NO: 56804 - DNA, 76 bp, Homo sapiens
atcacccaacatgctggtgtacagaaagagcctggcccaactagagaatctgtgcaaacagctgtatgaaaccaca

SEQ ID NO: 56805 - DNA, 106 bp, Homo sapiens
tgccaccccagcccgtggtcctgatgccaacagtgtaccagcagggcgttggctatgtgcccatcacaggccactcttcacctccaccatgagcctggacatccag

SEQ ID NO: 56806 - DNA, 100 bp, Homo sapiens
agaaggccctggacacagcaatatctctgggctttcacaggagccccgtcctggttttccagtgcaactcccgccacgtgatttgcttagactgtttcca

SEQ ID NO: 56807 - DNA, 75 bp, Homo sapiens
ctgttagagaccactggattagcagaccctgtcaccaggagactaaagtccatcaaaaacatccagaaaattacc

SEQ ID NO: 56808 - DNA, 75 bp, Homo sapiens
tggcgtcccgcggccggcgtccggagcatggcggacccccagagctgtgagaaggcaaccaaagtgcaggacatc

SEQ ID NO: 56809 - DNA, 101 bp, Homo sapiens
ggcgattacaagacgattcacctgtccagcatccgaccaccgaggctggagggggagaacacccagttcaaactggaaacaagatggatgatgtgtcaaga

SEQ ID NO: 56810 - DNA, 100 bp, Homo sapiens
tgccaaggtgtacacctgcactatctgcagtcgggcatacacatcaagctgaggcttcgaagacctcagaggacttctctcagcactcacagaaacctcc

SEQ ID NO: 56811 - DNA, 122 bp, Homo sapiens
tggccgggtactctacacttgcttccaatccatacaggcccaaaagagttcagagtgcacaggtttcatattccagaaggttggaaagttggctgcaacagctgtgggaggtggattttttc

SEQ ID NO: 56812 - DNA, 100 bp, Homo sapiens
agaagagtcaaatgttcagccagtatcaacaccagtaacagtgtgtggagatatccatggacagcttggctggtccattggtccaaatcatttgataaaa

SEQ ID NO: 56813 - DNA, 97 bp, Homo sapiens
aaaaagtttgccccggtagttgctccaaaacctaagtacaacccatacaaacaacctggaggtgagggtggttaaataaacttggatcggctgtaat

SEQ ID NO: 56814 - DNA, 100 bp, Homo sapiens
ggaagatgcagatgagaaggttcagttggcaaaccagatatatgacttggtgctaacagacatcaaagctgacaaagaccaagccaacgatggtctttcc

SEQ ID NO: 56815 - DNA, 50 bp, Homo sapiens
cgacggcgccttcggcaaggtttacaagacgacaaggacaagatgagcag

SEQ ID NO: 56816 - DNA, 88 bp, Homo sapiens
tcaagatggcggcgcagccaccccgcgggatacgcctcagcgcgatgctgctgcagcttcagcaatggtgtcttcatccgccccgtcg

SEQ ID NO: 56817 - DNA, 80 bp, Homo sapiens
gctgtgctgatgagcgctcaggaatcatgggctatcaaaggagcacggtctgaatctgcacagagcaagatgctgagtgg

SEQ ID NO: 56818 - DNA, 83 bp, Homo sapiens
agagagggcagcagcagctctgagggccgtggggacacagataaggtttggtgcacctcgatttggaggaagtagggcagggc

SEQ ID NO: 56819 - DNA, 82 bp, Homo sapiens
gaattccggcggctgccgtgactccagtgcaagtatcgagaaccttccctgcgaacttcagaggaacttccagctgatgcga

SEQ ID NO: 56820 - DNA, 73 bp, Homo sapiens
aaggagagacaattatgttcctgaggtggtccaaacagacagatgtaggtatcacacactttcgttcaggaat

SEQ ID NO: 56821 - DNA, 100 bp, Homo sapiens
gccagtatgaagtggtgaaggagtgtgtgcagcggcgaggaaacgagacctctttcgttccttctagaaggtctggaggacgtagagttattgaaaatgc

SEQ ID NO: 56822 - DNA, 98 bp, Homo sapiens
gcagctccaacaccgccgacattagtagcagatgaaactgaccctgatgctcccataagacagaaaatgccccttgatgatctggatagagaagatga

SEQ ID NO: 56823 - DNA, 73 bp, Homo sapiens
tcatacaccagtactaccaaggacagcttttttcctgcaagttttgtcagcctggcgggtggcagctgtccag

SEQ ID NO: 56824 - DNA, 100 bp, Homo sapiens
gaatccgtgaaggaggcccaggagaaactggagcaggccgagaagaaggccactgatgttgggggccgtcccgctcctaaggcaggaagatggtggccgc

SEQ ID NO: 56825 - DNA, 100 bp, Homo sapiens
atctgggccaaaaggaatgaccctagccagactcagggatcaaagagcaaacagattcagtggcctgcattgagttgtctgctggttctcagcttgaaga

SEQ ID NO: 56826 - DNA, 90 bp, Homo sapiens
acatagtggagaaataaccagtcatgagcagggcttctctgtggaagagggagcaaaggagtttgctgctgctctcaccgctgagcggat

SEQ ID NO: 56827 - DNA, 73 bp, Homo sapiens
catataactcctgagaatagtggttcttaactcttcactattccaggtcctcaggatatagccgtgacctaaa

SEQ ID NO: 56828 - DNA, 83 bp, Homo sapiens
cgggaatgtcgacgaggagctgagaccaagcggagcagccagctggcagtagcgccctgtaggacccccaggacccgatggta

SEQ ID NO: 56829 - DNA, 100 bp, Homo sapiens
ttgaaccagattgatgaagtaaaggtgtggcctcaggttcctgctccagcgtggctcctggactggcgccagatgctggccctgggggtttcaatccaag

SEQ ID NO: 56830 - DNA, 100 bp, Homo sapiens
agcatcaaccatctggatattgctccttcagtgcacatttggccatgatcgataccctcatgatggcttatactgtagaaatggtcagtatagaaaaagt

SEQ ID NO: 56831 - DNA, 98 bp, Homo sapiens
cacaggagctgcagtgctgtactctaagctgcccaacatgttcggcgaccttcggtccacgtttattgccttgatgattgggtcctacgcctcctcgg

SEQ ID NO: 56832 - DNA, 100 bp, Homo sapiens
agctgaagcagttggagtgaagattggcaatccagtgccctataatgaaggtggagccgccaccaaaatgcagattttcgtgaaaacccttacggggaag

SEQ ID NO: 56833 - DNA, 75 bp, Homo sapiens
caaaaagtgattaagcagagaatggagaagaaggttgattccagattgctgctaaaattgattcaattcctcact

SEQ ID NO: 56834 - DNA, 98 bp, Homo sapiens
gactgtcttgggcagcatgcagtgctttctggggagaccctgcagcgtcatggtgctggagctggtggcacccgcaacatctcaggcaccagtaagtt

SEQ ID NO: 56835 - DNA, 100 bp, Homo sapiens
ctttgtgctgcgtttttatctagggaaggaacagaagagtgtcgtctcctagaaatctagcactggagaaacggattttgtcagggagaaaaagtatcgg

SEQ ID NO: 56836 - DNA, 98 bp, Homo sapiens
gagttcccaattaataatgaagcagagcatgaataatctttcatttagtgagctatgttgcctcttctgctgtccaccttgtccagggaagattgctt

SEQ ID NO: 56837 - DNA, 75 bp, Homo sapiens
taacccagaagtagctgaatgtgttactccattgctgaggagtggttaaagcggcaactggggaagaagtatctg

SEQ ID NO: 56838 - DNA, 124 bp, Homo sapiens
cgtgtgtgcacccccgatcccgccagccactcgcccctggcctcgcgggccgtgtctccggcatcatgtgtgatgatgattattctccaccgtctaagagaccaaaggccaatgagctaccgca

SEQ ID NO: 56839 - DNA, 105 bp, Homo sapiens
acaggccaaagccagactacagctggttcttgaagctgctgccatgaagctcatgactgctctggtgaatgttgccttaaacctcagtattcatcaggataatac

SEQ ID NO: 56840 - DNA, 100 bp, Homo sapiens
accaggagaagtttttatcaacaaaggcaaaggattcggatttattaagcttatgcctgtccctatgcttattccatcttcaatggatagtgaagataaa

SEQ ID NO: 56841 - DNA, 96 bp, Homo sapiens
ttgtgagactaaaggatacggaggaagtgtggacagtggacctacatacaatggtgtcatggagaaactccagctgggcccagagattctgcagcg

SEQ ID NO: 56842 - DNA, 80 bp, Homo sapiens
gccgcggagcgttcacctgcggccgggagacaatgcagatcttcgtgaagactctgactggtaagaccatcaccctcgag

SEQ ID NO: 56843 - DNA, 80 bp, Homo sapiens
gtcggtgtctgctgcgttcacggcaggattcggttagaacaagttgaaatcatcgcagaaggataaagttcgtcagttta

SEQ ID NO: 56844 - DNA, 96 bp, Homo sapiens
cggaggatgagcctgcagagcgcgcagtacctccggactggggttttaaggggtgtggcaggaggttttggactcgatgagtttccaccgaaatgt

SEQ ID NO: 56845 - DNA, 112 bp, Homo sapiens
tgggtttgtcacatatgccactgtggaggaggtggatgcagctatgaatgcaaggccacactggtgtgtctcataagtgacttctacccgggagccgtgacagtggcctgga

SEQ ID NO: 56846 - DNA, 100 bp, Homo sapiens
ctccactggattggatattattggcctagctggagaatggctgacatcaacggccaataccaacatgtatggtgacatggtgccaaaaaccatagcaggg

SEQ ID NO: 56847 - DNA, 99 bp, Homo sapiens
atgtactacagccagtcttctatgtttccacatcggtcagaaaaagatgaatgggtaccacagaccatgtcatcgtcctggcgtccacgaaccgagctg

SEQ ID NO: 56848 - DNA, 51 bp, Homo sapiens
atgcaagtgggctggaaaagacatcctgacaggtgctctagttcacagcta

SEQ ID NO: 56849 - DNA, 101 bp, Homo sapiens
gtttccgggcaagagaccgactggcggagcaccgccttccggcagaagctggtcagtcaaataaattccgggtagatatgcctggctcaggcagtgcattc

SEQ ID NO: 56850 - DNA, 74 bp, Homo sapiens
cacgaatgggaagccaagtgccatcttcaaaatttcaggtcttaaatctgagttctgctgaggaagaatctgaa

SEQ ID NO: 56851 - DNA, 74 bp, Homo sapiens
tggggcggcaccggatcaccaagacggaggattcaatgctggattttgaaaatcagacacttgatcctgccatt

SEQ ID NO: 56852 - DNA, 82 bp, Homo sapiens
aacgcacaggccgtcgctatgagcgggaccaccctgggcacagcaggcatcggagcacacggaccctgactactcggctgcc

SEQ ID NO: 56853 - DNA, 100 bp, Homo sapiens
gatctaccatgaaagacttgtgaatccaggaagagagactgactgggcaacatgttattcaggcaccaccaggaccagctgatcattccagcccacagca

SEQ ID NO: 56854 - DNA, 100 bp, Homo sapiens
cagtgccccacaccaccgcactgtcgctgcccgcctgccctgaggagtccccgctgcttggttctctaattgaacaactaacaacagaaaaatacgagtg

SEQ ID NO: 56855 - DNA, 50 bp, Homo sapiens
gtttctttggattatagcagtgaagtatcactggacaggccatggctcca

SEQ ID NO: 56856 - DNA, 98 bp, Homo sapiens
aatcacgttattgaagacatcaagggaaaatggggtgaggaagattttgaagacaatcgtcacttatacagttttgatgtggacaatggcacatctgc

SEQ ID NO: 56857 - DNA, 74 bp, Homo sapiens
cgactccaggggagccgtggcctcctctccgccctagcgctgaggcttgcacagaaatctggaggcagtatcac

SEQ ID NO: 56858 - DNA, 74 bp, Homo sapiens
cagcatcaagatgatttatggtaataagctgacatgggctttgcccgattatttaattcacctttgaagccttt

SEQ ID NO: 56859 - DNA, 100 bp, Homo sapiens
cacagccaatttcatgctccactatagaggagagaacacgtcttacaggatggaagagaaaagtgatttcatgctagaaaaattggaaactaaaagtgtg

SEQ ID NO: 56860 - DNA, 100 bp, Homo sapiens
tgagagcaaaatctacaagatgatgcagggaggagaggactattttaacaaagggaaaaatgagcctgaggacagtaagcttcgattcgaaacttatcag

SEQ ID NO: 56861 - DNA, 98 bp, Homo sapiens
tttgccgagctttccgcgacggccgctccgaggacttccgcaggacccgcaacagcgcagagggtatacaaaactaggatatgctggaaatacagaac

SEQ ID NO: 56862 - DNA, 74 bp, Homo sapiens
gaattgtgctgccttggccaaaagaggcaagaggaggaacgacgtagaagagaggaagagatgatgattcgtca

SEQ ID NO: 56863 - DNA, 50 bp, Homo sapiens
tggttcatccctaagggtcctaaccggggtgactgtgaagtgctgaccac

SEQ ID NO: 56864 - DNA, 90 bp, Homo sapiens
taccaccaccacaccagaaactagcaccagccccaaatttccccccccttgcctggacggaagcccgtgtgcaaatggaggtcgttgcac

SEQ ID NO: 56865 - DNA, 100 bp, Homo sapiens
ggagctttcgtcacctgtccttctacattttcgatagagacgttttccggagggattccatcataggtgcaatggatgagcttcatagtctggatccaag

SEQ ID NO: 56866 - DNA, 95 bp, Homo sapiens
acgtagagcatcggacgcgggcgccgtggcgctgggcaggagggcgaagccatgacgtcagtcagatataattgatcctgttgctttagaaattc

SEQ ID NO: 56867 - DNA, 100 bp, Homo sapiens
gtcggcttcttggtgccttggttcatccctaagggtcctaaccggggtggcgagctttcctgcccggcctgaagttcgaggtcatcagctctgctcacat

SEQ ID NO: 56868 - DNA, 82 bp, Homo sapiens
gttcacgcacgggatccagagcgccgcgcacttcgtcatgttcttcgcgccctgatgaagggcgccctaatggagatcatcc

SEQ ID NO: 56869 - DNA, 108 bp, Homo sapiens
tcttgctggcgttggtgggagccgtgctctacctctatccgcctgtgcctactacactggcacaagtggatagagaaaagatctatcagtggatcaatgagctgtcca

SEQ ID NO: 56870 - DNA, 100 bp, Homo sapiens
taaggaagaagaccatgctgggaccttccaggatatagcagatccattctttgcttattgtaagcaacatgcagataggttagacagaaagtggaagaga

SEQ ID NO: 56871 - DNA, 74 bp, Homo sapiens
gcggagggcaccccgggcgggcggcggctgctatgtgaagttcatttccaatccgccctccatggtggcagcgg

SEQ ID NO: 56872 - DNA, 83 bp, Homo sapiens
gtttagagcttctagttggcaatggggccgatgtcaatatgaagcagcgtcaccctttacaccagaaagctggcgggcactat

SEQ ID NO: 56873 - DNA, 100 bp, Homo sapiens
gcagttttgccaggtgtttgttaccttgattacaggctgtgccagccctggaaaaacagttacaattgttgttcgtggttctaacaaactggtgattgaa

SEQ ID NO: 56874 - DNA, 96 bp, Homo sapiens
ccggaccctttgccttcgccactgctcagcgtctgcacatccctacaatggctaaaacagcaatggaccaatgatgcgagctcagagtcaatagca

SEQ ID NO: 56875 - DNA, 75 bp, Homo sapiens
gccccaacggcaagcaacttgcaagatggaaagttgccttttgttcctccggaggaagaatttattatgggagtt

SEQ ID NO: 56876 - DNA, 100 bp, Homo sapiens
agaatttagcatctattgggatgtcgattgcactttactgggggatttgcctcagatggagttacagattggccatttcttaggttgttccagagtggtg

SEQ ID NO: 56877 - DNA, 75 bp, Homo sapiens
gacgacgacagcgtcctcgaagccaccagctcccgggacccgctcagcgatgtgctggagaatctggtaaaagca

SEQ ID NO: 56878 - DNA, 90 bp, Homo sapiens
gcgaaggtggcggcgctgctgctcgggctgctcttggagttcatggcctcccacgggaacgacgccgcgagagccaggtttgagtccaaa

SEQ ID NO: 56879 - DNA, 100 bp, Homo sapiens
gaaggggaaggcgcctgaagaggacgaagattgaagaactcccttcaggatttcttgtagaacaagtctggtgttgatgaaatccttcggcttttgtttg

SEQ ID NO: 56880 - DNA, 100 bp, Homo sapiens
tttcctttccctcagcacacagaggatgatgctgactttgatgaagatgtgaaaggaccacccacccaccgtctgtcttgtggtcagtcaccctacaccg

SEQ ID NO: 56881 - DNA, 75 bp, Homo sapiens
cttacaacatggcagacattgacaaaattctatcgtgatgcagagaagaaagaacggagtgaagccatttatgcc

SEQ ID NO: 56882 - DNA, 74 bp, Homo sapiens
aaaaaccaactgaagcagctgacagagatggatagtggctataatacgcagaattgtggaagcaatattatgga

SEQ ID NO: 56883 - DNA, 76 bp, Homo sapiens
ctgccagcagggtttctcaatctctgcagatggccgtacgtgtgaagccataaggatgagtttaccattattcctg

SEQ ID NO: 56884 - DNA, 100 bp, Homo sapiens
aagatggcggctgggttcaaggtcccgacggcctacacatggggcgctgtgggcgccgtggggctggtgtgggccaccgattggcggctgatcctggact

SEQ ID NO: 56885 - DNA, 82 bp, Homo sapiens
aagccgctggcagccgcggatctcaccgccgctcaggatctaccttctgagatatcatccttcttcagggagataaggaaaa

SEQ ID NO: 56886 - DNA, 100 bp, Homo sapiens
gtatgcttcgtttttcgccgtcatgggcgcctcggccgccatggtcttcagcgctggtaatgccgctgtcatcaaatatgaggagaaacctccaaaacca

SEQ ID NO: 56887 - DNA, 100 bp, Homo sapiens
tcagtaagaagagcaaagtaaatgctgtcttttcccaaaagacaggctcttcacctgaagaaaaatatgtcgtaactgcaagtgtggccaagaagagcat

SEQ ID NO: 56888 - DNA, 75 bp, Homo sapiens
tctccaccaggatcacgtttgagtgtgctcagatatcgcacatgccaaaatttaattcaatttcaattagtggat

SEQ ID NO: 56889 - DNA, 98 bp, Homo sapiens
cgaggaccggcgacgcctagaacaggtccctccttgtggtccatttctgggcaccatgggctccacagtgtgcacagatgaacgaagttatggcagag

SEQ ID NO: 56890 - DNA, 75 bp, Homo sapiens
gccgcccccgccgggtgcctaagcaggcccggcgcggccccagggctggagcagcttcaccactggagccagccg

SEQ ID NO: 56891 - DNA, 121 bp, Homo sapiens
tgatgtggtgcttttgaaccactggaaagtgaggaattttgaagtacaccgtggtgacattgtatcattggtggcgaactttctgaccaagtatacaactacccagagggcctaggagaag

SEQ ID NO: 56892 - DNA, 98 bp, Homo sapiens
aatatctgctgggtgcctttgaaagcctgggcaaagcctggccgcgaaacgcggagacccaacttgttacagaagatggcccagagcccaaggacaaa

SEQ ID NO: 56893 - DNA, 130 bp, Homo sapiens
gagcgcttctttaagggctacgggaagatcctggaggtggatctgaagaacgggtttttcgttggaatatacgttgcacatttatggcgattctgagtgtgagggcagacttctgccaggctcagcacag

SEQ ID NO: 56894 - DNA, 75 bp, Homo sapiens
cttgatggcattttacttcagcaagctgaaggaggaccagatcaagaagaatttggaatttttccatgaagatgt

SEQ ID NO: 56895 - DNA, 100 bp, Homo sapiens
tcctgatgataatgacatatcaaaagaagcaaaaaaccttatttgtgccttccttactgacaggttgcttgtggtggatgtcacatggtagtttttgctg

SEQ ID NO: 56896 - DNA, 100 bp, Homo sapiens
cacggactacatcaggaacggggtgctctacgtcacggagaagaacagatggagtcggataactgttcaggaggagatgatgactggacccatctgtctt

SEQ ID NO: 56897 - DNA, 88 bp, Homo sapiens
gcggaactggatcgaggctctgagaaagaccgtacgtccaacttcagccccagatgtcaccaagaaactccgggacgttttacagcag

SEQ ID NO: 56898 - DNA, 85 bp, Homo sapiens
agttcctagctgaaaaaggtgatgtacaagcacagaacatttccccagaggagctcaaaatggagttgccggagagacagcccag

SEQ ID NO: 56899 - DNA, 75 bp, Homo sapiens
cgtggatgtcgctgaattgcccgtgcccccaggaattcctcctgatcagcagagactgatctttgctggcaagca

SEQ ID NO: 56900 - DNA, 100 bp, Homo sapiens
gaaagggagagatgcctgtttcaggaaattctgaaacagccacacctacaaatgtagacttgcctcaggtcatccccaagtctgagaacagcagccagcc

SEQ ID NO: 56901 - DNA, 100 bp, Homo sapiens
tgccagcccggctttgacatcaaggacgttgccagagctagagccggtgcaggccacgcagaacaagacagggaagtatgtgccgccgagcctgcgcgac

SEQ ID NO: 56902 - DNA, 50 bp, Homo sapiens
tgttttgagctaaatattgaggttgtcgagatgtccacagaaggaggatt

SEQ ID NO: 56903 - DNA, 88 bp, Homo sapiens
gtgggtacccccatgctgtggcacggcttcaggttggtgatttggatatcagctatattaatatagagggaatcactgccactaccag

SEQ ID NO: 56904 - DNA, 98 bp, Homo sapiens
ccctgcaactaactccattcttaattgttttcggctttgtgagaaaccttaccatcaaacacgatggccagcaacgttaccaacaagacagatcctcg

SEQ ID NO: 56905 - DNA, 100 bp, Homo sapiens
aaaaatgtactctgacctgaatcctgaattttccttgatggtcaaaagattaagttgtctcggaggaagtgataattttaagcatttaaatgaaattgat

SEQ ID NO: 56906 - DNA, 96 bp, Homo sapiens
gcatctattggctcccactgactgacagccagatcgccaaggatgtgaagcagttctatgaccaggccctacagcaggccgtggtggatgatgacg

SEQ ID NO: 56907 - DNA, 83 bp, Homo sapiens
ttcatctcttgtgtggggagtttcatcctagcggtaatggtccaacagacagttatgcagctatttcacaagtggatcgattg

SEQ ID NO: 56908 - DNA, 83 bp, Homo sapiens
ctcaaagagcagcaccacatccgcgggtccatcacacaagacaatgcagatcttcgtgaagactctgactggtaagaccatca

SEQ ID NO: 56909 - DNA, 76 bp, Homo sapiens
actgcctggccgaatcagccttttcacgctcaagttgaggctgtgaagctgggcagggtttcagctgagctgaggt

SEQ ID NO: 56910 - DNA, 97 bp, Homo sapiens
agccgccggaggacgagccggacgccgacggctacgagtcggacgactgcactatgctgggactcatgtatgtctactggactcagctcaacatgtt

SEQ ID NO: 56911 - DNA, 100 bp, Homo sapiens
gttgataatctaaatggatgtagccgactcattattgcgttcttccctgtggaacagtagagacctagtctgccttctttcacaagataatccttcaatt

SEQ ID NO: 56912 - DNA, 100 bp, Homo sapiens
tctgctgctattctccgagcttcgcaatgggatacagcaggccaggagcgatttcacaccatcacaacctcctactacagaggcgcaatgggtatcatgc

SEQ ID NO: 56913 - DNA, 50 bp, Homo sapiens
cgtggccccgagggcggatccgaggtgctggagaatctggtaaaagcacc

SEQ ID NO: 56914 - DNA, 100 bp, Homo sapiens
acgattcagtgctactcccttagtaactatgcagttttaatgccgaccccttggtgggaagtattgccactcagtatatgaccaacagagcagaacatga

SEQ ID NO: 56915 - DNA, 75 bp, Homo sapiens
gacttcttccactacaaaatctccagcgtccagtgcctcagggatcgtgaccagatgcccgctggtgctgaaact

SEQ ID NO: 56916 - DNA, 100 bp, Homo sapiens
ggggactcggagctgagaggagctgctgctcggaccagcgcgttgttgacctcctgtactggagagacattaagaagactggagtggtgtttggtgccag

SEQ ID NO: 56917 - DNA, 75 bp, Homo sapiens
gtccggaggacctggcggcacccggtgtttgcgtgcctgcgagcaaggggcaaaagtcaacaactctagcttaat

SEQ ID NO: 56918 - DNA, 100 bp, Homo sapiens
tgccacaaatttgaaagacaagagttctttagtttcatctctctataaagttatccaggagccacaaagtgagggtgttgaaagcagcaggggcctagaa

SEQ ID NO: 56919 - DNA, 88 bp, Homo sapiens
tgcttttaggcttgctggcccgcggggctgtccaggcacgcgaggcccctcagatcttacagactctttcagcacctacgaaaaattt

SEQ ID NO: 56920 - DNA, 100 bp, Homo sapiens
tgagtagcagcaggaagcggaggaaggtgaagtaggaccgaattcctgtgccgaagaggcctgcagtgggagagcaggggagaagaaatgggtgaccgtt

SEQ ID NO: 56921 - DNA, 98 bp, Homo sapiens
aggaaagtgtgtgggaggcgttgacctgccccttgtcctggccccggtgatggctggaccggcggaggaggcgggagcccattgtcccgagagcctgt

SEQ ID NO: 56922 - DNA, 89 bp, Homo sapiens
gaaaggccgcgtcgtgatcgactcggacacagaggacagcggcagcgacgagaacctggatcaggtacaccaggggttggaaaaaccac

SEQ ID NO: 56923 - DNA, 97 bp, Homo sapiens
ctttaagcagcagaggagcacgaggatcgtgggagctaagaagtagctacagcaagctgggtagcaggcagatccaaaggatatcatgaagtttcca

SEQ ID NO: 56924 - DNA, 83 bp, Homo sapiens
tgactctgactctcggactgagaaacgcaagcattttgaaagcgaagcagaagccgtagaatcagcggcgagcctgttgaaag

SEQ ID NO: 56925 - DNA, 75 bp, Homo sapiens
tctgtccaaagcagaggcagtggagcttgaggaaagagcatctacggtgagcgcttccccgatgagaacttcaaa

SEQ ID NO: 56926 - DNA, 98 bp, Homo sapiens
ggtcggcgcctgttctcgggctgtttggcgggtatcgagaaccttccctgcgaacttcagaggaacttccagctgatgcgagagctggaccagaggac

SEQ ID NO: 56927 - DNA, 90 bp, Homo sapiens
tgagctcggcgcacctgggctgggcaggtgtacatggacatcaagattgggaacaagccggctggccgcatccagatgctcctgcgttct

SEQ ID NO: 56928 - DNA, 100 bp, Homo sapiens
cactgaaaggaaatgacggattttgaggcaagtgaggcctatctggttggcctttttgaagacaccaacctgtgtgctatccatgccaaacgtgtaacaa

SEQ ID NO: 56929 - DNA, 83 bp, Homo sapiens
cggagctgggcgacgagctgaccctgggagacatcgacggcctccaggcccaaggtcagcatcccactgtcagccatcattga

SEQ ID NO: 56930 - DNA, 100 bp, Homo sapiens
ggcagattacagtgggacaaagaattggatctggatcatttggaacagtctacaagggaaagtggcatgctgctagtctatggggtccttacaaagacat

SEQ ID NO: 56931 - DNA, 90 bp, Homo sapiens
cgcagagtcggcacctgaaggacatggagagtttgaaaagttcatgacagctcacagctgatgatggtggcaatcttaaggatacagaaa

SEQ ID NO: 56932 - DNA, 100 bp, Homo sapiens
ccatgatgtgatgctggagaccttgacacttatatcctccctggaaacattgaatgaggaggataaagcaaagattgctaaaagcaagaagaagatgagg

SEQ ID NO: 56933 - DNA, 100 bp, Homo sapiens
acctactatgagggtcgagcagaggtaagttcgaggatcgggaagaccacgtccccaagttggagcaaataaacagcacgaggatcctgagcagccagaa

SEQ ID NO: 56934 - DNA, 95 bp, Homo sapiens
cgcggtcgcagtctccacggcgcaggcccacggtagcgcagccgctctgagtttctgatgaagaattgaaaagaagagtagctgaggagctggca

SEQ ID NO: 56935 - DNA, 98 bp, Homo sapiens
ccggctgcgcggctaccgtggccgagctaggaactgtggaaggtgcatcagtgaagaaatggaccaatgtgtataatcatggaatctccttgctaacc

SEQ ID NO: 56936 - DNA, 98 bp, Homo sapiens
gtttccaccccggcgggagctgtcaggttggctccgcgtaaacctctttgtgctgctctctgtggtttgtgtcctcttaaatctagctggatttatcc

SEQ ID NO: 56937 - DNA, 75 bp, Homo sapiens
tttgttttaggtttggattttctttcccttattccagttgatccccagggtgcgtgatgctctaaaaggtccaag

SEQ ID NO: 56938 - DNA, 100 bp, Homo sapiens
aagagaaggttttttctaggaggaggaagtgatccattgtgtaagttgtatcacggactgattcaccgagcccaaccgtactcaactcacatatttctac

SEQ ID NO: 56939 - DNA, 100 bp, Homo sapiens
accacaaatgtttttctgttttgcctgaatacatgatttaaacaagagatttccacagaagatatttgttcagtcgaatcaaggtgaagaggaaacaaca

SEQ ID NO: 56940 - DNA, 83 bp, Homo sapiens
ggtctgcgcagtgcaggcagataccgtttgacaccaccagtcttgcaagagcaaaatccgtccctagccacacatactccaac

SEQ ID NO: 56941 - DNA, 100 bp, Homo sapiens
tgcaaaccacccaagtctgcaatcttaccagggaggccaagcgaccacccaaagaaggtctagatgttgatggaatatatcgagttagtggcaatctggc

SEQ ID NO: 56942 - DNA, 83 bp, Homo sapiens
cgccgacggctgctcaaacatcaggaacatccagtcatggataaaaatgagctggttcagaaggccaaactggccgagcaggc

SEQ ID NO: 56943 - DNA, 99 bp, Homo sapiens
cggtgggcatcaacctcttcctctacccgtggaagaaggaattcagaagcatcaaggggtttcctgcagaatttgcgatgtacttaaactattgtcgtg

SEQ ID NO: 56944 - DNA, 46 bp, Homo sapiens
acgatgaagccccctctgatgagccccccaagatgaacccagtggt

SEQ ID NO: 56945 - DNA, 75 bp, Homo sapiens
tgggaaaatcgcaaggaagccggataagaccatcatcatgtggaaactgaccagggatgagaccaactatggaat

SEQ ID NO: 56946 - DNA, 82 bp, Homo sapiens
ccacttaccgcagcatccaagtcggccctgtctctgctttctatccgtcaagatgataaagtcgtgtgcccgagaaccaaag

SEQ ID NO: 56947 - DNA, 80 bp, Homo sapiens
ctgagcgcctccagcgagaagttgagggagaaaggcgggcccgggaacagctgcatatccccaccgtttgaatctctttt

SEQ ID NO: 56948 - DNA, 100 bp, Homo sapiens
gccagcatcccggtcaacacgcggtacctgaacctgcaagagaacggcatccagcttcggaaccaaaaagaagcttcccagagccggggccaggagcccc

SEQ ID NO: 56949 - DNA, 74 bp, Homo sapiens
atgatgatgatgctctgtccgactggaatttgaatgaggcgatggctgtgctccagcatcacgacgccgtcagc

SEQ ID NO: 56950 - DNA, 76 bp, Homo sapiens
gttggctgcagatttgtggtgcgttctgagccgtctgtcctgcgccaaggtaagccaagatgggtgcatacaagta

SEQ ID NO: 56951 - DNA, 100 bp, Homo sapiens
ctgagagcgacgagcagccggtcagcatgagcgagctctaccctctgcagatctcccccgtgtcttcctatgcagaaaataaagcagttggagtgatgaa

SEQ ID NO: 56952 - DNA, 100 bp, Homo sapiens
ggccgagtggcagccgtcggacgtggaccagcgctgcctggacagcggctggctgtcggcaattggattcttccagtacagcccgggcgctgccgtggtc

SEQ ID NO: 56953 - DNA, 90 bp, Homo sapiens
gcacccacaaaactagcatcctcctggaggagctcgggagtgacagtgaggattcacatttgggttatttcaagatgagcttcctactgc

SEQ ID NO: 56954 - DNA, 75 bp, Homo sapiens
ggactcgccatcgtggccttggctgtctgtgcggccctacatgcctcagaaggattcactccttctccagttgca

SEQ ID NO: 56955 - DNA, 104 bp, Homo sapiens
cagccggcagcccgggcgggtcccggggtgcgagcagcgcacttccgctggagcagatccgcagggacatccgagacttccggtctagcgcggggctggacaaa

SEQ ID NO: 56956 - DNA, 100 bp, Homo sapiens
aagtaatcctcttggaaagctggaaacatagtccgaccgattattgaccgacctattcgaggtcgtggtggtcttggaagaggtcgagggggccgtggac

SEQ ID NO: 56957 - DNA, 144 bp, Homo sapiens
gaagagtttgaaagcgtgctccacaaatatttacagtcggaggagtactcggtgaaatcctgtcctgaagactgtaagtttttgaagagccggaagatccaagcaacagatcatttttctctgaaattatctcttcgatttcgg

SEQ ID NO: 56958 - DNA, 51 bp, Homo sapiens
tcaacaccaagtgcatcaccatccccagaacaacatgcctggaattcaagg

SEQ ID NO: 56959 - DNA, 100 bp, Homo sapiens
aagaggagtctcctgctaaaacttcatcatctcaagttgacctgccacttcacccaaggaggactaagcctggagtaattcgcccagtacctgtaaaatc

SEQ ID NO: 56960 - DNA, 83 bp, Homo sapiens
acggcggcggtggcggcttggacgactcggagagccgaaagaagatgctgatatgctacaacacggatgaacctggaggacgt

SEQ ID NO: 56961 - DNA, 80 bp, Homo sapiens
gcgggaataggacctatggcgtggtggcccagtactaccggcccctgcatggtacccagtgtgttgaacaaattcaagag

SEQ ID NO: 56962 - DNA, 101 bp, Homo sapiens
caggaatcttctgtggccatgttcactccggttttacaggatccctgctgccttggtgatcccgggctgacagccagagagcacagcggctcagctcctgg

SEQ ID NO: 56963 - DNA, 83 bp, Homo sapiens
cagaatgggactccaagcctggaagtgggaaaactcttgcctttgccatcccaatgattcatgcggtgttgcagtggcagaag

SEQ ID NO: 56964 - DNA, 75 bp, Homo sapiens
gcggagacgtgggcgccctccccgccaaggcccgtgcgagctgtccagaccaaaacgaagaagacgttagccaaa

SEQ ID NO: 56965 - DNA, 83 bp, Homo sapiens
atcggtttctaagttctcaaaacttacaggtgagaagccctaccactgcaactgggacggctgcggctggaagtttgcgcgct

SEQ ID NO: 56966 - DNA, 82 bp, Homo sapiens
cggttttcttatgcttataagagtggaacagaattcagaaggagctggcggacatcactttagaccctccacctaattgcag

SEQ ID NO: 56967 - DNA, 135 bp, Homo sapiens
gcagctctctatcacttcaaccactcactggtaacctctgaccttcagtcacctaacctgcagatgaggaaactgaggtttagagagatgaaataacttgcccaagggcatacaccttatgaagcaaggtcctgg

SEQ ID NO: 56968 - DNA, 75 bp, Homo sapiens
ccgcggccagggaacggggcatcgcggttccaacggaaagtgatgaagcattgggcccaacaatgatgagttgga

SEQ ID NO: 56969 - DNA, 75 bp, Homo sapiens
tgtcactcccaccgccccaccgtacttgcaagaaagcagccccagagggtcatcgagcagctcggtgggaagcag

SEQ ID NO: 56970 - DNA, 82 bp, Homo sapiens
ggaagctggctgaacgcgacatcgtccagaggcatttcatccttcatgaagccattcaggattttgaattgcatatgagtgc

SEQ ID NO: 56971 - DNA, 98 bp, Homo sapiens
gtaacttggccaggctggccccgagcggaactggagaaagctgaggtaccatgagctcccgacactctgccagcccagtggttttcaccagtgcccgg

SEQ ID NO: 56972 - DNA, 75 bp, Homo sapiens
actgctgttggcaccaccacccgagactccttaaccgagatcaacctgtctgatgactgtccaagtgcctccaaa

SEQ ID NO: 56973 - DNA, 98 bp, Homo sapiens
ttgtgaagcggcagctgaggagactccggcgctcgccatggccgacgaaaagcccaagggtggcattgtgtgtcccagagtgccggagcgagtcccag

SEQ ID NO: 56974 - DNA, 75 bp, Homo sapiens
ggcgcggcttttggcggcctttctgctcctcgcggcccaggggagtacatcaagacctggcggccacgctacttc

SEQ ID NO: 56975 - DNA, 100 bp, Homo sapiens
gtaaccaagaggaagttggaggtgccgacgggacctgaagtgcagacccctaaggtttttagaacttcagccataaaaatgggcagaattttccttgatc

SEQ ID NO: 56976 - DNA, 101 bp, Homo sapiens
aatagatttttccctctaccttaaggatgtgcaggatcttgatggtggcaaggagtttttgtcatccattggagggacactgtatgaggttggaaagcctg

SEQ ID NO: 56977 - DNA, 101 bp, Homo sapiens
atttaatgcataaaaactgcaatcatttttcttcagctttatcagagacatggaaggtctttaatgtaactttaaatggttcaccaaaggatgctctaatg

SEQ ID NO: 56978 - DNA, 100 bp, Homo sapiens
gcagctgccccgtctgagaagtgaggagcctctccgcccggcagccaccccatctgggaaccggatcgagctgggagatgtgacaccacacaatattaaa

SEQ ID NO: 56979 - DNA, 83 bp, Homo sapiens
ctttgggaggccaaggagggcagatcacttcaggtgacctgtgtttttcccctggctgctttggaaattatgggaaaaaatca

SEQ ID NO: 56980 - DNA, 50 bp, Homo sapiens
agagaattgcagccctcaccaaggagatctattgggaaactgattataac

SEQ ID NO: 56981 - DNA, 100 bp, Homo sapiens
aaggacctttagcaaatacagtaatagatttttggaggatgatatgggagtataatgttgtgtgatttaaagggagtgatagtcactctgagtgatgatg

SEQ ID NO: 56982 - DNA, 90 bp, Homo sapiens
tagaaaacagggaagatattagccaatatggaattgccaggttcttcactgaataaaagttcaggagccctggaaaggagaaggaataag

SEQ ID NO: 56983 - DNA, 100 bp, Homo sapiens
tcccaggacctccactaatcaccagaacaaaatgtgcagattttgaagatgatgatctctacggccagtctgtagaggatgattattgtatttcgccgtc

SEQ ID NO: 56984 - DNA, 82 bp, Homo sapiens
gcgtggagcgctgcgcggcgcggcggccgggccctcgagacggggacgaaactatgttccaacttcctgtcaacaatcttgg

SEQ ID NO: 56985 - DNA, 82 bp, Homo sapiens
ttgccaccaaagacctgcgactttgctcagggagtgcatccgccccaacccttttccccctcgtctcctgtgagaattcccc

SEQ ID NO: 56986 - DNA, 100 bp, Homo sapiens
ctcaacggctctcagacaccaggttgcttcttgagagaagccggatggatgtgcatgcagggaggacagtcattttgtttactcattcagccctgttgca

SEQ ID NO: 56987 - DNA, 75 bp, Homo sapiens
gttattctgcatattgcagttcttgtcaatgacctggtgaccaagaatatggcccaggtgaccaaagccctggac

SEQ ID NO: 56988 - DNA, 98 bp, Homo sapiens
ggaaaatgactgtgattctcccaggaaccaacagccagaaccagcgaatcaatgtccagccactaaatccgggtcctcccctggagtcaactttccac

SEQ ID NO: 56989 - DNA, 100 bp, Homo sapiens
tgtggccgaagaggtgaagtgtgtgactgtggcaccgtgtgtgagactcggacagatccggacgctgcggctgaagatcttggcagacgcagcagctgag

SEQ ID NO: 56990 - DNA, 101 bp, Homo sapiens
atacagacagttcctgctctaagaggccatctgtgaggctcagtctcccaacacctctgaacaaaatccagtctcatagcagaggagaatataatgtttac

SEQ ID NO: 56991 - DNA, 74 bp, Homo sapiens
ggacccagagaagaggaaaactctaccggtgcagaagggagaattccacaagttggctgatgccaagatatttt

SEQ ID NO: 56992 - DNA, 98 bp, Homo sapiens
agtggttgtgtggtcgcgtctcggaaaccggtagcgcttgcagcatgctgagatctgtatctgtggacctgaatgttgatccctcgcttcagattgac

SEQ ID NO: 56993 - DNA, 98 bp, Homo sapiens
gtgccccaggtgaaggccagtgctctcaaggaaattttacggttctggctcacaaagggtgttgatggttttagtttggatgctgttaaattcctcct

SEQ ID NO: 56994 - DNA, 100 bp, Homo sapiens
tggagtttgcaaacaaattattgacggtcaaggtatttcatgccgaggtatttctgggaaaagccagcttctgtttgcactggtcttcacaactcgttac

SEQ ID NO: 56995 - DNA, 83 bp, Homo sapiens
gcaggagaaggtgctccagagatcttctgttcttcagtgctgaagctgctgaaagatggcagaagaagtggtggtagtagcca

SEQ ID NO: 56996 - DNA, 100 bp, Homo sapiens
gtttgcgctacgctgagtacttgcagccctcggccaaacggccagacgccgacgtcgaccagcagagactgatgccgctcctacgaggactgctgtggct

SEQ ID NO: 56997 - DNA, 89 bp, Homo sapiens
acgcttggctatgtgacgctgctggaggaaacacctcaggacacggcctacaacaccaagagtgcctccggagccagcgtggtggccat

SEQ ID NO: 56998 - DNA, 100 bp, Homo sapiens
aaagccacctatggagattagggaagaaaagaaagaagacaaggtggaaaagttgcagtttgaagaggaggactttattttcagctgaactctcatctct

SEQ ID NO: 56999 - DNA, 100 bp, Homo sapiens
ccggccgccgcccgagcgctcgagaaagtcctctcgggagaagcagcgcctgttcccggggcagatccaggttcagatctctggaccggattcgtcccat

SEQ ID NO: 57000 - DNA, 75 bp, Homo sapiens
catgccttctgatgtctacaggcgctgacggccacccctccaggcccagaataaagagaccagtgttttagctgc

SEQ ID NO: 57001 - DNA, 75 bp, Homo sapiens
cagatatcttgaaaagctgccagaaagtgtactaatggtcacttgatgtgcgctggctgttttatccacctacta

SEQ ID NO: 57002 - DNA, 75 bp, Homo sapiens
acccttgtagagtcattcctgcctttgagcggactcccttttaaggtggatccataaagaacccagccaacccgc

SEQ ID NO: 57003 - DNA, 75 bp, Homo sapiens
aaatgctagcagacacggtggctactctgcctcggggacgaaagcaggagacggtggctcagggagtaaaggaag

SEQ ID NO: 57004 - DNA, 119 bp, Homo sapiens
ggcgggacagacctcgtcccgggctgaattctctctccactcttcgagattggcacacccagaataaagttacctcaatgaccttcttaactggcaaagcagtagaagatttgtgcaga

SEQ ID NO: 57005 - DNA, 144 bp, Homo sapiens
ttctcggtgacagccgagggcggcctgagcccggcgcaggtgaccggcgcgcgggagcgctacggccccaacggtgctggagaatctggtaaaagcaccattgtgaagcagatgaggatcctgcatgttaatgggtttaatgga

SEQ ID NO: 57006 - DNA, 90 bp, Homo sapiens
cggcggcgagcggttccttgtgggctagatatgtgtcacaaagatgtctacacggaactgccagggaatggactcagtgatcaaacccct

SEQ ID NO: 57007 - DNA, 100 bp, Homo sapiens
ctctgatccattcacacctagataccggaggaggatcttctgcggattgttggaatctaccctaagatatcaacatggactagggactccagacttgcgg

SEQ ID NO: 57008 - DNA, 100 bp, Homo sapiens
tcattggccacctacagaaacaaaatgtcaacaaattgatggttggccagtcagtgctgaaagatgtaagcaaagtgaagaagctgaagcaatctggaga

SEQ ID NO: 57009 - DNA, 97 bp, Homo sapiens
gccgggacccggttccccggcccacagtgggggtgtgcaaacccgagagaactggctctcttgagtcatggcttcttcaaagctccgagaacccgtg

SEQ ID NO: 57010 - DNA, 100 bp, Homo sapiens
acactccaggagttggtggtgaccccgcccagttggcccagaggatctcttctaacatccagaagatcacacagtgttaggagtattcaagctgtagtcg

SEQ ID NO: 57011 - DNA, 83 bp, Homo sapiens
gggacgacgagtacgactacctattcaaagaacatccagtcatggataaaaatgagctggttcagaaggccaaactggccgag

SEQ ID NO: 57012 - DNA, 100 bp, Homo sapiens
ggcttttcctccgaccctgatgctcttcaattcggtgctccgccagccccagcttggcgtcctgagaaatgggaaatcctcattgacgattcaatttgtt

SEQ ID NO: 57013 - DNA, 90 bp, Homo sapiens
cgcggcctgcgcgcgcctcccgggcggattccagccccgagcgggacagcgcggcggggagcgacgattatcaggaactgttgccgttat

SEQ ID NO: 57014 - DNA, 100 bp, Homo sapiens
gatggccgctttgaggtgtggaatgcgatgactcgggccaagctgggccatggccttctctccggggagtattccaagccagtaccggagtcgggcgatg

SEQ ID NO: 57015 - DNA, 98 bp, Homo sapiens
cggagagctccctcctagaaaagcttgttgcagatccttgtgccagcaacccttgtcaccatggcaactgcagcagcagcagcagcagcagcagcgat

SEQ ID NO: 57016 - DNA, 51 bp, Homo sapiens
ctcacgctccactgcaacatcacggaacactttggtcttagtaacctgact

SEQ ID NO: 57017 - DNA, 100 bp, Homo sapiens
caagtcccgtcttatgggacttgaggccctcaaggactgtcctgattgcctgtaatgttaagcagatgagcaaggatgctcagccctctttctctgctga

SEQ ID NO: 57018 - DNA, 75 bp, Homo sapiens
ggccgccccgagcggagcctggagaaatgactgctgtccatgcaggcaacataaacttcaagtgggatcctaaaa

SEQ ID NO: 57019 - DNA, 98 bp, Homo sapiens
gcttccgtttgttggtggaggaggtggcaggcctcggcgcaaaagactgttgaagtagagagcattttgcccagctcactcggattctttgctggcat

SEQ ID NO: 57020 - DNA, 75 bp, Homo sapiens
taaggatggtttagaaatggaaaaatgttgcattgaagtaatgggagatggatgccttaataatgaacactttga

SEQ ID NO: 57021 - DNA, 83 bp, Homo sapiens
agaaaagcaagagtttctgtttagatgaccagtctcctgccactagaacttatatgtgaaaagtctataggtacttgtaatag

SEQ ID NO: 57022 - DNA, 89 bp, Homo sapiens
tgagttcctcttgctcacagagctctgtaaaggtgccctacgagacgctgaacaaacgctttcgcgccgctcagaagaacattgaccgg

SEQ ID NO: 57023 - DNA, 50 bp, Homo sapiens
ccaggaccccctagaagcctagaaatgaccagcagaagtagacactgtgg

SEQ ID NO: 57024 - DNA, 100 bp, Homo sapiens
acttaactaagcagatttcccgagactacggtgtgctgttagaaggttctggtcttgcactaagctcgtgtcctttcttcggaagaaggatgacttcgtg

SEQ ID NO: 57025 - DNA, 83 bp, Homo sapiens
gcttgtccttgctggtgcatgcgtcgtcggcctctgggcagcagatttggcagctgatcggaagctctttcgtcttgtctcca

SEQ ID NO: 57026 - DNA, 101 bp, Homo sapiens
ccaacaacatcttcccaatttagcttccatttaccatgaacatcttagtcaaggtcttgtggatgagcagcagaaagttcggaccatcagtgctttggcca

SEQ ID NO: 57027 - DNA, 75 bp, Homo sapiens
gtcggtcccggggtcacccgctacgggaagcaggcctcgccacagggaggtatatcatacaaagagaatgcaaca

SEQ ID NO: 57028 - DNA, 100 bp, Homo sapiens
gagggagcggcggccgagttctccagcctgctgcgcaggataaaaggcaaactcttcacctggccaaagatgaagaggaagcctttctggattggagtga

SEQ ID NO: 57029 - DNA, 75 bp, Homo sapiens
aacaatcttttgttggattgaaacagctaatccccgccgccgccatgcccttctccaacagccacaacgcactga

SEQ ID NO: 57030 - DNA, 83 bp, Homo sapiens
ggagcggaccccgcatcttcgccgtctggaaaggtttttagaacttcagccataaaaatgggcagaattttccttgatcatat

SEQ ID NO: 57031 - DNA, 100 bp, Homo sapiens
tgaagccattccagagagaagacagtcacccaagaggcttctgcagtaccaccgggctctggtggcggtgctcctgagccgcacctggcacgtccgcagg

SEQ ID NO: 57032 - DNA, 51 bp, Homo sapiens
taccgttgaccgctcctccaactaaccagaatccatacctgttttgtatgt

SEQ ID NO: 57033 - DNA, 100 bp, Homo sapiens
gtatggtgcaatggtaaaaaattggagacagcggtggctgtgaaaaacaatatcgatgtcttctacttcagctgcctcatcccactcaatgtgctttttg

SEQ ID NO: 57034 - DNA, 90 bp, Homo sapiens
caggtgaactcgtggcgagagaaggaaaatgcgcgtcccgggcgcggggctgggttacgacccctacaaccctgagctgcccaagccccc

SEQ ID NO: 57035 - DNA, 75 bp, Homo sapiens
ccccaggggactgtgcgaactgcagaatttacatagtacatgacgaagttaaggataaagcttttgaactagaac

SEQ ID NO: 57036 - DNA, 98 bp, Homo sapiens
tgccaacccacctaactacggaaaacctgatcccaaaattattgaaaacactcgaagggttttccgaaattctctgtatgcaccagattattcatctc

SEQ ID NO: 57037 - DNA, 98 bp, Homo sapiens
gatggcggcggcggcggcagcgacagcagcagcagcagccagtattcgggaaaggcagacagagaattgtggccttgtttcctaaagatgtggaccgt

SEQ ID NO: 57038 - DNA, 83 bp, Homo sapiens
ccagatcatccatgtgagtgaccatgcagcaaaagaaggagggtcctctcagtgattaagctcattcttggaatcccagaaca

SEQ ID NO: 57039 - DNA, 50 bp, Homo sapiens
ccgacactcttgatgacctgatagcaggagttgatccccctcatattgtg

SEQ ID NO: 57040 - DNA, 112 bp, Homo sapiens
acccttggtgatgagcctcggaaagtgctcctgcggctgtatggagcgattttgcagatgcgtggtaccatgcgacgacgctatgaagatgatggcatttcagatgatgaaa

SEQ ID NO: 57041 - DNA, 82 bp, Homo sapiens
ccatggttcagtggccctgtacgacatccggactggaaaatgtcagatggagtcatcagaacccactgtgaggaagtgactt

SEQ ID NO: 57042 - DNA, 90 bp, Homo sapiens
ctgagcctcctgcaacacctgcggcctcactgggacccccaggaggtgaccctgcagatccaaaggggctattctgaacatttcatctgg

SEQ ID NO: 57043 - DNA, 99 bp, Homo sapiens
actgaagagaggagagatcattgcaaagcagggaggaggcggtcaggctgctgaggaaacaccacaggctgaacgggggaggaatgcacatgccacgct

SEQ ID NO: 57044 - DNA, 100 bp, Homo sapiens
gtgccatatactctattcagatgaaaatatcactacgattcagtgctactcccttagtaactatgcagttttaatgatccctgcatgtcactgagtccac

SEQ ID NO: 57045 - DNA, 86 bp, Homo sapiens
gagcaggcccggggagggtggttaccgctgaggagctgcagtctctgtcaagtttcagacccaaagtttacgcctatcagacctac

SEQ ID NO: 57046 - DNA, 98 bp, Homo sapiens
tggcctataattacaaaatggaacagatttcaaaaggacgtaatactccactgtgcgacagttgctgatcttatctgaagcagcagatcagtgggatg

SEQ ID NO: 57047 - DNA, 75 bp, Homo sapiens
ccgccctggctgcaggacccggagctcatgctggtacgctgctgctgcaggatcagtttgacaacttagaaaaac

SEQ ID NO: 57048 - DNA, 100 bp, Homo sapiens
agactgaggacttaaatgaagccactgattagcaatttaaagatcctctccaagatgtcagtattgaatatggtggtgaggcgtgaccctggcaacactg

SEQ ID NO: 57049 - DNA, 90 bp, Homo sapiens
tcacctgcagaccggctataagtcttctcacaagactttcaggattaagcgattcctggccaagaaacaaaagcaaaatcgtcccattcc

SEQ ID NO: 57050 - DNA, 100 bp, Homo sapiens
gcatacagctcatgttggatcaggagacctgttcagtggaatgaattcacgggctacattgagagacctcagctgattcgagcaaaagtgccaattgtga

SEQ ID NO: 57051 - DNA, 50 bp, Homo sapiens
gcccccagcgcagcggccgcggagcctagtaataaacgggtcaaacccct

SEQ ID NO: 57052 - DNA, 124 bp, Homo sapiens
gaataatgtcactgcatcagtttttactagagccaatcacctgtcatgcctggaacagggatcgtactcattagaagcccaggacccaggaaggagacacaggaaatttattcaaagtccccac

SEQ ID NO: 57053 - DNA, 82 bp, Homo sapiens
ctggatgcgttactactcttctcattacatgactttagtggttcaatccaaaggctctggtgaagagaactcctagcagtgg

SEQ ID NO: 57054 - DNA, 50 bp, Homo sapiens
tccttggcatgggctacaaggaaaacggtaaaatcccagaggaatccaaa

SEQ ID NO: 57055 - DNA, 97 bp, Homo sapiens
cgcctagcgacgcccaacacctgtccaaacagtgttgaaaagtctcctctagagctttggaaggctgaatgcactaaacatgaagagcttgaaagcg

SEQ ID NO: 57056 - DNA, 98 bp, Homo sapiens
gattgctggtttcatcctgggcactgcagtggccctgtttctgggaatgggtactgttcaaaaaggaatgccccacaagtgttaccatggcaaaactg

SEQ ID NO: 57057 - DNA, 75 bp, Homo sapiens
agccactgattagcaatttaaagatcctctccaagagaacaactttatgagattgggaatcatgatcacctccat

SEQ ID NO: 57058 - DNA, 100 bp, Homo sapiens
gtcggaggtctcatctttgaactactgccggagcttctgccagcaccagaaagtttgatgcaggcattggaagacttagattatctggcagcactggata

SEQ ID NO: 57059 - DNA, 100 bp, Homo sapiens
ttatgaggcagagcctaagagaactatggcaacatcaggtgactgtcccagaagtgaatcgcagttgtggaagctgatcgaggaagcctaagcaggctct

SEQ ID NO: 57060 - DNA, 96 bp, Homo sapiens
atgagtgatgacaaaccctttctatgtactgcgcctggatgtggccaggtatttactaccagggagcacccaattcttcttgagaacaccaaccta

SEQ ID NO: 57061 - DNA, 82 bp, Homo sapiens
ccatcctgccgtccttctccactttcgccagcccgtgccgcgagcgcggcctgcaggagtggtcccaggctgcacccatggc

SEQ ID NO: 57062 - DNA, 128 bp, Homo sapiens
gagttgctggtgatccgcaattacggccccgaggtgtgggaagacatcaaggaggtggggaagacagggctccagctaccacaggacgggctctgggtatagccgttccagtcagggacagccgtgga

SEQ ID NO: 57063 - DNA, 100 bp, Homo sapiens
ccatctactgtctttttcttcaatgggcagcatatgaaagtggattatggtgagccacgtattgttagtagaattttccagtgttgtgcttggaatggtg

SEQ ID NO: 57064 - DNA, 100 bp, Homo sapiens
cagaaatcaccttcagctgtttcctgagttgctgtttcttgggactgcgaagctatacaggctacggtgcttcctgaaggccctggattgtcgtattcac

SEQ ID NO: 57065 - DNA, 50 bp, Homo sapiens
cctgacacccggcatgaccacgggacgaccctgggacagtctccactggg

SEQ ID NO: 57066 - DNA, 75 bp, Homo sapiens
tatgcctcgccagagattgtcaatgggaagccctacacaggcccagaggactcagaattcatgattgaagaaatg

SEQ ID NO: 57067 - DNA, 100 bp, Homo sapiens
atcggtttctgagtccagccaacagcagaagagaaagccagttatccacggactggaagatcaaaagagggcaattgctggctactttgatatatatttt

SEQ ID NO: 57068 - DNA, 100 bp, Homo sapiens
ctcaaccagtgtggatcccttctctattacctcaccttggcatcgacaggtggacccaagtggagagattgtggaactggcgaaaggtgcatgtccctgg

SEQ ID NO: 57069 - DNA, 99 bp, Homo sapiens
agtcttcccgcgtccgccgattcctcctccttggtcgccgcgtccttggctggcgtgcatctgcatctgggaccgacctcctgggctggctgatcaaag

SEQ ID NO: 57070 - DNA, 88 bp, Homo sapiens
ggggagtgcgcggcggccgcagctgccacaaaccagaagttggtgagatggcaaagcagtatatagagaaaagtcttttggttccaga

SEQ ID NO: 57071 - DNA, 100 bp, Homo sapiens
cgaaaggaacggctgaaggccctacgggagaaaaccgggcgcaaggtttacccagggttgatgataaccgctggccttattcattggattttaaatacat

SEQ ID NO: 57072 - DNA, 100 bp, Homo sapiens
gaagagtttgctgcagctctctatcacttcaaccactcactggtaacctctgaccttcagtcacctaacctgcagggtgatctggaccctctggcatctc

SEQ ID NO: 57073 - DNA, 100 bp, Homo sapiens
gagacagggagagaaggctgaagtccctggaggaggagctggagaggaaggcgagactgcaaaattcaaaatggggctcaaggtattcgtttcatctaca

SEQ ID NO: 57074 - DNA, 100 bp, Homo sapiens
agaggatgaagatgtggatctggcccaggagccagctctcaatgaagccaacttgagcaatctgaaggccccattggacatcccagtgcctgatccagtc

SEQ ID NO: 57075 - DNA, 100 bp, Homo sapiens
cggccacagcctgcagcggagcccacgagaggcagcgccatggcggagcagacctactcgtgagtgtgaacatggctacgcctcttcattcccgtccatg

SEQ ID NO: 57076 - DNA, 51 bp, Homo sapiens
ttttgttggattgaaacagctaatccctagtgtgttaattgtaacctacaa

SEQ ID NO: 57077 - DNA, 75 bp, Homo sapiens
ttaatctcagggaactggatgtcagcaagaatggaggagacatcacagctttcccagatcgggaggaaaaatatg

SEQ ID NO: 57078 - DNA, 82 bp, Homo sapiens
agatcatctacgacgagaaccggactcctgggagagttggctctcaaggttctgatttagattcatcagcaactcctataaa

SEQ ID NO: 57079 - DNA, 75 bp, Homo sapiens
gttgcctccatgcgccaatccaaaccgaaagccagaagaatcatgtcaaccctgccatggacttcacgcagactc

SEQ ID NO: 57080 - DNA, 74 bp, Homo sapiens
cgaatgggaagccaagtgccatcttcaaaatttcaggtcttaaatctgatcataggtatattgaactgttcctg

SEQ ID NO: 57081 - DNA, 90 bp, Homo sapiens
ggcagccattctatgctgtggaaaagaaagcatactgcgagccctgctacattgacctcaatacagtctccatcttcatatggtaacagc

SEQ ID NO: 57082 - DNA, 98 bp, Homo sapiens
aagagcagaaaatagcagccaggaaccaagaaaacttggattggcagccaccatttgcatgtgatgttgataaacttcattttacgccacgtatccag

SEQ ID NO: 57083 - DNA, 100 bp, Homo sapiens
gtcaggatggccgagtggtctaaggcgccagactcaagggatacagcaggccaggagcgatttcacaccatcacaacctcctactacagaggcgcaatgg

SEQ ID NO: 57084 - DNA, 95 bp, Homo sapiens
agcctcccaagtagctgggattacagcctacaacacagcagtcccctcaggatgagcaggaaaagctcttggatgaagccatacaggctgtgaag

SEQ ID NO: 57085 - DNA, 74 bp, Homo sapiens
gcccagcctctcgaatgggcacacctgtgtaggtgaatctggattgggaaagtcgacattaatcaactcattat

SEQ ID NO: 57086 - DNA, 75 bp, Homo sapiens
ctggacttcatgcttagatacatgtataacaaggtcattcccaaaagcaagttcgtcttggtgaagttcgacacc

SEQ ID NO: 57087 - DNA, 97 bp, Homo sapiens
gtcccccaaagatgagatttacctgtgagatgtttcatcccaacagattcaacgtgggcagaagtgctggtgggagatcgacggtcagggagattaa

SEQ ID NO: 57088 - DNA, 100 bp, Homo sapiens
cggagcccctcggcggcgccaccatgtactcgggagccggccccggtgaatgaaaactttgccattgatttgatagcagagcagcccgtgagcgaggtgg

SEQ ID NO: 57089 - DNA, 101 bp, Homo sapiens
cggagctgcgctggcagaagttcgtcatgttctacgacagcgagtatgggagccatccagggtcctgaagagtttgtggaaggaatggcactaggacttaa

SEQ ID NO: 57090 - DNA, 100 bp, Homo sapiens
atccactgcctcagggtcttcagtggtaacagccagtgtgcagattcttcaaacacctaaatgaaagtgataaattcaaaactgatccttttagttcctc

SEQ ID NO: 57091 - DNA, 51 bp, Homo sapiens
ctttttcagagagaaactttcggtaatgtggtatggctctctcggcatgat

SEQ ID NO: 57092 - DNA, 75 bp, Homo sapiens
tcagtgtgcttgcttggagatcaggacgcaaaggaaaaatatattcagggggaagagatgtaatagatttcacat

SEQ ID NO: 57093 - DNA, 99 bp, Homo sapiens
aagtctacagggtgatccagcagcagctctgcttgaggatatttttgagtgtcgaacttgtggcttgctggagtcactgtgttgttgtacggaatgtgc

SEQ ID NO: 57094 - DNA, 75 bp, Homo sapiens
accttgcccactcccatggtcctgcagaggaacagcgcctaaaagaacttgcaaagaaacctcatacctctttaa

SEQ ID NO: 57095 - DNA, 90 bp, Homo sapiens
gcatgtttctacacaacaaaacattcatggagggggaagtctggctctgggagaggagtggacagcagctggttgagatacatccccatc

SEQ ID NO: 57096 - DNA, 98 bp, Homo sapiens
atctgcagcagcatgatttaagacagccagctaaaggtgtggatgagcaaatacggctggagtgccgacgagtcggggcagatcttcatctgtagcca

SEQ ID NO: 57097 - DNA, 96 bp, Homo sapiens
tgtttgatctccacccaatgagtctcctgggctacctgaccaagtacgactgctccagtgcggacatcaaccccataggcgggatcagcaagacgg

SEQ ID NO: 57098 - DNA, 100 bp, Homo sapiens
cttgtggtgcggcctcaccatacaggaacagggcagacgttagcgtgagtgatcactctcaatcccggggtgctgtgccgttcctggtcagtgccacctc

SEQ ID NO: 57099 - DNA, 100 bp, Homo sapiens
ttagcaacggaagccccgggcctcatcccaggcatgtattccactgatgagaacctgatcctttccccactcctgggtaacgtctgcttctccagctccc

SEQ ID NO: 57100 - DNA, 75 bp, Homo sapiens
cgggcccttcctcgaggcggtgtcccacctgccgcccttcttcgtattggctggagttggcgatgactcagcaga

SEQ ID NO: 57101 - DNA, 51 bp, Homo sapiens
ccgcagcagccaagcaatggcagggaattgatgttgatgctgaaaattgtg

SEQ ID NO: 57102 - DNA, 73 bp, Homo sapiens
ctcaccaccctggtggcctttccctccagctctgtctatcctaccaagctcatgatggagcagtccaagaagt

SEQ ID NO: 57103 - DNA, 101 bp, Homo sapiens
cgccgccgccgccttgctgctgctcaaagctgctgccgccccttgggctaaaagagtcctccctgctgctgtgtggacgacacgtgggcacaggcagaagt

SEQ ID NO: 57104 - DNA, 118 bp, Homo sapiens
cccagaccctggagcctcagttggaagcagccgatccagcctgcggagcctgtggggcagtctgcatgaagaaatcagtgatttttatgaatacatgtctccaagacctgaggaggag

SEQ ID NO: 57105 - DNA, 83 bp, Homo sapiens
ctccaggccaagagggatccttcacccgtgtctggtcactatcatatgacaaaggctttgccgcagttcatcttcctccctgt

SEQ ID NO: 57106 - DNA, 98 bp, Homo sapiens
gcctccaggtgacagcaatcagctggcctggtttgatactgacctgtaaatcatcctttagaaatctcctgcaaagaagctgagccatgcaattagta

SEQ ID NO: 57107 - DNA, 51 bp, Homo sapiens
ggccaagatccaggataaggaagggtatgttagagcccaccaaggaaccac

SEQ ID NO: 57108 - DNA, 83 bp, Homo sapiens
ttggattcgttactgctttgcaacgcgcacctaactccagcatgctccttttgatgcaatgattatggtgaacatcagttatt

SEQ ID NO: 57109 - DNA, 90 bp, Homo sapiens
cgcactggaggagctttgctttatgattatgggaatgctaccaaagcctcaggaacttgctactaccagcaccatgccctaccaatatcc

SEQ ID NO: 57110 - DNA, 76 bp, Homo sapiens
cgggaaaggtctgcagtatgaatgcacagtgcccaaggttgaagcaatgaataaaagactgggctccttggtggat

SEQ ID NO: 57111 - DNA, 100 bp, Homo sapiens
gcggaagaccaagatcatcgagatgggtgttgaaagcagcaggggcctagaagacattaaaccgataccacagaaatacaaaggatcattagagactatt

SEQ ID NO: 57112 - DNA, 100 bp, Homo sapiens
aagaagccctcaggggcaattctgacccatggtacacaatgttgtcaggacaggttcccttccaatctcatgaccgaagtttgacgtgtaccagcgcggt

SEQ ID NO: 57113 - DNA, 108 bp, Homo sapiens
tctgtgcatcgacttcaacaagaacctgaacgaggacacgaccttcctgcccttcacgctccaggagctagatgaaggatttgggggcagagcacttggcaggtcatg

SEQ ID NO: 57114 - DNA, 101 bp, Homo sapiens
gttactagtgtctgaagatccaaaggaaggaggagctaccaccaaagagtcagagctgcgggaagcatttcttgagttcgataaggaccgagatgggttca

SEQ ID NO: 57115 - DNA, 90 bp, Homo sapiens
aacatggaggaaaatggccttactggtttaaaaaaatggccatacactgcttcccttatgtgaagaagcgcatccctgtcatgtaccagc

SEQ ID NO: 57116 - DNA, 100 bp, Homo sapiens
ttaaattacgtcctggagaaatgggtattgtcagcaatgggagaaggcgaatctttagataacctggactccccccgatccaattcttggagacagcctc

SEQ ID NO: 57117 - DNA, 50 bp, Homo sapiens
ggccgcggagcgccagctcaatgaagtcaaaatgcagatcttcgtgaaaa

SEQ ID NO: 57118 - DNA, 98 bp, Homo sapiens
aacattgcggcaacaccatggctgggtagttcgaggggtttttgcgacctttccaaagtgaaactgatgagatttgatgatccactgttggggcctcg

SEQ ID NO: 57119 - DNA, 75 bp, Homo sapiens
ccggagtctgaaagatgcacttttcaagacttccattagtttgatgaatctgacttccacaccactatgcaacct

SEQ ID NO: 57120 - DNA, 100 bp, Homo sapiens
ctcgagatgattatcgtaggaggagtcctccacctcgtcgcagtggtaatctactgggacggaacagctttgaggtgcgtgtttgtgcctgtcctgggag

SEQ ID NO: 57121 - DNA, 100 bp, Homo sapiens
tgaccgtgctggctggtgcaatgcttgccttgggactaatgacatgcttgtcaggtaggcaagttgcacacagtggagctaaagcaagtgtagttgatgg

SEQ ID NO: 57122 - DNA, 90 bp, Homo sapiens
ccagaacagagccccattgtattataattaatctgagcacatggattatatggttcgagaaatggctgctactaccttaagcggtctgct

SEQ ID NO: 57123 - DNA, 87 bp, Homo sapiens
aagaccacccagcggatgccaggaaaccttggtgactctgacatcattagaagcatgccagaacagactggtgaaaagtaaaccttt

SEQ ID NO: 57124 - DNA, 75 bp, Homo sapiens
ctgctttcatggagttcacagaagagtcgaggaggttatcttcattgtaatgaatatgatagtctgagattgagg

SEQ ID NO: 57125 - DNA, 88 bp, Homo sapiens
aagatggcggcagggaccagcagttactgggaagccatggcaatgacaggctcaacaccttgctcatccatgagtaaccacacaaagg

SEQ ID NO: 57126 - DNA, 100 bp, Homo sapiens
acattgatggaaaacaaatcaaactgcaaatctgggatacggagttccaccatcttcctctgaagacgtagccatcttgctccatgaaggtcaggacaat

SEQ ID NO: 57127 - DNA, 96 bp, Homo sapiens
gagctttggatcaacatgccaattgagtgaaaaatttatcaaagctggctctcggcggtactcctgggtctcagaggagccgctgaactacgtggg

SEQ ID NO: 57128 - DNA, 95 bp, Homo sapiens
caagtaatcttatatggtgtgattctgctgttcagcaggagaaaatttcagagctgcaaaattatcaggctgaagtggaggcacagctggcccga

SEQ ID NO: 57129 - DNA, 77 bp, Homo sapiens
accagtcttccctggcaagattcttctgaattgtgctgccttggccaaaagaggttgtctgcattcaaaagagcatt

SEQ ID NO: 57130 - DNA, 82 bp, Homo sapiens
cgggaccggctgtatgattaggccacaatcttcaatgagtaaacatattcctgtcagaagttgagtagcaggggcctaggag

SEQ ID NO: 57131 - DNA, 100 bp, Homo sapiens
cagaggtgatcttcaggctgcaacaaggagaagagccatggaaacaggaggaagaattcccaagccaaagctttccagtgcctccaaagccattacacct

SEQ ID NO: 57132 - DNA, 90 bp, Homo sapiens
ggcacctgcgcgaagctggccaaagcctgcccagacggctcacctgtgcgggatggaacaaaaggtgctggagagtcatgcctgtgagcc

SEQ ID NO: 57133 - DNA, 90 bp, Homo sapiens
gtgatgggtattacagatgtagatgataaaatcatcaaaagagccaatgagactttttaaaactgtggacttaaatgttctgcaaagtct

SEQ ID NO: 57134 - DNA, 83 bp, Homo sapiens
aattcactcactttgcaatggaagcaaggacacccaggcccattattttcctccagcctccatggaccacagtcttccaagga

SEQ ID NO: 57135 - DNA, 74 bp, Homo sapiens
agaggttccctccgagccccttcctgagaagatcccaggtgtgacgtatgcagccaaaggctactttgacgccc

SEQ ID NO: 57136 - DNA, 58 bp, Homo sapiens
agaacaagcccatcgtcacctgagtgagctgttgccgcagaatgggctgctggctcct

SEQ ID NO: 57137 - DNA, 82 bp, Homo sapiens
tcggcgtgggcgtttgaggaagctgggttccccctaaaggactcaaaacgtctaatccaatggttaaaagctgttcagaggg

SEQ ID NO: 57138 - DNA, 100 bp, Homo sapiens
ccatccaaccatgagctggtggttctccagaagctggggaaggcagatgagaccaaggatgagcagtttgagcagtgcgtccagaatttcaacaagcagc

SEQ ID NO: 57139 - DNA, 82 bp, Homo sapiens
cgggtctcggcccgcaccaggagcggaacaaatctctggaaacatggctacagaacatgttaatggaaatggtactgaagag

SEQ ID NO: 57140 - DNA, 74 bp, Homo sapiens
ggagctcccccaagagccggaaaggtataaaggaccattgttagaagagcaagcccttacaaaggcggcagagg

SEQ ID NO: 57141 - DNA, 96 bp, Homo sapiens
atgaccagcagtctaggcgttcaagaggatttgcctttgtatattttgaaaatgtagatgatgccaaggaacttcaagacaaagccactgtgctaa

SEQ ID NO: 57142 - DNA, 82 bp, Homo sapiens
agtttcccagcaagcagtctatcattcagaggaattacatgaacgacagccttcgcaccgacgtcttcgtgcggttccagcc

SEQ ID NO: 57143 - DNA, 138 bp, Homo sapiens
ctcgctcctgctgacagaagaggaagcagccctctacattcaatccttctggagagcctgtgtggtgaaaggtgtagcagtcactcggcctacacccacagcatcgaccttgtgaacccagcgacctgactgccttgg

SEQ ID NO: 57144 - DNA, 101 bp, Homo sapiens
ctcatgcggatcaccctgcggaacctggaggaggtggagttctgtgtggaaggattgtcagtggcttcgccccgaggagagctgactgccctgggctgctg

SEQ ID NO: 57145 - DNA, 74 bp, Homo sapiens
accaccttagcctcttgatcgaggaaggtgcgagaagatgtactaaattcattgaataacaactttcttcaaac

SEQ ID NO: 57146 - DNA, 75 bp, Homo sapiens
tcactgttacctgaaagagcaatattacaggatttggagttccatggagtgatgagattttattttcaagataaa

SEQ ID NO: 57147 - DNA, 75 bp, Homo sapiens
tcccgctggccgcctcgatgcaggaggacgaacaggtaactcaactggacccaaataaatcattattggaggtaa

SEQ ID NO: 57148 - DNA, 74 bp, Homo sapiens
gcgggaggagcctgttcccctgagcgcaccatcctgggaagtgcatgtctcagaccaactccaccttcaccttc

SEQ ID NO: 57149 - DNA, 95 bp, Homo sapiens
gaaagtgaagcattatctcatcctgccgcttagcaaatggagtacctttgggactctggaagttatgcctcagaatgaatcggaaacacagatgt

SEQ ID NO: 57150 - DNA, 50 bp, Homo sapiens
gttaaggattccaagtaactcttatttgattggctcgacatcgaaaaata

SEQ ID NO: 57151 - DNA, 75 bp, Homo sapiens
cgaggggctccgggtcttccagagcgtgaagatcaagatcgacatgcaagaaagcacttcagccaagcagaaggg

SEQ ID NO: 57152 - DNA, 100 bp, Homo sapiens
ctcgcatctcagtcttggtcttctagtgctgtggagcatccgagtgtgccagagtctccagaattcgtcagggtcagatcatatgaatcccaaatggtta

SEQ ID NO: 57153 - DNA, 83 bp, Homo sapiens
gaagaggggaaagcccaggggtacaggaggcctctgggtgaaggcagaggctaacatgggctttcggcagctggggtacccca

SEQ ID NO: 57154 - DNA, 100 bp, Homo sapiens
cggccagcccgagtgactcactcggccaaggaaactcccagggcccgcccaggacccccaagccgccgcggacgcaggagttgtaagacgttcatcgccg

SEQ ID NO: 57155 - DNA, 87 bp, Homo sapiens
attccgctctgcggcgggtgtccctaaactagcagtttagggtgtcaggagtgtttctcaggagctatcagaaactatcctcaccat

SEQ ID NO: 57156 - DNA, 100 bp, Homo sapiens
tagtttccagatggctctaacctcagtgaggctaagaatattgtacacaaagattcttgatgttcttgaggaaatccctaaaaatgcagcatatagaaag

SEQ ID NO: 57157 - DNA, 100 bp, Homo sapiens
gagttttctctgccatgttgctattgcaggacggattgttgactgtggccctcctgatgatctacccagtggccgagtggagtacatcacaggtcctgga

SEQ ID NO: 57158 - DNA, 82 bp, Homo sapiens
gatagtcttccggagacccgtccccatctcttaccatcagtctttgagagttcaggccctggtccgagaggattcaatcctg

SEQ ID NO: 57159 - DNA, 100 bp, Homo sapiens
cagtaatgcctggaatgatgatgtctcatatgtctcaggcttccatgcagcctgccttaccggtacatcaggaacgtctctatcaagaatacaatttcag

SEQ ID NO: 57160 - DNA, 100 bp, Homo sapiens
tcccatgctatctgttgacatggaaaacaaggaaaatggctctgtcggtgtaaaaaagttcaaaccttgtactactcagctgatcacaagctgcttgatg

SEQ ID NO: 57161 - DNA, 100 bp, Homo sapiens
gtcgagatcgccatgcctaccccctttccgctgtgcccattgccattactcctgcaacatatctggctctctgaagcggcactacaacaggaagcaccct

SEQ ID NO: 57162 - DNA, 100 bp, Homo sapiens
ggcctccgtgggacatggagtgttccttccgctagtgatcctttgcaccctgcttggagacggacttgcttccgggaacagaaagaacagcttcaaaaga

SEQ ID NO: 57163 - DNA, 90 bp, Homo sapiens
gggatcatggtgttctacttcaccagcagcagcgcatcaacaacagcaacttgtgattggcggtgaccggatattcagttgcacatcccc

SEQ ID NO: 57164 - DNA, 51 bp, Homo sapiens
cccgatcaagcctgacttctagccaagattggtccagaaaagggcgtggtg

SEQ ID NO: 57165 - DNA, 75 bp, Homo sapiens
tgtcccagctggattcggtgcgggtctggctgggcaagcactacaagaagggtcccgacggcctacacatggggc

SEQ ID NO: 57166 - DNA, 100 bp, Homo sapiens
gggatcccagcctcaggcgtgcgcggacggtgtgcggggagcctttcattttcccacggtgaacaaaggaaaggagttttcctgtggacgtttcctagcc

SEQ ID NO: 57167 - DNA, 88 bp, Homo sapiens
tcaagtcccttggagcaagtccaacagttgctggaatagtagatattgatgatgttaagaagttcaaaccgggttacctggaagctac

SEQ ID NO: 57168 - DNA, 100 bp, Homo sapiens
tccggggacccttccgtatctgcctaggcattttgctgtctcctcctaatacgcttcagaacttgatgatgatgttccaaaagcaaactgcctctccact

SEQ ID NO: 57169 - DNA, 100 bp, Homo sapiens
gctatggctggcagtcaggacatattcgatgccatcgtgatggcggatgagaggagcagtttttgcaagaaaggatcaaagtgaacggaaaagctgggaa

SEQ ID NO: 57170 - DNA, 100 bp, Homo sapiens
ggaaaggaagtaccaggacttgcacagacctagaggatcaagacataatgggagcatttttagacaagccaaagatggaaaagcataatgcccaggggca

SEQ ID NO: 57171 - DNA, 82 bp, Homo sapiens
tgggattcaaatgaaagtgaaaatgttagaagaactcgtgagccggattgatggttttataggatcacattgacaaaagtac

SEQ ID NO: 57172 - DNA, 83 bp, Homo sapiens
ccgaacgcggactcgccacccgggtgtaccaacattcgaccaggagagactggaatggatgtaacaagccgctgcacccttgg

SEQ ID NO: 57173 - DNA, 96 bp, Homo sapiens
cagaaagagaatcgtgttttcttgcagaggcattgagcccatgaaacccctgaaggccaccgccaccacctcccagcccgtgctcaccatccagca

SEQ ID NO: 57174 - DNA, 101 bp, Homo sapiens
tggagataaagttgctttttactggtcctatggcagcgtatacaaagctattcataaagagaccggccagattgttgctattaagcaagttcctgtggaat

SEQ ID NO: 57175 - DNA, 75 bp, Homo sapiens
aggatttctccgcctcagcccaacggggaggtaaacgatcgacgcattctagatgggatgtttgctatctgtggt

SEQ ID NO: 57176 - DNA, 90 bp, Homo sapiens
ctcgggcgccgacgagatcggaacccttaggagaaatcttgagagtggacagcaattgtgaagatcgccagagagttctgtgtttcatca

SEQ ID NO: 57177 - DNA, 100 bp, Homo sapiens
ccagaagtcattccggagaatactgacctggtgactttggggatgaatttcacccattcatcgaggcacttcttccacatgtccgtgcaattgcctatac

SEQ ID NO: 57178 - DNA, 50 bp, Homo sapiens
acctggtacatcgccgagttctaacagtgctcggcatggcagggattcca

SEQ ID NO: 57179 - DNA, 100 bp, Homo sapiens
gcgtctgcaccttcagaaacagtgctgaagcctttaaatgcagcatctgcgatgtgaggaaaggcacctccaccagagctgtaggtaaaacttgcctact

SEQ ID NO: 57180 - DNA, 83 bp, Homo sapiens
ctgggaaggggcgaaattacagtctgggacagcatacctcctagtgttctgccagttctggataatccactgtccaagaaggt

SEQ ID NO: 57181 - DNA, 100 bp, Homo sapiens
gctggaaaaggggtgattgttgcaaagagcaaagaagaggcctgcaaagctgtacaagagatcatgcagcatatgcagaatcagagtgactcaggcccta

SEQ ID NO: 57182 - DNA, 100 bp, Homo sapiens
tggtttagtatcttcttcagcaactcagtacggggctcatgagcagacgcatgcgatgtatggtcagaagaggccaagtgatggaaatagtggattaatg

SEQ ID NO: 57183 - DNA, 100 bp, Homo sapiens
gaacagagccatcattcaagaagtttgcttcatgcacatttgaggatgttcgtgatgctgaagacgctttacataatttggacagaaagtggatttgtgg

SEQ ID NO: 57184 - DNA, 96 bp, Homo sapiens
gcaagttcggttcccactgatggctcaggagcagttggacatcatggagacaacttagtagagaagatcatttcagcacttccccagctcccaggc

SEQ ID NO: 57185 - DNA, 83 bp, Homo sapiens
gaaggagctggcggacatcactttagaccctccacctaattgcagctcatttgatatagtcatcgttggtggcggaattgtgg

SEQ ID NO: 57186 - DNA, 80 bp, Homo sapiens
cccacagaaatgaagcagagtggcctaggtgagaattatgaagatgatgacctagtaaattctgatgaggttatgaagaa

SEQ ID NO: 57187 - DNA, 98 bp, Homo sapiens
ccttatggtaatgtcggccattgagaaattgttgaggcaggtgattcacataacaggccggctacgcctgagagtgtcgctgtcccacgggaggaccg

SEQ ID NO: 57188 - DNA, 82 bp, Homo sapiens
aaagaatcttgtcactttagccactgctactacaggtttttcacgactgaaaacaacatagcaaaataagccaagatgtctg

SEQ ID NO: 57189 - DNA, 75 bp, Homo sapiens
gtggttgaagccccagcaaaggataacaatgaagatggtgccaaaactgctttctcctttggttaaagattgggc

SEQ ID NO: 57190 - DNA, 100 bp, Homo sapiens
aaatccaaaccagtcacctccccacccccaccgccaagcagccacgagaaagatcgggtgctaccaaggttttgcttttgcatggaaatgtctactgcac

SEQ ID NO: 57191 - DNA, 75 bp, Homo sapiens
gatgcaatcttcaggaaagtaagaggtccaaaagaaactcttccttcaaaacctgtgaagaaagagaaggaacag

SEQ ID NO: 57192 - DNA, 75 bp, Homo sapiens
tggaggaggcgttgccgtgaggcacgaggtagaactaacattgaacttagagagaaattcatcctaccagaggga

SEQ ID NO: 57193 - DNA, 100 bp, Homo sapiens
tacccatggacagacatgtcttcccatggaggcagggcaagaatcctttcgttccatcacaaggtcgtattacagaggtgcagcaggagctttactagtt

SEQ ID NO: 57194 - DNA, 100 bp, Homo sapiens
tcctggctgtgctggccttagtgccccaggatcagggaggactgatgtggacgagtgctcactagcagaaaaaacctgtgtgaggaaaaacgaaaactgc

SEQ ID NO: 57195 - DNA, 89 bp, Homo sapiens
caccatcctccaaacaagtgaagctctccgtgtgaaatggtcccatctcagactgccctgggtagacctagactggctcatagacatct

SEQ ID NO: 57196 - DNA, 100 bp, Homo sapiens
agtgctgctgctagacctggcctgggccaatacctttgtaatcaggttttccctgatgaatttcacctccagactttgaatccttttcttcgggcctgtg

SEQ ID NO: 57197 - DNA, 86 bp, Homo sapiens
atgggaaagatctaccttctggaagctactactacgtggtgcttggaaaggtgcagaccatgaattacgtggggcagttagccggc

SEQ ID NO: 57198 - DNA, 100 bp, Homo sapiens
ccgcagccgcctccgaagatgggggatttctacgacccggagcacccgacccctgaccaaatttgtatcctactgtggggcttcaaacaccaggagaagt

SEQ ID NO: 57199 - DNA, 82 bp, Homo sapiens
tcagaaggatatcgacgtcgtgatccagaagtccagagctgaggactgcctgtttgcaggatgatcggctgaatgtaacaga

SEQ ID NO: 57200 - DNA, 90 bp, Homo sapiens
gcagcagccgagtctgacggcgccggttcgctgcccggtccgcccgcggtgagagacaatgcagatcttcgtgaagactctgactggtaa

SEQ ID NO: 57201 - DNA, 111 bp, Homo sapiens
ccggcctcaccatgttggtgctgtttgaaacgtctgtgggttacgccatctttaaggacatttttattccttccccaagtctggaagaacaatcaaatgatgggaagaaag

SEQ ID NO: 57202 - DNA, 100 bp, Homo sapiens
agagcttcaggggaaatggcttcagcgcagtatattactgcaggtcgttccaggggtagaggaggcatgaaggatgaccgtcgggacagatactctgcgg

SEQ ID NO: 57203 - DNA, 82 bp, Homo sapiens
aagaattattttgaaaataccgatattcttataaaccctcgtctggatggctgcatgaggagctggaactggctgaacggag

SEQ ID NO: 57204 - DNA, 100 bp, Homo sapiens
gatgaacacccagcccatggaggagatcggcctcagcccccgcaaggatggcctttcctaccaggtttggtgcacctcgatttggaggaagtagggcagg

SEQ ID NO: 57205 - DNA, 50 bp, Homo sapiens
ggacgcacctctgtttgggggtcctcaggcatgaatgctttacagttgca

SEQ ID NO: 57206 - DNA, 80 bp, Homo sapiens
ctggcgctgagcctgcagccggccctgccgctccacccacattggcctagacccagtctctaagggctgaaaatattgcc

SEQ ID NO: 57207 - DNA, 51 bp, Homo sapiens
taaggattgtctttgtacataacaagtttcttggcagtacagaagtggaac

SEQ ID NO: 57208 - DNA, 75 bp, Homo sapiens
gtgaccttaaacctgaaagtggtagcaaggaaatgactgttgaaaacagaattgctgaaactcacagcaagagct

SEQ ID NO: 57209 - DNA, 100 bp, Homo sapiens
gccacctttataacaaccgctatgctggtgtgttttatggaccatgtgctgctatgtatgcctgaagaagtacttgaaatgcaaatttggggagactttg

SEQ ID NO: 57210 - DNA, 98 bp, Homo sapiens
gccgctgctgctgggagcccagggagcgccgcgcgaccaggaggcggcggcgccgccggctttgaatgacatcttcgagtggtccagggaccaccgag

SEQ ID NO: 57211 - DNA, 96 bp, Homo sapiens
attgaccaaggggtgagcagtaacagcagctacttgaagtggaacaagcctgtcccctggctctcagaggatttgttaaggattccaagtaactct

SEQ ID NO: 57212 - DNA, 100 bp, Homo sapiens
tgaatatctgctccatgtaggagctcagaaatcagctcaaacatttttatcagaggttcgtgagccacacatctccccacaccaagctcctccatacaag

SEQ ID NO: 57213 - DNA, 87 bp, Homo sapiens
aagcgatggcttcagacagcatatttgagtcatttccttcgtacccacagtgcttcatgagaggtccttatgtcgtcagaagatcga

SEQ ID NO: 57214 - DNA, 75 bp, Homo sapiens
ctatgtacgccctcttcctcctggccagcctcctgggcgcggataccaatggggaaaacattgcagaatcactgg

SEQ ID NO: 57215 - DNA, 74 bp, Homo sapiens
ctgcttctacagcaacatcttccgctgggaaactctgttgcttttggaggaagtcatgaattcaagcactctga

SEQ ID NO: 57216 - DNA, 100 bp, Homo sapiens
cccagactccactccccagctgtgaaagggatccacctctgatgttcagtgaagactaccagaaaagtctgctagagcagtaccatctgggtctggatca

SEQ ID NO: 57217 - DNA, 148 bp, Homo sapiens
gagcctggagtctgcgaaggccgggacccggttccccggcccacagtgggggtgtgcaaacccgagagaactgggtgtcatggagaaactccagctgggcccagagattctgcagcgggaaaatccaaggcttatttatgccaggctg

SEQ ID NO: 57218 - DNA, 82 bp, Homo sapiens
cgcaaccattgacgccatgtcgggttattcgagtgaccgagaccgcggccgggaccgaggatcgaaaagtatcctccttgca

SEQ ID NO: 57219 - DNA, 80 bp, Homo sapiens
tgatcagctgaggcctgagacacaggaccagcagccagacccggtccgtttggaatgcctgggatggtgccgccgcatgt

SEQ ID NO: 57220 - DNA, 82 bp, Homo sapiens
ctggggctgcctgccgggcggccgggcgcggcgagcccaggtgtttcccattaaacactaccaggacaaaatcaggccttac

SEQ ID NO: 57221 - DNA, 100 bp, Homo sapiens
ctgcttaactggtgtgtccagatagctaagttggatcacaaggacgagtcataagttttgaggtacgaaaagaccaccatgatctggctaagaagaatta

SEQ ID NO: 57222 - DNA, 83 bp, Homo sapiens
gctgctcatccacatgcgagtgcactcgggcgagaagcccaacaagtgcatggtggtcctgccatcatggctgtcctctgcaa

SEQ ID NO: 57223 - DNA, 87 bp, Homo sapiens
tggaagtccaagtcaaacgcagaaggactgcctcactgagcaaccaagagagcatctttccttgaagaagtacattattgacattgt

SEQ ID NO: 57224 - DNA, 100 bp, Homo sapiens
agaaaagtgctcttctcaacagccaccaggcagcaaaaccatcttctctaaggctcatgcacaattagttcgagaagttgatgtggagaaggtgtctgct

SEQ ID NO: 57225 - DNA, 83 bp, Homo sapiens
caagcctcctctgcctggcattcgggtggttgataataggagtcagtggatcggtggggaaaatgctgcttaccctgggccct

SEQ ID NO: 57226 - DNA, 100 bp, Homo sapiens
tgggatcggtgacttttggctacttttctgacaggacccctcacgcccacttccagggtcccagctcagcctgtcctctccaggcagtacagaagatgaa

SEQ ID NO: 57227 - DNA, 100 bp, Homo sapiens
agtggcttcataaactgtaccaggagaagcaggttcaggagaagtggcacctggtggaggacctgtcgcgactgctgccggagccaggcccgagcgactc

SEQ ID NO: 57228 - DNA, 88 bp, Homo sapiens
cgagacttttctcagatgttggatatttgcttggaaaaacgtgtgggtacgaccttggtcaaaatgcagatcttcgtgaaaaccctta

SEQ ID NO: 57229 - DNA, 75 bp, Homo sapiens
gcagccattcagacctcaggagctgggggaaaaaaatagtggctttgatgtcctctaccataatatgaaacatgg

SEQ ID NO: 57230 - DNA, 75 bp, Homo sapiens
acagcctcccgcgcctcgctcagctccaacatgggttccgagtctgaggaagacataaccttgtgcctgcctgcc

SEQ ID NO: 57231 - DNA, 87 bp, Homo sapiens
acaataaaagagtttctgcagcatctgtagctttattgaacaccagcaagaatggcatatcaggtacgagtgcttccatatccattt

SEQ ID NO: 57232 - DNA, 75 bp, Homo sapiens
cttcgccttcggagagcagagtcaacacggagtgtgaagcctcagtttaggtcatctggtggttcagaacactca

SEQ ID NO: 57233 - DNA, 100 bp, Homo sapiens
ctgccgcgtgttcctgcaagcagaaaaggagttaactaggtttttcgttggaatatacgttgcacatttatggcgattctgagtgtgagggcagacttct

SEQ ID NO: 57234 - DNA, 90 bp, Homo sapiens
ctgagaagccaagccggagatggtgaagcaatcctggactcagcaacatcaggaaactactctcacagtagagacgggggttcaccatgt

SEQ ID NO: 57235 - DNA, 82 bp, Homo sapiens
agaagcggcagcgtctaccctgaggtcaaaggccctttcagaagcaactccatttcattggataacttaaaaccctccagag

SEQ ID NO: 57236 - DNA, 83 bp, Homo sapiens
caatctcaacgacagctctcagcagctacaggcttgcattgatgacaatgttgatatggtgaagtttctggtagaaaatggag

SEQ ID NO: 57237 - DNA, 100 bp, Homo sapiens
aacctaaccatgaagacttgaacttaatacagcaagaaagaccatcaagtttaccacatggacaaggacagcccggaggtccaccaggacctgaacgccc

SEQ ID NO: 57238 - DNA, 78 bp, Homo sapiens
tgtcctgctgctgctgctgctactacttacaatttggtgccctggttgtcagatgttggaaagcagtaggacggaaca

SEQ ID NO: 57239 - DNA, 83 bp, Homo sapiens
cccagacctggacctgcatcagggtcctgacttccagggagcccgcttccccgggcgctgcctggacaggcctgcctgcgtgc

SEQ ID NO: 57240 - DNA, 100 bp, Homo sapiens
gccccaggtgtaagcgcagaaagcaggcgaacccgcggcgcaataacgtcacccacaaaagctgtatataatgccagacattggaatcatccagattcag

SEQ ID NO: 57241 - DNA, 100 bp, Homo sapiens
gtctgctggtcatcgtggggcttctcatgtttaggtttggaaagcagagtggagaacaaagagttgattccaatgcaacaaattttagaagaagcggagc

SEQ ID NO: 57242 - DNA, 107 bp, Homo sapiens
cagcctttcagccttaccaagcaacaagtgaaattgaggtcacaccttcagtccttcgagcaaatttgaacatggaattcaatccttcagatcatcctcgggccagc

SEQ ID NO: 57243 - DNA, 75 bp, Homo sapiens
aaacctgggtgaactttcacggacaacctcagaggacaacgaagtgttcgaaacctctgcgccatgagagccaag

SEQ ID NO: 57244 - DNA, 98 bp, Homo sapiens
gggagtgccgtgcgccgcagcccgggcccaggccccggcagcgcctgggacaagagatccgcacgcagctggtggagcagttcaaatgtctggagcag

SEQ ID NO: 57245 - DNA, 98 bp, Homo sapiens
gttccagacctttgtggccacacaggagcagaggggtggtgatcatgaactcgatcctggagcgcatgtgtgccgacgtgctgcagcagacagccacg

SEQ ID NO: 57246 - DNA, 119 bp, Homo sapiens
ctgggtctggagacgccgtggcagcctgaacggagtgtgcgacggattgggagggccgttgctccagggagaactgcaaatatcttcatccacccccacatttaaaaacgcagttggag

SEQ ID NO: 57247 - DNA, 51 bp, Homo sapiens
gccccctatcctatccgcaaacacattgtcgtggaagttctccgaatcctg

SEQ ID NO: 57248 - DNA, 100 bp, Homo sapiens
aagaaaacttcgaaggcttaagaatgatcaccttctctcaggattatgtcgcaaatgagctcactcagagcttcttcaccatcactcagaagattcagaa

SEQ ID NO: 57249 - DNA, 80 bp, Homo sapiens
ggacgtgcacgcagcccggcgggaggataaagaccaccacggtgacttaagagattaaaattaatttggttgctgttggt

SEQ ID NO: 57250 - DNA, 74 bp, Homo sapiens
ggtatggcgtgtgctatcagcattctgggaaagggagttcccattagacttgaagttgggccacgtgatatgaa

SEQ ID NO: 57251 - DNA, 50 bp, Homo sapiens
agcatcttggaccgtgatgatatcttcgttctctggcatctctatcccct

SEQ ID NO: 57252 - DNA, 147 bp, Homo sapiens
gcggcggcggagcgcaggcctcgtgccgttacggccatcacggcggccgcagtggcgtcctggagccctcctcaggtactccaaagattcaggtttactcacgtcatccagcagagaatggaaagtcaaatttcctgaattgctatg

SEQ ID NO: 57253 - DNA, 100 bp, Homo sapiens
attcacagggaaagctgtgaggctccagggttccttgaaaagaaaacaggtagttaacctatctcctgccaacagcaagcgacccaatggctttgtggac

SEQ ID NO: 57254 - DNA, 83 bp, Homo sapiens
gttgccgtgtgtgctggaaacaaaatattcatgctggatattgagtcacgtgaactggaaatttcagtttattggcgtgattg

SEQ ID NO: 57255 - DNA, 98 bp, Homo sapiens
catgggaagagcatgcattgtgggttactggaggaacccgacatggattccacaggtgcccggcggcggcggcgagtggagcaccacgctgctgtccc

SEQ ID NO: 57256 - DNA, 75 bp, Homo sapiens
actgtggacagtgaagagaggcctctcccaaagcacctgcgcagaaacctctgtagaggagcaggatgcaaccga

SEQ ID NO: 57257 - DNA, 51 bp, Homo sapiens
caggaattcagcaacctggaagaggaaaagggtggaaagcaagtcctggaa

SEQ ID NO: 57258 - DNA, 97 bp, Homo sapiens
agagcagaagaaacagttagcgcaagacacaggacttacaattctccaagtaaacaactggttccctctcccagcctgtgctgactcagccatcttc

SEQ ID NO: 57259 - DNA, 100 bp, Homo sapiens
agctacatggaggagaagcacatgccacccccaaacatgaccacgaacgagcgcagagttatcgtgccagcaggtgtcatggagaaactccagctgggcc

SEQ ID NO: 57260 - DNA, 75 bp, Homo sapiens
gatgacaaaccctttctatgtactgcgcctggatgtggccaggtatgggctacgtgagttcgtggtgattgcccc

SEQ ID NO: 57261 - DNA, 100 bp, Homo sapiens
ttggcactggcaggatcaagtgatgctttttctggaagtgaggattgttgtaggagataaagttgttttgatgcctgtgaatgcagggcagccactacat

SEQ ID NO: 57262 - DNA, 75 bp, Homo sapiens
gatcctttcctgcttttggtttccctggcaggggttgaactgtggagtgtgtggaataatcatgggccagactgg

SEQ ID NO: 57263 - DNA, 48 bp, Homo sapiens
ggcaccttcggcaaagtgaaggttcttcgtgccatgaaggaggacagt

SEQ ID NO: 57264 - DNA, 83 bp, Homo sapiens
ctggagagcagaagaccgaaagaccaagatcactccatggatgaaatgacagctgtggtgaaaattgaaaaaggagttggtgg

SEQ ID NO: 57265 - DNA, 97 bp, Homo sapiens
ctgaaaaaccccttggaaatagtcagcatacctgtcaccaggagactaaagtccatcaaaaacatccagaaaattaccaagtctatgaaaatggtag

SEQ ID NO: 57266 - DNA, 90 bp, Homo sapiens
catctagtctttccgcttcttgaatttctctctgtaaaggagcgctcctggttgcagccagaatgcatgacttcaggaggactgtgaagg

SEQ ID NO: 57267 - DNA, 100 bp, Homo sapiens
aaaagtggcactgaggctctggaacttctgcccagctctccttgatctcccttgagtttagaaatctggctgagaaataccaaacagtgattgccgacat

SEQ ID NO: 57268 - DNA, 75 bp, Homo sapiens
ggaaaacaagctcagggctcccacggattctacattatgaatcctcactatggatgggctcattgaggacattaa

SEQ ID NO: 57269 - DNA, 97 bp, Homo sapiens
ttgtaacaatggaattttatggaaagaatgatcttacattaggaatatttttagagagatactgtttcagatgaccttcctgaacttcaggcagttc

SEQ ID NO: 57270 - DNA, 82 bp, Homo sapiens
ctggggactgcgggcggcgctgtgtccgtcgccatgacaggtgagaagccctaccactgcaactgggacggctgcggctgga

SEQ ID NO: 57271 - DNA, 75 bp, Homo sapiens
atccatctgtcttagcaaggctgtcatcacagttccaatcgttgcacttactgctactgcaagttcttcaatccg

SEQ ID NO: 57272 - DNA, 90 bp, Homo sapiens
gtcttccccaggcctgcgtccgagtctccgccgctgcgggcccgctccgacgcggaagctgcaagctttcttcctggtggcagatgacat

SEQ ID NO: 57273 - DNA, 74 bp, Homo sapiens
tggcacttcattggccacctacagaaacaaaatgtcaacaaattgatgggtatatatgagagatcgagaaattg

SEQ ID NO: 57274 - DNA, 98 bp, Homo sapiens
tctgcgttttgccagtcacctctcaactgtgtgccaaaggtgacaaacagcatgtttggtgcttcaagaaagaagtttgtagagggggtcgacagtga

SEQ ID NO: 57275 - DNA, 75 bp, Homo sapiens
ccaattttgttacttttatggaaggaaaagtgtgcaacttgctttggtgtttgctgttttattgccacagatgac

SEQ ID NO: 57276 - DNA, 80 bp, Homo sapiens
aaaaggcagactttttgatattcagagccttggaagtcaacactgtcagcattgcactgatgatgtggaatacgttctta

SEQ ID NO: 57277 - DNA, 98 bp, Homo sapiens
gagatgatgccagccttgagcatgaagctgagatggacctgggaactccaacatatgatgaaaaccccatgaaggcgacgttgtggacgtttaccagc

SEQ ID NO: 57278 - DNA, 87 bp, Homo sapiens
cgattgttgcgcgctcatcttcctctcggtctacttccacatttgaggatgttcgtgatgctgaagacgctttacataatttggaca

SEQ ID NO: 57279 - DNA, 75 bp, Homo sapiens
ttttgctccagatgtctttaactgccaagcaccaggccttcctgggctatgtgctgtatggagagtgccaggagg

SEQ ID NO: 57280 - DNA, 100 bp, Homo sapiens
cccctcgttgaggacttccttagtggtttccaggaccacatggtgacaatgcatgatgtgcttgatgctcagtggctgtatgataaccacaaggatgaga

SEQ ID NO: 57281 - DNA, 75 bp, Homo sapiens
cggatgagtacgataccgaagcgggctgtgtgccccttctccacccagagcgatatgccaatttcaaggacgaac

SEQ ID NO: 57282 - DNA, 142 bp, Homo sapiens
gtttctgcctccaggtctgggtggtcagaatggatccacgcctgatggctccacgcatttcccttcgtggtgtgaaggctggagccaggcctggaggaaccccaggggctcccgccggccagccaggtgccgatggggagag

SEQ ID NO: 57283 - DNA, 50 bp, Homo sapiens
catgaagggattgctcactaagaaaggaggtgtggcatcaggattcaagc

SEQ ID NO: 57284 - DNA, 100 bp, Homo sapiens
gacaactgttcaggatgaccctgagcaatttgaggtcatcaagcaacaaaaagaaatcattgaacacggcatcgagctatgtggaattagaagaagctat

SEQ ID NO: 57285 - DNA, 82 bp, Homo sapiens
ctcgagaatgggagccgttacatttttgcactgcctggtaacaagctggaaggatggtcttgccttcaatgccctgatccac

SEQ ID NO: 57286 - DNA, 83 bp, Homo sapiens
ctcgagcgctcaggatggaggaagactcgatccgcctgcctgcgcacctgcgaattgaagagaatcctgacaagtggcatgtt

SEQ ID NO: 57287 - DNA, 100 bp, Homo sapiens
gttaaaagttacctgtttcggaatgcttttgtgctgctcacagtcaccgctgtcattgtggggttacacatcattttggaatgactgtatatcatctgga

SEQ ID NO: 57288 - DNA, 89 bp, Homo sapiens
cgcgcagcgccccgcagggcgatggacggccgaaccccgcgcccgcaggacgccccagccaggcctgttacatgaacagaatatggcaa

SEQ ID NO: 57289 - DNA, 75 bp, Homo sapiens
tgggctcattcagcaggaaataatggaaaaagctgcaatatccagtgtccagagcaggtggtcggtggcatctac

SEQ ID NO: 57290 - DNA, 123 bp, Homo sapiens
catcttcatcctgaacaaccgctgggatgcatctgcctcagagcccgagtacatggaggagacaaccttttagtcctcacggtggccactaaggagaccgagggattccgtcgcttcaagcgc

SEQ ID NO: 57291 - DNA, 127 bp, Homo sapiens
cggcactgcctggctgcgagcacatgatggcgatacgggagctcaaagtgtgccttctcggggaaaaattccggaactgttggcttcgggcatggttgataacatgaccaaacttgtgctagtaaat

SEQ ID NO: 57292 - DNA, 73 bp, Homo sapiens
tgcttgccagacttccacccacactgtgtacttggctgaaagcaatggagccatgtgtgagatacctgcccag

SEQ ID NO: 57293 - DNA, 50 bp, Homo sapiens
cagaaagagactgcccggttgcaggatttggatcatacagcagatgtcca

SEQ ID NO: 57294 - DNA, 83 bp, Homo sapiens
ctgaggttggacgtggggaatttctcctggggctcagagtgtgcaggtgatggtcctaccagtgtgtctgttgaggtcacccg

SEQ ID NO: 57295 - DNA, 75 bp, Homo sapiens
tgggtcagtccgccgctcaccccgcggccgcaccttcccgccttctcagggcaagtgtccagagaatggctggga

SEQ ID NO: 57296 - DNA, 100 bp, Homo sapiens
gtcattcctgaggccatcgttaatctgcagatgctgacttacctgaacttgaggtgttctgggactcagtgttagaagctgtctgtctgtaagaatcttg

SEQ ID NO: 57297 - DNA, 99 bp, Homo sapiens
gctgcacatctgcatgtttgcactgggcaccaaatcagatgaaagccaaggaagggaggaatgtgtacagttcttcacgctatgatgattatgacagat

SEQ ID NO: 57298 - DNA, 100 bp, Homo sapiens
tatctgatgctcgatgtgtgtttgacatggctgtatggctatcctgatccttcttacctgaaacgtgtcaaagaggagctgaaagccaaaggaattgagt

SEQ ID NO: 57299 - DNA, 100 bp, Homo sapiens
ggggacgagggaggaacactctctgaggaagcccaactcctatgagctcctctctggcaggaatactcccccagttgcaagaggcgcaggaccgtggaag

SEQ ID NO: 57300 - DNA, 100 bp, Homo sapiens
gttcatccgggtctgggctgaatacgacccggctgcgtggacctgaaggagaagaaggagaaggtggaggagaaggcaagccggaaagagcgaaagaaag

SEQ ID NO: 57301 - DNA, 100 bp, Homo sapiens
tactgtctgcgacatgtggaaaatgacggttataagaccatttatttctttggagacaaaactatgccagcagaggtggaggagacactgaagcgactgc

SEQ ID NO: 57302 - DNA, 74 bp, Homo sapiens
ttctgtgctggagccatcgaccatatcaaaagtgccagcgatgccgcccctctgcagaggtcccagtctctccc

SEQ ID NO: 57303 - DNA, 100 bp, Homo sapiens
cgagccgattcaagaaggacaaagagatcatagccgagtatgaaagtcaagtcaaaggagaacgtatttaccgggcagtcaaagatctattcctacatga

SEQ ID NO: 57304 - DNA, 83 bp, Homo sapiens
gtccggagccagccaacgagcggatattagaaatggctactccccagtcaattttcatctttgcaatctgcattttaatgata

SEQ ID NO: 57305 - DNA, 100 bp, Homo sapiens
ttatggagcatatattatggaacacacattagtgccagcagtagttcccaagggctgtctcagccatccacccagacgactcagtatctgagagcagaca

SEQ ID NO: 57306 - DNA, 75 bp, Homo sapiens
agagaagatgaagaaacccagcttgatatgttgaaagaaaaggtgtatatcggaaaattaaatatgatccttgtt

SEQ ID NO: 57307 - DNA, 100 bp, Homo sapiens
gagaagacaggtatatgcgtttaaaggaggagctgcaactgtctgatgaacagctacagaagaggtcctttgtcatccagcaaatcccaagcagcaacct

SEQ ID NO: 57308 - DNA, 87 bp, Homo sapiens
ggccatcacgctggtgacacagtacgacatccacctggtgcacgccatcgaggagcagatcagctcggacatcatcatgcagctgga

SEQ ID NO: 57309 - DNA, 82 bp, Homo sapiens
ccccagaaaggattgtgacatatcgttggacccagaattgaggtccttttggaataaatcatgggattgagcttcattcaga

SEQ ID NO: 57310 - DNA, 100 bp, Homo sapiens
agcaggaagatatcaaactgtatgatatggcagatgtatgggtgaagatccaagatgttctacagaataatccagaatggctactctgatctatgttgat

SEQ ID NO: 57311 - DNA, 101 bp, Homo sapiens
cctctccagcggggacctgctccgggacaacatgctgcggggcacaggccatcgaagacggcaatttggaggaaatggaagaggaagtacggcttaagaag

SEQ ID NO: 57312 - DNA, 96 bp, Homo sapiens
ctactgttgattcacagaaagactgtagaaaatttccagttccacagaaggtagttcagctacaggaatggatgattaaaagcatcaataataata

SEQ ID NO: 57313 - DNA, 78 bp, Homo sapiens
agaaatggaagcagctaggcatgaacaccaattaatgctaatgaggcaaggaagagccaatgttttccacccataatc

SEQ ID NO: 57314 - DNA, 100 bp, Homo sapiens
gccaagaggcaaaggggaggttacgcagcaaaccatccagaaggttgaagaagcctcagcggaggcgatacggcctcctcgccaacactgaggaccccac

SEQ ID NO: 57315 - DNA, 100 bp, Homo sapiens
aaagagccggtgaaggggcagaacaggcagtgtatcacaatgtgaagccagcagctttgcagcagcaattagagaacattcatcttagacaagacaaagc

SEQ ID NO: 57316 - DNA, 98 bp, Homo sapiens
tttggaagaaaaccagcatgaaattacttgaccaagttgtccctccagctggtggcagagttgggcctaaatgagcaccatcaaaatgaagttattaa

SEQ ID NO: 57317 - DNA, 50 bp, Homo sapiens
cagggagccaagcgtcctgcccggccgaccaagaatcgccttcagccctg

SEQ ID NO: 57318 - DNA, 143 bp, Homo sapiens
ggcggcggcgctagcttcggagtctcccgcgcgcacctcagccgcctcctagcggcgcggcgctcgctcctacggaagatgagaatgtgcctactgctcctgatcctccaagtcaacatttacgtgggcatgggacaggcttt

SEQ ID NO: 57319 - DNA, 96 bp, Homo sapiens
gcggcgctgagccagccgggacggacatgcgcgggagggcgccgcggggcagccgccgctcctccgggttgtcgagatgtccacagaaggaggatt

SEQ ID NO: 57320 - DNA, 83 bp, Homo sapiens
aagcttgtggcgctgaaaacgaacgagtccctgtgaagcaggaagagtgagggcaggttcactgcagctcagcagcatgtctg

SEQ ID NO: 57321 - DNA, 99 bp, Homo sapiens
aaacgaattagtaaacagtgcaagttgatgcgtcttccatttgcaagacatgccttgaattggaacgctacctacagacggagccccggaggatctcag

SEQ ID NO: 57322 - DNA, 75 bp, Homo sapiens
atttggtgctgtttgtagagatgacaacactgataaaatccactcattgctggctgagtatgagtttatcagctc

SEQ ID NO: 57323 - DNA, 98 bp, Homo sapiens
ttcagccaatactgtggaagaaattattgaaaacttacagcaagatggttcatcttttgccctagagcaattgaagttgttgacctcctgtactggag

SEQ ID NO: 57324 - DNA, 83 bp, Homo sapiens
atcgctgtctgtggtcactactgtgtggggagttggcaacgcgacacagagccaggaaggaggctgcagtgtgccagtagccg

SEQ ID NO: 57325 - DNA, 100 bp, Homo sapiens
gttttcgggaggaggcggagggcgcaaagcgagccgagcaagatttgaacttctttgttctccactttttaataagtgtatagaagcaatcagaggactc

SEQ ID NO: 57326 - DNA, 99 bp, Homo sapiens
tacgaacccctggacgggagagtctgccggcggagaatataagactggaaagctacccttgaggagaataggttgaattctgaaaaagatcgagctagg

SEQ ID NO: 57327 - DNA, 100 bp, Homo sapiens
aaagatgttcctccttcagctgtcacaagaccaatatttggtatactgggcacaatccatctggtggcaggagaggctcgggctgtgctgaagtgggcag

SEQ ID NO: 57328 - DNA, 52 bp, Homo sapiens
ggtgaatttccatgtcaacatagtccagagtcttgctctgtcacccaggctg

SEQ ID NO: 57329 - DNA, 75 bp, Homo sapiens
ctaacatcgggggcctgaactgggagataaccctggacagtggcagcaggttcaggagaagtggcacctggtgga

SEQ ID NO: 57330 - DNA, 75 bp, Homo sapiens
gtttggttcttggcaggaatatggaagacagatggcccctgagttctgcagcctcgaggaaggcctgccctatct

SEQ ID NO: 57331 - DNA, 101 bp, Homo sapiens
tggacaaaggaacaggtatctcagattgaaaaggaagatcaggccaaccccaaagaagaagtgaccaaggaggagtttaaactgaatgaacaacctcggct

SEQ ID NO: 57332 - DNA, 82 bp, Homo sapiens
aacagttcagcaacacgggttttttttggccatgacagacgaccagcggatggtatgtctgattgacccgggctgcttccga

SEQ ID NO: 57333 - DNA, 99 bp, Homo sapiens
ccttatgctgaagaggacccaccgtgggctccacgttcttacttggaaaagggaaacaagattttggtgaagcagtcgcccatgcttgtagcgtacgac

SEQ ID NO: 57334 - DNA, 83 bp, Homo sapiens
ggctgctcttggctctcaacttattcccttcaattcaagtaacaggtaaaatgtcggttccaggaccttaccaggcggccact

SEQ ID NO: 57335 - DNA, 75 bp, Homo sapiens
gccttcacacaactctccaatctgcagatgcagatgttggacaaatttcccatggaaggaggacagaaggacccc

SEQ ID NO: 57336 - DNA, 101 bp, Homo sapiens
ggcggcgtggaagctgtgagcgcccccatcccggaggtctccgccggctcccgggttcgagaacttgtcttggacaattgcaaatcaaatgatggaaaaat

SEQ ID NO: 57337 - DNA, 100 bp, Homo sapiens
ggattgggccgagcctatgccctggcttttgcagaaagaggagcgttagttgttgagatcctgaactttcaactgtttgccggaagtctggtacattaat

SEQ ID NO: 57338 - DNA, 101 bp, Homo sapiens
gttgaggaattcagcgatttatacaacgaggactttgccaataccattcctggccatggaggcatcatggatcgctttgactgccagtatctgatggccac

SEQ ID NO: 57339 - DNA, 96 bp, Homo sapiens
ccaacacagtgtttggtttggggttttcctctgagcagcagctgacaaagggccagatgcagatggctggagatgggtgcagatcccagggatctc

SEQ ID NO: 57340 - DNA, 100 bp, Homo sapiens
cggacactccccgctgagagtccgcctgccatggactcggaatattacagcggcgaccagtcagggagatatacttcccaattcatcagattataagtcc

SEQ ID NO: 57341 - DNA, 100 bp, Homo sapiens
acaggttatggagccagctgtgtcagtagtggacggccagacagagtccccggagggccgttaattaaggaaaagttgagccagggcgtgaccctcgtcg

SEQ ID NO: 57342 - DNA, 83 bp, Homo sapiens
gttcagccgcgctgccgagaagctttacctcgctgaccctatgaagttggttagtctgctgctaattggaattgctgcgtggg

SEQ ID NO: 57343 - DNA, 85 bp, Homo sapiens
aaccagcggaaccgggagtggaacattgtagagtctgagaaggcccttgtggtcctgtactcacatctctgcagatgaaaaagca

SEQ ID NO: 57344 - DNA, 100 bp, Homo sapiens
gcctggatgatcctgaggtggagcagcatggccgaaacagaagccctgtcgaagcttcgggaagacttcaggatgcagaataaatccgtctttattttgg

SEQ ID NO: 57345 - DNA, 87 bp, Homo sapiens
ggagaaggttcgaggcctacagaacctagcctatcagctggggctggatgagtcaacaattgagtcacttcaaaaggagttcattga

SEQ ID NO: 57346 - DNA, 90 bp, Homo sapiens
ggctgctcatctctgtgatcaggtgaaaatgaaatccttgcaactctgcatgccatttcaagcaaaaaccagatctggagatcgtatatt

SEQ ID NO: 57347 - DNA, 74 bp, Homo sapiens
gaccatcaaatccgtgtcggagtccttacaggagagcacagaatggggattcaacacctcggcaatgccctttt

SEQ ID NO: 57348 - DNA, 98 bp, Homo sapiens
gccgagtccaggtgtcccgcgggcctcgatttggggagcaggaattgaatgatctggcacgggaccctccagcacagtgttcagcaggtcctgttgga

SEQ ID NO: 57349 - DNA, 82 bp, Homo sapiens
ccgcgggccaggagagcgctcggcggctcggcaagatgtcggtgaaggagggcgcacagcgcaagtgggcagcgctgaagga

SEQ ID NO: 57350 - DNA, 93 bp, Homo sapiens
ccactgctgggccctgaggctgcaccaagtggcgaaggagccggctccaagttggaatcgaagcctcttaaaatggcagatgacttggacttc

SEQ ID NO: 57351 - DNA, 50 bp, Homo sapiens
aaaataacaagaatgggaggagaagggtatgacgctgggcgggatggctt

SEQ ID NO: 57352 - DNA, 74 bp, Homo sapiens
ctgagctgccacggatactgagggaactactggagaccacgtgccgcctggccaacacgctgaagaggcatgga

SEQ ID NO: 57353 - DNA, 100 bp, Homo sapiens
ctactacgcacagtgctaccgccacatgctggacttgcagaagcagctgggcagatggcccactgcgtgaccttggttcagctgtccatttcctgtgacc

SEQ ID NO: 57354 - DNA, 128 bp, Homo sapiens
tagaaaatgaagattttgacagtcgtagatacaaatttttggatgatgatggatccatttctcctattgaggagtcaacacactggaagaattgtcttaccaagctcttgccctgttttctggagcac

SEQ ID NO: 57355 - DNA, 75 bp, Homo sapiens
tgaactcaagtcaccgtggagctccgccgccccgaaactttcaccgcgagcggtcaccttcaggccattcagagg

SEQ ID NO: 57356 - DNA, 75 bp, Homo sapiens
caagcctgtctccggcacgttcgacttggaggctggctcacagttggaccaacgcttacaaatagcaactacaat

SEQ ID NO: 57357 - DNA, 100 bp, Homo sapiens
gcccccgccggttcgcgtctctctgctgcggcgcggggaccgctgtgctctcgagcaagctataccagagaatcagatagcaagccctccctcagaggcc

SEQ ID NO: 57358 - DNA, 98 bp, Homo sapiens
tgaaatacttcagaaagacagagattttactgctgaagattatgaaaagacctgatggccaaaagaaaggaagaaaatttttcctctcctaaaaatgc

SEQ ID NO: 57359 - DNA, 100 bp, Homo sapiens
atcagcgaccgggagaacatagacggttggtcaaagaaaaagtgatgtatgaaaaagaggcaaaacaacaagaagaaaagattgaaaaaatgagagctga

SEQ ID NO: 57360 - DNA, 82 bp, Homo sapiens
gaaaatttcgccaaattggcagaagccctctacattgctgatcggaaggggatatttttggtctatgacattagcagcgagc

SEQ ID NO: 57361 - DNA, 87 bp, Homo sapiens
aagaagaagatgaagatgagaacattgaggtggtggaattgggcatcctggaccagctctccactgaggagcggaaaaggcaggagg

SEQ ID NO: 57362 - DNA, 83 bp, Homo sapiens
ttatccttgaattcaaagaaaaatgtaaagacaagaagaatcctttagatcagtgctaacatcttccgtacacttcctccaag

SEQ ID NO: 57363 - DNA, 96 bp, Homo sapiens
ctatgtcatggcagaggcacgggagaagaggaggatgcggctcgtggtggatggcatggggcgctttggcaggatgctttcattggatttggagga

SEQ ID NO: 57364 - DNA, 111 bp, Homo sapiens
ggacatctgctttatatttctctcagaccattcccatcagtgagcattacagtgtggcaaaggagcagagaactttgacaagttcttcacacgaggacagcccgtcttaac

SEQ ID NO: 57365 - DNA, 75 bp, Homo sapiens
gagctcgctgcgtataaggaggaagcaaacaccattgctaaggctcctgagtcctataagaatgtgacagatgtg

SEQ ID NO: 57366 - DNA, 98 bp, Homo sapiens
gaacttcgtgagtttcgctctaaactgcccttgaaatgaagctggacttggaggtacagcccacgcttgatggaaaaaattctccaaatggctgaagg

SEQ ID NO: 57367 - DNA, 51 bp, Homo sapiens
tttcaggatacagcagaagcattagcaggtgtgatgaatgcagactctgct

SEQ ID NO: 57368 - DNA, 101 bp, Homo sapiens
ctgagaccctggagcatctgcaagagatcaacatcgccaccaggaccaccttcctcctgccaggtcccacccacctctgcctccgccatggctgcaagaac

SEQ ID NO: 57369 - DNA, 100 bp, Homo sapiens
attacgccccctatcctatccgcaaacagatattaccttccaaatgatgatggagaattttatcagttctgttacgttacccataagggtgaaattcgtg

SEQ ID NO: 57370 - DNA, 100 bp, Homo sapiens
ctcacaatgggcagggcctggggaatgcttttttatctcatattagtgcctgtgatggcatctttcatctaacacgtagactcttggtaacaaatttaag

SEQ ID NO: 57371 - DNA, 98 bp, Homo sapiens
tcgcgcttcagcgtcccggcgccgtcgcgccactcctccgatgaagctgtggtctaccaatctagacaactcagtggcaagcattgaggcaaaggcta

SEQ ID NO: 57372 - DNA, 95 bp, Homo sapiens
ccgcggaggggtctgcgcagtgcaggcagataccgtttgacaccaccagagtccaacctataccttctcagggaggcaaactagaaatagctggc

SEQ ID NO: 57373 - DNA, 99 bp, Homo sapiens
gtaatcgcctgctttgattcattgaaaggcctgttccccacggatcagctcatctccaggaaaaaaaccccagagacaaggctgtagtgcctgtgttta

SEQ ID NO: 57374 - DNA, 73 bp, Homo sapiens
gacaactaagcgaggggatcctcatgagttaagaaacatatttctacagcggaagatccatccaaaagctatg

SEQ ID NO: 57375 - DNA, 74 bp, Homo sapiens
atgataaagacgccctggtgttcgtgctgattgatgagggaatccctggagatagagaaagtcaggctgtggtt

SEQ ID NO: 57376 - DNA, 90 bp, Homo sapiens
ggttcacaataaaggtgctaagaaagagaatgtaagacaggaaaataattaaatattcttaccgagcaccctggaggagaagaggttctg

SEQ ID NO: 57377 - DNA, 106 bp, Homo sapiens
cctcgcgcggcgctggagagagacaagatgtccgccagagctgcggccgccaagccgtgcagtcggaggtccttgtgcatgaagacagatttgttctatggcctcg

SEQ ID NO: 57378 - DNA, 75 bp, Homo sapiens
ggcgtgagcgacagcggcaaactaagatatcaacatggactagggactccagacttgcggcaaacccttcccaac

SEQ ID NO: 57379 - DNA, 100 bp, Homo sapiens
aaccaggactgctccgcgcgcccctgagcctcgggctccggcccggacctgcagcctcccaggtggctgggaagctaaagccaattcaaatactttcaaa

SEQ ID NO: 57380 - DNA, 100 bp, Homo sapiens
cctggtcctgctgctcggggtccgcgcggcctccgcggagccaggggacggcaaaacagaacagaaaggcggagataaaaagaggggtgttaaaagacca

SEQ ID NO: 57381 - DNA, 90 bp, Homo sapiens
gagggcatttgctattgattctagtcatccctggcttcatgagtgtatgattcgtctctttaatactggaagggtagatgtctacccaaa

SEQ ID NO: 57382 - DNA, 98 bp, Homo sapiens
ctggagtgattgattcgaaagggatcttcttggaaacagaattgttctacaaaggtatccgccctgcaattaacgttggtctgtctgtatctcgtgtc

SEQ ID NO: 57383 - DNA, 75 bp, Homo sapiens
cgaggtctatgagaacaagacggacgtcatcctgatcttggaactggttaatcatctcattttagtggagccttg

SEQ ID NO: 57384 - DNA, 100 bp, Homo sapiens
ttaagggatccatcctacagaagctgctgcatctgaagccccccaggatgtgacctacgcccagctgcacagcttgaccctcagacggaaggcaactgag

SEQ ID NO: 57385 - DNA, 89 bp, Homo sapiens
attgcaaagtcatcagccggtgccaaagagagacaagagagacacctccaacttcgacaaagagttcaccagacagcctgtggaactga

SEQ ID NO: 57386 - DNA, 75 bp, Homo sapiens
ctgaagagggaagacacgcggaaacaggaaaatatatgcagatgatgaacattcttaagccaattgcctttgatg

SEQ ID NO: 57387 - DNA, 100 bp, Homo sapiens
agttgaagaaacttctttactggaagattcgtcagtgacttttcctgtggtaataataggatggagctatgacattgaagagaggaaggttccaaaaccc

SEQ ID NO: 57388 - DNA, 100 bp, Homo sapiens
gtccccagagcccaggaggcaacatctgcgccaagcccatctttgtgtgcttgcatccaactgtgatgagcctatgtatgtcaagttggtggaggccctt

SEQ ID NO: 57389 - DNA, 75 bp, Homo sapiens
ccactagcagccagttccggcccgaggacaccgactaccagcaggccgcctgatcttcgacaacctaaagaagtc

SEQ ID NO: 57390 - DNA, 90 bp, Homo sapiens
ggcattattcatttctccagctctggttggtgaccgttgttatgatgaaaaaatgtatgatgctgctaagttgttgtacaataatgtttc

SEQ ID NO: 57391 - DNA, 110 bp, Homo sapiens
taaaagcattcggcagcgtcgtcgcttcactgtggctcatacatgatttattcaggagattgagcatgctctgggtcttggcccagccaaacagtgtcctcttcgagagt

SEQ ID NO: 57392 - DNA, 75 bp, Homo sapiens
aggaggggctccggctggtctgtggtgagaaacctgctcctccaaagccagagcccaagcctaaaaaggcccctg

SEQ ID NO: 57393 - DNA, 95 bp, Homo sapiens
gtggaccccaagaagaccattcagatgggatctttccggatcaatccagatggcagccagtcagtggtggagacttaattcagtgcacaaatgag

SEQ ID NO: 57394 - DNA, 89 bp, Homo sapiens
ggatgcctgtgggaaaaagggaaattttcattacgttcaggtgtgaacacagcaggtgtgagatgtcatcttggaagacaggccttgca

SEQ ID NO: 57395 - DNA, 83 bp, Homo sapiens
ggagttgctgcccttccggagtccgccccgtgaggagaatgatatgatgcttcctggtgtgtttagtggttggtgccattcca

SEQ ID NO: 57396 - DNA, 100 bp, Homo sapiens
aagggaatacattgccagaacttggaatactctactggacaaacatttcctccaagattcatgcccaagcacaaaacaacccatttaaagaagatgctcg

SEQ ID NO: 57397 - DNA, 90 bp, Homo sapiens
gtacatcctcagctcgctgttggcagagggtcttgctctgttgcctgggctggagtgcagtgccacgatcttggctccctgcagccttga

SEQ ID NO: 57398 - DNA, 90 bp, Homo sapiens
cgcggagggaagacgccctggtgctcaccaagcaagctgcttcctgtctgtgacacctgggaagacacagtttgggcctacttccgggtg

SEQ ID NO: 57399 - DNA, 100 bp, Homo sapiens
gcagtggtcgcttcttctccttgatggtggagccagggcaagatttactgcttgctgctttgagtgagagtggaattagtccgaatgacctctttgatat

SEQ ID NO: 57400 - DNA, 100 bp, Homo sapiens
cgtgtttctcgcctacttcctggtgtcgatcgccggcctcctctacgcgctggtacagctcgattcctggtcgggtggcttccagtggtcttcagtctgt

SEQ ID NO: 57401 - DNA, 100 bp, Homo sapiens
caatgacattgggggcctgtggaaattttcaagtcaagggtccagagaaggaggagaagttgagacaggcggtcaagcaggtgctgaagtgtgatgtgac

SEQ ID NO: 57402 - DNA, 83 bp, Homo sapiens
ctggaaccagctgctaagccagaagcgcgtaacccagcgggtgccgcttctccacccgaggcttccacctccaacgagccatg

SEQ ID NO: 57403 - DNA, 100 bp, Homo sapiens
aggacttcggaatgcactacaacaggaaaatcatattatagatggagtaaagctggtgcaggcctttacccatgctcctgcaacattagaagcagacaga

SEQ ID NO: 57404 - DNA, 75 bp, Homo sapiens
gatcgccgcggggcagttcgggccggctgtcctggcgcggtgtggatgaggtcaccattgtcaacattttgacca

SEQ ID NO: 57405 - DNA, 90 bp, Homo sapiens
gcagagctggggaagttgcgagagaggctgcagggggagcacagccagaatggggaggaggagcctgagctattcccttcagcaagctca

SEQ ID NO: 57406 - DNA, 75 bp, Homo sapiens
aagggcagtgccattgataggtcgaggctttgggcaatccaactccctcccgacggctggctctgtgggcggtgg

SEQ ID NO: 57407 - DNA, 75 bp, Homo sapiens
cgggatcttcgacgggcacgggggagaggcactactgcagtcttcagttaagcaacaagtagaagctattgaaaa

SEQ ID NO: 57408 - DNA, 100 bp, Homo sapiens
gcaagaccatcatgctgcgcggccttcccatcaccatcacagagagcgatatgcttttactgactctgctatcagtgctaaagtgaatggcgaacacaaa

SEQ ID NO: 57409 - DNA, 90 bp, Homo sapiens
gccggaggaggagtaggtgcgggtgaagatggcggcagccgaggccgcgaactgcatcatggaggccctgtttgtgctcttcgtcctggc

SEQ ID NO: 57410 - DNA, 75 bp, Homo sapiens
ttccgagccagccgagacctgccgtgggaccccagagattcccaaagctccaccatgaggcgaggtggatggagg

SEQ ID NO: 57411 - DNA, 97 bp, Homo sapiens
ctcgcttcggactgcgcaacgctgcgctctgggctgacagcttggtcgggaggaacctgccatgtccatggatgccaatggaaagataatttgggcc

SEQ ID NO: 57412 - DNA, 102 bp, Homo sapiens
aaccgcagtatcatgctggccaagaagatcatcattaaggacggaggcacggccacggcgtatgcctccgaggacggggtcctgaccgaggccatgatggac

SEQ ID NO: 57413 - DNA, 75 bp, Homo sapiens
ctgctacagagcaggagttgccgcagccccaggctgagacagggcactgcacttggctgtgattcatcagcatga

SEQ ID NO: 57414 - DNA, 75 bp, Homo sapiens
tcactcctagatatctccaacacaccagagtctagcattaactatggaggtgttgctctcttgccattcgtggat

SEQ ID NO: 57415 - DNA, 96 bp, Homo sapiens
cgaggagccatcagcttcagctccagctccgctctcttcggctgccccaatccccggcagctctctcaggccagattacctgtccctaatactgag

SEQ ID NO: 57416 - DNA, 89 bp, Homo sapiens
cttggagcacttcctattccactggattgggaaagaccatggcagactattgcagatatcatccgaacatgtttgggacccaagtccat

SEQ ID NO: 57417 - DNA, 51 bp, Homo sapiens
gcagtggcagcttcgaagccagcccaggaatttgctgacacaatatcttcc

SEQ ID NO: 57418 - DNA, 100 bp, Homo sapiens
cgtttcttcctgcctttgggccgtcaggcagttggttgggacccgctccaaccctcgctcctaatttccgaatggaaccagtgacagccctgggtatcct

SEQ ID NO: 57419 - DNA, 50 bp, Homo sapiens
ctgtccttaggaaagatatttaccagtcaatgagtggtcattgaagataa

SEQ ID NO: 57420 - DNA, 100 bp, Homo sapiens
gcaccagtttcaaaaacttacaaggatgatgatgacgacatgggagaggatgaagatgaggacgatggtttctttgtgccccatgggtacctgtctgagg

SEQ ID NO: 57421 - DNA, 100 bp, Homo sapiens
tcagcaagaacgggaacaaaactctgatttgaacatggaattcaatccttcagatcatcctcgggccagcacaatattcctcagtaaatctcagacggac

SEQ ID NO: 57422 - DNA, 99 bp, Homo sapiens
tagaaattgcagccagggatattgagaaacttctgagcaacagatctaaagccctggtggtttttctaaagagtgaccgagtggccagaatggtacaga

SEQ ID NO: 57423 - DNA, 73 bp, Homo sapiens
gcattgtttgtttgaaattgcattgacgactgccaaaactggacaagccaaggcatctgtagccaaagtaaac

SEQ ID NO: 57424 - DNA, 95 bp, Homo sapiens
gagctgggagggagccgcgcgcctttgtgcgcgcgccgagatccagtccttctgtggaacttctgaacatcttttattagtggaaatattttcta

SEQ ID NO: 57425 - DNA, 100 bp, Homo sapiens
ccatcaggtacaacctcgaggagctctaccaggaagaaatgttggctatttggcgatgagaggtggtgaacagtgaccatactggtatacaacactatgg

SEQ ID NO: 57426 - DNA, 101 bp, Homo sapiens
ctgttgcagggttttgtttatataactcaagttgtttggctaaattcttcagtcagcagataagcagagagccctagaagaaaccaaagcctacaccaccc

SEQ ID NO: 57427 - DNA, 50 bp, Homo sapiens
ccgagaccgcggccgggaccgaggaaatgcctccacggctgtgtacgcct

SEQ ID NO: 57428 - DNA, 75 bp, Homo sapiens
gatgggcaggttagcccaggaagcctgctcttagctggtgccatagctgactgggctggcttagatgaagatgaa

SEQ ID NO: 57429 - DNA, 100 bp, Homo sapiens
cttctcaccactctgtcaaatagagtctgctcacaatatgctgcttatggggagaagaaatcaaggctcagcaaatccacagcattaggcaacattccag

SEQ ID NO: 57430 - DNA, 83 bp, Homo sapiens
gcagtgcaaaacagttcacgccatgatggaaaggaagttgatgaaggttactataacaacagtaccaaggtggctgtgaaaac

SEQ ID NO: 57431 - DNA, 50 bp, Homo sapiens
atgaagggtacccactctggaagcaggtattaatctctggagaagacaca

SEQ ID NO: 57432 - DNA, 83 bp, Homo sapiens
aaatatcgtatggaacgccccaaaatccaacagcagttctcagacctcaagggatgatcatggtgattttactgctgcttgtg

SEQ ID NO: 57433 - DNA, 99 bp, Homo sapiens
ctgattatcagtacgtaggcaaggatggcttaaattccttggtccttgatttagattttcctgctttgaggaaaaacaagaacatagataatttcttaa

SEQ ID NO: 57434 - DNA, 82 bp, Homo sapiens
aatggagagcgcctcagtcttccacccaataagtgagttgctgaatgagcttatggacagtgcaaaagtgtctaacagccct

SEQ ID NO: 57435 - DNA, 75 bp, Homo sapiens
agctgtgcagccgcgaggaggcgcgggaggtgttcgagaacgaccccgagacgacaggtgatttggcttctgcac

SEQ ID NO: 57436 - DNA, 75 bp, Homo sapiens
agcatattacctatcaggagaggaggacttgcaccttcgagatcccctgtgtttacccagctggaggatgatgaa

SEQ ID NO: 57437 - DNA, 96 bp, Homo sapiens
tctgagttcaatacgtctgaacctttgctgtctatggatctgctctaaaccttatagcctgcttatgggggaaggggttatggttttgtgaaattc

SEQ ID NO: 57438 - DNA, 103 bp, Homo sapiens
ctcaagtacattagattcgctggctgttatgatcagcacaaccttgttgcatgccagataaatgatcagaggggtgtttgatgcttccctcaaaatggctggc

SEQ ID NO: 57439 - DNA, 75 bp, Homo sapiens
actcatatcccaggatgggactcagcatggaccagttactctccacaagaaaattcacacaaccacagtgctctt

SEQ ID NO: 57440 - DNA, 89 bp, Homo sapiens
gcctcccagcagcagtcccgagcagaggaaagaccacagcaagattctttcattcgtctcctcctagcctgggggaccaggctcgaact

SEQ ID NO: 57441 - DNA, 119 bp, Homo sapiens
gaaaacctaaccatgaagacttgaacttaatacagcaagaaagaccatcaagtttaccaataacaacgaacttgatgcaagtgataggtttgccaaggtcagacctctcatcatccgga

SEQ ID NO: 57442 - DNA, 100 bp, Homo sapiens
atgtgagtgaccatgcagcaaaagaaggagggtcctctcagtgattaagtctgacagcaatgcaagcttcctccgtgctgccagagcaggcaacctggac

SEQ ID NO: 57443 - DNA, 75 bp, Homo sapiens
ttgctgtcaaagttgtgtcagtgaatacaaacaggcagatccagttcctaatggtttgcgagctttgccagtttt

SEQ ID NO: 57444 - DNA, 100 bp, Homo sapiens
tcctcagtagattcagcccaagcctcagatatgggaggagaatcaccaggaaaatgtttataggaggccttagctgggacactacaaagaaagatctgaa

SEQ ID NO: 57445 - DNA, 82 bp, Homo sapiens
gcaccgcggacgcccgctgagcttggcgcacgggccgaccagggagtgcatccgccccaacccttttccccctcgtctcctg

SEQ ID NO: 57446 - DNA, 96 bp, Homo sapiens
atgaggataagagagccacgaaccacggcactgattttcagttctgggaaaatggtgtgcacaggagccaagaggacatagagacactgcatattt

SEQ ID NO: 57447 - DNA, 75 bp, Homo sapiens
caaactcatattgatattaattccaaaatcaggaaaattctgtttgaagatttccggtcctggctttctgatatt

SEQ ID NO: 57448 - DNA, 49 bp, Homo sapiens
tgggggtgctgctcatcttccttgcactggtgaccccggcagccctgag

SEQ ID NO: 57449 - DNA, 75 bp, Homo sapiens
gtgtttgaaagaaaatcctcaagaaaggcctacttctgcccaggacacttaccgaagaaggcagatgcagaggac

SEQ ID NO: 57450 - DNA, 100 bp, Homo sapiens
acagattgttcctaaaccagaagaggaggttgcccagaagaaaaagatgaagactggcccatttgcagagcactccaaccagctgtggaacatcagcgcc

SEQ ID NO: 57451 - DNA, 82 bp, Homo sapiens
cccgagcctgctcctgccgccgagagtactgcagtggactgtaaaataacatcgtctacgactggagataaacactttgata

SEQ ID NO: 57452 - DNA, 100 bp, Homo sapiens
gctcagtctgcggccaagactccgtcctgcaaggtcacataatgagtatgactcctgaacagcttcaggcttggcggtgggaaagagaaattgatgagag

SEQ ID NO: 57453 - DNA, 52 bp, Homo sapiens
gcctgtaatcccagctactcgggaggagaatcacttgaacctgggaggcaga

SEQ ID NO: 57454 - DNA, 74 bp, Homo sapiens
agaggaccaccggtcaaattcttaccaggtggacctcccccacacggcgatccaggaagcctccaacaagaaga

SEQ ID NO: 57455 - DNA, 73 bp, Homo sapiens
agaaaccaacctcttcctggaggagattcaggaaaatgagcgtaccaaggatctaatcattgagcaaagattt

SEQ ID NO: 57456 - DNA, 101 bp, Homo sapiens
agggacagcacctcatcccctggatgggggaccacaagatcctcatcgacagggagtggagcttggtttcgggatctcggtgctgcagacggcgagacctc

SEQ ID NO: 57457 - DNA, 100 bp, Homo sapiens
tgctggatgacacccaggaggcatttgaagttccagccgaaatagaactatttgtgaacagacttgattcagtggaatcagttcttccttatgaatacac

SEQ ID NO: 57458 - DNA, 88 bp, Homo sapiens
gaaagcgacaagtggaggcgccgctctagcggccgggactctgaactatggcggataccttcttctactcattggtctatgacccctc

SEQ ID NO: 57459 - DNA, 98 bp, Homo sapiens
aagaggccctcattctcatcaaaggctccttccggattctcaagctgattgtcaggagatgctggcccgcgagagacattgatgcattttgctgtgcg

SEQ ID NO: 57460 - DNA, 83 bp, Homo sapiens
gttggttgctttcggccagcgggacggcatccgagacctgcctagagctggaacgttacctccagagcgagccctgctatgtt

SEQ ID NO: 57461 - DNA, 100 bp, Homo sapiens
gcggggaagtcatgctcgcttcacggaggcaatagctagccgagatgcccgagtggtaaaagacatggcaacaggaaagtctaagggatatggctttgtc

SEQ ID NO: 57462 - DNA, 100 bp, Homo sapiens
ctgcaatggctccaaatgtcaaaaggatgcaatgcagtatgcttctgaatctaaagatactgaattggctgaagaactcctgcagtggtttttgcaggaa

SEQ ID NO: 57463 - DNA, 75 bp, Homo sapiens
gaatatttcagaaaagatccaagaccattcttcaagtttgcaaaggtgttggggatgtcctttgcactgaccctg

SEQ ID NO: 57464 - DNA, 75 bp, Homo sapiens
gtgtgaaccatgtgactttgtcacagcccaagatagttaagtgggctgtttgtgatatagggtctgcctccttta

SEQ ID NO: 57465 - DNA, 73 bp, Homo sapiens
gctggagaagcatctggccgggctgcagttccgggagcaggaggtgacccatgggctgagggcatacgatggc

SEQ ID NO: 57466 - DNA, 115 bp, Homo sapiens
ggggaccggcggcgctggaggagcgaggcagctgtactaggactgggaacggactatttggagttttcctggtcttactggatgtcactctcgtccttgccgacctaattttcac

SEQ ID NO: 57467 - DNA, 90 bp, Homo sapiens
tgcctggttctgggaaaacaacattgtctcgatggtttcacccaaatatcactggtgtggaggcagaaaacctactgttgacaagaggag

SEQ ID NO: 57468 - DNA, 75 bp, Homo sapiens
cttctcctttcaaaatgaagcccataggacttcaagagaggaggttgtggctcactggattgctgaaagccgcat

SEQ ID NO: 57469 - DNA, 100 bp, Homo sapiens
actgctgagggggcgcgaggggaacggaggccagagctgcggcttgggcactgtttaaaggaaagttccgagaaggcatcgacaagccggaccctcccac

SEQ ID NO: 57470 - DNA, 90 bp, Homo sapiens
ttccgggttcgagtaattctcctgcctcagcctcccaagcagctgggtctacagccagagactgctgctactttgaaacgtacgatagag

SEQ ID NO: 57471 - DNA, 75 bp, Homo sapiens
aagctcacaggttgaaaaaccaaagctccctgctgcataagaccttgtcagagcttaagagttggacagtggagg

SEQ ID NO: 57472 - DNA, 75 bp, Homo sapiens
gaaggagcggaagaatggcagtgctcaaactcaccgaccagatcttgagccagatgattgtgcatccatttacat

SEQ ID NO: 57473 - DNA, 88 bp, Homo sapiens
gcgctcaacggcgagccagagctggacctcaccagcaaggtgcagagcattgtagaccaaggagccatggataggagaagtatgggtg

SEQ ID NO: 57474 - DNA, 110 bp, Homo sapiens
cattgcttgggcacttagattatattcgcaccacgttttttcatcatgcccagcctccgttatcagcaatgatgatgactctgccagcccactccatcacatctccaatg

SEQ ID NO: 57475 - DNA, 75 bp, Homo sapiens
gtgatcataggagaaaaccatttcagaaatggcgaaaagtcttttgaagacagcctctctgtctggaaggacaaa

SEQ ID NO: 57476 - DNA, 75 bp, Homo sapiens
aaatcaccctgagtgggcaaaatcaccacgcttattaatcataaagataataccaaaaagtctgataaaactctg

SEQ ID NO: 57477 - DNA, 75 bp, Homo sapiens
agttactggaacatagagattttataggatatggatatttgatggtcctacaggtgaaggccgacttttgagatt

SEQ ID NO: 57478 - DNA, 75 bp, Homo sapiens
agcaacctgaaacgaacagccagcaaccctaaagtggagaatgaggatgagaaaagaagagtcggggacctccta

SEQ ID NO: 57479 - DNA, 83 bp, Homo sapiens
gccgaaaacaccctgcaatctttcagacaggatagaatttttgcggcatttgaagagctttttccagattatgtttaaaattg

SEQ ID NO: 57480 - DNA, 112 bp, Homo sapiens
ggctttcaaggatatgctgtattcagctcaggaccaggcaccttctgtggaagatgcctgtgaggagccaccaacatttgaagctatggagctcattggtaaaccaaaaccc

SEQ ID NO: 57481 - DNA, 50 bp, Homo sapiens
gccacgtgtggtctgtaagtagggatagctgggagtatggccaccctgct

SEQ ID NO: 57482 - DNA, 101 bp, Homo sapiens
cccttaaaacatcatccctgccctggatcggcctggagccagtgcccaagatgtgaggtctggaacagctgcagccattttgccaccatgggaaacctggg

SEQ ID NO: 57483 - DNA, 100 bp, Homo sapiens
cagagtggaccaccccatgaacctcgaaatgttgctgaagtgctgctgaaagggccagagatgcaaggatttgggatacattttgaacctttaagctgtc

SEQ ID NO: 57484 - DNA, 100 bp, Homo sapiens
aggactcggagcgcatgcagctgctgctgaccctggccttcaaccccgagccgctggtgctacaggttaatggcacagatgcagattatgaatatgaaga

SEQ ID NO: 57485 - DNA, 75 bp, Homo sapiens
tgcaaatctacgcaagaatgaactggagacagagaatagccgtgctggtatagaggactctaagaagtggggcat

SEQ ID NO: 57486 - DNA, 103 bp, Homo sapiens
acaactacaaccagctggaaggcagattcaagcagctgcaagtagacggataattaaccttggcccagtaatgcttatttctgaagaacaaccagctcagcct

SEQ ID NO: 57487 - DNA, 101 bp, Homo sapiens
cccccatggaggccctggcagagcagctctggtttgtcaggctggcactactagtgaagttgggccttttccagaatgctgagatggaatttgaacccttc

SEQ ID NO: 57488 - DNA, 100 bp, Homo sapiens
gtccgccccgcgagcacagagcctcgcctttgccgatccgccgcccgtccacacccgccgccagatctgaaatagctcaactcagtcaagaaaaaaggta

SEQ ID NO: 57489 - DNA, 98 bp, Homo sapiens
gagttcagcttttagagcaggtgtatgatcttttggaggaggaggatgaatttgatagagaggaactgcaagcacatgttgaccagataactgaaatg

SEQ ID NO: 57490 - DNA, 83 bp, Homo sapiens
ccaatctctgccatcaaggccgattttctttgaaccttcagcaaagacggatgtttccagtcctaaagattagtgtcacaggg

SEQ ID NO: 57491 - DNA, 96 bp, Homo sapiens
agcttttagagcaggtgtatgatcttttggaggaggaggatgaatttgatagagagtaacaaatgtggcaattattttggatctatcacctgtcat

SEQ ID NO: 57492 - DNA, 100 bp, Homo sapiens
acttcggccaagaaattagacaagaaacattggaaaagaaatcctgataagaactgctttggtgaccctaagaatgactcctggatctttgccctggctg

SEQ ID NO: 57493 - DNA, 51 bp, Homo sapiens
gcttctcgcttcaagctcctgaaggcataccaatcccattgtggaaaatgg

SEQ ID NO: 57494 - DNA, 46 bp, Homo sapiens
aacaacaacgagatcctcagtggcgcatttcacccagaacgtgtag

SEQ ID NO: 57495 - DNA, 98 bp, Homo sapiens
tagccggctgcgcgtggctggggaggcgaggccggacgcacctctgtttgggggtcctcagaaactggcgatggaatatgagaggagccctctggaaa

SEQ ID NO: 57496 - DNA, 83 bp, Homo sapiens
gggcccctgagccatgcccatcgcagccgccccgaaggagccagacaatgcagatcttcgtgaagactctgactggtaagacc

SEQ ID NO: 57497 - DNA, 128 bp, Homo sapiens
cttgtctgcctcggctgtgaagtggggaggctggcaacagttttcttcagcgcccaggatgcagccggctaaggattaaactgcaaatatctcatgaagctgctgcctgtatcactggtctccgggca

SEQ ID NO: 57498 - DNA, 100 bp, Homo sapiens
gagaaacttctgagcaacagatctaaagccctggtgataaactgccagggagaagaatgagaagacaggagacaaactgtttggaaagctaaatcttccc

SEQ ID NO: 57499 - DNA, 90 bp, Homo sapiens
catccctcgtcgaaaggattggattggcatctttagagagagaaaccctttatctgtgaaatctgtggcaaaagcttcaccagccgcccc

SEQ ID NO: 57500 - DNA, 100 bp, Homo sapiens
atttgggctggaagcgaaaatacaagtaaacatatgtcaaatggcagtgcctgatcctctactgggtgttcaacactggctgcatttatggagaccacag

SEQ ID NO: 57501 - DNA, 80 bp, Homo sapiens
accaaagaccaagtagatggagttctcagctactctccagagagaccggatcttcaaacattttaccaggaagcgccaaa

SEQ ID NO: 57502 - DNA, 74 bp, Homo sapiens
taagtaacgatctggatgcccagaacacagatggggtgaacttctataacatcttaactaaaagcactcccacg

SEQ ID NO: 57503 - DNA, 100 bp, Homo sapiens
aggatttcgcggtggattcagaggaggtcgtgggggccgggagtttgcggattttgaatataggtcggaattgagatgggcgattggcaggaagtctggg

SEQ ID NO: 57504 - DNA, 83 bp, Homo sapiens
gcctttctggacagaccaacctgtcagtgctgcaagccaagctgaagtctttctcagccaagatcgtgcagctcctgaaggag

SEQ ID NO: 57505 - DNA, 73 bp, Homo sapiens
atctgcattatcgtgctgaatttgggtgaggaggaaggagaagcaggtgtacaagggagaagaagccacattc

SEQ ID NO: 57506 - DNA, 101 bp, Homo sapiens
tcggacagcgcccagggccggagcccgagcccttggaggccaaacttccagatctgcaaccatttccttctccagatggtgatacagtgacccaacatgag

SEQ ID NO: 57507 - DNA, 100 bp, Homo sapiens
agaatctttcctgaccagccagtgggtctcctacaccattgattttaaagatatccttgaaaggaactgtagatttcgggcagacaacttgaacaagctg

SEQ ID NO: 57508 - DNA, 75 bp, Homo sapiens
aagacaatcgtcacttatacagacccaacatgagtgaagtttcctgcaagaaacgggacgactatttggaatggc

SEQ ID NO: 57509 - DNA, 100 bp, Homo sapiens
tccctctggatgtggaattctccgtccctttccagggagggaacaaagcccacagcaccgcttgaacatgcgaaagtgacacagacagagttgatgcgtg

SEQ ID NO: 57510 - DNA, 100 bp, Homo sapiens
ccctgccctgggctggaacgaccctggaattctcacactcaagaaagcaaatgaacttcttctgagcacaggcatgcccggcagttttctcatccgagtc

SEQ ID NO: 57511 - DNA, 75 bp, Homo sapiens
cttttgtgaagcacagcacggtactggagaacacggatggtggacgtgcaagtcagagaaatggtgaaactcctg

SEQ ID NO: 57512 - DNA, 74 bp, Homo sapiens
gttcacagagctagccggacgtcctccgactcaaggttactataacaacagtaccaaggtggctgtgaaaaccc

SEQ ID NO: 57513 - DNA, 100 bp, Homo sapiens
gtcatccccatggctgatgcagcaggcatcatccgctatgcaattggggaggtggtccaggccacgctggtggtcctggccttggccatggtgcccatcc

SEQ ID NO: 57514 - DNA, 74 bp, Homo sapiens
gttcaagatggctaaaaattggagtggttcctgggcagcctgcgtgcccgcctgatgcttctgcaccccagccc

SEQ ID NO: 57515 - DNA, 90 bp, Homo sapiens
atcgcattttatgtttctggcgagaagggaacggagttttcatcagggtggaatgcatgtcaatggcgcacctcctctgatgcaagcttc

SEQ ID NO: 57516 - DNA, 75 bp, Homo sapiens
agaggcggcgccgctcccaagatgtcgcagacggccatgtccgaaacctacgcaaaatgatgcttcaacacccag

SEQ ID NO: 57517 - DNA, 88 bp, Homo sapiens
ataattcaaaaacactatcccagggagtgcaagcttagagcgtctggccaagaatcagaggaagtggatcatccgggaagcccacggg

SEQ ID NO: 57518 - DNA, 82 bp, Homo sapiens
ctcagttggaagcagccgatccagcctgcggagcctgtggggcagtgattcgcctttgccagtctcatctcgtgtctgcttt

SEQ ID NO: 57519 - DNA, 87 bp, Homo sapiens
gccgccgcgtcctcagccaccgctccctcttcccacgcggtcttgcgagtggctggttccctgcagaagagcacagaagtgatgaag

SEQ ID NO: 57520 - DNA, 75 bp, Homo sapiens
ggcccatctctgtagccatcactgagaaatctggattttcaagatgctgaaattttcttctaaggagaaatatcc

SEQ ID NO: 57521 - DNA, 100 bp, Homo sapiens
atcaccccattaacccaaagggcctggagtgccggatggagtgctgtgatgtgccagccgagacactctacgacgtcctacacgacattgagtaccgcaa

SEQ ID NO: 57522 - DNA, 125 bp, Homo sapiens
ttggcgtgaaggctgctggcgactgggccagcattcattgtgaagaccggagggacacaccctgctgtgtgactgtgggaagatggaggagtatgagaagttctgtgaaaaaagtcttgccagaa

SEQ ID NO: 57523 - DNA, 100 bp, Homo sapiens
gagctcatcaaggacgggaagtcactcataagcgcgctcaagaagaagatttacctgcttactaaagaatgtatttcccaaagcaaatatcacatggttt

SEQ ID NO: 57524 - DNA, 82 bp, Homo sapiens
aggaagacgacgagtttgaagagttccctgccgaaggagcatattaatgaaaagtgccataaactgaaaaaccaaacatgag

SEQ ID NO: 57525 - DNA, 78 bp, Homo sapiens
aaagctgaaggtggaggcgccgcaagcgctgagctatgaagatttttgtaacaactaaaaactcaaaaaaccaaggca

SEQ ID NO: 57526 - DNA, 100 bp, Homo sapiens
ggagcctcccctgcagcgactcggaagattcgaggcggcgggggacaagtcggcgccccagagcggacgagccgccctggagggagggccagcgtggaca

SEQ ID NO: 57527 - DNA, 100 bp, Homo sapiens
aacttctccctcgaactttaaagtccgcttctttgtgttaaccaaagccagcctggcatactttgaagatcgtcatgggcgtcgagggcgaggcccccag

SEQ ID NO: 57528 - DNA, 117 bp, Homo sapiens
aggagccgcggagccggcgctgagaggggctgcggccggagcgggcggctgagacaaaggcgacgtgccttgctttccatgacatttcccctcaagcaccaacacattttctggtga

SEQ ID NO: 57529 - DNA, 80 bp, Homo sapiens
ctgcgggagatcatcatctgcacctaccgccaggaatcccagtcagaagttccagcctgccactgttctctgatgccatg

SEQ ID NO: 57530 - DNA, 100 bp, Homo sapiens
aattcatcgctgtgactgcataccagaatgataagagctgcagaaactggagggcagcagtggacctgtgcggacgtctcctcacagcccacggccaggg

SEQ ID NO: 57531 - DNA, 82 bp, Homo sapiens
gcagtacaccaacgcggtgcgcgaccgggagctggacctccgggggatttcagtcataatcggttgtctaactggaacatca

SEQ ID NO: 57532 - DNA, 100 bp, Homo sapiens
cctcaacatctctcagagacgaaaggttattcagcttctcaaggctggaaaagcgaaggaagtttcctacaatgcactagcctcacacataatctcagag

SEQ ID NO: 57533 - DNA, 82 bp, Homo sapiens
ctgaagcgcaggctgcggggcgcggagtcgggagtgtactaatggtcacttgatgtgcgctggctgttttatccacctacta

SEQ ID NO: 57534 - DNA, 101 bp, Homo sapiens
cctatgctggtggaacagcctcggccaccaaggatcaccttcagcagtgcttatttcaacctgtgcagtgttctaatgagaagtgccgggagccagtccta

SEQ ID NO: 57535 - DNA, 50 bp, Homo sapiens
gtggatcctacatgtgccataggttgctgtctctgctggccttcatctgt

SEQ ID NO: 57536 - DNA, 100 bp, Homo sapiens
gaccgcacggtggtgctggccaagcgcaacggaggcgtggtgagcagtaggtcatccagtcccagtgtcagaatgattactacctcaggaccaacctcag

SEQ ID NO: 57537 - DNA, 100 bp, Homo sapiens
gcagcacagtgtggctgtttgtctccttgcccgccaaagttctgcccagtccaacgactccacgcagctcgcccttgggtttggaaatcccttgtctcca

SEQ ID NO: 57538 - DNA, 101 bp, Homo sapiens
atgagagagatgctatatcgtggtaccaaaagaagagcatgaccttcctcttgatgttgctgctcatcttcttctacatttttgctgtgactggtgtctac

SEQ ID NO: 57539 - DNA, 100 bp, Homo sapiens
ttttgaatggcaatgtaaacttccagccatcaagcccaagactgaatttcaattgggacacaggttgaacatcacggcggagaacgactgccggcggctg

SEQ ID NO: 57540 - DNA, 75 bp, Homo sapiens
cctcggagcgcggtccctgtattggtctcctgctcctagaggtcatcatcagatttgaaatatttaaagtggata

SEQ ID NO: 57541 - DNA, 80 bp, Homo sapiens
tagattttctctcaaactacgaggatcatggcggtacaggaagggatggctggatagtagactacatccacatcttcggg

SEQ ID NO: 57542 - DNA, 89 bp, Homo sapiens
gaactataagagcctggtgagacggagctatcggcgccgcggcaagagccaggtcttcaggcaccatggaggacaaacgcaacatccag

SEQ ID NO: 57543 - DNA, 75 bp, Homo sapiens
ttcacctattgcctgatctccatgcattagaacacacatactctgataaaggaactgtggctgcaccatctgtct

SEQ ID NO: 57544 - DNA, 98 bp, Homo sapiens
aggttacatcattgcagtccaccgaaaaatgaatcaggaaacccaggcccaacggcaggtggatgcaagaagaaatgttccccaaaacgacccagtga

SEQ ID NO: 57545 - DNA, 82 bp, Homo sapiens
gttttgccggaggagcccctcaggccggccgagaactactggtggcgtggccagaacacacggacgctgtgtgtggggccct

SEQ ID NO: 57546 - DNA, 100 bp, Homo sapiens
tctctcgcggcggccggcggggcccgcgctgcagccggagacccggagaaaggcaaagccacaacacttgagaaaacctatggacctgcatggatagcct

SEQ ID NO: 57547 - DNA, 75 bp, Homo sapiens
agtcctggaaaaggaattcggattggccatctgcaagcttcccttctccgtggagagcaggaagacagtcatggg

SEQ ID NO: 57548 - DNA, 96 bp, Homo sapiens
ggaggacgacagcgacgatgacgatgtcctggctccttcaggggccaccgcagctgtgttctaagaacggaagcatctgggctggatggaatttag

SEQ ID NO: 57549 - DNA, 75 bp, Homo sapiens
cggaaaccggtagcgcttgcagcatggaggtgtgattgcctatatcagttcttccagctcagcctcaagccctgc

SEQ ID NO: 57550 - DNA, 100 bp, Homo sapiens
agtaggaagaggatgaattcatttcgcttatctggcaaatgtgtaatctgagtaatagaggatttttgtgagcatggaacaaagtctgggttaaaccagg

SEQ ID NO: 57551 - DNA, 72 bp, Homo sapiens
atgcaaagagtgcaaatgcacctcctgcaagaaaagagaactacgatgacccgcacaaaacccctgcctccc

SEQ ID NO: 57552 - DNA, 100 bp, Homo sapiens
ccaggactcagaggccgccatcaaccgccagatcaacctggagctctacgcctcctacgtttacctgtccatgattctgtgctgaacgcctccggtccct

SEQ ID NO: 57553 - DNA, 50 bp, Homo sapiens
cggacagattgaccttcagagcgaggtttttcgttggaatatacgttgca

SEQ ID NO: 57554 - DNA, 101 bp, Homo sapiens
tcagaagacgttctgtatttcagcttcctgctatgtgccctctttgttcctaaagggtcaatgcaaccaacttcatggaggcaggagccccagttatgtgg

SEQ ID NO: 57555 - DNA, 96 bp, Homo sapiens
cttgcttggagctgacgccgacgggaaaaccagtggctgttacaagtaacagaggcacaggaagggcacctttacgtcctggcgctaacccccagc

SEQ ID NO: 57556 - DNA, 83 bp, Homo sapiens
cgcccgtcaacttctgcgacgaagaaaaaaagagcgacgagtgcaaggattttttatcaagcagaaatgcatcgaacaacgag

SEQ ID NO: 57557 - DNA, 83 bp, Homo sapiens
atcagtcaggcagatgtttgtcgactggaatgggagatacaactcgtcaacgaatcaaattcagtgatgacagagtatgcaag

SEQ ID NO: 57558 - DNA, 82 bp, Homo sapiens
gagaaacattaagacctactaccaggcccgcgatgctcccagcccggtgagacctgcctgaatggcgggaagtgtgaagcgg

SEQ ID NO: 57559 - DNA, 83 bp, Homo sapiens
aaggagctaaagcagcgtgcgttcagccctgggctcggagcccaagatcctcttctcctacaaatgccaagtggacgagacag

SEQ ID NO: 57560 - DNA, 100 bp, Homo sapiens
ggggtttcttcgttgcattgcctgagaggagcggagtctgccaggtggtgtccatcatgagcttacaagaccctatgaaaaaattagttgagaaagaaga

SEQ ID NO: 57561 - DNA, 98 bp, Homo sapiens
tttcacaaaccccagcccttccagttccagccttgtgacagtgatactggaactctaatgatccaggacaaagaagttaccctggagtatgtatcaag

SEQ ID NO: 57562 - DNA, 100 bp, Homo sapiens
gtcattttccttctttggttttttcctgacttacattcgtgattttcagattatgactgtacccaatgacccttacacttttctctcttgtggtgaagat

SEQ ID NO: 57563 - DNA, 88 bp, Homo sapiens
cggggatctgtgagtcttctggcaaacagtgtttgcctctggttcagctcatacaacagcttcttagatgcggaaaacgccatgcggt

SEQ ID NO: 57564 - DNA, 76 bp, Homo sapiens
ggaacctacggacaggtgtacaaggataaagttcacattcctggtgccatctacctctcaatcaaattcgactctc

SEQ ID NO: 57565 - DNA, 100 bp, Homo sapiens
ggaagcggcaggagccgccgccgacacctgaaggtgtcatggagaaactccagctgggcccagagattctgcagcgggaaaatccaaggcttatttatgc

SEQ ID NO: 57566 - DNA, 89 bp, Homo sapiens
tggaaggaatgaaggcttgtatgacctatttccctcgggcttgtggttctctcaaagtggacatcttcaataaggagctactgctaatc

SEQ ID NO: 57567 - DNA, 51 bp, Homo sapiens
gttcaaggaagcgcaggctgaggtcgattgagctatccacatccaggaact

SEQ ID NO: 57568 - DNA, 50 bp, Homo sapiens
tagatgccatgatcatggatgggaaactttgagggaaattttgagtcact

SEQ ID NO: 57569 - DNA, 96 bp, Homo sapiens
ccgcgaaccgcagtatcatgctggccaagaagatcatcattaaggacggaggcacggtctcggcgcggaagatggccggcggcgtggacggcccca

SEQ ID NO: 57570 - DNA, 100 bp, Homo sapiens
cttcaggtgaccgtgcccttcatgtttgcaggcctgggactgtcctgggccggcatgcttctggactatttccaggtagctacagcaagctgggtagcag

SEQ ID NO: 57571 - DNA, 100 bp, Homo sapiens
gagatggcgctgctggctacctcactgcctgagggcatcatggtcaagacttttgaagatagaatgagcactgcagtttcctcctgaaggctggctccgg

SEQ ID NO: 57572 - DNA, 100 bp, Homo sapiens
aaaaatgtgcatactcacagagttagagagagggatggtggtctgtatgagctgttggctgctctgccagcccagctgcagccacatgtggatagccagg

SEQ ID NO: 57573 - DNA, 100 bp, Homo sapiens
gtgtgtggatcagcagacccccaccatccctaaccggctggctgcagacccggttgatgctatgaaactgggagtaaaggaaatgaagaaggcatacaag

SEQ ID NO: 57574 - DNA, 101 bp, Homo sapiens
gtctttaggatttgcagctccaggaagcgagatgtcgaagccgccacccaaaccagtcaaaccaggttcgagaacttgtcttggacaattgcaaatcaaat

SEQ ID NO: 57575 - DNA, 100 bp, Homo sapiens
aatcagaatttacaaagcaggataaggctgccagagtcattcagcaggcctggaaaagtttccttgaacctcagctcagcctctcaggccactcgccaga

SEQ ID NO: 57576 - DNA, 75 bp, Homo sapiens
ttagcttcgcagtctggaaagctttaggagttcacagtgtttctagatcacattaagaatgaggacagcccaggg

SEQ ID NO: 57577 - DNA, 50 bp, Homo sapiens
tcaagatggccatgtggcagggtgaccattgtgaggtagatattttgttc

SEQ ID NO: 57578 - DNA, 98 bp, Homo sapiens
gggacgcggcggcagcggcggcggcggcggccctccgctctcctacaagcttgtgtgccctgtaaccagtatgtatggtacaatatttacagcctgga

SEQ ID NO: 57579 - DNA, 74 bp, Homo sapiens
ggaagatccggcgcggggcacaggatccggagctggagcccccaggtgggtgtgtacactggcactgagctgca

SEQ ID NO: 57580 - DNA, 74 bp, Homo sapiens
gaaacacaacaaaaaagatgattgttggatatgcataagagtttgtcagaggaatggctgtgaatggatgcctg

SEQ ID NO: 57581 - DNA, 97 bp, Homo sapiens
ctttcctcggcaagaaatgtgtggccccttcacagatgtagtcactacaaatcttaaattgcgaaatccatcggatagaaaagtgtgtttcaaagtg

SEQ ID NO: 57582 - DNA, 100 bp, Homo sapiens
ggacacacctccattggatttaaaagacagtcctcgtcagcactgactttcagctatggaatcgcctctcttctagatcaagtcatgtgacaagttcttg

SEQ ID NO: 57583 - DNA, 99 bp, Homo sapiens
ggtgtttgtgtggggcctgaatgacaaggaccagctgggcgggctgaaaggctccaaggagcgagctggacgccactgtggggctctgagagtcctgaa

SEQ ID NO: 57584 - DNA, 111 bp, Homo sapiens
agaattggaagctaaagctaccaaagacgtagaaagaaatcttagcagggaccctccattttccatatccaggaaaatgtgatgcgccacaggtatcagcgtctggatcgc

SEQ ID NO: 57585 - DNA, 82 bp, Homo sapiens
aaaattgtggggccatgacacacaaaaagaaagactgctttgagatgctattaacattctgaaggagatgaaagagaaggat

SEQ ID NO: 57586 - DNA, 109 bp, Homo sapiens
gttctaagtgccttaagagaggatcgcccaatccacatgcttttccaggtgtcatggagaaactccagctgggcccagagattctgcagcgggaaaatccaaggcttat

SEQ ID NO: 57587 - DNA, 100 bp, Homo sapiens
tgcaactctgaagaatcagggacccttctcaggtgcagccagagagacactagcccactgatggacggacagacgtgggcagggtccgtgtcactaaacc

SEQ ID NO: 57588 - DNA, 98 bp, Homo sapiens
tcttcatcttacccagtggaacctaagaaattaaattctccaggatcactactcttggaatcaaagataaatccaaatactgcatatcagaaacaaca

SEQ ID NO: 57589 - DNA, 50 bp, Homo sapiens
aggaggagtattctgatcttttcagatcgagctgggagcattagtaccct

SEQ ID NO: 57590 - DNA, 98 bp, Homo sapiens
tgttactcctgccgactgcagtgctgttccgtgagcttcttgaatgacatcgtacagtatctccgacgcacagcattgttcacagtgatcttaaacca

SEQ ID NO: 57591 - DNA, 100 bp, Homo sapiens
gtgctgtaaggaagctgtgtgtgtcattgacatgtcctctttcacaaagtttgagataacaaccccaccaacaactgaacgctttggtcaggctgctaca

SEQ ID NO: 57592 - DNA, 75 bp, Homo sapiens
gaaaaatatagttctgcaccaaatgcagttgccttcacaagaagattcaatcatctgtcggaaaaggtaacagaa

SEQ ID NO: 57593 - DNA, 100 bp, Homo sapiens
tatgaagatggacctgttgaactatcagtacttggacaagatgaacaacaatatcggcattctgtgctacgaagcttagaccatgctcagcctccaagca

SEQ ID NO: 57594 - DNA, 75 bp, Homo sapiens
gttgtgtttgtgaaacagagaaagataggcggccatggtccaaccttgaagcgtccgtctccaagagagtatgaa

SEQ ID NO: 57595 - DNA, 100 bp, Homo sapiens
ggatctttccggatcaatccagatggcagccagtcagtggtggaggcctatgagagctacaagaagaaggactacacccaggtggactacttaatcaacg

SEQ ID NO: 57596 - DNA, 100 bp, Homo sapiens
ctggaggtggatctgaagaacggggacggaagaagtctatagtggctgtggagcccaggagtcttattcaaggagcctttcaaggctgctcagtgtccgg

SEQ ID NO: 57597 - DNA, 75 bp, Homo sapiens
ggcggaggaactgagacgtttcgaattccagagtattgggaaagggtcgttgtggtgcatagacccagagtatag

SEQ ID NO: 57598 - DNA, 90 bp, Homo sapiens
ccttgtctgcctcgctttctccttggccaccctggtccagcgagtgaatttgggtggtttgaaggatcacataaaggagatccagagatg

SEQ ID NO: 57599 - DNA, 97 bp, Homo sapiens
gagtacaacgaggtcaacgtcaccctggacctgggccaggagcttctggaagaggtgaagaaggaattgcagaaagtgaaagaggaaatcattgaag

SEQ ID NO: 57600 - DNA, 106 bp, Homo sapiens
aattgtccagcatgttttgaatttcctcgaagtcccaaccctttgagaggtgactggggaggaactgagggcattgatcactttcaggaaagatcaccttgaggcc

SEQ ID NO: 57601 - DNA, 100 bp, Homo sapiens
tcacggtggaaaacacagatccagagtgttactggcttacaaattggattgagatgaaacgactacaaagtgccatgacagaaggtggtgtggttctacg

SEQ ID NO: 57602 - DNA, 75 bp, Homo sapiens
catggaacagggactcactggggattctgatgctcacagtaccacctcaagtgcctccccagctcaatctccttg

SEQ ID NO: 57603 - DNA, 100 bp, Homo sapiens
aaggagctaaagcagcgtgcgttcagccctgggacagtcttgcactgtttcctaggctggagtgcagtggcacaatcacagctcactgcagccttgactt

SEQ ID NO: 57604 - DNA, 100 bp, Homo sapiens
agcgacagaaactagagacccaggagaagaaaatcattgcagacattaagaagatggccaagcaaggccagatggactcagaattcatgattgaagaaat

SEQ ID NO: 57605 - DNA, 75 bp, Homo sapiens
aagatggtgaagcagatcgagagcaagcatgcttttcacttccactgcatctctcgctggctcaaaacacgacag

SEQ ID NO: 57606 - DNA, 90 bp, Homo sapiens
ccaatgaggagaagcagcaagaggttgctgaaaagccaggagtcaaaatgactgagcgctttgactgccaccattgcaacgaatctctct

SEQ ID NO: 57607 - DNA, 98 bp, Homo sapiens
cggcttctgcctggtgctctgcgtcctcatcgggcttatgttcgagacatctccagttacagcccgaacactggaaactctgattcgactggccacag

SEQ ID NO: 57608 - DNA, 100 bp, Homo sapiens
ctcctgagtagctggaattacaggatcgtagggcatcagaaaaacaaaaagaaatagagagagtaaaagagaagcaacagaaagaactcaataaacaaaa

SEQ ID NO: 57609 - DNA, 75 bp, Homo sapiens
aggagccgcgggcggcgcggcccagctcgttccagaagagccgaatgcacataaggtcgccagcccaccctccgg

SEQ ID NO: 57610 - DNA, 100 bp, Homo sapiens
tggggctgctctcggccctgcctctggctgtggaaacaggcctccaagtacccaagattcaaccctatgaaaagataaaggccaggggcttgcctgataa

SEQ ID NO: 57611 - DNA, 83 bp, Homo sapiens
ctcattaccgtcgccagcggagcgaacccgagagcgtggagcgggctgggccaggtttactcctggcttgggggcattaggaa

SEQ ID NO: 57612 - DNA, 100 bp, Homo sapiens
ttgggttgccttaagtgagaaatcagcatggctcaggtcagggagtggtaaaaccgtttcaaatgtgattacagagtcacacaattctgacaatgaagag

SEQ ID NO: 57613 - DNA, 80 bp, Homo sapiens
cgcgtgcgcctgggggcaccgctgccgttccgaggttctgcggggagtgtctccagccctgcctgcaggtgccatccccg

SEQ ID NO: 57614 - DNA, 100 bp, Homo sapiens
agacgatctgcacttcgcattttggcattgacatttaattttagggtcctttatatagaagggagagtaggttatttcttatgagggtcatggatatccc

SEQ ID NO: 57615 - DNA, 100 bp, Homo sapiens
ttcgggccgtcaccctgcctcccctgcgtcccgccaccggccgcttctgtcctcggccggtctaattgaagccaacggagaactcaaggtcttcatagac

SEQ ID NO: 57616 - DNA, 114 bp, Homo sapiens
gtcattcttctctacagaagagcttctcctcatcaactggggatgattacagttcttcctaaaaaagcaatggctgccatccggaagaaactggtgattgttggtgatggagcc

SEQ ID NO: 57617 - DNA, 98 bp, Homo sapiens
acttcctcagccacatccccatcaccctgttcatggacctgcaggcggtgctgccgcgcgagctctacccagtcgagcacctccttttgtggctcggg

SEQ ID NO: 57618 - DNA, 73 bp, Homo sapiens
tgagcccggggatggcgcgccaggtgactcgaaaagccctgtttcctggtgactctgagattgaccagctctt

SEQ ID NO: 57619 - DNA, 86 bp, Homo sapiens
cgaatatcgtcatcgttagaaggccaaccccttcaaggagcgaatctgcagggtcttctccacatccccagccaaagacagcctta

SEQ ID NO: 57620 - DNA, 74 bp, Homo sapiens
ctgtctccaaacatacattggtggatccttcccaattgtcaggctttcgccaaggtcttcaacacaacccctga

SEQ ID NO: 57621 - DNA, 100 bp, Homo sapiens
gggaataataagtcacaaagggaggagctggactccatcctcttcctttttgaaggccatgctatgatagtggaagcttatccaaaataatagatccaga

SEQ ID NO: 57622 - DNA, 100 bp, Homo sapiens
ccttgactccatcgggcgcttctttggcggtgacaggggtgcgcccaagcggggctctggcaagaacaccttccaccatgaccacctcagcaagttccca

SEQ ID NO: 57623 - DNA, 90 bp, Homo sapiens
cacagctcatcatgatggacttggagctgccgccgccgggactcccgtcccagcaggctcctatggatattccaggtttaaacctgagtc

SEQ ID NO: 57624 - DNA, 75 bp, Homo sapiens
tctacctgacgggcctgcgagggttgaagattgtgaagcaatagcctaagaacaaagaactttgagtctggcaag

SEQ ID NO: 57625 - DNA, 98 bp, Homo sapiens
ggaaatggaacatacgggcaagtttataaggatttggagttccatggagtgatgagattttattttcaagataaagctgctggaaactttgcaacaaa

SEQ ID NO: 57626 - DNA, 50 bp, Homo sapiens
ccgccaaccccttcgagcaagacgtgggtctgccatcatggatgttctcg

SEQ ID NO: 57627 - DNA, 101 bp, Homo sapiens
tcggtggactccttcggcagtccacccaccgccgccgcctcccagagtgaagacatttccacctggacacctgaccatgtgcctgccctgagcagcgaggc

SEQ ID NO: 57628 - DNA, 75 bp, Homo sapiens
agttgcaccagtgcagggacagcagcaatttcagaggctgaagtctccggagtagagatgaagagagaatttcta

SEQ ID NO: 57629 - DNA, 100 bp, Homo sapiens
gggacctagtggcccagtggaagaagctggttcctgtggaacggcgccctggagatcgggcaggccctccccatccacgcaggccgctacacctgctcag

SEQ ID NO: 57630 - DNA, 123 bp, Homo sapiens
cggggccctgctgggctgcctctgcctggcgttgctttgcctgggcggtgcggacaagcgcctgcggttgtactcagactatctctactttgcaagttcgaataaatccgcggacgacttcca

SEQ ID NO: 57631 - DNA, 74 bp, Homo sapiens
tctggatttccaaggaagaatttcctctgaagcaccggtgtacgaagccatcgacagcagagatggagcatctt

SEQ ID NO: 57632 - DNA, 90 bp, Homo sapiens
ttcatgacatcatccataccaaggagacgctgacacttgtgtttgaatatgtggtggataagattgtggaccagctgcagcagttaatgc

SEQ ID NO: 57633 - DNA, 83 bp, Homo sapiens
ggggactgcacgtagcccggcgctcggcatggctctcctggtgctcgtggccataaaatgcagtaaaaacaaatccagttccc

SEQ ID NO: 57634 - DNA, 100 bp, Homo sapiens
caggatgtggagtggacttcctagcagaggccgagacgcatccagagctttcgtgaccggggactgttctgaagcaggcctcgtggatgacgtatccgac

SEQ ID NO: 57635 - DNA, 100 bp, Homo sapiens
cacaaaattactattgataccaacaaatctccagtcagtcttcttagtctcttcccagctcggattctgaaggtaattttgagactcctgaagctgaaac

SEQ ID NO: 57636 - DNA, 75 bp, Homo sapiens
aggacctcctcccccaggctttaagtctgagttcacaggtgtggatgaggtcaccattgtcaacattttgaccaa

SEQ ID NO: 57637 - DNA, 100 bp, Homo sapiens
ctttccaagaggaatcctcggcagataaactggactgtcctctacagaaggaagcacaaaaagggacagtcgggcacaagagactatagtccccggcaga

SEQ ID NO: 57638 - DNA, 98 bp, Homo sapiens
ttacttactttattcccgattggagacaggaccaaagatgatgtctttctacctaaagatattgacctagacagtgtggatatggatgagacagagag

SEQ ID NO: 57639 - DNA, 51 bp, Homo sapiens
cttcttagtgtagttgaagatcataaagagaggaggggataccaactggag

SEQ ID NO: 57640 - DNA, 97 bp, Homo sapiens
ctcttgattatgatagttcagatgacagtgattttaaagttggagatgcctcagaagtgcctagctgccactccatttatatgaggcaagaaggctt

SEQ ID NO: 57641 - DNA, 82 bp, Homo sapiens
tggaagcagaagaagctgaggatgaagaagatgaaacattgaatgaggaggataaagcaaagattgctaaaagcaagaagaa

SEQ ID NO: 57642 - DNA, 100 bp, Homo sapiens
ctgatgcagcttgtggaccacagaggaggcggcggaggcggggctccactcgcgccggacacagggagcagcgagcacgcgtttcccgcaacccgatacc

SEQ ID NO: 57643 - DNA, 100 bp, Homo sapiens
gcaagaggtactgtccatcaaacatcttccaccacagcttagaggaatcagtgacattcaaagatgtgtctgtggacttcacccaggaagaatggtacca

SEQ ID NO: 57644 - DNA, 95 bp, Homo sapiens
cctcctgctatatgtcggatattgaatttgagttgtgtaatggaacaactagatgttggtattgttccatatattgtccttttagttgttcctgt

SEQ ID NO: 57645 - DNA, 100 bp, Homo sapiens
ccgcaacctggccattgtctgggcacccaacctgctacggtggtgttatcaaggagaagaaattcctgccttgaccagatgtgtggagcatctacaaatg

SEQ ID NO: 57646 - DNA, 74 bp, Homo sapiens
accacaaaagcgaaatgggcacaccacagaatacagattctgttcatcttgctctgaaattaaataattctgaa

SEQ ID NO: 57647 - DNA, 83 bp, Homo sapiens
aagaaggagaagcagctgcggaaaatgctagaagacctgcctagagctggaacgttacctccagagcgagccctgctatgttt

SEQ ID NO: 57648 - DNA, 83 bp, Homo sapiens
ctttgacaatacaggaaatgtttgaactgtggctgcaccatctgtcttcatcttcccgccatctgatgagcagttgaaatctg

SEQ ID NO: 57649 - DNA, 74 bp, Homo sapiens
cttccgtatctgcctaggcattttgctgtctcctcctaatacgcaaggaagatgtccgagcaactgaaaaagac

SEQ ID NO: 57650 - DNA, 100 bp, Homo sapiens
gcagccggccttcgggtcgggcgtctccgccggctactgccgcttcagttctcccggtgtggccacgagtcggttatattctactctgaaagaaggcaac

SEQ ID NO: 57651 - DNA, 90 bp, Homo sapiens
cagtgctgagccctgggccaggatgggaggcaagaggaccaagaaggagagacatccaggagacagcaaaaactataatgaatgtatccg

SEQ ID NO: 57652 - DNA, 82 bp, Homo sapiens
gctgatgtggatgcagcagataaccggaaaatcacacctcttatgtcagcatttcgcaagctggaacagatggtgatcaaaa

SEQ ID NO: 57653 - DNA, 133 bp, Homo sapiens
ctcagcggcggcggaagcggagggggaccaccgtggagagcgcggtcccagcccggccactgcggatccctgaaaccaagctcctcctcagccatcctggccgtgctcagtcatctgaccagctgacctccgt

SEQ ID NO: 57654 - DNA, 82 bp, Homo sapiens
tcgggcgccccgcagccccccaacatcctgctcctgctcatggacgacggtttccaggcctgaggtgcccgccctggcccca

SEQ ID NO: 57655 - DNA, 100 bp, Homo sapiens
ctggaggagtgaagaactttgccgaagtgctcctgtcctctcagctgtggccaccgtcggcatcacgattggagtgctggccagggtggctctgatatag

SEQ ID NO: 57656 - DNA, 90 bp, Homo sapiens
tgccagcagcttctccaaggcacgggaggaaggcgttcccacagctgtgcagaacttagcgccacgcgctgctgttgctgctgctgctcc

SEQ ID NO: 57657 - DNA, 76 bp, Homo sapiens
gaagtatgtcaccgtcagtatcccaaggtggtgaagcagtattttccaatttgaagattcatttgaaggtggctcc

SEQ ID NO: 57658 - DNA, 82 bp, Homo sapiens
agcgtcgggattaggtgaaattttcggctttgtgagaaaccttaccatcaaacacgatggccagcaacgttaccaacaagac

SEQ ID NO: 57659 - DNA, 75 bp, Homo sapiens
cctgttcttcgcctattattgggatgacaacttcgacccaggtgctggagaatctggtaaaagcaccattgtgaa

SEQ ID NO: 57660 - DNA, 98 bp, Homo sapiens
cggagccaggctggtttcggaaatgcccttacagcagcaggaattggcagcaatgaaacagattctcgttaagatgcatagtaaacattctgagaaca

SEQ ID NO: 57661 - DNA, 74 bp, Homo sapiens
tgaccaagaacgtgagcaagcccaggcacagccgacgccgcggggctgaccaactgactgaagagcagattgca

SEQ ID NO: 57662 - DNA, 74 bp, Homo sapiens
cgccagatcatcggtcaggccaagaagcatccgagcccgttggacataccagatggtcgaagagctccacttcc

SEQ ID NO: 57663 - DNA, 83 bp, Homo sapiens
acttgagcatcactagactgatctattttaacactggtggggggcagcgaggtgtcgtgaaaactacccctaaaagccaaaat

SEQ ID NO: 57664 - DNA, 101 bp, Homo sapiens
agagtggacggtgtgagggggaccgggagaggcaccaaatctggcctgggggcccgagaagcttcctctcagggtctccaactgaattccttgaagagaaa

SEQ ID NO: 57665 - DNA, 100 bp, Homo sapiens
aaacacagctcgacagtacgcctacttctataaagtcatccagaaatatggctacacacacctttctgcaggagagctgcttcgtgatgaaaggaagaac

SEQ ID NO: 57666 - DNA, 98 bp, Homo sapiens
ggtattcggcatgcaggcgcgctacagcctgagaggttttgcacactagggaccaagaagccctcggggacactgctgagaaaagactgccgaaggga

SEQ ID NO: 57667 - DNA, 75 bp, Homo sapiens
ggtgttctgcaaagactgcaggaaggttattgcagctgactgcaaaagggtcacagtgctgaagtattttctgga

SEQ ID NO: 57668 - DNA, 100 bp, Homo sapiens
tggaacagatgacagagaaagagagagagcaagaactgttcaatcgcatagagaagagggaggtgttgaaaagaagcctccagacccagggacgggcgat

SEQ ID NO: 57669 - DNA, 75 bp, Homo sapiens
aagttgttcattgtttgtcaccacaaaaaggacagggtgcaaatagctatgggcaacttggcctcggccataagg

SEQ ID NO: 57670 - DNA, 50 bp, Homo sapiens
ttcagccctttgatgaccgcagcagagtggagactgctgcacggactctg

SEQ ID NO: 57671 - DNA, 51 bp, Homo sapiens
gacagttcgctacacagcaatgcatcgagtgaggtgctggcggaggagtcc

SEQ ID NO: 57672 - DNA, 75 bp, Homo sapiens
ctgcgctatcttccctggatttttcttcaccttttccttactcatgagccagattgctcgctgtaagcagctcat

SEQ ID NO: 57673 - DNA, 82 bp, Homo sapiens
ctgctgccttcccgtcgccgctcccgaagcttttccaggtttggtgcacctcgatttggaggaagtagggcagggcccttat

SEQ ID NO: 57674 - DNA, 74 bp, Homo sapiens
ccgctgtccaggagctctgctctcccctccaggtgggagacctacctgatgcagatattaaacctccagaaaat

SEQ ID NO: 57675 - DNA, 88 bp, Homo sapiens
ccaactacccattcatcaacattcggtcaagtgaaccacacgatgagccagcacgcacagtgagggatcgctcaacaggacacctctc

SEQ ID NO: 57676 - DNA, 100 bp, Homo sapiens
gaaaaatgctaacaacagcttcacgaattccatacgacataatctgtcattgaacaaatgtttccttaaagtgcctcgatctaaggatgaccctggaaag

SEQ ID NO: 57677 - DNA, 75 bp, Homo sapiens
tgtttctcacatttgtttcattgaagaaatagttaagagctccttaataagcatttatagtcagtttttggcagc

SEQ ID NO: 57678 - DNA, 50 bp, Homo sapiens
actgaaggcatccgtggttgtttttaagggatcagtgtccttcagtgatg

SEQ ID NO: 57679 - DNA, 83 bp, Homo sapiens
gcacagccgcggcggcagcagcagtgagaggattgaaagaaggtggcaagaggaagaagcagaagcagagagaggagtcgaag

SEQ ID NO: 57680 - DNA, 120 bp, Homo sapiens
tttgacgtccagaagaccaagtacctgcagatcctgacctctctgatgagatggatcgcacccaccaaggctccggatgtgttccccatcatatcagggtgcagacacccaaaggataac

SEQ ID NO: 57681 - DNA, 100 bp, Homo sapiens
cgtgaccgagagcgtgaccgagagcgcgaatatcgtcatcgttagaaggtaaaggttgacttaattgaactctctgaaaaatgctgtagtgactttgatt

SEQ ID NO: 57682 - DNA, 99 bp, Homo sapiens
cgctagggaagatcgcaccgcggacgcccgctgagcttggcgcacgggccgaccagatcatgatgctgccgccaccgccgccaccacggagcgagaagc

SEQ ID NO: 57683 - DNA, 50 bp, Homo sapiens
gtcgccctcaaggccatgatcaaaactggctcacaggcccggggcattca

SEQ ID NO: 57684 - DNA, 83 bp, Homo sapiens
cttcacctgcagaagcgtgtcgttctgcaccagcgccttgatcgagtacttgaggagcaggccgggctctcgccatgggtcac

SEQ ID NO: 57685 - DNA, 100 bp, Homo sapiens
caattggaaataaacctgtggagactatcggttttgactctattatgaaacagcaaagctaggtcttgactccactaacggggacttctcatacggcttt

SEQ ID NO: 57686 - DNA, 82 bp, Homo sapiens
ttaaagtctctcttcaccctgccgtcatgtctaagtcagagttggctggagttgtcttccttggagtcgggctgtgggcatg

SEQ ID NO: 57687 - DNA, 100 bp, Homo sapiens
gtgctctctagaaagcccgttttggcctgagtgcggctgaggacatcaccccccggttcaggtaccccaagctggcagctctgaaccctgagtccaacac

SEQ ID NO: 57688 - DNA, 90 bp, Homo sapiens
ggtttccaagcaacaatcagtgctccacacatgatgaccgcacctcgagcaggagtggggatgccacgtctgcccccagcgcccggccct

SEQ ID NO: 57689 - DNA, 99 bp, Homo sapiens
cagcgcggctacctgctgacacggaaccctcacctcaacaaggtacctttaaaacagggcagaagccttatggattggattcgactgaccaaaagtgga

SEQ ID NO: 57690 - DNA, 100 bp, Homo sapiens
tgataaggaaaatggagaaccaggcacccgtgtggttgctaaggatgggctgaagctggggtctggaccttgccatagtgtatgaaggccaagacaagaa

SEQ ID NO: 57691 - DNA, 100 bp, Homo sapiens
cttgggggtcgagcacataacggggttcgggtgtctcgtgtgtgaacatcacagtcttgtgaaaatgccattgtgtgctggaaacctggcaagatggaag

SEQ ID NO: 57692 - DNA, 89 bp, Homo sapiens
agcatgaaggacatgcgcaaagttctgagaacattacagcagatcaagaaatccagctcaaccacctgtctttaccagtttccaagact

SEQ ID NO: 57693 - DNA, 74 bp, Homo sapiens
gctaccgagttaccctaagaaaggtgttgccacatctgcaaacttcctgggagagtaatggggattcgagtgct

SEQ ID NO: 57694 - DNA, 90 bp, Homo sapiens
ctggcaaacagtgtttgcctctggttcagctcatacaacagcttcttagatgactcaaggagaactacatctagtgctgtaacggaaact

SEQ ID NO: 57695 - DNA, 78 bp, Homo sapiens
aagaatctcatcttggcaggagtgaaaggactgaccatgctggatcacgaacagaaacctctgcgccatgagagccaa

SEQ ID NO: 57696 - DNA, 100 bp, Homo sapiens
gcgtaagaagcgactactagacagaaaggggcagccattttggggggtgctgatggatacctgcggggtcggctatgttgccctgggggaggccggcccc

SEQ ID NO: 57697 - DNA, 100 bp, Homo sapiens
agtcgtcacttcgggcacaagtgcccttcgagcagattctcagccttccagagctcaagacgccacaggtcatcatctggatcatcccattctggttccc

SEQ ID NO: 57698 - DNA, 100 bp, Homo sapiens
gtctcccagcgtggatgagggcgcctgcagatcccggctagggcacggaccgcctaggccgagactggatacacgtctgtttaactacgcaaaaggtaat

SEQ ID NO: 57699 - DNA, 100 bp, Homo sapiens
cctggtacgagcccggaacattcttcacaagaaaggactacaggaatatgtggaagctgtctcttttcaacacttcatcaaaacacgatcattaattagt

SEQ ID NO: 57700 - DNA, 98 bp, Homo sapiens
agagctcggcccgagagctgcggccacttctcgttttcatctgggccaagatcctcgcagtggacagcgtactccaaagattcaggtttactcacgtc

SEQ ID NO: 57701 - DNA, 100 bp, Homo sapiens
agaatgcatcagtgcccttgtggcgaatggggctcacgtcgaggcatttttggtcgaagagagctgaagtaatgagaagacatcatggaggcccagtccc

SEQ ID NO: 57702 - DNA, 82 bp, Homo sapiens
tctggaaaaacttcttgccaaccaaattcacttcttcaactgagatggacatgatataatctccattgagtcaaagaatggc

SEQ ID NO: 57703 - DNA, 100 bp, Homo sapiens
gtggacagcatggaccgcggcacgctccctctggctgttgccctgctgctggccagctgcagcctcagccccacaagattactacagcatcccatttccc

SEQ ID NO: 57704 - DNA, 83 bp, Homo sapiens
cctgaacctgttatcacctggagacaccttacaccaactggttgagcaatgtttaaagcgtttgaaaaacatgaatttggagg

SEQ ID NO: 57705 - DNA, 83 bp, Homo sapiens
gagcgagcccgaggacatggagatggaagacaatgcagatcttcgtgaagactctgactggtaagaccatcaccctcgaggtt

SEQ ID NO: 57706 - DNA, 51 bp, Homo sapiens
gcccaggacttcggaactagacgagaaatggaatctatttggaatttgcag

SEQ ID NO: 57707 - DNA, 50 bp, Homo sapiens
cgggccggcgctggggtaagaagatgtcatcctcaaattccgggacaaga

SEQ ID NO: 57708 - DNA, 103 bp, Homo sapiens
gaacaacccgttcttgcctcaggccagtcgcctccaggccaagagggatccttcacccgtgtctgcatccgcagtgtcatgcagaagtacctggaggaccggg

SEQ ID NO: 57709 - DNA, 82 bp, Homo sapiens
gcaatttgttaggccttttgttgtatttaatttttggaacaatttgatgagctaggagggttgttatgaggctcaaaggaac

SEQ ID NO: 57710 - DNA, 90 bp, Homo sapiens
ctaatccaagcaataacccaagcaaaacttcagatgcatgcgcgtcccgggacgactggcgctgtgcgcgctccatgcacgagttttccg

SEQ ID NO: 57711 - DNA, 75 bp, Homo sapiens
atcatgtgaaatgtgtaaagatgctcttagggagggacattgcttgggcctccagactctgtggttgatgtgggg

SEQ ID NO: 57712 - DNA, 75 bp, Homo sapiens
tcaggcacactacagaactaaatatgcatgaagtcctggctgagcaaggttggaagccctagttctcgcattgac

SEQ ID NO: 57713 - DNA, 100 bp, Homo sapiens
caggattcagaaatcatggaaagcaggatgctcaagaattccttcgatgtttaatggatttgcttcatgaagaattgaaagagcaagtcatggaagtaga

SEQ ID NO: 57714 - DNA, 51 bp, Homo sapiens
caaatatgtggacctgtacaaggagtccagctacttgctcttttagttccc

SEQ ID NO: 57715 - DNA, 74 bp, Homo sapiens
gaccgccggccgggggacgagctcggagcagcagccaggcgccatgtcagaaccggctggggatgtccgtcaga

SEQ ID NO: 57716 - DNA, 96 bp, Homo sapiens
tctttatcctgctggggctgcgacagaagaagcccaccatctccgtgaaggaagactggggcagcacctactccgtgtcagtggtggagaccgact

SEQ ID NO: 57717 - DNA, 82 bp, Homo sapiens
caggtgcaaaggccctgaggctggaacaggcatggtatcatgatattagctggtttgacatcaagtcatttgtgagtcatca

SEQ ID NO: 57718 - DNA, 75 bp, Homo sapiens
ggggggcctggccgcgcagccgaactgccattggatgtccagaatcccctgtagttgataatgttgggaataagc

SEQ ID NO: 57719 - DNA, 88 bp, Homo sapiens
cgggcaggatgaaggcagagcgtgtggcatctccacctcaaggaaacgggcctgaatttgaagctaggatccgacagaacgagatcaa

SEQ ID NO: 57720 - DNA, 100 bp, Homo sapiens
tgctttttgatggccatggcataaggaactctatcccaggaatacagctttgcattaggatgcgtattggatagcaatgaatagttctctgaaatgtaaa

SEQ ID NO: 57721 - DNA, 105 bp, Homo sapiens
caaatcctagcgaatttttggagcatctccacccaggaacctcgccatccagaagtgagaagccctaccactgcaactgggacggctgcggctggaagtttgcgc

SEQ ID NO: 57722 - DNA, 100 bp, Homo sapiens
aagagaagtcacaaaacagcagatttcccaagagcagcggaaaatgatccagtcacagacttaattcagtgcacaaatgagatgaatgtgaacatcccac

SEQ ID NO: 57723 - DNA, 90 bp, Homo sapiens
ccatgaagcagtgggaagtcactagcagtagcaggacccagtgctccataaaggataatagtttccagtacactatccctcatgatgact

SEQ ID NO: 57724 - DNA, 83 bp, Homo sapiens
gagagaaatatatgatcagtttggggaggaagatgtattcttggggaactattcacaaagaagcctatttttcaagccaatct

SEQ ID NO: 57725 - DNA, 87 bp, Homo sapiens
agacctcctcctccacaggggagacagagatattgatgatgttaagaagttcaaaccgggttacctggaagctactcttaattggtt

SEQ ID NO: 57726 - DNA, 100 bp, Homo sapiens
tgcagatgcagtgtggctctggatagcaccttatggacaggtaggagcaacggtgggaatgccctctgaggaatgcagtgatgtccatcagtcacctctc

SEQ ID NO: 57727 - DNA, 84 bp, Homo sapiens
gctaaagcagcgtgcgttcagccctggggtatggcctcacaagtcttggtctacccaccatatgtttatcaaactcagtcaagt

SEQ ID NO: 57728 - DNA, 100 bp, Homo sapiens
tgagggagcagcggaggaaggaggagcagcagactcggacgtggacgcctttttccggacaggttaacttggataagctgaaggaaagagctcaaagatt

SEQ ID NO: 57729 - DNA, 100 bp, Homo sapiens
ctgtggctttgacatcaacaagactttcatattctctgacctggactacatggggatgcttctggctggcacacctggcttcccctccatgctcagaact

SEQ ID NO: 57730 - DNA, 59 bp, Homo sapiens
gatggaccaccagatccaaagattgcacctctgcctccacctcccctactaccaccttt

SEQ ID NO: 57731 - DNA, 90 bp, Homo sapiens
cgcagagcagctgatccaggaagcctgtcggagctgcctggagcagatattaataaggcagcggaaagaagaaatatgaatacggctcca

SEQ ID NO: 57732 - DNA, 80 bp, Homo sapiens
tgcagcactggtggaacttgaggtacactgatgctgaagtactatgagccttcggaacttgtggagagactacaaagttt

SEQ ID NO: 57733 - DNA, 75 bp, Homo sapiens
ctcttctgggcacaccccacccacctgtggccagtttgctgctttgtggtgcacaagcggtgccatgaatttgtc

SEQ ID NO: 57734 - DNA, 90 bp, Homo sapiens
ttcagagtgatagtttgtggcttgtagaattctatgctccatgctacgtgtctctctgtgataatgaaaagacaggttgcaaagcccggg

SEQ ID NO: 57735 - DNA, 101 bp, Homo sapiens
agaccatcatgctgcgcggccttcccatcaccatcacagagagcgatgtttggcaaatacgtgtagacctacatttattaaatcatgatggaaatattatt

SEQ ID NO: 57736 - DNA, 101 bp, Homo sapiens
cggcaagtaacatgactaaaaagaagcgggagaatctgggcgtcgctctagaggtgccagatcggctagggatactcactcacctgtatagggactttgat

SEQ ID NO: 57737 - DNA, 74 bp, Homo sapiens
atttacgcgcacgttggaaccgaagagagctctgttgttgcagaatcatgggtaaagaaggaagacaggctgca

SEQ ID NO: 57738 - DNA, 82 bp, Homo sapiens
ggcggaggcagaggtggaggcgctttgaaagatgtgaagttcatttccaatccgccctccatggtggcagcggggagcgtgg

SEQ ID NO: 57739 - DNA, 82 bp, Homo sapiens
tttttgaaatgggctgggaaaagccatctcctattcagatccctgaatattgccgagccttagaagagaatgaaatatctga

SEQ ID NO: 57740 - DNA, 100 bp, Homo sapiens
gctgtgctctgtggccccctacctcccagtgtccccagccccaaatctgctggtgccagtggcagcaaagatgctcctgtccctggtggtcctggccctg

SEQ ID NO: 57741 - DNA, 100 bp, Homo sapiens
tctgggaccgaaccagcatggggagtcggaaggggacaaatccgcgatcccagtcatgcatggactgttgacatttagggatgtggccatagaattctct

SEQ ID NO: 57742 - DNA, 101 bp, Homo sapiens
ctcgcctttgccgatccgccgcccgtccacacccgccgccagggtccctcaggctccctatcagcccctccagctgcctcagttatctctgcacccccatc

SEQ ID NO: 57743 - DNA, 50 bp, Homo sapiens
cacctatcagcactgaaaactcttttgccaagacccatgttcttgacatt

SEQ ID NO: 57744 - DNA, 100 bp, Homo sapiens
cgatccagaaggcgtgcatacctgtgggtctattggggaaggacatctgtgcctgtgcagccactgggacaggtgctgccaaataccgccagatcctaca

SEQ ID NO: 57745 - DNA, 100 bp, Homo sapiens
ctataatgggtatggaggaggacctggagacacttcgtgtatgatcatgtgttcgctgagaagatcacttccttgcaaggtcagccaagccctgatgaag

SEQ ID NO: 57746 - DNA, 101 bp, Homo sapiens
gtgaattggaagtttttgctaaagtactgagagctttggataaaagtatgagcccagaggacctggtcggcccttgtaccaaagaagaatctcatctagct

SEQ ID NO: 57747 - DNA, 96 bp, Homo sapiens
ccgggatagagaacgggaccggcaccactgagaaagcgtcactggtgtaccgcctgccccagtcgtgggtggggcccaaactgccctggaaactcc

SEQ ID NO: 57748 - DNA, 100 bp, Homo sapiens
gcggcttaaatgatgtattttgtgatcgcagcgatgaaaggttcatgatcaagagggcccaaggacggaagcgctttgggatgaagaattttaagaagag

SEQ ID NO: 57749 - DNA, 75 bp, Homo sapiens
tctccacttaatgactgtctcacattggccggcaacttgttccaggatggaggttctctggatcaagtcctgaag

SEQ ID NO: 57750 - DNA, 100 bp, Homo sapiens
gagacgtcgaaggccccttctgcctgatggcacattcagctcctgtaagaaggctttcttcgagagtcacccagctccttcagctgagcgtaccatccag

SEQ ID NO: 57751 - DNA, 75 bp, Homo sapiens
gcacaggaatctcactctgttaaagctggtctgttctaactgaggcgtggtgaccaagatgaagatgcagaggac

SEQ ID NO: 57752 - DNA, 82 bp, Homo sapiens
ggcgatcaaggccaagtatccgccagtcaataggaagtacgagtactgcttttcaggaagccttggacgctgcaggtgataa

SEQ ID NO: 57753 - DNA, 101 bp, Homo sapiens
cagaggggagcccgcagacttgagcgatgcatcaaagagctgacctatcagtctcaaaccatgaattatgtgggacagctggctgggcaggtgattgtcac

SEQ ID NO: 57754 - DNA, 98 bp, Homo sapiens
tttaccagtgcatcaggcctgaccccaggtcaactttgtagtgtgccaactctttgccttgctagcagccatttggtttcgaacttatctacattcaa

SEQ ID NO: 57755 - DNA, 100 bp, Homo sapiens
ctccccaaagtccctgactcccgtgtggcgtttatagagtctctgaagagagatgaccaagcgagacgtgcctggcttcgccatcgggggcctgagcggg

SEQ ID NO: 57756 - DNA, 75 bp, Homo sapiens
gcgcctccatctgggccatggatgggtatagctgtggaccaactgtatatgatcatgcgcaccttggccatgctt

SEQ ID NO: 57757 - DNA, 98 bp, Homo sapiens
tcagccaagttccccaacggctccccgtcgtcctggtgctgcagcgcgggctgacgcacgaggcacacaggaaggaggtggagcaggtgtatctgcgc

SEQ ID NO: 57758 - DNA, 112 bp, Homo sapiens
ctccgggtcttccagagcgtgaagatcaagatcgcttcgagagctgtgcccaggagtgaacaaccagccctacctctgtgagagtggtcactgctgcggggagactggctgc

SEQ ID NO: 57759 - DNA, 100 bp, Homo sapiens
ggagggcttacgggtgatgggagaagtcggtcaccacgtacttgaactggctggttcggatgtcatctgaaatggaaaccaacatcgtggccgtggagag

SEQ ID NO: 57760 - DNA, 100 bp, Homo sapiens
agaaggagaacctgaaggctgcgcaggaggagtatgtcaagcgagccctgccggccaagagccactgcacaatgaggagctggcaggagcaggccgggtg

SEQ ID NO: 57761 - DNA, 97 bp, Homo sapiens
acttgtggatttgccaggaatgaccaaggggatgtatggcattgagaatgaagtcttcctgagccttccatgtatcctcaatgcccggggattaacc

SEQ ID NO: 57762 - DNA, 51 bp, Homo sapiens
cacagttgaagcctgattgcaggtaaagtgttgagagaggagaaccagtgc

SEQ ID NO: 57763 - DNA, 95 bp, Homo sapiens
ctggaagacatggccactccagtcggtgttgagcacggcgagcagtctcaggcctttagtgatgatgagatggagtttcactgtgtcagccagga

SEQ ID NO: 57764 - DNA, 79 bp, Homo sapiens
cggcggcggctgcggtcgaagaaggggacgccgacaaggtccctgagtgccagaggtggtggtgttgcttatcttctgg

SEQ ID NO: 57765 - DNA, 82 bp, Homo sapiens
tttcacccaacgttgtcaatttgacacttgtggatttgccaggaatgaccaaggtgttaaaaagtaatcgaagtacgaagag

SEQ ID NO: 57766 - DNA, 112 bp, Homo sapiens
ggatcggattttggaggcattgaagctgctgctgagcccgggagagtacccaaaggcaagtggaacagctctaatggggttgaagaaaaggagacttgggtggaagaggatg

SEQ ID NO: 57767 - DNA, 90 bp, Homo sapiens
cttcagattattaaggaatcccagcagcagcatggtttacggcatggagattttcagaggtacaggaggcatccgctcgacggcgggaga

SEQ ID NO: 57768 - DNA, 100 bp, Homo sapiens
ttagagtcttcctgcccaacaaacagaggacagtgatggcccctgagttctgcagcctcgaggaaggcctgccctatctggacatggtgattgcagagac

SEQ ID NO: 57769 - DNA, 100 bp, Homo sapiens
attaccatccagaagtgtctcccactgaaggcatccgtggttgtttttaagaatggagatgaggcgcctggtgtttggatgatcccaacttcagatccag

SEQ ID NO: 57770 - DNA, 100 bp, Homo sapiens
gggagaggcctggaggacaccaacatgggaaggtattcatgtaaatcaagaattactgcaaatatctccttgtatcacagagcagttcattgagctgttg

SEQ ID NO: 57771 - DNA, 75 bp, Homo sapiens
gcggatctggaggagcagttgtctgatgaagagaaggccgttgatgctcactgccatcagctgcatcctccctat

SEQ ID NO: 57772 - DNA, 98 bp, Homo sapiens
cagaactgccagccaagatcctggttgagtttgtggtgattattccttgggcctgaatgacttgaatgtttccccgcctgagctaacagtccatgtgg

SEQ ID NO: 57773 - DNA, 90 bp, Homo sapiens
tatagagctaattacaactttcggggcatgtacaatcagaggcaattaagttggaatatgcaaggttggttaagttggcccaagaagaca

SEQ ID NO: 57774 - DNA, 82 bp, Homo sapiens
tcggcagccttgcgctgctctaatggtccggacttccgtgtaacccagtgacttgattgtaaaaatttacagagcggaatca

SEQ ID NO: 57775 - DNA, 75 bp, Homo sapiens
ttgacatttaattttagggtcctttatatagaagggagagtaggttggctctgactgtaccaccatccactacaa

SEQ ID NO: 57776 - DNA, 101 bp, Homo sapiens
gaagccttgaaaaagctgccctgagacggtgtcccgccgaaaggatttttcaagccacattcaattgataggatgaaaaaatttaagagaaggctatccct

SEQ ID NO: 57777 - DNA, 100 bp, Homo sapiens
cttcgagaagatccctagtgagactttgaaccgtatcctgggcgacccagaagccctgagagtttagatgcaaaatccacaagtattcaagtgattgtta

SEQ ID NO: 57778 - DNA, 100 bp, Homo sapiens
tggagtgtgcgccgggcaggcgggacatggaggtggtggacgagacggaggcgctgcagcgcttcttcgaaggtggagccgccaccaaaatgcagatttt

SEQ ID NO: 57779 - DNA, 88 bp, Homo sapiens
ggtgcaggaaggcagtctttgctacgtacagcaaaaggccagaagcggactcctagaagaggggagcagcaaggatggaatgacagcc

SEQ ID NO: 57780 - DNA, 80 bp, Homo sapiens
ccgggacacctggaagccgagaaatgggcagagcggcttgggtaaatccaccttaatcaacaccctcttcaaatccaaaa

SEQ ID NO: 57781 - DNA, 98 bp, Homo sapiens
ccggggccgcctcctcccgcacggacccatgaaccagccgggcggcgcggcggctccgcaggttcgagaacttgtcttggacaattgcaaatcaaatg

SEQ ID NO: 57782 - DNA, 95 bp, Homo sapiens
attgacacctactgcgagcagaaggagtgggccatgaacgtgggcgacaagaaagactgctgagaaggaagaatttgaacatcaacagaaagagc

SEQ ID NO: 57783 - DNA, 75 bp, Homo sapiens
ctgcgtggagttcagttacccggagctgctgctgtgcggagaacaacgggtattccagcgtcttcaggaaacagt

SEQ ID NO: 57784 - DNA, 100 bp, Homo sapiens
ggcaaagcgcaactccttgaaggaactgtggcttgtgatccatgggcgagtctacgatgtcacccgcttcctcaacgagatgtgtcttgctgaatcaggg

SEQ ID NO: 57785 - DNA, 75 bp, Homo sapiens
cactttctaacttgattggaattaggaaagggttaatgcgagatgatacaatatacgaggatgaagatgtaaaag

SEQ ID NO: 57786 - DNA, 82 bp, Homo sapiens
ggaaccctggtcaccgtctcctcagatccactgagcgtggatggcacggccggtggtctcgatgagcccggagtggcctctg

SEQ ID NO: 57787 - DNA, 106 bp, Homo sapiens
ctgtctagctccgaccggctgaggcggcgcggcagcggagggacggcagtctcgcgcgtactatactggcaattgctggagaagattttgcaattgttgcttctga

SEQ ID NO: 57788 - DNA, 98 bp, Homo sapiens
ctttacagaggaatagtctacaaaggaagacttgtaacctggagaagagaattcaacagtcatgagcagagctgaaaattttaaacaagttgagtacc

SEQ ID NO: 57789 - DNA, 90 bp, Homo sapiens
cgcgtgcgcggacatggcctcaaacggaaggagtcaagactgagaacaacgatcatattaatttgaaggtggcggggcaggatggttctg

SEQ ID NO: 57790 - DNA, 75 bp, Homo sapiens
caagaaatttcaaaacttgatcaaggctgtggaaaatctctgttctcacaaagtctccccaatgctctacaagca

SEQ ID NO: 57791 - DNA, 100 bp, Homo sapiens
tggggagcgcctcgtcgacatgagtgatgtggaggaaaacaacttcgagggcagatttagcccgatggccaaaggctctcaaagatacatggtttccact

SEQ ID NO: 57792 - DNA, 101 bp, Homo sapiens
cttcagtgcattcatgaagcatctgaaaaagctgtggaaggctctggataaggaccagtacctgcccaggaaactgcagccacctcagcagagaagtgctc

SEQ ID NO: 57793 - DNA, 100 bp, Homo sapiens
cgcgatgtcaccctgagagtgaccggcgaggtgcacattggaggcgtgatgcttaagctggtggagaaactcgcactggaagacgcaacgcagtgaggag

SEQ ID NO: 57794 - DNA, 113 bp, Homo sapiens
gcccggatgagtacgataccgaagcgggctgtgtgccccttctccacccagagtaagactttgaccccgacgcaggcttcagtgattgccgcggatcagaagcctgagcactt

SEQ ID NO: 57795 - DNA, 100 bp, Homo sapiens
gggggtggctcaccgggcagcgtgggtgagcggcgcagcggcggcagcggagagcgagagaggggagcagatccaacttagaaataatgtttcattcaag

SEQ ID NO: 57796 - DNA, 51 bp, Homo sapiens
ggagtccggacatctgaaacttggctccccaaaaaggccacaaagacagcc

SEQ ID NO: 57797 - DNA, 78 bp, Homo sapiens
ctgtggcatgtcaaccagcttggaagctgaatatggtgggcatgatcagatagatttgtatgacgatgtcatatctcc

SEQ ID NO: 57798 - DNA, 75 bp, Homo sapiens
acgtgtgctttttcaagggagctgataaagaacttcttcccaaaatggaaagtgaagtcactgcttttgctgtct

SEQ ID NO: 57799 - DNA, 96 bp, Homo sapiens
ccgagctgctggagaactgaaggcggacagtctcctgcgaaaccaggcaatgggatccgggagacagtggaccctggagagaggacccagggctgg

SEQ ID NO: 57800 - DNA, 74 bp, Homo sapiens
gctcctgccgtggtggacctgggagaagtgtctggtcatttaaatcaaacggtattgagatggattgggttatg

SEQ ID NO: 57801 - DNA, 101 bp, Homo sapiens
catgggcaaagtgtggaaacagcagatgtaccctcagtacgccacctactattacccccagtatctgcaagccaaggacatttattcagaacagctgggga

SEQ ID NO: 57802 - DNA, 137 bp, Homo sapiens
agaagtgtatatcaagccacaatttccatcaaaaagtgattaagcagagaatggagaagaaggttgattccagaacatacatatgatagttgagaaagacacatattctgatcatgaagaaataaacacaagttaaa

SEQ ID NO: 57803 - DNA, 100 bp, Homo sapiens
agacattcaggatcaacttgaacgaatatttctgtatgaatctgatgaacaagaaaagagtgcctatcaagagtatgacagtgacagtgatgttcctgag

SEQ ID NO: 57804 - DNA, 94 bp, Homo sapiens
cttccccacgcaaccccagatccatttacactttacaataacgaaggaggcccaacttcattcaataaggagcctgacggatttatcccagacg

SEQ ID NO: 57805 - DNA, 110 bp, Homo sapiens
ttctattcatgttgctttttgatggccatggcataaggaactctatcccaggaatacagctttgcattagcggggatctgatgagcttctttcttctggcatcattaacg

SEQ ID NO: 57806 - DNA, 82 bp, Homo sapiens
ttctccactgttcctggaggaatccgagaagagcagagcggagggagccccagacacgcattttgaaagcgaagcagaagcc

SEQ ID NO: 57807 - DNA, 75 bp, Homo sapiens
gttgtggcgaggcagatcctgccccgtggccgcggccgtctcatctacgcagaccccaccaagaggctggagctg

SEQ ID NO: 57808 - DNA, 76 bp, Homo sapiens
gggcgccctccccgccaaggcccgtgcgaggcccgatgagagaaagggaaagttaaggatgctggagcagaacaat

SEQ ID NO: 57809 - DNA, 75 bp, Homo sapiens
gacgacccccattgctgagccagcggagctgcttgggcatcttctctgcattcagtttcatccaagtcattccgg

SEQ ID NO: 57810 - DNA, 75 bp, Homo sapiens
aggggacagagacctgtgcagcttggatacccaggacctacaaggatgccgaggaatttcccaacctggcagttg

SEQ ID NO: 57811 - DNA, 100 bp, Homo sapiens
caatgacctccagtaagggagggcaagaagatatgaacctgagccttcagtcaagaccctccagcttgcctagtgatcagcagctggactgtgccttgga

SEQ ID NO: 57812 - DNA, 100 bp, Homo sapiens
atgtttgagtcaattctgaaagctccggtattattctttgatagaaatccaatagccaggaaatgtgaagaattcacctggaactaagtagaaaactcca

SEQ ID NO: 57813 - DNA, 75 bp, Homo sapiens
tgccttattttttctcatggatgttcttcttcgagtatttgtagaaggcctgagacctcagatcattgttccctc

SEQ ID NO: 57814 - DNA, 100 bp, Homo sapiens
ctgccgctggcgagcgccaccgcatgggtgctgatattcgtggcttcagtgctcctaggacatttggccttacactgggacatgtagtagatgaaataca

SEQ ID NO: 57815 - DNA, 90 bp, Homo sapiens
gggcgcccgcccgcctcccgccgccgcctcggtacaccgtcccgcggggtgtttttggggaaaaaaatcacaatctggacgtgagaaagg

SEQ ID NO: 57816 - DNA, 125 bp, Homo sapiens
tgcagcttcatcccgaccggaaccctgatgatccacaagcccaggagaaattccaggatctgggtgctgcttatgagatgaagtggtgaagagagcctgcgattgaagattttttcatctcagct

SEQ ID NO: 57817 - DNA, 82 bp, Homo sapiens
ccggactacaaggtcgcctacgtgcagctgcgtgagtgcatctccatccacgttggccaggctggtgtccagattggcaatg

SEQ ID NO: 57818 - DNA, 100 bp, Homo sapiens
tgttggtgcatttaactacaaaaccagtttaattagacacttcagaattttgatcacctaatgttgatttcagatgtaaaagtcaagagaagactctaaa

SEQ ID NO: 57819 - DNA, 75 bp, Homo sapiens
cttagacttcctggcctccagaatggactggacctacagagacatctgggattttctgcgtcagctgtttgtccc

SEQ ID NO: 57820 - DNA, 101 bp, Homo sapiens
cttttatggaatcctgcaaagtgatgcctcagacatgctgaaagtcagcagaagcacatggcagagaaaatgcctgcaaagtgaaaagaagccattcaacc

SEQ ID NO: 57821 - DNA, 96 bp, Homo sapiens
tgggatctcaaccacactcatccatcagcatgtcagataagtaaactgaggcccaaagaagttaagtaaatttcccaaagtcacaagacaaaggag

SEQ ID NO: 57822 - DNA, 75 bp, Homo sapiens
attgaagccgcctctgtattacttaccaggttttaaaatcaaagatgggaaaatcggagaaaattgcccttcccc

SEQ ID NO: 57823 - DNA, 100 bp, Homo sapiens
gcaacaccactgcagcatctagtggatgagaatggcaaaattagtcgccttcgtcgagagtgcccttctgatgaatgtggtgctggggtgtttatggcaa

SEQ ID NO: 57824 - DNA, 82 bp, Homo sapiens
ttcgaagtgtgtgccactgtttataccagggcagcgaggtcacaggccccacctttgctgatggcgagctcatccccaggga

SEQ ID NO: 57825 - DNA, 101 bp, Homo sapiens
ttttaactaccgggaagatttacacagatggaaccagaaaagatacgaggctctaggagagaaaaggcgacggcggattgacagaagtatgattggagagc

SEQ ID NO: 57826 - DNA, 88 bp, Homo sapiens
tccagcctcggtaccatggccgggatcatcaagaaacaaatcttgaagcacctctccagagcaagtacaatcatgtggtccacctcct

SEQ ID NO: 57827 - DNA, 100 bp, Homo sapiens
agcacccgccaccgtcgccggccgcccgcacgtccgtccggatgttaccaagttgacgccactttcacacgaagttatcagcagacaagccacaattaac

SEQ ID NO: 57828 - DNA, 100 bp, Homo sapiens
gagaaccgtcagtttgagccagatgaggtgcccacgagtgtattcggggagaagcttcgagaacaagttgaagagcgactgtccttctatgagactggag

SEQ ID NO: 57829 - DNA, 49 bp, Homo sapiens
tgaagtaccagttgtcgctagaacagttttccagttctcaagatgagga

SEQ ID NO: 57830 - DNA, 75 bp, Homo sapiens
atggaactctggggctatgttgctgccaggctccttttctgggcagtggagggactatagctccatcatcttttt

SEQ ID NO: 57831 - DNA, 90 bp, Homo sapiens
cttcctgggtctgtctctgccacctggtctgggctctgccagcagacagccttggcacacaggcacaagggctggagcccagagatgaga

SEQ ID NO: 57832 - DNA, 100 bp, Homo sapiens
ctttcccagggtgtctgcatccctgtccaagattgtggctgcacccataatggccgatacttgccggacccacgcagccacccagcctcagcactcatct

SEQ ID NO: 57833 - DNA, 98 bp, Homo sapiens
tactacaagtttagtggcttcacgcagaagttggcaggagcatgggcttcggaggcctatagcccgcaggtctgccatcatggatgttctcgcagaag

SEQ ID NO: 57834 - DNA, 82 bp, Homo sapiens
cagccagtagcttggatccttgtgggcatgatccataatcggtttcaagggatttggacatttggtgccatcttcagaagat

SEQ ID NO: 57835 - DNA, 83 bp, Homo sapiens
ggttctcccggcagcagcccgacgcaaaccaaggatctggggatcttcgcactatcccaagaattaaacaaccaccatgtcga

SEQ ID NO: 57836 - DNA, 75 bp, Homo sapiens
agaaacgaaagaaacgtcggcaggaacttgctcgactgagagactcaggttatcaatagtctggctgtctatcgt

SEQ ID NO: 57837 - DNA, 74 bp, Homo sapiens
cagggcagccgccccgccgagtcgcaggtctcctctgagcctccggcctccataagacccaaaacagatgacac

SEQ ID NO: 57838 - DNA, 80 bp, Homo sapiens
gaactggcttcgggaattttaccagtgaacttcgaccacttccagatccttcgggccattgggaagggcagctttggcaa

SEQ ID NO: 57839 - DNA, 50 bp, Homo sapiens
ccagctccgaaatcaccaccaagatttaagtaagtcttccccaacaccga

SEQ ID NO: 57840 - DNA, 50 bp, Homo sapiens
ggagcacaggaagcagccgtgtccctatgcaccttccaaaaagggaaaga

SEQ ID NO: 57841 - DNA, 59 bp, Homo sapiens
tgccacaggccctatgaaggccccaactgtctgagaggcgatatgaaaggtgaggtcta

SEQ ID NO: 57842 - DNA, 82 bp, Homo sapiens
tgtcgtctgtgttgtgactgctttggacgtgggagtcacctgaaagccaggaaatgtgaaactggaacgccaagctgaagaa

SEQ ID NO: 57843 - DNA, 101 bp, Homo sapiens
ggcggccgcagctgccacaaaccaggtaaacactacacgtgaagagtggtgaaagggaacattgattactgaagtgccctggagagggaaagcactggtca

SEQ ID NO: 57844 - DNA, 100 bp, Homo sapiens
cctgcagtacctgcagaaggtctctggagacatcttcagcagcgggtatttctgtgggacttggatgaaaccatcatcatcttccactcacttcttactg

SEQ ID NO: 57845 - DNA, 88 bp, Homo sapiens
gaaagaagaggaaatgactgagtcccagtcctggaatcaagatgtgagaccaagaaattatttctgaagaaagaaatttatgaaatag

SEQ ID NO: 57846 - DNA, 98 bp, Homo sapiens
tctgctatatgaaatatgggagacgacagaccgtttgtgtgcaatgccccgggctgtggacagagcgtcctccaggctttgaccgtgtccgaaatgct

SEQ ID NO: 57847 - DNA, 74 bp, Homo sapiens
attcctcccattcatgtgcctccaggttatatctcacaggcaggtaaagtgaggaaacatgcaactgaacagga

SEQ ID NO: 57848 - DNA, 100 bp, Homo sapiens
tcaaacaccagctactgtgaactctgccacttcaggtttgcagtcgagcgcaaacccaggccgttagtggagagcctggagaaagttcttgtggaattca

SEQ ID NO: 57849 - DNA, 75 bp, Homo sapiens
ccagttaccatgactcatccaggtttgcgaggagcgatcgcatttgccttagctattcggaacacagaatctcag

SEQ ID NO: 57850 - DNA, 50 bp, Homo sapiens
tggcaaccggcactcctgtgtagtgtcgcgctcgagtcccgacgggccgc

SEQ ID NO: 57851 - DNA, 78 bp, Homo sapiens
tcagacctgccaatttaccagagataattgataacaccctgtaacagctgaaaacctgctcctccaaagccagagccc

SEQ ID NO: 57852 - DNA, 82 bp, Homo sapiens
gtgcagatcgtggacgaggccaacgcacggggagaggtctcacaagaatcttttcttatctaagttgcaacatggaacccag

SEQ ID NO: 57853 - DNA, 83 bp, Homo sapiens
gggaaccaaggagacgctcctggcactgcagcattttgaaagcgaagcagaagccgtagaatcagcggcgagcctgttgaaag

SEQ ID NO: 57854 - DNA, 82 bp, Homo sapiens
cctcggagcgcggtccctgtattggtctcctgctcctagaggtgagcgagtgctgtgctttcatgggcctcttctttatgaa

SEQ ID NO: 57855 - DNA, 100 bp, Homo sapiens
tttcctgaagacagaaagactacacaggctctaaggcaccaaaggggtctaagagcatgtcctttgcaacctgatcacacaaatgatgaaaaagaataga

SEQ ID NO: 57856 - DNA, 88 bp, Homo sapiens
ggacattacattattagtgcatcctctgatggcactgtaaaggaagaagaccagctacaaggaaatacttctgaaaaatcactctgaa

SEQ ID NO: 57857 - DNA, 97 bp, Homo sapiens
aacaacggctcggactggaagatgatcatggatgacagcaaacgcaaggcgaaggctaacagagaccctgatgctggaattgatgaagctcaagttg

SEQ ID NO: 57858 - DNA, 122 bp, Homo sapiens
gattcgcagggaggatgtcgggacaccccggaagctgggaaatgtaagactttgaccccgacgcaggcttcagtgattgccgcggatcagaagcctgagcactttggctcgagacaattaag

SEQ ID NO: 57859 - DNA, 98 bp, Homo sapiens
ggagcaccccgtgctgctgaccgaggcccccctgaaccccaaggccaaccgcgagaagatgacccagaacaccttccaccatgaccacctcagcaagt

SEQ ID NO: 57860 - DNA, 80 bp, Homo sapiens
ggacagttcgctacacagcaatgcatcgaggcatcaagcatgatggaaccatgtgtgatacctgccgccagcaaccaatc

SEQ ID NO: 57861 - DNA, 50 bp, Homo sapiens
taacaagccccaaacttgttaaagtggccataaaatgcagtaaaaacaaa

SEQ ID NO: 57862 - DNA, 101 bp, Homo sapiens
ctgcggtttttgttcctggggctgagtgccctcggctcacagaacatttcctgcctgttgctcacactctgttgtccacagcatacccgcaccctagatgg

SEQ ID NO: 57863 - DNA, 75 bp, Homo sapiens
ctttccgccactgcccaaactgctgaagcagctcccgcgaggaccacccggttcgccatcggtggtgtgaactca

SEQ ID NO: 57864 - DNA, 99 bp, Homo sapiens
atgatcttttggaggaggaggatgaatttgatagagaggatggtgctgctccactggtgcctgctgtggctcctgtttccactcagctcaaggacccag

SEQ ID NO: 57865 - DNA, 82 bp, Homo sapiens
cgattcctcctccttggtcgccgcgtccttggctggcgtgtcgcgtggggcaggcagtggcgctgcgggccaaggccttcgg

SEQ ID NO: 57866 - DNA, 83 bp, Homo sapiens
cgacgaccggatcctgaggaggcagctgcggtggcagctgctgagttctcggtgaagaatctccggcctgtgaaactgtgagg

SEQ ID NO: 57867 - DNA, 96 bp, Homo sapiens
tgaagtcttcagatactgccctacctccacctccagtgcctcccaaatctgaagccgtattggcaagcttgccagtgtacctgctggtggggctgt

SEQ ID NO: 57868 - DNA, 75 bp, Homo sapiens
gctgccctctcgaaggcaggacagcggtggcggcagtgggaaagaagcctaaggaataaagtcatctctctagac

SEQ ID NO: 57869 - DNA, 100 bp, Homo sapiens
tgaggtggatctgacagatgccagcgtagctgaatccagtaccaaaaacgtcaacaacagttttacggtgcgtatagcagcaaaattcatcattcatgcc

SEQ ID NO: 57870 - DNA, 90 bp, Homo sapiens
cggcactgctactgcgaagacagctggcagccgggtgggcttggactgggcgtgctccatggcagagatcctgcggtcactcaacagtgc

SEQ ID NO: 57871 - DNA, 75 bp, Homo sapiens
catcaagggagttttccggggccctctcagcaagaacgggaacaaaactctgcagttggaattgatcacaccttt

SEQ ID NO: 57872 - DNA, 98 bp, Homo sapiens
taggccgacccgggccccgggctagcagagcggaggcgctgccacgaaactcgtacctgcggctaagagcagcttgaacatgcgaaagtgacacagac

SEQ ID NO: 57873 - DNA, 100 bp, Homo sapiens
agatatgacctatgcagttcgaaaactggataacactaagtttagatctcatgaggtctcctctgagcctccggcctccataagacccaaaacagatgac

SEQ ID NO: 57874 - DNA, 125 bp, Homo sapiens
tcccttacgtccccgagtgcggcagtaccgcctccttcccagccgcgcggcttcctccagacctctcggcgcgggcctcctgggatggatgtcacccgcttactcctggccaccctgctggtctt

SEQ ID NO: 57875 - DNA, 74 bp, Homo sapiens
ctggacttagctttgtcatgcaaagctgtcatttgctgtcggcttcactgtataaataggagaggatgagagcc

SEQ ID NO: 57876 - DNA, 75 bp, Homo sapiens
tcactgtggagtacatcacccgctacatcgccagtctgaagcaggattattgcatcgagcttttagtgtcttctt

SEQ ID NO: 57877 - DNA, 100 bp, Homo sapiens
cgccggaagcagctgagggaccagtactgctttgaatgtgactgtttccgttgccaaacccaggacaaggatggagagcaatacatcatcatctttggag

SEQ ID NO: 57878 - DNA, 75 bp, Homo sapiens
ggcggcagcgagccgggtcccaccatggccgcgaatgaaccctaaggactctgcaatatgaataattccctagag

SEQ ID NO: 57879 - DNA, 82 bp, Homo sapiens
gtatcgtatgtccgctatccagaacctccactctttcgctcaccatggatgatgatatcgccgcgctcgtcgtcgacaacgg

SEQ ID NO: 57880 - DNA, 101 bp, Homo sapiens
tcatccatcaggtgctggaggcccctggtgtctacgtgtttggagaactgctggacatgcccaatgttagagagggtggagccagccatcctgagacgtcc

SEQ ID NO: 57881 - DNA, 96 bp, Homo sapiens
ctgaccaactgactgaagagcagattgcagaggctgacccgcggctgattgagtccctctcccagatgctgtccatgggcttctctgatgaaggcg

SEQ ID NO: 57882 - DNA, 101 bp, Homo sapiens
taaaaaggagcaaaagaaaaaagaatgggtcaaccaagaacgtcaaacactccaacgattgagagcatttaaagatgtctccaggaaaagttgggctttca

SEQ ID NO: 57883 - DNA, 100 bp, Homo sapiens
tcagcggctatgaccaggtgctccacgaagacgaaaccacggttatgaagacagtatggagtttccagaccatagtagacatttgctacagtgtctgagc

SEQ ID NO: 57884 - DNA, 100 bp, Homo sapiens
gcatcttcaaagctgaactgaatgagtttcttactcgggagctggctgaagatggctactctggagttgagaacaagcggaccaacttgaagaagcccaa

SEQ ID NO: 57885 - DNA, 75 bp, Homo sapiens
atccacaaacggagacggcagacagtcacaggcagagctggtgatgctgctggagtggtggtcgggcacggaatg

SEQ ID NO: 57886 - DNA, 117 bp, Homo sapiens
ggaccgggaggtaagaggtttgggactgccccggcaactccagggtgtctggtccacgacctatcctaggcgccatgactgggctggcttagatgaagatgaagatgcacatgtctg

SEQ ID NO: 57887 - DNA, 82 bp, Homo sapiens
gctgtgcagccgcgaggaggcgcgggaggtgttcgagaacgaccccgagacggaactgtggaaggtgcatcagtgaagaaat

SEQ ID NO: 57888 - DNA, 75 bp, Homo sapiens
ggaatgtgatgttagagaactacagaaacctggccttcctgggttcctccagaagaaattaattatttaacacga

SEQ ID NO: 57889 - DNA, 76 bp, Homo sapiens
tacgttagccagtttacttaacttggaatggaaaattatctatgtgggctctgcagaaagtgaagaatacgatcaa

SEQ ID NO: 57890 - DNA, 100 bp, Homo sapiens
aatcaagtcacctgacacatttgtgagaactatttatgcaggatctcaaagatttcatgagacaagctggggaagtaacgtttgcggatgcacaccgacc

SEQ ID NO: 57891 - DNA, 83 bp, Homo sapiens
ccaagaagatgagaccgggggaggcgacgctaagttgctgatcgtggcggttgtggcagcactgcctgaaggtatgagaccag

SEQ ID NO: 57892 - DNA, 90 bp, Homo sapiens
gacgccgcctggcaggccctgcgcaccagaaggtgcctaccagtaacacagagggaggctggtcctgctctctcgctgagtacatccgcc

SEQ ID NO: 57893 - DNA, 100 bp, Homo sapiens
gaggactcgtcaggctccgagatctgtctggctccattgatgacctccccacgggaacggaagcaactttgagctcagcagtcagtgcatccgggtccac

SEQ ID NO: 57894 - DNA, 80 bp, Homo sapiens
gaagagacctggagccgacagacggacagagcgggatgccaccagcttgtccaaagggaagttccaggagctcctggtgg

SEQ ID NO: 57895 - DNA, 100 bp, Homo sapiens
gggactgggagtcgttagtgagagatccgtgctcagctcacagagcagatgaaatgcctggaccagcagtgtgagcttcgggtgcaactgttgcaggacc

SEQ ID NO: 57896 - DNA, 75 bp, Homo sapiens
cgccgtgggagggagccatgaagcattacgagggtacagccaaagaccggagctttggagagatgaagtttaaac

SEQ ID NO: 57897 - DNA, 75 bp, Homo sapiens
aaagaaggagggacgtatagatgatttgctcaggggaccgagtggggtcaatcttctggtgctgcctctccaggt

SEQ ID NO: 57898 - DNA, 83 bp, Homo sapiens
cttggactgagtcctgcaggacacagcgggagatacagatgacccaccaagaattactcagaaccctgtgatcaatgggaatg

SEQ ID NO: 57899 - DNA, 82 bp, Homo sapiens
ccgaagcctaaattccaggaggtacctggagtagaacagaaaaattattatgtctgtgttcccttgggactcattggaaatt

SEQ ID NO: 57900 - DNA, 82 bp, Homo sapiens
ccgactgcaagccaccagtcacaggaaaacctccctgccctgcccactgctctgttaaaagcgaaaatgaaacaattgcctg

SEQ ID NO: 57901 - DNA, 100 bp, Homo sapiens
gtccgctgtgcccgggcctgcaccatgagcgtcccggccttcatcgacatcagtgaagaagatcaggctcatcttcaggtggaactaatctggttaagat

SEQ ID NO: 57902 - DNA, 75 bp, Homo sapiens
tttcttcccaggcagcaagtgcaattaacagagaatccaaggatggagagccaagcccacgatcagctgcccaca

SEQ ID NO: 57903 - DNA, 75 bp, Homo sapiens
gcggcggcggcggctgcggcccaatatagcattcgttcagtcagagagcataatagaagtactgcgttttgatga

SEQ ID NO: 57904 - DNA, 75 bp, Homo sapiens
ccgcgggcgcgcgggcgcgactcggcggcggcgtcttttctgctacaggagctgagagaccctaccctcactttc

SEQ ID NO: 57905 - DNA, 100 bp, Homo sapiens
catcatccaggccacgcaccagaatctgacttcctacagccaaggagtggtacgggtatcactttccggagctggtgaagatcatcaacgacaatgccac

SEQ ID NO: 57906 - DNA, 75 bp, Homo sapiens
gatctggggacatcttactggtccatgctactgagactgacaggaaagaaccaacctatgaccctgtgagcgagg

SEQ ID NO: 57907 - DNA, 101 bp, Homo sapiens
tgacttctctaatcagttacggacccagatgatgtggtaccagttggccaaagaagagcctggtgttggtgcatgtgctttggactagcatttatgcttgc

SEQ ID NO: 57908 - DNA, 76 bp, Homo sapiens
tacccgacacttacatgccatggccttctacgttgtgaaaatggcaaaagaatggaccccagcaggaaaagcaaag

SEQ ID NO: 57909 - DNA, 50 bp, Homo sapiens
agcttctctccagagtagaaaggtacttaagagattatggcatcagaaac

SEQ ID NO: 57910 - DNA, 100 bp, Homo sapiens
ggcggggaggcgcggagcgcgcgtgtggtccttgcgccgctgacttctccactggttcctgggcaccgaaaggcaggcagtatgacacctaagtcgccct

SEQ ID NO: 57911 - DNA, 82 bp, Homo sapiens
tttaacagacattgtgtggtgggctggcacaatcgcaagtttgaagactgcttcattctgcctctagtaccagcggtttctc

SEQ ID NO: 57912 - DNA, 100 bp, Homo sapiens
gtgggacccgggcttgcaccctttctcagggtacttcagtcaagtgacacccttttagagacgacgtgaggaatcggtaattatgccaccctcggccctg

SEQ ID NO: 57913 - DNA, 50 bp, Homo sapiens
tcaagagaaatggagcccttctccaagggaagccgtggcggacggagcag

SEQ ID NO: 57914 - DNA, 74 bp, Homo sapiens
cgtggaagcaggactgcgccgcgtcttcctcaagaacatcgatatattgaactcttcttgaattctactcctgg

SEQ ID NO: 57915 - DNA, 96 bp, Homo sapiens
gcagtgggcaggaagaacccatcgggcagctacacatcttgaaagagaagctcttcctgtgagaaggccagggatgtaccgcctacgacgtagctg

SEQ ID NO: 57916 - DNA, 82 bp, Homo sapiens
gcgggcaccggagccagccccgcagcgggtttttagaacttcagccataaaaatgggcagaattttccttgatcatatcggt

SEQ ID NO: 57917 - DNA, 101 bp, Homo sapiens
agaaaaattcaaaagaatcgaaaggttgcatctacttggacgcctgcattgatgttgttcaggaattgtcttagaagaaagaaggcaagccaccattttac

SEQ ID NO: 57918 - DNA, 98 bp, Homo sapiens
aaaagccaagaggaggacagttcgctacacagcaatgcatcgaggtgtctgatgatttgtgagcctcaagtgactactctgtggaatcatctgtcctt

SEQ ID NO: 57919 - DNA, 75 bp, Homo sapiens
aagatggcggcgccgctcatccccctctcccagcaggcgaacctcttcccggccgctctggtgcacttgggagcc

SEQ ID NO: 57920 - DNA, 90 bp, Homo sapiens
ctggcataacaggacaagagttggaaagacagggggaaggttcctcctcattcttgtcggaaacttgccatgaggatccctctgtttccc

SEQ ID NO: 57921 - DNA, 100 bp, Homo sapiens
gaagaagtgggatcagttttacagtgaagttttaggctcaggctgcacgaagaaaaggttattaaagatagacgtcatcatctcaagacctacccaaact

SEQ ID NO: 57922 - DNA, 82 bp, Homo sapiens
ccgagcgcctcgacctcggtctgaggtacatgtcccagagcaagcacacggaggcccgggagctcatgtactcgggagccct

SEQ ID NO: 57923 - DNA, 75 bp, Homo sapiens
atatgtgatgccattccagcactggactcatggaggctgagcatttattcagctgctacggaagaggcacatagg

SEQ ID NO: 57924 - DNA, 50 bp, Homo sapiens
aggatgtgcaaccctccaagtggaagtttttggattcaaagcataaaaac

SEQ ID NO: 57925 - DNA, 97 bp, Homo sapiens
gcacatggagcctgcacgcgcacggtttggccaaagaagcccccatactcccggtgaaaaaggtgctggagaatctggtaaaagcaccattgtgaag

SEQ ID NO: 57926 - DNA, 100 bp, Homo sapiens
cttttatattcatctcaaaaacaaaattctgaactcaggacttggcaataccaaatatgccccaacagcggcaagaccagcatcatcagagtgccatgat

SEQ ID NO: 57927 - DNA, 83 bp, Homo sapiens
tgtagctaatgaccgtggttcccactgaggtgaccttgaggaaccctgggagctcaggaaggaaggagcgcccagaagcaggg

SEQ ID NO: 57928 - DNA, 90 bp, Homo sapiens
cgctgctgggtccgctgagcggggcgacccgagaacccggcagtgggcaggtgtttgtgacttcagagaaccaacttgtgtattacccca

SEQ ID NO: 57929 - DNA, 97 bp, Homo sapiens
ggatgtcgacgactgggacaatgagaacagctctgcgcggctttttgagcggtcccgcatcaaggctctggcagctctttcagtctcacatggcaac

SEQ ID NO: 57930 - DNA, 84 bp, Homo sapiens
gtccaggcctgacagctctgcggctcgggccctgaggtaagtaaggaggtctctgtaccatggctcgtacaaagcagactgccc

SEQ ID NO: 57931 - DNA, 75 bp, Homo sapiens
ctggtgtcctgcgcagactgtggacgctctgagcctagtcctccaatagatgaagttatcaacactccaagagtg

SEQ ID NO: 57932 - DNA, 100 bp, Homo sapiens
acacttccgtgcacactctcaacttcgagtacgccgtggagcgcgtcctcgcaggaattacatgaatgacagtcttcgaaccaatgtgtttgttcgattt

SEQ ID NO: 57933 - DNA, 156 bp, Homo sapiens
gttgagaggaagaaagggcaatttagccatctgtgtgattatcctcttgtttatcctggctgtcatcaatttaataagaaccatctgtgaccaaattgatacaggaacaggagaaagagccgcggtggctgacattacactccaactgggagagcc

SEQ ID NO: 57934 - DNA, 75 bp, Homo sapiens
ctggctggacttgcggagtccccgccgaagaacccgagcttctgcagaaagccgtcattacacctgattttgaaa

SEQ ID NO: 57935 - DNA, 75 bp, Homo sapiens
aaaagactgattggctcttcctcaatgcttgtgtggatgaacaagagaactgggcaacccatgatccacatctac

SEQ ID NO: 57936 - DNA, 100 bp, Homo sapiens
gtgttttcttatttagccggagtgagaagcaagaaggccctggacacagcaatatctctgggctttcacagatgggtttgtggaggctacagaaggtttg

SEQ ID NO: 57937 - DNA, 100 bp, Homo sapiens
gcgctctccgacctctacctggagcatttgctgcagaagcgtagtcggccagagcgacttgggagcttctgggaaacatggtggcaacgtctctttggat

SEQ ID NO: 57938 - DNA, 74 bp, Homo sapiens
gcggtgcggagactccatgaggccctgacaatgcagatcttcgtgaagactctgactggtaagaccatcaccct

SEQ ID NO: 57939 - DNA, 112 bp, Homo sapiens
ccgcgcggagcgccccttcgcgtcccctgcaccatgagctggggcaccgagctctggggagtgcatccgccccaacccttttccccctcgtctcctgtgagaattccccgtc

SEQ ID NO: 57940 - DNA, 74 bp, Homo sapiens
ggctaaagaaattaatgacaataatggatagtatgaatgatcaaggcacagttggcgggcagctcccaggtctc

SEQ ID NO: 57941 - DNA, 100 bp, Homo sapiens
aacttatgtgaacctgagcagtttgtggttgtgataaatttgcgcctcattttggtaagcggaaaaacaaaagagttcctgttttctcctaacgattctg

SEQ ID NO: 57942 - DNA, 76 bp, Homo sapiens
cccgttcagagtcctacagtggcaggtattgttgcagcatctggcagtgagactgaggatgaggacagcatggaca

SEQ ID NO: 57943 - DNA, 80 bp, Homo sapiens
ccgcgaggaggcgcgggaggtgttcgagaacgaccccgagacgagaagcagggccctgagcggaagaggattaagaagga

SEQ ID NO: 57944 - DNA, 98 bp, Homo sapiens
agctaccggcccaaggccatctacctggacatcgatggacgcattcagaagccactgaggcggctcccagctgcgttggcgacatggccgacaccccc

SEQ ID NO: 57945 - DNA, 88 bp, Homo sapiens
attgtctgtgacagtaacagtacttgggatcccccagttccaaagtgtcttaaaggtgaggaaaatagcagctgaatactatgacaac

SEQ ID NO: 57946 - DNA, 98 bp, Homo sapiens
ctccctggtgctcatccccaaagccaagccactcactctgctctgggaaactggcgatggaatatgagaggagccctctggaaagaaaaggacagacc

SEQ ID NO: 57947 - DNA, 100 bp, Homo sapiens
catatttactggacagagtgctgtatccagatgcagaggtgtgccttcatgtactgaggcttgtccagtctgtggttctggaacctgaagtcttctccaa

SEQ ID NO: 57948 - DNA, 98 bp, Homo sapiens
agcgactccggggcctgatgaatgacatcgttgtggaagatatcaataagcgcagagagccgctccccagcctggaggctgtgtatctcatcactcca

SEQ ID NO: 57949 - DNA, 96 bp, Homo sapiens
tataggatctctgcccacagtcagcagcacaacagaggcggcatatcccagtagaatacgggcttttccagggcaggaacctttagctggtttgct

SEQ ID NO: 57950 - DNA, 101 bp, Homo sapiens
ttgttggcctttcaggaagagtgcttaagccagatgacgtgtactactgtggaataaagtacatcaaagatgatgtcatcttaaatgagccctctgcagat

SEQ ID NO: 57951 - DNA, 96 bp, Homo sapiens
tggctgtacagctcctcaagtgcaacaagtcccacttccgaaaccacaagtttgccgatacaaatcttcctattttcaagctgaaagaatctactg

SEQ ID NO: 57952 - DNA, 75 bp, Homo sapiens
ggccgtggaggcagaggtggcatgggggtctggctctgttgcccaatttggagtgcagttgtgcgatcctggctc

SEQ ID NO: 57953 - DNA, 83 bp, Homo sapiens
atggggcatcgtctgtttgtgcctcggcttctggcggtgtccctggccagtgtccttccacctgtccacaagcatggggaaca

SEQ ID NO: 57954 - DNA, 74 bp, Homo sapiens
gccagggaaccctggtcaccgtctcctcaggacctctggtcctcaatcgagttcctctacgaagaacacaccag

SEQ ID NO: 57955 - DNA, 99 bp, Homo sapiens
ttctgaagaaaatgactggcaaacctgaacccaaggtggcaagtgggatgatactggtcatggctttctttctcatcacctacacctttcattcaacct

SEQ ID NO: 57956 - DNA, 58 bp, Homo sapiens
gggaaacaaggcttccagtgccaaggccataatgaatgaatcaacagagtttgaggaa

SEQ ID NO: 57957 - DNA, 50 bp, Homo sapiens
caggcgtgtgtcactgcgcccagctgttgacagtgtcttgaagaggatga

SEQ ID NO: 57958 - DNA, 74 bp, Homo sapiens
tcggtcatgtacccggtggactcggtgaagagccccccgggcccattgacaacagcaggattgcacaggtcaaa

SEQ ID NO: 57959 - DNA, 82 bp, Homo sapiens
aatgatgtattttgtgatcgcagcgatgaaaggttgatgataattagaagcatgctttccactgaacttcccgacaacattt

SEQ ID NO: 57960 - DNA, 75 bp, Homo sapiens
gccacctgcagccatcacccaggtcatgttgctggccaatccactgaaggttatcaatactctggctgaccatca

SEQ ID NO: 57961 - DNA, 90 bp, Homo sapiens
ggtggaaacagcggatgattctggaactgggagaagatggctttaaagaatacacttcaaacacccatcatactgactccaagccccttg

SEQ ID NO: 57962 - DNA, 74 bp, Homo sapiens
cagtctgaatcgagctcagctaacctttgaatatctgcacacaaattcgatggaagggggagagctgtttgaca

SEQ ID NO: 57963 - DNA, 96 bp, Homo sapiens
ctatgccaaagaaatccataaattcgacatgatccaggggctggcggagcacagtagcctttccagtaaatatatgactcagggaaaagcctcagc

SEQ ID NO: 57964 - DNA, 82 bp, Homo sapiens
gaaatacttcagatcagtgtggggaaggtagatgtcattcaagaaccagaaatatccgcgcaagatgttgacgttgcagact

SEQ ID NO: 57965 - DNA, 75 bp, Homo sapiens
cctctttggcaatgttttcttggacgcaattaccagctctggctgggtcgccacaacttgtttgacgacgaaaac

SEQ ID NO: 57966 - DNA, 100 bp, Homo sapiens
gactctggttatctgcatttgctttataaaagaccactggatcccaagagtgaagctcagcttcagaattctgcttggtcagaatcgtgatggcattgtg

SEQ ID NO: 57967 - DNA, 86 bp, Homo sapiens
agagcagaggtcaaacctgaaagaccccagttatggatgggagctctctgcgcccttgttgccaccatctggttccctgtgtgcgc

SEQ ID NO: 57968 - DNA, 73 bp, Homo sapiens
aaaatgtcaacaaattgatgggcatctgcagcatgtggggcggctcccactattccacctttgacggcacctc

SEQ ID NO: 57969 - DNA, 50 bp, Homo sapiens
gggcgccaggaccggccgaacgcagagggagtgcatccgccccaaccctt

SEQ ID NO: 57970 - DNA, 117 bp, Homo sapiens
gaatatgccagattacgaggaattcgagtcctgccagaatttgatacccctgggcatacactatcttggggaaaaggaaaatatgcccaggttaccaacaatcctgaaaatgatgga

SEQ ID NO: 57971 - DNA, 76 bp, Homo sapiens
aaagactgaaaatgctcatcttttagttcagcagctgacagtgcttggaaaggtcagctatcacattgaaatgagc

SEQ ID NO: 57972 - DNA, 88 bp, Homo sapiens
cgctggggacggcgatggaacaaaacacacttccggttctctggagtttacatatcggcgtagcttatgagcaagctggaatgatgtt

SEQ ID NO: 57973 - DNA, 101 bp, Homo sapiens
attctgggtgttgggcctgacgatcctgacctggtacgagcccggaacattcttcacaagaaaggctgggtccgatacgccgagcgggtgctgggtcgccc

SEQ ID NO: 57974 - DNA, 78 bp, Homo sapiens
catcaaacaatgggtcagtgttctcgataattctgaaataatcagcagaaacggaatggaatgccaagaatctgcatt

SEQ ID NO: 57975 - DNA, 75 bp, Homo sapiens
tggtggaaaagatccatgccaaggtgcaaatgtcaattgtcaagccttggacaaagctacacccttgttcattgc

SEQ ID NO: 57976 - DNA, 100 bp, Homo sapiens
tccgagttggagaacaggcgtggccagcactggctccttgatgttacagctcttttgaggaagcttaagcagcaatccagggaaagtgttgaagaaaaac

SEQ ID NO: 57977 - DNA, 99 bp, Homo sapiens
aagtgatcctgctggagcacatcatcatgtgccgccttgtcacgggtcacaaggccacggcgctgcaggagagatttaccgcattgtttctcagaagca

SEQ ID NO: 57978 - DNA, 75 bp, Homo sapiens
ggaagatggcgaaggtctcagagctttacgatgtcacttgggaagattgcagcaaaaattggaggtgatgcaggg

SEQ ID NO: 57979 - DNA, 75 bp, Homo sapiens
gtatcaagtaatggtgcaaagcctgaaggctcttggtggtatcgctcaatacgctatagtggagaccagattcta

SEQ ID NO: 57980 - DNA, 80 bp, Homo sapiens
aagatcgccgaagtagactgcactgctgaacggaatatctgcagcaagtattcgatcaagactggtgccccttgccgatc

SEQ ID NO: 57981 - DNA, 101 bp, Homo sapiens
ctccgaggcgcagaagtggattgaggcctcaggagtgcaagtagctgatgaagtatgtcgcattttttatgacatgaaagttcgtaaatgctccacaccag

SEQ ID NO: 57982 - DNA, 51 bp, Homo sapiens
tgatgcttggagaagctgaggacacacaggtttgaagatggcatcctggac

SEQ ID NO: 57983 - DNA, 98 bp, Homo sapiens
cagaacgcagatcagaggtagtcggacctttcccgctggcgcgcagcctcagctaggctaacaataaatgcccttgcccagaagctcaatgcttactg

SEQ ID NO: 57984 - DNA, 90 bp, Homo sapiens
cagagatctgtaattacagctactccagcaacatcttgtccataaggctgaaccggcaaatgtggaaacaacttctgtgcatctcatcgt

SEQ ID NO: 57985 - DNA, 101 bp, Homo sapiens
gtctacagcggggtggtgaacctcagcaccgagaacatctactctttcaactacaccagccagcccgaccagaaagaatcttcaagagggagacataggga

SEQ ID NO: 57986 - DNA, 101 bp, Homo sapiens
ccgggtataagctgttttctctgagttctgtggagcagctggatcaagtccacggaagcagtatccacaaattacccattatcaaaaacaaatagttcatc

SEQ ID NO: 57987 - DNA, 100 bp, Homo sapiens
cctctttctctcaggctttcctacaactcatgcccagcagcagcaagcagcttcaaaagcagtggactgtcttttggattcaaagtgggcaaaggccaag

SEQ ID NO: 57988 - DNA, 97 bp, Homo sapiens
ctgaactcaggacttggcaagctgctcccggcagatcggcttctcctttgtacgacccaagctctgtgccttctctggcctctattactgtgacatc

SEQ ID NO: 57989 - DNA, 100 bp, Homo sapiens
agccattttcctgagttccctgatccccacacctacatcaaaactccggtacatgtcccagagcaagcacacggaggcccgggagctcatgtactcggga

SEQ ID NO: 57990 - DNA, 50 bp, Homo sapiens
tgtacccggtggactcggtgaaggttatgaagacagtatggagtttccag

SEQ ID NO: 57991 - DNA, 100 bp, Homo sapiens
acatgatcttctttataattctactttgagtgctgtctccatgtttgatgtatctgagcagtcacccttggtgccctgtacttcactgtggtcctgaact

SEQ ID NO: 57992 - DNA, 97 bp, Homo sapiens
gatcggggacggagagaacacgagcccatcaggtgcagcagtgaacagcagtgagagtctccctccatcctcgtctgtcaatgacatctcctccatg

SEQ ID NO: 57993 - DNA, 90 bp, Homo sapiens
atcaagaacagaacaggccctatggggcatacctatggctttattgacctcgactcccatgcgctattgtacagggggatacgctggaag

SEQ ID NO: 57994 - DNA, 74 bp, Homo sapiens
agattatgcagaaggaattgaagttgctgcagtaccagttgatgtcaaaccagaagagaagtaaaattcaacaa

SEQ ID NO: 57995 - DNA, 83 bp, Homo sapiens
cggcgacgtctcctcccgcctcaccacaggtgtcgtgaaaactacccctaaaagccaaaatgggaaaggaaaagactcatatc

SEQ ID NO: 57996 - DNA, 83 bp, Homo sapiens
ctcacaatgaggctccctgctcagctcctggggctgctaatgctctgggtctctgccaagtacatcgtgcaagtggatggtaa

SEQ ID NO: 57997 - DNA, 100 bp, Homo sapiens
gtaccatcctgcctactgggtcgtcttctcggcgacaactgccctgctcttcatcccagcttcagacagcaaagtcctgacatgtgcagccgtgtggagg

SEQ ID NO: 57998 - DNA, 100 bp, Homo sapiens
gcctcagcaggcggggaagatgaaaggggtgaagttgaacaaattgctatgatgaaaccaaaaggccagactgaacacgatgagggtatgcttgaatatt

SEQ ID NO: 57999 - DNA, 82 bp, Homo sapiens
cagaacccaggcccacggaggaagagccgggcagtccctggagcgggccaggttacttcttgctgcagattctgcgcaggat

SEQ ID NO: 58000 - DNA, 97 bp, Homo sapiens
aacttgagaaacccaaacctgtaaaaccagtgacgttttccacaggcatcaaaatggctttgaagacaagattcccaaaaggagattctctgagatg

SEQ ID NO: 58001 - DNA, 50 bp, Homo sapiens
atcactttagaccctccacctaattgcagaaactggcgatggaatatgag

SEQ ID NO: 58002 - DNA, 112 bp, Homo sapiens
tcctgcctcaggtttatttgtacaaatagcacaggagaaccccatgcgggaacttcgcatccgcaaactctgtctcaacatctgtgttggggagagtggagacagactgacg

SEQ ID NO: 58003 - DNA, 100 bp, Homo sapiens
tggctgttgttcttttcttttccatgatatcattatatggacagtttagggctcttgcagaccaatttgaagataaaactacatctgtattggaacgcct

SEQ ID NO: 58004 - DNA, 100 bp, Homo sapiens
tctccttcagcagcaagagcagcagctccagcaactccagcagctcctggcctccccgcagctgaccccgcggaagtgaccgtggtggcttcaataaatt

SEQ ID NO: 58005 - DNA, 100 bp, Homo sapiens
aaaatttggagcaagattctcaaggaagcaacaagatcctaagatatggaagaaagtagcagtgttgccatgttggtgccagatattggggaacaggaag

SEQ ID NO: 58006 - DNA, 82 bp, Homo sapiens
ctcctcccagtgacgggtctggagtgcgtgggggaccggctgttggcgggatgccggctccaggagcagcagtggaggtcgg

SEQ ID NO: 58007 - DNA, 90 bp, Homo sapiens
cgggggagcggggccttccacaccccctccgtgggtgtgtgggagttgaccacatttggccatttcccagaagggccccaccccaagggt

SEQ ID NO: 58008 - DNA, 82 bp, Homo sapiens
agcgcggggcggcggcgaaaggacggtgggaggaggagctcgccaagcgcatgaaccttcagaccatggtggacacgctgca

SEQ ID NO: 58009 - DNA, 100 bp, Homo sapiens
cggccctcacagcaaccagcaccagatgaaggagcattcctcttggggtgtgctgatctgcaaaccctggacacaatgcagccaattgagaggaaaagac

SEQ ID NO: 58010 - DNA, 100 bp, Homo sapiens
cgcttacggaaactgcatgctgttgtagaaactctagtcaaccataggaaaggaattagaaggtgacgaggagggagaagacgaggatgatgcggaaatt

SEQ ID NO: 58011 - DNA, 90 bp, Homo sapiens
gattcctccaggtctcacctgataattacggtgactctaaccacagcctcctgctctgacagcactgactgcctgcgctgctgacttaag

SEQ ID NO: 58012 - DNA, 92 bp, Homo sapiens
cgtccttctccactttcgccagcccgtgccgcgagcgcggcctgcaggagtccctgaagaggaaggagaaggaatatgagcatgaaatggag

SEQ ID NO: 58013 - DNA, 100 bp, Homo sapiens
gaaatggaggaggagacagagttccttgagctcggaaccaggatatcaagaccaaatggggaattgaaaattcggtttttactctaagtgaaggacattc

SEQ ID NO: 58014 - DNA, 51 bp, Homo sapiens
catgaacggtggagtcttcaaagaggttggagcaatcactgaagaaactga

SEQ ID NO: 58015 - DNA, 100 bp, Homo sapiens
actcgcggaaaaggccgctggaagccccccctgaagccggcagcaccaagaggaccaatacgggcggagatcagaattcaattgatattttcatctggga

SEQ ID NO: 58016 - DNA, 100 bp, Homo sapiens
gccggccgggattcgcggcccggagctcgggaccggtctcagccttagatccaaggacagtccaaggaagtcctaagaccatggagttggtgatctggga

SEQ ID NO: 58017 - DNA, 75 bp, Homo sapiens
gtatccagcaatgaggacctgcacaaacgtgcagatatctgatagccctttccgttgcactcaagaggaagcaag

SEQ ID NO: 58018 - DNA, 101 bp, Homo sapiens
gcattgctgaccagatcactctgctcaaagctgcctgcctagatatcctggtgtcccgcatgagatgtctgcagaatgagacttacagtgcgctgagccct

SEQ ID NO: 58019 - DNA, 90 bp, Homo sapiens
gcaaaagctctgctgaggtcatcgcccaggcacggaagaaggggcagcagaagaagcctttgtaaatgacattgacgagtcgtccccagg

SEQ ID NO: 58020 - DNA, 100 bp, Homo sapiens
gaaaaagacctgtggctattaagatagggttttgactctgggaggagggctgccttatttggagcaccttaatctctctggttgtcttactataactggt

SEQ ID NO: 58021 - DNA, 50 bp, Homo sapiens
cgaggagagaaaagtctctaagtttgtggaactcttgcaagaagaaagga

SEQ ID NO: 58022 - DNA, 100 bp, Homo sapiens
tacgaagtcaggtgtatccaacagcctctaatatggagtatatggatgaagatgagctggattcccacaccatggtgaagactagtgtggagagtgtggg

SEQ ID NO: 58023 - DNA, 74 bp, Homo sapiens
catcttcctgcaggggctgctcggcgtcgtggccttcagcacgttaatgcgtgcaatggatgagcttcatagtc

SEQ ID NO: 58024 - DNA, 90 bp, Homo sapiens
aatttcttcaaagacagacactggaccaccagagagtttgaggagctaagatcatgtagagaggcaaccactgagaaaacggaaccgaat

SEQ ID NO: 58025 - DNA, 100 bp, Homo sapiens
gcgagtcgcactgcgcggagaaggggtccgagggcagtctgtgtcaaacgcaggtgctggagaatctggtaaaagcaccattgtgaagcagatgaggatc

SEQ ID NO: 58026 - DNA, 100 bp, Homo sapiens
cttgactactcgcatcgcgcactttttggatcggcatctagtctttccgcttcttgaatttctctctgtaaaggaggttcgtggcggagagatgctgatc

SEQ ID NO: 58027 - DNA, 82 bp, Homo sapiens
gcatgtgttaccaagctgtttcctaccaggtcacacactgttgcagcgcaggtgctggggagtcagggaagagcaccatcgt

SEQ ID NO: 58028 - DNA, 95 bp, Homo sapiens
tgccagaagaaacattttcaaggtattgatgaagatgaccctactgctgatgataccagtgctgctgtaactgaagaaatgccaccccttgaagg

SEQ ID NO: 58029 - DNA, 80 bp, Homo sapiens
attttgcattggatattcgcatgcctggggttacacctaaacagatgccttcaattaagttgcagagttctgatggagag

SEQ ID NO: 58030 - DNA, 83 bp, Homo sapiens
gctgaagagcgcgccgccctctcgtcccactttccagaatgcagtaatagtggccttgtcttcaaaatcatgggatgtagaga

SEQ ID NO: 58031 - DNA, 74 bp, Homo sapiens
ggacctgaagaagatgaacaagcgccaggtgtgggccatgtttgaggattgccccagcattcagttctatgagt

SEQ ID NO: 58032 - DNA, 90 bp, Homo sapiens
ttggtttcgggatctcggtgctgcagacggcgagacctcctgcacagtgcggcaccttcccgtctgatgctggcgttgtgcgtatggtgc

SEQ ID NO: 58033 - DNA, 83 bp, Homo sapiens
cgcgtgtctaggtgagtcgcggtgggtcctcgcttgcagttcagcgaccacggctcacgaggcccagggaatcctctggacca

SEQ ID NO: 58034 - DNA, 74 bp, Homo sapiens
ctcgggggtcatgatgggcagcaagatggcgtctgctagtagggtcgttcagattttgcaagaacgaggctcaa

SEQ ID NO: 58035 - DNA, 75 bp, Homo sapiens
ttctcgctgaccgcgctagctggccaagaagcttgagagaagaaaaatttcagaaaaattgtctcaatttgacta

SEQ ID NO: 58036 - DNA, 75 bp, Homo sapiens
ttccagaaggctgtagaccagagtatcgagaagctcttggtgctggacaggcatctttgtttgggaacaaccaac

SEQ ID NO: 58037 - DNA, 75 bp, Homo sapiens
gagatcgtggacaagatcatgggcaaaggacagatccaggttgtgaccgagattcccgacgagagagactgaggg

SEQ ID NO: 58038 - DNA, 50 bp, Homo sapiens
aatatggtgaactcattgtcttagggtcacagaattttccacactccttg

SEQ ID NO: 58039 - DNA, 100 bp, Homo sapiens
tgaaggacacagacagtgaggaggagatccgagaggcgttccgtgtctttgacaaggagttcatgatcaagtgttgcccacaccaaatgcttcatccaga

SEQ ID NO: 58040 - DNA, 98 bp, Homo sapiens
tgacatggaaggggcagtacaagcttacgtctctgctcttcagtacaatcctgatgaagatgagctggattcccacaccatggtgaagactagtgtgg

SEQ ID NO: 58041 - DNA, 88 bp, Homo sapiens
gaggtccgcgcagcccagcgcagccatcacttagtcggtcggctaattggcaagcaggggcgctatgtgagttttctgaagcaaacat

SEQ ID NO: 58042 - DNA, 100 bp, Homo sapiens
cggcgcccctcggcctcggagcaacgagcgcagcgccgagtgaagacatttccacctggacacctgaccatgtgcctgccctgagcagcgaggcccacca

SEQ ID NO: 58043 - DNA, 75 bp, Homo sapiens
agctccaggaccttctacgtacagacgagagattaaacagttattgtctgagttggatgaagagaagaaaatccg

SEQ ID NO: 58044 - DNA, 100 bp, Homo sapiens
cctcaggtcctggatcagctgtccaaaaacatcaccaggatggggctaacaaacttcaccctcaactacctcaggaactccatccggcacaacctgtcac

SEQ ID NO: 58045 - DNA, 100 bp, Homo sapiens
gtcagtggcgcaccatctgaaaacaacatcatgcagtggaatgcagttatatttgggacaaagcccacaaacgctatctgctaatgagcattgaccagag

SEQ ID NO: 58046 - DNA, 83 bp, Homo sapiens
ccccgaacgggggtcttcctcctccgccgttgacagcgctgataaagcagtttgtgtccgacgtggcctggggggagctggac

SEQ ID NO: 58047 - DNA, 84 bp, Homo sapiens
ccgctgcctgctgatctgagggccaaagtttggaagtctgttcggcacttgaagtactccttgtttaagaaatcactactgggc

SEQ ID NO: 58048 - DNA, 89 bp, Homo sapiens
ggcgccggccggctgcgaagacgcggtgggccgcccctccggatgaagcctgctgggagcgtgaatgacatggccctggatgccttcga

SEQ ID NO: 58049 - DNA, 51 bp, Homo sapiens
atattgatgcgccagtcactggtagctacagcaagctgggtagcaggcaga

SEQ ID NO: 58050 - DNA, 89 bp, Homo sapiens
cttcgccccgacgtggaaggcgctggccgaagacgtcaaaggcgcttcggcacaaaatgcacggcctgccagcagggtatccccccaac

SEQ ID NO: 58051 - DNA, 80 bp, Homo sapiens
gtgcctgctgcggctgggggtgctgcgccagcatttcagatcccccagaccagatgacctatcttccttccagctctgag

SEQ ID NO: 58052 - DNA, 83 bp, Homo sapiens
agtgaagagctgctgaagtacatgcttcatagtccttgcgtctctctgtgtaattacttcaagcctccaggatggcaatccag

SEQ ID NO: 58053 - DNA, 100 bp, Homo sapiens
acaccccgtactggcaggcatggagccaacaaggagaacctggagctcaacggcagcatcctgagtggaaacaagattttggtgaagcagtcgcccatgc

SEQ ID NO: 58054 - DNA, 98 bp, Homo sapiens
acagatgaagatgaacacagtattgaaatgcatttgccttatacagctaaagccatggaaagctcggggtgtggttttctctcggttgtgcctatttg

SEQ ID NO: 58055 - DNA, 94 bp, Homo sapiens
gagggtccgagccagccgctgttttgccggaggagcccctcaggccgttaacacagaaatctgcctcctgggccatgccgcttctaaggcctgt

SEQ ID NO: 58056 - DNA, 100 bp, Homo sapiens
cgagcccgcaaaaccatgtccaaaccaggaaatggacaggtactgcccttcctgcaagcagcaccagctggcaaccaagaagctggacctgtggatgctg

SEQ ID NO: 58057 - DNA, 82 bp, Homo sapiens
ttccgaaactgtcaagattggcaaggtaaaacttccttttcctgtagatcaaatcacagatcttccaaggaacgatttccag

SEQ ID NO: 58058 - DNA, 83 bp, Homo sapiens
ccgaaggccaaggaatcactgaagatcggcgagggaggacagggggttcatcatggctcagagtcaagatctccactgaagtt

SEQ ID NO: 58059 - DNA, 50 bp, Homo sapiens
tgaaatctgaaaaatttcaattccaatcgatatgaaaacttcatccatct

SEQ ID NO: 58060 - DNA, 100 bp, Homo sapiens
ctacggaagaagaatgtgaatggaaaccagatgaagaagatgagatttcggaaattggccttgcctctctgggtgcacctgatgaatacattgaaaagct

SEQ ID NO: 58061 - DNA, 100 bp, Homo sapiens
catttctgggtgacactcaacaggattcccgctgatcctggagaaactaaaaccttctgcacagcaaaggaaacaatcaacagactgaaaagacaaccta

SEQ ID NO: 58062 - DNA, 75 bp, Homo sapiens
cacagttcagcaccgccccagaaatcaaggctaaagtaaataatgccagcctgattggactgggttatactcaga

SEQ ID NO: 58063 - DNA, 103 bp, Homo sapiens
ggaaaaagcaagctgaagacatcaagaagatcttcgagttcaaagagaccctcggaacatgggaacagcgagagctgcccaacggacgtgtctattatgttga

SEQ ID NO: 58064 - DNA, 134 bp, Homo sapiens
gcagaagtcgcgtgtctaggtgagtcgcggtgggtcctcgcttgcagttcagcgaccacgggggatatgagactttctactcggaatatcctgagtgttgcgtggatgtaaaacccatttcacaagagaagatt

SEQ ID NO: 58065 - DNA, 100 bp, Homo sapiens
gactggtgaaatcgcaaactgggcgtctgttccggcgccggacccctatttgcaaaggtgctggagaatctggtaaaagcaccattgtgaagcagatgag

SEQ ID NO: 58066 - DNA, 100 bp, Homo sapiens
acggagctaagagatatctgcaatgatgtactgagtaattccctcctggtcccagacagtctaagaggcacagataaacgcagaaatggacctgaatttt

SEQ ID NO: 58067 - DNA, 101 bp, Homo sapiens
cggcgcaccgactggaccgggaaggagcatcccaggacctaccagaatctgttacagccaagttctacttctgaatctatggatcaactactaaacaaaaa

SEQ ID NO: 58068 - DNA, 50 bp, Homo sapiens
cagaattcaattaaagtggctcaggtactaccattaaagataccttcttc

SEQ ID NO: 58069 - DNA, 83 bp, Homo sapiens
ttggaggtagcctggcccggtgggcactgtgatctcagacttccagccttcagaacttttggtgccctggttgtcagatgttg

SEQ ID NO: 58070 - DNA, 98 bp, Homo sapiens
aaaggcagccgcggatcgccgcgctcagcgacaaacaaaagtctgggccaacggtcacaaaagttgtcactgttgtgacaaccaaaaaagcagttgtg

SEQ ID NO: 58071 - DNA, 100 bp, Homo sapiens
aagcaaccagtctcgatctggcccaatctctcctgcaagtatcccagttgtattccctgaatgactataaaccacccatttcgaaagcgaaaatgaccca

SEQ ID NO: 58072 - DNA, 50 bp, Homo sapiens
ggcaagttcaagatccacatcccagaatgttgtaccatctttgggtaggc

SEQ ID NO: 58073 - DNA, 78 bp, Homo sapiens
agaactgaaatggaggtcagagcttcattacagaagctcctggtaacgtttttatccatggatgacttgcttgggtaa

SEQ ID NO: 58074 - DNA, 60 bp, Homo sapiens
agacgagccccgagcccggctggacgccgctgcctcagctccgtggatggccgcgtgaga

SEQ ID NO: 58075 - DNA, 100 bp, Homo sapiens
gcggcagcaacacgatcggcgcccgcctgaaccgagtagaagacaagctggctggaggcgtgatcctgggtgtggccctgtggctccgccatgacccgca

SEQ ID NO: 58076 - DNA, 83 bp, Homo sapiens
acggcggcggctggagggaaccagtgggcgcggagcgcgtgctgggtgtgttgtgctctccgaccccttgaaggactcttctc

SEQ ID NO: 58077 - DNA, 50 bp, Homo sapiens
aaccaactgcaattcctacctccaggtgagcgagtgctgtgctttcatgg

SEQ ID NO: 58078 - DNA, 83 bp, Homo sapiens
attcgcggctcttcccgcccgccttccgccgtctcttcgagttcttcgtgctgctcaagcccgtgtccaggagccccgccagg

SEQ ID NO: 58079 - DNA, 74 bp, Homo sapiens
gcagtggtcgcttcttctccttgatggagaggagaaaacctatggtggctgtgaaggacctgatgccatgtatg

SEQ ID NO: 58080 - DNA, 75 bp, Homo sapiens
cgagcgcgccccaagcccgggcgccaccgctgccacctccgcgaggttcattttccagacactgaaagagcagaa

SEQ ID NO: 58081 - DNA, 83 bp, Homo sapiens
agcatctttactggaaaaaagtgaagagaatgcctgaatctaaggtgccatcctctgagaatcatcgcccagaaatgtgctct

SEQ ID NO: 58082 - DNA, 50 bp, Homo sapiens
cccagaaacgtcactatcaagaaggccatacaggaactaatgaaaatcca

SEQ ID NO: 58083 - DNA, 50 bp, Homo sapiens
gagactcatacgcaacctcaatggaacctggcttctgtatttaccatgta

SEQ ID NO: 58084 - DNA, 100 bp, Homo sapiens
cgaatttcagcgtaaactgcagcatgatgttctgaagcttgagtgggcagctgatgacacacttgggcagtgactttcccccaggggctggggtgctgga

SEQ ID NO: 58085 - DNA, 102 bp, Homo sapiens
actgaagctataaaaaatgatcacctcaggcaaatggaacgtgaaaggaggaagaaggcacctacgatcaaactctggagttccgtaggggaggtgatggcc

SEQ ID NO: 58086 - DNA, 101 bp, Homo sapiens
atctttatccaatcaagtgcccttggacaaagcctgaaaccaggtgctggagaatctggtaaaagcaccattgtgaagcagatgaggatcctgcatgttaa

SEQ ID NO: 58087 - DNA, 74 bp, Homo sapiens
acgtggtccggtatctctgtctgatgggagccagcgttgaggcgctgaccacgtatttcactcagctgtccgag

SEQ ID NO: 58088 - DNA, 100 bp, Homo sapiens
gcttactgccagaacacaaagccaaggctctgctctttgagggcccagtgttcaccatcataccaggggccagaggcgatggcttgcctccatgagaccc

SEQ ID NO: 58089 - DNA, 90 bp, Homo sapiens
ggtaggagcctggacactaatagaagtgccaggtcgacctgtcagccctcagtagggaacagacgcacaagctggagttgcagctggaag

SEQ ID NO: 58090 - DNA, 100 bp, Homo sapiens
cgatctgcacttcgcattttggcattgacatttaattttagggtcctttatatagaagggagagtgtggaaccactttgacagcggttcgtgcccaggcc

SEQ ID NO: 58091 - DNA, 78 bp, Homo sapiens
caactccaatgggcctttccagcccgtggtccttctccatattcgaggttggtcaaagaaaaagtgatgtatgaaaaa

SEQ ID NO: 58092 - DNA, 99 bp, Homo sapiens
ttcggggtgagcggccagctcatcgactccatggccaactccttcgtgggcacgcgctcctacatggctgccatcgaggagggcacgctggaggagatc

SEQ ID NO: 58093 - DNA, 75 bp, Homo sapiens
taaatgggcagctgaaatattaccagatataatacattgccaagcagaagaactctgaaaaattcaagattagtg

SEQ ID NO: 58094 - DNA, 76 bp, Homo sapiens
gtccggagtaacttggccaggctggccccgagcggaactggagaaagctgaggacatcaacatggctggagagcct

SEQ ID NO: 58095 - DNA, 100 bp, Homo sapiens
tggccccgcaggtcttcacccaggccctggagtgcatgcgcagaaaaacgttgacctcttggcgagaatgcaaagaagggaacgcttgcttatacgctgt

SEQ ID NO: 58096 - DNA, 100 bp, Homo sapiens
gaaaaatggcaaccctgtctgtaggaggaaaaactgtatcacgttttcgtagctgaacttcgtcacccagtccctagagccagcaagacatgggccccag

SEQ ID NO: 58097 - DNA, 100 bp, Homo sapiens
ttctggacacattgtattggtttgatgctcctacctggaacagacatggaaggtctttaatgtaactttaaatggttcaccaaaggatgctctaatggat

SEQ ID NO: 58098 - DNA, 75 bp, Homo sapiens
caatggaagcagctggcttcactgctcagaatcctcagagtgaaaacaccaacagtaagtaaaatgaaaaggggc

SEQ ID NO: 58099 - DNA, 100 bp, Homo sapiens
cctgttgccttttctcacttccggtttgacgtggagtgtggggatgaagtcctgtactggtgttaactgtctggcctatgatgaagccatcatggctcag

SEQ ID NO: 58100 - DNA, 100 bp, Homo sapiens
aaaacattgtaatggccatcgctggaaacaagtgcgacctctcagatattaggagcgagaacccgagcagcgccatgagcaacactaccgtcgtccccag

SEQ ID NO: 58101 - DNA, 100 bp, Homo sapiens
ggaccccaactccacccagcgctaccggctggaagccctcaagaatgagtccctggaacgccagatgcgtgaaatggaagagaactttgccgttgaagct

SEQ ID NO: 58102 - DNA, 87 bp, Homo sapiens
gttcttgggacaaacttcatttgggaccacttaatagtgagtcttccaaccagagcttgtgcagcgtcggatccttgagtgataaag

SEQ ID NO: 58103 - DNA, 154 bp, Homo sapiens
tgttggggagaagaggattggaggtgtcagtgttaaaggaacctctacaacgaaggtgaagccacggaagataagacggaatcagtccccaatgcctggaaattcctcattggattactgtgttttaaacagaatttcgtgaacagccttttat

SEQ ID NO: 58104 - DNA, 100 bp, Homo sapiens
gagaagtttctggtcactccccaggattatgcgcggctaatggaggttggcaggatgctactaccccttcatcagtgacctcccctacagaaggccctgg

SEQ ID NO: 58105 - DNA, 100 bp, Homo sapiens
gaggcagtggcaagaaaaggggctttgcctttgtaacctttgacgaccatgactccgtggataagattgtcaaaggaggcaatgtatatgcaactggtgg

SEQ ID NO: 58106 - DNA, 90 bp, Homo sapiens
gccaagttatgcagccttaaacgacttgttctctatcgaacaaaagtagaggctgaagggtatgtgattggcagctgtattaaacacatt

SEQ ID NO: 58107 - DNA, 98 bp, Homo sapiens
acaccttttccacagggaattgagttggtgaccagtatgcactgaagatgaggtttgtggaccatgtgtttgatgaacaagtgatagattctctgact

SEQ ID NO: 58108 - DNA, 100 bp, Homo sapiens
gagtcgtggcgtcgtctgcgaccgctgccttctcgggagcggcattgcccccgaatgtccagattatccctgtttttgtgaccaaagaggaagccattag

SEQ ID NO: 58109 - DNA, 75 bp, Homo sapiens
agataaattcatcggtgaaattcgcttctggtaatactgtaggacccattccaacaatctcgtaaaacatggtgg

SEQ ID NO: 58110 - DNA, 88 bp, Homo sapiens
gatggaaagatggagatgaacctctaacacagtggaaaggaaccgttctggatcagattagcctgaggcctgctcagtcgttcctaat

SEQ ID NO: 58111 - DNA, 100 bp, Homo sapiens
tacgttgacatctcccccgggactgtggactggaaccacatctactttgaaaggaggtggtgagaaagcccgagcacttcacatatcaagaggaaaacta

SEQ ID NO: 58112 - DNA, 116 bp, Homo sapiens
ggagctgtgcagccgcgaggaggcgcgggaggtgttcgagaacgaccccgagacggctttccatctgatggtcccctggtgtgtgccctggaacaggagcgaaggctccgcctccc

SEQ ID NO: 58113 - DNA, 98 bp, Homo sapiens
ggcgggtcaaagaagtagtgaagaagcattctcagttcataggctatcccatcaccctttatggcaaactctttgattctacaatagctgatgaggga

SEQ ID NO: 58114 - DNA, 100 bp, Homo sapiens
gatgatccgcaatcccaacagcctcaaagccatggcgcccctctcctctgggcatcagggatttggggtactctcagtaatattggcaaaccatgccatc

SEQ ID NO: 58115 - DNA, 91 bp, Homo sapiens
cagttggaagcagccgatccagcctgcggagcctgtggggcagatgtgtatatctcatgattgatatggagaaactagtcatgggccaaag

SEQ ID NO: 58116 - DNA, 101 bp, Homo sapiens
gcgtgtatgggatcttcaactcagtcctgtttgacaacatctgccctacccccatcctgcagaaggtatctccatacagccaagaataaagaaagaaaggg

SEQ ID NO: 58117 - DNA, 100 bp, Homo sapiens
ggaaagggcagcagcagccaggtgtggcagtgacagggagtaccgggaccctctggtgataatggcatcagtgttacaatgatcttggtagcctggatgg

SEQ ID NO: 58118 - DNA, 95 bp, Homo sapiens
cgcgcacatcactcccgagtggaggaagcaatacatccagtatgaggtggtggtatcatggatacagaaatgtctgaagatatagaccacaactt

SEQ ID NO: 58119 - DNA, 75 bp, Homo sapiens
gtatcaagtaatggtgcaaagcctgaagtaaaacttccttttcctgtagatcaaatcacagatcttccaaggaac

SEQ ID NO: 58120 - DNA, 100 bp, Homo sapiens
cggcggctcgtccgtgggggtccgggtgttcgcggtcggccgccaccaggtcaccctggaagagtcgctggccgaaggcctgctggtgggtacccttgat

SEQ ID NO: 58121 - DNA, 80 bp, Homo sapiens
cgaggctccgcaccagccgcgcttctgtccgcctgcagatgtgtcttgctgaatcagggctctcttatccctgccatcga

SEQ ID NO: 58122 - DNA, 100 bp, Homo sapiens
aaaggctcaaccaagagaaaaaggtctctgtttatttagaagacacagactaacaattttagatgaaatgagccgtcagactgctacagcattacctacc

SEQ ID NO: 58123 - DNA, 97 bp, Homo sapiens
gctcctcagcctgtgagaacagatgtggccgtcctgcggtaccagccaccccctgagtatggggtaacgagatccaaaggggctattctgaacattt

SEQ ID NO: 58124 - DNA, 85 bp, Homo sapiens
tctgctggtgccctgatcttggaattcccaccgtctagaactatataagagttcggaccgcccagcacacaaggtcagcatgctg

SEQ ID NO: 58125 - DNA, 101 bp, Homo sapiens
gagcatggcaggctccctgcctccctgcgtggtggactgtggcaccgggtactaggttttgacaagcttgcatcatgcgtgagtataagctagtcgttctt

SEQ ID NO: 58126 - DNA, 95 bp, Homo sapiens
gtctggaaagcgtcacttggggaaaacaaggtggacccgggaagaggtggtttgtgatgaaaatggttccaagggctatggatttgtacactttg

SEQ ID NO: 58127 - DNA, 75 bp, Homo sapiens
cggagggagacgcgctgccgaggagaacccagcgggatttccagatgtgacttgcactcagaagatcagtggtca

SEQ ID NO: 58128 - DNA, 101 bp, Homo sapiens
gggggagcggcgctgcctgtggagatccgcggaggccgacaggattcgttggctgccgtccccgctgctgtgcattggggtcaaagaattgactgtagatc

SEQ ID NO: 58129 - DNA, 87 bp, Homo sapiens
cggggtgtcgagggatttattcccaagaactacatccgcgtcaagccccatccattggcacagcaacgaggggacagtgaggacgga

SEQ ID NO: 58130 - DNA, 98 bp, Homo sapiens
agcgactcactgacggagaagcagtggctcaagaacctcaaccagaaccctcggactttgctgcctaaattctatggactgtactgtgtgcaggcagg

SEQ ID NO: 58131 - DNA, 82 bp, Homo sapiens
ggacctggaggccatccggctgcgggaggaggccatcctgcagatggagatccagacatttaatgtggatgcaccatgccag

SEQ ID NO: 58132 - DNA, 82 bp, Homo sapiens
gcttcgtgtggagcggcacggctgaggcccgcaagcgcaagggttgttgggggctttgacgtactgacagccatggagaatg

SEQ ID NO: 58133 - DNA, 98 bp, Homo sapiens
gtggtggcaggctgggcacgaggaccatgctgggccggagcctccgagaaatgttccagtggatttgatcgtcatcggcaggactgggtggacagtgg

SEQ ID NO: 58134 - DNA, 82 bp, Homo sapiens
tggaaagcaagggattgctggctacagcttcagaagaccgaagcgttcgtatctggaaggtcccgcagcccccggaagccaa

SEQ ID NO: 58135 - DNA, 83 bp, Homo sapiens
cgcgagctggtggacaaagcagatggggacttgcttggggtcttgctgcccaggctggtcttgaactcgtggcgtcaagggat

SEQ ID NO: 58136 - DNA, 100 bp, Homo sapiens
cagccattgagattatacggaaccagaagcagattgccaacattgaccgtattacaaacattactctactgactggcagagacaggagaggtagatgtcc

SEQ ID NO: 58137 - DNA, 74 bp, Homo sapiens
ggacccctggactcctcatctgtatgctcggcccaggaagtacacgagaagctccgaggatggctgaagtccaa

SEQ ID NO: 58138 - DNA, 90 bp, Homo sapiens
gctggaacaaggagaagaaccatggagactggaggaagaattcccaagccagagctttccaggtgacagattgactgggatcccctcgca

SEQ ID NO: 58139 - DNA, 75 bp, Homo sapiens
cagcaccagcaagcggcattggctgcggtacttttaggttgaaatacgcccctccagcagaaagtctggactcca

SEQ ID NO: 58140 - DNA, 82 bp, Homo sapiens
cgcagggcacgcgttcgcgcacaccctagcacacatgaacacgcgcaagatgtgtcttgctgaatcagggctctcttatccc

SEQ ID NO: 58141 - DNA, 83 bp, Homo sapiens
gaaacaattgatttgctcttacgtatttgtgtgacttgactcttcaaacacaaaggactccctggaggaaaagcggaagcggc

SEQ ID NO: 58142 - DNA, 100 bp, Homo sapiens
caagaaagcaggatggactatcattactcctccaacaccaatcatcccagacggccgccacaaaggattttgtggagtcgccccaggcctgacggcgtta

SEQ ID NO: 58143 - DNA, 116 bp, Homo sapiens
ctctagtaacccgcgaaatgatgggatagcgttgcaaatccttaaaagagtcttaacggaacttagtgatttggcccgtgaccctccagcacaatgttctgcaggtccagttgggg

SEQ ID NO: 58144 - DNA, 83 bp, Homo sapiens
cacgtgcagaccggaagagacacgcggggcttcaggtgtctgtgacctttgaggatgtggctgtgacattcacccaggaggag

SEQ ID NO: 58145 - DNA, 100 bp, Homo sapiens
cttacagaaggcatatgaatccaaaattgattatgacaagagaatggatcttggagaatgtctgaaagtccatgacctggctttaagagcggattatgaa

SEQ ID NO: 58146 - DNA, 100 bp, Homo sapiens
gtcatgagcgacagcggcgagcagaactacggcgagcggggtatttgaagtataccatacaactgttttgaaaatccagcgtggacaatggctactcaag

SEQ ID NO: 58147 - DNA, 97 bp, Homo sapiens
tccacactaagcggctttaccggtccagtgcgaggcattgacttccataagcagcagccactgttcgtctctggaggagatgactataagattaagg

SEQ ID NO: 58148 - DNA, 87 bp, Homo sapiens
ccacccgatggaagattcgatggacatggacatgagccccctgaggccccagaactatcttttcgaactgataaatttcaaacggaa

SEQ ID NO: 58149 - DNA, 89 bp, Homo sapiens
gaaatacttggattctatccctcctggtcagtacatggattcttcacttgttaaggacctgggccttgagaggaccctccttcctgata

SEQ ID NO: 58150 - DNA, 74 bp, Homo sapiens
aggaccagcggtagctcccgggttaatatgatcctctgttgaagcaagaagacaaactgtatggtggagaaaga

SEQ ID NO: 58151 - DNA, 75 bp, Homo sapiens
agggcaggggtgtccgtctatggtgtattacctgactgcttaaccgatggctctgatgtggtcagtgaccttgaa

SEQ ID NO: 58152 - DNA, 100 bp, Homo sapiens
aagaggacagttgttggcggttgctggatccactggagcaggcaaggggttgggcatgttccaggatctgtctatcgacttctctcaggaggaatgggag

SEQ ID NO: 58153 - DNA, 82 bp, Homo sapiens
ccgcaccaggtcttgtagcagcgcctcctcgttactgtaaaatggggaaaggagaaatttgaaggtgtagaattgaatacag

SEQ ID NO: 58154 - DNA, 126 bp, Homo sapiens
ccaacttcggcaagatccagatcgggatttacgtggagatcaagcgcagcgatgcctcgaagcggaggatccctgtgtcccagccgggcatggccgacccccaccagcttttcgatgacacaagtt

SEQ ID NO: 58155 - DNA, 74 bp, Homo sapiens
tgcagcttgagaagaggtgggggtaaggatgactgataggaaatgttggtagttacgagtcacatcgttgtcta

SEQ ID NO: 58156 - DNA, 100 bp, Homo sapiens
gaggaagacggggcggaagaccaagatcatcgagatggacccattccaacaatctcgtaaaacatggtggattactatgaagttctaggcgtgcagagac

SEQ ID NO: 58157 - DNA, 101 bp, Homo sapiens
accccagcccctctccagctcgaaatcccctaccacttatgtcttggatgaagatgaacctcgattccttgaagaagttgattacagtgcagaaagtaatg

SEQ ID NO: 58158 - DNA, 50 bp, Homo sapiens
gtcaaggaagacccactggagactagagatgatcgctatggaaaatcctg

SEQ ID NO: 58159 - DNA, 80 bp, Homo sapiens
gagaggaagaactttaaattcatccttcagagaagctcgagaagagggactctctttctgtggatgttttggcccagctt

SEQ ID NO: 58160 - DNA, 100 bp, Homo sapiens
gaggagtttgatgctcgctgggtaacatacttcaacaagccagatatagatgcctgggaattgcgtaaagggtcatctagtagcaggcacccaaatcagg

SEQ ID NO: 58161 - DNA, 100 bp, Homo sapiens
acaagtgccagtgtgaggaaggcttccagctggacccccacacgaaggcctgcaaggctgtggaagaatggctacgtgactgtcagtgagatcaaagcca

SEQ ID NO: 58162 - DNA, 75 bp, Homo sapiens
ccagtcaaccatcagacagactcatgactgaaaaacagctggtcacctgacttttgaatgccgcaattttctccg

SEQ ID NO: 58163 - DNA, 96 bp, Homo sapiens
gtcggcgccccgcgcctgccgctgccctacggcttctccgccatgcaaggctggcgcgtctccatggaggctcaggccacagggtcaccacataca

SEQ ID NO: 58164 - DNA, 95 bp, Homo sapiens
gaagctcagaacgctggactctccctttgcagggccgttgctccagggagaactgcaaatatcttcatccacccccacatttaaaaacgcagttg

SEQ ID NO: 58165 - DNA, 88 bp, Homo sapiens
gctaagcggcgccgggcgggagaagagcggagcagtggtcggagatgtggcgaccgagctcaggccccggggcctccagcggcaccag

SEQ ID NO: 58166 - DNA, 101 bp, Homo sapiens
ctttgcctgggcggtgcggacaagcgcctgcggatatgttcaaggaatgagtgatttactttcccctcttttatatgtgatggaaaatgaagtggatgcct

SEQ ID NO: 58167 - DNA, 100 bp, Homo sapiens
atcccctgaagatttgcctgccctcagtggttaacttttttgctgcaatcacaaactgtctgtggttcatgagaaaaaatcccaagaaggaaagccaaaa

SEQ ID NO: 58168 - DNA, 100 bp, Homo sapiens
tgcagacatgcttcaggctcctctctttactgctgaagctttacttcgagctcatgctgactcttttggtgatcccttcttcccccggactacacagata

SEQ ID NO: 58169 - DNA, 88 bp, Homo sapiens
aattatccaacaagaaaaagacctgtggctattaagataggtgctggagaatctggtaaaagcaccattgtgaagcagatgaggatcc

SEQ ID NO: 58170 - DNA, 51 bp, Homo sapiens
gggcgcccagctgccaacaccaagtttcgtgtggctgatcaaagaaagaag

SEQ ID NO: 58171 - DNA, 97 bp, Homo sapiens
aacggaaagatgaacggtagcaccttaaataaagcccatgatgggcccgtctatagcatggtttccaccgatcgacatctgcttagtgctggggatg

SEQ ID NO: 58172 - DNA, 83 bp, Homo sapiens
cattattatgtggactaccggagcgacagcgcagtccaagaccttgcagggtgagcccatcactttctgtgaggagagttttg

SEQ ID NO: 58173 - DNA, 80 bp, Homo sapiens
attgccggcaagagggagttaaggacattccaggcagaggcaaggttgtggaacttttagcaagtgctcttatggacttg

SEQ ID NO: 58174 - DNA, 96 bp, Homo sapiens
ttctactggacttcatgcttagatacatgtataacaaggtgctttgtaccgttacatttgattcattagaatctggtattaagtcagatcaagtta

SEQ ID NO: 58175 - DNA, 75 bp, Homo sapiens
gtcgctgctgcaaccccaagatgtcggagacacggtggaaacgcttatgctgttaaaaaacccgctccagcaccc

SEQ ID NO: 58176 - DNA, 131 bp, Homo sapiens
cttacctttgactaccaccagaagctgcagggcaagccacagagccatgagctggactcacaccacccggcaagaactgctcactacggctccctgccccagaagtcacacggccggacccaagatgaaaa

SEQ ID NO: 58177 - DNA, 101 bp, Homo sapiens
aggcatgattattgggccaccaaggattactgatctctcattacccaactatctgatggcatcttcggttggactgcttcctacccagcttctgaattctt

SEQ ID NO: 58178 - DNA, 100 bp, Homo sapiens
cgaagaccccttttttgtagtccgagggtgctggagaatctggtaaaagcaccattgtgaagcagatgaggatcctgcatgttaatgggtttaatggaga

SEQ ID NO: 58179 - DNA, 100 bp, Homo sapiens
tccatcaacaggggcaaatcgaagtagagagcgaaaccatcttcaagttagcagcgtttattttacagggttacattccgaaaagcaaatgggagatgga

SEQ ID NO: 58180 - DNA, 83 bp, Homo sapiens
tcataagtggaattttggagatattcaaagcaaggatggaacattactgtggacctggtcattggccctaaagggatccgcca

SEQ ID NO: 58181 - DNA, 98 bp, Homo sapiens
gaagagaactgtctcctggtgaccgagcacccgcctccgggcatcttcaactggtatcagcatggaagccatgagtgagaataaaatggtgccctctg

SEQ ID NO: 58182 - DNA, 75 bp, Homo sapiens
ctgctcgggcccctgacgaactgaccttagaggtcctaggcctacttacaagcctccagtctcaaattatccagg

SEQ ID NO: 58183 - DNA, 100 bp, Homo sapiens
ccaagataagaccgggatggtggactttgctctggaatctggtgcttggagttatgacctacagtgatacagggaaactaagtccagaaacccaatctgc

SEQ ID NO: 58184 - DNA, 100 bp, Homo sapiens
gcccccatggagggcatcagaaggcctgaccaggccctgctcccagagctcccagacttgaaactgcatctgcagagcactgattatggtaacttcctgg

SEQ ID NO: 58185 - DNA, 83 bp, Homo sapiens
ccggcggctgctgctgctgctgacgctgctgctgcccggcctcggggaactgtggctgcaccatctgtcttcatcttcccgcc

SEQ ID NO: 58186 - DNA, 87 bp, Homo sapiens
caagtcagagggcttttactcctacctgtgtaccgagccagagttgcatgctgagaatttgaaaaatgaagatgatgtagacactgg

SEQ ID NO: 58187 - DNA, 104 bp, Homo sapiens
aggtggcagcgcgagctgggaccagcgtctcggaggcgccgcaggtgctggagaatctggtaaaagcaccattgtgaagcagatgaggatcctgcatgttaatg

SEQ ID NO: 58188 - DNA, 102 bp, Homo sapiens
tctccagacggacattttggatccaagtttgttactgcagtggctacaggtgagggttcagagtatggtgccagtggagaagatgcgctcagcaggatccag

SEQ ID NO: 58189 - DNA, 100 bp, Homo sapiens
gggctcagggtgtgcgttcccctctgctgaggcagagctccagtgaacagtgcaggaaatgggtcctgatgaatatgaagagatggaagaagaggaggag

SEQ ID NO: 58190 - DNA, 85 bp, Homo sapiens
caaattcaattaaaaggaatcctaatgcaccggttgtcagacgaggttggctttataaacagaaaatgatgcatcctgttgccag

SEQ ID NO: 58191 - DNA, 100 bp, Homo sapiens
ggagcccattttagaggcatctgttctatcttcccatcataaaaaaatgggagttttgtggttcatgatataccttctggatcttatgtagtggaagttg

SEQ ID NO: 58192 - DNA, 100 bp, Homo sapiens
ataggtgctgggttcatttaccctttggtcggaacgatacagaaggtggtcatggcactaggagactacatgggcgcctcctgtcacgcctgtatcgggg

SEQ ID NO: 58193 - DNA, 51 bp, Homo sapiens
ccagtgcccatgaaggtcagactgagcttgtagattttcagtggaaactgg

SEQ ID NO: 58194 - DNA, 112 bp, Homo sapiens
gcggacgcgactcgagggtgacgctcgctccgctcgtcccgctcgtcatggcctacccgggatacggaggaggggagaactgcgacacatcaccaagctgaagccctggagc

SEQ ID NO: 58195 - DNA, 90 bp, Homo sapiens
ccggcgccaggggagccgccacaggtcacgagaagagaatgccttctagatgcaaaatcacctccaaaccagaccacttttcttgacttg

SEQ ID NO: 58196 - DNA, 76 bp, Homo sapiens
gccgccccggccaggagggaccccgaggactcacggtgggttttatcaacagcctcaagttctccagctctgggga

SEQ ID NO: 58197 - DNA, 75 bp, Homo sapiens
cccgaggagtagtcgctggagtccgcgcctccctggtatgacgaggaagcgatggtggaggctgtggccctctac

SEQ ID NO: 58198 - DNA, 100 bp, Homo sapiens
gccccttgcaacaaaggcagactgagcgccagagaggacgtttccaactcaaaggtgctgataagactgtgaaaggcccagatggactgaccgcctttga

SEQ ID NO: 58199 - DNA, 97 bp, Homo sapiens
cagctgggagacggcacaggacactaaaccaggaaaatgttctgctgctgccctggatgttcttgcaaatgtgtatcgtgatgaactgctgccacat

SEQ ID NO: 58200 - DNA, 100 bp, Homo sapiens
cgcagatcgcaggaccgtggagaagacttggaagctcatggacaaagtggaaagaatacccacctcatgtccaaaaagttgaaattaatcctgtaaggtt

SEQ ID NO: 58201 - DNA, 74 bp, Homo sapiens
cctcatccttccttttctcggggctcccgtggggcggcgactggcggcgcgatggacctgaccgggctcctgct

SEQ ID NO: 58202 - DNA, 82 bp, Homo sapiens
gcggatggccccaggtgtaagcgcagaaagcaggcgaacccgcggcgcaataacgaaactgaggcttcttgaagagcttgaa

SEQ ID NO: 58203 - DNA, 100 bp, Homo sapiens
aactaggaatctatgatgctgatggtgatggagattttgatgtggatgatgccaaagttttattaggagtacaagcgcaagctagccagagtttccctgg

SEQ ID NO: 58204 - DNA, 98 bp, Homo sapiens
cgagcccaaaccccgccaccatcataggatgtggagagcatcttgtgcgcaccatactggctagagaatgttcacatgctttacaagctgaggatgct

SEQ ID NO: 58205 - DNA, 75 bp, Homo sapiens
gcgcggggtacctgttgacttgggaagggccaggatcgcgatcaatggtgctcaaaaatgtgataactttgctga

SEQ ID NO: 58206 - DNA, 96 bp, Homo sapiens
gagggagcaagaggtgtcggaggtctcatctttgaactactgccggagcttctgccaggtttttcgttggaatatacgttgcacatttatggcgat

SEQ ID NO: 58207 - DNA, 74 bp, Homo sapiens
tgtgggcgcgcggcacgcagccgggaggccgaggactcggagttcacctgcagtacgaggatgtcgtccaggaa

SEQ ID NO: 58208 - DNA, 100 bp, Homo sapiens
gggtctccaagttggagtgcatggcagctaccctccacgggagacgaagaggtgtttgtttccgaccaagctccacgaagatctctgtgagaagaggacg

SEQ ID NO: 58209 - DNA, 96 bp, Homo sapiens
tgacatggaaaacaaggaaaatggctctgtcggtgtaaaaaaaaaatgtcactgaaattcacaaatgcaaaacggattgaaggacttgatagtaat

SEQ ID NO: 58210 - DNA, 98 bp, Homo sapiens
agcacatgaccagcttagcttctgtcctaaaggaaaatcaagaagatctgggcctgtgggaagagaaatttggaaaatttgtggatatcaaagctaat

SEQ ID NO: 58211 - DNA, 100 bp, Homo sapiens
cctaaggagctggtgtcttcatccagaagggacagtttgtgccagctctccagagagaaaagggtttggatccagctcgagtcaacgtccctgtcattgg

SEQ ID NO: 58212 - DNA, 100 bp, Homo sapiens
agatgatgagaaataaggacaaaagccaagaggaggacagttcgctacacagcaatgcatcgaggctcagaacgcccagcagctccatgaacgaatccag

SEQ ID NO: 58213 - DNA, 100 bp, Homo sapiens
ggaaaaaggggaagaagaagggcaagaaggcgccagcaggcccttccacctgcctcgtatccctgttgctgactccgtccaccctgttcctgttagatga

SEQ ID NO: 58214 - DNA, 101 bp, Homo sapiens
gttaccggacagcaattaaacacagaaggaaatacccagactgttactacaacctcgggcgtctgggaaatgtttcaacgtgcgcaagcgttgcggcggcg

SEQ ID NO: 58215 - DNA, 83 bp, Homo sapiens
tggaaacgggctctaacaatgacacacgagtacacgagacaggattgagaaaggagagattcaaattgtgacttcagattcaa

SEQ ID NO: 58216 - DNA, 71 bp, Homo sapiens
ccgggtctgagcgcggctgcccaggttgacctttctgcgggaggtcacagtgctgtcgatatcaccaaggt

SEQ ID NO: 58217 - DNA, 50 bp, Homo sapiens
gttcttcttcgagtatttgtagaaggagtgttgcggagataggaacatgg

SEQ ID NO: 58218 - DNA, 75 bp, Homo sapiens
cagtgggaggagcaatgagaggcaatcctgttaatttggagtggcccctggagtcagtttcctacaccatccgag

SEQ ID NO: 58219 - DNA, 100 bp, Homo sapiens
ctcaatcttgagagatgagcaccagttacacaaggacttctttatccgagcgctggattgcatgagaaggtggagtctttcattttggatcaggatgatt

SEQ ID NO: 58220 - DNA, 98 bp, Homo sapiens
gggtacgagtggccgaccacggatttgcattgccgaggacgggaccccagggcagcgaagcagatccaacttagaaataatgtttcattcaagataag

SEQ ID NO: 58221 - DNA, 90 bp, Homo sapiens
aatattcttcaccaggcgaggattgagtcgcagtcgcgtcaggaactcgcctccagggaagtcgcggccactgcctgtgtgacggatgtg

SEQ ID NO: 58222 - DNA, 50 bp, Homo sapiens
cgagatcagccagccgaccgagatatgatgcttcctggtgtgtttagtgg

SEQ ID NO: 58223 - DNA, 71 bp, Homo sapiens
ggagtgaaggtcgcaccgcggcggagatctataaggacaggcagaaattctcagaacaggttttcaaagtg

SEQ ID NO: 58224 - DNA, 74 bp, Homo sapiens
cttcattctcttggactgaacttaaatactgatagggaaccggtaattgtgcattctcaaaatgggaaccagat

SEQ ID NO: 58225 - DNA, 80 bp, Homo sapiens
aggccatcgattgttggtgccagttggaaagaaccttttccagttggttttcagaagatcctgacactgacatatgtaga

SEQ ID NO: 58226 - DNA, 100 bp, Homo sapiens
acgcagtcactgcagcactggtggaacttgagatgcctggaatgatgtcgtcagtaatgcctggaatgatgatgtctcatatgtctcaggcttccatgca

SEQ ID NO: 58227 - DNA, 83 bp, Homo sapiens
gctggaaactgttctgagcaggaagggcagcagttaccggtattgtaagaacaagccgtacccaaagtctcgcttctgccgag

SEQ ID NO: 58228 - DNA, 50 bp, Homo sapiens
gtctgaagctgatggaagatggaacgatggtatgttacttacggtcatga

SEQ ID NO: 58229 - DNA, 82 bp, Homo sapiens
aatggagctggaaaacatcgtggccaacacggtcttgctgaaagccagggaagatataattggtgattacaactttcctcta

SEQ ID NO: 58230 - DNA, 75 bp, Homo sapiens
ggagacctacctgcggcgtcggcagctgctgctccgagctcctgcttatgtgtcagtctgtctcctcctcttgtg

SEQ ID NO: 58231 - DNA, 75 bp, Homo sapiens
tggctgactacctgctgtacaccctcaacaaacaccagcgctttggggtatttgtggtgcagcagattcccaaca

SEQ ID NO: 58232 - DNA, 98 bp, Homo sapiens
ggccactgactcctacttcctctgtatagagcaactgttgaactcagctgcctgtagcttgctcctgagaccaaggctgtcattcattggattatgga

SEQ ID NO: 58233 - DNA, 90 bp, Homo sapiens
ctctcctaccacaaacagcacagctccatttggcctgaagcctcgatcagggttatgatcatagctactacttcattgcaacctttatta

SEQ ID NO: 58234 - DNA, 75 bp, Homo sapiens
cccttcctggtcggattacactcctgcttccagacgacaagtcgtgttttaactcaaatgggtgatgaaaaggac

SEQ ID NO: 58235 - DNA, 90 bp, Homo sapiens
aaaaaaaccttcgactatgcagagacatgagatggtagccaacccctcaggatagaatttttgcggcatttgaagagctttttccagatt

SEQ ID NO: 58236 - DNA, 110 bp, Homo sapiens
gattattgagcggctggaccacctggagaatgtcatcaagcagcacattcaaggatcaggagaaggtctggggaaaataatccagagatttccacagaaggactgggatg

SEQ ID NO: 58237 - DNA, 100 bp, Homo sapiens
ctgggagcgcctggcagttctggtcctcctaggagcggccgcctgcggccggctgcgtgcacttttcctacaaagcatcgtgtgagatccgcgtgcttat

SEQ ID NO: 58238 - DNA, 51 bp, Homo sapiens
ctctgatgtgtctctcacagcttgaaaagcgtcctgggagatgaagtcatt

SEQ ID NO: 58239 - DNA, 100 bp, Homo sapiens
ctctgggctacggactatgggcgaatagctctgaccacccggcgaaggatgttgagaaagagaaggaaacccacagttacctcagcaaagaggagatcaa

SEQ ID NO: 58240 - DNA, 74 bp, Homo sapiens
ctctttccccgtcagcatcccagccgtgctcacgtaaaatgtttattggaggcttgagctgggatacaagcaaa

SEQ ID NO: 58241 - DNA, 50 bp, Homo sapiens
cggcgcggcaggagcgcgttgagggactcacaaggccaatcagccccccc

SEQ ID NO: 58242 - DNA, 82 bp, Homo sapiens
gcaaacccaaagatccccgttcctggagattctgattgaggtggagccttttgccagcttgaccgaggccgtgcggagctca

SEQ ID NO: 58243 - DNA, 100 bp, Homo sapiens
cccgctgctgctgccgctgccgccctgagtcactgcctgcgcagctccggccgcctggctccccatactagtcgccgggatgggcgtgttttgggcgtgc

SEQ ID NO: 58244 - DNA, 100 bp, Homo sapiens
cctatagaccagtgtaataccctgaatccctacaaggtgaatatcttaaccagacttgccgcagaattgaacaaatttatgctggaaaaagtgactgagg

SEQ ID NO: 58245 - DNA, 145 bp, Homo sapiens
gggagccgggccctcccctcaggaacgtgtcccggggccgacccggcccgtagtgtggaagcagcttcagctgaccatgccactgcctcggtacggctccgggcagcagccactgatcctgccccagtctattcagctgccacct

SEQ ID NO: 58246 - DNA, 76 bp, Homo sapiens
ctgggctcgccagtcttggggacagtgtcagcgtttggtgcacctcgatttggaggaagtagggcagggcccttat

SEQ ID NO: 58247 - DNA, 100 bp, Homo sapiens
ggagtcgtccgcttatagtggaggctgctaggagccggtcagaggagtgaagatagtccaagtcctaagagacagcgcctctctcattcagtctttgatt

SEQ ID NO: 58248 - DNA, 82 bp, Homo sapiens
ccccagagcccccgaaggcctgtgcacagaaatcctaagtaatgcactgaagagaggagagatcattgcaaagcagggagga

SEQ ID NO: 58249 - DNA, 100 bp, Homo sapiens
ctcagcctcccaggtagctgggattacagctccctacaccatcatcaccttccccttcctgtttgctgtgatgttcggggatgtgggccacgggctgctc

SEQ ID NO: 58250 - DNA, 75 bp, Homo sapiens
ggaatatgtttttgctgactccaaagatctcacttgcttatctgaagaagattgtccaggctcatattgggaatg

SEQ ID NO: 58251 - DNA, 100 bp, Homo sapiens
ctgtgacagggtccaacagggcctggtccgtgtccggtcccccaaatctgtcgtccctgcccccaggcactgctcagcacgcaggcatgtgaggaagctg

SEQ ID NO: 58252 - DNA, 75 bp, Homo sapiens
gggcagacggattcatttagagctgcggaacaggacgccctctgatgcccagggccccggccagtgcccagcccc

SEQ ID NO: 58253 - DNA, 100 bp, Homo sapiens
atcgaattgaaagacctggtcatggggacagacgccaaggatctcccattaaccagtcataatgaagtaagaacaagaagatggggaagaggaagtgtaa

SEQ ID NO: 58254 - DNA, 89 bp, Homo sapiens
ttcactcctcttcacttcttcacggacaaacataaattgcagagattcctgactgctgacatggccctggtggcgacagtctatgcgcc

SEQ ID NO: 58255 - DNA, 75 bp, Homo sapiens
ttattaaaggaagcacacctaagagagtaaaacttgtctcggcacagagtcaagtaaagaaagccaacatacagt

SEQ ID NO: 58256 - DNA, 100 bp, Homo sapiens
acatcaggtcagctgtctcagtttggggcaagtttatacgggcaacaaaacagaaagaatttactttcaggttttcttacctaaagggagcaaagagaag

SEQ ID NO: 58257 - DNA, 90 bp, Homo sapiens
gggacgcggggtctcgcggcgcctggcagcagagaccaccagaagggtactactgagcgagtgtgcttgatccagggaacggttgaagca

SEQ ID NO: 58258 - DNA, 101 bp, Homo sapiens
ggccggagaaggccgccgggcccgggcatggtggtctggggcaacgcggaaggtatacaaaactaggatatgctggaaatacagaaccacagtttatcatc

SEQ ID NO: 58259 - DNA, 100 bp, Homo sapiens
tcaggttcagacccgaccgttatccagtcggttcgtggagaggagaggctggacgtaaagaaagaagtgatgcactcaattctgcaatagataaaatgac

SEQ ID NO: 58260 - DNA, 100 bp, Homo sapiens
tctctcggtttgggcggatcatcaactcgcgggtcctcgtggatcagactacagatactagagtaaaaggatggtttcttctggacaattatatacccac

SEQ ID NO: 58261 - DNA, 99 bp, Homo sapiens
ggatgggcaccctgggctcgattattttcatctcagcctagtgacgatgaatcaagtagtgatgaaaccagtaatcagcccagtcctgcctttagacga

SEQ ID NO: 58262 - DNA, 74 bp, Homo sapiens
gaagatgtcggccttctgagccgactgcggtggtcaagaggagcccagtttcctccaattgcagcacaagacct

SEQ ID NO: 58263 - DNA, 95 bp, Homo sapiens
atgccaagtccttgggattgtgaccccaggaattgtagtgtgccggtccaacaaaagcccttgggtctgtttgacttgttcaagtgtccactgtg

SEQ ID NO: 58264 - DNA, 75 bp, Homo sapiens
gcagcgcgatctgcgcgaccagaccggcccccccgagctctggacttattggacaaaatgttgacattcaaccca

SEQ ID NO: 58265 - DNA, 74 bp, Homo sapiens
tcactttcggcggagggaccaaggtggagatcaaactgcagtgtgccctgaaccgccctgccttctttgctgag

SEQ ID NO: 58266 - DNA, 75 bp, Homo sapiens
cgcgtttcccgcctgagcgcaactagcggcgggtcgtgggcacctccagcgtctgagagaagaaatggaagaaat

SEQ ID NO: 58267 - DNA, 98 bp, Homo sapiens
gcagtttgtgtgctcggatggctcgggccaggccaccggacagggagatgcacttatttacatggaaccagagaaacaagtgatgtccaggtcgtcag

SEQ ID NO: 58268 - DNA, 98 bp, Homo sapiens
tgggaccgccttccaggtgacccagggaacgggaccggagcttcatgcctgcaaagaggctattcatgctcttatggaaaatgctgtgcaacccttac

SEQ ID NO: 58269 - DNA, 100 bp, Homo sapiens
tttcccaacgagcctgctgcagtcattgccctcaacaccattaaggaatggcttgccaagaatcaccatgagctgtcaaagctcgaaaaacagcagcaga

SEQ ID NO: 58270 - DNA, 50 bp, Homo sapiens
tctgttccaaatgctttgctggtactactgagcgagtgtgcttgatccag

SEQ ID NO: 58271 - DNA, 75 bp, Homo sapiens
cttttgtctgcccctattgtaagtgcagatggaacacaacagggggtcctgatgacaacttaattgaaggtggag

SEQ ID NO: 58272 - DNA, 100 bp, Homo sapiens
atccaaataaactgaagtttcttctgggtccatcaccaaagagcagatgccaaatctggttttcctttggaatatggataaatacaccatgatacggaaa

SEQ ID NO: 58273 - DNA, 83 bp, Homo sapiens
cgaatggggttgtgatggcccaggttcttcaaaagatgatgataatgaagataattcaaatgatgggacccagccatccaaaa

SEQ ID NO: 58274 - DNA, 90 bp, Homo sapiens
cctttatccagactccaaggaagctactgtggtttatctagctgaagatgtatgacatcgttggacactctggagatggctacaacattg

SEQ ID NO: 58275 - DNA, 74 bp, Homo sapiens
acatcaaactctccttcaaagaacatggccagattgaggttaaagcagtaaagttgggtcatattctggtagta

SEQ ID NO: 58276 - DNA, 96 bp, Homo sapiens
tcaccaagctggaggtggacgccatcgtcaacgccggcctctggctgtacctggcagggagcagcctgccctgtctcacgctgattggctctccta

SEQ ID NO: 58277 - DNA, 100 bp, Homo sapiens
ctcgggccggcggacagtgagggcgcgtgcctgatttgagatggggtcccaggtctcggtggaatcgggagctctgcacgtggtgattgtgggtgggggc

SEQ ID NO: 58278 - DNA, 50 bp, Homo sapiens
ctcgcttgcagttcagcgaccacggggttggccggagacctacgacatga

SEQ ID NO: 58279 - DNA, 82 bp, Homo sapiens
gccggggggacccgcccccggccggccgcagccatgactggaaagctacccttgaggagaataggttgaattctgaaaaaga

SEQ ID NO: 58280 - DNA, 100 bp, Homo sapiens
gctctcctggcttcttactcagtccatcttctgcttagtatgtgtattcagacaggctggttggaaggaaaatcatgcaacattcatgagcgaactaaaa

SEQ ID NO: 58281 - DNA, 100 bp, Homo sapiens
cgtcgggtcagatccgacagaagatgaagtacaacttgccttcctggtgtgaccgagtcctctggaagtcttatcccctggtgcacgtggtgtgtcagtc

SEQ ID NO: 58282 - DNA, 75 bp, Homo sapiens
tttggcaagaagcagatgcgcattttgatgggtgctgcgacaagagactttggacaaaaattgacttgagtaggt

SEQ ID NO: 58283 - DNA, 73 bp, Homo sapiens
aaaggagctggtgcctgtgcaagttgttgaggatgtaatccctgttcattactacttaatacctccaccaaca

SEQ ID NO: 58284 - DNA, 100 bp, Homo sapiens
atgaaagagattccttgcagagacagctcaacacggcacttccacaggacgtcttcctcatctgcttctccctcgtcagcccagcctcttatgagaacgt

SEQ ID NO: 58285 - DNA, 74 bp, Homo sapiens
ggagtaagagcccatagcagtctgccagacaatagagcatatggctggatcagctcctttgtggcagtaaagca

SEQ ID NO: 58286 - DNA, 90 bp, Homo sapiens
aaatgccctccaacttagtgatgaagagatgagtttgtttacagctgttgtcctggtatctgcaggatatcttaaatacgatcataaggc

SEQ ID NO: 58287 - DNA, 98 bp, Homo sapiens
ggcctggctgttggagctggctccacacttttatcaacaaggaacggtattgttgcagcatctggcagtgagactgaggatgaggacagcatggacat

SEQ ID NO: 58288 - DNA, 100 bp, Homo sapiens
gcctccgccgccgcctgaggaggcgagctagccgggagttacaccgccaccgccaggtgtcagctgtgatgcatgtttaaaaggaaattttcgaggtcgc

SEQ ID NO: 58289 - DNA, 135 bp, Homo sapiens
gtctcgctccgtggccttagctgtgctcgcgctactctctctttctggcctggaggctatccagcgttaatttggagtggcccctggagtcagtttcctacaccatccgaggccccacccagcacgagctacagc

SEQ ID NO: 58290 - DNA, 74 bp, Homo sapiens
gaggcctccccagccatgtggaactgatgatcgctgcaagatccctttattcatgctaatgtcctttatgccgg

SEQ ID NO: 58291 - DNA, 100 bp, Homo sapiens
ctgttccttaagcagagaatgagcttactctctcagatgacttcgtctcccaccgactgcctgtttaagaactggaagaagttcgggaactcagagtttg

SEQ ID NO: 58292 - DNA, 75 bp, Homo sapiens
ccacaacttcattgctgggaaaagagagaagctgcatgaggccaataatgaactacagaagaagagagccattat

SEQ ID NO: 58293 - DNA, 83 bp, Homo sapiens
gtcaggctgaaggaatcttggtaaatggttgctggatttgtgcgactcggtgaaggatgatgcccggagggtgatctcgacct

SEQ ID NO: 58294 - DNA, 100 bp, Homo sapiens
cacaaattttgaaattttccgaatgagggagaaacaggtacctgtggatgtggtcgagatgaaagggctgaagtctcaatctaaacgtgctgtgtcagct

SEQ ID NO: 58295 - DNA, 100 bp, Homo sapiens
gacggcccccgcagcaagccccagccaaaggtgctactgaaattgttcagttactgcgtgaaggtgaaagtcaaccggcagcaactggtcaaactggaaa

SEQ ID NO: 58296 - DNA, 100 bp, Homo sapiens
tggcaccagggactggcagctccactgccgtcaactcctgttctcctcagagcctgctcctctggtgcaagtgtggtagctattgacaacaaaatcgagc

SEQ ID NO: 58297 - DNA, 98 bp, Homo sapiens
cggggtctggaatgtgacggagctggtgagagtatcacagatgggagattcttcacagtcaagctcccagttgctcttgatcctggggccaagatttc

SEQ ID NO: 58298 - DNA, 74 bp, Homo sapiens
gtggactgcaacacccagcagcgcggtttgctcaccttataaatgtggaattttttgatgatctgttagtagtt

SEQ ID NO: 58299 - DNA, 101 bp, Homo sapiens
cttttaaggagcagggaatcttaactctggctgtgcattacaactgcctggtactttgtcaccacatcatcagaaaagcccttactgaggaaaaacgtgtc

SEQ ID NO: 58300 - DNA, 75 bp, Homo sapiens
catccagacattatctgccagttaagattattcttaaaactctgctactacccacagatggcatgatccgaaaac

SEQ ID NO: 58301 - DNA, 82 bp, Homo sapiens
ggcccggagtctgcgcttcgttaccttggtggacccaagtggagagattgtggaactggcgaaaggtgcatgtccctggaag

SEQ ID NO: 58302 - DNA, 100 bp, Homo sapiens
caaccagtttgtattgtaccgcataactgaagccactaagacggaagacccactacgttatctgagacaatggcaaaagctgacatatggcttattcgaa

SEQ ID NO: 58303 - DNA, 95 bp, Homo sapiens
aaaataagaaacaactcaaacagccttatacagagacaaaatacaggaacttagaaatgttatgttaatgtgttaagagccattgacatttgaag

SEQ ID NO: 58304 - DNA, 102 bp, Homo sapiens
gtgttggcgtggcccagcatctaactaacacggtttttattgacagagctctgatagttgttccttgtgcagaagcccaccaagaaaacacattgtggagcg

SEQ ID NO: 58305 - DNA, 98 bp, Homo sapiens
accattgctcaggattatggggtcttaaaggctgatgaaggcatctcgttcagtgtcaaaccagaagagaagtaaaattcaacaaaaatttatgtgtg

SEQ ID NO: 58306 - DNA, 76 bp, Homo sapiens
acgcctgcattacacctggcgggagctctggtcagacagcccacctgaggatattgaccataaggactcatatctc

SEQ ID NO: 58307 - DNA, 100 bp, Homo sapiens
tctgggtgggcaacttacccgagaacgtgcgggaagagaagatcatcgagcatttcaaacgacgttggacctctcgaacaaccagctgagcgagatccct

SEQ ID NO: 58308 - DNA, 100 bp, Homo sapiens
acgttaagtattttctaccaagctgggacttccaaagctgggaatcctattttttattatgttgcacggagaacctaccttctggatcatcacgtgttgg

SEQ ID NO: 58309 - DNA, 100 bp, Homo sapiens
tcttggcatttcaacacagagagcaacttttattacgtggaacaatcaagctgtattagtcgacaggaccatttacatttcaggacagataggcatggac

SEQ ID NO: 58310 - DNA, 96 bp, Homo sapiens
cacggcagcccacatcaagaagttcaccttcgtctgcatggctctgtcactcacgagcctggagaaagttcttgtggaattcagtcacaaggagtt

SEQ ID NO: 58311 - DNA, 100 bp, Homo sapiens
cctggaaggaaaaagatctaaagtcacccggcggccaaaggccagtgactaccaacgtttggaccagaagaatgttcgcatcttaccacatacagttctt

SEQ ID NO: 58312 - DNA, 75 bp, Homo sapiens
cccatgaatcaatgtctggtagccaccggcactcacggaccgccgggagagcctgcccacctccccaccctggac

SEQ ID NO: 58313 - DNA, 74 bp, Homo sapiens
tgatgcaggccatcaagtgtgtggtggtgggagacgggaactgcaagcacatgttgaccagataactgaaatgg

SEQ ID NO: 58314 - DNA, 76 bp, Homo sapiens
ttttggtaccttataaccttgctaaatctgcatacagagaattggttcagaaaatgcttggacagaagagatgagt

SEQ ID NO: 58315 - DNA, 99 bp, Homo sapiens
ggaagcataagaacatgagaactgcgactcagcatgcagaagattgcattctcacaacacaatacaatcatggaccttgtgcagttttttgtcaccttc

SEQ ID NO: 58316 - DNA, 75 bp, Homo sapiens
ttcgtagcagagaacagctctttgcatccggagagtggacaagaaagaaaatgtttataggaggccttagctggg

SEQ ID NO: 58317 - DNA, 75 bp, Homo sapiens
attacccacttcgagtcctttattgtggaggtggcagggcccagccccgaaccagacaagggacccctcaaggag

SEQ ID NO: 58318 - DNA, 100 bp, Homo sapiens
caggcacgcgccaccactcccagaatagcctaacatggcagaccagagacagcgctcactgtctacctctggggagtcattgtaccacgtccttgggttg

SEQ ID NO: 58319 - DNA, 100 bp, Homo sapiens
cgtccagactgtcaactgtgatcctggactcgctgtaggttttgacgagtttgggtctgtggacttcagtggcacattctacgtaaacactgaccgggac

SEQ ID NO: 58320 - DNA, 100 bp, Homo sapiens
gtttgaggagcattgcttctcatacagtaaggtgcttttgaagatgatgatatcacgcacgttgaaggaagtgtagatcctattcgagatatagaaataa

SEQ ID NO: 58321 - DNA, 100 bp, Homo sapiens
gcctccatcccgtgccctcgctctgagctgcgcctggacctggttctgccttctggacaatctttccgggacctcccgaattccctggtaacagtgttca

SEQ ID NO: 58322 - DNA, 100 bp, Homo sapiens
tcagtgttcggttgaaggattctgtgtgctgtcggacccagagggtgacggcgccgctaggatgaagctcgtgagtcacagcccgttggagattgtgatt

SEQ ID NO: 58323 - DNA, 98 bp, Homo sapiens
agtgtatgaccacaaacagccatcaaggaagaattttcatctattgaagaaaaattcaaaattattgagagagctgaaaaatttggactcccgccagt

SEQ ID NO: 58324 - DNA, 75 bp, Homo sapiens
tacaggcacccgccaccacgcccagtttgggcttcctgtagacacccttttcctgcgcaacagagctgggcctcc

SEQ ID NO: 58325 - DNA, 98 bp, Homo sapiens
gcggcggcgacggcggccctggcaggagctatgaagacatgattggtgaggaggtgccatcggatcaatactactgggctcctttggcccagcatgag

SEQ ID NO: 58326 - DNA, 51 bp, Homo sapiens
ctatggaaaagttgccaaattggacctctttgtttttagacatgaattggc

SEQ ID NO: 58327 - DNA, 75 bp, Homo sapiens
tgcctttgccgccaccatgcccaaaacgatctttaagcaagcgacaatgaaggcattgcggaaaaaatctgtttt

SEQ ID NO: 58328 - DNA, 74 bp, Homo sapiens
gggtacctgcggccaattcggtggaacgaggacgcggactgcgaaggcaggtaagccaagatgggtgcatacaa

SEQ ID NO: 58329 - DNA, 100 bp, Homo sapiens
ttcttgaaggctgtgctgagaaaagtaaacagctgaaggatgaaggagccagtttggctgaaaataaaaggatggagctatgacattgaagagaggaagg

SEQ ID NO: 58330 - DNA, 115 bp, Homo sapiens
cagctcttccacagcatccccaccatcctcctccactgccatctttcagccctctgaaaccgtgtccagcacagctggagtgggagccacctgcgctggggccagccactccgag

SEQ ID NO: 58331 - DNA, 100 bp, Homo sapiens
ttgttggtcgagctggcgggtcccgcgggccaggccgtggagaaaccgaagctgaaagactggcatcctcctgggggctttattctgggattatgggcac

SEQ ID NO: 58332 - DNA, 100 bp, Homo sapiens
gagcagcaccagctcatcctatccaagcttctgagggaggaggacaacaagtactgcgccgactgcgaggccaaagtattcaagatttgaaggaaagaat

SEQ ID NO: 58333 - DNA, 75 bp, Homo sapiens
ctcaggcgcctcttcttagttgatgatttagttgattctctgaagaaccatccgggtatggctgaaaagagacag

SEQ ID NO: 58334 - DNA, 96 bp, Homo sapiens
ctttgagcggactcccttttaagaaatgactgctgtccatgcaggcaacataaacttcaagtgggatcctaaaagtctagagatcaggactctggc

SEQ ID NO: 58335 - DNA, 100 bp, Homo sapiens
tttcaactgcgccaactgcgggtttataaatatgctgctaggtcatatgtcaatagaagttctacgggaagaagcatgtgactgtttatttgaagttgta

SEQ ID NO: 58336 - DNA, 88 bp, Homo sapiens
tctgttgcgaaggcagccatctttagttcgtctttcctagagagcagggagaaggttttaaggtgaaaacgaagaaagaaatccggca

SEQ ID NO: 58337 - DNA, 75 bp, Homo sapiens
ccccaacagggtggtcttccaggagtttcggcagaggattccagacagcattggaaaagacatagaaaaggcttg

SEQ ID NO: 58338 - DNA, 101 bp, Homo sapiens
gcacccacgcggcatcacgggatcgaaccccgctcccagcggccgcgattcggggaggtaggcgctgggccgaggagatagagtctccctctgtcgcccag

SEQ ID NO: 58339 - DNA, 75 bp, Homo sapiens
tcaagtctctaggactggactcttcctaagcaagtccggttcaggaagatttgactgaagagaaaaaaagggaac

SEQ ID NO: 58340 - DNA, 101 bp, Homo sapiens
gagcttgtgtagcgtcagatccttgagtgataaaggagtagagaacctatctacaagacctcttgtgctttgactattcatgctattggacgatacagccc

SEQ ID NO: 58341 - DNA, 90 bp, Homo sapiens
catatgcaaaattacaaaaatgtcatcagctaatgtctacctcgaatcaaagccggaaatcactgtggaaaatcttcccagttatttcag

SEQ ID NO: 58342 - DNA, 102 bp, Homo sapiens
aggattgggagagaggtagctacccggatgcagtcctttgggatgaagcactctcgagtggaccctgaggagctcttcaccaagctcgaccgcattggcaag

SEQ ID NO: 58343 - DNA, 100 bp, Homo sapiens
gattcacccacagcggggcggcggcggcggcggctgcggcccaatataggaactcgaatcatttatgacagaaagtttctgttggatcgtcgcaattctc

SEQ ID NO: 58344 - DNA, 100 bp, Homo sapiens
gctgtgaagaagctgtaactcttttaaagtatatgtatgacttttaaaagagagagcttgtgaaactgagggaataggtttttcgttggaatatacgttg

SEQ ID NO: 58345 - DNA, 50 bp, Homo sapiens
gcagtagatgatgatgtagcagaagggaataccttggcaagcagctccag

SEQ ID NO: 58346 - DNA, 50 bp, Homo sapiens
gtgcgcacagtgctggtctgcctgacattgtatgtggtagaagaccaaag

SEQ ID NO: 58347 - DNA, 75 bp, Homo sapiens
ctcttgggtgaactctagcaattacaagaaactggaggaagcagcatctcgtgcagcagaagaggaaaagaaacg

SEQ ID NO: 58348 - DNA, 74 bp, Homo sapiens
cccagcgtgaccagtggccacctctgcagtgtcttccacaacctggattcatgatgttgctatcaaaagttgag

SEQ ID NO: 58349 - DNA, 100 bp, Homo sapiens
cgcgcagggtctggagagtcaccgcggcggcgccgggtggtggttaaaccatgttaaggaggattttacagagggcagcctgcttctgcaaagtggtacg

SEQ ID NO: 58350 - DNA, 83 bp, Homo sapiens
atgactctctgcctgaaaatagcgagacaggattatattccatcacaacaagatattctgcttgccagaagacccaccaaagg

SEQ ID NO: 58351 - DNA, 50 bp, Homo sapiens
gacatagaggccaaccaacctttggagtatgaaaacaaagttgcagtacg

SEQ ID NO: 58352 - DNA, 98 bp, Homo sapiens
ttgaacaaggcaaatatggttttgagttgtctgctggttctcagcttgaagaagattctgcagtccttattgatcctttttcttggcgttaccatttt

SEQ ID NO: 58353 - DNA, 83 bp, Homo sapiens
cgcgaggccgcagcctgaggagcaccacattaaataccagcatttgctgaagaagaaatatgtatgtccccatccctcctgtg

SEQ ID NO: 58354 - DNA, 83 bp, Homo sapiens
tctcaggacaacccagatgtgcaacaaagtgcgatgttcattccttggaagaagctgtaccatcgatacctgatgaatgaaga

SEQ ID NO: 58355 - DNA, 96 bp, Homo sapiens
tatgaggcatgggcaaaacttgatgtggagtctagtaaaagccctaaaacgatgaagaaatttcttcataaaaggaagactgagagaaaaccatcg

SEQ ID NO: 58356 - DNA, 100 bp, Homo sapiens
aagattttgtggtttatacttacaacaaggaagggactttaatcactgaccatcccaatatacagcggacaaggcaaaatctcagcaagttcggacctct

SEQ ID NO: 58357 - DNA, 75 bp, Homo sapiens
gttcgctacacagcaatgcatcgaggattttgatgtagattcccaaatccgtgctgagatgcacagaaaaacagc

SEQ ID NO: 58358 - DNA, 100 bp, Homo sapiens
ggcgttcttccgctggctcagccgcaagtacccgtccatcatagtcaactgcgtggaagagaaggatacttttgtggaactctatgggaacaatgcagca

SEQ ID NO: 58359 - DNA, 74 bp, Homo sapiens
caaactttccccttcgtccttttgtgattccatttctcaaggcaacagcattattgagaaaagcccttacagaa

SEQ ID NO: 58360 - DNA, 82 bp, Homo sapiens
gtaggatttccgggagaggctgctgtggaggctgaggaggcggcggcggagatctggacaatgcagatcttcgtgaagactc

SEQ ID NO: 58361 - DNA, 104 bp, Homo sapiens
aggactttccttacctgtttttccagctcacccactgccagcagagaaaactgtcgctgaaaagcaggagaagagaaatcaggatcgcttgaggaggagagagg

SEQ ID NO: 58362 - DNA, 74 bp, Homo sapiens
tattcaggagaccgtcgttgccttgtatttccagagaacagaatccctgcccagagtccagcgcttccttcctg

SEQ ID NO: 58363 - DNA, 80 bp, Homo sapiens
tgtctgggaccttctccctgcctggacccctactattgcaacaaggagtgcctgtgaagaaaacggggtattgccctgag

SEQ ID NO: 58364 - DNA, 90 bp, Homo sapiens
cagagtcggttcagtctgtggattactactgtgataatgaggagctctatgctggtgtgtacatcgattttatgggcactgatgcagcca

SEQ ID NO: 58365 - DNA, 82 bp, Homo sapiens
cgaatggcatacaattagaagctgagaaaaaagcattctctgaaaaccttgatcctgagcaacttgagttggtggaaccaag

SEQ ID NO: 58366 - DNA, 101 bp, Homo sapiens
actgaaatcactgcaccttaaaaacaaaagattgagctgcactgtattcctcactcctgtaggaggcctgctgatggcatttcagaagtactctggtgaga

SEQ ID NO: 58367 - DNA, 75 bp, Homo sapiens
ggagtgtaggtcatatcgccgcgcatgatgccttcttctgtagagtgggcgctttgcagaatacgtgttgaatga

SEQ ID NO: 58368 - DNA, 101 bp, Homo sapiens
agaagaccgccactgccggagccatctcggagctcacggagagccgcctgaggagcggcacagaaatggtgtcaacctccaacaacaaagatggacaagcc

SEQ ID NO: 58369 - DNA, 50 bp, Homo sapiens
gaagtacaaggaatttcagaacacacttttccagccattaactccaggct

SEQ ID NO: 58370 - DNA, 83 bp, Homo sapiens
ccccggtctctcggacaccattttctgccgctggacgcaaggtatggtttaggaatgatttattacaagcaagaaaaattcag

SEQ ID NO: 58371 - DNA, 75 bp, Homo sapiens
gacatttataccgtctgagggtagcagctcgaaagtagaagaagtggggagaagagcctgctgagtgcagtgagg

SEQ ID NO: 58372 - DNA, 50 bp, Homo sapiens
gtgaaaacgacccggcagatcccagcctgactcctggagattgtgaatag

SEQ ID NO: 58373 - DNA, 50 bp, Homo sapiens
cctccctctccactcccatcttcagggtaccatctccagggagagcaagg

SEQ ID NO: 58374 - DNA, 75 bp, Homo sapiens
agcagctgctgtggaagggctccttcaagcccagcgagcatggggctgataggatgtcttcatttggtgattttg

SEQ ID NO: 58375 - DNA, 50 bp, Homo sapiens
cacacaggaaaaggagcttagctgctggagcagacaagatggagacaaat

SEQ ID NO: 58376 - DNA, 75 bp, Homo sapiens
ggaacttgccctgtctcctcgcagatgaggcctcctgatcacttgccacgtggcacgcatccctctgccagccgg

SEQ ID NO: 58377 - DNA, 50 bp, Homo sapiens
gggctaactccagaatcccccattgagcaggttgttgccctggatgccca

SEQ ID NO: 58378 - DNA, 90 bp, Homo sapiens
agggaattgggaggtcggcggccccaaaacaggaacgaatttcatatacacctccagagagcccagtgccgagttacgcttcctcgacgc

SEQ ID NO: 58379 - DNA, 82 bp, Homo sapiens
tgaagaggtgccggacccgatgagctcgggagtccaccatcgctctgcaagccgcaggtataatgggtctctcccaaatggc

SEQ ID NO: 58380 - DNA, 100 bp, Homo sapiens
cttgtatctcaacaccctgagtgcggatttctgctatgatgacagattcagaacaatttgtgggcaggaaatgcaagtggtggttctgtggttacttcat

SEQ ID NO: 58381 - DNA, 100 bp, Homo sapiens
aggcgcgaccgcggcgttctctgagcagggtgttgccaactcatggtgcatggattcaaatgcaataaacagtcctggggagatgtcccgctcctgtagc

SEQ ID NO: 58382 - DNA, 74 bp, Homo sapiens
tttgctttaaaacagtattacttgcgactccttttcggactcagtcagcctgcacccaggtgattaaaaagctt

SEQ ID NO: 58383 - DNA, 90 bp, Homo sapiens
cgccactggccagaccgggctcaccaccctggcgcaggcggtgcaagcagctggaaggatggtcttgccttcaatgccctgatccaccgg

SEQ ID NO: 58384 - DNA, 85 bp, Homo sapiens
aaccatgaagacttgaacttaatacagcaagaaagaccatcaagtttaccacttcatgattgtatccaaaaaaccttgaatgaat

SEQ ID NO: 58385 - DNA, 82 bp, Homo sapiens
ttccgcaacctggagaacgccaagcgcttcgccatcgacataggaactgtggaaggtgcatcagtgaagaaatggaccaatg

SEQ ID NO: 58386 - DNA, 109 bp, Homo sapiens
gggaaccctacaaccgcaagacgctcagcaagctcaagaggagcgtggtcagagcccaggtgaccatggaggaagaagatgagtctcgagggaagacagaggagtcggg

SEQ ID NO: 58387 - DNA, 100 bp, Homo sapiens
gtaggcaagacctgcctcctgttccgcttctcagaggacgccttcaacaccaccttcatctccaccatcgtgcaagtctgtactgcggcaggactgagtc

SEQ ID NO: 58388 - DNA, 100 bp, Homo sapiens
tttgtgattcaggagaactggtcgccatcaagaaagtattgcaggacaagagatttaagagtgttgcggagataggaacatgggagagaaacaatctggg

SEQ ID NO: 58389 - DNA, 95 bp, Homo sapiens
aggtcgagtaccttccctgtcccatcgcaaacccaaagatccccgttcctggagattctgattgagggagtggagcttggtttcgggatctcggt

SEQ ID NO: 58390 - DNA, 90 bp, Homo sapiens
ggatttatcaaatcgagtcactgtcaatgattcgcctttgccagtctcatctcgtgtctgctttgttaagttccatgatccagactcagc

SEQ ID NO: 58391 - DNA, 83 bp, Homo sapiens
cgcgtgtctaggtgagtcgcggtgggtcctcgcttgcagttcagcgaccacgtgggtaattccagaattgattggccatacca

SEQ ID NO: 58392 - DNA, 80 bp, Homo sapiens
ctcttgtctgcgtgcgcacagacggcgagggcgaggatccggagtgtctgggagaagagacacctatggctgccgatgaa

SEQ ID NO: 58393 - DNA, 95 bp, Homo sapiens
ccggccgcgcgccgaggagtcgcttgtagggcgccctgcgtccggcagaggaggcgagcatcccgctcaggtgatgaggaacccctcgcgcaccc

SEQ ID NO: 58394 - DNA, 102 bp, Homo sapiens
aaatcccctgaagatttgcctgccctcagtggttaacttttttgctgcaatcacaaaagcccacaggcggttttgtgagctgcttccccaggagcagcggag

SEQ ID NO: 58395 - DNA, 100 bp, Homo sapiens
ttttctcctaacgattctgcttctgacattgcaaagcatgtatatgacaattggccaatgggaaaaccgtcttcagatacagtccctaagcccaagagag

SEQ ID NO: 58396 - DNA, 82 bp, Homo sapiens
tggtctttatgctgggaactccctattatggctgcactggagaagcccgtttcctcctttcaaaagtcaacccttcacagac

SEQ ID NO: 58397 - DNA, 75 bp, Homo sapiens
aaacagttagcgcaagacacaggacttacaattctccaagtaaacaactgatggcgggtgaaaaagttgagaagc

SEQ ID NO: 58398 - DNA, 82 bp, Homo sapiens
cagagattcatctttcatgcagtgacatgttgataaaaaatgatgggggatatgagactttctactcggaatatcctgagtg

SEQ ID NO: 58399 - DNA, 51 bp, Homo sapiens
cctccatgataaaggaatcatctatagctctggatggacaaggaaaaagag

SEQ ID NO: 58400 - DNA, 75 bp, Homo sapiens
tctcagttcagtgttggcagcaatgagcttgtgttccaggtgaagtctctggcatctctatcccctatgaggcac

SEQ ID NO: 58401 - DNA, 100 bp, Homo sapiens
gttggggccctcttgataaaaagagatgtggggggattctcgacctgctaacagaactggaccttttcgtgtctgaagttctgtgcttgaaacctaagtc

SEQ ID NO: 58402 - DNA, 82 bp, Homo sapiens
tccccagccattttcctgagttccctgatccccacacctacatcaaaactccggagagaaaggccttgggaaaacaactggg

SEQ ID NO: 58403 - DNA, 85 bp, Homo sapiens
gacagcgcgcacttcacccgcagttgccttatgccagcctggaccatcttggaggcagtgtaggatcatggaagaactttgaatt

SEQ ID NO: 58404 - DNA, 74 bp, Homo sapiens
actgtaaagtcaccaacgagatcttccgccactacgacttcttggacacttaatgattgttggcaagaaatgtg

SEQ ID NO: 58405 - DNA, 100 bp, Homo sapiens
cacagataatgaagactttccatcaagtttaattggttggggtcagataagaagaggagtgacaatcaagccaacagtagatgatgactgaagaatacca

SEQ ID NO: 58406 - DNA, 100 bp, Homo sapiens
agaagatcggctcccggaattggaacagctggagcgcattggactgttcagtcatgcggagattaagatcgacgagaacgtgctaggagcccagctggac

SEQ ID NO: 58407 - DNA, 83 bp, Homo sapiens
atcagaagtcaattcaaaggacctgcccccagagagatgcacgatctgattttctggagagatgtgaagaagactgggtttgt

SEQ ID NO: 58408 - DNA, 100 bp, Homo sapiens
ctagctggaggtctgcgttgtagagaggtaaccccaggaactgcaagcacatgttgaccagataactgaaatggcagcagtaatgaggaaagccattgaa

SEQ ID NO: 58409 - DNA, 98 bp, Homo sapiens
cgggaccgagcaggaatccgtatctgggaacagggagagctgaaggacctgacccagaaggtagagctgctggagaagtttcgggacaactgtttggc

SEQ ID NO: 58410 - DNA, 100 bp, Homo sapiens
cccagggcagggctcctaaggaaggacccgcctttagatatttgatttaatggatgccaaagcacgtgctgattgcatcaaagaaatagatcttcttaag

SEQ ID NO: 58411 - DNA, 75 bp, Homo sapiens
gtcagaacaggcgctgcggctgatcatctccatcttcctgggcgtccgagctgggccacagcctgaacgagaacg

SEQ ID NO: 58412 - DNA, 100 bp, Homo sapiens
cctcctcctcgctcggtccaggaccggctctgcgggcgccgccaggcccagaccaagaactcgaaaattaatgctgaaaataaggcgaagatcaacatgg

SEQ ID NO: 58413 - DNA, 100 bp, Homo sapiens
ctcccgggtagctgggactacagaaaactgtggatttagttactccactctgccatgtctttccaccactgcctgcacatttgagaccaaggatagagat

SEQ ID NO: 58414 - DNA, 98 bp, Homo sapiens
cagccgcaatccggacctggcgggctattgagtggccagacttccccaacaaatgccaaattggagaaactggactctcagcaggtgttgcagctctg

SEQ ID NO: 58415 - DNA, 74 bp, Homo sapiens
acctcaatggcctaagcaagtgtctgcagtgccaaatgtgtgacccaggttgaaggggcccggccaggactcgg

SEQ ID NO: 58416 - DNA, 100 bp, Homo sapiens
ctgctgttaccggccatataagaattcgtgcaaagagccagaggactactgagcccagccaggctgtatgccattgctgccaaagaaaaagatattcaag

SEQ ID NO: 58417 - DNA, 110 bp, Homo sapiens
ctccctgtgtactttccatttgccttcctgggaggatgcagcattcaaggttctatcttggaagcagagactgtgccctcaccagatgctgaacctgctgagcaccctga

SEQ ID NO: 58418 - DNA, 100 bp, Homo sapiens
tttcagtgaagaagaaagtaaagttggaagttaagggagacaaagttgaaaacaaagtgctgagtttttggtcatgaagaggaagagaggcaggcctaag

SEQ ID NO: 58419 - DNA, 75 bp, Homo sapiens
gaatgcatcagtgcccttgtggcgaatggggctcacgtcgaaatgtaaaaagggcagctctctggcatgttcctg

SEQ ID NO: 58420 - DNA, 90 bp, Homo sapiens
atctggtggagctactggcgtggtagttaaaggcccagatgataggaatcccatctcatttagtttgcagaaaaaacttcagcatgtgcc

SEQ ID NO: 58421 - DNA, 98 bp, Homo sapiens
tacgctaggaatatggcaaacggcagcccaatggatccaatggtgatgaagagacctcagttgtatggcatgggcagtaaccctcattctcagcctca

SEQ ID NO: 58422 - DNA, 87 bp, Homo sapiens
cgtccccctctccgccccccaggaggggcgagagggagccgcagctgatgtcaggtttaactatagatcaacacatcatcttgcatc

SEQ ID NO: 58423 - DNA, 75 bp, Homo sapiens
ctacacagaaatgactatgtagctgcagaaagatgtgtccgggagagctatagacgcagtaaaacgcaggactct

SEQ ID NO: 58424 - DNA, 50 bp, Homo sapiens
ccacacactgggaaacatcattaaatcatgcagacaggattgcagtcggc

SEQ ID NO: 58425 - DNA, 73 bp, Homo sapiens
tgactacagctggagcgcccagaggcgagccctggtggaggaagagggtgccgacccccacatcctggcaaaa

SEQ ID NO: 58426 - DNA, 50 bp, Homo sapiens
cctacatcctccacctcccgggttcaaagacggggtttcaccatgttagc

SEQ ID NO: 58427 - DNA, 90 bp, Homo sapiens
gtggggaagctgctaacccgacccggattggcgctgaggtggcccgtggggcagggaacccgagcgtcatgttagggtgaagcagaggac

SEQ ID NO: 58428 - DNA, 75 bp, Homo sapiens
cgctcagaagcagaggctgcaaagaatgctttgaatgccctggagatgtacaaggatgattggaacaaagtgtcg

SEQ ID NO: 58429 - DNA, 74 bp, Homo sapiens
agaccctgctggtggccattgaccgagcctgcccagaaagcgccagccatacgtcgtgtgccggcagtgtcctg

SEQ ID NO: 58430 - DNA, 82 bp, Homo sapiens
atgattatgtaagaaagattcttaagctgcctcattcttccatcctcagaacgtgtgaagtgggttatactggtgtccgatg

SEQ ID NO: 58431 - DNA, 100 bp, Homo sapiens
gactcttctatgctgtgttcagtcggagccagtaaagcaggtggctgtgccagtgtcattgtgtcattaactactcagtgtcctcaggacctaacacctt

SEQ ID NO: 58432 - DNA, 100 bp, Homo sapiens
atcaaattttagaaaagggggcagcaaaaaggacaactgcagctactctgatgaatgcatactctagggatatgatgatacatacgcagaacaaagttac

SEQ ID NO: 58433 - DNA, 75 bp, Homo sapiens
cattaatgcaactaccattacactaaggtgcacatgaacttgaacagatgcagctgattttagaatctattcctg

SEQ ID NO: 58434 - DNA, 75 bp, Homo sapiens
ctctgggatcccggccaccagcaattgtccggtacaccaggggttggaaaaaccacactaggcaaagaacttgcg

SEQ ID NO: 58435 - DNA, 100 bp, Homo sapiens
acctcagcactatcccaagactgctggcaacagtggaatgcagtagccctctgggcctgggatattgtggttgataactgtgccatctgcaggaaccaca

SEQ ID NO: 58436 - DNA, 82 bp, Homo sapiens
cctggaacttcatcatcatctacttcacaggaattgccatttgtggtatggtcaggaaaaagactacaatgtactagtcatg

SEQ ID NO: 58437 - DNA, 100 bp, Homo sapiens
atcgccttggaccccgctcacggaccatgtctggacagaagtctattctccttctcagcagcggtggctgcactgtgatgcatgtgaagatgtctgtgac

SEQ ID NO: 58438 - DNA, 87 bp, Homo sapiens
cggctctccgccgtccccagccctgcctctccctgggctctggtattggcaagcttgccagtgtacctgctggtggggctgtagccg

SEQ ID NO: 58439 - DNA, 50 bp, Homo sapiens
cagctcgagtctcaagtggacaatggtaccgggaagccagtgttgaagtg

SEQ ID NO: 58440 - DNA, 100 bp, Homo sapiens
ctaccctgtgaagatctctcaccatccaaaaaagtactaatttggtcgaagcagataaccaagcggagtggaccgacgttcagaagaagattatcccgtg

SEQ ID NO: 58441 - DNA, 75 bp, Homo sapiens
cagtaccctattcacgctctgtgcttgtgccaaggttgtttttcaccattcagaacattgcctgaagcaggtcca

SEQ ID NO: 58442 - DNA, 75 bp, Homo sapiens
gcccgttggtgtggaaggaggggcggcagcttctccgacagttgaggcctctggtgtctacgcagccagcaaaga

SEQ ID NO: 58443 - DNA, 82 bp, Homo sapiens
cacctttcggcttctgagacggcggcagcagcggcattcagaatcagcttaaaatggctcgtttcaccattgtggatgggaa

SEQ ID NO: 58444 - DNA, 100 bp, Homo sapiens
cttattcatcagtttgttgtgcttgtcaagatcagacttaatgaacaagccagtgaggagattttgaaagtagaacagaaatataacaaactccgccaac

SEQ ID NO: 58445 - DNA, 75 bp, Homo sapiens
gcaaggtttaaaccttgcagctactgctgctgttactgcagcagtaaaggcctctgagcccaagctaagccatca

SEQ ID NO: 58446 - DNA, 85 bp, Homo sapiens
ttctgtttgcctgttttggatagcaatgatcccaatttccagatgccttgttcaacaggatcaccccttctgtgtcattctctga

SEQ ID NO: 58447 - DNA, 98 bp, Homo sapiens
acgacttcaccaaagagctgaaccagtaccggcgtgccaaggagggcagcagccgcggccgagtgctcttaaagttccgtacagataaaggaagagat

SEQ ID NO: 58448 - DNA, 134 bp, Homo sapiens
tagaagaggctttggttttagcaaaaggagcccggaggaacattccaaaggaaaaatttcaggttgctgaaaagccaggagtcaaaatgactgagcgctttgactgccaccattgcaacgaatctctctttggc

SEQ ID NO: 58449 - DNA, 83 bp, Homo sapiens
accatgtcagacgcagccgtagacaccagctccgaaatcaccaccaaggtgaaaggaaagcaagccaggatggatatttacga

SEQ ID NO: 58450 - DNA, 82 bp, Homo sapiens
tggcggcttccaggcgcactaccgcggtctctaattaacagaagatggcaaagcccagccacagcagctatgtccttcagca

SEQ ID NO: 58451 - DNA, 100 bp, Homo sapiens
catgactccaatttttgatgagaaaatgctcaaggaaaattgcctaagaattatgacccaaaagttaccccagatccagaaagatggctgccaatgcgag

SEQ ID NO: 58452 - DNA, 90 bp, Homo sapiens
tagttcagaagaggtttggctttccagagggcagtgtagaggagtcttttagtcctgctatacagctgcaccttgtacatcaagctccat

SEQ ID NO: 58453 - DNA, 90 bp, Homo sapiens
catcgacaagatgcgccgcgccagctcctactcctccctcaactccctcatcgatttggacacctcccacactgagtccccaacccccca

SEQ ID NO: 58454 - DNA, 99 bp, Homo sapiens
cgcagacggccatgtccgaaacctacggttgaaatcacaaagattagacacctttttagataggtgttcttcagcaccactgacaacacggttctgaca

SEQ ID NO: 58455 - DNA, 82 bp, Homo sapiens
ctgactctgactctcggactgagaaacgcaaggccccttcccagctgcctgcctgccctagccagctcccaggtgaagagac

SEQ ID NO: 58456 - DNA, 82 bp, Homo sapiens
cctcaagaagaagaagttgcgaaggatccccaacggggaggccaacgtgaagaatgagaaagatcagtctaaagaaaaggag

SEQ ID NO: 58457 - DNA, 75 bp, Homo sapiens
tggaactgtgtttgggagcctcatcattggttatgccagagtgtgaacatggctacgcctcttcattcccgtcca

SEQ ID NO: 58458 - DNA, 100 bp, Homo sapiens
gtaacagcagcgccgtcccgtccgacagccaggcccgggagaagtaaagattatagttcccaacagcacagcaggtctgataatagggaagggaggtgct

SEQ ID NO: 58459 - DNA, 74 bp, Homo sapiens
acgacgttcccgaagcaaaagtccattcagaaaagacaagagccctgtgagattatgatgacatttccaatcag

SEQ ID NO: 58460 - DNA, 75 bp, Homo sapiens
atgatgtaccaatccaatgtgaaatctctcctcttatctcctatgctggagaagagtttcgctcttgttgcccag

SEQ ID NO: 58461 - DNA, 99 bp, Homo sapiens
ggaaagtaattttgtttgccgaagtgacccccacaacgatgcgtctcctggatgggaggagagacttcagcatgcaaaccttcatctgttcggcttgca

SEQ ID NO: 58462 - DNA, 100 bp, Homo sapiens
ggaattcatttcttacagttatggaggctgagaagtccaaggtccaggggcataacagaacaccttccaccatgaccacctcagcaagttcccacttaaa

SEQ ID NO: 58463 - DNA, 83 bp, Homo sapiens
ccacacaggagatccaggtcaccagcatccactggagctacaagagttttgaagccgcttctctggccgagttaggtttcgcc

SEQ ID NO: 58464 - DNA, 74 bp, Homo sapiens
ttgcccgcatctatagtttccagatggctctaacctcagtgaatcaagctatagaagtggtctggagtcaccag

SEQ ID NO: 58465 - DNA, 100 bp, Homo sapiens
attacctccgagggaaacaagaaaacatcaaagaggtctagcaaagggccctccagaatttccacagcatacacctggacctgttcccaacagtttcagc

SEQ ID NO: 58466 - DNA, 82 bp, Homo sapiens
gacaagtgcctggaagagttctatgcactctgtgaccagctggagctgtgcctggaagctcttcgtgggcggtcttgactgg

SEQ ID NO: 58467 - DNA, 82 bp, Homo sapiens
tggaggacggagaggacctgttcaccagcactgtctccaccctagagatcacttttctccagagaatgcaaatgacacggcc

SEQ ID NO: 58468 - DNA, 100 bp, Homo sapiens
gcctttaaatgcagcatctgcgatgtgaggaaaggcacctccaccagattaatgttcttcataaaccaccatatgaacatccaaaagacttgaagctcag

SEQ ID NO: 58469 - DNA, 74 bp, Homo sapiens
tggagaagatggctcagtacagattgcagggaattcacaattgaaactgaagggaaaacatttcagttaacaaa

SEQ ID NO: 58470 - DNA, 50 bp, Homo sapiens
ccagaaagctgggagccctgcgtggaggctgcaaccccaccctatggatg

SEQ ID NO: 58471 - DNA, 75 bp, Homo sapiens
ggatcgctgtgatcgtcacttggaatgtaaccaatttacctacaagtttgccgaagaaatcagaaggcagtcttt

SEQ ID NO: 58472 - DNA, 74 bp, Homo sapiens
aagaaatgatgatggaaatgaagtataataccaagaaagccccacttgctgaaccttcacctagccccaggatt

SEQ ID NO: 58473 - DNA, 100 bp, Homo sapiens
caagccgctcttccccagctgcccggtgcccgaggaggcagccaagctcatggcctgccactgcgtgcgtgatctttagacagtgactgagtatggatca

SEQ ID NO: 58474 - DNA, 100 bp, Homo sapiens
tggtgagactttcttcatgtgttcctgtagctctgatgagtgcaatgacaacatcatcttctcagaagaaggtgggtgcggctgctatttggacgagagt

SEQ ID NO: 58475 - DNA, 80 bp, Homo sapiens
aggaaccactcattcacttctagacgacaaaatgcaaaaaaggaggccaaagacttttgctgctctacgttcgaaaggag

SEQ ID NO: 58476 - DNA, 50 bp, Homo sapiens
cgtcaatcagagcgtcctgtgcgatccagagacaatggccccgatgggat

SEQ ID NO: 58477 - DNA, 51 bp, Homo sapiens
cacaagtgatgggcagctcagatgggacctagtgaatattgagatgttcct

SEQ ID NO: 58478 - DNA, 101 bp, Homo sapiens
ctggtatctatgaggccctagagctccgggacaatgataagactcgctatatggggaagggtgatgagaatgggacagtctcccttgtggacaccaagagt

SEQ ID NO: 58479 - DNA, 101 bp, Homo sapiens
cgtcttcacacagcgctgccatgaccagctcacggggctggactcggagaaggttccagcctgaactgtctgcccctgatctgcggcgatttatcgatggt

SEQ ID NO: 58480 - DNA, 87 bp, Homo sapiens
aggaggtggcggcggcgggaagatgtcctagcagaagatgtgactcagactgcctctgggtggggctggctggcccacagatcctgc

SEQ ID NO: 58481 - DNA, 75 bp, Homo sapiens
gaaacggattgccagagaattggcagaagaatgtactcaagactgatcttctaagttcactggaaatgattttat

SEQ ID NO: 58482 - DNA, 74 bp, Homo sapiens
ggaactgggagacctgggtcccagtggagaggcctcaccatgtaccatcagagggttctcgcttcagcacaaga

SEQ ID NO: 58483 - DNA, 83 bp, Homo sapiens
cgtcaagcagatctgtgtggtcatgctggagaaagaagcttccggttctgaggtcctggaggtgccatttccctctctgttga

SEQ ID NO: 58484 - DNA, 87 bp, Homo sapiens
actaccggcagctcgagaaggagctgcagggccaggctaattcacctaaataagattgatcctcatgctccaaatgaaatgctctat

SEQ ID NO: 58485 - DNA, 119 bp, Homo sapiens
gccgggtaccggccgtggaagcggccaccgactactgtcagcagctgtgccagcaattctgtggtgttcttggtcacacatttatggagtttctgaagggcagtggagattactgccag

SEQ ID NO: 58486 - DNA, 98 bp, Homo sapiens
ctgcgctttagctgctgcgccacgcgcgcctcgggcctgggcgcagaggatcggccgggcgcggcgggaaggaggaggtggaaggccatacagaatgg

SEQ ID NO: 58487 - DNA, 75 bp, Homo sapiens
gacaaaagacgcattgcaaacttaattaaagaactggccagccatgtgacatgcctgctcctactctgccttcca

SEQ ID NO: 58488 - DNA, 90 bp, Homo sapiens
ggatcatgtctgcgagccaggattcccgggcagcgggtggcatgagacgtgggaacatgggccacctcacacggatcgccaacgcggtgg

SEQ ID NO: 58489 - DNA, 97 bp, Homo sapiens
gagccagaggggaaagtatttgtggtaataacccttaccgggagtttcactgaagcctttaaatctacaagacagcagccttcccgaaatgtcacta

SEQ ID NO: 58490 - DNA, 88 bp, Homo sapiens
gggaggggcgaaggcgggcggcagaggcgatcaggtggcagaatcgtgtcctcgaaaccctttgcacctctgaacttcagaataaaca

SEQ ID NO: 58491 - DNA, 90 bp, Homo sapiens
ccaaacggtgcctgcggtgcctgagctgagtgaggccgaggccgggaggccgtgcccggagacaaatttacatgtattggagaccagacc

SEQ ID NO: 58492 - DNA, 98 bp, Homo sapiens
aaacgtccatctccaggtggattgttgaggggcagatccgagtgaagcctgacaggaccggtgtggtcacggatggtgtgaagcactccatgaacccc

SEQ ID NO: 58493 - DNA, 100 bp, Homo sapiens
aatgaacacagaatcagcatggctttcctttgctgagaaatcactgatgggaagtgagacttgttaaacttgaaaggacgtggtgggtcctctggtgcga

SEQ ID NO: 58494 - DNA, 122 bp, Homo sapiens
tctccgggcctacatccgcaaacagtgcaaccacatcttcctccggcatccgtgtcattctggaccttactcccaactaccggggtgagaactcgtggttctccactcaggttgacactgtg

SEQ ID NO: 58495 - DNA, 90 bp, Homo sapiens
tccgggccgcgctgcgagactacgagacgaaatatggctacacacacctttctgcaggagagctgcttcgtgatgaaaggaagaacccag

SEQ ID NO: 58496 - DNA, 100 bp, Homo sapiens
gttctgccctggctgcctcagccctaccagcactggtcatgtctaaaggccctttgaacggacgattaccatgcataaggatagcactggacatgttggt

SEQ ID NO: 58497 - DNA, 93 bp, Homo sapiens
gctttgtctccttcgacttggagtctttgtccaggacgcaattctgtggtgttcttggtcacacatttatggagtttctgaagggcagtggag

SEQ ID NO: 58498 - DNA, 98 bp, Homo sapiens
gcgagcccttgggccgcgtctcctttgagggaacgcgaatcccctgagctgaaggagaaggaaaaatggatccgctttcttaaacctttccagaattt

SEQ ID NO: 58499 - DNA, 50 bp, Homo sapiens
tcattctcaaaaacccacctgataccccagaatcttccatgctccgtcac

SEQ ID NO: 58500 - DNA, 83 bp, Homo sapiens
catctcttgtgtggggagtttcatcctagcgggttcgtgctggccgtgggcagcgccgtctttgatgccatgttcaacggggg

SEQ ID NO: 58501 - DNA, 101 bp, Homo sapiens
gaaggcacagacgcacgggacaggagagcctgggcaagactggagaggacagagcgggatgccaccagcttgtccaaagggaagttccaggagctcctggt

SEQ ID NO: 58502 - DNA, 83 bp, Homo sapiens
cagctgacaatggctttggtccccagcgcagtgaagtggtgagcctttttgtcactggtggcctccatgaaccagcgccgtgt

SEQ ID NO: 58503 - DNA, 83 bp, Homo sapiens
ggacgagctcggagcagcagccaggctatgactttgcagccgtcctggagtggttcgcggagcgtgtggaccgcatcatcctg

SEQ ID NO: 58504 - DNA, 75 bp, Homo sapiens
ctcctctcaatgtgtcccgtgtggcccagttgtgcaggattaaaaggagcccaagccccatctcatcctagcaca

SEQ ID NO: 58505 - DNA, 101 bp, Homo sapiens
tcgcttgtcctgagctggttgccggggcaggggcggaggcggaggcagaggtggaggcgctttgaaaggtcaaaatgcagatcttcgtgaaaacccttacc

SEQ ID NO: 58506 - DNA, 100 bp, Homo sapiens
tgtgttactccattgctgaggagtgtgcctacaccaactaatgttacaattgaatcctataacatgaaccctatcgtatattgggagtaccagatcatgc

SEQ ID NO: 58507 - DNA, 50 bp, Homo sapiens
gctttattgacctcgactcccatgcgtgggaagccgtgtccgccttttaa

SEQ ID NO: 58508 - DNA, 100 bp, Homo sapiens
gaaaagtaatatttgacatagtggatctctgtaccacctgggagggaccaacatcaatgatgcaatgctgatggctgtgcagttgctggacagcagcaac

SEQ ID NO: 58509 - DNA, 73 bp, Homo sapiens
aagccaatgcccaagacattataaacaacctatccagtgctgattcagggagagacatcagttggtaaaacaa

SEQ ID NO: 58510 - DNA, 90 bp, Homo sapiens
cgggttcagttcgtcatggggctgtttggaaagacccaggagaagccgcccaaagaactgtgatgaaactacagaatctgtttgtagatg

SEQ ID NO: 58511 - DNA, 100 bp, Homo sapiens
tttccaccaccacctgctcctggccgcctgcatgcacagtggctttaagatcctcaactgccaaaaggcaatggcattccaaaatatgcccggtgctatc

SEQ ID NO: 58512 - DNA, 51 bp, Homo sapiens
tggctctcttggccctcctgaaatggaagatgagaatgtgcctactgctcc

SEQ ID NO: 58513 - DNA, 82 bp, Homo sapiens
tttccatcaaaaagtgattaagcagagaatggagaagaaggttgattccaggtacgacaacaattccacgatgccaaattca

SEQ ID NO: 58514 - DNA, 80 bp, Homo sapiens
cttatatcccaccattgccacgggcattctccatctccttgcaggtttctaagcatgaattgaggaacagaagaagcaga

SEQ ID NO: 58515 - DNA, 100 bp, Homo sapiens
taatgtttgcttcagtcctgcaaataaacccaagatcctggctaatgattttcagacgatgctggttggttttcaagaaggcttctagcaaaggacccag

SEQ ID NO: 58516 - DNA, 76 bp, Homo sapiens
gaggctcaccgcagtcgtgcaggatctgaaggagattctcgatgaattcaaaaaggattcgtccgtgttcatcctg

SEQ ID NO: 58517 - DNA, 100 bp, Homo sapiens
ggacattttctataagaactccttgttccgacatcccaaacagtcaagtccatcatctccagaaccagctagtcttcctgcagaagatattagtgcaaac

SEQ ID NO: 58518 - DNA, 100 bp, Homo sapiens
agagtcggagccgaataccaagctcggatccctgaatttgatccagggttttcagagaaagatgctgatgaggtgaaaggaatttttgtagataccaact

SEQ ID NO: 58519 - DNA, 101 bp, Homo sapiens
ggtcctcggtcggtacagtctctgcacctcgcgccccagcaggagcccagtttcctccaattgcagcacaagaccttccttttgttctaaaggctggctac

SEQ ID NO: 58520 - DNA, 82 bp, Homo sapiens
gtatggcaacatgacagaggaccatgtgatgcacctgctccagaacaccaatcagggtcttcaggcctggaagattgaagac

SEQ ID NO: 58521 - DNA, 128 bp, Homo sapiens
gcgcaggccgggtggcgacaggcagcggccggaggtcagactgttgcacgccggctcgggggccgacacagagccaaaagccttgaaagtctcatctatatgagtacccggacagataaagatggcaa

SEQ ID NO: 58522 - DNA, 100 bp, Homo sapiens
ctgtatgagagtgctgtgaccaggcctcacacagtggtctgcaagaagaatctggacagtaccactgtggccgtgcatggtgaggagatttactgcaagt

SEQ ID NO: 58523 - DNA, 100 bp, Homo sapiens
caggaagcggaggaaggtgaagtaggaccgaattcctgtgccgaagaggcctgcagtgggagagcaggtctctgctttctatccgtcaagatgataaagt

SEQ ID NO: 58524 - DNA, 100 bp, Homo sapiens
ccctcgcggtggctgcctttaaatggccaacatgcagggactggtggaaagactggaacgagctgtcagccgcctggagtcgctgtctgcagagtcccac

SEQ ID NO: 58525 - DNA, 96 bp, Homo sapiens
aaagaaagcaagagaagcatggaaaatctgggcagatgagtggtgaaaggacataggaaggagtctggggaactgtactacagcattgaaaaagaa

SEQ ID NO: 58526 - DNA, 75 bp, Homo sapiens
aaatggaagttgctgttttgaaaaagctgcaagatcaaacattatctatgtggccagcaatcattttgtttggag

SEQ ID NO: 58527 - DNA, 96 bp, Homo sapiens
ctccggccgcctggctccccatactagtcgccggacaaccctccatatgataagggagccttcagaatcgaaatcaactttccagcagagtaccca

SEQ ID NO: 58528 - DNA, 75 bp, Homo sapiens
gaaaagagccctacaatgtgaagatacataagatcgtagccagacccccaggacagtcattttgtttactcattc

SEQ ID NO: 58529 - DNA, 83 bp, Homo sapiens
aagaaactgaggttcagagaggttaagagactccactgaggtcacacagccggtgaaatgacaatggatgctctgttggctcg

SEQ ID NO: 58530 - DNA, 94 bp, Homo sapiens
ttggggacaagctgcgcatgatcgtcatgggacacagaaggaccaagaatcgccttcagccctgtctggtgcatccttggcagaaagtgaggag

SEQ ID NO: 58531 - DNA, 98 bp, Homo sapiens
gcagaggaggaagatgagttctaccagacgacttatgggggtttcacagaggttcatcatgcctagtggcgtataagaagaccccgccaccggtccct

SEQ ID NO: 58532 - DNA, 83 bp, Homo sapiens
ccagagtcttgctccggccgcggccagcggagccctgggctggggcaggagccgggggatatgagactttctactcggaatat

SEQ ID NO: 58533 - DNA, 82 bp, Homo sapiens
gggagctgcagatcatgcaagggctggagcaccccttcctggtcaatctgtggaatcacccttcggtcatcgtgcagcctgg

SEQ ID NO: 58534 - DNA, 98 bp, Homo sapiens
cttcaagcagaaagtggtagcgctgctgcggaggttcaaagtgtccgacgagaaaagcacatctcccaggatcctgagagagcttgaaccagaccact

SEQ ID NO: 58535 - DNA, 75 bp, Homo sapiens
caccatggttagccacatgtcctctggagtgcccactcccaccaagagattccagaatgactatcttgacttacc

SEQ ID NO: 58536 - DNA, 93 bp, Homo sapiens
gagcttggtttcgggatctcggtgctgcagacggcgagacctcctgcacaggtcaaaatgcagatcttcgtgaaaacccttaccggcaagacc

SEQ ID NO: 58537 - DNA, 75 bp, Homo sapiens
ccggcccacagtgggggtgtgcaaacccgagagaactggtttgggacccactctggaacctgaggaagtggtaaa

SEQ ID NO: 58538 - DNA, 101 bp, Homo sapiens
aagctttgctggctatgtgggcatgttaacaggattcaaaccaggtcggcatgtcaagacggggcagctggctgccatcaaggtcatggatgtcacggagg

SEQ ID NO: 58539 - DNA, 76 bp, Homo sapiens
gggacatgagagaagaggagcggcgctcagccccgcagcgcctccaccccagagacccggaccaagttcacacagg

SEQ ID NO: 58540 - DNA, 99 bp, Homo sapiens
catctggggaaaaggcaaaaatcccatctaccgcaactctcagttcgagagtaaagcaacagcttgcacaactacagaaagaaaaatcagagattctga

SEQ ID NO: 58541 - DNA, 82 bp, Homo sapiens
tgcgggcggaggaggcgccgccaagacaggcataaagaatggcgtgtggttggaataaaaacagggttgaatgagttccaga

SEQ ID NO: 58542 - DNA, 75 bp, Homo sapiens
gacgagtacctggagtaccggagagttaatagagtggatacaaccttgctgaagatgaagaatatacaatattga

SEQ ID NO: 58543 - DNA, 83 bp, Homo sapiens
ctggaccaggaggaggttttcaggaccaaaattgtggaaaagtcactctgatgccatggacaatattaccaggcagaaccaat

SEQ ID NO: 58544 - DNA, 71 bp, Homo sapiens
ttgttggatgaattaatgaaccttgacccacaccaaggattaacctccatttcagctaatcatgggagaga

SEQ ID NO: 58545 - DNA, 75 bp, Homo sapiens
ctagaactagcggaatgtcctactacggaagccggagctgaaaattgggtttgatctgtggatgaaatgaatcat

SEQ ID NO: 58546 - DNA, 50 bp, Homo sapiens
cagggcggcgcagcgcttccggctccaggaagaggagttgtacgcatgtc

SEQ ID NO: 58547 - DNA, 100 bp, Homo sapiens
ggattgccccctagtgtccgtgggaaagtttggagtctagctgtaggaaatgaactaaatatcactcctggaatgggtaccacagaccatgtcatcgtcc

SEQ ID NO: 58548 - DNA, 99 bp, Homo sapiens
ccctcctgctgtcaggctacatcagcaaagggcttgccagcaaagcacggacagagaaggaggagaagctgagccaggcctatgcaatcagtgctggtg

SEQ ID NO: 58549 - DNA, 82 bp, Homo sapiens
cctgctgtcccccaggagaaccaagatgggaaaggattttgcacaagccagcagctatgcagatatagctgtgaactctgat

SEQ ID NO: 58550 - DNA, 82 bp, Homo sapiens
aaccgctccggggtccgcatgtttaaagatggctagcttgtcactttctgcaaaggtttccctcagggagcctcctgctgcc

SEQ ID NO: 58551 - DNA, 82 bp, Homo sapiens
gccgccccgagcggagcctggagacttcccaagtaagaagcggaagaggagccgctggaaccaagacacaatggaacagaag

SEQ ID NO: 58552 - DNA, 75 bp, Homo sapiens
aagctggtgcctggcttgcaagacagagatctataaggacaggcagaaattctcagaacaggttttcaaagtggc

SEQ ID NO: 58553 - DNA, 75 bp, Homo sapiens
gctggctaagctcatcattgttactgttacgccccatggtgtccatcctgccagcagactgattcagaatgggag

SEQ ID NO: 58554 - DNA, 100 bp, Homo sapiens
tcgggtacgagctcccggtcccgacggcagccccggcgcctcccgaggacgcagaggctggggagtagctgctgagaggctgggaggcggcagaatgcag

SEQ ID NO: 58555 - DNA, 100 bp, Homo sapiens
cacggtgcaccggaccctgccagccctggcctcccacgactacatcctgaagattgtgcccacggtttatgaggacaagagtggcaagcagcggtactcc

SEQ ID NO: 58556 - DNA, 112 bp, Homo sapiens
tctcgctcggctgcgggaaatcgggctgaagcgactgagtccgcgatggaggtacactgaggaggggacggctccgtcttcacattgtgcacagatctgaggatgggattag

SEQ ID NO: 58557 - DNA, 101 bp, Homo sapiens
gcaactagccaatgccatgatgcctggtgccccattacaacccgtgtgtttcctgaggttataggcgggtgtttgaggagtacatgcgggttattagccag

SEQ ID NO: 58558 - DNA, 96 bp, Homo sapiens
ccatccgccgatttggccgcctggattgtgttgtcaacaacgctggccaccatgtggacgagtgctcactagcagaaaaaacctgtgtgaggaaaa

SEQ ID NO: 58559 - DNA, 78 bp, Homo sapiens
aggactacctgcagggttgtcgagctgctctgcagaacctcaaccagaaccctcggactttgctgcctaaattctatg

SEQ ID NO: 58560 - DNA, 100 bp, Homo sapiens
agtgatcccattgggggttgatacagcagagacgtcatacttggaaatggctgcaggttcagaggtgcatttgagaagatcttttctctttggccattgt

SEQ ID NO: 58561 - DNA, 83 bp, Homo sapiens
ctttttttctccagccgagaggacgcggctgtgatatacgaaggtgttctttgacctaatgagagaaatcagaacaaagaaga

SEQ ID NO: 58562 - DNA, 97 bp, Homo sapiens
cgtccagcagatggcggatgccctgcagtacctgcagaaggtctctggagacatcttcagcagaggcagttgctgtgggaggtgtggtaactgctgg

SEQ ID NO: 58563 - DNA, 75 bp, Homo sapiens
cagtgacctgattgcctgcctgcttcagggctgctatcaacgaagagatatcaccaagatggaaagttgcctttt

SEQ ID NO: 58564 - DNA, 100 bp, Homo sapiens
tgcggggcttccctgcggctggagaagtgacagtgtgttcgtgttcttctgaggtgtcagcaaagtttgttctacatgcagtccagcttgtgaagcaaag

SEQ ID NO: 58565 - DNA, 75 bp, Homo sapiens
gtgctgtatgaagtgagttatcggcgatatggtgatgagggaaagcacaggttgcatgtagacactggaatggag

SEQ ID NO: 58566 - DNA, 90 bp, Homo sapiens
ctgtatgagctctcagcaagcaactttgagctgcacgttgcacaagaacaccttgcacagaatatatctaaatcgcatctggaaacctgc

SEQ ID NO: 58567 - DNA, 75 bp, Homo sapiens
agtgaattctggttgtgtttcaactgctgtattgcagaacagcctcagcctgaattgaatgatctggcacgggac

SEQ ID NO: 58568 - DNA, 90 bp, Homo sapiens
tcacggggtctgccagacaaacagcttcatcagcaatggaagtggctgatatgtggactctgcagattatataaccttcctaagcacccg

SEQ ID NO: 58569 - DNA, 96 bp, Homo sapiens
cgatgctgcccggtttggcactgctcctgctggccgcctggacggctcgggcgctggagactttgaatcctcctcttccaccaccccctctcctgg

SEQ ID NO: 58570 - DNA, 90 bp, Homo sapiens
ccggctccgggccagcatccgagagcccggactggagagattgaggacgaggaggagaaggtctccaggtaccgagagctgctggtgcgg

SEQ ID NO: 58571 - DNA, 107 bp, Homo sapiens
ccgcagccttgggcctcgcgccggctatggccgtgccctggggctgagccctcaggtactccaaagattcaggtttactcacgtcatccagcagagaatggaaagtc

SEQ ID NO: 58572 - DNA, 83 bp, Homo sapiens
ggctctgcagcggcaacccccagcggcttaagccatggcgtcttgccccagaagctgcgggcacatccacgcctgaaatgcgg

SEQ ID NO: 58573 - DNA, 100 bp, Homo sapiens
ttcaagaggaggagaggggttgttttataaactgcctggccgaatcagccttttcacgctcaagagtgagcacaaatggatcagatgaccctgaagatgc

SEQ ID NO: 58574 - DNA, 50 bp, Homo sapiens
ttggttcttggcaggaatatggaagacagatatcggaaactggcactgaa

SEQ ID NO: 58575 - DNA, 100 bp, Homo sapiens
gcgagccccttggaggggctgctggacctcagctacccccgcacccacgcggccctgctgaaagtggcgcaaatgaaatggagatcttcacccttttcaa

SEQ ID NO: 58576 - DNA, 100 bp, Homo sapiens
agtatggtgttcagggatttcctaccattaagatttttggatccaacaaaaacagaccagaagattaccaaggtaatgtgaggctacaggagatgatggc

SEQ ID NO: 58577 - DNA, 50 bp, Homo sapiens
cagtgttcaccatcctggccccggaagcgagacggtcatctgttccagcc

SEQ ID NO: 58578 - DNA, 95 bp, Homo sapiens
gattcgcaagaccttcaatatcaaaaatgactttactgaagaggaggaagcccaggaatttacaagctcaggctcagccaacactgagaccacca

SEQ ID NO: 58579 - DNA, 98 bp, Homo sapiens
ggtcctgtgtccggagtgtgaggagcctgtccccaaggaaaccatggaggagcactgcaagcttgagcaccagcagtcactcagcctctgaagaagct

SEQ ID NO: 58580 - DNA, 75 bp, Homo sapiens
ttcttgatgaaacagatttatacagatggcatagtcaatccaacaataagaaaagatttgaaaactggaccgaaa

SEQ ID NO: 58581 - DNA, 46 bp, Homo sapiens
gaaagctgccaaaagtgacatgcagctgcggggtattgaatttgag

SEQ ID NO: 58582 - DNA, 75 bp, Homo sapiens
gaccaaccaatgagtcgaaggtctcgtagagcttccttagtgaatacttgtaatgaagtttatgaattaaagaag

SEQ ID NO: 58583 - DNA, 73 bp, Homo sapiens
gtcctctgcgtgctgctgatggggcgtcagcgaaaccaggtcctctctcagggagctgcagaacgcacccgac

SEQ ID NO: 58584 - DNA, 83 bp, Homo sapiens
ctggcccaacgatggcgagggcgccttccatggagacgcagtcaagtccatcatctccagaaccagctagtcttcctgcagaa

SEQ ID NO: 58585 - DNA, 50 bp, Homo sapiens
gaatccaaaatccttcatttacaggtggatccataaagaacccagccaac

SEQ ID NO: 58586 - DNA, 82 bp, Homo sapiens
ctcgtgcccttcgccttcgtgcgcttcgaggacccccgttcaaatctgaacatcaatgatgtactagggaactactcattga

SEQ ID NO: 58587 - DNA, 80 bp, Homo sapiens
cgacggctgctcaaacatcaggctccttccgcttccagccgttcgagtcctatgactccaggccctgcctgccggagcac

SEQ ID NO: 58588 - DNA, 147 bp, Homo sapiens
ggcaccgggatcgtgaccgagaccgtgaccgagagcgtgaccgagagcgcgaatatcgtcatcgttagaaggtgtcatggagaaactccagctgggcccagagattctgcagcgggaaaatccaaggcttatttatgccaggctgag

SEQ ID NO: 58589 - DNA, 51 bp, Homo sapiens
agttgttaccgaacatctcataaataaggtgagaagaaatttgtttgtcca

SEQ ID NO: 58590 - DNA, 82 bp, Homo sapiens
ctggcctggaggctatccagcggagtaccctgacttctaccggaagctctacggcctcttggacccctctgtctttcacgtc

SEQ ID NO: 58591 - DNA, 90 bp, Homo sapiens
gaaagagaaaagagggctgctgcactggaagtagtttatgccaacgtgacttcattcatacagatgaaccaaggatcgggatagcagtat

SEQ ID NO: 58592 - DNA, 75 bp, Homo sapiens
gctgcccaggctcgcctcgactccaaatggttgaaaacagatatacagcattgtttacaataaccaagatatgaa

SEQ ID NO: 58593 - DNA, 101 bp, Homo sapiens
ggctgcaggaggggctcggcggttcctctgcggtgtggtggaagaacttggagcgtgatgcccagaagtgtgtgaactggtctgtgaccacaaagatgaga

SEQ ID NO: 58594 - DNA, 76 bp, Homo sapiens
cgcgaccctgagccggcgcccgtggtccggccatggacgacctcggtatctccatacagccaagaataaagaaaga

SEQ ID NO: 58595 - DNA, 98 bp, Homo sapiens
agaggagctggtggaagaaagccaaacgaagttaaaggaagtgttccccacggctgcgctcatgccaggataacaaagccattgacctttgccgattg

SEQ ID NO: 58596 - DNA, 75 bp, Homo sapiens
gaggaggaaacagaaaattctctgtttgttcatatcaacaacttaaaactcatctgcagagcacatcaactagtg

SEQ ID NO: 58597 - DNA, 100 bp, Homo sapiens
ggccagttatttgcctcagtaaaagaattcagaatggacagtttagaagaacctcagaaaaaagtctttaaggctcgaaaaacgatgagagtgagtgatc

SEQ ID NO: 58598 - DNA, 123 bp, Homo sapiens
catgaggcgaggctagggaggacctcacttccccggggtgtaataatgttaactgagctacaggccaaatttgagcaccttaagagacttcaccaagaagagagaatgaagcttgaagaaaag

SEQ ID NO: 58599 - DNA, 90 bp, Homo sapiens
gtgcatcaaaggtgtgaacgcagctctagcctctcggaatttgtcttcttcagtggaaaccccgagaagactgatcagttcttcagttct

SEQ ID NO: 58600 - DNA, 100 bp, Homo sapiens
ctgccctgggctggaacgaccctgatacaagagtaaacctggtgatgactatgaagatcccaaagatcttcaagccatcaaagaagcccaggtgtatatg

SEQ ID NO: 58601 - DNA, 75 bp, Homo sapiens
agctgttgtctcagggagcacagaagtgaccaagaatatggcccaggtgaccaaagccctggacaaggccctgag

SEQ ID NO: 58602 - DNA, 95 bp, Homo sapiens
agacgcagccgtagacaccagctccgaaatcaccaccaaggtattatcgggggacccacggggtcattgtggtttacgacgtcaccagtgccgag

SEQ ID NO: 58603 - DNA, 75 bp, Homo sapiens
cagctggcggagctggagctggagctctcggaggaataagaccacagcttgccaaagagaagattgaaggatgcc

SEQ ID NO: 58604 - DNA, 90 bp, Homo sapiens
ggcggcggtagcggcagtggcggcgcgtaggaggcgggccaggatcctcttcctgctccagttgctggccgaccacgtccctggcgttgg

SEQ ID NO: 58605 - DNA, 100 bp, Homo sapiens
gagacttcaccaggggagatggcacaggagggagagcccattgctaaaaaggcccgctcaaatcctcaggtgtacatggacatcaagattgggaacaagc

SEQ ID NO: 58606 - DNA, 97 bp, Homo sapiens
gtcatacttggaaatggctgcaggttcagagtgactctgacatcattagaagcatgccagaacagactggtgaaaagtaaaccttttcacctacaaa

SEQ ID NO: 58607 - DNA, 98 bp, Homo sapiens
gagattccggcctggagctcccagggccgaggtgctggagaatctggtaaaagcaccattgtgaagcagatgaggatcctgcatgttaatgggtttaa

SEQ ID NO: 58608 - DNA, 100 bp, Homo sapiens
acctggaaagcaagggattgctggctacagcttcagaagaccgaagcgttcgtatctggaagcttttcttgcctggagaagagggaggggagaggacaag

SEQ ID NO: 58609 - DNA, 99 bp, Homo sapiens
tcaatgagcactattttggattagtcaatatttgcttgtaaatgcatcacgaagaggcagcccagaatgaagaaagcaagcaggagtgttggctcagtg

SEQ ID NO: 58610 - DNA, 82 bp, Homo sapiens
ctggtggaagaacaagtggcaggaacgtcaaggtcgtgggaaataaaaggcagttctacacagactgcagcaacggttgcat

SEQ ID NO: 58611 - DNA, 82 bp, Homo sapiens
atctgcactctttgggtacctcactttttatgatgaaagaaatgacctgccgtgatatcgttaaagaagttgcaaaaatgta

SEQ ID NO: 58612 - DNA, 83 bp, Homo sapiens
ctgcggcagaagccgagttcaacatcctcctggccaccgactcctacaaggaaggaaaatcacctcggcagtgtttgaaggaa

SEQ ID NO: 58613 - DNA, 74 bp, Homo sapiens
gcccagcatcactgtggatctgcttaccaaaagggtccccagccccaccccagccccaaaggaggctgttcgag

SEQ ID NO: 58614 - DNA, 74 bp, Homo sapiens
cgtctctctgctgcggcgcggggaccgctgtgctctcggatgagagggccttaccaaaaggagatttcttccct

SEQ ID NO: 58615 - DNA, 75 bp, Homo sapiens
ttttctactagtagataggactcttggtttggacatactacatggatcagaaatcctaagtaatgcactgaagag

SEQ ID NO: 58616 - DNA, 100 bp, Homo sapiens
ctggcttttagctgaactaaggagaaagtcctacaacagtttggcgtgcaacatggggcttgagaaagggcatgaaagaattactgatgtccttgatcaa

SEQ ID NO: 58617 - DNA, 90 bp, Homo sapiens
tggaaaagaaactttatgaatataatcagtctgatacatgcaggtttttctattgggaaagctactgatcggatggatgctttcaggaaa

SEQ ID NO: 58618 - DNA, 82 bp, Homo sapiens
agcctcctgggcagccccttgcccttggacaggtaactaggatttctacctcaaccgcgagacctatgcaaggacggtgtgg

SEQ ID NO: 58619 - DNA, 90 bp, Homo sapiens
gccgcgccgatgaacctgaccgagggtgtcacatgaccaaacctgatgtgatcctcaagttggaacgaggagaagagccatggacatcat

SEQ ID NO: 58620 - DNA, 88 bp, Homo sapiens
ccctgcctctccctgggctctgcttgcggaaggagctaatgctgcttatttgcagttgttgaacctgtttgcctatgggacataccca

SEQ ID NO: 58621 - DNA, 75 bp, Homo sapiens
cagaaagaacctggaagacagaggctggaggacaccagcagtgaaaacactgtggttcctccagaaacatatgtg

SEQ ID NO: 58622 - DNA, 100 bp, Homo sapiens
actttgtttttcctgggaactgcagagtcaagggtccagagaaggaggagaagttgagacaggcggtcaagcaggtgctgaagtgtgatgtgactcagag

SEQ ID NO: 58623 - DNA, 145 bp, Homo sapiens
gcccagcgccctggccctctcgctgttgctggtctctggctccctcctcccagggccaggcgccgctcagaacgcttcagtatcagacacagcacagcagccatctgaagagcaaagcaagtctcttgaaaaaccgaaacaaaaa

SEQ ID NO: 58624 - DNA, 75 bp, Homo sapiens
acagaaggaaaggtgatcggactcttcctgtcagatgatgatggtaggactgaaaatggagcactagctccaaag

SEQ ID NO: 58625 - DNA, 83 bp, Homo sapiens
gatctggtgtaccaggcgaagctggccgagcaggctgagcgatacgacgaaagaagatgctgatatgctacaacacggatgaa

SEQ ID NO: 58626 - DNA, 100 bp, Homo sapiens
cacaaaatgggatctctttggtaattgctacagattattgaagactggaattgaacatggagccatgccagaacagcaaatcaccgatgttcatatggtt

SEQ ID NO: 58627 - DNA, 82 bp, Homo sapiens
ccgctcctaagcctgcacagccgcggcggcagcagcagtgagagtgaagatagtgatccggggagacaggaacacgggcaag

SEQ ID NO: 58628 - DNA, 100 bp, Homo sapiens
atgactttggtgccctcaacatctctcagagacgaaagcttggtgatccagctatttttcctgccgtaattgtggaacatgttcctggtgctgatattct

SEQ ID NO: 58629 - DNA, 100 bp, Homo sapiens
gcaggatgagttttctctgcagcctgaagaagttgctctaggtcgtaaccagcctttgaaaaaggagaaaccaaaatggaaaagcgattatcctatgaca

SEQ ID NO: 58630 - DNA, 98 bp, Homo sapiens
cttctgatgaggatgttacagatgctggtcttaccacttatcatctccagtcttgtcacaggaacatctgctcagcaattggatgcaacatttagtac

SEQ ID NO: 58631 - DNA, 74 bp, Homo sapiens
atccatttgtatttattcctgaagatgacccattatttccacctattgagttgtactcgtaaaacaaggatcat

SEQ ID NO: 58632 - DNA, 100 bp, Homo sapiens
ggatgatcgagaggatctggtgtaccaggcgaagctggccgagcaggctgagcgatacgacggaccagaggagcgagagcagcaagaaccacacccagca

SEQ ID NO: 58633 - DNA, 100 bp, Homo sapiens
gaagcacctctccagcggggacctgctccgggacaacatgctgcggggcacagacccaatgattctcgcatgctggttgctttaggagaatgttacgaga

SEQ ID NO: 58634 - DNA, 101 bp, Homo sapiens
gaataatatggaagaagatggaaaaaacttgtttaatggaatttcgctaaggagtttgtgatcagtgatcggaaggagctggaggaagatttcatcaagag

SEQ ID NO: 58635 - DNA, 100 bp, Homo sapiens
aaaagcagcgtgcctggttacagctgtttccacgtgcggtgctcgtcgggagtgatcacctaccctacagggtctcttgcaacgtgtgagctgcctcttg

SEQ ID NO: 58636 - DNA, 75 bp, Homo sapiens
cctggaggagctgctgctcgacgccaaccagctgcgcgagctgcccaagtgcggcaccttcccgtctgatgctgg

SEQ ID NO: 58637 - DNA, 76 bp, Homo sapiens
tgcaaagctgtacaagagatcatgcagtcaaggggaagagtgattcctcacactgctttcaagctggactgagcca

SEQ ID NO: 58638 - DNA, 99 bp, Homo sapiens
tgatggtgggccccaacttccgcgtcggcaagaagatcggctgcggcaacttcggggagctccgcctaggtatcacctcttctgggctcaagatggaca

SEQ ID NO: 58639 - DNA, 76 bp, Homo sapiens
tcctggggctgtgctccatggcgagctgggcacagagacatctaccaatctccaccaaaagctctactaccatgtc

SEQ ID NO: 58640 - DNA, 83 bp, Homo sapiens
gtcggagatgtatgcagtgtgacgccaagtttgactttctcaccagaaaggaggatacgaagcgttttcggcttcctgcccgg

SEQ ID NO: 58641 - DNA, 100 bp, Homo sapiens
cttggacagcagattttggtttaatatctgattgggacaacattcagacccatttccagtcatgagataacaaagccattgacctttgccgattgtgttg

SEQ ID NO: 58642 - DNA, 75 bp, Homo sapiens
ggcgccggctggggtgtgtgctcctggaataatcaagctgggaaggtggaaccctctccccctcagttatgtgac

SEQ ID NO: 58643 - DNA, 120 bp, Homo sapiens
ggaacccaagcagtggcgaagggaatcgcaaggctcttccctgaccattttctactgtccctgcgcgagggtgttgaaagcagcaggggcctagaagacattaaaccgataccacagaaa

SEQ ID NO: 58644 - DNA, 90 bp, Homo sapiens
atcaggggaaaagtttgcctatgtgccatttggagctggttcaatgtatctatgcctgcctacctcaatctgcaagggagtgtcagaaag

SEQ ID NO: 58645 - DNA, 145 bp, Homo sapiens
gccgaagccggagtcgcgcggccgggagcacgggcgccggcatagtacaatgaggcagccagcggatcttgggtgctggagaatctggtaaaagcaccattgtgaagcagatgaggatcctgcatgttaatgggtttaatggaga

SEQ ID NO: 58646 - DNA, 50 bp, Homo sapiens
caggaagaaacttgaggccatgttacaagatttggacacctcccacactg

SEQ ID NO: 58647 - DNA, 75 bp, Homo sapiens
ggcctgttaggaaccgggcagcacagtaggaggtgctggagaatctggtaaaagcaccattgtgaagcagatgag

SEQ ID NO: 58648 - DNA, 103 bp, Homo sapiens
cgcaggcccgcggggagcgcagcccggcggagcatgcttttcacttccactgcatctctcgctggctcaaaacacgacaggtgtgtccattggacaacagaga

SEQ ID NO: 58649 - DNA, 82 bp, Homo sapiens
ccaggagtcatcggacgccagaatctgcaagagtgagccatggagctacgtgtggggaacaagtaccgcctgggacggaaga

SEQ ID NO: 58650 - DNA, 83 bp, Homo sapiens
ccctcatcagccagtgtggaaaaccagtggtaaatgtcagctacaggccagcttatgaccagacctgcctagagctggaacgt

SEQ ID NO: 58651 - DNA, 100 bp, Homo sapiens
gggatattctcttctgtgctgtcaaggggcccagtaaatcctttagggccacctgtaccccatgggccccatggtgtcccaggcccccatggacctcctg

SEQ ID NO: 58652 - DNA, 100 bp, Homo sapiens
caaagccacaagtcatacgcaggcagtgcttcaaaaaactatggaacaaaacagatccttggagaagttccaagatgagatgggattctccaacatggaa

SEQ ID NO: 58653 - DNA, 100 bp, Homo sapiens
ctgtgggttggtggcaggggtcgagcaggtgccatcaggcacatgaacggtggagtcttcaaaggagctctttgttcaatgcctagccacctattcctac

SEQ ID NO: 58654 - DNA, 75 bp, Homo sapiens
ctccaagccaaaatcacagctttgagtgagaaacaggcgggctggtccgagtctctgttttggaagctcaaccag

SEQ ID NO: 58655 - DNA, 99 bp, Homo sapiens
gaggacttcgtgaggtcagaggtcttcagaaaatccattggcattctcaacatttttaagagctcaggccccggggcctccagcggcaccagcggagac

SEQ ID NO: 58656 - DNA, 50 bp, Homo sapiens
ataaactcatggattgaactggctgcctttaatattggttgggaacaaat

SEQ ID NO: 58657 - DNA, 74 bp, Homo sapiens
tgctcttcctgaggttttcctaagccatcccctggcggaaccgcccccagagtacagttgtgaatttggctccg

SEQ ID NO: 58658 - DNA, 100 bp, Homo sapiens
tggacacttgtcttcttccttactgtaatgggactatttctactccacataatctggattctgcttcaggaaaaaaggaattgtctacttatgcagctgg

SEQ ID NO: 58659 - DNA, 101 bp, Homo sapiens
ctctacaacgaaggtgaagccacggaagataaggtcctgttattgccttggagtttaatggggatggtgctgtagaagtatgtcaacttattgtaaacgag

SEQ ID NO: 58660 - DNA, 83 bp, Homo sapiens
cgagtggggcggacgcgcgcagcccgcccgcccggcgaccagcaagaataccgtagcagtaggcaggacagttccaattcaac

SEQ ID NO: 58661 - DNA, 100 bp, Homo sapiens
gggatcccggccaccagcaattgtccggatcttatggttggtgatgaggcaagtgaattacgatcaatgttagaagttaactaccctatggaaaatggca

SEQ ID NO: 58662 - DNA, 82 bp, Homo sapiens
aagcaaaagagacccacagatttggatgtagatacgttagccagtttacttaatggagtctccctctgtcgcccaggctgga

SEQ ID NO: 58663 - DNA, 100 bp, Homo sapiens
ggcaaagttttgcagatcttcaacaagaggacccaggagaaattcgccctcaaaatgaaggatttgggggcagagcacttggcaggtcatgaaggggtcc

SEQ ID NO: 58664 - DNA, 100 bp, Homo sapiens
ccacagctaagacgccgggactccctggaaacctagaaatgaacatacatatgatagttgagaaagacacatattctgatcatgaagaaataaacacaag

SEQ ID NO: 58665 - DNA, 95 bp, Homo sapiens
ttcaacaaaggacactacatcaaggactgcccccagaatcccagtgttccaatgcagaagttgcaggatatccagagagcaatggagctgctatc

SEQ ID NO: 58666 - DNA, 82 bp, Homo sapiens
ccacttaccgcagcatccaagtcggccctggttgtgaccgagattcccgacgagagagactgaggggaagagaggaaggagg

SEQ ID NO: 58667 - DNA, 98 bp, Homo sapiens
gcaactgttggcccagctccgaaacctggacaacgcggtcctcatcggacgtagacaagtttggcaacgagatcacccagctggcccggcccctgcct

SEQ ID NO: 58668 - DNA, 95 bp, Homo sapiens
gcggcgcgcggcggcggcgctcggcgatggtaggcgtccctggagcggccgccttccagcgagctggtcaggctcaccatcgagaagcagggacg

SEQ ID NO: 58669 - DNA, 49 bp, Homo sapiens
tccatccttgccaccgcagtgatcaacactgaaaattcaggtggccgca

SEQ ID NO: 58670 - DNA, 98 bp, Homo sapiens
gaagggctcggccctggagggcagggccgacaccacaacgggcaggctgctggtggtctacccttggacccagaggttctttgagtcctttggggatc

SEQ ID NO: 58671 - DNA, 75 bp, Homo sapiens
cgctcagcttcagaccctgggctgcagctgcctaatgagggagagacaaaggcagcgctgccctcgggggagtat

SEQ ID NO: 58672 - DNA, 104 bp, Homo sapiens
tgcacgcgccgtggctccggatctcttcgtctttgcagcgtagcccgagtcggtcagcgccggagtaagactttgaccccgacgcaggcttcagtgattgccgc

SEQ ID NO: 58673 - DNA, 76 bp, Homo sapiens
aggtgataagacttacagtttcctaacagcagtgcaggcctgcacagctgaccacagttgggaaacgttgctgtct

SEQ ID NO: 58674 - DNA, 100 bp, Homo sapiens
ccggggaggcagcgcgggatcccagcctcaggcgtgcgcggacggtgtgcgggtacagcagggaagaactggaaactcagagaaagaaactgcccttcca

SEQ ID NO: 58675 - DNA, 96 bp, Homo sapiens
agaaaaaagtaaactacttgaaaaatttagccttgttcaaaaagaggctgtgcaacaagttattactaacctgctaattgggcagatagagcttcg

SEQ ID NO: 58676 - DNA, 74 bp, Homo sapiens
tcgggatataattcgcaacccatacagtgaatccatttaagggcctgcagttgccatcacccactgcaaccagc

SEQ ID NO: 58677 - DNA, 100 bp, Homo sapiens
ccgagggcttcgtggatgccctgcaccgggtccggcaggtgttggaaatcaatagctcttctagcctttgcattgtttaaatataatagtgtcattggac

SEQ ID NO: 58678 - DNA, 97 bp, Homo sapiens
ggtcgaggagagccggagtcggggacccaggagtttcctgtgtccagcgctgccggagccgcctgaggaaatgtggctttagataatctacagataa

SEQ ID NO: 58679 - DNA, 74 bp, Homo sapiens
tgctgccccacaaaaccaagcgaggccaggccgctctggaccgtctcaaggaaggaagagctactgttaaccag

SEQ ID NO: 58680 - DNA, 75 bp, Homo sapiens
gagcgatatcacagaacacaagattaatcaatgtcaactgacagggttattttggagctgttggagcactccttg

SEQ ID NO: 58681 - DNA, 75 bp, Homo sapiens
cgtggatggattccaccccaacgaggtgtgatccctcacatccacaaatctctgattggaaagaagggacagcag

SEQ ID NO: 58682 - DNA, 90 bp, Homo sapiens
cgttccttcgcgcgtgaggctgcggctctgacgctcaccatggatgatgatatcgccgcgctcgtcgtcgacaacggctccggcatgtgc

SEQ ID NO: 58683 - DNA, 100 bp, Homo sapiens
cggcggcggagcggccggtccacggaggaggaagctctatgcagaactgtgccaaggcatcgtggacatagccatttccagtgtcttcccacccccagat

SEQ ID NO: 58684 - DNA, 101 bp, Homo sapiens
aagaaaaaagaatgggtcaaccaagaacgtcaaacactccaacgattgagagcatttaaagatgtcctatggcagcgtatacaaagctattcataaagaga

SEQ ID NO: 58685 - DNA, 74 bp, Homo sapiens
gaaggttcgcgccaaggagaccaggaagcgagcactcagcagtctctgctggatgaaccgaatcctaacagtcc

SEQ ID NO: 58686 - DNA, 98 bp, Homo sapiens
gaggacggtctgcatactcgctgcccgccggctccctcccccgcgtccctgcgaccgccgcggcgaagatgaggcttcgtgacggagttatcagagac

SEQ ID NO: 58687 - DNA, 100 bp, Homo sapiens
gcagcctccacctcccaggctcaagcagtccttcccccctcgccctcatgaatagctgggactacaggaaggcgtggaagtgcgagtggccagaatcttc

SEQ ID NO: 58688 - DNA, 96 bp, Homo sapiens
gttatattccatctactgtctttttcttcaatgggcagcatatgaaagtggattatgggaccttgcctcatagtattcgatcagattcagaagata

SEQ ID NO: 58689 - DNA, 83 bp, Homo sapiens
ggaggcttactgcaagaagtatgagcagctcaaggtgcaagaagtaggctggcacgacgtggccggctggttggggcgtggtg

SEQ ID NO: 58690 - DNA, 83 bp, Homo sapiens
cccggaacccgagctggagctgaagcgcaggctgcggggcgcggagtcgggaggggacggcaaaacagaacagaaaggcggag

SEQ ID NO: 58691 - DNA, 78 bp, Homo sapiens
gggagacgggtgaggtacaggctcagtctgcggccaagactccgtcctgcaaggaggaagttaagtcttcagagccta

SEQ ID NO: 58692 - DNA, 75 bp, Homo sapiens
ggccacgtgagccacggccacggccgcatagtctactgcttatgaaaagcaatttcctgcaaccagtaaggacaa

SEQ ID NO: 58693 - DNA, 75 bp, Homo sapiens
gagccagccgctgttttgccggaggagcccctcaggcctggaggccatagtggagtttgactaccaggcccagca

SEQ ID NO: 58694 - DNA, 100 bp, Homo sapiens
acaatgggcagaacgaattcagtgatatcattaagtccagatctgtaaaggcatgacttcctggcaccacagggaaaatcgggtgcaagcccagaaacta

SEQ ID NO: 58695 - DNA, 100 bp, Homo sapiens
gagttttctagtccctcttacttgaagcatgtctttcagagcccggcaccacccatcttgagtatctgagttattaagcctacgctcagatcaaggtagc

SEQ ID NO: 58696 - DNA, 90 bp, Homo sapiens
cagcagttctgcctgccctcccacaccgtggatccctccgagtgggccgaagaggagatactagagtaaaaggatggtttcttctggaca

SEQ ID NO: 58697 - DNA, 100 bp, Homo sapiens
acacattgtgtccttggttcatcatgttaaaggagatatacgactaaggggtcagacgggggttcgtgctgaacgccgtggctcctacccattcattgac

SEQ ID NO: 58698 - DNA, 75 bp, Homo sapiens
atggaacacttcagtgcattcaagttggaatgttaaagaaattcatcaggctgctgactatctcaaagtggaaga

SEQ ID NO: 58699 - DNA, 46 bp, Homo sapiens
tgtgcgagagcctcctcacttggttggaaaatggatataccttatt

SEQ ID NO: 58700 - DNA, 87 bp, Homo sapiens
ggcggcggctgcggcccaatatagtgattcgcctttgccagtctcatctcgtgtctgctttgttaagttccatgatccagactcagc

SEQ ID NO: 58701 - DNA, 100 bp, Homo sapiens
caattatgaaagaagtcattccttttttgaaggtacactgaggaggggacggctccgtcttcacattgtgcacagatctgaggatgggattagcgaagct

SEQ ID NO: 58702 - DNA, 83 bp, Homo sapiens
cagcgtgcgttcagccctgggatgagattgtggggaacctgggtgaaggcacctttggcaaggtggtggagtgcttggaccat

SEQ ID NO: 58703 - DNA, 75 bp, Homo sapiens
tgtcacagcaactcctttgcaagatgccccggtctgaggcccttcatccctgagaaggacagccagcacttcgag

SEQ ID NO: 58704 - DNA, 75 bp, Homo sapiens
tgaggggacaaatgacattcttcggctgtttgtggctctgcagggctgtatgactggagaagaaagcacggacag

SEQ ID NO: 58705 - DNA, 100 bp, Homo sapiens
gatcggcgcccagcaatcacagaagccgacaaggcgttcaagcgaaaacatgaccgctgagcccatgagttggatgaaaaatctgacaaacagtatgctg

SEQ ID NO: 58706 - DNA, 82 bp, Homo sapiens
ttaggaaacacctctacctcctgcgaggcctcccgggctccgggaaaactacactggccagtgtggacgaatgtggaacctc

SEQ ID NO: 58707 - DNA, 82 bp, Homo sapiens
ttacatagcccaagtagtcccaggatgcattcagtctactagcatattcagatccctggaacagcccagttggaaatcagct

SEQ ID NO: 58708 - DNA, 76 bp, Homo sapiens
ggagaatgtgaccgttgggggctactacccagggatcattatcaagtcccagcagagcgaggtgacccgaatcctg

SEQ ID NO: 58709 - DNA, 100 bp, Homo sapiens
actctaccctggaggagattctggggcagtatcaacggagtctccggggtactaatttggtcgaagcagataaccaagcggagtggaccgacgttcagaa

SEQ ID NO: 58710 - DNA, 75 bp, Homo sapiens
cagaagggtgatcagcaccgcgaaagccccaggggccattggaccctacaggctggagtgcggtggcgtgatctt

SEQ ID NO: 58711 - DNA, 100 bp, Homo sapiens
accagaccattgatgaggaatatgatagcatcaaaaacaacattgaagaggaggaaaaagaggttggctcaggtttaccgacaagactgtgaaactttcg

SEQ ID NO: 58712 - DNA, 100 bp, Homo sapiens
atgatgcctatgatgccaacgtgtccttcaatgtttcccgggagctcttcttcatcaacatgtggcagaagatgccactgccgccaggagccctgtaaca

SEQ ID NO: 58713 - DNA, 100 bp, Homo sapiens
gccatcatcatgaaggacgtgcccgactggaagcatccgtacttcaaacaatagtcaggttaataaactgactctaacaagtgatgaatctacattaata

SEQ ID NO: 58714 - DNA, 100 bp, Homo sapiens
gaccaaattatcacctccaaggagcaccttgccagcaagatccgaggtgttcctgggacctcagagaccaggctcagagcctgacatccctgcgagggga

SEQ ID NO: 58715 - DNA, 75 bp, Homo sapiens
attatcaggttcacgccaacagtacctcattgctctttggcgactcttattggaatggtctggaacacggacctg

SEQ ID NO: 58716 - DNA, 50 bp, Homo sapiens
aagtgggattactggattatatgagtgttgcggagataggaacatgggag

SEQ ID NO: 58717 - DNA, 100 bp, Homo sapiens
tttctggctctgaaggcgaacgcttcgctggccatttaggagctctgctcaaagccagacggcgatcagtgggtgaccgcggctgcgagggactttgtca

SEQ ID NO: 58718 - DNA, 100 bp, Homo sapiens
cggcacctgacggcgtgaccgacccgagccgggcgccctgcgtccggcagaggaggcgagcatcccgctcaggtgatgaggaacccctcgcgcacccagc

SEQ ID NO: 58719 - DNA, 90 bp, Homo sapiens
gtcccgattcgatctcttctttatccttgtggatgaatgtaatgaggcagctgttgtgctgtgtatggacgtgggctttaccatgagtaa

SEQ ID NO: 58720 - DNA, 74 bp, Homo sapiens
gggcttctccctgcactcgcagctcgccaagttcctgttggaccggaacttccgcaaacacctgcgcatggtcg

SEQ ID NO: 58721 - DNA, 100 bp, Homo sapiens
agagtcgggagagctttctggatgatgtaaaccttattctggccaacagtgttaagtataatggtacaactccaaaaggagacattggagaagaaccaag

SEQ ID NO: 58722 - DNA, 100 bp, Homo sapiens
ccggcggggagagaagcggatcccgtccgagccccggccccaagtaacgccgccgccccggagccgccgtgtttgtaaaatgtatgaagaacatctgaaa

SEQ ID NO: 58723 - DNA, 100 bp, Homo sapiens
tacaccatacatggtacagccagagtaccgaatctatgagatgaacaagagactgcagtctcgcacagaggatggaggatgaagctgtcctggacagagg

SEQ ID NO: 58724 - DNA, 108 bp, Homo sapiens
ctggactgactgttggatggtgaatgctgatgactctctggaggtctcattcaggaacgtcgcctgataacactgcaccaccacctccccctccaaggccacagccct

SEQ ID NO: 58725 - DNA, 75 bp, Homo sapiens
tccttgtgccaaacgtctggccaatgtcgttcgccaagtacagcccagagcacatgtgaggagaggcagaccata

SEQ ID NO: 58726 - DNA, 96 bp, Homo sapiens
aggagcccccacttaatgggacgtcatcacttgaggcagcagcattccaaaatatgcccggtgctatccgcccagctgctcctagaccaccattta

SEQ ID NO: 58727 - DNA, 82 bp, Homo sapiens
gagtgtgcgtgcgcgccgagcgttgcagagtgggcaggatcttaagacccgataggtgcagaacccatctggacacggagac

SEQ ID NO: 58728 - DNA, 83 bp, Homo sapiens
ccctgttccccgcgctgcggcctggcggcttccaggcgcactaccgcgaaagaaggggatcaacctgaaagagtccaaccaat

SEQ ID NO: 58729 - DNA, 90 bp, Homo sapiens
gagctgtgcacgaccacaccgctgatgaagacaaggactcacagtggctgcaagaaaactttagaaactgttcctttggagaggaaaaag

SEQ ID NO: 58730 - DNA, 100 bp, Homo sapiens
cagttggatggcggtgactgcgtggtacaggacacaatatccaatcctaggcctcctatatgatgactacgaatatataccaccaggtagtgaaacacag

SEQ ID NO: 58731 - DNA, 60 bp, Homo sapiens
cctacattagcgtctacgaccaccaagatgagaaccacagtgctacagcagagtccagtc

SEQ ID NO: 58732 - DNA, 75 bp, Homo sapiens
ccgggaacgagcgagtcgccgctgcagccctagtgactgcggcctgcatcccgacaaatttacatgtattggaga

SEQ ID NO: 58733 - DNA, 75 bp, Homo sapiens
tcgtggtcctcctcgccctctgcagccggtgtgtggacaatatacgatgtaatggtttaatgactatagtgtttg

SEQ ID NO: 58734 - DNA, 110 bp, Homo sapiens
gccgctgggcgccgccgcgggcgccgggagcgagctgggagggagccgcgcgcctttgtgcgcgcgccgagaggaggaagatgactatctctttgatgatcctctgccaa

SEQ ID NO: 58735 - DNA, 97 bp, Homo sapiens
ctgaatgtgcaacttgcaagggaactggagacaatgaaaatcttgtcagaatgttcgtggcatcagagagaaagatgagagctcaccaggtgctcac

SEQ ID NO: 58736 - DNA, 136 bp, Homo sapiens
gcagcccagcagcccgccagcagatcccatggcgcggccccagcattggacacagccatcaccagcagagctggagtggctggatgtggagcaccgcaccgtggctggagtcctgagcagcaccttctggacaggg

SEQ ID NO: 58737 - DNA, 90 bp, Homo sapiens
gaaatccagtccctgttactccattttggccagaaattcaaggttttgacctgtagcagagaaccaattctggagaacagcctcacttct

SEQ ID NO: 58738 - DNA, 100 bp, Homo sapiens
gaagcctgaaaagtcgcagcgagctggagccgccggaggccctggccaacgtcaacattgggagcctcatctgcaatgtaggggccggtggacctgctcc

SEQ ID NO: 58739 - DNA, 75 bp, Homo sapiens
aaaaggacattaaggatctgggagggtgatttgctgtcctctgaatacatagagagacacattgaacatggaggc

SEQ ID NO: 58740 - DNA, 83 bp, Homo sapiens
cacagcccgatcccgccatggagcagccgaggaaggcggtggtagtgacgggtgcgtgcaggagctgcggcaggggctgctgg

SEQ ID NO: 58741 - DNA, 82 bp, Homo sapiens
ggcgcctgaaggagttgttgtctcggcagcgcccgcggagacgtgaagaggtttgtctacagattttgagcgttcgaagttg

SEQ ID NO: 58742 - DNA, 90 bp, Homo sapiens
aggaccctgatgaagaccttgaacaagtctcgagagtggaaacaactctcacgaaggaagcagccaccctcgccatggcctccccgcccg

SEQ ID NO: 58743 - DNA, 96 bp, Homo sapiens
cgccaggtcccccggaaacctagaaatggcatcatctggggagaggatacactgatggagtatttggagaatcccaagaagtacatccctggaaca

SEQ ID NO: 58744 - DNA, 101 bp, Homo sapiens
atccagccttgatacccattaccactgcctcctttattgcagcaggaatttgttgattgaatcccggaatttggaaaccccagatacggagggcggacggt

SEQ ID NO: 58745 - DNA, 88 bp, Homo sapiens
cggggacagcgacgacgcggaggcagagaagggaacgcccggcccagcccccagatccagtttgctgaccagaagcaagaattcaaca

SEQ ID NO: 58746 - DNA, 74 bp, Homo sapiens
gtctttcagagcccggcaccacccatcttgagtatctgaagaagcctgggaagtttataaacagataaagacgc

SEQ ID NO: 58747 - DNA, 74 bp, Homo sapiens
acggacttaaaatctccgcaccgcaccctccacctcagacaatgcagatcttcgtgaagactctgactggtaag

SEQ ID NO: 58748 - DNA, 100 bp, Homo sapiens
gccctgcgaccccagtcatgggccagacctcggtgtccacgctgtccccgcagcccggcagcgcattcagcctgtatatggagcacagcatcctcctctt

SEQ ID NO: 58749 - DNA, 83 bp, Homo sapiens
cgctcctaagcctgcacagccgcggcggcagcagcagtgagagaaatgcgtgtactgccggaagcggatgaagaaggtgtcag

SEQ ID NO: 58750 - DNA, 85 bp, Homo sapiens
ttttcttcagcatcttcacaaaaccgggtgggcttggactgggcgtgctccatggcagagatcctgcggtcactcaacagtgccc

SEQ ID NO: 58751 - DNA, 100 bp, Homo sapiens
tcactccagtctttgagacccccagcaggccaggcaggctctcctagatgtgaagaacatcgcccaccagaacaagtttggggaggatatgccccaccca

SEQ ID NO: 58752 - DNA, 96 bp, Homo sapiens
cggactcccgcggcgggaggagcctgttcccctgaggttctggctccttggcagcaatggctgtatttgaagataagtttaggccagacatggagg

SEQ ID NO: 58753 - DNA, 90 bp, Homo sapiens
cttggtgggttaggcctgtgtgttgcttagccgaaagaggcatcgttttctctttagaaaacatggtaagaggcttagatgaagatgaga

SEQ ID NO: 58754 - DNA, 105 bp, Homo sapiens
ggaaggagctgggagcctgggctgcctgtgtgtcggctggatgctgccagggaggccgaggcgactttggcttgaaaggagaacctgggaggaaaggagagaaag

SEQ ID NO: 58755 - DNA, 100 bp, Homo sapiens
cccacacctctgcctttgttgggaaatgttttgtcctatcgtcaggtggcacgcactacccttcttcctggcctcctgaagaccatagcagcaaatcgta

SEQ ID NO: 58756 - DNA, 100 bp, Homo sapiens
aaaacaagactggggctgctcccatcattgatgtggtgcgatcggacattgccgagaatggctgcgcccccaccccagaagagcagctgccaaagactgc

SEQ ID NO: 58757 - DNA, 76 bp, Homo sapiens
gggcagcagcccacccagtgcccctgcaggtgagggcacagaccggccagaatttagcttcacttgagagagatct

SEQ ID NO: 58758 - DNA, 75 bp, Homo sapiens
agtaacctactgcagtcattcaaggagcactttgctatgtagctgtgtacatatcactacagttataggaagttt

SEQ ID NO: 58759 - DNA, 100 bp, Homo sapiens
tggggagcagctgcgggtgttccgggagcaccggggctccgtcatctgtctggagggtgaatttggaagtgaaaagaaaactgctttgcatgaaaaagag

SEQ ID NO: 58760 - DNA, 117 bp, Homo sapiens
ggacactttgttattggagaaacatgcagattatatcgcatcctatggctcaaagaaagatgattatgaagagcagcgaagaggcacaaaaagagaggagaaggatatcaaatttat

SEQ ID NO: 58761 - DNA, 97 bp, Homo sapiens
tcactgcagcctcaacttcttgtcctcaagtgatcctcccaccttagcctcctaagtagctgggaccacagatttgggtattcggattcccgttgga

SEQ ID NO: 58762 - DNA, 74 bp, Homo sapiens
caacaggatgaaacccataaattggagtcagagtattcatcgaaaagaaagcacagctaacacttttaggaaca

SEQ ID NO: 58763 - DNA, 49 bp, Homo sapiens
ctttggaggatgcggctttgatggagaacttcagagccctgtgcactgg

SEQ ID NO: 58764 - DNA, 75 bp, Homo sapiens
gaggcaccagtggggtcccacagtcacctgaggtcatcatcagatttgaaatatttaaagtggatacaaaactat

SEQ ID NO: 58765 - DNA, 74 bp, Homo sapiens
cgtggaccacaggccctcgttgcccagatatattgaaatggattccaggcgtgtgcctcgagacaagctggcct

SEQ ID NO: 58766 - DNA, 100 bp, Homo sapiens
taccccgagcggcaccaacagcggcgcgggcaagaagcgctttgaagtgaaaaaggtttttcgttggaatatacgttgcacatttatggcgattctgagt

SEQ ID NO: 58767 - DNA, 50 bp, Homo sapiens
agcatgtcgtctttatcgctcagccggagcggttgcagggcacacattac

SEQ ID NO: 58768 - DNA, 100 bp, Homo sapiens
cgacaagatccggcccatctccagcattggacaggtaatcagtccaaaaaccagcgtgccaaagcgtttccccagggctctgtccggactctgaagcact

SEQ ID NO: 58769 - DNA, 74 bp, Homo sapiens
tcaggaacaccaatggaccaaaatgaacacagtcactgggcaaatacttccctggacaagaaagccagatgaaa

SEQ ID NO: 58770 - DNA, 90 bp, Homo sapiens
aaatcgcttggttaaaacctgacacttttaacagattagaagcccaggacccaggaaggagacacaggaaatttattcaaagtccccacg

SEQ ID NO: 58771 - DNA, 75 bp, Homo sapiens
gcgagcagtctcaggcctttagtgatgatgaatccagaacatgcggatgattgatgggaagccggaatacaagaa

SEQ ID NO: 58772 - DNA, 98 bp, Homo sapiens
ctaaattacacttctgggctctgtcagccatgtgactgtagtccacatggagctctcagcataccgtgcaacaggttgtaaagaagaaagttctaccc

SEQ ID NO: 58773 - DNA, 87 bp, Homo sapiens
gattgtgacatatcgttggacccagaattgaggtgtccaacacgctctcttgggctctgtatgagctctcccggcaccccgaagtcc

SEQ ID NO: 58774 - DNA, 74 bp, Homo sapiens
ccggtctctgttccgcaggatgaatgattacggacctgaagccaaagaacaagatgcgctagtggacagattgc

SEQ ID NO: 58775 - DNA, 75 bp, Homo sapiens
catgaatggagcaaaatggcggatcatgtgcagtgtgtgctgtatttatggagtttaaagattaatcatcccaaa

SEQ ID NO: 58776 - DNA, 98 bp, Homo sapiens
cttcatcgcgataacgaagaaacctgaggaactgcaagcacatgttgaccagataactgaaatggcagcagtaatgaggaaagccattgaaattgacg

SEQ ID NO: 58777 - DNA, 100 bp, Homo sapiens
gccgtcgcagtccagccgccgcctgccctcagccgcccgctggccgggagcggagcccctgtggatgatatcatcaagttgaatcgaaaggaagggaaga

SEQ ID NO: 58778 - DNA, 100 bp, Homo sapiens
gtgcctagcttcttctgttcttcagtatggttatgaggttaattggactcctgagattaacaaagaacacttgctacagggtctgcttcctgatgtgcaa

SEQ ID NO: 58779 - DNA, 98 bp, Homo sapiens
aaagtagctccagctcaaccatctgaggaaggaccaggaaggaaagctattgacctgaaaagtggttctggaaaagtgtaccaaggccctgcaaaagg

SEQ ID NO: 58780 - DNA, 98 bp, Homo sapiens
agagagcgaacgccagggaccctgtgcaggcctgctcctccgtttgcaagatgtctttggtggacttgggaaagaggttgctagaagcagcaagaaaa

SEQ ID NO: 58781 - DNA, 49 bp, Homo sapiens
gcgggcctcggagcctggggacaaagggcatcgttataacacccctgct

SEQ ID NO: 58782 - DNA, 100 bp, Homo sapiens
atcaaatacctgctgttcggatttaacttcatcttctggtatcaagtggggcagctgtattctgtggctgaggccagtaaaaatgaaacgggtggtggcg

SEQ ID NO: 58783 - DNA, 50 bp, Homo sapiens
gggaaccctggtcaccgtctcctcagccactgaagatcctggtgtcgcca

SEQ ID NO: 58784 - DNA, 109 bp, Homo sapiens
aagaattaaaagatgatgagaaataaggacaaaagccaagaggaggacagttcgctacacagcaatgcatcgagggggtgcactatagccatctggagctgagccctgg

SEQ ID NO: 58785 - DNA, 50 bp, Homo sapiens
tcaggatgctggatgttcatggagtgagggagaaactgcctacatccggg

SEQ ID NO: 58786 - DNA, 75 bp, Homo sapiens
aaggaagccacgtgcagacatctacaaccttcgatctcctgacgattctttatagctccaagctctacagattct

SEQ ID NO: 58787 - DNA, 97 bp, Homo sapiens
tggaattctaatttgaaccatgtttggattgaagccgcctctgtattacttaccagaggaaactcattcaggcaagttcagccctttatgaggaatt

SEQ ID NO: 58788 - DNA, 74 bp, Homo sapiens
acagtgaggaggagatccgagaggcgttccgtgtctttgacaaggatgggcggctgagcaaagcggaaatcctg

SEQ ID NO: 58789 - DNA, 87 bp, Homo sapiens
tccatcagcagagaacccagcaggttgagcaagacatggaactagattctggtctggctgaatctgtgtctacattgatctgggctg

SEQ ID NO: 58790 - DNA, 83 bp, Homo sapiens
atattgtcgatgattcagtcagagtgtaaacaggaacatcgataagtagtgtaaaaacttgcacaatgaaatccgaagccaag

SEQ ID NO: 58791 - DNA, 75 bp, Homo sapiens
ccagaaatggctgcaggccaagcgcctcacgccggacctggtgcaggtgtaaagatttctctctgtgttactgga

SEQ ID NO: 58792 - DNA, 75 bp, Homo sapiens
accaggaggccaggggtgtcgccatggttgactatagtcaatggggccaatggagccaagtgtatggaaacccac

SEQ ID NO: 58793 - DNA, 74 bp, Homo sapiens
gaagtaaatgagctgatggaagagctgtttgaaactgtgttggggatgtcctttgcactgaccctgaactgcca

SEQ ID NO: 58794 - DNA, 82 bp, Homo sapiens
cgtgggactcagcagccttggtgctcaggtgccagatgcaaaggcccgacaacaagctcaaatacgtcaccaaatggcagag

SEQ ID NO: 58795 - DNA, 74 bp, Homo sapiens
atggcaaccatgcagctattaaccagtgtcaggaagatgagaatgtgcctactgctcctgatcctccaagtcaa

SEQ ID NO: 58796 - DNA, 115 bp, Homo sapiens
tcctaaaggagatggaagtgatgtaccatcatgggtagcctttgataaacagaaatatggctacacacacctttctgcaggagagctgcttcgtgatgaaaggaagaacccagat

SEQ ID NO: 58797 - DNA, 100 bp, Homo sapiens
aaggacaggcagagctaaacaagtgcacgtggtgattgctacccctgggagaatcctggatcttattaagaaaggagtagcaaaggttgatcatgtccag

SEQ ID NO: 58798 - DNA, 75 bp, Homo sapiens
ctcagcctcccaagcagatgggactacaggcactggtgaggtggattgatgatgaatcttctggcacacctggag

SEQ ID NO: 58799 - DNA, 75 bp, Homo sapiens
tgaggaaccttcaaaggcacttcgtggggtcacagatggactctgtgactacatgactaataaaatatggcagaa

SEQ ID NO: 58800 - DNA, 83 bp, Homo sapiens
cggggggccaccgaatcgctgtcacgccggcagaattcagaaggagctggcggacatcactttagaccctccacctaattgca

SEQ ID NO: 58801 - DNA, 48 bp, Homo sapiens
ttcacggaggcaatagctagccggcttatgcatctggatgtgacattg

SEQ ID NO: 58802 - DNA, 102 bp, Homo sapiens
ggtcacccgaatcgcagggagtcgccgctggagaggggctcggcgcccggcggggactgcagacttaattcagtgcacaaatgagatgaatgtgaacatccc

SEQ ID NO: 58803 - DNA, 100 bp, Homo sapiens
tgctgattgtagacgccatgtccaaaagttaaatctactacagggacaagtttcagagctgccactcagctatgctaagaaggaatctgatcttaatggc

SEQ ID NO: 58804 - DNA, 100 bp, Homo sapiens
acagacctcagctccgcggaagttgcgagttgtggaaagtaaaaatgtagccctaccaaaaggaactattgtactggcttctccaggctggacaacgcac

SEQ ID NO: 58805 - DNA, 100 bp, Homo sapiens
tcttctgccgcaccaggctcatcctgtccatcgtgtgcctgatgatcacgcagctggctggcttcagtggaccaggtcatgatcagagttcgactcttgc

SEQ ID NO: 58806 - DNA, 98 bp, Homo sapiens
tcggaggtccggtccgttgcctcaaaccagtcagagatggagttctcttcacttcaggacatgaaaaatggctacaaacttcctagcacatgagaaga

SEQ ID NO: 58807 - DNA, 82 bp, Homo sapiens
cttgtaacagggtgaagccctatgtccatgtcctggacattggcgagtgcctgacagtgccggacgagttctcaaagcaaga

SEQ ID NO: 58808 - DNA, 75 bp, Homo sapiens
gtcccttatatggtggagagaatctcaaaaaattatgctcttcaggaacaggagtacagctgtgtagtaaagatg

SEQ ID NO: 58809 - DNA, 101 bp, Homo sapiens
ttcgctcgcgttggaggccgccttttcagaagcggctgcgcacggactgctggagatggtggagtccgtcagcctgcactgcccaaagtcttggaaacttg

SEQ ID NO: 58810 - DNA, 100 bp, Homo sapiens
cttgacttcaaagtcctaccccaggaagctgaagaggagcgatgtcggagctcttaggcctgctgaaaacctacaactgctaccatgagggcaagagctt

SEQ ID NO: 58811 - DNA, 98 bp, Homo sapiens
cggcccaagcggtttcaaacggcttagagcaggccgcttggttctgacccagctgagatcaggatcctcatgaccagccaaagagaagaagaattagg

SEQ ID NO: 58812 - DNA, 83 bp, Homo sapiens
cctggtcctcctggatcgacgccgccaaattacactgctccgacagttgtaaacatgttaaaggcatcctgttatatggaccc

SEQ ID NO: 58813 - DNA, 49 bp, Homo sapiens
aatttatgacaaatacgtagagctcaggggcctgcgaggtcaaccgcca

SEQ ID NO: 58814 - DNA, 98 bp, Homo sapiens
acacctgggcacttgtcacaaattttatatgcagatatttcagttgcctaatgacttcaaatcatcccaacaccagagaacactaaatgacagtggac

SEQ ID NO: 58815 - DNA, 90 bp, Homo sapiens
ctacgtgtcccccgaggatctggaggcacagctgcagtctgacgagaggggcattgaagttgatatcgatgtggagcacggagggaaaag

SEQ ID NO: 58816 - DNA, 83 bp, Homo sapiens
gggtctcgggggccgctctgggatcccggccaccagcaattgtccggcgccatgtcagaaccggctggggatgtccgtcagaa

SEQ ID NO: 58817 - DNA, 50 bp, Homo sapiens
cgacaagtttggatcctgtgttccccagcatggactcctcggacttgtct

SEQ ID NO: 58818 - DNA, 114 bp, Homo sapiens
ccagagctccagcagccttgttagggcgtggcctgaggcttggataagtgggacaatgcagatcttcgtgaagactctgactggtaagaccatcaccctcgaggttgagcccag

SEQ ID NO: 58819 - DNA, 75 bp, Homo sapiens
gtgataacacactcagcatcactaaaggttgggtatctacagccattggttgctgttcaggtcagctttgctcct

SEQ ID NO: 58820 - DNA, 75 bp, Homo sapiens
ttatttgctgttggatcgtttcatactttacgcttgtgtgataaaactggggtggattgtagacatggaaggtgc

SEQ ID NO: 58821 - DNA, 98 bp, Homo sapiens
tgcaaagtgggacgcggcacctacggtcacgtctacaaggcgaggcggaaagatggaacccagcgggtgccgcttctccacccgaggcttccacctcc

SEQ ID NO: 58822 - DNA, 100 bp, Homo sapiens
agtctaacagaatcctgtcggagttgtagccatgccctagttgtgattccaaagaatccctatcctgcctccgatgtgaatactgagaagcccagcatcc

SEQ ID NO: 58823 - DNA, 75 bp, Homo sapiens
ccagagataggagatgctattgcccggctcaaggagatgcagaggaatcacttggcacgccacctacaagagaac

SEQ ID NO: 58824 - DNA, 50 bp, Homo sapiens
ccagctccgtctcggcggcggcggggattttatattggaagacatggatc

SEQ ID NO: 58825 - DNA, 50 bp, Homo sapiens
tggtgaatcatgttcctcttgaacagctgacaatggcaccatgcatcttt

SEQ ID NO: 58826 - DNA, 74 bp, Homo sapiens
gtgcaatcttaaaagaaactgtgaagcaaattcgtcagatcaaagaacaagttttgcagccttagaaaatggca

SEQ ID NO: 58827 - DNA, 90 bp, Homo sapiens
ttttcattggaggagaagaagggatggcagagaaggttgctccttgagggcaggacagttcttatggctttatccgttgcgtaagcacag

SEQ ID NO: 58828 - DNA, 75 bp, Homo sapiens
cagcaagactctcgagcccatgtaaagagaaatgtgtatgaccttacaagtatccccgttcgccaccaattatgg

SEQ ID NO: 58829 - DNA, 83 bp, Homo sapiens
gtccaagaagcaaaaaagggactgctaagaagataccaccagtgacactccattcagggtaatggacaagatggagtttgcag

SEQ ID NO: 58830 - DNA, 96 bp, Homo sapiens
ttttatgagtgggaaccatttgcagaagcccatcacctcttcatgaccactgcctgccaggaggctaactacggtgccctcctccgggagctctgc

SEQ ID NO: 58831 - DNA, 100 bp, Homo sapiens
ccggggtcttcaccgagctcattaaaggattcggtactctttgagcacatcaaattcttccattgccgctcttctctgtgccctttatccgcacttccca

SEQ ID NO: 58832 - DNA, 100 bp, Homo sapiens
tcctgccctgccaacacaacctgtgccgcaaatgtgccaacgacgtcttccaggaattgaatgatctggcacgggaccctccagcacagtgttcagcagg

SEQ ID NO: 58833 - DNA, 75 bp, Homo sapiens
cttttcaggcatcctcatataattaaactagaatcagatatcaccaaggagagaattcagaagatcctggcaact

SEQ ID NO: 58834 - DNA, 75 bp, Homo sapiens
gctcccccgggatgatctacagaaaaagcttgtggtgaaggggggcaaaaaaaagaagcaagttctgaagttcac

SEQ ID NO: 58835 - DNA, 76 bp, Homo sapiens
gaacatggcgacgtctaatctgttaaagaatgttgtaccatctttgggtaggcagacttccctgacgacatcagtg

SEQ ID NO: 58836 - DNA, 83 bp, Homo sapiens
ccgatccagcctgcggagcctgtggggcaggtggtgatcgtggcagaggtggccctggtggcatgcggggaggaagaggtggc

SEQ ID NO: 58837 - DNA, 88 bp, Homo sapiens
aggagtgaaggcggcaaaatggcggaccgcttctcccgcttcaacgaagaccgagactttcagtttggaatcaagaccatgttggaga

SEQ ID NO: 58838 - DNA, 134 bp, Homo sapiens
atcacgttgacgtccatttaccagtcttccctggcaagattcttctgaattgtgctgccttggccaaaagagccttatgtttgatcatcggccaaggtcctggcgagaactgcctctgcggctagctgattttg

SEQ ID NO: 58839 - DNA, 75 bp, Homo sapiens
acggggattccaagcaatgaagaagatccatttggctcaagccataggaaaaggatacagagtagagtttcatga

SEQ ID NO: 58840 - DNA, 82 bp, Homo sapiens
cagaaggccgcccatgggcacgtccgcaaggccttcaagagccacgaccgcctatggctgcggtagcagtgagagaagctct

SEQ ID NO: 58841 - DNA, 99 bp, Homo sapiens
ccctaaacagcaagccatctcccctcgcccgccccccgcccccccagtctcggagatctcagaggcaccgactgggagacagggtttcgccatgttgcc

SEQ ID NO: 58842 - DNA, 50 bp, Homo sapiens
tggattgggaaagaccatggcaggagtccttcaataatgttaaacagtgg

SEQ ID NO: 58843 - DNA, 75 bp, Homo sapiens
gaacatcttggagaaacagttttctaaatcttccagagctgcacaccagatacagaagatcattgagacactgac

SEQ ID NO: 58844 - DNA, 100 bp, Homo sapiens
gccaatgtgttgactgtcgctatgggctcactgttgtccaggcagctcattgtatttgcatgcccgagtctttgagccgtgctataccagtttgtccaga

SEQ ID NO: 58845 - DNA, 75 bp, Homo sapiens
aaaatgaagttaagataagaagtaatctggaatcagaaagcactacgctaagagacagtcttgctctgttgccca

SEQ ID NO: 58846 - DNA, 98 bp, Homo sapiens
ctggagaagagattctgccagcttatttatccagagacacagatgtgcacactgtggcttccctgttaaagctctacctccgagacctcccagagccc

SEQ ID NO: 58847 - DNA, 100 bp, Homo sapiens
catgaccactagacccacagctgttaaagcaacagatgcatcaaattgcaatttggaggagaggcagcacaagcagaagcctgggcctggctagcagcca

SEQ ID NO: 58848 - DNA, 73 bp, Homo sapiens
gtgaacagggatgtacctaattgttctggacttggtgcctctttctgttatatgctttcctatttagttggga

SEQ ID NO: 58849 - DNA, 100 bp, Homo sapiens
tattttccctcctcaaactgactttgcagccacggagaggtctgagttcactgacaccatcctgtccgtgcacccctctgatgtgctggacatgcccgtg

SEQ ID NO: 58850 - DNA, 75 bp, Homo sapiens
tttacaaactggccaagaagggccttactccttcacagatcggtggtttggctttgaatgacagcaagaactctg

SEQ ID NO: 58851 - DNA, 75 bp, Homo sapiens
cctgtggaaagatggcagcccccacccggaacacctgcactactggcatcacagtttctccacagacactaccca

SEQ ID NO: 58852 - DNA, 90 bp, Homo sapiens
gcggaccctgccattccggaggaggaagcactacagttcgtaaggagatcatcaggaataagatcagagccattgggaagatggcacggg

SEQ ID NO: 58853 - DNA, 51 bp, Homo sapiens
cttgatctctttatctgtggatgaacagaactggcattgcccgccttgtcg

SEQ ID NO: 58854 - DNA, 97 bp, Homo sapiens
cgaagcaaaaagaccagttttcatctttgaatggttgcgatttcttgataaagtcttggttgctgccaacaaggttttgaagtacaggaagaaggtt

SEQ ID NO: 58855 - DNA, 98 bp, Homo sapiens
ttttctatgaagcacaatacaaagaagtaaaagtggtggctaatatgatgaggagtctgatgaggaagctgtgaagaaaaccaacaaatgtgtactag

SEQ ID NO: 58856 - DNA, 82 bp, Homo sapiens
tgaagtggtgagcctttttgtcactggctttgccacaaatgtcagtgcagaactctggctggccccaccaagaagacagccc

SEQ ID NO: 58857 - DNA, 49 bp, Homo sapiens
agaacatggtgtctggagttaaagatgagacgtgcaggtaccatcagga

SEQ ID NO: 58858 - DNA, 126 bp, Homo sapiens
tggcagccctgcccgagtggtccagtgcatttcagagctgggcatctttggggtctatgtcagacccggactccttcctgaagtctgcacggctgcagcggctgccatcgtcgtcgtcggagatgg

SEQ ID NO: 58859 - DNA, 75 bp, Homo sapiens
cggcgatgtggtgcgaatacaggagacgtgtggagttcttcgtgccatgaaggaggacagtgaaaaagttccgag

SEQ ID NO: 58860 - DNA, 83 bp, Homo sapiens
atttaccagagataattgataacaccctgtaacagctgacacaaacacagagcagtctaaagcaaccgagcactgagaaaaat

SEQ ID NO: 58861 - DNA, 82 bp, Homo sapiens
cctggagcctcagttggaagcagccgatccagcctgcggagcctgtggggcaggagcagtgaggagaatgaataccttccaa

SEQ ID NO: 58862 - DNA, 88 bp, Homo sapiens
taccatattttctcgggatatccgatttgctaaccatgaggtggccgctgttcctccaactccccagcctttagctcctacaccttca

SEQ ID NO: 58863 - DNA, 90 bp, Homo sapiens
aacagcaccttcagtataaacgatgctgcttcccacacaagcacaaaacgagtggatcattcaaataccagattggcttcccagcttgat

SEQ ID NO: 58864 - DNA, 100 bp, Homo sapiens
ctgcagaacaaattagacttgcacagatgatttcggaccataatgatgctgactttgaggagaaggtgaaacaatctcttgcatggcaccaagaatgtta

SEQ ID NO: 58865 - DNA, 75 bp, Homo sapiens
acgacatgttgcttttcgtggagactcagcccgcctgcacccaggtgaaatatacagccttgttgctcacacaaa

SEQ ID NO: 58866 - DNA, 75 bp, Homo sapiens
cctaataaggagccatggagaaaaatggatcttaggatggcccactgcgtgaccttggttcagctgtccatttcc

SEQ ID NO: 58867 - DNA, 100 bp, Homo sapiens
cccgtctgcctgcagttcttcaccttgacgcttatgaacctctactttgcccagcacctgaactcctggggggaccgtcagtcttcctcttccccccaaa

SEQ ID NO: 58868 - DNA, 50 bp, Homo sapiens
ctcattcaaggttacccagttgggctgcgtccaaagaggactctgcggct

SEQ ID NO: 58869 - DNA, 100 bp, Homo sapiens
agccagctggcccccagggccctgcaggcctttccgttccgaacgtccacggcgccctggcccccctggccatcccctcggcggcggcggcagctgcggc

SEQ ID NO: 58870 - DNA, 75 bp, Homo sapiens
caccatcaacaaagaagaccacacactgggaaacatcattaaatcaaactaatctggattcactccctctggttg

SEQ ID NO: 58871 - DNA, 96 bp, Homo sapiens
ctcaaggcctgagtagccggtaacaaacgagggttcccgggattggaccgacgcagccatggtacaagactgtcatgtcttaaaatatacgtcaaa

SEQ ID NO: 58872 - DNA, 100 bp, Homo sapiens
catcacgacctccagtgacactggcatccgtgtcattctggaccttactcccaactaccggggtgagaactcgtggttctccactcaggttgacactgtg

SEQ ID NO: 58873 - DNA, 98 bp, Homo sapiens
gggatgctgtgaacgagtgtgatattactgaatattgtactggagactctggtcagattgatgcctgggctcagctgaactctattcctggccagttc

SEQ ID NO: 58874 - DNA, 83 bp, Homo sapiens
cctggcgccggcggcgggtactacccaggcgggatgcaatggatcaactagaacaaagagtcagtgaattctttatgaatgca

SEQ ID NO: 58875 - DNA, 75 bp, Homo sapiens
ccgccatgggggcctgcctgggagcctgctccctgctcagctgcatatggctcgtggacagcagaaaattcagtc

SEQ ID NO: 58876 - DNA, 100 bp, Homo sapiens
atggcggatctggaggagcagttgtctgatgaagagaagattggatttgtcctgtatccccccagtggaggtcctgcatgggatctgatggatcatgaaa

SEQ ID NO: 58877 - DNA, 100 bp, Homo sapiens
tgcctgccgggcggccgggcgcggcgagcccagagctgtaggtaaaacttgcctactgatcagttacacaaccaatgcatttcctggagaatatatccct

SEQ ID NO: 58878 - DNA, 96 bp, Homo sapiens
tggaattttggcatcaaggacaaacccaccttcatcaaaggggacctgaaggagaagaaggagaaggtggaggagaaggcaagccggaaagagcga

SEQ ID NO: 58879 - DNA, 78 bp, Homo sapiens
ggagccgagccggaactgcggcagtctctccctgccaggctcttcatccaagcagatataatttctacagtagaattt

SEQ ID NO: 58880 - DNA, 117 bp, Homo sapiens
ctggcaacagttttcttcagcgcccaggatgcagccggctaaggttatgaagacagtatggagtttccagaccatagtagacatttgctacagtgtctgagcgagcagagacaccag

SEQ ID NO: 58881 - DNA, 75 bp, Homo sapiens
gttcagtggcttcctgaagtgactaattgggcagatgtacagagtcagctcaggcacatagaagcagcatttgac

SEQ ID NO: 58882 - DNA, 90 bp, Homo sapiens
gacaccttcgaccacctcatcgagatggacaagcgggagggcaaatacgacatgggcatcctggatgaaggatttgggggcagagcactt

SEQ ID NO: 58883 - DNA, 75 bp, Homo sapiens
gcacggccagagcttccagaatggctatgccggcatcttccatttccagttcatctcaaagaaggacccagagga

SEQ ID NO: 58884 - DNA, 99 bp, Homo sapiens
aaagtggtgaatcccctgtttgagaaaaggcctaagaattttggcattggccaatggaagcactgttgtgaagaacttatgaaaattgagattatgtca

SEQ ID NO: 58885 - DNA, 82 bp, Homo sapiens
ctggctgttagaagaattcatgctcatccggggaaatcctcattgacgattcaatttgttgaaggccaatttgtggactcct

SEQ ID NO: 58886 - DNA, 100 bp, Homo sapiens
ggcagcagctccagagctttgtcaaagaggctacttctacaagtccgaacagccagtccagcaaaatgaacagcattgtctaccagaagcagttccagtc

SEQ ID NO: 58887 - DNA, 100 bp, Homo sapiens
tggtcccctatgcctgaacattatgtggaaggatcaacagtcaattgtgtactagcattccaaggccaaaaccagcaactgatttggataccatcaagac

SEQ ID NO: 58888 - DNA, 75 bp, Homo sapiens
gccatcatcctcatcatcatcatagttcctccaactcctctgccaaccaatgatgttgatgtgtatttcgagacc

SEQ ID NO: 58889 - DNA, 128 bp, Homo sapiens
ctggagtgtgctcacagggaaagtggaaaaggttctttcaaagcagcacagtggagacctttggcgacttggcctttggcgacatcttcctccacctgctcacgggcaaccttgcgctgctggccgac

SEQ ID NO: 58890 - DNA, 83 bp, Homo sapiens
cagaagatctgggtgcccgtggaccacaggccctcgttgcccagatgtggacgacatccttggagaaggcagcgacgacagcg

SEQ ID NO: 58891 - DNA, 100 bp, Homo sapiens
gcattttgtcaaggatgagaaaactcgctttagtctggcactggagtgtggaaacattgaggtgcagctcagtggaagatgatgacaaccagaagacatg

SEQ ID NO: 58892 - DNA, 98 bp, Homo sapiens
ggatggggcaggatggctgcgttgacacgtcttatttaatccacatcataggtgatccggacggacacgttcaagcacctgcggcacctggagattct

SEQ ID NO: 58893 - DNA, 75 bp, Homo sapiens
gccgtgccctggggctgagccctcaggaggcagtggagaaggtgacacagcacatccacggcctgtctgggaaga

SEQ ID NO: 58894 - DNA, 100 bp, Homo sapiens
ttgaggtgtggaaagaccagaagaaggacaagatcgcagaggaaggtgggcggcgggagtgcccagccgtgtgacagcatcgttgtggcgtactacttct

SEQ ID NO: 58895 - DNA, 89 bp, Homo sapiens
gccgcggcccgcctcagcatctggtacagccgagggccacctacagatgctcctgcagtggacacagcagaacaagtctatatctcttc

SEQ ID NO: 58896 - DNA, 117 bp, Homo sapiens
ggaaagagtcctgcatggtttcaagggacgtaccaggaggatggtgcccagcttttccagaagcctgttaaaagcaaggtctccccacaagcaacttctctgccacatcgccacccc

SEQ ID NO: 58897 - DNA, 83 bp, Homo sapiens
cattacagagacctgctccaagtccctcaggaggaatatagaactgaaggtatcagctggcacaacatagattacattgataa

SEQ ID NO: 58898 - DNA, 95 bp, Homo sapiens
tgtgtgatatcatctatgccggtgagaaggcccagtttgcacagccggagatcttaataggaaccatcccagggtggaattgcgtttgttgccat

SEQ ID NO: 58899 - DNA, 100 bp, Homo sapiens
acaggagctggagccctcaacaaaaagctgccagtaactcagattctagccatgaaggtcaagaggaatcttcaaaggaaaatgtgtcatcaaatgctgc

SEQ ID NO: 58900 - DNA, 100 bp, Homo sapiens
catcccgcagtacaagaactggagaggttgttagcgacatgagtacagggtctggatcttacccattcaagagtgtattctcagcacccaatgcctggca

SEQ ID NO: 58901 - DNA, 100 bp, Homo sapiens
caaggcaagaccgaattcagaaggatatcgacgtcgtgatccagaagtccagagctgaggactgcctgtttgcagtatccggagtgtgatgcagaagtac

SEQ ID NO: 58902 - DNA, 80 bp, Homo sapiens
tgagatggccgtcgtgctcaacggtgggaccgtccaatcacatgtgtgggtgcgaggaggctgtgagtccgggcgctgcg

SEQ ID NO: 58903 - DNA, 75 bp, Homo sapiens
aaaggaggaattcgccgtgcccgagaatagctccgtccagcagggataccaataactagtgcctcgtactacgcg

SEQ ID NO: 58904 - DNA, 98 bp, Homo sapiens
cgaagcgccgggcagctcgggaacatggccctggagcggctctgctcggtcctcaaaggttggtgttcgaggaagagacattgttgttcttggtgtgg

SEQ ID NO: 58905 - DNA, 50 bp, Homo sapiens
aaccagttaccactaatcttaagaaggaaactctgatgaggaagaaagtg

SEQ ID NO: 58906 - DNA, 99 bp, Homo sapiens
acttcttgaacaaaacctgcatactttagatagtctccgtatattcaatgacaagtaccactccagttgcggagagatttttcaccagttccacctctc

SEQ ID NO: 58907 - DNA, 101 bp, Homo sapiens
ggtgaatgtcagtagcctctcactgaatgagcctgaagacaaggatgtgactgttgatgctatgaaactgggagtaaaggaaatgaagaaggcatacaagc

SEQ ID NO: 58908 - DNA, 98 bp, Homo sapiens
ggagccctgagcccatggcagctccagcctctgcctcccagaaactcaggtctataagaaggagaaagctcgagtcatcactgaggaagagaagaatt

SEQ ID NO: 58909 - DNA, 83 bp, Homo sapiens
gagagcggcggccgctcacaacatgcacagcctggcgacggctgcgggcttttttccagacttcaagctcccattccaacagt

SEQ ID NO: 58910 - DNA, 75 bp, Homo sapiens
cagaggcgagccctggtggaggaagagaggccaggtcatgactcactggcttcctgcaacctgacgatggcccag

SEQ ID NO: 58911 - DNA, 149 bp, Homo sapiens
tcttacaccactcccaagaagaataagcacaagagaaagaaggttaagctggctgtcctgaaatattataaggtggatggagagagaaagaaaaagccagagaggagagctggggtccacctcgagaatcaaggccatcagaagaacgt

SEQ ID NO: 58912 - DNA, 74 bp, Homo sapiens
cgcagtggtcgcttcttctccttgtgatcaccagcagcttgcaaaacttatccaggagtcgccaaccgttgaac

SEQ ID NO: 58913 - DNA, 75 bp, Homo sapiens
ctctgttaaagctggtctgttctaactgagtgtaaacaggaacatcgataagtagtgtaaaaacttgcacaatga

SEQ ID NO: 58914 - DNA, 98 bp, Homo sapiens
caaggtgtcaacaatgtgccgaataccctctaccatctgctttggtcagggtgccgctcgaggatttaaaagcaacaagaagaaaaccaaacaatgct

SEQ ID NO: 58915 - DNA, 98 bp, Homo sapiens
cacccccagtgggtgctcacagctgcccattgcctaaagaaatcagtcgcatcgaatacattcattcaaagaacttcatccaccgggatgtgaagcca

SEQ ID NO: 58916 - DNA, 100 bp, Homo sapiens
cgctgccgccaacaggggacaaaaccagccgctccgactccagggctcctgtctacgaccagactgtgccctgtccacggtgcctcctgcatgtcctgct

SEQ ID NO: 58917 - DNA, 75 bp, Homo sapiens
tctggagtgcgtgggggaccggctgttggcgggccataaaattttgagtagaaaaatccagaaatttgaaaatca

SEQ ID NO: 58918 - DNA, 75 bp, Homo sapiens
aaccaggagcctcttccatacatgagattctgaaaaagagttccacgtcctcccttatcgagtctttgttcccct

SEQ ID NO: 58919 - DNA, 97 bp, Homo sapiens
cagaatacagagatatggaatcagggtgtgctgatctgcaaaccctggacacaatgcagccaattgagaggaaaagacagggctatattcatgagct

SEQ ID NO: 58920 - DNA, 101 bp, Homo sapiens
gactgtcctattgcatctcaagccgactcacaccacccggcaagaactgctcactacggctccctgccccagaagtcacacggccggacccaagatgaaaa

SEQ ID NO: 58921 - DNA, 100 bp, Homo sapiens
ttcagtaacacacctggaacaggaacccagcaacaattcttctgccaggcaaatactctatctggatcttctctcagtcaggcaccatctcatatgtatg

SEQ ID NO: 58922 - DNA, 74 bp, Homo sapiens
ccctggctgccttgagaggtcacttctgcctttccagtgacaaaatggtgtggccctggccaacgtcaacattg

SEQ ID NO: 58923 - DNA, 75 bp, Homo sapiens
ggaaccgcagacctctgggcttcctgctgggcagatgctcaaactcaaatccaaaacattgctgcatcttttgac

SEQ ID NO: 58924 - DNA, 82 bp, Homo sapiens
tctaaaagaagaaaactgatggctaagtttgcatgaaaactgcactttattgcaatggctgtgtggagtggtgtgaatgtgg

SEQ ID NO: 58925 - DNA, 100 bp, Homo sapiens
ggcacctccacaactatgatttctgcctgtgtctcaagatgcgtgcaaaaggtttcttgagtacaggcgatcaggctgcaaaggggaactatggactcct

SEQ ID NO: 58926 - DNA, 101 bp, Homo sapiens
aggtgctctacgaaatctttcgctccctacacaccctggttggacagaatggcttcctttgggtggaagaggaaaattggtgagaaggtctcaaaggtcac

SEQ ID NO: 58927 - DNA, 100 bp, Homo sapiens
attttctgacatcaagtcccacgcgttcttccgcagcatagactgggacttggtgtggacactgccagcggctgcagccgacttggaatgacctgggaga

SEQ ID NO: 58928 - DNA, 89 bp, Homo sapiens
gataagcaatttaaagaaaattttaaaaggaatcttggattataatcatgaggctttcaaggatatgctgtattcagctcaggaccagg

SEQ ID NO: 58929 - DNA, 100 bp, Homo sapiens
cgacagccccaacttcctgtgctcggtgctgccctcgcactggcgctgcaacaagaccctgcccgtggccttcaagtgcgaggacgacgggcagacgttc

SEQ ID NO: 58930 - DNA, 98 bp, Homo sapiens
aatgatgcaggtaatgctgctatagactcactgctgaattatgaaactgtgaaggatgttgcttcagagtgtgaagtcaaatgcatgccaacattcca

SEQ ID NO: 58931 - DNA, 76 bp, Homo sapiens
agaagaatcctgcaaaaatgtctctctatccatctctcgaagacttgaagtgtaaactggagttgctggtgggcag

SEQ ID NO: 58932 - DNA, 100 bp, Homo sapiens
gtgaatctgggcttatgggatacagctggacaagaagattatgacagattacgccccctatcctatccgcaaacagtatctcttgggtcacagattgatt

SEQ ID NO: 58933 - DNA, 74 bp, Homo sapiens
acgccagtacggggatgagtccactctggccttccagcaggacttggatgttgtgggtgatggtatgcagtgtc

SEQ ID NO: 58934 - DNA, 75 bp, Homo sapiens
gttcttccttgaagaaatacagcttggtgaagagttactagctcaaggagctggctaaatatgaatacatggaag

SEQ ID NO: 58935 - DNA, 96 bp, Homo sapiens
gttcggctggaaggaaccgctctcgcttcgtcctacacttgcgcaaatgtctccgacagatgcaccatcaggaatggaattacagtcatggtatcc

SEQ ID NO: 58936 - DNA, 75 bp, Homo sapiens
gttaaattcaaaaactacctcatccccaaggtctgcaataatttccctctactcattgattgtttcccaggaact

SEQ ID NO: 58937 - DNA, 82 bp, Homo sapiens
tttctgaggccacaggaaaggggccgtcggtcgccgccatgacagcgagcgaggcggaggatcagtgaatgcttgtgaaaag

SEQ ID NO: 58938 - DNA, 75 bp, Homo sapiens
gctgcacagccgggccttcctggccatcacgcgtctgcgctcctcagaccaccggcaggtgaacagcctgatgca

SEQ ID NO: 58939 - DNA, 95 bp, Homo sapiens
gcctcagcctcccgagtggctgggattacagcctacaaggagaagatgaaggagctgtcggtgctgtcgctcatctgctcctgcttctacacaca

SEQ ID NO: 58940 - DNA, 51 bp, Homo sapiens
cccggacatccgcgccacactgccctgcaggagtcattaaatcaaaacttc

SEQ ID NO: 58941 - DNA, 75 bp, Homo sapiens
cctcccgaaatgaaggagttcacccctgaatacaaaggtactgctataaccagaatttggtagaaaaaggattta

SEQ ID NO: 58942 - DNA, 96 bp, Homo sapiens
cacgggaggaagaggctgggtggtaaacaggaagtgggcgctcagagctcgggggcggcgctcagatctgaatggcatagacttaactcctgtgca

SEQ ID NO: 58943 - DNA, 98 bp, Homo sapiens
tgagttgctaaccccccagggtcccagttggacaactagtggtttgaagagccagggccgtctgtcagtaggaagtaatcgtgatcgagagatcagca

SEQ ID NO: 58944 - DNA, 89 bp, Homo sapiens
ctcgactcggtcctgtttcgacagcgaacatgtcgcggcctgtcagaacagtgcccaaacctcgtgttaaaaagcagccgaagactcag

SEQ ID NO: 58945 - DNA, 100 bp, Homo sapiens
tgcgtggaggagctgtgcagccgcgaggaggcgcgggaggtgttcgagaacgaccccgagacggtggttgatttgctgagatatttttcctgggccgagc

SEQ ID NO: 58946 - DNA, 74 bp, Homo sapiens
cacttgtcagtgaagttcaaatagctcagttgcggtttcctgtaccaaagatgtgtcgtggaggccgaatgttt

SEQ ID NO: 58947 - DNA, 50 bp, Homo sapiens
caaggaattacataacatcaaacgtggactattcagactatgaagacagt

SEQ ID NO: 58948 - DNA, 80 bp, Homo sapiens
gaacagtacgcagtgaatgttcttcgggctcagaatcaggttctgaaaaaaggtgttgtggatgaacaagcaaattctgc

SEQ ID NO: 58949 - DNA, 101 bp, Homo sapiens
gaatgttccctgacaatttcgttaaggtcctgatggggagaatagctggtccaagaagtacccgtcgtgtgggggcctgctgcagtcccccatagacctgc

SEQ ID NO: 58950 - DNA, 75 bp, Homo sapiens
gcacaacacagggaagcttggggagggccgacgactgcttttgtgcatctcgaaagctggatgcggtggccatcg

SEQ ID NO: 58951 - DNA, 98 bp, Homo sapiens
ttcagccgcgctgccgagaagctttacctcgctgaccctatgaaggcatccttctttaaaagagaaatccacgttagctctccttgaggtctcgagtt

SEQ ID NO: 58952 - DNA, 50 bp, Homo sapiens
cggaccctcgccagtgctctgcgcagatccctccctggtgccacagcagc

SEQ ID NO: 58953 - DNA, 75 bp, Homo sapiens
ccgcggctgagaccccgcagcctggaggagggctgtccggggctttggaacttcctccgttgccaaaataacaag

SEQ ID NO: 58954 - DNA, 101 bp, Homo sapiens
ttccgtagtccacaggcctgatggcggcggctgagccgatgggcccggcacaggtactccaaagattcaggtttactcacgtcatccagcagagaatggaa

SEQ ID NO: 58955 - DNA, 82 bp, Homo sapiens
ttccctgtcccatcgcaaacccaaagatccccgttcctggagattctgattgaggacccacccgaggacgggtcaccatggc

SEQ ID NO: 58956 - DNA, 101 bp, Homo sapiens
caccttctcaggttgcctttgaaataagaggaactcttttaccagacgaagttatacggaagcgtctcctcattgatggagatggtgctggagatgatcgg

SEQ ID NO: 58957 - DNA, 83 bp, Homo sapiens
agaagtgcccaccaagcctcccctgccaccggccaggacacagggcacaccagaaggaagaggcccagcagaagggactcgct

SEQ ID NO: 58958 - DNA, 83 bp, Homo sapiens
ggctcctgaacagttgcactgtaaaaaacccagctgaagaccactttagaaactcaattaagaggaagaacgtgcaaaacgtg

SEQ ID NO: 58959 - DNA, 83 bp, Homo sapiens
gtaatacagaactgccccatcgatgtgcggcgtccgctgtataagggggaaatttgcagtggtgagaaaatgtataaagaaag

SEQ ID NO: 58960 - DNA, 82 bp, Homo sapiens
tgggattgttgcggtgcgctggagccggccgccatggcatcagatgaaggcaaactttttgttggagggctgagttttgaca

SEQ ID NO: 58961 - DNA, 71 bp, Homo sapiens
ggttggaaggacatgttcaataccagtatgatgtctgtgccatttgcctggatgaatatgaggatggggac

SEQ ID NO: 58962 - DNA, 99 bp, Homo sapiens
ccggttcttggtgcccctgggcatcaccaacatagccatcgacttcggggagcaggcggctgagccagaggccaactgcagaggaactggaacagagga

SEQ ID NO: 58963 - DNA, 71 bp, Homo sapiens
aaacatctcaccaatttcaaatccggagagagaagctcttcagaaacagctggatgaagcaaatcgagaag

SEQ ID NO: 58964 - DNA, 100 bp, Homo sapiens
ccacagagctgggaaaattgttgtgaacctcacaggcaggctaaacaagtacgggctctggagcagtttgccactgtggtggaggccaagctgataaaac

SEQ ID NO: 58965 - DNA, 50 bp, Homo sapiens
aacagcagcctcttcgaaatcagggtctcactgtgtcatccagagctgga

SEQ ID NO: 58966 - DNA, 98 bp, Homo sapiens
cccgacagaacgaaaagaagccctccgaggtttacccaaggtccagcctagcccctaggcaccatgtcggacagtgatctaggtgaggacgaaggcct

SEQ ID NO: 58967 - DNA, 100 bp, Homo sapiens
atgtcaacactgctgagagaaatcaatgacgtgtttgaaggaagacgaggtggtcgtgtgatggtaacagatgctgacaggtcaatactatctccaggtg

SEQ ID NO: 58968 - DNA, 95 bp, Homo sapiens
cgagcatcggcagctccggaggccggggtaactggcagatgggaatttcttagccataggctcacatgacaactgcatctatatatatggcgtta

SEQ ID NO: 58969 - DNA, 50 bp, Homo sapiens
ggagtccggacatctgaaacttgatatatgagacatgcatatggcttagg

SEQ ID NO: 58970 - DNA, 100 bp, Homo sapiens
aatcatgtcaagcgaagccttgaaaaagctgccctgagacggtgtcccgccgaaagataagtaatggaacatcatctgtgatcgtctccagaaagaggcc

SEQ ID NO: 58971 - DNA, 100 bp, Homo sapiens
ctcacatctgtggtccagggcagggccactccagcggaagatggagaaccgtgattaccgggatgcacaggagtttgctgctgatgtacggcttatgttc

SEQ ID NO: 58972 - DNA, 100 bp, Homo sapiens
attgggtacttcaggaatccaggtgcacccaattcaaggcctgccgttggctatagcaaatgccccagtgaaactggaacgccaagctgaagaagaacga

SEQ ID NO: 58973 - DNA, 82 bp, Homo sapiens
aagctgctgactcttttcagagctggccacgaccaggactccatcaagaatgctggaggaagggtgtttgtccactgccagg

SEQ ID NO: 58974 - DNA, 83 bp, Homo sapiens
ctaggagtgctgagcccgcggaaccgcagccatggagacgcacaggatctacaagcagaagctggaggagctggctgcgctgc

SEQ ID NO: 58975 - DNA, 100 bp, Homo sapiens
tcctccctgcgacagaccttcagcttcctctcgggcatgaccggaaaggccaagctcctacagaagaagggaaaaaagagctgctgttcctaagtaacgc

SEQ ID NO: 58976 - DNA, 83 bp, Homo sapiens
ctcggctcctgtcgtccgttctctcaggctcccgttcagcattactctactgactggcagagacaggagaggtagatgtccac

SEQ ID NO: 58977 - DNA, 75 bp, Homo sapiens
agaggatcgacgcctatgtcgacgagcagactcaagtaggacgttttgctcctcaattttctggctaccagcaac

SEQ ID NO: 58978 - DNA, 97 bp, Homo sapiens
tctgcagtacaggatatgaagaaattgagggttcttgccatgataaacaacttgatgcagatgtttcccccaagcccactatttttcttccttcaat

SEQ ID NO: 58979 - DNA, 78 bp, Homo sapiens
ccgagaaccgtcagtttgagccagatggtatattgagatcttcagaagtagcaggagtgaaatcaaaggattttatga

SEQ ID NO: 58980 - DNA, 75 bp, Homo sapiens
caggagtaataggtgtagaattgggttcccatgtgaccaggtggccgggcttctacatcctgcagtggaaattcc

SEQ ID NO: 58981 - DNA, 100 bp, Homo sapiens
tctgtgtcaaacatccatatcataagtggaattttggagatattcaaaggttttgaacgaagaatgtgatcagaactggtacaaggcagagcttaatgga

SEQ ID NO: 58982 - DNA, 80 bp, Homo sapiens
tttgctcagcgactgtttgatgacgtcccgcaggtgtaccttccggtttcccagcacggccatcaagatccagttcacgt

SEQ ID NO: 58983 - DNA, 75 bp, Homo sapiens
ccaaaggagcagttgctagtggccatttacaggaatcagccacttcagttcaggacggccttagcaagatttcgc

SEQ ID NO: 58984 - DNA, 75 bp, Homo sapiens
ctcggagggaccctggcccggaggaagaaagccaaggagggtggtgctggctagagtgtatacgtttggacccaa

SEQ ID NO: 58985 - DNA, 50 bp, Homo sapiens
catgcaattcgcttattaaaggcaagatcacctgttgcctgaagcagaag

SEQ ID NO: 58986 - DNA, 82 bp, Homo sapiens
caacttttgtaattcggtcagagtcatgatgacagcacagctaggtcttcccagagtttgctgctgcccattcaaatttagc

SEQ ID NO: 58987 - DNA, 88 bp, Homo sapiens
tccactttcgccagcccgtgccgcgagcgcggcctgcaggagggaacggcaggagcagctgatgggatatcggaagagagggccgaag

SEQ ID NO: 58988 - DNA, 75 bp, Homo sapiens
atgacatccaggctctgggcacacagggaggagatatcaccaaacatgatggaacaggcggacagtccatttatg

SEQ ID NO: 58989 - DNA, 74 bp, Homo sapiens
gtgggaatcctcatcttcctgctgctggccgtgctgctctggaaggggagaaagggatgaggatgttggataag

SEQ ID NO: 58990 - DNA, 90 bp, Homo sapiens
gttttcttcagaagaaggacttcggaatgcactacaacaggaaaatcatattatagatggagtaaagggtcaacatatttcactggcacc

SEQ ID NO: 58991 - DNA, 90 bp, Homo sapiens
gaagatgatgtagacactggactattagccaagaaggatcaagaaggtggagaagaaaagaaatctgtgcaaaagaaaaaagtaaaagag

SEQ ID NO: 58992 - DNA, 75 bp, Homo sapiens
gatggaacccgaaagctactgaacttcatgcttgacaatctcgcagcttcttctcagcctgttgataaccatgtt

SEQ ID NO: 58993 - DNA, 74 bp, Homo sapiens
ctatcatcttcattgatgagttggatgccatcggcaccaagcgtggacgtgatgctgaatccaggcagtgccac

SEQ ID NO: 58994 - DNA, 75 bp, Homo sapiens
gatcttgtacttggattcagcaaggaaccttccggttatcaccaatctagtgaaaatgttgaagtccagagacac

SEQ ID NO: 58995 - DNA, 101 bp, Homo sapiens
tacaaggcgcccacggcctccagcttcaccacccgcacggcgcagtgccggaacactgtggcggccatcgaggagataactgtgtccagaggacccccagg

SEQ ID NO: 58996 - DNA, 100 bp, Homo sapiens
ttactgctgatagcaccatcttcaaatttgtggaagcttatgttattcaaggacacggaaaagccaacaccatggtagcattaatgaaagtttaccaaga

SEQ ID NO: 58997 - DNA, 95 bp, Homo sapiens
ttgctctgtcaggattagatgtgtatgcacataatgtagaaacagtcccggaattacagagacaccatgccacaaggagagtgatctcttcccct

SEQ ID NO: 58998 - DNA, 100 bp, Homo sapiens
cgacaagccgctggcagccgcggatctcaccgccgctcagggaaagctccaaccatggccatggggctcttccgcgtgtgtctggtggtggtgacggcca

SEQ ID NO: 58999 - DNA, 101 bp, Homo sapiens
cgccgccgggcccggccacagcctgcagcggagcccacgagaggcagcgccatggcggagcagacctactcgtggttgcagtattttacagagctagccca

SEQ ID NO: 59000 - DNA, 82 bp, Homo sapiens
gaagccatcgccaagcaattacagcttgatgaagatgcggaggtaaaaatgcatttgcaaagggagaaaatgaaggccaaac

SEQ ID NO: 59001 - DNA, 100 bp, Homo sapiens
ttgaactactgccggagcttctgccaggttgaagccatccttgtcaatatatttggtggtatcgtcaactgtgccatcattgccaatgggatcaccaaag

SEQ ID NO: 59002 - DNA, 83 bp, Homo sapiens
aagggattcaggtgtggtgccggtgggaactgaggaagcgcccaaggatatcccagaagctcctgagagactgatgacagaca

SEQ ID NO: 59003 - DNA, 75 bp, Homo sapiens
gcagacgccctgagaacgggaggtcaagagttggagcagacggtcagttctggaagcgccgcggagccatcaaca

SEQ ID NO: 59004 - DNA, 100 bp, Homo sapiens
gcggacggcggggtccgggccggagtacgtcgttcccgctgcgctaggggaagcgggcaggacgtagacaagtttggcaacgagatcacccagctggccc

SEQ ID NO: 59005 - DNA, 100 bp, Homo sapiens
acccggtactgtgcactattctttcccaggaaccattggataaggataaagttaatcagctgtgttcagcgaatacttatgaacagaaggctccagcagc

SEQ ID NO: 59006 - DNA, 75 bp, Homo sapiens
gaaataaatcctgattcagctcagccttacaagtggcgggggaaagcacacagagccgtggagcgagagatgccg

SEQ ID NO: 59007 - DNA, 75 bp, Homo sapiens
gttggaatggacttcggaccctggcctcttgggatgcaaagccctccagaatacccatcatatagcccctgaggt

SEQ ID NO: 59008 - DNA, 90 bp, Homo sapiens
gacctatggcgtggtggcccagtactaccggcccctgcataaaatggtgtgaatggaacattaacttcaaatgtagcagactctccccgg

SEQ ID NO: 59009 - DNA, 83 bp, Homo sapiens
ctggcacggtgttcactaccctaataagacctcagcttccctcgggagggcttcttctcagcctgttgataaccatgttagcc

SEQ ID NO: 59010 - DNA, 74 bp, Homo sapiens
atgtctccaacatggaccgcctgggggactcggaactgtccctagctgttggtagtaagtccggttataaattt

SEQ ID NO: 59011 - DNA, 75 bp, Homo sapiens
tggccacctccccaggtgatgcctgaagctcaagggactgtgtccaccctcagggtttccaaggcaagaccggcc

SEQ ID NO: 59012 - DNA, 100 bp, Homo sapiens
gggggacctgccggcacgcgactccccccgggcccaaagtgctggagaatctggtaaaagcaccattgtgaagcagatgaggatcctgcatgttaatggg

SEQ ID NO: 59013 - DNA, 97 bp, Homo sapiens
gaagcttggaagccatgatgtctgccgcaatgggagccgacttccatttctcttcatggcctcacctactgctattccatcgacctctcagagcgag

SEQ ID NO: 59014 - DNA, 50 bp, Homo sapiens
cagacatctgccaaggagccctggatctccttacaacatgcattatacct

SEQ ID NO: 59015 - DNA, 82 bp, Homo sapiens
gaagccattctggccttggatatccaggatccaggggtccccaggctaaagaacatggttctggaggacacgtgccggcggc

SEQ ID NO: 59016 - DNA, 100 bp, Homo sapiens
aaccatgatctcttccaaagaatgccacagaatcaggggaggcatgcttcagactgctcactagaagctcagcccaaatatgttagaggtgggaagcgtt

SEQ ID NO: 59017 - DNA, 100 bp, Homo sapiens
cttggtggactccacctctgaaaaatcacaggatgttgacaatgcgtctctggcacgtcttgaccttgaacgcaaagtggaatctttgcaagaagagatt

SEQ ID NO: 59018 - DNA, 100 bp, Homo sapiens
tgatcttggttcaccatggctacaaatatggaggggctggttcagcacagagtggggacccagcaggtggctgagcaaggagatggccaccaaggagaag

SEQ ID NO: 59019 - DNA, 100 bp, Homo sapiens
tgcccggccaagaggcaaaggggaggttacgcagcaaaccatccagaaggcatctgcatctgggaccgacctcctgggctggctgatcaaagaggaagca

SEQ ID NO: 59020 - DNA, 90 bp, Homo sapiens
cttgtgggcagaaggccgcgtccattccaggaagaggatcttctccggaaatggaactctaatgatccaggacaaagaagttaccctgga

SEQ ID NO: 59021 - DNA, 100 bp, Homo sapiens
ctttggaattccattcttttccttattcttctgatgtggatccagagcggttctggtgaggttggaaggatgcagccacccggttgtcatgaaaggcctg

SEQ ID NO: 59022 - DNA, 100 bp, Homo sapiens
caggagtgtctcggctcgcgggaggcagctgcaccaagaagagcgcctggacaccggaaaaggcgattccctgagcgcctggagttggagacaattcctg

SEQ ID NO: 59023 - DNA, 100 bp, Homo sapiens
gttgatacctataccaaccgtttaaggcaaaatggcaatacctgtgctttggaagtttctggagaagtatccttcagctgaggtagcaagaaccgcagac

SEQ ID NO: 59024 - DNA, 99 bp, Homo sapiens
gttgtaaacaagctcggagcgggagtagacagtggccggcagggcagccgggggacagctgtagtgaagcggagtttaagagagctgtgaaagtagcaa

SEQ ID NO: 59025 - DNA, 121 bp, Homo sapiens
ttttcagtacaatggctttttatttggattaatgctactctccattgcacgattatttcaggtttgcatcgccagcttctatatattacggcctttttttttgctggatattatcttgtaa

SEQ ID NO: 59026 - DNA, 75 bp, Homo sapiens
ttcaccttttggctttcttggcctgatgctgaactctcgaggcgatctagggcagccctgcagaggtacctgttc

SEQ ID NO: 59027 - DNA, 100 bp, Homo sapiens
cagaagtccttcctcagccgcctgtgccagggggaagagctgcagtcggaccggggcaaattcattcgcatcaactttgatgtcaatggctacattgttg

SEQ ID NO: 59028 - DNA, 75 bp, Homo sapiens
gaaaatcatattatagatggagtaaaggtggtgaagcagtattttccaatttgaagattcatttgaaggtggctc

SEQ ID NO: 59029 - DNA, 80 bp, Homo sapiens
ctacagagcctggaagcagtgagctaggtgttcccgagcagcctgacctccagcctgagaaatgccagtggcctgacagc

SEQ ID NO: 59030 - DNA, 51 bp, Homo sapiens
ctctcagcaagaacgggaacaaaactctgtacgaggatgtcgtccaggaaa

SEQ ID NO: 59031 - DNA, 75 bp, Homo sapiens
ggtgtttgatggtccaccccagccagagaatctgcgtacgagagctctggagctcagcagtggcaaagatgagat

SEQ ID NO: 59032 - DNA, 95 bp, Homo sapiens
tcagagggcttttactcctacctgtgtaccgagccagaaaccagggtggttatgaccgctactcaggaggaaattacagagacaattatgacaac

SEQ ID NO: 59033 - DNA, 100 bp, Homo sapiens
ggatgccctgctggtgggtgttccagctggaagtaaccccttccgggagcctagatcctgtgctttactctgaagactcaaatcatgccaccctcaaagc

SEQ ID NO: 59034 - DNA, 50 bp, Homo sapiens
ccaaggtgtaccatgagaacatcaagacaagccccatgtgccactcccct

SEQ ID NO: 59035 - DNA, 100 bp, Homo sapiens
ggcgccaatggcgagatctgcgtcaacgtgctcaagagggactggacggctgagctgggcatccgacacgtactgctgaatcatttgctgtttcaaatag

SEQ ID NO: 59036 - DNA, 95 bp, Homo sapiens
ggcagcccgtggagtcggctgagggaaaagcgaggcaaggcaggcgggcctatatgaacccaatagcaatggcgagatcaaggggtccaatccag

SEQ ID NO: 59037 - DNA, 82 bp, Homo sapiens
ccgcaaactgacacctcagggacaaagagatctggacagaatcgccggacagtgcacagccagagaacaacacatcacacac

SEQ ID NO: 59038 - DNA, 100 bp, Homo sapiens
gagtggcttcccttgtcagctgggatcgcttcacgtctcttcagcaagctcaggtcagtgactggtgggaggaatttgtgtacctgcgctcccgaaatcc

SEQ ID NO: 59039 - DNA, 100 bp, Homo sapiens
gagaccaaagttatcaaggaaatggtatagctgcggtctcctgtttgataaaagaatattggccagtattgcagattttaactgatttggctgatcctcc

SEQ ID NO: 59040 - DNA, 74 bp, Homo sapiens
cgcggaggccgcgacggacgcaagatggcgacggcgaccatagctctcgccaggtcagagcagcccaccatggg

SEQ ID NO: 59041 - DNA, 100 bp, Homo sapiens
ggggagccggaggaggatgctcctgcctcccagagaggggagccggcgaggatcaaaatcttcgaaggaggagcacttaaagaacctaaggaactgaatt

SEQ ID NO: 59042 - DNA, 50 bp, Homo sapiens
tttgcctggacaggaggaaccctatgctgttcaccagcccaggcttgaat

SEQ ID NO: 59043 - DNA, 75 bp, Homo sapiens
ccgcgtttcagccctagggaaggccaatatacccagtagaagaattagaagaagaaagcgttgcagaagatgatg

SEQ ID NO: 59044 - DNA, 100 bp, Homo sapiens
cctctgggagcagaagggaggctccaagacctcatcaacaattaaggtgactgggtacctggatatgtgatcgagtattcttctgggtgtttctatgagg

SEQ ID NO: 59045 - DNA, 75 bp, Homo sapiens
tgccctttttgcaccccagggagctgctgctgagcctgtgtggtgcccctatctccttgttccaagggcctctct

SEQ ID NO: 59046 - DNA, 82 bp, Homo sapiens
ggtgttgcagtctgtgtccttggaggtgaccagggccactgcaggcatggtgctaggtcgagcctcttaggcagagtttaac

SEQ ID NO: 59047 - DNA, 100 bp, Homo sapiens
ctggttcatcccatcagcctggattggtgaaactgaatcacaggagatatttccagcctcccaactgatatccaggctgaatctatcccattgatcttag

SEQ ID NO: 59048 - DNA, 50 bp, Homo sapiens
gccgccgccgccgcggccccgccagagaccccagaatccaacaatagcgt

SEQ ID NO: 59049 - DNA, 100 bp, Homo sapiens
tattttgacatcagttatattccatctactgtctttttcttcaatgggcagcatatgaaagtggattatgggcagcctgcttctgcaaagtggtacgatc

SEQ ID NO: 59050 - DNA, 100 bp, Homo sapiens
tcagcctccagctctactaaaggttcatcatgcctagtggcgtataagaagaccccgccaccggtccctccacgcaccacttcaaagccgttcatctcag

SEQ ID NO: 59051 - DNA, 101 bp, Homo sapiens
ctgtgccaggcccttcccgtagcgcccccagcagtcctgctcctcgccgtaccaaacagttacaggcccaaaaactgcgactggcatacacaaggagctct

SEQ ID NO: 59052 - DNA, 82 bp, Homo sapiens
gaaggaagatccggcgcggggcacaggatccggagctggagcccccagctggtcagtgagaaggtcggaggggccgagggga

SEQ ID NO: 59053 - DNA, 90 bp, Homo sapiens
gagggacacaggttcccacgctggcgcccggcgaccgggtggggctgcgctcctgcccctcctaaagctgaagccaaagcgaaggcttta

SEQ ID NO: 59054 - DNA, 75 bp, Homo sapiens
ggcgcttttcaccgcggccatcctgcaggcacagttgccgattacaggcacaagtgatccttatgtgaaatttaa

SEQ ID NO: 59055 - DNA, 75 bp, Homo sapiens
ctcaggaaaatcagaaatctctagaacaacttagtgatgtaatccttcagatagttttgaggcagctgtgccatc

SEQ ID NO: 59056 - DNA, 100 bp, Homo sapiens
gcctgttctcgggctgtttggcggcgcttcagcatggaagggatctcaaatgtcattcagaatggcctccgccacacctttggaaattcaggtggagaga

SEQ ID NO: 59057 - DNA, 100 bp, Homo sapiens
cgcgcagttaggcagcagcagccgcggagcagtagccgccgtgggagggagccatgaagcattacgagatttgataatgggctgcattaaaagtaaagaa

SEQ ID NO: 59058 - DNA, 75 bp, Homo sapiens
ctctaaagagacatcatcttacagattgggatcccagccttctcaccagtaatcagttcaagaagttccctcaga

SEQ ID NO: 59059 - DNA, 101 bp, Homo sapiens
gcgctcctggccccgcgcgggcggacggcggaggcgcctcccagattcatctgaaaactacattaagatgaagacctttgaaggtttctgtgctttgcatc

SEQ ID NO: 59060 - DNA, 71 bp, Homo sapiens
aaaatgcagccgagaactccgctcgttctgtgcgttctcctgtcccagtggatgattcaacagccacacaa

SEQ ID NO: 59061 - DNA, 75 bp, Homo sapiens
caaacttcttctatcacagcaaccaagtagtgaggatggcagctctggagtggtggtgaccgcggtggcttcaaa

SEQ ID NO: 59062 - DNA, 75 bp, Homo sapiens
gttgcacatccccacatcaatgcactgccaatgattgcaaatgcacaagattcgagacctatgtatacagagggc

SEQ ID NO: 59063 - DNA, 75 bp, Homo sapiens
tgcaggtgttgacgatgggcaatgatcgggtgctaccaaggttttgcttttgcatggaaatgtctactgcacagt

SEQ ID NO: 59064 - DNA, 83 bp, Homo sapiens
gagtgcttctaccagcccatgcccctgaaggcctcgctggagatcgagtaccaaacctaatctgggagcctgcaagtgacaac

SEQ ID NO: 59065 - DNA, 100 bp, Homo sapiens
attaagtactacccaacagcaaaggcaaaggaatgcctattcagaatggcagattcaggagagagtttgtgccagctggcattcctcgttcagtattgaa

SEQ ID NO: 59066 - DNA, 90 bp, Homo sapiens
gctaccatcaccgcactgagatcaacaagaagtatatacaagctgaaccacccaccaacaagtccctgtctagcctggttgtacagttgc

SEQ ID NO: 59067 - DNA, 101 bp, Homo sapiens
ccatggcccccagcatgggctcctctgtcaatgacgctttaaagagagataaagatgccatttatgggtggctgagcatcggagtggagttcgtggggaac

SEQ ID NO: 59068 - DNA, 113 bp, Homo sapiens
ttcaaagagccggatcgcaggctccctgcctactcccccaccggggatttcaggtggaaatgagttctcaacagtttcctcggttaggagccccttctaccgggctgagccag

SEQ ID NO: 59069 - DNA, 100 bp, Homo sapiens
tttatgtgcgaacatgtaacaagaatccaaagaaaacaaaatggtggtatcatgatattgatgatgttaagaagttcaaaccgggttacctggaagctac

SEQ ID NO: 59070 - DNA, 100 bp, Homo sapiens
cctgaaccaccgctgtgtatctgctgtccagcgctgtgatggggttgatgcctgtggcgatggctctgatgaagcagactactccaaaggattcggcggg

SEQ ID NO: 59071 - DNA, 85 bp, Homo sapiens
tggccaaatgtttgtccactgagctgatctcctctctggagcaccggggccaccaggagggagggattggttttcagagacattt

SEQ ID NO: 59072 - DNA, 99 bp, Homo sapiens
ataccagctcgacaaagatggggttgtcctctttaagaaggtggaacggcacatgtgtgatggggacattgttatcttcaaccggcagccaactctgca

SEQ ID NO: 59073 - DNA, 75 bp, Homo sapiens
cgagaagagaagaaggcccagaactctgaaatgagaatgaagagagctcagctgaagaaatcaggggagaaaccc

SEQ ID NO: 59074 - DNA, 75 bp, Homo sapiens
aacccgagcacaccaaggagcgcgtctcaggtcaattcagtgaagatatgatacccacagtgggcttcaacatga

SEQ ID NO: 59075 - DNA, 98 bp, Homo sapiens
ttttttataccattatggcgtacacaccaacgtacatcagctcggtacttcaagccaacctcagagatggtctcgctcttacacccaggctggagtgc

SEQ ID NO: 59076 - DNA, 100 bp, Homo sapiens
cgtctgggcagccacggccgggggcgtctttcagagcattacggtgccacttcggataaaccctttggactcctaactccaatcaggtgtctgctttgtt

SEQ ID NO: 59077 - DNA, 82 bp, Homo sapiens
ctttcttccagcttctgctgtccttctttgtggagagcaaggtattatccatgcagcagaagagaaggactggaaaactgcg

SEQ ID NO: 59078 - DNA, 105 bp, Homo sapiens
taaagttcttctcccagaatatggaggcaccaaagtagttctagatgacaagtaatctatgccagcaattatgacaatgttagcagaccatgcagctcgtcagct

SEQ ID NO: 59079 - DNA, 75 bp, Homo sapiens
gatccagcctgcggagcctgtggggcagtgtgaatatcagccactgttatttgctgtgagtcgaagaaaagtgaa

SEQ ID NO: 59080 - DNA, 109 bp, Homo sapiens
cgtgcactccgcacctcggggacattattgcgcgtggaacggctgcttttggaaggcgtccgagctgggccacagcctgaacgagaacgtcctcaagcctgcgcaggag

SEQ ID NO: 59081 - DNA, 98 bp, Homo sapiens
cggcggcggcggagtgtaggaagaggcactgctgagggggcgcgaggggaacggaggccagagctgcgcccaataggggcacaaaacgtccccgggat

SEQ ID NO: 59082 - DNA, 74 bp, Homo sapiens
aagaccttcgagaaatgcatcattgaagccgtgagctcagcctgccaggacctgatcccaaccttgaagaaagt

SEQ ID NO: 59083 - DNA, 103 bp, Homo sapiens
ccgtccttctccactttcgccagcccgtgccgcgagcgcggcctgcaggaggacagagcgggatgccaccagcttgtccaaagggaagttccaggagctcctg

SEQ ID NO: 59084 - DNA, 90 bp, Homo sapiens
cagcctcagaagttgctggaattacagtaacaaatgtggcaattattttggatctatcacctgtcatcataactggcttctgcttgtcat

SEQ ID NO: 59085 - DNA, 109 bp, Homo sapiens
gggactgattccaagacaaggcgcccaccccacagagcaagttttctgaaacgtgtttggtgcacctcgatttggaggaagtagggcagggcccttatctggaaagaag

SEQ ID NO: 59086 - DNA, 74 bp, Homo sapiens
aggactaagattcctgcattttgactctaaatggcagcctggcatcctcgctacaacctcattgttgtgggccg

SEQ ID NO: 59087 - DNA, 108 bp, Homo sapiens
cggcgagtttccgatttaaagctgagctgcgaggaaaatggcggcgggagggacctcaggatggaaaccagcagcctgcaccgcccgagaaggtcggctgggtccgga

SEQ ID NO: 59088 - DNA, 99 bp, Homo sapiens
ccacccgcatgctctttgtcactccccggcggcagcacgaaagtaccatctattcctgcaccaactgacctgaagttcactcaggtcacacccacaagc

SEQ ID NO: 59089 - DNA, 111 bp, Homo sapiens
ccagaccctggagcctcagttggaagcagccgatccagcctgcggagcctgtggggcagtgttctaagaacggaagcatctgggctggatggaatttagcatcaagcagag

SEQ ID NO: 59090 - DNA, 60 bp, Homo sapiens
cagagatcatcctcttcagaaacaaatcttttagctgaaaaagtagagcagctgatggaa

SEQ ID NO: 59091 - DNA, 100 bp, Homo sapiens
ggagagaagatgccgcagcccgagtcccagaaggcggcgatcctgggctgcgggcaaggcggccttgtgaaaaagggtaaagaacaaaacacacagcgaa

SEQ ID NO: 59092 - DNA, 74 bp, Homo sapiens
agaccagacctgcaagctctttgacacacagcagttcttgtcaggtcttgtccagaatgccgtgtgatatcaga

SEQ ID NO: 59093 - DNA, 100 bp, Homo sapiens
gcggcggcggagcgggagcgggtaccgggcgcgggcagagcgcggcggcgcgggcaaggagatgagacaccatctacaaataatggaagtgatgatgaga

SEQ ID NO: 59094 - DNA, 82 bp, Homo sapiens
cttacagccgctcgtcagactccagcagccaagatggtgaagcagatcgagagcaaggctttatcctgtggataaacgcaga

SEQ ID NO: 59095 - DNA, 100 bp, Homo sapiens
atataatccagacacttgtcctgaggttggattctttgatgtgttggggaatgacaggaggcacgtgtggttctcaaatataggcattctgatgggaact

SEQ ID NO: 59096 - DNA, 96 bp, Homo sapiens
ctcgggaagagatgcgaggatgacaaggtcaatgtgacggtggactacattagaccagccagcccagccacagagacagtgcctgccttttcagag

SEQ ID NO: 59097 - DNA, 51 bp, Homo sapiens
atcgtgtgtcggatgaggagaagctaatcttccagtaccaacaattgcagc

SEQ ID NO: 59098 - DNA, 83 bp, Homo sapiens
gaaggggcagtacaagcttacgtctctgctcttcagtacaatcctgtcagcccaaggccaaccccactgtcactctgttcccg

SEQ ID NO: 59099 - DNA, 100 bp, Homo sapiens
cgtgggcctgtggactgcagcctcggcggtcagcagcattccaaaatatgcccggtgctatccgcccagctgctcctagaccaccatttagtactatgag

SEQ ID NO: 59100 - DNA, 100 bp, Homo sapiens
ttgtggctggagacatgagcaagaaaagcctctgggagcagaagggaggctccaagacctcatcaacaattaaggatggggcctataccgtgcgccccag

SEQ ID NO: 59101 - DNA, 75 bp, Homo sapiens
gtgatcctgacagggatcagcgatacctgaccacctacaaccaagggttatcagtgagctgaatggaaaaaacat

SEQ ID NO: 59102 - DNA, 75 bp, Homo sapiens
actccctgaaatctggagtgaagaacgccgccatccagccaccattccaagtttaagtgctgtggggctgctaac

SEQ ID NO: 59103 - DNA, 100 bp, Homo sapiens
cataggagaagtgattcttgtgggtggcatgactaggatgcccaagtattgtccttgtgaacttccttgaagatggcagcatgtctgtgaccggaattat

SEQ ID NO: 59104 - DNA, 80 bp, Homo sapiens
ccgctgtgtggttgcaacggagataaattcccggaaccgcgattcggcgtgtcaggagacagaggcctgaagcaaagaca

SEQ ID NO: 59105 - DNA, 75 bp, Homo sapiens
cgcggactgaaggagactgaagatcatgcatgccccgcggtccagggacaggttcacagcgccgtccttcatcca

SEQ ID NO: 59106 - DNA, 74 bp, Homo sapiens
tttgccaccacactccagcctggactggtgaattttcagctcgtttccttttgaagctgcccgtagatttcagc

SEQ ID NO: 59107 - DNA, 90 bp, Homo sapiens
gtttttccctaatctgatgggtcattatgaccagagtattgccgcggtggaaatggagccaccaaccgctaaaatgcacgccatcatcga

SEQ ID NO: 59108 - DNA, 95 bp, Homo sapiens
atcgacatcgccagcatcgacatggtttccgaagtcaacatgctagagatgatcgctatggaaaatcctgcagacttgaagaagcagttgtatgt

SEQ ID NO: 59109 - DNA, 74 bp, Homo sapiens
tgatatgcaatgtcacttacaacattaatcagatactgcatttaagggagaaactctggaaaccttgacaatgg

SEQ ID NO: 59110 - DNA, 83 bp, Homo sapiens
cgtagataacagcttccgccaggcggtgatgaagaatccccccgaaaggaccccccagatgcctgaggaaacccagacccaag

SEQ ID NO: 59111 - DNA, 83 bp, Homo sapiens
gcgcagccaatcaggcgtcgttgctacctacctcctgccccccgaggtctgcagtctcctgaacccagcagccatctacgcca

SEQ ID NO: 59112 - DNA, 98 bp, Homo sapiens
cttgaatgttgaagatgtccttaccagctttgacaatacaggaaatgtttggggagacattggacaggacagctctgatgataatcacagcgggactc

SEQ ID NO: 59113 - DNA, 97 bp, Homo sapiens
tccccagctctgcagccacatactatccgtttgttcaggaaccaccagtgacagaggatcttgcctcggagctggtcccactacacggtgcctgccg

SEQ ID NO: 59114 - DNA, 100 bp, Homo sapiens
cttctacattcgacctcttcgagcccttggctgagcactgtgttggagcttccaggccgagcggcccgcgttaaacgtcgtcatcttccctctgctccac

SEQ ID NO: 59115 - DNA, 116 bp, Homo sapiens
ttcatgtgtctcttctaagctgaataaagctgttttggaactgtcaggtacctcaaagcaccagaatctgagggagagcagattcggccttgagaacgcctacaacaacttccggc

SEQ ID NO: 59116 - DNA, 100 bp, Homo sapiens
tcatgactgtgcgcatcgtcaagcatgccttcgagatcatacacctgctcacaggcgagggagaacgaggcaagccggggctcccaggagagaagggaga

SEQ ID NO: 59117 - DNA, 89 bp, Homo sapiens
catttcgtggttcacccgctgccgggcaccgaggaccagctcaatgacagacggaatcagtccccaatgcctggaaattcctcattgga

SEQ ID NO: 59118 - DNA, 50 bp, Homo sapiens
gttggactcacgggcggggcatgatggatcgtcacagctacctgtctctg

SEQ ID NO: 59119 - DNA, 75 bp, Homo sapiens
tctctcattgattaatgtcaatgggggaaaaaaatagtggctttgatgtcctctaccataatatgaaacatggac

SEQ ID NO: 59120 - DNA, 100 bp, Homo sapiens
cagaccctcgggcctcatcatggccaggaaggcccacgaaatctgctactccgtattatgtctcttctcgtacgtggctgcagttcatagcagtgaggaa

SEQ ID NO: 59121 - DNA, 83 bp, Homo sapiens
tggctgaccacccctaaaagcacctggccccgctacagcaaaccagggcagctgtgcggagggtagtggcagccatgaaccgg

SEQ ID NO: 59122 - DNA, 100 bp, Homo sapiens
ctggtgttccttgactggagacaacctgcagcctcctggcaccaaagccaagtatcttcaagaccttctcatggagagtgtgaatttttcccccgccaat

SEQ ID NO: 59123 - DNA, 100 bp, Homo sapiens
tttgctactggtggggccgggttctgcctcagcagaggccttgccctcaagatgagcccatgggccagttctgaaccagctggaggagttgctgagcgac

SEQ ID NO: 59124 - DNA, 90 bp, Homo sapiens
tcaaactctatttgccaaaggaaacttgccttatcaccttcttgcttgcagttcctgttcccgacatccggacgtgccacttctgcctcg

SEQ ID NO: 59125 - DNA, 82 bp, Homo sapiens
catgatgatcctgccatgcaggcaggccctgagcacgctgctgtgtgagcagcaggtcagcccaaggccaaccccactgtca

SEQ ID NO: 59126 - DNA, 98 bp, Homo sapiens
ccagacaccagccccccaccatgggatctgaaacttgcccacccttcgggatattgcaggacgctgcatcatgagcgacagtaaatgtgacagtcagt

SEQ ID NO: 59127 - DNA, 50 bp, Homo sapiens
cagctcatcccgcagcagctgctggaggaagagcaagcaggccctgaggg

SEQ ID NO: 59128 - DNA, 100 bp, Homo sapiens
ccggagaccctcccttgaaaccggcactgggacttctcgatctctggaggcacctgttgcaagtgacagaccctgactgcacctgccccatttgctgatg

SEQ ID NO: 59129 - DNA, 108 bp, Homo sapiens
gcgccagcggccgagcgggcggcttcctggcctgggcgctccggtggcggcggagatgccatggacaatattaccaggcagaaccaattctacgatacccaagtcatc

SEQ ID NO: 59130 - DNA, 82 bp, Homo sapiens
actttgtttttcctgggaactgcaggaatacggggtgctttgcattcaggaatacagaaaaaacagcaaagtggagtcaagt

SEQ ID NO: 59131 - DNA, 118 bp, Homo sapiens
atccttctcaaccttgtgggatgtgaaaactctgttactgaagccaaagggaaaggacagtcccaaaccagagtgaatattaatgctgccttggttgaggatataatcaacttggaag

SEQ ID NO: 59132 - DNA, 74 bp, Homo sapiens
tttgccagcaaactggtgctcaaggtgtatttcgggcgctggctgatcgagggaggccctctggtggtgctcct

SEQ ID NO: 59133 - DNA, 50 bp, Homo sapiens
gaagaagatggtggataagcccacccagagcctaaaaccattggccaacc

SEQ ID NO: 59134 - DNA, 100 bp, Homo sapiens
gcatctcatctgacgtgagttcaagtacagatcacacgcccactaaagcccagaagaatgtggctaccagcgaagatccaggatgagaagactgataaaa

SEQ ID NO: 59135 - DNA, 99 bp, Homo sapiens
gcggaagaagagtgtagttgagagctcggccccaggagccaataacctgcagacccagcgcgtgtcctcaacatgccccctgtgatttacgtgcccgtg

SEQ ID NO: 59136 - DNA, 100 bp, Homo sapiens
gcaatctcttcccgaacacgagcaccacaggcgcccgaaggccggaacaggagcttttctgtgtgtgtggggccctcaagcgagctcgactggtccatcc

SEQ ID NO: 59137 - DNA, 100 bp, Homo sapiens
agggaacctggagagggtccagccctcagtgccccggccagaggcgggaaggggctctagagcttcggaggcactggctacaattaggcttctcgacgtc

SEQ ID NO: 59138 - DNA, 82 bp, Homo sapiens
cgctgtgatgcctgcagagctgtggcttaccagactcttcactgcctgaggacattccggtttttactgctgcagcagctgc

SEQ ID NO: 59139 - DNA, 122 bp, Homo sapiens
gtcgcgcccgggaggaaggaacgaggcaaggagctaaagcagcgtgcgttcagccctgggggcgtgatggtgggcatgggtcagaaggattcctatgtgggcgacgaggcccagagcaagag

SEQ ID NO: 59140 - DNA, 100 bp, Homo sapiens
tcgttgggtgatcatttcattgagatcaacctgaatgaccaggtgtaaagtgcaagagtaatatgctatgactgaggccagggagctggagagcagagag

SEQ ID NO: 59141 - DNA, 100 bp, Homo sapiens
caagttagatgccgattacccacttcgagtcctttattgtggagtgtgggccaaactgaaattgcagaaggcttcagaacgatggcagcctgacactgag

SEQ ID NO: 59142 - DNA, 100 bp, Homo sapiens
caatgagagcctcacagacccagccatcgttaagccccggggcccagcgacctgacagttacaggactgaagtctttctccagcccctccctctgcagct

SEQ ID NO: 59143 - DNA, 100 bp, Homo sapiens
cgctgctgggtccgctgagcggggcgacccgaggagagtacctggccatacctgtttggagtgattgtggtccctgccgttgtccagctgctgagccttc

SEQ ID NO: 59144 - DNA, 90 bp, Homo sapiens
attacctgcacgacacatggaaattggactaaattaccagaatgcagggggcttttttccagacttcaagctcccattccaacagtaaga

SEQ ID NO: 59145 - DNA, 100 bp, Homo sapiens
tggtccgcggcatccgtaaccacaaggaggacgagatttcaatgggacagatgttacaagattttggaaaatttcttgggatgtttcttcttgttttgtt

SEQ ID NO: 59146 - DNA, 80 bp, Homo sapiens
atcagtgcccgctttgttcagctgcagcatggagagatagataaacggtggccaacagtgttgcaaacaggaacccgagg

SEQ ID NO: 59147 - DNA, 100 bp, Homo sapiens
agattgtgaagaagaatttcgatctccgccctggggtcattgtcagagagaaaaggaacagttccgtaagctctttattggtggcttaagctttgaaacc

SEQ ID NO: 59148 - DNA, 75 bp, Homo sapiens
cagcgtcccagggcccaggccgagcagttacagaatgtctgaaggggacagtgtgggagaatccgtccatgggaa

SEQ ID NO: 59149 - DNA, 100 bp, Homo sapiens
ccagctcctcagtcaacagctacagccaattttgctaactttgcacatttcaacagtcatgcagcagcaagcaactttgactgctgtcttggatacacag

SEQ ID NO: 59150 - DNA, 82 bp, Homo sapiens
cacagagcctgccttcaacccccaaagcagttaccggtattgtaagaacaagccgtacccaaagtctcgcttctgccgaggt

SEQ ID NO: 59151 - DNA, 89 bp, Homo sapiens
cggagacgcgcgtgtttctggaggtgcggggacagctgcagagcgcgcttctgatcctggggtatggcatgaattgccttattcagttt

SEQ ID NO: 59152 - DNA, 90 bp, Homo sapiens
cacactccgccgccaaactggaggagcgacggaagccagaccccaggaggtctctggggaacaagactcatggaggaaagcagcactaac

SEQ ID NO: 59153 - DNA, 75 bp, Homo sapiens
tcttcagcagggcagtgaccgagtacaccttgcagggaggagcaggacatcgagactttacatggctctgttcac

SEQ ID NO: 59154 - DNA, 82 bp, Homo sapiens
ccggtgctggcgagacctcacctgcatggacttccactatgaggaaacttcctcctggccaaccctgtgtctggcagcccca

SEQ ID NO: 59155 - DNA, 74 bp, Homo sapiens
ctggtggctctacccagaattcaattaaagtggctcaggataagaagccagccctcgggaaccaccacgacccg

SEQ ID NO: 59156 - DNA, 75 bp, Homo sapiens
tcctttgctgtggagtcagagtgcaccttccttgactacatcaaaggaggggccagtgcctctgccaagtccgag

SEQ ID NO: 59157 - DNA, 100 bp, Homo sapiens
caggaatttttccagctcaactacctccaacacctatcactcagtcggtgctatgatataatacctgaaactttactccgtgctggtatagaggactcta

SEQ ID NO: 59158 - DNA, 98 bp, Homo sapiens
ccagataataaagagtttgctgagaagaaatttaaggaggtggccgaggcatatgaagtgctgtctgacagctgttgagatcctgaagacagctcgtg

SEQ ID NO: 59159 - DNA, 82 bp, Homo sapiens
tctggctttaatgacaacagtgttaaatatcagcaaagaaaacatgaccctcacagaaaatccgcttgatggcattgaaacg

SEQ ID NO: 59160 - DNA, 100 bp, Homo sapiens
tcacagaagccgacaaggcgttcaagcgaaaacatgaccgctgagcccatgaggaattagcttaccgaaaggagatggtgagagctgacctaattaacaa

SEQ ID NO: 59161 - DNA, 50 bp, Homo sapiens
cctgggaagccaacgaccacacgcagttctgcggggagtgtctccagccc

SEQ ID NO: 59162 - DNA, 75 bp, Homo sapiens
tgaacttcataacactggagagttcaaacacactccaccaggtggcatcatacctctgcttgttgccaactcttc

SEQ ID NO: 59163 - DNA, 100 bp, Homo sapiens
atgataatcttgaaactaaagaacccccaaacccaaaccgaggagcgcttccgccctcagtggagctggagcgaagcttgcgggacgtcgtagagaaaac

SEQ ID NO: 59164 - DNA, 98 bp, Homo sapiens
ccagacatggcattctgcaggtggcagggcttgggcaccgatgataacaccctcatcagagtgatggtttctcgagcagaaattgacatgttggatat

SEQ ID NO: 59165 - DNA, 74 bp, Homo sapiens
ctgactccaagtactgctacggcccccaaggcaggttcaaggatggcccagtccctgcccatgaaccatcccac

SEQ ID NO: 59166 - DNA, 74 bp, Homo sapiens
cggaagtgtaacgttgaggcccttcttgtgtatctggagaaaatagagaacctaaaggagctggtgctggaggc

SEQ ID NO: 59167 - DNA, 73 bp, Homo sapiens
aatagctcaaggaaacctttccaacacagatgtccaagctgccaaattacctaggaacagtacgatttggggt

SEQ ID NO: 59168 - DNA, 112 bp, Homo sapiens
ccaaggcccaaaagcgtcaaactcaccaaaaacaacatctttccagaaagagtttcaccagtgatcattaaagaatgggcagcttacaaaggaaagtctcctcaaaccccgg

SEQ ID NO: 59169 - DNA, 100 bp, Homo sapiens
tcttcacctgcacagacccgggaacagtcggaagaatctgcagcggctctttgtgttggagttgggagtttcgctgatccagatgacctgccggggctgg

SEQ ID NO: 59170 - DNA, 84 bp, Homo sapiens
gagcgtgtcctgaaggagttccaccaggccgggaagcccatcgggctcccctggctccagccctaaggtgctctcccagccgtc

SEQ ID NO: 59171 - DNA, 96 bp, Homo sapiens
gctgataccagagtcttgctccggccgcggccagcggagccctgggctggggcaggagccggttgaaggggaccagctgcctccaggacacacagt

SEQ ID NO: 59172 - DNA, 75 bp, Homo sapiens
gaagaagctgcggccgcacctggccaagtgcctccggagccagcgtggtggccatagacaacaagatcgaacagg

SEQ ID NO: 59173 - DNA, 71 bp, Homo sapiens
aagccaacaccgtgccactgcactacagcctgggcgacaggatctcacattcttgaaggtggcattgaaga

SEQ ID NO: 59174 - DNA, 100 bp, Homo sapiens
aagacgtccaatctgagcgtgctgcggacggcgctgcggtacatccaggccatcagcatcagcaaagccatcaacacccaggaggcccccgtgaaggaga

SEQ ID NO: 59175 - DNA, 87 bp, Homo sapiens
aaggtgggcgttatcttccgactgatccagctggtggtcctggtctacgtcatcggactcagtggttctccatccttccggacttca

SEQ ID NO: 59176 - DNA, 95 bp, Homo sapiens
tttttgcctacccaaccctggaaagtttgcagaagtggaaggagcagaacgtgagggtgtaacttacaaaaagggattatcttgaacacataacc

SEQ ID NO: 59177 - DNA, 100 bp, Homo sapiens
ggcagaacttacgctgcgggaccccgggcactgttgctgctgcgggagtccaagctcaccttaaccccatgggtcggccttcggaagatcaatgtgtcct

SEQ ID NO: 59178 - DNA, 73 bp, Homo sapiens
caaaatgtgctacgtcactcggagtatggccttggccgaccctgagaacaggactatggcaaggagtctcagg

SEQ ID NO: 59179 - DNA, 74 bp, Homo sapiens
aatgtccctgaaaaattagaaggtacaggtttgcagattccgccagcagcacagcaagctctacagatgagtgg

SEQ ID NO: 59180 - DNA, 75 bp, Homo sapiens
tttacctcacccagagtctactaccagtgatgagaaggtgctggctgctgtctacaaggctctgagtgaccacca

SEQ ID NO: 59181 - DNA, 101 bp, Homo sapiens
ggagtacaacctgaacttctcaggaagcagtactattcaagaggctgtttatatcactggaaaagaagttttcagcttcaaaatggtttcttacatggatg

SEQ ID NO: 59182 - DNA, 100 bp, Homo sapiens
gtaaatctcccaagtccaaagggcatttccggagagttcttttgaagtcacttcagaaggatctacatgaggaaatgaactacatcactgcaataattga

SEQ ID NO: 59183 - DNA, 90 bp, Homo sapiens
gtttctcttcattgacagacagcacttgcagctgtgccctcctggctgaagaagccccaagacagccagctggaggagggcaaacccggc

SEQ ID NO: 59184 - DNA, 74 bp, Homo sapiens
gggaaatctccaagtcagaaagaatgtgtataaagatgacctgaattggttgaaaggcattggttgctacgttt

SEQ ID NO: 59185 - DNA, 83 bp, Homo sapiens
ctcggaccttggagcagggccccttcagggaaggccagaaacaccttatctccagaagaagaagagaaaaggagaatccgaag

SEQ ID NO: 59186 - DNA, 100 bp, Homo sapiens
gccaggccgggtgctgggcacggtcccgcgagatctttaatctcatgaagtacgacagctacagccgcttcttaaagtctgacttgtttttaaaacacaa

SEQ ID NO: 59187 - DNA, 85 bp, Homo sapiens
ctcctggaggcggcgggatggaggcggcggccggagcggtggtgccccccccgggcacggggccatgtacaacgggatcgggctg

SEQ ID NO: 59188 - DNA, 90 bp, Homo sapiens
ccggaggccatcgaggaagtgaagaagtctaagagtgtaaccagttccagtagcagtagcagtgacagttctgccagtgattcttcatca

SEQ ID NO: 59189 - DNA, 76 bp, Homo sapiens
gtttgtccccgcaggcactcacactcctgggagccggctccaggttgggcccatgagatgtgtgctctgtatattc

SEQ ID NO: 59190 - DNA, 74 bp, Homo sapiens
tgctttgctctgtggacccgtgagcaagcataagctgccaaaccaagaggaggctgcggaggaggaggaggaag

SEQ ID NO: 59191 - DNA, 75 bp, Homo sapiens
cggcacctgcacacctggatccaggataacggaggctggagctcttcagaaaccaggctgctttcaggaacattg

SEQ ID NO: 59192 - DNA, 100 bp, Homo sapiens
gcactgccttcttcatcaatttcatagccatttattaccatgcttcaagagccattccttttggaacaatgaatggcctgtccagaagacagccaaatac

SEQ ID NO: 59193 - DNA, 97 bp, Homo sapiens
ggaggcctggctgagctgtcatcccccagtgaattttgaagattgcaccggtcgacaaaggacagcctatttttccctcgacacccgattcaaagtg

SEQ ID NO: 59194 - DNA, 83 bp, Homo sapiens
gaaaagtccaagcatagcaacagtgtaaacaggaacatcgataagtagtgtaaaaacttgcacaatgaaatccgaagccaagg

SEQ ID NO: 59195 - DNA, 75 bp, Homo sapiens
tgacaacacttcccaggcctacagggatttcaacaagaccttctggaatcagctggactgtgctgctgccatctc

SEQ ID NO: 59196 - DNA, 82 bp, Homo sapiens
cggctggaaggaaccgctctcgcttcgtcctacacttgcgcaaatgtctccggtgaagtaacatctggaactctgaggattg

SEQ ID NO: 59197 - DNA, 100 bp, Homo sapiens
cagatggatccctctgtgcttctggaggcaaggtggtcataatgtcacaatctccttgcagtccaggactgggcatactcatatgccttctgtggttggc

SEQ ID NO: 59198 - DNA, 91 bp, Homo sapiens
gaaacaggcacacaagtgtgaggagttgctaaatgctcagtttgcctatctggggcgcctggctcacgaggttggctggaagtaccaggca

SEQ ID NO: 59199 - DNA, 100 bp, Homo sapiens
cctcctcaaggctgcctgcctggacatcctgtctattatcctcccagtccacaacgctgaaccgtggctggacgaatgtttgaggtctgttttgcaacag

SEQ ID NO: 59200 - DNA, 83 bp, Homo sapiens
tctgggacacagcggggcaggagcgcttccgcaccatcacctccaccatttgaagacatgctggagaacccactgaacagcac

SEQ ID NO: 59201 - DNA, 100 bp, Homo sapiens
ctgagggagcaagaggtgtcggaggtctcatctttgaactactgccggagcttctgccagcttcataaacaagcagatatgcaagaagagaaaaaccgaa

SEQ ID NO: 59202 - DNA, 82 bp, Homo sapiens
tctgcccacgtcgagcgtgcccgagacccgagctatcatggtgaacttacttcagattgtgcgggaccactgggttcatgtt

SEQ ID NO: 59203 - DNA, 99 bp, Homo sapiens
gaagtatgagttggggcgcccagctgccaacaccaaggccaacaacttcactttccacactcagtgccacgaagtgcagctctaagctggggatttctg

SEQ ID NO: 59204 - DNA, 75 bp, Homo sapiens
cggagagcggcctgcgggcgatcgggccgaggtcaaaatgcagatcttcgtgaaaacccttaccggcaagaccat

SEQ ID NO: 59205 - DNA, 100 bp, Homo sapiens
gcccccggcgtggggcgggacagcggccccctggagggggcagtcccgggagaacctgcggcggccggagcggtatatgactgatgggatgttacttcgt

SEQ ID NO: 59206 - DNA, 95 bp, Homo sapiens
aacccgaagaagaaaggattcgttacagccagagattgattttatcatgtgggcaacctgctgcaactggttctgcctggatggacagcctgagg

SEQ ID NO: 59207 - DNA, 100 bp, Homo sapiens
gcagcagctccagcaactccagcagctcctggcctccccgcagctgaccccgcttaaaactagagatcgatacatcagtagtctgaaaaagaaatgccag

SEQ ID NO: 59208 - DNA, 75 bp, Homo sapiens
gttatgctttaaggaattcatcatgaggttgtacgtggacactataaaggtcagcaaattggcaaagtagtccag

SEQ ID NO: 59209 - DNA, 100 bp, Homo sapiens
cccgcctctgcgtctttgctcccggagcgcttgaaggagctgcggctctaagcgaaagacatgaggcctcagcctgaaatgaggttgttttgaggtcatc

SEQ ID NO: 59210 - DNA, 95 bp, Homo sapiens
caattcaccttttagagcacagtgttgaacttctgaaggagatcctttcccggagttcagttatgggtgtgagaggtttgcaaggatttgtggga

SEQ ID NO: 59211 - DNA, 100 bp, Homo sapiens
ctctgtctcgctcagaggagatgcaccggctcacggaaaatgtctataagattgacgagatgcctgaggctgccgtgaaatcaacagccaacaaatacca

SEQ ID NO: 59212 - DNA, 80 bp, Homo sapiens
agcatgcccaagctcttcctgcacctggaaaagagtggagtttgtccatatgctcaatgctaccatgtgcgccactaccc

SEQ ID NO: 59213 - DNA, 74 bp, Homo sapiens
aaaagattttgctgtcaaagttgtgtcagtgaatacaaacaggtgtggcagagaagacacagcttctgaaattg

SEQ ID NO: 59214 - DNA, 100 bp, Homo sapiens
gctggccatcctgctgctgcagggcctggtagtgtggagcttcagcggcctggaggaggacgaggcgggcgaggagaccctcctgttcttaactgtgggc

SEQ ID NO: 59215 - DNA, 75 bp, Homo sapiens
caggatgaaaaccaagaaggagattttgaagatgcagatacccagcagaaaaatatggctcaggagactaaccag

SEQ ID NO: 59216 - DNA, 101 bp, Homo sapiens
gttctgcctgacttggaccctggaaaacctggccctcttcaatttctgacaaaaggtggggacccatcgtgaagatggcgtggccctgagaggcagccatt

SEQ ID NO: 59217 - DNA, 80 bp, Homo sapiens
gcgtgtgcgcgcccgccagctgctccggagatacgtttgaaggatgacctctaggaagaaagtgttgctgaaggttatca

SEQ ID NO: 59218 - DNA, 100 bp, Homo sapiens
ggctgaggaggggccccagcagcccccgaaggccctatcaggacatggagtatgaaagacgtttcaggtttagctgtgcctcccagtgactataatgaca

SEQ ID NO: 59219 - DNA, 75 bp, Homo sapiens
gaagatttaacgaatggggttgtgatggcccaggttcttcaaaagatgtgactattatatggttaaaaagatttt

SEQ ID NO: 59220 - DNA, 78 bp, Homo sapiens
aagagcctgtacaaccagcgcctgcgcctacagaacgagcaccgagatgccatggacaatattaccaggcagaaccaa

SEQ ID NO: 59221 - DNA, 75 bp, Homo sapiens
gccggatcgcaggctccctgcctactcccccaccggggatttcaggagcagtttgagttcgcgctgacagccgtg

SEQ ID NO: 59222 - DNA, 100 bp, Homo sapiens
cttctccattccctggtgcttcagcagggcagctgaggatgaaggagaacatatttgccagtcaccatcagaaaagctaagtttgctgtatagtgaggat

SEQ ID NO: 59223 - DNA, 82 bp, Homo sapiens
aacatttccatcaaaccctgagagctttattaccagacatgatctttcaggtgactctcctattccatctgtttcttcggga

SEQ ID NO: 59224 - DNA, 100 bp, Homo sapiens
gttcatagcatgcggtggtgaagatggattactgaaagttttgaaattagagacgcagacagcggacttgtctcaggtgtggccagaggcaaaccagcac

SEQ ID NO: 59225 - DNA, 101 bp, Homo sapiens
cgcgcaccgaggctcagggggtccggccgcgcgccgaggagtcgcttgtaggtgctggagaatctggtaaaagcaccattgtgaagcagatgaggatcctg

SEQ ID NO: 59226 - DNA, 90 bp, Homo sapiens
tggagccaggctaaggacattttctataagaactccttgttccgacatcccaaacagatgctgcagttggagaagaaacttgaacgtgaa

SEQ ID NO: 59227 - DNA, 82 bp, Homo sapiens
ggactttcttccagcttctgctgtccttctttgtggagagcaaggtttctctggaaacccccctggtaagtgtggaggaggc

SEQ ID NO: 59228 - DNA, 75 bp, Homo sapiens
ctggagctctacgcctcctacgtttacctgtccatgagtttgtccggatgatgtcccgctgaggccgcgagggcc

SEQ ID NO: 59229 - DNA, 83 bp, Homo sapiens
ctgcggctctcggtgccctctccttttcgtttccggaaacatggtttttagaacttcagccataaaaatgggcagaattttcc

SEQ ID NO: 59230 - DNA, 100 bp, Homo sapiens
gtgggattgagacattctcacctcctcctccgcctccaaagtcgcgatgagaccaagaataactgggaagtgtcagctctttctcgggctgcccagaaag

SEQ ID NO: 59231 - DNA, 100 bp, Homo sapiens
gccttgagctgtctcctaggcctccccttgcgggtgcagaagatccgagccggccggagcacgccaggcctgaggccctcctccagagttctgcaagtcg

SEQ ID NO: 59232 - DNA, 100 bp, Homo sapiens
gatatccttctcaaccttgtgggatgtgaaaactctgttactgaagatattgtactccaagatacttggattacgaagatttggagcgcaagtactggaa

SEQ ID NO: 59233 - DNA, 100 bp, Homo sapiens
tgctagtgaactttatgtatctgcaaagcctcctacagcccaaaagcaggcgcctgtgtctggcagagctggtgtgagacgagacaatcctgccccgccg

SEQ ID NO: 59234 - DNA, 74 bp, Homo sapiens
tagcagatatactattgtactatggacttcatcgctttatattcctgtgccttaagaacattagaaccttcctg

SEQ ID NO: 59235 - DNA, 90 bp, Homo sapiens
gccgtgagttcgccgctggtggctccggactctttttgatcagaacaatgctgcaaaaaaagaagagtcagaaactgccaacaaaaatga

SEQ ID NO: 59236 - DNA, 90 bp, Homo sapiens
gtagaaaaagcaagagtttgttatatagcatggaatttctgtggagccacacgacggagagcatgtgtgtcggatatatgtcagcccagg

SEQ ID NO: 59237 - DNA, 101 bp, Homo sapiens
ttttctttcttccttgcgcgtggcaagcttttttttttctttttcttttttcttaccagcctccccccaatgagaatgtgacagtgatgataacatgggtg

SEQ ID NO: 59238 - DNA, 51 bp, Homo sapiens
gtgcccgcggccacttttgccttcccggaaaatgatgcggtcatccgtttt

SEQ ID NO: 59239 - DNA, 100 bp, Homo sapiens
gtgccggcctagcgtcctggaattacttcaatcaaaatgtgcccatttacttttggctcacaatgctccagtcaaggtgaaaaatgctcagggatggagc

SEQ ID NO: 59240 - DNA, 100 bp, Homo sapiens
gggacagcggcagcacccccatgcccagggacggcctccggaacccagagactgcatcagagccactgtctgaggcagagctgacctgtccggtaatcaa

SEQ ID NO: 59241 - DNA, 75 bp, Homo sapiens
ctattactcgttgctgaacgtgcgcagggagagacggtgccgagacctcaaggccaagggaattttatttgtggg

SEQ ID NO: 59242 - DNA, 80 bp, Homo sapiens
ctcggaactcgggcatcatggcctcaggaaggatttgatgccctggatccctttattcccatcctggtttccaactataa

SEQ ID NO: 59243 - DNA, 50 bp, Homo sapiens
ctcataacagggatcatgaaagacagtgttaagtgggcagaccaacatcc

SEQ ID NO: 59244 - DNA, 96 bp, Homo sapiens
gcctgctgaagaagcagcacgaaagagagaggtccgtctaatgaagaacagatttgcctactggctgggaagaagcatatacttttgaaggtgcaa

SEQ ID NO: 59245 - DNA, 100 bp, Homo sapiens
gcggggcgtgaacgctctggggctcagccaggcctgcgcgggcccgaggccggaggaacccggactccggcgtagcgtgaagaggaagaaaagttccaaa

SEQ ID NO: 59246 - DNA, 83 bp, Homo sapiens
ggggtctgggtgttgaggggcgactggagccatggcggagtcggcgcctgctcggattgtcactgctgttccaagggcacacg

SEQ ID NO: 59247 - DNA, 100 bp, Homo sapiens
tgcggttctctctcgaccccttctgcccggcgcttcggcccgggccgctcaggtgcaggtccccttcccctgagcccatctacaatagcgaggggaagcg

SEQ ID NO: 59248 - DNA, 78 bp, Homo sapiens
cagtgtgggaagccaagcagatacaagcaaactaggcgtggcaactgctggctgcgtgaatgaagttacagagatgga

SEQ ID NO: 59249 - DNA, 98 bp, Homo sapiens
gggatgtgagcgctgagcccttggcaggggcccagatcattgatctgatgatgctggtcatcgatgtgaccaaggggatgcagacccagtcagcggaa

SEQ ID NO: 59250 - DNA, 50 bp, Homo sapiens
tgaaaacagagttcctacatgtgaagaggacaccgagtttccaggtgtgg

SEQ ID NO: 59251 - DNA, 100 bp, Homo sapiens
ctgccggcacgcgactccccccgggcccaaagaaagaccacagcaagattctttcattcgtctcctcctagcctgggggaccaggctcgaactgaccctg

SEQ ID NO: 59252 - DNA, 82 bp, Homo sapiens
gcgattgcgggggcctgggctagatggacttcagcagaaatctttatgatattggggaacaactggacagtgaagatctggc

SEQ ID NO: 59253 - DNA, 96 bp, Homo sapiens
gtacaaccgtgccatcgacagcatccaccagctggtctgcggtgccgctcagactccgaggatgagtgcagcacgcaggaggccgacggccagaag

SEQ ID NO: 59254 - DNA, 98 bp, Homo sapiens
gaaagtttgacgctgcgaactctgtgggagaagaactgccagggaatgaaagctactggttgattttaaagtgcctgggcctcacaggtttggagatg

SEQ ID NO: 59255 - DNA, 74 bp, Homo sapiens
tggaaagttccagccggttcgagagctagggagaccaaattttgaggaaggtggaccaacatcagtagggagaa

SEQ ID NO: 59256 - DNA, 100 bp, Homo sapiens
ttctaccttgtatgcctcaatttgctggatttaagcactgctgcactttatgagtggcagcatggaacctgcatttcatagaggagatcttctctttcta

SEQ ID NO: 59257 - DNA, 95 bp, Homo sapiens
cgtggttcacccgctgccgggcaccgaggaccagctcaatgacaggtttttcgttggaatatacgttgcacatttatggcgattctgagtgtgag

SEQ ID NO: 59258 - DNA, 100 bp, Homo sapiens
cgcgcctggctcaggtgtgggaccccatccttcctgtcttcgcagaggagtcctcgcgtggttctcccatgggcaggtggtctctctggatgagctgcgc

SEQ ID NO: 59259 - DNA, 100 bp, Homo sapiens
agtgcttttgccacattcaactctctatcaatatcagctcacatcattgaaaagataattttgaagacatgttttgctgaaaagacactaagaaaaattt

SEQ ID NO: 59260 - DNA, 82 bp, Homo sapiens
aggcaaggagctaaagcagcgtgcgttcagccctggggtcatcaagagagagggcacaggtacagagatgcccatgattggg

SEQ ID NO: 59261 - DNA, 98 bp, Homo sapiens
cgagcgccagctccgcgagtgcacacgctgggccgacgccgagtgcgagggtttctctagaggactttctaaagaaaattcagcgagtggattttgat

SEQ ID NO: 59262 - DNA, 100 bp, Homo sapiens
tgccgaaggaaaatgtcactgtcccattggccatattttagctaaaggttatagtgaattctctgaagaatatgataaatacattcgtgccaagtggaaa

SEQ ID NO: 59263 - DNA, 78 bp, Homo sapiens
tttgatggctcatcaaactgcaattttgcagctcaccttgtgaagatgaaatatccaagaatctgtattctagatggt

SEQ ID NO: 59264 - DNA, 51 bp, Homo sapiens
ggctccagtcaaaaaccattaaggcctacacaatccagggacagtatgcca

SEQ ID NO: 59265 - DNA, 75 bp, Homo sapiens
cagcggcacctacggcgacgtctacaagctgcagcaaaaaattattcctgatcaggaccaactgatggcaatagc

SEQ ID NO: 59266 - DNA, 100 bp, Homo sapiens
gcgcagacctggtggaggtgttaaatgaaaaccctggacgcatttgccgcaatggcctgcacggagatgctgacaagaaacaccctgaagcccagtcccc

SEQ ID NO: 59267 - DNA, 75 bp, Homo sapiens
agaaagtcctcattatgctgtgaaaatattagaatatgcttttaaggctattaaccagggtggccttacatcagt

SEQ ID NO: 59268 - DNA, 83 bp, Homo sapiens
gccctaccccccaagcagcggcagctgcacatggattaattgatgtatgttgagtttatggagctgccttttggtggcttgct

SEQ ID NO: 59269 - DNA, 75 bp, Homo sapiens
caaagtcatcagttgccaattgttacatacgaaactatctcagtggttcaatagcatccccagatgtcaaattaa

SEQ ID NO: 59270 - DNA, 75 bp, Homo sapiens
aggacgccccggaaaaacggtggatctgggctctggcgacggcaggatcgtgaagctgtacttcacaaaaacagt

SEQ ID NO: 59271 - DNA, 74 bp, Homo sapiens
gtccctcgcctcccggccgagctgacggaaacaagattttggtgaagcagtcgcccatgcttgtagcgtacgac

SEQ ID NO: 59272 - DNA, 51 bp, Homo sapiens
agatggtactgaactttttgatcagattgaagaaggtattgttgtaatgga

SEQ ID NO: 59273 - DNA, 100 bp, Homo sapiens
attttcacgtgctcttgctaaagaggtagcaagaaagaaaattagagtgaatgtagttgcaccagggaagctgcccgggagtgtcgcaggaagaagaaag

SEQ ID NO: 59274 - DNA, 100 bp, Homo sapiens
cagccggcggcggagcggccggtccacggaggagtatcgtcagtgaagcaggagcatcaatctacagtgtcagccctgaagctaacaaagagatgccagg

SEQ ID NO: 59275 - DNA, 82 bp, Homo sapiens
gcagccacttcaaaatcagacctctgtggcagcattttttccagaacacaaaagcttgccagcaaagcacggacagagaagg

SEQ ID NO: 59276 - DNA, 100 bp, Homo sapiens
ccaagacttggttaaagtcattgaggactttccagcaaaggctaatgtataccatgctagcacagcaaatggagagagcagagcaatcaaaatttataaa

SEQ ID NO: 59277 - DNA, 50 bp, Homo sapiens
ctaagaactgctgggaggatgacaattattcaccttaagcgatttcaatt

SEQ ID NO: 59278 - DNA, 101 bp, Homo sapiens
cccaggcccagaggcggctcaagcccccgcacccagcactgtgacccggagcacttccccttccctgccccagccaatgcccccctacagcgcatccgctc

SEQ ID NO: 59279 - DNA, 74 bp, Homo sapiens
aggaccagcagatggccagtcacgagaacccagacctcctgccccccgaggtctgcagtctcctgaacccagca

SEQ ID NO: 59280 - DNA, 83 bp, Homo sapiens
gaggaggctcatgcgggatttcaagcgtgggtaattccagaattgattggccataccattgtcactgtattactgctcatgtc

SEQ ID NO: 59281 - DNA, 100 bp, Homo sapiens
tgagcggcctccacctaaacgacttactagaactttaccttttgaccagttggtccagagggcagctgaagagaaacataaagaattctttgtttcagag

SEQ ID NO: 59282 - DNA, 74 bp, Homo sapiens
gggggaccttgaagacgacttcgaccctgcccagcacgaccagctcatgcaggactcagaattcatgattgaag

SEQ ID NO: 59283 - DNA, 101 bp, Homo sapiens
acagggctgtttggacatacctcctttaattgtcacagtaaccccatgacgtaattggttgtgcctggtcatacaggtttttcgttggaatatacgttgca

SEQ ID NO: 59284 - DNA, 99 bp, Homo sapiens
tgccgaaggcgcccaagcagcagctgccggagcccgagtggatcggggacggagagaacacgagcccatcaggcagttccggcgaggggggagcctcag

SEQ ID NO: 59285 - DNA, 100 bp, Homo sapiens
agtctggatgtcggtgggcctctgagatatgccgtttacgggtgtcatggagaaactccagctgggcccagagattctgcagcgggaaaatccaaggctt

SEQ ID NO: 59286 - DNA, 75 bp, Homo sapiens
gccatcatggagggttatccagcacctggaggatacctgctacctgccaagaagcttgagagaagaaaaatttca

SEQ ID NO: 59287 - DNA, 118 bp, Homo sapiens
gctaaacgtgggtttcttactaaggacgagctgatcaagtatatgactgaagaaggagtatgctgtgaactgccatgtgatcacctgggagaggattatcagccactttgatattttt

SEQ ID NO: 59288 - DNA, 90 bp, Homo sapiens
aataaggaaatgaattacctcccttgacggctctaattttacttgccacctagaccaagcaccccagacctttctaaggcaaggggttcc

SEQ ID NO: 59289 - DNA, 74 bp, Homo sapiens
gctcatgctcgcccggctttggggtcaagcagattgccattgagacccagagcagcagttctgaagagatagtg

SEQ ID NO: 59290 - DNA, 100 bp, Homo sapiens
gggaaaacacgctgtttgatattcatagatctccagcaagaagaagccatattagagtggtggacatgacaacagagtcaactgcatacagtggcatcaa

SEQ ID NO: 59291 - DNA, 83 bp, Homo sapiens
cgcgggtctgctctgtgtgccatggacggggagtaccctgacttctaccggaagctctacggcctcttggacccctctgtctt

SEQ ID NO: 59292 - DNA, 100 bp, Homo sapiens
aggcaaagagagctcgacttaacaagattactgatgtgatgctgatccttcagccttagccaactatgttgtagcactggtcaagaaggacaaacctgag

SEQ ID NO: 59293 - DNA, 100 bp, Homo sapiens
agttcgccgatgggaaacccggagaccaaatccttggttggtgttcgaggaagagacattgttgttcttggtgtggagaagaagtcagtggccaaactgc

SEQ ID NO: 59294 - DNA, 83 bp, Homo sapiens
gtcacctaaagttaggcggcactccagccccagctcggggcaacaccctccactaaagagtcaagccagccggacgcattctc

SEQ ID NO: 59295 - DNA, 75 bp, Homo sapiens
agctatgggtacggaggcaactcggcgacagcaggctacaccgccagccctctcctggtgctattcacaattaac

SEQ ID NO: 59296 - DNA, 83 bp, Homo sapiens
cagtgcacaggcttccatcaatgatgtgtaccgtaccaagggccagctggccaacttccaggagatgctggagaacatcttcc

SEQ ID NO: 59297 - DNA, 76 bp, Homo sapiens
ttataaattatgatctacctaccaatcgtgaaaactatattcacaggactggctttaattttgggataatcacacc

SEQ ID NO: 59298 - DNA, 100 bp, Homo sapiens
tgcccacccagatgccagtagtgcccgccccacccgcatgctctttgtcactccccggcggcagcacgaaagtaccatagtgttgcggagataggaacat

SEQ ID NO: 59299 - DNA, 100 bp, Homo sapiens
agcaggctgagcgatacgacgggatgatcatggtgattttactgctgcttgtggctatcgtggttgttgcagtctggccgaccaactgatggcagtaaag

SEQ ID NO: 59300 - DNA, 74 bp, Homo sapiens
gaatatgaagagacatgagatggtggatgaacccccagcttagaacagcgaaacttgactttggaaacagaaat

SEQ ID NO: 59301 - DNA, 102 bp, Homo sapiens
cagaaagtgtggatttgtgtggagcacacattgaatgggccaaggaaaaatcgagcagaaagaatgtctttcagtgcacagccagagaacaacacatcacac

SEQ ID NO: 59302 - DNA, 83 bp, Homo sapiens
attgcaagaaaatgagacacattctcagcaattctgtggtgttcttggtcacacatttatggagtttctgaagggcagtggag

SEQ ID NO: 59303 - DNA, 100 bp, Homo sapiens
ggcaggaccttgaccagccgagggccatcgccttggaccccgctcacgggcatgtcgggccccaggcctgtggtgctgagcgggccttcgggagctggga

SEQ ID NO: 59304 - DNA, 100 bp, Homo sapiens
atttgttctttcagcaattgttccagacaattccgccaggcacggtggctcacacctgtaatcccagcactttgggaggccgaggcgggcagatcacctg

SEQ ID NO: 59305 - DNA, 101 bp, Homo sapiens
ctggatgaaccagaaggaaaaaataatggaagtgttggaaaagtccagtactttaaatgtgcccccaagtatggtggacactatatagcctactgccgaaa

SEQ ID NO: 59306 - DNA, 75 bp, Homo sapiens
gcatcgcaaccaccgccctggccatctaccatgtgcccaaaatggagttaatcctgactgggagaagaaagtaat

SEQ ID NO: 59307 - DNA, 100 bp, Homo sapiens
aagcacattgtagaattgcaaataatcctggaaaagtacttggcagattattcaggacagggagttgaccaactgcaaagagtgattgacaccatcaaaa

SEQ ID NO: 59308 - DNA, 50 bp, Homo sapiens
gcccgcacggaccctctacttcagtcccccacggcccttcaggatgaaag

SEQ ID NO: 59309 - DNA, 100 bp, Homo sapiens
gtaatggcggcgaccgagccggagctgctcgacgaccaagaggcgaagagcatccctctctacctgccaacatcctgtattagagaacttgtggccggag

SEQ ID NO: 59310 - DNA, 75 bp, Homo sapiens
gggtgatacccagtgcagtgaactgcagggagactcatgcatctgtatgccgtgtgcgtggactgcctggaaggg

SEQ ID NO: 59311 - DNA, 100 bp, Homo sapiens
ctgcccgcgccatgtccgcgcacaatcggggcaccgagctcggatggagtgcaatggcatgatctcagctcaccgcaacctctgcctcccggattcaagt

SEQ ID NO: 59312 - DNA, 102 bp, Homo sapiens
gggcagcccccaccacccgcccaggccagccccagcagcaacagcagcacaggagatgacttacagtctcttctgtttcactttttggatgaatggctttat

SEQ ID NO: 59313 - DNA, 83 bp, Homo sapiens
ggcacaccctacgttaccgtgctcaagttggaatcgaagcctcttaaaatggcagatgacttggacttcgagacaggagatgc

SEQ ID NO: 59314 - DNA, 50 bp, Homo sapiens
aaggaactggtgctgcagcgagagaatcaagctatagaagtggtctggag

SEQ ID NO: 59315 - DNA, 102 bp, Homo sapiens
cgggctggagcggcggcgggcaggcgtgcggaggacactcctgcgaccagggtttccaggcctgaggtgcccgccctggccccaggagaatgaaccagccgc

SEQ ID NO: 59316 - DNA, 100 bp, Homo sapiens
cagtacctcattgctctttggcgactcttattgtgagtctgccaaaaaagaggtggttgctgaagtggtaaaagccccgcaggtagttgccgaagcagca

SEQ ID NO: 59317 - DNA, 98 bp, Homo sapiens
gggcttcccgagctgacgtggcttgaattgggaggggggcagctggagcctcaggcggcagcgcttctagggattatgatcaagaacagtttgctgat

SEQ ID NO: 59318 - DNA, 101 bp, Homo sapiens
ctttttattaatttgatcagtgatccttcacgttggaacctttcagctcttggggcattggtgagtctcagtaatgcacgtctcagttccatcaaaactcg

SEQ ID NO: 59319 - DNA, 100 bp, Homo sapiens
caatgaggcgggcagcactgcgaaagccaagacgaacttgaccattatatcaaccaccttctgcaaagcacatcgttgaggtcctatctgcctcctcttt

SEQ ID NO: 59320 - DNA, 100 bp, Homo sapiens
ctacagagggtaccgggatgcctgcaccattactgtgtcctctacaagcctggtgatgcccacacaccacttacttcgtgcgcaacaacaaggaccctgt

SEQ ID NO: 59321 - DNA, 100 bp, Homo sapiens
gcggcagggtgtcttttcctccctcaaccacattgtggagaaacgggtcttggcgttcactggttgaggacccagttcccatctttggatatagaggtcg

SEQ ID NO: 59322 - DNA, 80 bp, Homo sapiens
tccgatttaaagctgagctgcgaggaaaatggcggcgggagtacttggaccatgagactgtttcagccactttcatcgac

SEQ ID NO: 59323 - DNA, 83 bp, Homo sapiens
cacggacctggaaattctcgcctgtcttcccttcacccagagcaaattgagacgtcccgtttggtgccctggttgtcagatgt

SEQ ID NO: 59324 - DNA, 87 bp, Homo sapiens
aagatgaatcatacaatatttcagaggtcatgtcaaaagaggttttcccatcatatgattcccggtcctcctggtccccacacaact

SEQ ID NO: 59325 - DNA, 76 bp, Homo sapiens
gtcgaaggggaaggcgcctgaagaggacgaaggagtacatgcgcatgatggggctcagcagctggctgcactggag

SEQ ID NO: 59326 - DNA, 100 bp, Homo sapiens
agaggatgtcgtccttcgtgcggcaaatcgactttgccctggactgggtggaggtggaggccgggcgagcaatatacagagaccctcatggacacaaaat

SEQ ID NO: 59327 - DNA, 82 bp, Homo sapiens
tcgacgtcgtgatccagaagtccagagctgaggactgcctgtttgcaggaagtccaaagccaagcctaatggcaagaagccc

SEQ ID NO: 59328 - DNA, 100 bp, Homo sapiens
ggcagctccggagctgcccgcgccatgtccgcgcacaatcggggcaccgagctcgcatgactatatgaaggaagaggaaggttttcctgaagatgaggcg

SEQ ID NO: 59329 - DNA, 74 bp, Homo sapiens
ctggctgtggaagaagcataatatggtgaacggccgcctggcaggtctcctctgagcctccggcctccataaga

SEQ ID NO: 59330 - DNA, 124 bp, Homo sapiens
ctcaagctgctgcaccgcggcgccgacatcaattacgccaatgtggacggactcactgccctgcaccagctgcctactgaatcactcttctatcgtgctgttcttcaggatattattaaagatt

SEQ ID NO: 59331 - DNA, 99 bp, Homo sapiens
cggggtttcttcgttgcattgcctgagaggagcggagtctgccaggtggtgtccatcatgagccgcattcaccagtccacctatggcaagagcctagcc

SEQ ID NO: 59332 - DNA, 100 bp, Homo sapiens
ccctgcagggcccagaggagctgctggagaacctggcagagatggcgtccctggaggtccaggaatgaggtggaggaaggccctgtcttcgccatgtgca

SEQ ID NO: 59333 - DNA, 98 bp, Homo sapiens
acggaaaagagcaaatgcagcatttttgataggtgcctatgcagatcttcaagatgaagttcaaagggagaatactaatctgcaaaaactacaggccc

SEQ ID NO: 59334 - DNA, 100 bp, Homo sapiens
taaactttgtgacagagatatttcgtcagataaatactgcaacaactgtagctgacttaaagtcaataataaatgaatgctataactaccttgagttaat

SEQ ID NO: 59335 - DNA, 82 bp, Homo sapiens
cactgatctgcgtggggctcaaagacaaggggatgcggcacatggtgggtcccgattggcgccagctcttcgatgtggtcat

SEQ ID NO: 59336 - DNA, 99 bp, Homo sapiens
cccttctgctaatccagcaaagaccatgcagggcagtgaggccgggtgagagcaaaactttcagcaccacttgctggcatgggaaatgccaaggcagat

SEQ ID NO: 59337 - DNA, 75 bp, Homo sapiens
gtgcacctcagcactatcccaagactgctggcaacaggtgattgcatactcggaacatcgttaccgtatctttgg

SEQ ID NO: 59338 - DNA, 75 bp, Homo sapiens
ctggtggcctggcttgtgccaaggaggatggcaacagtctgtttgactccatggccagcgggatgcgcctggtcg

SEQ ID NO: 59339 - DNA, 75 bp, Homo sapiens
gaaacatcattcacccatactgactagtttcacatctctttgggcttcctcagccgccgcctcaagggctccatc

SEQ ID NO: 59340 - DNA, 89 bp, Homo sapiens
tgtctcttctaagctgaataaagctgttttggaactgtcaggtacctcaaagctctggtgctgctggtcatccttaacatgatgctctt

SEQ ID NO: 59341 - DNA, 100 bp, Homo sapiens
acgcgaagcaaccgctagagcaggacctggtctcccgagaggttttgatggtacagtccaggtctatgatgccacatcttgggatggaacacggagccaa

SEQ ID NO: 59342 - DNA, 100 bp, Homo sapiens
cggcaggaggacccaggaaagggacatctgctcctccaaggcagagcggctcccccctttcgatgcagacaacatatgttttacagagtcttcatttgag

SEQ ID NO: 59343 - DNA, 100 bp, Homo sapiens
ggaagatggcggctgggttcaagtgcccctgggcgctgggattgctctagcctgtaagtataatggaaaagatgaggtctgcctgactttatatggcgat

SEQ ID NO: 59344 - DNA, 95 bp, Homo sapiens
agaagaattttccaaatgaatttgcaaaacttactgtagggtgtgaaagctgttttggccgaaagttatgaaaaaatacacaaagatcatttgat

SEQ ID NO: 59345 - DNA, 83 bp, Homo sapiens
ggatgccctgcagtacctgcagaaggtctctggagacatcttcagcaggtggacatcgagcagctggatccccgcggccggac

SEQ ID NO: 59346 - DNA, 102 bp, Homo sapiens
aagaattccatcggacatggtgtttcttaggacttcagaaaaagcagctccggaccaaaatttaacagtgccatccgaggaaagattgggttgcctcatagc

SEQ ID NO: 59347 - DNA, 83 bp, Homo sapiens
gtccgcggccggggcgcgggaggagggcctcggcccgtacagcttcattgtcttcgccgtgatctgcctcctcaccaccatct

SEQ ID NO: 59348 - DNA, 100 bp, Homo sapiens
gttatatcctccaggaatactggccagcacaagctccgggtggataaggcagctgctgcagcagcggcactacaagccaaatcagatgagaaggcggcgg

SEQ ID NO: 59349 - DNA, 100 bp, Homo sapiens
gaaccagtcctgaaagctcaccagtctcactctgcagaagatgtggacaaggcagtgaaggccgcccgggccgccttccagctgggctcaccttggcgcc

SEQ ID NO: 59350 - DNA, 83 bp, Homo sapiens
gcccgggaggaaggaacgaggcaaggagctaaagcagcgtgcgttcagccctggggtcttccccagggaggtcctgaactaca

SEQ ID NO: 59351 - DNA, 101 bp, Homo sapiens
ggacgtgcggcagttgcaggcgagcaggcgaggaatcgccgtggcgtcttggtgttctccacgctggttcgcagcaaggcacgtactacacacagccgctg

SEQ ID NO: 59352 - DNA, 100 bp, Homo sapiens
ccgagaggaagggccccgagatgccacgactattcttggacttgggaccccctcaggggaacagcgagcagatcaaagctatgaccaccaaagattatcc

SEQ ID NO: 59353 - DNA, 50 bp, Homo sapiens
tgacgtacaacttgaggaagagggagggcctgaggctatggcaggaggag

SEQ ID NO: 59354 - DNA, 75 bp, Homo sapiens
ctaacccagaacactatattaaacatcccctacagaacaggtgcccgcctggctgggtgggtgagcggtgtcagc

SEQ ID NO: 59355 - DNA, 82 bp, Homo sapiens
gggggaggcgacgctaagttgctgatcgtggcgtttcactgttacatgccttgaagtgatgaggaggtttctgttactatat

SEQ ID NO: 59356 - DNA, 90 bp, Homo sapiens
gctgtatggaccttactggcaccaaccccggcagtatgagcagtttgagttcctgagatctagttggtgagagacatgatgttctaccgg

SEQ ID NO: 59357 - DNA, 83 bp, Homo sapiens
ctgcggcagaagccgagttcaacatcctcctggccaccgactcctacaaggtctcggcgcggaagatggccggcggcgtggac

SEQ ID NO: 59358 - DNA, 98 bp, Homo sapiens
gagaaactgaaggagatgtccacactagcaacagattcgggaactggagcctctcctctgtcacagtgacaatccatctcagctcatctggacatcat

SEQ ID NO: 59359 - DNA, 80 bp, Homo sapiens
agagaacccctccgtctatgtgcctggtatgtgaggagcagcgctgtgaggaggaagtcttccccctggccatgaactac

SEQ ID NO: 59360 - DNA, 50 bp, Homo sapiens
tgggcctcccggtccgcaagcaggtgaaagaacttgtcctggacaacagt

SEQ ID NO: 59361 - DNA, 75 bp, Homo sapiens
ctgtaaccacctcacagattccagcttcggaacaagagaccctggtacaatcattggtttgatgggatggcgctg

SEQ ID NO: 59362 - DNA, 100 bp, Homo sapiens
ttgcctgaaatttctgagtatgaggctattcatgctcttatggaaaatgctgtgcaacccttactcacttctgtgggagatgctatagaggccataatca

SEQ ID NO: 59363 - DNA, 113 bp, Homo sapiens
cttccaaagagatacagggcagaggaaaatgcaagaagactgatggagcaggcttgcaatattaaatagtattattgattccacagaatacagccaacctccaggtttcagtg

SEQ ID NO: 59364 - DNA, 100 bp, Homo sapiens
gcaagaaggccctggacacagcaatatctctgggctttcacaggctggattctagtgacatttataacgaattgaaagaaacatatcctaattatcttcc

SEQ ID NO: 59365 - DNA, 100 bp, Homo sapiens
tttctacagcagagaccttgagggatatctttcttcactcctcttcacttcttcagcgagaaccgaagtttggaggtagacgagcaggcgagcggtttgc

SEQ ID NO: 59366 - DNA, 75 bp, Homo sapiens
gcagagcaagcgcggggaaccaaggagacgctcctggcactgcagggaaccctgagcagaacacatgcacaaact

SEQ ID NO: 59367 - DNA, 74 bp, Homo sapiens
gcttcacagtgtgttgcagtgtaagatgcctgaggaagtgcaccatggagaggaggaggtggagacttttgcct

SEQ ID NO: 59368 - DNA, 100 bp, Homo sapiens
gtagtggaaggagtacagggaagtctataagctttgcaacagaattacagagtatgattcccatgagcgtgtaagcaagcgtctacatcagagattccag

SEQ ID NO: 59369 - DNA, 75 bp, Homo sapiens
tgcagctgcgcaagatccgagaccagtacctcgttactacgagatgtcctacggcttgaacatcgagatgcacaa

SEQ ID NO: 59370 - DNA, 82 bp, Homo sapiens
aaaagcagaaccttagcaaagaggagctgatagcggagctgcaggtactccaaagattcaggtttactcacgtcatccagca

SEQ ID NO: 59371 - DNA, 100 bp, Homo sapiens
ctgtcagtcagtacaaagccgtgaagtcagaggcgaacgccactcagcttttgcggcacttggagaaccactggttcacctacaatgagacaatgacagt

SEQ ID NO: 59372 - DNA, 76 bp, Homo sapiens
cttgaacttaatacagcaagaaagaccatcaagtttaccagctggaggctctcaggtcatttttaccaacccattg

SEQ ID NO: 59373 - DNA, 88 bp, Homo sapiens
gctgatgaagacaaggactcacagtggctgcaagctgtgcatgtctgataaactgtgggaacagatagtccagtcgacctgcgacacc

SEQ ID NO: 59374 - DNA, 98 bp, Homo sapiens
acaggcaggaggcatggccaagctacaggccaaatttgagcaccttaagagacttcaccaagaagagagaatgaagcttgaagaaaagagaagacttt

SEQ ID NO: 59375 - DNA, 100 bp, Homo sapiens
tggaataggtgtatcaagtaatggtgcaaagcctgaagacatgtctcaggaaggctatggaactagatctcaacctcctctggcccccggaaaacctaac

SEQ ID NO: 59376 - DNA, 51 bp, Homo sapiens
tgaacattttgcacacccaccctcagtttcgagaggcccgtgccatgagac

SEQ ID NO: 59377 - DNA, 74 bp, Homo sapiens
caaactgggagacagctgccatccactgactcgtaaagacccccgcagcaaacacaagtttaagatccacacgt

SEQ ID NO: 59378 - DNA, 98 bp, Homo sapiens
ccgaggcccctatggcagatttgaaaattcacccttgtagagtcattcctgcctttgagcggactcccttttaagctcccgaaaagcccgtgaaacaa

SEQ ID NO: 59379 - DNA, 102 bp, Homo sapiens
tctcaactggatctacaatgtctggaagcatcggtgtgtggctatttttaaagacaaacagaacaagcctactggttttgccctgggaagtatcgaggggag

SEQ ID NO: 59380 - DNA, 100 bp, Homo sapiens
gcgttggggactccggcgggggatgcgcgcccggcccctcagcgcccccagcacgccgccgagtcccgctcgccatgggaacttgtcaatctgctcctga

SEQ ID NO: 59381 - DNA, 75 bp, Homo sapiens
gcgccctagtggagaaggcctatgccaacccctatgtcaccacagtgggaggcacatccttccaggaacctttcc

SEQ ID NO: 59382 - DNA, 73 bp, Homo sapiens
cggagtgaccagaggagggacacgggaaatcagcaagttctgtaaaatctgtggtaacggtagctgttaaagg

SEQ ID NO: 59383 - DNA, 96 bp, Homo sapiens
gggcgctcgaaatgagctttttgctctcaggccagctcctattcaggttttgcagccactcttgatgatgacaaaccttggtactccatttttccc

SEQ ID NO: 59384 - DNA, 98 bp, Homo sapiens
cgcgagccccgcggctgagaccccgcagcctggaggagggctgtccggggctttgggtagctacagcaagctgggtagcaggcagatccaaaggatat

SEQ ID NO: 59385 - DNA, 75 bp, Homo sapiens
agtatgaaataaacgccactcctaaaggctggtcctgccactgggacagtgccggtggtggtgtgcacattgagc

SEQ ID NO: 59386 - DNA, 73 bp, Homo sapiens
ggctctgtagccaaggtggctgactactggctggacgtgctgtacagcaagctgtctgacagcaaagatgctt

SEQ ID NO: 59387 - DNA, 75 bp, Homo sapiens
gtaaaattggcaagacatatccttacaggcagagaggtggtgtgtgatgagaacggctctaagggttatgccttt

SEQ ID NO: 59388 - DNA, 87 bp, Homo sapiens
atttgatgctgtggttggatatttagaggacattatcatgggaactcgaatcatttatgacagaaagtttctgttggatcgtcgcaa

SEQ ID NO: 59389 - DNA, 100 bp, Homo sapiens
gagatgaagaaaattcgtcaagttatccgaaaatataattacgttgctatgatggcccactgcgtgaccttggttcagctgtccatttcctgtgaccatc

SEQ ID NO: 59390 - DNA, 100 bp, Homo sapiens
tggaacttcgttgcttgcttgcctgtgcgcgcgtgcgcggacatggcctcaaacggtgacttaagagattaaaattaatttggttgctgttggttctgaa

SEQ ID NO: 59391 - DNA, 100 bp, Homo sapiens
tgtctcttgattggacgtcaggatctttccaagcaggcctgcgaaggaaacttacccaaagggaagtctgatgtgtactctggcacacccaccaaggtga

SEQ ID NO: 59392 - DNA, 74 bp, Homo sapiens
ctggaggagccttctcaagaacagagctatcatggtgaacttacttcagattgtgcgggaccactgggttcatg

SEQ ID NO: 59393 - DNA, 88 bp, Homo sapiens
ttatcaacaccaaaaagctttctgctaggggactcatgcccgttgcacagcagccggtttattgtgcttcaaagcatggcatagttgg

SEQ ID NO: 59394 - DNA, 101 bp, Homo sapiens
aggaggtggaggaggaggaggaggaggcttgggcttgcgccgttgaagcgtttgctgccaattgatggggcaaatgatctcttttttcagccacctccact

SEQ ID NO: 59395 - DNA, 100 bp, Homo sapiens
tttgaagtatatgttgaagtggcctatcccaggacaggtggcactctttcagaaagttcaggagccctggaaaggagaaggaataagacggcaggaggaa

SEQ ID NO: 59396 - DNA, 91 bp, Homo sapiens
tccccaaggaaaccatggaggagcactgcaagcttgagcaccagcagatgccagtatggacagaatagcttatgatgcttatccccaccca

SEQ ID NO: 59397 - DNA, 82 bp, Homo sapiens
tcctggggtcggcgccgagtgggaggatggcggaacccagctcaacattggcaatgtgctccctgtgggcaccatgcctgag

SEQ ID NO: 59398 - DNA, 87 bp, Homo sapiens
aagcctcggaaggagcggcccacggcaaagacagtccagaagacatgcacagctggattaaggagattggcgcagctgtccaggccc

SEQ ID NO: 59399 - DNA, 100 bp, Homo sapiens
gcctggcctcactcaaacagtaaacgagtctgaagatgatgagaaactgaaaaagaggaaggagcgatttgggattgtcacaagttcagctggaactgga

SEQ ID NO: 59400 - DNA, 100 bp, Homo sapiens
ccatctggacaatatctcgcccatggcaagctggatccctgtggattactttggctccatctactctttgaagcttctgcccagcttgcattgtttctag

SEQ ID NO: 59401 - DNA, 80 bp, Homo sapiens
gagacctgcgtacattcggggtgccagaaggaaagcatagattgtctccagctttaagaccacgacatcgagagctgcct

SEQ ID NO: 59402 - DNA, 75 bp, Homo sapiens
cccacaggtgttgaagaagataaaggaacttcctgtagaaaagcccccaaaacaaaacaaaccttaattgactaa

SEQ ID NO: 59403 - DNA, 83 bp, Homo sapiens
cagaagtgtatttagcatctctaggtactccaaagattcaggtttactcacgtcatccagcagagaatggaaagtcaaatttc

SEQ ID NO: 59404 - DNA, 82 bp, Homo sapiens
tgaccgagaccgtgaccgagagcgtgaccgagagcgcgaatatcgtcatcgttagaaggaagcaagatttccagatgtagca

SEQ ID NO: 59405 - DNA, 100 bp, Homo sapiens
gcgccgatctatgcacgcagatgctggagaagtccccttatgaccaggtgccactgattaatgaacttgaatcagcaatacatcagctgtacaaacagcg

SEQ ID NO: 59406 - DNA, 83 bp, Homo sapiens
gttcagtgctaccttgagcaaagagatccgtccagtctgccgcaagttcatgcaagatcacgtaaccaaggctttgacgtggt

SEQ ID NO: 59407 - DNA, 100 bp, Homo sapiens
ggcggagcgcgagagcttcgagcggactcaggttgaaatcacaaagattagacacctttttagataggtgttcttcagcaccactgacaacacggttctg

SEQ ID NO: 59408 - DNA, 98 bp, Homo sapiens
tatgtaaagagcattgttcaagagtatgttaagtcatctgcttgggaaaataaggatgattatgcttacaatgcagtagcccaggatgtgttcaacca

SEQ ID NO: 59409 - DNA, 74 bp, Homo sapiens
ccttgccgctgctgtcctgcgaccccaagcagatgaaggatttgggggcagagcacttggcaggtcatgaaggg

SEQ ID NO: 59410 - DNA, 96 bp, Homo sapiens
aggaaggaatatatcctgactgattaaggcaacagactactgcaacagaaactatccttagatgggaaccccaaacctatacatggaacaacagag

SEQ ID NO: 59411 - DNA, 87 bp, Homo sapiens
aacctccagatccatcacgtggggcaggacggtcaggcacttccgttccggcgcccctccggtcatcaacccgctgggcaccagctt

SEQ ID NO: 59412 - DNA, 75 bp, Homo sapiens
caaaaatcccatctaccgcaactctcagttcgagagtaaagtactatactggcaattgctggagaagattttgca

SEQ ID NO: 59413 - DNA, 119 bp, Homo sapiens
tgggcactcctccccgccagtgctggcgtaaagacactgctcccagtaccaagttttgaagagctcttcagtatccccatcagccagtttccgaggtgctgagaagcacagaaactccg

SEQ ID NO: 59414 - DNA, 100 bp, Homo sapiens
cgcctatctgcgagaacagagaagggagctctatagtcggagtggagaactgcaagcttttcggatgatcccttatcccttggaaaaggggcacctattt

SEQ ID NO: 59415 - DNA, 100 bp, Homo sapiens
gtaaacatgtcggagtctggggagatgagtgaatttggctacatcatggaattgatagctaaaggcaaggtgctagactggatcgagaaccacggagaag

SEQ ID NO: 59416 - DNA, 100 bp, Homo sapiens
cgtcattgccgggaacgagcgagtcgccgctgcagccctagtgactgcggcctgcatcccgcagtctgagctatcagctgaagaaagtccagaaaaatta

SEQ ID NO: 59417 - DNA, 101 bp, Homo sapiens
tagaagtcgagccgtctgtatttttcacccgagtcagcaccctcccagcaaccagtttgagttcatgatcgagtccatcctgtatgcccgggatgcctggc

SEQ ID NO: 59418 - DNA, 100 bp, Homo sapiens
tgcacacagccacgatttgcaaagccttgttagatgacttggataaagaactaaacaactacattatgcgatgtagagaatggtatggctggcatttccc

SEQ ID NO: 59419 - DNA, 75 bp, Homo sapiens
gaggctgaccttgaacacttaaagattcgggaactggagcctctcctctgtcacagtgacaatccatctcagctc

SEQ ID NO: 59420 - DNA, 137 bp, Homo sapiens
ggagagccggagtcggggacccaggagtttcctgtgtccagcgctgccggagccgcctgagcatggcacattacacttctgtggatttaaagtccttgcccctcagatcagctttgctcctgaaattgcatccgaag

SEQ ID NO: 59421 - DNA, 75 bp, Homo sapiens
gctggatttaagcactgctgcactttatgaggtggcacaagaatggctcaactctccaaatagagagaatttcta

SEQ ID NO: 59422 - DNA, 75 bp, Homo sapiens
cgagcctgctcctgccgccgagaacaagttgaaatcatcgcagaaggataaagttcgtcagtttatgatcttcac

SEQ ID NO: 59423 - DNA, 82 bp, Homo sapiens
gaggttggctcgatgctgttcccagtacctggagtagaacagaaaaattattatgtctgtgttcccttgggactcattggaa

SEQ ID NO: 59424 - DNA, 51 bp, Homo sapiens
atgtggggggtaaaccactcggatgactgtcttaggtcattgacgagattt

SEQ ID NO: 59425 - DNA, 90 bp, Homo sapiens
aaactagctgctcggaacacttcagcacaagaacgctaccttttcttagctaatagctcgtcagcttgctaaaatccatgctattcatgc

SEQ ID NO: 59426 - DNA, 97 bp, Homo sapiens
gcagccccctatccctccccctaaaccagctcacagaaatagcaaccctgtcattggatcccgttgaagataccacattacacttaggctcctgttg

SEQ ID NO: 59427 - DNA, 100 bp, Homo sapiens
tctgctcaagaggaacggcacatgacccaggcctatgccaatcagcatttcacattcctcatggttggttcaaagccggatcgagctgggagatgtgaca

SEQ ID NO: 59428 - DNA, 75 bp, Homo sapiens
gaaaaatcctggatctgtatgctttgagcaaggatgtgtttcacatggtagttgaagtaccacgctggtctaatg

SEQ ID NO: 59429 - DNA, 90 bp, Homo sapiens
gcagcagctgcccgtcctcctgcagacgcttctcggaaacgaccatttcgccagggtgaactcaaggttagtcataagcattttgaagaa

SEQ ID NO: 59430 - DNA, 76 bp, Homo sapiens
tttcagaagatactagattctggaaagctccctgtgctgtcaggaatctacaggacttggctcgtatttacattcg

SEQ ID NO: 59431 - DNA, 100 bp, Homo sapiens
cgctgttggagttggatttggggctatagaaaagacggcatctgctacctttgagagtgccagtgtgaagcctcagtttaggtcatctggtggttcagaa

SEQ ID NO: 59432 - DNA, 150 bp, Homo sapiens
cgcgcagtgctcttggccgggaggaggctgtgctgcaccagcacctcttgctccacatctccagagagcccaggtccagtggtttacgtcttggatcttgcagatagactgatctcaaaagcctgtccatttgctgcagcaggaataatg

SEQ ID NO: 59433 - DNA, 90 bp, Homo sapiens
cctttccagagagccagaaagaagttggcgtgcagtggtgtgatctcagctcattgcaacctctgcctcccggactcaagcaatcctccc

SEQ ID NO: 59434 - DNA, 75 bp, Homo sapiens
cacaacccgcagagacttctactggctgcgctcctttctggccggagagaatggtgacttcttggccctggatct

SEQ ID NO: 59435 - DNA, 75 bp, Homo sapiens
cagaatggtcagaagtatcagaggaagataagatttgtgaccaaatcagtgatgctgtccttgatgcccaccttc

SEQ ID NO: 59436 - DNA, 100 bp, Homo sapiens
tgtgccaacacaatacccgataacacaagtgcagcctccagctagcactggacaggtgaggaaaatagcagctgaatactatgacaacctccctcactac

SEQ ID NO: 59437 - DNA, 90 bp, Homo sapiens
agcgacagctgtcagaggggcaggagcttctgggagccaccgtctgaagcatgttttcccagcagtccccaccacactttgggcagcaag

SEQ ID NO: 59438 - DNA, 50 bp, Homo sapiens
catggcgtatttcgtcgagaatttttgggcaccgaccgtcacgagctaac

SEQ ID NO: 59439 - DNA, 50 bp, Homo sapiens
ctttattccagaacaatcacagaatgtatcctgtcaggtataatgtcagt

SEQ ID NO: 59440 - DNA, 80 bp, Homo sapiens
gcccgcccgaccccgtcccgaccctggccgccccgagcggagcctggagaggactacactgaaacattcaaatgtgtggc

SEQ ID NO: 59441 - DNA, 50 bp, Homo sapiens
agcaatatctctgggctttcacagaattttacagccctgatacctggaac

SEQ ID NO: 59442 - DNA, 83 bp, Homo sapiens
cggaagcctgcgtaactttctcccttgatccgggagtctttccactggataacgaaggaggcccaacttcattcaataaggag

SEQ ID NO: 59443 - DNA, 80 bp, Homo sapiens
gctttggcccccagcgcagtaaggcggtgagcctctccgtcactggttgctattgctggggccccagtcactctgtggat

SEQ ID NO: 59444 - DNA, 90 bp, Homo sapiens
gtccaccagtgtggcatgggcatgtaaggtgcgcggagggactgcaccttctccatcaggtgcagaagatataattgaccctgcaatcct

SEQ ID NO: 59445 - DNA, 97 bp, Homo sapiens
tggattataatactggagaggataaatcctcaaaaaatcttcttggttctgctacaaattcacagtctgagaatgaggcttcaccagtaaaacggcc

SEQ ID NO: 59446 - DNA, 100 bp, Homo sapiens
caacaccagtggaagatgatcacatcccagatattgcggtggtggagatgagcgatgccttccggcagccgtccttgttttaccaccttggggtgagaga

SEQ ID NO: 59447 - DNA, 73 bp, Homo sapiens
gatgctgatggtgatggagattttgatgtggatgatgccaaagttttattagctttgccagcgccgagtacca

SEQ ID NO: 59448 - DNA, 96 bp, Homo sapiens
tatgatagttcagatgacagtgattttaaagttggagatgcctcagggtgttctaaggatacattttattgaagctcaggatcttcaggggaaaga

SEQ ID NO: 59449 - DNA, 51 bp, Homo sapiens
caagggtttccgcaatgcccctgttgctgttttggagtcagcggaagatca

SEQ ID NO: 59450 - DNA, 74 bp, Homo sapiens
gaagattctgcaaccggggcacagccacctttataacaaccgctatgctggtgagaaggcaaccaaagtgcagg

SEQ ID NO: 59451 - DNA, 51 bp, Homo sapiens
caaaagaaacgggccccgactgaaaactttagaaactgttcctttggagag

SEQ ID NO: 59452 - DNA, 50 bp, Homo sapiens
taccagtggccttccttatccaagagaatgaaatggaaaggcattttctg

SEQ ID NO: 59453 - DNA, 90 bp, Homo sapiens
tatatgatggcatccgggacatcaggaaagcagtgctgatgataagggatcccgttgaagataccacattacacttaggctcctgttggc

SEQ ID NO: 59454 - DNA, 94 bp, Homo sapiens
caaggaatgagagctgcctgcctgctgctgcttggagagccccagacagtcgcttgaagaggtatgtggaactgaccaactactgtgattataa

SEQ ID NO: 59455 - DNA, 100 bp, Homo sapiens
tgcaggattttcagcttcagcaagcaggtgcagcggaactgctgcctgacgctctgcaacttcagcatccccgaggagctggaattccagtaccgccggg

SEQ ID NO: 59456 - DNA, 101 bp, Homo sapiens
gtgcttggtgtcgtttttccttgagctgaacgtcttgcaacagtggccgcacgcataggtcgtctgatctttgataacttgaagaaatccattgcttatac

SEQ ID NO: 59457 - DNA, 100 bp, Homo sapiens
tgcgacggctcaggccacgtcagcggcagcttcctcacacaccgcaggtactactgagcgagtgtgcttgatccagggaacggttgaagcactgaatgca

SEQ ID NO: 59458 - DNA, 77 bp, Homo sapiens
ccctcatcctggttctggaatcctcagttcaaggtacaatgactcttcttgcttttcacctaagttgaataagcacc

SEQ ID NO: 59459 - DNA, 100 bp, Homo sapiens
ccaccgcgtgcccttccaccgtgtggacaccatctccgtcaatggctctgtgcagctgtcctacatcagcttccaggtggagccagctggactggaggag

SEQ ID NO: 59460 - DNA, 78 bp, Homo sapiens
gggcacctccgagcgcaaggacagcgcgaggtccgcgcagcccagcgcagccataggagcaggagcggcttcgcttgg

SEQ ID NO: 59461 - DNA, 111 bp, Homo sapiens
tgatctcctgtttgttatgtttgccgtggtttttatcaccacacgactgggtatatttcctctctgtgagatggaagattttcgaggtatagcagaagaatcatttccaag

SEQ ID NO: 59462 - DNA, 100 bp, Homo sapiens
gttgaacctatcagcctggcgagggacatgaggcttctgcagtgatgagggtccttctccatctcccagccctcctggcttccctcatcttgcttcaggc

SEQ ID NO: 59463 - DNA, 132 bp, Homo sapiens
gggccagtgcggcatcacctcctccaagaccgtgctggtctttctcaacctcatcttctgggtggcacaagatctctgtaaagtagcaggcatagcaaaagttctggtggctcagcatgatgtgtacaaagg

SEQ ID NO: 59464 - DNA, 90 bp, Homo sapiens
ctccctgacatgcaagaacagggtccagcttccaattgtggacaagataaggaccattgcccaggctgtctatggagccaaagatatcga

SEQ ID NO: 59465 - DNA, 100 bp, Homo sapiens
gtggatttcagcctgcacggatggtcttgaaacacaaatggtttttgttccaggcatgaaccgatacttccagcctttctaccagcccaatgagtgtggc

SEQ ID NO: 59466 - DNA, 98 bp, Homo sapiens
tcatactgctaagaattcaaacttcagcagtcatagctcggtcatgagcaccgacagtaactcactggcacgtgaatttctgaccgatgtcaaccggc

SEQ ID NO: 59467 - DNA, 75 bp, Homo sapiens
cccgttcagctctccagtgggacagcgcatcggtgtcgtgaaaactacccctaaaagccaaaatgggaaaggaaa

SEQ ID NO: 59468 - DNA, 97 bp, Homo sapiens
gtgggccgacgcggaggcggcagcggcgggcctgaggcgaaggagcggccgggagcccgccgcgctggtagcggtcatcatcagatttgaaatattt

SEQ ID NO: 59469 - DNA, 73 bp, Homo sapiens
gcggaatcggggagcgtccggagctagctggatcctctaggcagatgcctgaggaaacccagacccaagacca

SEQ ID NO: 59470 - DNA, 100 bp, Homo sapiens
ggcggcggcgctcggcgatggtaggcgtccctggagcggccgccttccagcgttatcttatgatgaggcttttgctatggctaatgatcccttggaaggc

SEQ ID NO: 59471 - DNA, 100 bp, Homo sapiens
ggtggaccctatgatggctgatgccattgatttcatggtagacaggctcctgggcaacgtgctggtctgtgtgctggcccatcactttggcaaagaattc

SEQ ID NO: 59472 - DNA, 76 bp, Homo sapiens
cctgcgagggttgaagattgtgaagcaatagcctaagttctcagaataactgtagaatgtgctggaaatggaacat

SEQ ID NO: 59473 - DNA, 100 bp, Homo sapiens
tgcggctgctgctcctacggatattgcgcaagactggggcgttggaaaccctattggagcatatgatcaacaaatatgggaaaaatctgttgaacagaga

SEQ ID NO: 59474 - DNA, 51 bp, Homo sapiens
caagatcgagttcatcgggcagatcggcagtgtagccaatcaagtattcca

SEQ ID NO: 59475 - DNA, 100 bp, Homo sapiens
ctgagctaaaatggctgaggagagagtcgcgacggatctgccttctgaggaagtggatcaagagctgattgaagacagtcagtgggaagaaatactgaag

SEQ ID NO: 59476 - DNA, 100 bp, Homo sapiens
ctcgcttcctgctcgacctgcggcagtacttggaccgaagccaggacagcacagccgtagcactctcagactctagctcaacgcaggacttctttaatga

SEQ ID NO: 59477 - DNA, 97 bp, Homo sapiens
ggagcctttggcaaagttgtagagtgcattgatcatggcatggcaattgaaggaacagactaaaaatcgtgtcctggaaggaaactacaggtactac

SEQ ID NO: 59478 - DNA, 100 bp, Homo sapiens
ctcatctttgaactactgccggagcttctgccagcacttgacccctgacaagatctaccacgtcacagtgatgccctgctatgacaaaaagctggaagcc

SEQ ID NO: 59479 - DNA, 75 bp, Homo sapiens
tgggaaaaatggaccaacttctttggcaagtggacattttactggctcaaataccagatgacaattttagcatcc

SEQ ID NO: 59480 - DNA, 82 bp, Homo sapiens
tggcttctttgtctggagttgaaagccagatcaccaccttctggcagggcaagaatcctttcgttccatcacaaggtcgtat

SEQ ID NO: 59481 - DNA, 100 bp, Homo sapiens
tggattcacccacagcggggcggcggcggcggcggctgcggcccaatataggcaccgaccgtcacgagctaacttcctggaagagctttccgtctatttt

SEQ ID NO: 59482 - DNA, 75 bp, Homo sapiens
gtcattacaatagcaacttctgttgataagttggggggtcctgatgacaacttaattgaaggtggaggaacaaaa

SEQ ID NO: 59483 - DNA, 75 bp, Homo sapiens
aaaaagaaggacacgcagggctttggggaggagtccagggagcccagcacagtttctcaagtcaaagaaggccct

SEQ ID NO: 59484 - DNA, 82 bp, Homo sapiens
acgctgcctcggcccggacgcgcccgcgcccccgcggctggagggtggtgagaagccctaccactgcaactgggacggctgc

SEQ ID NO: 59485 - DNA, 50 bp, Homo sapiens
ggagcccagaagctgccaccgaaccaagacgggctcatcttcgcttgtgc

SEQ ID NO: 59486 - DNA, 100 bp, Homo sapiens
atgttttctttctgccactattactattttcttccactaaaaaagcgtaatttggctgaacaactttttaaagcaacaatgagttacctccttggagggg

SEQ ID NO: 59487 - DNA, 98 bp, Homo sapiens
ggaagcacgcgaggctgcccggagtccggataagccgggcgggagcccctcggccagacacctggatttcattagcatcatgacctacgattttcatg

SEQ ID NO: 59488 - DNA, 75 bp, Homo sapiens
gaagagttggaggggtactgcattcaactcaagaccccaccaacaactgaacgctttggtcaggctgctacaatg

SEQ ID NO: 59489 - DNA, 75 bp, Homo sapiens
cacggatcatggccgcagccgctctggggcaggtgagaagccctaccactgcaactgggacggctgcggctggaa

SEQ ID NO: 59490 - DNA, 100 bp, Homo sapiens
acctctgaagccgcgtcctactttgacagctgcagggccgcggcctggattttaggtgatgggcaagtcagaaagtcagatggatataactgatatcaac

SEQ ID NO: 59491 - DNA, 90 bp, Homo sapiens
tggcgaccgagacggtggagctccataagctaaagattcatcaataagctgcagccaggctccgtgaagaagatcaatgagtcaacccaa

SEQ ID NO: 59492 - DNA, 71 bp, Homo sapiens
ggaaatggcggagtatctggcctccatcttcggcaccgagaaagacaagaacatgaatctgaaggtggaag

SEQ ID NO: 59493 - DNA, 75 bp, Homo sapiens
gtgggttcttggtctcactgacttcaagaatgaagccgcggaccctcgcggtttcttgagtacaggcgatcaggc

SEQ ID NO: 59494 - DNA, 87 bp, Homo sapiens
tcgccgagaggtaccgggggtgacagctccgggaccggccgaaaggcgaggaaccgataccggggagaccacgacgctgcctcctgg

SEQ ID NO: 59495 - DNA, 99 bp, Homo sapiens
gcctgctgtgcagtctgatgaaagacttcagcctctgctcaatcacctcagtcctcaggactacagaagcagttcacattttacagatcaaacggacga

SEQ ID NO: 59496 - DNA, 90 bp, Homo sapiens
tggtgcaggatctgcagctactgctgcatcagaagaaatggacaatcctccaaacacagactgtttgacttagaatcttcccttttttac

SEQ ID NO: 59497 - DNA, 97 bp, Homo sapiens
cctcgccgaccgccatttcacatccagcagaggaggcgggggcagccgctgagacggtttttcacaagttatacttactggtggacaccagaggtga

SEQ ID NO: 59498 - DNA, 82 bp, Homo sapiens
gggacatctatttggcgatcaacatcaccaacggcgaggaacagatggagtcggataactgttcaggaggagatgatgactg

SEQ ID NO: 59499 - DNA, 75 bp, Homo sapiens
tgcggatgattgatgggaagccggaatacaagaacgggctggacgtgttcctcatgatccggcgccacaagacca

SEQ ID NO: 59500 - DNA, 100 bp, Homo sapiens
aatgatcttctaggagatttgtttggcgtgccaagcttctctgtgaaagagcacagtcacagcaaactgtacaatggcagttgagtgggttttgaaaaac

SEQ ID NO: 59501 - DNA, 100 bp, Homo sapiens
gcagccgatccagcctgcggagcctgtggggcagtggccacagatgtctttaattccaaaaacctggccgttcaggcacaaaagaagatcttgggtaaaa

SEQ ID NO: 59502 - DNA, 98 bp, Homo sapiens
ccggcacccagacaggtggcgacggcagaggaaacccagaagtaccatggcttctgacctagagagtagcctcacctccatagactggctcccccagc

SEQ ID NO: 59503 - DNA, 100 bp, Homo sapiens
caggtttgcagattccgccagcagcacagcaagctctacagatgagtggctctttggcatttggtgctgtggcaggaatacaaacagaagcttgcacgag

SEQ ID NO: 59504 - DNA, 83 bp, Homo sapiens
ggtcaccctacctggcagccagtgataaggcaactgcggcatagcaacctggtgcagctcctgggcgtgatcgtggaggagaa

SEQ ID NO: 59505 - DNA, 75 bp, Homo sapiens
aagtatttggctgaggagttttcaatcccacagcgatggattttgggtggggaagtcctccttgcggagttggcg

SEQ ID NO: 59506 - DNA, 75 bp, Homo sapiens
ctgtgagggaacaagaccagagtttcacgtttaagtgctgtggggctgctaactacacagattgggagaaaatcc

SEQ ID NO: 59507 - DNA, 89 bp, Homo sapiens
gacgcacgccactttttctctgctgatccagacctgcctagagctggaacgttacctccagagcgagccctgctatgtttcagcctcag

SEQ ID NO: 59508 - DNA, 96 bp, Homo sapiens
cgagccttggcggcggacgtgcaggtgaaaggtgtagcagtcactcggcctacacccacagcatcgaccttgtgaacccagcgacctgactgcctt

SEQ ID NO: 59509 - DNA, 83 bp, Homo sapiens
gtgcagcgcaaccacgagacggccttccaagtactttaggaagaatcatcaaagtaactcaggaggtgattgactaccggagg

SEQ ID NO: 59510 - DNA, 75 bp, Homo sapiens
ccggaggattaccatcaccggaagaaaaccaattctgtgtcctcggaggaccacagcccagttgggccccaggcg

SEQ ID NO: 59511 - DNA, 75 bp, Homo sapiens
gggaggtgccgccggggtcgcaggtgggaagaagagcgctatcctgaaggcatcaagtggaaattcctagaacat

SEQ ID NO: 59512 - DNA, 80 bp, Homo sapiens
gcccctctgaagcctcctcgccgccgtttctgagaaggagccttcacgtaaatgggtccagtcatgcctcccagtaagaa

SEQ ID NO: 59513 - DNA, 100 bp, Homo sapiens
ccgagatgtctcgctccgtggccttagctgtgctcgcgctactctctctttctggcctggaggctatccagcattttgggaaccagtaggacattgacat

SEQ ID NO: 59514 - DNA, 97 bp, Homo sapiens
tgatcagacagacagtgtgagattcatggccacgcagtgctttgcaacgctaattagactcatgccacttgaggcacgtgacacaagctgacctcaa

SEQ ID NO: 59515 - DNA, 75 bp, Homo sapiens
caataaaatcgctgcctcccagctgtttggatcacagagagctgggagaaccaccacagacgacgagctagaaga

SEQ ID NO: 59516 - DNA, 100 bp, Homo sapiens
ctcatgctttctccagtgatctcatgaggacaaagcagatggaggagatgtataagaaagctcatgctgctatacgagagaatccagtctatgaaaagaa

SEQ ID NO: 59517 - DNA, 102 bp, Homo sapiens
tcctcaagaatctcgtgctcaccggtttctcccacatcgacctgggaagccctatggggcggatgacttcctgcctgtgctcatgtatgtgctggcccgcag

SEQ ID NO: 59518 - DNA, 75 bp, Homo sapiens
agcagaacgtgctgcagcagagcgcggcgcagaagtctagagcatgtttggaaaggattcaagaattagaggact

SEQ ID NO: 59519 - DNA, 75 bp, Homo sapiens
aaattctgaactcaggacttggcaaacatatctgaagagatggattaagaatgctttggattaaggattgtggag

SEQ ID NO: 59520 - DNA, 97 bp, Homo sapiens
gcctctccaaagcagcccttctgcgcaggagctgaaagctccactggttgtctgttttgatgccaagataaactttgatgacaacgcagaattccga

SEQ ID NO: 59521 - DNA, 90 bp, Homo sapiens
tgaatcgacagtttcttttccggccctgggatgtcacgatgaggagcgggaaggcctcctgcaccctggagaccgtgtgggaagacaagc

SEQ ID NO: 59522 - DNA, 100 bp, Homo sapiens
gcgaacgcacaggatgaccaccaccctcgtgtctgccaccatcttcgacttgagcgaagttttatgcaaggccgccatggcatcagatgaaggcaaactt

SEQ ID NO: 59523 - DNA, 100 bp, Homo sapiens
cttaaagttcaacttgaaaaggcaaataaattcaaagaaactataacacagataccaaaaaaatctggggtagaggagcgtagagtggcagctctccaag

SEQ ID NO: 59524 - DNA, 75 bp, Homo sapiens
acctggaatcgcccaagtccctctactcgcgagatattgatgatgttaagaagttcaaaccgggttacctggaag

SEQ ID NO: 59525 - DNA, 100 bp, Homo sapiens
tagtcgcggctacggcgtcatggaggagatccggcggcagggcaagctgtgcgacgtgaccctcaagagcaatggtggaacaaagcggcaaaagatatcc

SEQ ID NO: 59526 - DNA, 74 bp, Homo sapiens
ctttgctctgtggacccgtgagcaagcataagctgccaaaccaagggcactccacagaaggatgttattatcaa

SEQ ID NO: 59527 - DNA, 75 bp, Homo sapiens
ctttgccattcatggaaacttttctggttgaaatcacaaagattagacacctttttagataggtgttcttcagca

SEQ ID NO: 59528 - DNA, 90 bp, Homo sapiens
ccaaagtcctgctaggccctctctctccctacactgaacacctacctcttcatgatgcaagcccaaggcattctgatccgggacaacgtg

SEQ ID NO: 59529 - DNA, 124 bp, Homo sapiens
aagcaagatgatcgaccgcaacttacgggaggacggggaaaaagcggccaaagaagtgaagctgctgctactcggatgtaatccctgttcattactacttaatacctccaccaacaaagactaa

SEQ ID NO: 59530 - DNA, 75 bp, Homo sapiens
aagattggcccagacaacctgccttatgtccagatcttgaaggaaccactcgttttgactattattttatcactc

SEQ ID NO: 59531 - DNA, 75 bp, Homo sapiens
cgagtcggagggggcgaagattgacgccagtaagaacgaggaggatgaaggttactccacaggatccgctgaaca

SEQ ID NO: 59532 - DNA, 100 bp, Homo sapiens
tgattgatatatatgctgacgaggagttcaaccaggcaccatgagccaggacaccgaggtggatatgaaggaggtggagctgaatgagttagagcccgag

SEQ ID NO: 59533 - DNA, 90 bp, Homo sapiens
ggctggaagaggaagatgcctagcacagaccttctgatgttgcctgccacagtgactcaggtcactcaaggaactatccgaccagctgcc

SEQ ID NO: 59534 - DNA, 101 bp, Homo sapiens
accgagcctaagagggcagccgcctgaaggaacgcgacggcggcgcccgcagagctacagagacttctgaagtggagagtctgcgacctcctcggttcttc

SEQ ID NO: 59535 - DNA, 100 bp, Homo sapiens
cgctctttccaatggagcacattttatatgcaactacggaccagggtttcggtctaagtaccacccagatgaggtggggaagcgtcggcaggaggcccgg

SEQ ID NO: 59536 - DNA, 98 bp, Homo sapiens
acgaccggttcgtcgcctccttgcccgtgaccgtcgctagaactcagttgtgcgttgcggccagtcgccactgctgcattcccatcaagagcaccatg

SEQ ID NO: 59537 - DNA, 100 bp, Homo sapiens
ccttggcgtgctgctgctgcccgggaccctgcgactggcagatttgaaagttgagagcagcatgttttgcccactgaaactcatcctgctgccagtgtta

SEQ ID NO: 59538 - DNA, 120 bp, Homo sapiens
ccagaattgcttttggcgtggccatgccggcggccctcacagcaaccagcaccagatgaaggagcattcctcttggtgccaaatctttggagtgttgatggagaagttacagtagctgaa

SEQ ID NO: 59539 - DNA, 100 bp, Homo sapiens
ccacaggcttccagtacgagctggttaggaggcacagggcgtcggacctgcacgagctgtctggcgcatgtttcctttcttgagcttcaacataaacgga

SEQ ID NO: 59540 - DNA, 101 bp, Homo sapiens
ctcgacctgggcaagctccagagcctgccggaaggctccctcggtcgcgagtatctccgtttcctggatgtgaacgtgctgatgtatggacagccgtatcg

SEQ ID NO: 59541 - DNA, 75 bp, Homo sapiens
tgcgctcaacgagctgtatttctatgtcaccaagtaccgccaggagtctgcagatgtggatcccgaatcctgcga

SEQ ID NO: 59542 - DNA, 82 bp, Homo sapiens
gaactggctcttcaaattgaaaaaggaagctgttgaagttattgaagtacctgttgctatattctaagaaattaaaatgtcc

SEQ ID NO: 59543 - DNA, 83 bp, Homo sapiens
gaagaattttgtggagttgacagatgttgccaataaaaaggttggaaagggcaaagaaattacaagaacagcgagaaaaggaa

SEQ ID NO: 59544 - DNA, 87 bp, Homo sapiens
aagctgctgaaaaggctaaatgtgaactctcctcatctgtgcagttaattggccttggtcctcacagctccaaaaagaaacaggatc

SEQ ID NO: 59545 - DNA, 90 bp, Homo sapiens
tcgccggggaggcagcgcgggatcccagcctcaggcgtgcgcggacggtgtgcggatcacaagagacccctggagatgggaagcctccag

SEQ ID NO: 59546 - DNA, 88 bp, Homo sapiens
aaactgtgagtgactgctccccacacatagccaacatcgggcgcctggtagaggtgtggtgactctgctgtctgactacgaggtgtgc

SEQ ID NO: 59547 - DNA, 100 bp, Homo sapiens
tacagcagagcttttttcttgctgaaacattaaaattcctagaggggagtgcctgcgagcctcgggtgagccttcctggaggagcctccgtctgcttgtt

SEQ ID NO: 59548 - DNA, 100 bp, Homo sapiens
gaaaaaagattaaatctcagggaaactcttatggaggtactgggaacagcttttgatcctttcttaggaggaaaaaacttcgatgaaaagttagtggaac

SEQ ID NO: 59549 - DNA, 124 bp, Homo sapiens
agaagatgtgtctgtggagcacggatgccattagcaaggatgtttttaataaggtggacaaactgagagtgatgttcctggagatgaaaaatgagaaggaaaaactcatgatcaagttccagag

SEQ ID NO: 59550 - DNA, 96 bp, Homo sapiens
aacaaagctgaggtccagatgaaagagaagtttctggtcactccccaggattatgcgcggacaacgtggatctgggagagctgatgttttccctgt

SEQ ID NO: 59551 - DNA, 90 bp, Homo sapiens
ctctcctggtccaaggacacctacagccccgacgaacatttctgggtgacactcaacaggattcccgcatcctatggctctactttgaga

SEQ ID NO: 59552 - DNA, 82 bp, Homo sapiens
atctgtcttcggtggactccttcggcagtccacccaccgccgccgcctcccagtccacaggtcctggctaccctgggaagag

SEQ ID NO: 59553 - DNA, 83 bp, Homo sapiens
agtggatggcgtggagatatggcgcaactgcggcgcgtgtgggcaagagcagtttactgttgcgttttgcagacaacactttc

SEQ ID NO: 59554 - DNA, 80 bp, Homo sapiens
acatcgccttttgccacctttccctttatttccggagatgtgaagttcatttccaatccgccctccatggtggcagcggg

SEQ ID NO: 59555 - DNA, 82 bp, Homo sapiens
gcagcctgggggccacagctgcttcaaactcccccactggaaaggattctgaaagaaatgaagtcagccctcagaaatgaag

SEQ ID NO: 59556 - DNA, 100 bp, Homo sapiens
cctgtcttcagatcttcacagcacagttcctgggaaggtggagccaccagcctctccctgaaagagctcttggaggaagttggccagaatggcagccgag

SEQ ID NO: 59557 - DNA, 83 bp, Homo sapiens
gtgaccgatgtcatatgctaggccactatacagatacatatctgaagagatggattaagaatgctttggattaaggattgtgg

SEQ ID NO: 59558 - DNA, 90 bp, Homo sapiens
ttgctgtggaaagacttcacgtcttgccgaatgaaaatgtggaagatgtcaagtttgtgatcaactatgactatccaaacagctcagagg

SEQ ID NO: 59559 - DNA, 83 bp, Homo sapiens
ctgggacggcggcgcggagaaggcagaattaaacaaccaccatgtcgagcaaaaaggcaaagaccaagaccaccaagaagcgc

SEQ ID NO: 59560 - DNA, 109 bp, Homo sapiens
tctggagtccgtgtgccagcaacagagctgggtccgggtgtacgacaatacaatggtgggtgaagagaagatgtctctaagaaaccggctgtcaaagtccagggaaaat

SEQ ID NO: 59561 - DNA, 100 bp, Homo sapiens
atgacaccgaagatacaagcactgagttcactgacagtattgaggaggaggctgcacaccatagtcaccagcaagtggttggaggcaaagtaaagaagcc

SEQ ID NO: 59562 - DNA, 49 bp, Homo sapiens
ggtcatgttaggaataacttatagaaacctgtcatttactccatccttt

SEQ ID NO: 59563 - DNA, 74 bp, Homo sapiens
ggagaaattccaagttcagattctccaggtagtggtagcagagaattttgatgaaatagtgaataatgaaaata

SEQ ID NO: 59564 - DNA, 75 bp, Homo sapiens
agctcttggatgttcttggacttgacgacaatgcagatcttcgtgaagactctgactggtaagaccatcaccctc

SEQ ID NO: 59565 - DNA, 75 bp, Homo sapiens
ctgaaccagttatgtgtgttgcatgagaaaacgccagagtggaactattcaagagaggtgtgctcaaggaatatg

SEQ ID NO: 59566 - DNA, 100 bp, Homo sapiens
cgactgtgtgcccctcttccacagccacctggccctgtccgtcatgttggaggtcgccctcaaccagatggacggggagtccgaggaggagcaggagtcc

SEQ ID NO: 59567 - DNA, 87 bp, Homo sapiens
ggaaatcagcgcggagttaccccagacccctcagcgtctggcatctctcagcgacatgtcctcacctacatggaggatgcagtgtgc

SEQ ID NO: 59568 - DNA, 100 bp, Homo sapiens
gctgcctgcaccatgtccgccagagacctgtcatttactccatcctttatagtgatgctacaggacgaagaggaatggataaaaacattggcgagcaact

SEQ ID NO: 59569 - DNA, 117 bp, Homo sapiens
gacggagctgcagtcggcactgctactgcgaagacagctggcagacaatgcagatcttcgtgaagactctgactggtaagaccatcaccctcgaggttgagcccagtgacaccatcg

SEQ ID NO: 59570 - DNA, 50 bp, Homo sapiens
agaagttaagatttattgtcaaccaagctgcagaaccttggcctgaaaat

SEQ ID NO: 59571 - DNA, 82 bp, Homo sapiens
taacagtggggagaggagaagatttgacttctgaacatcctttgttagcttatcaaccagcccagccgtatcccttcggaac

SEQ ID NO: 59572 - DNA, 100 bp, Homo sapiens
gaaactgaatactccttccttcctccccacccattcctttaaatccggagggggaaaaaatcccaaggtctgcaaaggcataatcaccagcaacacccgg

SEQ ID NO: 59573 - DNA, 83 bp, Homo sapiens
ggccgagccgggatctcaggtcctcgggggcggcggccacgccaaggacggcagcctcccgcgacgatgcccctcaacgttag

SEQ ID NO: 59574 - DNA, 83 bp, Homo sapiens
cctccccagccatgtgggactggtaaagcatgaatcatcctccagtgatgaggagcgcgcagctgccaagccatcaaacgcag

SEQ ID NO: 59575 - DNA, 139 bp, Homo sapiens
cggacttgctgaaccgcttcctgggggactatgtggagaacctgaacaagtcccagctgaagctgggcatctggggcgggaggctgccggcgtggaccgcgggaaggcggggctggggctcggcgggaggccaccccca

SEQ ID NO: 59576 - DNA, 100 bp, Homo sapiens
aggagatggagctcacgctggtcgggcttcagtactcgggcaagaccaccttcgtcaacgtgatcgcgccaccaaaaccctcaacaggggcatctctgag

SEQ ID NO: 59577 - DNA, 111 bp, Homo sapiens
ctgaagaacgctggaataggttacaagaaatcaatatattgtggcaggaattattggaagaacagttgacggactggacaaagcttctatagcaaactcagatggccccac

SEQ ID NO: 59578 - DNA, 75 bp, Homo sapiens
cggatgagctccctaacagttgtctggtgccttcaccagggatggaagaggcaggctgcagcagagagatgcaga

SEQ ID NO: 59579 - DNA, 82 bp, Homo sapiens
gtgctaaactgtgtggggcgcggatgggatccagctgttagtcgggtaggcataggtgagaagccctaccactgcaactggg

SEQ ID NO: 59580 - DNA, 51 bp, Homo sapiens
gtgccccaatggttcgatattcaaaggaatgacagaggaagaggaagacaa

SEQ ID NO: 59581 - DNA, 100 bp, Homo sapiens
tcaggaaccaccagtgacagagaggcactggctacaattaggcttctcgacgtcctgtgcgaaatgactgtgaatactgagctgctcggctatctgcagg

SEQ ID NO: 59582 - DNA, 82 bp, Homo sapiens
ggcagaagaagacgaagaagcagaagcgtctgctcaggttgcagcaggagagagggtttgccttcccggattgggcctacaa

SEQ ID NO: 59583 - DNA, 98 bp, Homo sapiens
atggctctcgtttcaggcctccacggtgtgcacctggagtcaggagcgcgcttgtgcgtacagttcggttcaggctcatgctgaagattcggttatgg

SEQ ID NO: 59584 - DNA, 90 bp, Homo sapiens
ctttagtaaggatgggaccttgtttgcctggggcaatggagaaaagtgaccaagaatatggcccaggtgaccaaagccctggacaaggcc

SEQ ID NO: 59585 - DNA, 101 bp, Homo sapiens
ccagagtgaagtatttgtgctataccatgaaagtatttacaaagatgtggaagatgtcaagtttgtgatcaactatgactatccaaacagctcagaggatt

SEQ ID NO: 59586 - DNA, 80 bp, Homo sapiens
gccaggctgtggggctgccgccctggctgcaggacccggagctcatgctgtccacctaaacccactgtgttcatctctgg

SEQ ID NO: 59587 - DNA, 83 bp, Homo sapiens
caacttctgcgggatcttcaaccacctcgagcggctgctggacgaagtactatactggcaattgctggagaagattttgcaat

SEQ ID NO: 59588 - DNA, 74 bp, Homo sapiens
agtatccgtaaatggagagaagaacaaatggaacgcttggaagcccttgtgggccccatgctgattgagtttaa

SEQ ID NO: 59589 - DNA, 90 bp, Homo sapiens
ggctgtggcgacatgtcgacctgacgctctacacgacgccaaggacttattgttgtgctaacactgaagacttggagacagttattcacc

SEQ ID NO: 59590 - DNA, 99 bp, Homo sapiens
tggtgctgcacagcttcacgcagctagaccccgacctgccgcgcccggagctgagggcacccggtgcacggacccgcctgcaggcaagcccgccatggc

SEQ ID NO: 59591 - DNA, 118 bp, Homo sapiens
cgttgctttctggaagtcaacattttgatgttcctcccaggagacagctatatttgcccatgttattcaagtccctaaaagataagttagtacaagagaaaaagctgtccaatatgta

SEQ ID NO: 59592 - DNA, 90 bp, Homo sapiens
gttctgcggcacgggatggcggaggcgcctcctgtctcagaatgttcgcatcttaccacatacagttctttacatggctgattcagaaac

SEQ ID NO: 59593 - DNA, 76 bp, Homo sapiens
cgcgtggactggaagtcacactgcggcgtgggcatccccaccatcagatggtgcggggcagagggggactacaacg

SEQ ID NO: 59594 - DNA, 75 bp, Homo sapiens
gtttaagaaagcaaagagcaggttcttcatcttcaaaaatgaacagtttggctgtgaacaaccggtccatccaac

SEQ ID NO: 59595 - DNA, 50 bp, Homo sapiens
tctctcagggtcgtcgggtgaaggtggtttgttctggatgcagaaaccag

SEQ ID NO: 59596 - DNA, 75 bp, Homo sapiens
tattgcgcgtggaacggctgcttttggaagactttaagtttgccatgtacccaccgtcgatgatcgcaactggaa

SEQ ID NO: 59597 - DNA, 98 bp, Homo sapiens
ctaggggagcgaaggctgaggtggcagcggcaggagagtccggccgcgacaggacggtggtttcctagaaacatgattgtttattggcattgatctca

SEQ ID NO: 59598 - DNA, 75 bp, Homo sapiens
ctcctgcagtgaccagtaatggcactttacactcgatttggtgcttccagatgtgagttatcaggtggaatccag

SEQ ID NO: 59599 - DNA, 100 bp, Homo sapiens
actctccagaccttagggaacaagaggcatcactcagtccttctgggacagcttccctgccccacggaggagtcaccccccagtgcgcctctgcgtcccc

SEQ ID NO: 59600 - DNA, 100 bp, Homo sapiens
gttccttcaaaagccagcagtgtctgatgagaaaccgcaatcggaagcaataccaagtttccaggcccgaagagcatcccagactattgggactcctctg

SEQ ID NO: 59601 - DNA, 82 bp, Homo sapiens
aactgagctggaccactggagcctcggtgagggagagtcccacgaactggctgggtatacagaaatgtccagaggccggaga

SEQ ID NO: 59602 - DNA, 75 bp, Homo sapiens
atttccacacccagacccaaagtttgcaacaatcagtcaggggttggccggagacctacgacatgaatacctcgg

SEQ ID NO: 59603 - DNA, 100 bp, Homo sapiens
ggtggaacttgttggaaatggaacatacgggcaagtttataagatggcggatccagacttgttggaagagtcctcatccctcttggagccaagtgagatg

SEQ ID NO: 59604 - DNA, 98 bp, Homo sapiens
tttgccagtgcacgtccatacttaactactgaatgtgaagatgtcctcttagtgcttggcagattagtactgcatgtcaacatcgctctaattcagag

SEQ ID NO: 59605 - DNA, 82 bp, Homo sapiens
cgggtggcttacagacgctgccagcatcgccgccgccagttccagggtctccctccactgctgtagtaacccgggtccgggg

SEQ ID NO: 59606 - DNA, 100 bp, Homo sapiens
ccttggggcaaaatgtggacaagggttctctacttaaaagacaatgactactgatgaaggtgccaagaacaatgaagaaagccccacagccactgttgct

SEQ ID NO: 59607 - DNA, 90 bp, Homo sapiens
tcaaggccagctgtggatcccggcacacagctgtggtgacaccactgatcaggagggaggtgaaagcagcagtgagtcgcacacttcgag

SEQ ID NO: 59608 - DNA, 75 bp, Homo sapiens
ctggggctgctgcccctggctggtcctcctctgtggtagttagaaacaaacctgtggcaaggcaggctcctggca

SEQ ID NO: 59609 - DNA, 100 bp, Homo sapiens
caggcgaacctcacggccagctccgagggttacatgcacaacaccccccggggaaagacattttctgctcccaccgagttggcagggcctgcttcctgaa

SEQ ID NO: 59610 - DNA, 90 bp, Homo sapiens
gcagaaccccaggactgcgcccccgggagcgggcgcccagagctgtatccagcatgctccaaggccacagctctgtgttccaggccttgc

SEQ ID NO: 59611 - DNA, 97 bp, Homo sapiens
gaggtgtcggcgcgggagcagcacttccacagccaagtgcgggagtccacgaaatcgagctatagcagattatcttcgttcaaatggctatgaagag

SEQ ID NO: 59612 - DNA, 90 bp, Homo sapiens
ccttcattgctctgtgtgccaccggtagacgttacatccaagaggaaataatccaggcaaggaagcacaagctgatcaagatgtgtagtt

SEQ ID NO: 59613 - DNA, 75 bp, Homo sapiens
ctcagccaccgctccctcttcccacggtattaatattagaaccaaccaaaatctatcaaccttcttatttgtcta

SEQ ID NO: 59614 - DNA, 83 bp, Homo sapiens
gggcgtccccggccgggacgcgggtcgcgtcgttgtcctccgcgagcgtccggattgcagatgtccagaaggcttcttggggg

SEQ ID NO: 59615 - DNA, 100 bp, Homo sapiens
cacaatggaagtagtagttgttgagcagagggaaagggataggagaaggatgtggactgcagtgctgcagtgccaggcaacatcagatgctgacctgaaa

SEQ ID NO: 59616 - DNA, 82 bp, Homo sapiens
cggccggaattttttacatcgttttctacaagcaaagcgagctgaattccttcttgtggaccattaagcgagacccaccatc

SEQ ID NO: 59617 - DNA, 75 bp, Homo sapiens
agagatggacggtcactcagcctatggaggatttaggtcctgaatatgaaggtatatttaacacttcattgcagt

SEQ ID NO: 59618 - DNA, 100 bp, Homo sapiens
gcagcgctgaggacgctccggagcccggcgaccgcggtaccgcgcgccactaacagattctctaaccatggcacaggtagagaaacgtggaggtttgctc

SEQ ID NO: 59619 - DNA, 100 bp, Homo sapiens
caaaaactgatgaccaagagaatgtgtcagccgatgcaccgagtccagcccaggaaaatggagaggaagttggaaatctgtatgacatgttccacactcg

SEQ ID NO: 59620 - DNA, 75 bp, Homo sapiens
agattttacaggaatacgttgaacatcaggtcctggtgcttgatggtcgaggccatctcctgggccgcctggcgg

SEQ ID NO: 59621 - DNA, 100 bp, Homo sapiens
atctttgctcttccatccgcctttgatcgtcttcctcttcagccatccagtgttattggagagcttacgccgtgggagatgtggagaaaatggctctggt

SEQ ID NO: 59622 - DNA, 76 bp, Homo sapiens
cgataacacaagtgcagcctccagctagcactggacagatgggacaccaggtccaataccacctccaagccgagtc

SEQ ID NO: 59623 - DNA, 99 bp, Homo sapiens
agcagggtggtgtgatagcggcagcgaggggctcggagaggtgctcggattctcgtagctgtgccggatctaccacagccctataacaaaacagcaaga

SEQ ID NO: 59624 - DNA, 87 bp, Homo sapiens
aattttgtggcgctctgcgtcccctgaagtaagatatttcccaaaggccttcctgaggagtactcagtagctgccatgtttcgagta

SEQ ID NO: 59625 - DNA, 75 bp, Homo sapiens
ggggcgcggaccgcggagcggccaaaagacagctttgatttctggctgcaaaaaagatatgaggaagagctcctc

SEQ ID NO: 59626 - DNA, 98 bp, Homo sapiens
gaacttcttcttttctcgcaagtgttctggtcctggtcgccacacctttttcgagatgaaattggcctgatcccatgtcctgaagctaggtataaccg

SEQ ID NO: 59627 - DNA, 75 bp, Homo sapiens
tttgtgcagctgtcctctgcaatggaagaatcctgtaagtacaatcccaagtattctgttgctaatgacaccggc

SEQ ID NO: 59628 - DNA, 49 bp, Homo sapiens
aggcagaggcacttatgcttgtcagttctacttgtccaattctgaaaag

SEQ ID NO: 59629 - DNA, 97 bp, Homo sapiens
gctggggttcctcatctcgtcagtgactttctttactccactggtccagcctagggtgaatgtttccccctccaagaaggggcccttgcagcaccac

SEQ ID NO: 59630 - DNA, 75 bp, Homo sapiens
attttgccgtcggtaacagatccaactgtttcctggttataagaaaactttagaaactgttcctttggagaggaa

SEQ ID NO: 59631 - DNA, 83 bp, Homo sapiens
ggaaagtagagaattactgcaaaggagttcattcaaaagtgcctgcagtctgagcctgctcgcagaccaacagccagagaact

SEQ ID NO: 59632 - DNA, 100 bp, Homo sapiens
tcacctggagcactggacaagtgcatgcaagaccatgactgcaaggattgggtgcataagttttagaaagagcgttttcgctacgtaaagcacattcgat

SEQ ID NO: 59633 - DNA, 100 bp, Homo sapiens
ttggggagaccaatccagcagattcaaagccaggcaccattcgtggggacttctgcattcaggttggcaggaatatacagatgttgccacaggaatctaa

SEQ ID NO: 59634 - DNA, 50 bp, Homo sapiens
gaaaaataccacgacaaaaccaccctatacatatccagccatactcatgg

SEQ ID NO: 59635 - DNA, 80 bp, Homo sapiens
gggcctgcagcgggagctggacggcgagcgcgagcggcgcgagaaagtgctgcagggtgcacagctgatcgccgtggcct

SEQ ID NO: 59636 - DNA, 90 bp, Homo sapiens
caagcccaggaacgtggcgctcatcaccggtatcacaggccaggttgacatcatggacatatgtgagtccatcctggagaggaagcggca

SEQ ID NO: 59637 - DNA, 75 bp, Homo sapiens
ctgcagctgaataacccttttaacgagtattccaaatttgatggcaagatattcaagattaaagcagtgcaattg

SEQ ID NO: 59638 - DNA, 75 bp, Homo sapiens
cgatcatcgagaccggggccagtaccaggaccacgccatcgacagagtgaagacatttccacctggacacctgac

SEQ ID NO: 59639 - DNA, 83 bp, Homo sapiens
cagcgaggggctcggagaggtgctcggattctcgtagctgtgccgggtcaaaatgcagatcttcgtgaaaacccttaccggca

SEQ ID NO: 59640 - DNA, 100 bp, Homo sapiens
tagggatgtgatgttagagaactacagaaacctgatcttccttggccaggagtggtggctcacacctgtaatcccagctctgggaggccaaggccagtgg

SEQ ID NO: 59641 - DNA, 75 bp, Homo sapiens
cctgggaccaaagtggatatcaaacgtgaagagaaggactataccatatggctggcacactccacagaccctgaa

SEQ ID NO: 59642 - DNA, 82 bp, Homo sapiens
tcatgtggcagtggaaaatgcgctcgggctggaccagcagaggagctgatcacgcagtacctggctgagcttcggaaccccg

SEQ ID NO: 59643 - DNA, 121 bp, Homo sapiens
gtggtggtggttgcacagtcgccttttccagtttggagagacgttgtgatgtacctgctcccccttcaccttctgccataattggaagcttcctgaggccctcaccagaagcagatgccgg

SEQ ID NO: 59644 - DNA, 82 bp, Homo sapiens
cagaaacctgaagttagaaaggctcaacgagaacaagctatcagcatgaagaggaaccacctcagaatatgaaaccacaatc

SEQ ID NO: 59645 - DNA, 98 bp, Homo sapiens
tgttggagaggtggaaacagcggatgattctggaactgggagaagatggctttaaagaatacacttcaaaggggtgtttgatgcttccctcaaaatgg

SEQ ID NO: 59646 - DNA, 75 bp, Homo sapiens
gacgtctgacagtgacgatgaggaatatacagatgttgccacaggaatctaatctgaaatcgtacaaatggaaat

SEQ ID NO: 59647 - DNA, 100 bp, Homo sapiens
caggacaccgggagtgggagagattggactgggagactcagcaggtcagctggccgccggcacctgtgagattgtgaccttggaccgggacagcagccag

SEQ ID NO: 59648 - DNA, 100 bp, Homo sapiens
cgccagggaccctgtgcaggcctgctcctccgtttgcaaggtgttgtctggaggatggaggaatagacgtgtggcatcaacatcaatgaacagagaatcg

SEQ ID NO: 59649 - DNA, 50 bp, Homo sapiens
gtgaggtcgaaacaggataaaattttgagttaatgttctcctcagaggtg

SEQ ID NO: 59650 - DNA, 50 bp, Homo sapiens
gccggccggagcacgccaggcctgagcttcctgctcgaccccaagttgaa

SEQ ID NO: 59651 - DNA, 78 bp, Homo sapiens
acacagtgtccagatacgagggctggatgacaccaaaatcctcccaggcaacatgaaggataacttctgggagatggg

SEQ ID NO: 59652 - DNA, 76 bp, Homo sapiens
gaaagcagacatcgcactcatcaaaattgaccaccagtgggtaattccagaattgattggccataccattgtcact

SEQ ID NO: 59653 - DNA, 75 bp, Homo sapiens
agaaaacccatatatccgaatgatatgaagagcattttaagaggtgcagcctctggaagtggatcaaactagaac

SEQ ID NO: 59654 - DNA, 100 bp, Homo sapiens
ggcggcgacggcggcaaatctaagaaatttctggcctgctgctgtgggtctgcaggctgctctctctgctgtgattgctgccccaggattcggcagtccc

SEQ ID NO: 59655 - DNA, 75 bp, Homo sapiens
tgcagccctagtgtttgccggagccatggaatttgctgaagtattctaccttgtaaatactgttatttgtatata

SEQ ID NO: 59656 - DNA, 101 bp, Homo sapiens
aaaaaaatctgggaggttgaacttattaatcaaggggaagttgattgttggcccctgccttgcccagatgtggagtgtgaattcagcattctcccagagaa

SEQ ID NO: 59657 - DNA, 99 bp, Homo sapiens
ctgtattctgacgtttacaaaactacagagaatgaatctgaagtctgctgcagtaaaacacagaaggctttaaaatgttttcttgcataaaattcaaaa

SEQ ID NO: 59658 - DNA, 100 bp, Homo sapiens
aaggagagcacaaccatcgcagttggaagcccatggggcaggagtgactattccctggctaaatattggcatggtcttttctacctcatgctggtctcga

SEQ ID NO: 59659 - DNA, 75 bp, Homo sapiens
gcaggaagtgggaccggtgtctggcggatgcggtcgtgaagataggcctcagctgttgaagaacgctctgcagag

SEQ ID NO: 59660 - DNA, 100 bp, Homo sapiens
cgacgtgggcaagggcgagatcctggagagcctgcaggacggcgcggcagagtccccgtacgcctacagtaacgaacgtgctggccaaagcgctctatga

SEQ ID NO: 59661 - DNA, 50 bp, Homo sapiens
ggggacatcatctgtgtgttctcacaaagaagctactatggaggaaactg

SEQ ID NO: 59662 - DNA, 100 bp, Homo sapiens
gtcagccttcccagtagctggaactacagccttgttcgggagtctagcagttctcgctcaccaaccccaaagcagaagaagaagaaaaagaagaaagata

SEQ ID NO: 59663 - DNA, 83 bp, Homo sapiens
gggagctgcaggaactgttcagcggcattgatgggcatctcaccgatttccgttactatggcaatgacggcagggactacaac

SEQ ID NO: 59664 - DNA, 82 bp, Homo sapiens
ccttgcaggattcagaagtgtatttagcatctctagaaaaagatggaggagctcttattactggccaaggaaagcagtcgga

SEQ ID NO: 59665 - DNA, 100 bp, Homo sapiens
tctaagactctgggacactcctgaagtcgggaaatgacaatgcagatcttcgtgaagactctgactggtaagaccatcaccctcgaggttgagcccagtg

SEQ ID NO: 59666 - DNA, 100 bp, Homo sapiens
agtccgaaatggcggggactgttggtctcggccctgcggaaggtgtcatggagaaactccagctgggcccagagattctgcagcgggaaaatccaaggct

SEQ ID NO: 59667 - DNA, 75 bp, Homo sapiens
gcctctactacctctggatgtaggaatgttacggcatccggagtcatccctcagatttctctgatcatgggccca

SEQ ID NO: 59668 - DNA, 51 bp, Homo sapiens
cttggagcagcacttggaagacacggatcttctgcatttaaaatagaagag

SEQ ID NO: 59669 - DNA, 83 bp, Homo sapiens
attcaaacccagaaactgaatcctaaaggaggaactctccatgcagatgctcagctttattactctcgtggctttggtggccg

SEQ ID NO: 59670 - DNA, 100 bp, Homo sapiens
tagcctcggaccccgactgccgctggtgcccggccccggactgcggcaggaggccactgtctgcagctcccgtgaagatgtccactccagacccacccct

SEQ ID NO: 59671 - DNA, 51 bp, Homo sapiens
atggccactcctacacatccaagataagaactccattttctgttgatgtgg

SEQ ID NO: 59672 - DNA, 50 bp, Homo sapiens
ccgagaccgcggccgggaccgaggtgttgttacagatcttataacagtcg

SEQ ID NO: 59673 - DNA, 83 bp, Homo sapiens
tctcgccacagcggcctcggcctccccttggattcagacgccgattcgcccaggttggacttggctcagtctctgggactcac

SEQ ID NO: 59674 - DNA, 75 bp, Homo sapiens
gagatcttccgccactacgaattctgaaagtcaagaagacatcatccggaatattgccaggcacctcgcccaggt

SEQ ID NO: 59675 - DNA, 95 bp, Homo sapiens
gttcctcggcggctgcaggatgggggactccaaagtgaaagtggcggtgcggatacgacccatgaaccggcgagtgaactttgaggcgctgatca

SEQ ID NO: 59676 - DNA, 100 bp, Homo sapiens
gaattccgggaagtgggagcttcaggctcgctccgtgcggatacactgcctctaggactgggacagatagccactgagtacctgcttcaaatcaccctgc

SEQ ID NO: 59677 - DNA, 103 bp, Homo sapiens
ggcgggagcttccgggagggcggctcgcagacaatgcagatcttcgtgaagactctgactggtaagaccatcaccctcgaggttgagcccagtgacaccatcg

SEQ ID NO: 59678 - DNA, 99 bp, Homo sapiens
gtttgtgcaggacaccgacatggaacagggactcactggggtttgttggcatgggatggaggatgaagagacacctgagcaaagtgtttctgtagaagg

SEQ ID NO: 59679 - DNA, 100 bp, Homo sapiens
tcagaggcccctgatgtctggagaattgtgagcttggagccaggaaatcatactgtgaccttattctggaaggctctcaactacaatctgagcaaagaag

SEQ ID NO: 59680 - DNA, 82 bp, Homo sapiens
ccaggagaagtttttatcaacaaaggcaaaggattcggatttattaagcttgcccttcccaacagaagaaagcattaatgat

SEQ ID NO: 59681 - DNA, 50 bp, Homo sapiens
gagcgaatcctaccttccaaacaggactttatggacagcagcctgctaac

SEQ ID NO: 59682 - DNA, 100 bp, Homo sapiens
cccaggaagggagagtcttcttccaagcagagccccctcccttgctgcactcagggacatgactgtcagcacttctaccccccctcagacttcactgtca

SEQ ID NO: 59683 - DNA, 88 bp, Homo sapiens
gaaatcctgctttcttttcctcagaactactatattcagtggctaaatggctccctgattcatggaaagaccacagcaagattctttc

SEQ ID NO: 59684 - DNA, 75 bp, Homo sapiens
ccgcagtaccagggagcgactgaagtgcccatgccgcttgctccggagaaggtgctggagaatctggtaaaagca

SEQ ID NO: 59685 - DNA, 87 bp, Homo sapiens
cctgcagagggagagccagagtgccaaggccctggagcggccctgggagagcctcagctctgctatatcctggatgccatcctgttt

SEQ ID NO: 59686 - DNA, 75 bp, Homo sapiens
ggagaaaacgaaaccttcgtgatgagattgactgtagccgaggtcattatttagaagcaaggtccttgaatgagc

SEQ ID NO: 59687 - DNA, 98 bp, Homo sapiens
tcggatctgccttgctctgggaggggtgtgatgaatgcagactctgctaccattttggctgtttggatcctcctttgaaaaagtctcctaaacagaca

SEQ ID NO: 59688 - DNA, 75 bp, Homo sapiens
aagtccagcatcgcaggcagcagcacctgggaaagcttgttactgtggagaagcaggataatgaaacatttggat

SEQ ID NO: 59689 - DNA, 50 bp, Homo sapiens
aaggaggtggtgcactcagtgcattcttacaaccagtacagaaaatagac

SEQ ID NO: 59690 - DNA, 80 bp, Homo sapiens
agctgcaggactgggtgaaaaagatccgtgaagtggcccagacagcagacgccaggaccaactcttcagccagtgcatgc

SEQ ID NO: 59691 - DNA, 100 bp, Homo sapiens
gagcagaggaacctatacaaagaagtgatgctggaaaatctcaggaatctggtctcattgggcttgctgaatgacaacacctttgcccagtgcaagaagg

SEQ ID NO: 59692 - DNA, 74 bp, Homo sapiens
cccttcgagaggaggcagattcccctctacatagacgacaccctgacgattccaaatcctttatttgatctggc

SEQ ID NO: 59693 - DNA, 75 bp, Homo sapiens
ggagcagccagctgggtccggggagcgccgccgccgcctcgatggggtgcaaattcgaccatggaacctaagtga

SEQ ID NO: 59694 - DNA, 82 bp, Homo sapiens
aagaaaagaaggggaagaagatcaaaacccaccatgccccagttttctggatatgccgcagaaggatccgtgccagaagcaa

SEQ ID NO: 59695 - DNA, 100 bp, Homo sapiens
ctgcggtgttacccacgactgcctgggacctggccaagggctccacacaccaagaccaaggacgcgcgggcggccatgcgccccttcgacccctccactc

SEQ ID NO: 59696 - DNA, 75 bp, Homo sapiens
aagggcccaccgaggatgcccaagaagacgccgagaaggctaaagattactctcgtggctttggtggccggtacg

SEQ ID NO: 59697 - DNA, 74 bp, Homo sapiens
ccgagacatcgaggtgggagaggaggttgttcctactgaaggattggtctccatattaaagaagaggaatgata

SEQ ID NO: 59698 - DNA, 83 bp, Homo sapiens
gatgctggaccagttgatgggcacctcccgggacggcgttcccacagctgtgcagaacttagcgccacgcgctgctgttgctg

SEQ ID NO: 59699 - DNA, 100 bp, Homo sapiens
gcgagttcctgcgcggctgcggggcttccctgcggctggagctctgtgcagtgtgcctagaagacttcaagcctcgagatgagttggggatttgcccatg

SEQ ID NO: 59700 - DNA, 74 bp, Homo sapiens
gcggagatgcctctttttgccaccaatcccttcgatcaggatgttggtaagaatgattgatgttggctgatatt

SEQ ID NO: 59701 - DNA, 98 bp, Homo sapiens
cgaagccgatctctctctcgttcaaggaagcgcaggctgagagtagctgtgctatgtgtttccagatctgcttattgtttgggttcaagccaccccag

SEQ ID NO: 59702 - DNA, 51 bp, Homo sapiens
cagagtctcactctgttgcccaggctggaatgcagtggtgcaatctcggct

SEQ ID NO: 59703 - DNA, 103 bp, Homo sapiens
atagattctgctggtatacagctacatccaggagagaatgctgacagtcctgcagctgcagaaccttggcctgaaaatgctacattatatcagcaattgaaag

SEQ ID NO: 59704 - DNA, 98 bp, Homo sapiens
ctccctggtagctgggattacagatatcatttgaggatgtggctgtggatttcacgctggaggaatggcagctacttaatcctactcagaagaacttg

SEQ ID NO: 59705 - DNA, 75 bp, Homo sapiens
ggactcgtggggctgcagcaccgaatgaagaaggagccccacaggaaggaattctggaagatatgcctgtggatc

SEQ ID NO: 59706 - DNA, 75 bp, Homo sapiens
tggaaacaccatggctgcggcggcccagctctctctgacacagacggtcctaaaatctctacacttgccaaaaaa

SEQ ID NO: 59707 - DNA, 82 bp, Homo sapiens
tactgaataaacaaggagggatgtttctaacccgagcaatgtctggctttgatgacagtagggaaagaaccatttcctacca

SEQ ID NO: 59708 - DNA, 82 bp, Homo sapiens
ctaacatgtcagcgttattgtaatgcaagtgggcagcaatgctggcatcgtggggatgaccaaagaacacctgggcttggca

SEQ ID NO: 59709 - DNA, 100 bp, Homo sapiens
tccgcgacgagctatccgggaaagggccgaatgcgatcaaacctaatccgcgagacttgctaagagatgattattgacagagtaaatggacaggctgttc

SEQ ID NO: 59710 - DNA, 80 bp, Homo sapiens
ctgcgtcggagctctacacaaaggtgtgggttgggagcagcagcggcctgccgcccctggaacctcttcctagcgacctg

SEQ ID NO: 59711 - DNA, 75 bp, Homo sapiens
ttcccggcccctcagggccacggctttagcggtgtcttttgcggacgtagacaagtttggcaacgagatcaccca

SEQ ID NO: 59712 - DNA, 51 bp, Homo sapiens
tcttccagagcgtgaagatcaagatcgtgtcctgggtcatgaaacttaatc

SEQ ID NO: 59713 - DNA, 82 bp, Homo sapiens
cgcggacctcgccccgggacagcgaggagctgagggaccctggtttccaggcctgaggtgcccgccctggccccaggagaat

SEQ ID NO: 59714 - DNA, 95 bp, Homo sapiens
ggagcgtcctctaacacattcagactacaagtccagacccaggagagcaaggcccagaaagaggctccttgaagttcgtggaaggctgtatgagc

SEQ ID NO: 59715 - DNA, 75 bp, Homo sapiens
gatggccctgggtcctcgctgtggggcaatccgggcttgcagacgaggtaagaatgattgatgttggctgatatt

SEQ ID NO: 59716 - DNA, 51 bp, Homo sapiens
ccaggattcatgctctacatccccatagagtgaccaaagacttgaccactc

SEQ ID NO: 59717 - DNA, 100 bp, Homo sapiens
ccttcaccgccgcagaccccttcaagttctagtcatggttaagaatagacccaccagcatttcgtgggatggtcttgattcagggaagctctacaccttg

SEQ ID NO: 59718 - DNA, 90 bp, Homo sapiens
cagaggatctcttctaacatccagaagatcacacagtgttgttgaaatcacaaagattagacacctttttagataggtgttcttcagcac

SEQ ID NO: 59719 - DNA, 98 bp, Homo sapiens
tgttctccgtaaccagaaacaggttcattcattgaaactggcaagatgtttacctggggccgagcagactatggtcagctagggaggaagttggagac

SEQ ID NO: 59720 - DNA, 75 bp, Homo sapiens
ggcagttggtgaaaattactgatggctctccttccaaagcgaatctttctgcattgaatttgaagatttctgaac

SEQ ID NO: 59721 - DNA, 100 bp, Homo sapiens
cggaaaattgaggaaatcaaggacttcctgctcacagcccgacgaaaggatgccaaatatggcagagttccctctggagccaatgctatgcaaaatgctc

SEQ ID NO: 59722 - DNA, 111 bp, Homo sapiens
ggaaaaccagttattgaatatcaagaggaggagttgttggaggtagaagaggatgatccagtgcctgagatccgtcgagatcactttgaagaagccatgcgctttgcgcgc

SEQ ID NO: 59723 - DNA, 90 bp, Homo sapiens
catgactcgcctcctctcagtgaccacaggttggttgaggggtttaacaaggctaagaagccttacgaaggatgaatccaaaaggccaaa

SEQ ID NO: 59724 - DNA, 100 bp, Homo sapiens
tccagaaagcggcttatcgaacagagccgggagttcaagaagaacactccagaggctaggcagctggaagagaaagaccgagtgctaaagaagcaggatg

SEQ ID NO: 59725 - DNA, 51 bp, Homo sapiens
cgtcatcagactgtcggtacgagagcgatcgtcttctgatcaaaggaggta

SEQ ID NO: 59726 - DNA, 98 bp, Homo sapiens
cgcatgaatcagtctctctccctgctctacaacgtgcctgcagtggccgaggagattcaggatgaagttggttacacttccaggggctccccactcag

SEQ ID NO: 59727 - DNA, 100 bp, Homo sapiens
atggcacttcattggccacctacagaaacaaaatgtcaacaaattgatggggaaagattttcaagggagcaaacttaaagtctcccttgctcggaagaag

SEQ ID NO: 59728 - DNA, 83 bp, Homo sapiens
cttcaagagactgatcaaattgtgagaggaaaacagcctacccggtttactcctggcttgggggcattaggaagcactggagg

SEQ ID NO: 59729 - DNA, 100 bp, Homo sapiens
gcggagctgcgcgtgctcgtagctgtcaagagggtcatcgactacgccgtgaagaccaagatcactccatggatgaaatgacagctgtggtgaaaattga

SEQ ID NO: 59730 - DNA, 99 bp, Homo sapiens
gtggccacagcatctttgtctagccccagtgcaggaaggaaaatcacctcggcagtgtttgaaggaaggatactgcaactctttgaagtacgcattttt

SEQ ID NO: 59731 - DNA, 100 bp, Homo sapiens
cgcctctgccccgccgccccatctgggatgtgaggagtgcctctgcccggccgagaccccgtctgggagccggatcgagctgggagatgtgacaccacac

SEQ ID NO: 59732 - DNA, 98 bp, Homo sapiens
tctgctgatcacttggagtgctgtcccttggaacaggaggagtaagattgagaattaaggtgaaaagcactgaagttgagatcctagagaagtctcaa

SEQ ID NO: 59733 - DNA, 101 bp, Homo sapiens
gcactgtcccagtcctacagaccgtgcccagtggctggagaagacccagcaggcccaggacataagcagctctatgaccaatagcacagctgccagtagac

SEQ ID NO: 59734 - DNA, 83 bp, Homo sapiens
atccggggagaagcaggtgtctgtggggcccaagagaagtaccatctcgcctggtccgacccccagtggcactaacgtgggat

SEQ ID NO: 59735 - DNA, 96 bp, Homo sapiens
agctgaatgactcaagtctggacctgggacccactgcagatccgttcttccccctctccttcctggtcaacagctggctcccagggatgctggatg

SEQ ID NO: 59736 - DNA, 98 bp, Homo sapiens
tcagttcgtcctagttactggctggttcttcacaatctcaccccacagctctggaggctgccatcgagaacctcaatgaagccaagaactattttgca

SEQ ID NO: 59737 - DNA, 107 bp, Homo sapiens
tttggaatcctcctatacgaaattgtcacctatgggaaaattccctacccagactttgagaatcactacaagaaaaactccttgtggtgaaggttctaagacgtggg

SEQ ID NO: 59738 - DNA, 147 bp, Homo sapiens
tcttcttgaaggctgtgctgagaaaagtaaacagctgaaggatgaaggagccagtttggctgaaaataaaagctgtctcctatatataatctggttccagtgaaaatgaaaaatgcacacctaaagaaacaaaacttggaaagagcc

SEQ ID NO: 59739 - DNA, 101 bp, Homo sapiens
ctttgtggctgcctttgttgctgctgcacattaggttgcagtatgtggccagttatttgcctcagtaaaagagtatcagatacacaccggacttcaacatt

SEQ ID NO: 59740 - DNA, 75 bp, Homo sapiens
ccgcgtcggcgatccggggtctgggcgcggcgagtgatgaacggcagcagccactcaccaacagccatcaatggt

SEQ ID NO: 59741 - DNA, 83 bp, Homo sapiens
ctgcgactccggagacagcccaaatatcctcggaagagcgctcccaggagaaacaagcattatattgtacttctagcaagtgc

SEQ ID NO: 59742 - DNA, 122 bp, Homo sapiens
tgccactcagctttgaggaaaagccagtttatatccaagacttagatgaggggccgttgacatttagggatgtggtcatagaattctctcaggaggagtggcaatgcctggacactgctcag

SEQ ID NO: 59743 - DNA, 96 bp, Homo sapiens
tgtacatgctttttattacaagactacggagcataggaggaaaattcatcatctggaaaatgttggggcttttcaggaagcataataagattccta

SEQ ID NO: 59744 - DNA, 100 bp, Homo sapiens
cacctctccagtcccctgcccctcacagctttcctgctctgggaccctaccaaggtgcccccacgactgcaggctgtgactgatgaccacatccggatgc

SEQ ID NO: 59745 - DNA, 100 bp, Homo sapiens
gctacacagagacagatcaaagcagctcgacagttctttttactctgacgtctgtggttgtacttgtgattacaacggactggatcagctgggacaagct

SEQ ID NO: 59746 - DNA, 82 bp, Homo sapiens
ctggagacgtccagcctgacattcacctgacttctgcagaacatccctgaagaggaaggagaaggaatatgagcatgaaatg

SEQ ID NO: 59747 - DNA, 88 bp, Homo sapiens
cagccagtaaggaattaaaggacttcaagaccctaaaaagtctgccagtcgccctgggagtcgggctgggagtcgagccgggagtcga

SEQ ID NO: 59748 - DNA, 75 bp, Homo sapiens
gttagaaaggctcaacgagaacaagctatcaggtaagccaagatgggtgcatacaagtacatccaggagctatgg

SEQ ID NO: 59749 - DNA, 83 bp, Homo sapiens
ctatcctcggtgctgtggtgcagagctagttcctctccagctcagccgcgtaggttggaagtactccatgacacacactcgga

SEQ ID NO: 59750 - DNA, 50 bp, Homo sapiens
aaaagcgaggcaaggcaggcgggaacattttagtggacaaaccaaatgac

SEQ ID NO: 59751 - DNA, 73 bp, Homo sapiens
gccccctgggatccgcaggttccctacacggtctcctgggtcaaggagaaacaattgcagcacttacagacat

SEQ ID NO: 59752 - DNA, 83 bp, Homo sapiens
atgacaccatttctaagcaacttacattagaacaggaaatatatcctggacaattccagccatctctctgtcacaaattcata

SEQ ID NO: 59753 - DNA, 73 bp, Homo sapiens
gataaatctttacaagcttgtaaaatctcagagaaccatggagtctggcagtaccgccgccagtgaggaggca

SEQ ID NO: 59754 - DNA, 75 bp, Homo sapiens
gtgaaatcaacaggaattttaggtggacaaggttcgttccaccagtcataaaccagatgaaatctatggcatgat

SEQ ID NO: 59755 - DNA, 90 bp, Homo sapiens
cctgtactgcaaactctgcaatgtcaccttgaactctgcacagcaagcccaggctcattatcagggccgttgctccagggagaactgcaa

SEQ ID NO: 59756 - DNA, 100 bp, Homo sapiens
cctacctgaacccatccttccatccctccaaaaaatttacccagcccaggatgttttggtgcaggagatggaagtggttaaacaaggaatgagccatgga

SEQ ID NO: 59757 - DNA, 50 bp, Homo sapiens
cagatgtctgtgaggcaagcaaaaagtgctgcaacctgtactggatgttt

SEQ ID NO: 59758 - DNA, 80 bp, Homo sapiens
tgaaaagggtcctcctgctcacagtgtgaataacagatcatggaagggaagtggttgctgtgtatgttactggtgcttgg

SEQ ID NO: 59759 - DNA, 76 bp, Homo sapiens
cttggaaactagtgaaccaaaacctttcctctactatcctgaaatcaaaggccaggagtggtggctcacacctgta

SEQ ID NO: 59760 - DNA, 108 bp, Homo sapiens
taccaggcgaagctggccgagcaggctgagcgatacgacgagaatgtcaccaatggcacagtgggcggcacagcagagccggggcacgaggaggtgagctggatgaac

SEQ ID NO: 59761 - DNA, 75 bp, Homo sapiens
tgataaacccaaactgttcagaggactgcaaatcaagtaagcggcgggctcgccagcctcgagcgaaagtgtgac

SEQ ID NO: 59762 - DNA, 103 bp, Homo sapiens
gcacgccatgagggccctgtgggtgctgggcctctgctgcgtcctgctgaccttcgcacttgcacctcctgcgccgccgccccccatccaaggatatgccttc

SEQ ID NO: 59763 - DNA, 113 bp, Homo sapiens
ccagcgccaccatccacgccagccgcaccatgccgctcctaagcctgcacagccgcggcggcagcagcagtgagaggaattctgtggccacactgcgaggagatcggttctgg

SEQ ID NO: 59764 - DNA, 100 bp, Homo sapiens
ggatgttttggcgagagatgtattcagtggaggaagctggcagcacgctggctcttctcctgaacttcctcgcctgcctggccagcttctgtgtggaaac

SEQ ID NO: 59765 - DNA, 90 bp, Homo sapiens
gttgatttctccaaggatctgctgaaaaatcttttagctgaaaaagtagagcagctgatggaatggagttccagacgctcaatcttccga

SEQ ID NO: 59766 - DNA, 96 bp, Homo sapiens
gggaagacaccctgttctcggaacccaagtttgcacagaccaacagaacttcacagtgacactggaccaggtcctgctccgctgcctggaacacca

SEQ ID NO: 59767 - DNA, 83 bp, Homo sapiens
cccagccctgcgtgaggccgcggagcgccagctcaatgaaacctgcctagagctggaacgttacctccagagcgagccctgct

SEQ ID NO: 59768 - DNA, 75 bp, Homo sapiens
aagaaaaggcattgaggaactcaatcaaaccagtattcttttcacacagatattgatgatgttaagaagttcaaa

SEQ ID NO: 59769 - DNA, 100 bp, Homo sapiens
agccgtgagggatacagcagtttggtcaatattgtcttaacatgcttcaaataaatcaggctaggcagctggaagagaaagaccgagtgctaaagaagca

SEQ ID NO: 59770 - DNA, 90 bp, Homo sapiens
ccacactgcgccaacacagaaattattggcttgttgtcagaggccccaaatgaaaaactcttcttcgtggacactggctccaaggaaaaa

SEQ ID NO: 59771 - DNA, 100 bp, Homo sapiens
ggaaagagtggtgacagaggagaaagtggccatgatccaaaggaaccagagcagttgagaaaactgtttattggtggtctgagctttgaaactacagatg

SEQ ID NO: 59772 - DNA, 75 bp, Homo sapiens
gggaggtggtggagtgacctggccccagtgctgcgtccttatcagccgagccgaaaaagcttgtggtgaaggggg

SEQ ID NO: 59773 - DNA, 82 bp, Homo sapiens
gacccggcggggcgcaccacagagaccggcttcaatatcttcacccagcatgaaggaagaggcccagcagaagggactcgct

SEQ ID NO: 59774 - DNA, 75 bp, Homo sapiens
tttctggaagaagaagaagagcatgatcggcatgtccaccaagggctgggttacgacccctacaaccctgagctg

SEQ ID NO: 59775 - DNA, 103 bp, Homo sapiens
tggaacattacaaattcaactagcaaaagaaagctttctgcacaggactactgttcgaagatttttggaagaatactgagaacggcataaagtgaagatcgac

SEQ ID NO: 59776 - DNA, 83 bp, Homo sapiens
ccaaagtcccacagggatgaggtgagcctggacttgaatgcaggagcaggccgggctctcgccatgggtcactgtcgcctctg

SEQ ID NO: 59777 - DNA, 82 bp, Homo sapiens
atgtatcaagcctggatttttggtactgcaaacgagttgctccttgagggcaggacagttcttatggctttatccgttgcgt

SEQ ID NO: 59778 - DNA, 147 bp, Homo sapiens
gccggttatgaaaggattactggcgccgcaaaacaccttcctggacaccatcgccacccgttttgacggaacacgtggttatgttgaagatgtaaatattctccctgctgtgagtattactgcagctgcccaaagatgctttatttt

SEQ ID NO: 59779 - DNA, 90 bp, Homo sapiens
ctttcttaaacctttccagaatttgcccctagaaccactcctattcttgacgcccagaatggtcagtgattcctggtcgggtggcttcca

SEQ ID NO: 59780 - DNA, 82 bp, Homo sapiens
agaaggtggacgtgctggtgtctgagtggatggggacctgcctgctggtattagaaaactactcggatgctccaatgacacc

SEQ ID NO: 59781 - DNA, 100 bp, Homo sapiens
atttacttggtgcccgagatactaatgttctattgggttcccttctggctctggctagtttagcagaaaggtattttggcctctccccagtctgctcctg

SEQ ID NO: 59782 - DNA, 97 bp, Homo sapiens
tattcgggtgggagtgacccgattttccaggccgaggagtcttgtaaatgtaatggctggaaaaaccctaacccctcacccactccccccagagccg

SEQ ID NO: 59783 - DNA, 82 bp, Homo sapiens
gtgaacaaggatctggatatttattataagactcttgaccagagctaaatcccctgaagcagcagaaagctttcattctgga

SEQ ID NO: 59784 - DNA, 100 bp, Homo sapiens
cgcagcgctgccatggagcccagcagcaaggttgattgtcctgggctgtggctggctgtggagctagagccctggatggcccctgagccagccccaggga

SEQ ID NO: 59785 - DNA, 83 bp, Homo sapiens
tcgtccgaggcccagagatgaccccttatgaagccgaacgaccctgtcaccaacatttgccaagcagccgacaaacagctttt

SEQ ID NO: 59786 - DNA, 100 bp, Homo sapiens
gtacagtctctgcacctcgcgccccagcagattttgaacacagcacgaaaacattttggagctggtggaaatcagcggattcgcttcacactgccacctt

SEQ ID NO: 59787 - DNA, 83 bp, Homo sapiens
catcaccggagcgtcccagctgcgaggagtcgcaatgtatctgctgagcaaaaagatgaaaacaaagaagcaaagcctcgatc

SEQ ID NO: 59788 - DNA, 112 bp, Homo sapiens
cggcagagcacgagcggatcctgcgagagatcgagagcactgacacggcctgcatcgggcccacgctcagtgctgaagctgctgaaagatggcagaagaagtggtggtagta

SEQ ID NO: 59789 - DNA, 100 bp, Homo sapiens
gcctttctccgtactgtccctgtgaaggccaagatctgtaacgctgacagtccccagacatacgatgggagagttgcagaaggtgaacaagtgctaccgg

SEQ ID NO: 59790 - DNA, 50 bp, Homo sapiens
tgcggaacaggacgccctctgatgtgacgcggcgcacggcgcggatggtg

SEQ ID NO: 59791 - DNA, 98 bp, Homo sapiens
agctatgcatgctgcttttgatgtctgacaacgtggatcgttgttttgaaactctattatcctcccagtccacaacgctgaaccgtggctggacgaat

SEQ ID NO: 59792 - DNA, 74 bp, Homo sapiens
tctccctcttctccaaaagcagtgatgtctggagtccactgcttttaaggccctgcactgaaaatgcaagctca

SEQ ID NO: 59793 - DNA, 100 bp, Homo sapiens
cagaagccatgcccctcaggctggaacttgccctgtctcctcgcagatgaggctttttagaccccgagaagaagcttttttctcaccgaatattatcaag

SEQ ID NO: 59794 - DNA, 75 bp, Homo sapiens
cggatgaacagagaaagcgacagggctttcatctgagtggcacagtaactgagctggccactgcctctgaaccag

SEQ ID NO: 59795 - DNA, 50 bp, Homo sapiens
gcggtcaccaagtacaccagctcgaagaacagggtctgttccacaaaaaa

SEQ ID NO: 59796 - DNA, 100 bp, Homo sapiens
aacatcctttgactggttagccaggtgcaaatatatacagagcttcataatcagcccaagaccacatagagcaaacatgaatgatatttcccaaaaggct

SEQ ID NO: 59797 - DNA, 100 bp, Homo sapiens
cctctgtgtcctggggccatccgagccaacggagagtggaggatgctggcgctgagaagtgatgactcggaacacaagtacagctccagcccactggagt

SEQ ID NO: 59798 - DNA, 100 bp, Homo sapiens
ttggtaaattgatcaggatttttggcctaccctccaaagaaaaggatggtgccatgacaatggtgtgaactacaagattggagagaagtgggaccgtcag

SEQ ID NO: 59799 - DNA, 100 bp, Homo sapiens
gaaaatgacccagcgtacatactgaatgatctctacatctcagactactgtgtgtggattcagaaagtcaagtcaacggcagagacttatccagagcaac

SEQ ID NO: 59800 - DNA, 73 bp, Homo sapiens
gaggcggcgccgccgggctgtggagagagaagaagaaggaggttcctgctgtgccagaaacccttaagaaaaa

SEQ ID NO: 59801 - DNA, 118 bp, Homo sapiens
aggatatgttagaaaagaggaaaatacagcgtgaattagcaaaaagggctgaacagttttttgctccactcaagcctgttagaatcaccatggaatacagctccagtgggaaggccac

SEQ ID NO: 59802 - DNA, 75 bp, Homo sapiens
cggaggtcgataagctggaactgatgtgctcttaaagttccgtacagataaaggaagagatcccagttctgatac

SEQ ID NO: 59803 - DNA, 75 bp, Homo sapiens
acgggcgagaagccctacgagtgcaacatctgcaaggtccgcttcaccaggtgcccgtggttgacacgagctgtg

SEQ ID NO: 59804 - DNA, 100 bp, Homo sapiens
aatgccaacgccgtgtctgaagcaaaagtactttgactcaggagactacaacatggccaaagccaagatgaagaataagcagctgccaagtgcaggacca

SEQ ID NO: 59805 - DNA, 101 bp, Homo sapiens
ggttgggcttctccagatgccggggctgggtccttcccaaggttgagggagtgaggattctttggacaccagcctgagagctcacggggtccatgccacta

SEQ ID NO: 59806 - DNA, 95 bp, Homo sapiens
cttgttggagtgctggtgaatcatttcaagagagaacagctgatgttccctttccactttgttgaccggctgggaaagcacgacgtgacctgcac

SEQ ID NO: 59807 - DNA, 50 bp, Homo sapiens
agagatccttcctaccctcaaatttgccaacattacaacaaaggagatgg

SEQ ID NO: 59808 - DNA, 74 bp, Homo sapiens
ggacctgctggaagggaaggaaaaacctgtatgtggaaccacctctgctgtgacttactcgaagcctcgattgg

SEQ ID NO: 59809 - DNA, 110 bp, Homo sapiens
agatgccaggaccccctgaaagcctagacatggaatcattgtagtcaatcattttccagttctcagccgctcagttgtgatcaagggacacgtggtttccgaactgccag

SEQ ID NO: 59810 - DNA, 100 bp, Homo sapiens
ggtatctactcgcgcatcaggcatgaagaagaatatctatggcaatatcgaggacctggctctcactatgttgcccaggctcgtctcaaattcctggact

SEQ ID NO: 59811 - DNA, 101 bp, Homo sapiens
cctataagcatgacaccaagttgctcatcttggcattggagcggctcaaggaagcttatagtgtgaatgctctgtcagcagatgtgctgggtcgatgccag

SEQ ID NO: 59812 - DNA, 100 bp, Homo sapiens
gagcagttttcatggatgcccctgtttctggtggttttaaaatcaaagatgggaaaatcggagaaaattgcccttccccatggccagcttgttcatggta

SEQ ID NO: 59813 - DNA, 100 bp, Homo sapiens
ccgggggcgcgggcggcggcgccggcaggaaggatcttttgccagaaatgagggcatactggcctgacgtaattcactcgtttcccaatcgcagccgctt

SEQ ID NO: 59814 - DNA, 83 bp, Homo sapiens
gaccgcgagagcatcaaactggtgtccatcgatgaggagcgggaaggcctcctgcaccctggagaccgtgtgggaagacaagc

SEQ ID NO: 59815 - DNA, 98 bp, Homo sapiens
cgggaccatggggccttccctcaggccctgcggaggtggctgggatccgcagggctcccctccttcaggaacgatgtgtattggaacattccaaaaac

SEQ ID NO: 59816 - DNA, 100 bp, Homo sapiens
atcggcgctctggctgtttcgtgaaggagagagagaaaccgtcacaggaacggggaaaaagtgcagcttgccggccgaggaggattctgtgttagaaaaa

SEQ ID NO: 59817 - DNA, 51 bp, Homo sapiens
ctacaggactgatgactgctggtattaaacatgagtggcaagtaaatggct

SEQ ID NO: 59818 - DNA, 139 bp, Homo sapiens
cgagcggtggcgtcgttgtcgccccctcctcgtcgggaagaatcgtttggtctcctgccgtgcccgaaagcaacagcccacaattgcctgcattttctttcctcttcaaaaccacttctgctccaaagaccatgaacct

SEQ ID NO: 59819 - DNA, 97 bp, Homo sapiens
cctcgccagcagccgtccggagccagccaacgagcgcctcatcatgttttacttcattgccttagctggagcacacaaacgggtggtcatccagctc

SEQ ID NO: 59820 - DNA, 90 bp, Homo sapiens
gatcctggaacaagtgtcctagatacttgccgcaaagcaaatgccattccagatggtccccgaggggacctcggaccgtcccccagaccc

SEQ ID NO: 59821 - DNA, 88 bp, Homo sapiens
tttacttcagaaagtgcatgtaggcaaccaggacaaactcactgatgaaggactcaagcagattctcaagtccaaagatttaacatct

SEQ ID NO: 59822 - DNA, 88 bp, Homo sapiens
ctgaagagccctcccaaaggatttgatacgactgccataaacaaaagctattacaatgtgatcccagatgcagtgactggttactacc

SEQ ID NO: 59823 - DNA, 100 bp, Homo sapiens
agaggacccacctgtgggtgtcagtggcgcaccatctgaaaacaacatcatgcagtggaatgcagttatatttggagttaatgttctcctcagaggtgga

SEQ ID NO: 59824 - DNA, 90 bp, Homo sapiens
caagaagtcgtagggggtgagggtggaagctgggaaacccacaggaggcaaccacactagtttaggtttaagtttttgaaactgaagtag

SEQ ID NO: 59825 - DNA, 74 bp, Homo sapiens
gctctgagcaggtgctcactgtgctgaaaacagtctctttgttggagtaccaagttcgatccatagcaagtcat

SEQ ID NO: 59826 - DNA, 90 bp, Homo sapiens
gattcgcagtggtcgcttcttctccttgatggaatggggcgagtccttgctcaagatgtatatgcaaaagacaatttaccccccttccca

SEQ ID NO: 59827 - DNA, 101 bp, Homo sapiens
gcgagccagggtggagaagagccagcccaggaggacacgctctcttcatgggccatgcccggtgaccacttttggaccaaaggcctgtgtgctgcagaacc

SEQ ID NO: 59828 - DNA, 76 bp, Homo sapiens
ctgacgctagcatcagcacatgtaggggtctaaggatgctgaaaacgccattcaacagatgggtggccagtggctt

SEQ ID NO: 59829 - DNA, 100 bp, Homo sapiens
attcaacagaataatgctacaaagacatttcgagaattttgtggacctgctgatcctttttcaaattgctgcaaacctcagcatggaacgctatgcccta

SEQ ID NO: 59830 - DNA, 75 bp, Homo sapiens
aaaatcaaaagaaacttttgcccttatcagtaacacctgagacactcctagaatatgcagagaaatggaaaactt

SEQ ID NO: 59831 - DNA, 90 bp, Homo sapiens
gtcctatcgacccagctggatcgtgtaaccagtctatgggaagtgaggtgagaagcaccagagggacaggacttctagaagttagaataa

SEQ ID NO: 59832 - DNA, 74 bp, Homo sapiens
cggaaacgccgaggaacccggctgaggcggcaggtttatgatgataaagactacaggagaattcggtttgtagg

SEQ ID NO: 59833 - DNA, 74 bp, Homo sapiens
ccacgcgttgtaattaagcctcgcacaatatgagactctccaacatgtgccttctgaccatacaaatgaaactt

SEQ ID NO: 59834 - DNA, 101 bp, Homo sapiens
aagggcagagataaagagaaaagagaaaaggagaaggataaagggaaggacaaggaattacataacatcaaacgtggatgaaattatgcagcaggaagtca

SEQ ID NO: 59835 - DNA, 75 bp, Homo sapiens
aaaattcttcagattggaaaataccacaggatggagactacgagtttgatatccgacatgaagccagtgacttcc

SEQ ID NO: 59836 - DNA, 75 bp, Homo sapiens
gccaggagccaggggcccagaaggattatatctgtccaagatgcgagtctggttttatcgaggagcttccggaag

SEQ ID NO: 59837 - DNA, 82 bp, Homo sapiens
cgcggtgaactctgtccagttttcaaaccacacaggacggctgtcctcagcgaggggccgtgcacccgctcctgagcagcgc

SEQ ID NO: 59838 - DNA, 90 bp, Homo sapiens
aaaaggcaaactcttcacctggtgtggatgaggtcaccattgtcaacattttgaccaaccgcagcaatgcacagagacaggatattgcct

SEQ ID NO: 59839 - DNA, 100 bp, Homo sapiens
atatcgcggcgacggcgggctgtcgtcacgacgacgtgcggacgcagcggcgggggctcccatgaagctgaggtcttgaagcagctggctgagaaacgag

SEQ ID NO: 59840 - DNA, 75 bp, Homo sapiens
ttggaccctcctcccaactgtaggttttgtagtgcatccctgagcatgagcacagaatgaagcggcgtttggatg

SEQ ID NO: 59841 - DNA, 74 bp, Homo sapiens
gaattggggatttgctaaacaggcactcttaaaagacccattttacatgggcttgtaccagaaacgagatcgca

SEQ ID NO: 59842 - DNA, 98 bp, Homo sapiens
cccgtcattggttacaactgagtcccaccgatgcttcaaatttaacaggtgaaaggaaagcaagccaggatggatatttacgacactcaaaccttggg

SEQ ID NO: 59843 - DNA, 75 bp, Homo sapiens
gatgtgggcagtagaacactctctccccagaaatccaacttctcaaggggaacgcccttttgcttgtgactggca

SEQ ID NO: 59844 - DNA, 50 bp, Homo sapiens
caaataactgccagaactacttgactgagacagggtctcactctgtcacc

SEQ ID NO: 59845 - DNA, 74 bp, Homo sapiens
ccgccacaccacgctgagcctcctgaagcgggccaaggtgcacatcaagatgaaggatttgggggcagagcact

SEQ ID NO: 59846 - DNA, 74 bp, Homo sapiens
cgagaagcagcggctgcagaatgagcccgcggcgccatggctcacgtcggctcccgcaagcgctcgaggagtcg

SEQ ID NO: 59847 - DNA, 100 bp, Homo sapiens
ctgaagatgaggttgaaaaacctgacttttatcatcatattgataatctcaggagaactctatgcagaagattcttcagaaaagtgtgggcctcctccac

SEQ ID NO: 59848 - DNA, 100 bp, Homo sapiens
ctgggattcagacaccgcaagctgctttcggaagggcttcaggagggggttgctgcgtggttaaaaaaaatatttggagatcatcctattccacagtatg

SEQ ID NO: 59849 - DNA, 75 bp, Homo sapiens
agacgggccggcccagagctcccgggtcgtctttcgtgtggccgcgaggttatcaagttatacccaaccagcagc

SEQ ID NO: 59850 - DNA, 100 bp, Homo sapiens
gccagggctgcgttcccgtctcgcgtcccggactgagaagttcggatcagggactatccacggtacctgtttgagatccgtgactggcggctaatgggtc

SEQ ID NO: 59851 - DNA, 75 bp, Homo sapiens
aatcatcgaggcatgggggtccacactgcaatgtttttgtggaacatggcaagtatatcgcgtcaacacagcgac

SEQ ID NO: 59852 - DNA, 87 bp, Homo sapiens
gcggcggagtgtaggaagaggcactgctgagggggcgcgaggggaacggaggccagagctgcgggaagaactgaacctggcagtgct

SEQ ID NO: 59853 - DNA, 102 bp, Homo sapiens
tcccggtggttggggtggtgacggaggacgatgaggcgcagccaacaagtcccaaatttggaaaagctgactcatatgaaaagctggaaaaactaggggaag

SEQ ID NO: 59854 - DNA, 100 bp, Homo sapiens
cgactgtatgatcgtggatgtcccggatgctgcggggcgtctctggccgagcctctttttgtggaaaacgacagcagcagcagtggcctggaagacgcca

SEQ ID NO: 59855 - DNA, 100 bp, Homo sapiens
agacaataaggttctgggaacacataaagattacacagatgaatcttgcactttcaagatatcattgcgaaatttccggtccatcttatcatgggaatta

SEQ ID NO: 59856 - DNA, 100 bp, Homo sapiens
ggctaacttggattcataaacttcacaaatttcttggatcagccaaaatgaagtttaatccctttgtgacttccgaccgaagcaagaatcgcaaaaggca

SEQ ID NO: 59857 - DNA, 140 bp, Homo sapiens
ctgacatcgctaccatggtctccggcagcagcggcctcgccgccgcccgtctcctgtcgcgcagcttcctccgtcagtaacagatccaagagatggaaagagagtagcgctcaaaaagatgcccaacgtcttccagaatc

SEQ ID NO: 59858 - DNA, 74 bp, Homo sapiens
agcgagccattctaccttgtatcaagggagcatcagatccatgctgctgctgactcggagccccacagcttggc

SEQ ID NO: 59859 - DNA, 75 bp, Homo sapiens
ggtacgggccatgttggccttcctgcagaagcacctcgtcccatgaagctgaggtcttgaagcagctggctgaga

SEQ ID NO: 59860 - DNA, 50 bp, Homo sapiens
tacaaggccttctacattaccggcatagcccttttgtacctgcagttgta

SEQ ID NO: 59861 - DNA, 88 bp, Homo sapiens
aaggtgaagccaagaacagcattactgattcccaaatggatgatgttgaagttgtttatacaattgggatggaggactaaagagagca

SEQ ID NO: 59862 - DNA, 75 bp, Homo sapiens
gggcgcgctgccccgcgggtgtgcctgagcctccgcgccccgcaggccctggagttttgcggcctccaggtggtg

SEQ ID NO: 59863 - DNA, 82 bp, Homo sapiens
tttcatgacatatgaatggctgaaaaatatcttcactccggagggaaagagttccagttcctagcagatttaatagacgagt

SEQ ID NO: 59864 - DNA, 100 bp, Homo sapiens
tcaaaagttaggattgaagcctgcatgtgggtgatttgtggagctatgatttcttcagtggtgaatttgtggtgtcacctgaaccagacacaagtgtcca

SEQ ID NO: 59865 - DNA, 75 bp, Homo sapiens
ttgcaacgtcatcctccacagctaaggtcgcgtctccttcttcacctcggggtccgagaacctacaccgcgtgga

SEQ ID NO: 59866 - DNA, 75 bp, Homo sapiens
agaggaaagaggcagcagatcccctagcatctaaacttaacaagatatctccggagcatttggataatgtgacag

SEQ ID NO: 59867 - DNA, 87 bp, Homo sapiens
tctgcgggatcttcaaccacctcgagcggctgctggacgaaggtgtattttgattacatgagaagctggatccaaatgctacagcaa

SEQ ID NO: 59868 - DNA, 74 bp, Homo sapiens
ctggatcagatctgaatccagaggctctcggaggaagagctcagggtctattctggataagcaggttttgtgaa

SEQ ID NO: 59869 - DNA, 74 bp, Homo sapiens
gggaggtgcccctgcgttgtaccatccgcctgtgggacacctaccagaaacctgctccaccaaaacctgaaccc

SEQ ID NO: 59870 - DNA, 50 bp, Homo sapiens
agccattgctgaaagcctgaatgaaaatatgcccaggttaccaacaatcc

SEQ ID NO: 59871 - DNA, 99 bp, Homo sapiens
ggatatgggagctgtggccctcagaatttaaacttaaggaaagagtgggaaagtgaggaaatgacagactttttcattgaatgatgaggacacagcagc

SEQ ID NO: 59872 - DNA, 100 bp, Homo sapiens
ggcaccaagatgataccctgtgacttcctcatcccggtccagacccagcaccccatacggaagggtctgcatcacaagccattccaggttgctgaggtct

SEQ ID NO: 59873 - DNA, 90 bp, Homo sapiens
agcatagctattcctgttgatggtgatgaagacagcatcaacaacagcaacttgtgattggcggtgaccggatattcagttgcacatccc

SEQ ID NO: 59874 - DNA, 50 bp, Homo sapiens
ctctgggagggtggctgttaagctccccgcagccaccgccacccattgga

SEQ ID NO: 59875 - DNA, 73 bp, Homo sapiens
ttttctttactacctcatgaacagaaggaaatctgaaatagagtactatgctatgttggctaaaactggtgtc

SEQ ID NO: 59876 - DNA, 50 bp, Homo sapiens
cacctggccccgctacagcaaaccagtcctcctccgcctcctcctctctg

SEQ ID NO: 59877 - DNA, 83 bp, Homo sapiens
cctgcccccatgcccccacgtgcccatggaccgacacaccactcttcctgttggcccaagaagatcctcaggaacgggaacgt

SEQ ID NO: 59878 - DNA, 100 bp, Homo sapiens
caggactggctgatactacatattccagatgagttccacgggctggatgaagccactctactgcgggctctgcaggccctacagcaggagcacaaggccg

SEQ ID NO: 59879 - DNA, 82 bp, Homo sapiens
ccagcatgaagaccccggcggacacagggaaagcaggcaggatgggagagtcgccgatagaaccacctcttccctgcctcct

SEQ ID NO: 59880 - DNA, 73 bp, Homo sapiens
ttaaacctgaaagtggtagcaagattctctgaagttacacccatcacagaattttcatagagctggactattg

SEQ ID NO: 59881 - DNA, 98 bp, Homo sapiens
cccccacccaccgcgccggcgctcccttgtcacgcctcgggaagcgcgcacctgccaagcaggtggagattttcattttacctttatgtatttaccta

SEQ ID NO: 59882 - DNA, 80 bp, Homo sapiens
gctgagtgtcttgtcatgctagcactgcattaagtgatgcatacagtgacaaccatgagtggaaaaaactaattatggtt

SEQ ID NO: 59883 - DNA, 74 bp, Homo sapiens
atcagcggaagaccaaagaggatgagaaggacgacaagcccatccgagggagcgtggctgtgctgtctgcagag

SEQ ID NO: 59884 - DNA, 103 bp, Homo sapiens
cgccgccatcctcggcgcgactcgcttctttcggttctacctgggagaatccaccgccatccgccaccatggtgtgatgaatgcagactctgctaccattttg

SEQ ID NO: 59885 - DNA, 75 bp, Homo sapiens
agcgcctccagcgagaagttgagggagaaaggcgggcccgggaacaggtactccaaagattcaggtttactcacg

SEQ ID NO: 59886 - DNA, 75 bp, Homo sapiens
ggaaagctggaaacatagtccggttcaaaccttgtactactcagctgatcacaagctgcttgatgggaacctact

SEQ ID NO: 59887 - DNA, 82 bp, Homo sapiens
ccataaaaaatcattactggtaccagatgtacatagatgatttaccaatatgggataatccgcaagatgggattatggtgaa

SEQ ID NO: 59888 - DNA, 98 bp, Homo sapiens
atcatcaaacagctatggtgatgattagagacatactaatgtacatggttgggggccgtcccgctcctaaggcaggaagatggtggccgcaaagaaga

SEQ ID NO: 59889 - DNA, 90 bp, Homo sapiens
ctgtgtggccatctcctcgctgggcatgatcgaggccacagcccaggtcacagtgaaagccatccgggtgacctgcataggttcctgcgg

SEQ ID NO: 59890 - DNA, 113 bp, Homo sapiens
atgagatgtatgactatcttctccatggccacaggttgaagcagcccgaagactgcctggatgaactgtccacgctgcttttatgagctgtaacactcaccgcgaagatctgc

SEQ ID NO: 59891 - DNA, 75 bp, Homo sapiens
ccccgcccgcgccggaagagccacgccggccaggtcagagcagcccaccatgggatggggagggggtggaggctg

SEQ ID NO: 59892 - DNA, 50 bp, Homo sapiens
atggggcttgtgattttcctccacgttatgggagagctgttcattcccag

SEQ ID NO: 59893 - DNA, 50 bp, Homo sapiens
tgctagaggcaaacttttgtctctctcgaaattgaagccaaggaagcttg

SEQ ID NO: 59894 - DNA, 51 bp, Homo sapiens
tggtgaaactaaagctgaagagacttattcgtctaatggaagagatcatga

SEQ ID NO: 59895 - DNA, 100 bp, Homo sapiens
gaggacgccagttactccacggaaagcagcttcagcagcactccagctcagcaaaacccagcagctcagattcctgccaggcagcgggagattgaaatga

SEQ ID NO: 59896 - DNA, 83 bp, Homo sapiens
ggcaggcgtgcggaggacactcctgcgaccaggcttgggcactgtttaaaggaaagttccgagaaggcatcgacaagccggac

SEQ ID NO: 59897 - DNA, 95 bp, Homo sapiens
aatcacttaaaggagtggacattgctagcaatgagctcccaaagccatccaggtctcaccaacggctttgggggtgcgaggagcgagcaggagcc

SEQ ID NO: 59898 - DNA, 73 bp, Homo sapiens
tgccagaaatttgaacaactttccgaatctgcaaaagaagaatccagggcctgaaaacccagaatgaacttgt

SEQ ID NO: 59899 - DNA, 100 bp, Homo sapiens
cgaggacacagccctgtcagaggcgagtgagaaggacgaaggggactcggatgaaggtggggtggaagacaacccgtgagtattacaccttcatgtgggt

SEQ ID NO: 59900 - DNA, 100 bp, Homo sapiens
tcgttttttgccgcccaagctggagcacggaaaatctacgcggtggaggccagcaccatggcccagcacgctgaggtcctggaccggatcaaaggctcac

SEQ ID NO: 59901 - DNA, 100 bp, Homo sapiens
cagattcgcagtggtcgcttcttctccttgcaagaaggctcactttgtgctcaacattgcctgaataacttattgcaaggagaatattttagccctgtgg

SEQ ID NO: 59902 - DNA, 100 bp, Homo sapiens
aataatgacaccctgggttctgtacgcactgaattcatgaacccccacctcatcagtgcaggcctgagtgttccttccagcatgtcggagggggagtccc

SEQ ID NO: 59903 - DNA, 75 bp, Homo sapiens
cagacatcaccgacttgttaaaagaagcccggaagcaggagatcattaagaccacggagcagctcatcgaggccg

SEQ ID NO: 59904 - DNA, 100 bp, Homo sapiens
gaagatgacaaggcctaccatcgtttcttcctgcctttgggccgtcaggcagttggttgggacccgctccaaccctcgctggtggaggccattgtcttgc

SEQ ID NO: 59905 - DNA, 89 bp, Homo sapiens
agcctgctgcgcaggataaaaggcaaactcttcacctggtgcttctgtacacgtctctccctgacttctgccataagtttctacccggc

SEQ ID NO: 59906 - DNA, 101 bp, Homo sapiens
ttcagaagagccaaggaataaacatgcaatgaacccaaaagggatatgatgatgcctatagatttgggggaaaagacaatatatttagtttcattctttga

SEQ ID NO: 59907 - DNA, 88 bp, Homo sapiens
acttcgcattttggcattgacatttaattttagggtcctttatatagaagggagagtagaggatttttctccaacaattatagaagat

SEQ ID NO: 59908 - DNA, 50 bp, Homo sapiens
gacagagcagtggagtatcttttaatgatgacggtcgaaccaaacccatt

SEQ ID NO: 59909 - DNA, 100 bp, Homo sapiens
cgatacgctcctcagcggcggcgccagctcctgtgggtgcggcgctgggctccatggtgggcctcatgacctacgggcggcgccaattccagtccctgga

SEQ ID NO: 59910 - DNA, 109 bp, Homo sapiens
agaaaacaaaggtagaacatggaggatcgtcaggctctaaacaaaattctgtctccttaaccaaaactgccaagaaaggcttggaattgaaacaaaacctgatagaaga

SEQ ID NO: 59911 - DNA, 98 bp, Homo sapiens
gccagcgccgcgcccggggccgtgcgctctcgggccactcggccgcagaacgaagtcggcctactggagttcttccaaaatgtgataaaagaaactag

SEQ ID NO: 59912 - DNA, 100 bp, Homo sapiens
cctcaagaaagtcctgtgccggcagctgtggccaacagcaacagagagagtccagagctcaggccccggggcctccagcggcaccagcggagaccacggt

SEQ ID NO: 59913 - DNA, 100 bp, Homo sapiens
ttttatttaccagaattcctgttcaattccaacaactttgatctagaactgataaatttcaaacggaagagagtggcagcatttagaaagaatctaattg

SEQ ID NO: 59914 - DNA, 78 bp, Homo sapiens
cacctgagtcaccagttaactatggtagcccacccagcattggcatctccttggaaacaatgccatctttgaatgtga

SEQ ID NO: 59915 - DNA, 100 bp, Homo sapiens
ttgccagtgggacgtctgagactttctccttcaagtacttggcagatcactctcttagcagattagtgatgatgaaccaggttatgaccttgatttattt

SEQ ID NO: 59916 - DNA, 90 bp, Homo sapiens
gaatatggctatcctactctcctactcagaaagaggtatctcattcagttgctaaacttatattagttaatttccactggcaagtttcag

SEQ ID NO: 59917 - DNA, 102 bp, Homo sapiens
ggattttcagggagatttggaaaaaccgctatgtggtgctgaaaggggaccagctctacatctctgagaaggaggaagtgctggactccctggtcagcaatg

SEQ ID NO: 59918 - DNA, 74 bp, Homo sapiens
tggatcggcatctagtctttccgcttcttgaatttctctctgtaaaggagcattagtgccagcagtagttccca

SEQ ID NO: 59919 - DNA, 82 bp, Homo sapiens
ctttgctacattggaacagggccgcctctcaagattacctaggaacagtacgatttggggttatcacaaataaacatcttgc

SEQ ID NO: 59920 - DNA, 74 bp, Homo sapiens
tggttacacagcagtacctctttgaccgccttgcccacgagataatcttgtgccgtggaaatcagaagggcaaa

SEQ ID NO: 59921 - DNA, 86 bp, Homo sapiens
ctcagagaaacctctacagagatgtgatgctggaaaacttccagaacctggcctcactaggctacatccagaagatcaagtcggga

SEQ ID NO: 59922 - DNA, 83 bp, Homo sapiens
ctgatctacttagtcttccttttcggcttcgctgtagggtgcatgagctggaggagatggtgaaggatcaggagaccacggcc

SEQ ID NO: 59923 - DNA, 100 bp, Homo sapiens
ggagaggcctggggcatgcagtgtgccctctgccccctgaaggattcaggaagccaccattcttcagagggcaatgaaggcacagaaatggaagtaccag

SEQ ID NO: 59924 - DNA, 89 bp, Homo sapiens
gacagctaaccacagggcaggccatgggcaagatatctcagtgttctccgctctcataggtcaggaggacagtcagtgacccacaccgg

SEQ ID NO: 59925 - DNA, 75 bp, Homo sapiens
tatgtcctcatggggcaccagctcactgccaccaagggcattcttcttgagcaccgagaaaaagaatttggagac

SEQ ID NO: 59926 - DNA, 119 bp, Homo sapiens
ccagccgtggtgagcccaatggtggggaacacagcgcccccatcttccctctcctcccagcttgcaggcttagacatgcttcagcttatcaacaaccaagacagtgacttccctggcct

SEQ ID NO: 59927 - DNA, 78 bp, Homo sapiens
aggcggaccatgataatttccccagagcgtcttgatccttttgcagatgctataataataggcggagtcgatctggaa

SEQ ID NO: 59928 - DNA, 100 bp, Homo sapiens
ttcgtcataagaccgcgaccagacaggcggcgccatcttcgaacttagacttccggaaggactttggcgagggagctggagtggctgctggagattaacc

SEQ ID NO: 59929 - DNA, 75 bp, Homo sapiens
cccgggccatgtcggtgggcgagctctacagccagacgacaggatctgctcgccacccttcatggagctcacgag

SEQ ID NO: 59930 - DNA, 82 bp, Homo sapiens
ctccagaaaaaactacactgtctactgccaagcaacgcacctcttgctttttcctccaaagtatgttatgttaagtttcgtg

SEQ ID NO: 59931 - DNA, 98 bp, Homo sapiens
cctggaacatcacatctgtacgttgcaatctgtggatcagctacgagaatgctgcttctaaattacttgggcaaaattgggtccaaaacgcctttgat

SEQ ID NO: 59932 - DNA, 83 bp, Homo sapiens
cggaagaaaattgcttctcgcatgattgaatgcctaagccttatgtttgatcatcggccaaggtcctggcgagaactgcctct

SEQ ID NO: 59933 - DNA, 123 bp, Homo sapiens
ctgggagaagagggtcacaggctgcccaccctttgatgaacacaagtgtctggctgagggaaataaaagccagggatccatctttgtccggatacacgccccgtggcaggtgctggccagaga

SEQ ID NO: 59934 - DNA, 51 bp, Homo sapiens
tatggcctaccatatgttccaaatactgaggcaagtgaggcctatctggtt

SEQ ID NO: 59935 - DNA, 50 bp, Homo sapiens
accgtcatattccacccattactaagccttggtggaggaccagatgatgc

SEQ ID NO: 59936 - DNA, 50 bp, Homo sapiens
ccgtggtccttctccatattcgagtctggctcttgctgattgaattcctt

SEQ ID NO: 59937 - DNA, 74 bp, Homo sapiens
gccgcagcgaggagaagatctcggactcggagaccccatatcatgtgaacctcctcctggctggctatgatgag

SEQ ID NO: 59938 - DNA, 100 bp, Homo sapiens
agacaggcgctgcccctgctggcctctgcctgcccagggccgagaactactggtggcgtggccagaacacacggacgctgtgtgtggggcccttccctcg

SEQ ID NO: 59939 - DNA, 98 bp, Homo sapiens
tgtgcaagtattccagacattatggaacaacttcagttcattggggttaaggagatctacagaccagtcacgatccactagttcctggactatgggaa

SEQ ID NO: 59940 - DNA, 75 bp, Homo sapiens
cggccatcgtcatcctgctgctgaagatctggaagacgcgctcctgcgccgatctaaagcttaaggactatggag

SEQ ID NO: 59941 - DNA, 100 bp, Homo sapiens
agtaaagatggaaagccagaaccccccaactggggattgagaagaaaaagtggatgggaagcttttggaaattttagcattcaggtgccaggaatgcaga

SEQ ID NO: 59942 - DNA, 98 bp, Homo sapiens
accctcactggagaatccagaggtttacccaaggtccagcctagcccctaggcaccatgtcggacagtgatctaggtgaggacgaaggcctcctctcc

SEQ ID NO: 59943 - DNA, 100 bp, Homo sapiens
cttggaatcaaagataaatccaaatactgcatatcagaaacaacagcggatctgaaaagaacaattgctgtccttctggatgacattttgcaacgattgg

SEQ ID NO: 59944 - DNA, 97 bp, Homo sapiens
gaacgagtgtgatattactgaatattgtactggagactctggtcagaaagtctttgcttcgcgcaaagagttgttggaatatgacctacagcagagg

SEQ ID NO: 59945 - DNA, 75 bp, Homo sapiens
ctgtgatccaagcggcagtgatttgcctcaagaaacctctgtagaggagcaggatgcaaccgacaggctgtggcc

SEQ ID NO: 59946 - DNA, 98 bp, Homo sapiens
tatcaggggatgccagtaagcgaaaggctattgttgcagaccggagagacaagagagacacctccaacttcgacaaagagttcaccagacagcctgtg

SEQ ID NO: 59947 - DNA, 98 bp, Homo sapiens
tacaaagaccacttttcccactacctgcagccttttatcacccaggtatatttgcttacttaaactaccatgttcctcgaacgagacgagaaatcctg

SEQ ID NO: 59948 - DNA, 82 bp, Homo sapiens
gtgggtgtaatacatcatgaactgcaggtgtgtgctgtatttatggagtttaaagattaatcatcccaaaacattgtttctg

SEQ ID NO: 59949 - DNA, 75 bp, Homo sapiens
gagagatagaggcagcagaagccagggcagctgaaagacagagaccttcaggaactgcaagcacatgttgaccag

SEQ ID NO: 59950 - DNA, 88 bp, Homo sapiens
caagcagaagaagaaggtgtactcctttctattttaaagagccaagcctcagagaatttggagcaagaggtggtggtggccttccccc

SEQ ID NO: 59951 - DNA, 75 bp, Homo sapiens
catgccaacattccagttttttaagaagggacaaaaggaggtatttaactgaaaggaatatctgcttcactgttg

SEQ ID NO: 59952 - DNA, 98 bp, Homo sapiens
agaataatttctttctcgctgatcgcctaacttctactgacgaagcttggaagttgcagaagttgtgttggtgttgaagaggagaaggctgctgacat

SEQ ID NO: 59953 - DNA, 90 bp, Homo sapiens
agccaaattgctcaactaagaccaagtcctcgctggactgctcagggtgccagacctcatctaatgaagaagttagtactattattatct

SEQ ID NO: 59954 - DNA, 83 bp, Homo sapiens
aagagttgtcccagctcggcccgcgggggagccccgggagccgcacgggactggtgattgcagctggaagtgcccatgaccga

SEQ ID NO: 59955 - DNA, 100 bp, Homo sapiens
caagagcatacagcatcatctgaggacggctcaggagcatgacaagcgagaccctgtggtggcttattactgagtatgcatcaacaattgtgtcaggaac

SEQ ID NO: 59956 - DNA, 50 bp, Homo sapiens
aagccgtgtggacagtctgaaatcaatggccacagatgtctttaattcca

SEQ ID NO: 59957 - DNA, 73 bp, Homo sapiens
ctgtaaaagccccgcctctgccttcggataggagtttgctataaaatgggagttctggttgtactcactgttc

SEQ ID NO: 59958 - DNA, 75 bp, Homo sapiens
caccccgactcaacgtgagacgcaccgcccggactcaccatgggcagcagctggatgaattcctacagctagctg

SEQ ID NO: 59959 - DNA, 104 bp, Homo sapiens
gggagacgagaagcctgaaaagtcgcagcgagctggagccgccggaggtcagatgtaccaacagtaccagcaacaggccggctatggtgcacagcagccgcagg

SEQ ID NO: 59960 - DNA, 100 bp, Homo sapiens
cgggcctcccgtttctggctccgggctgagcttcctggagaagaggaaggagaactacgatgacccgcacaaaacccctgcctccccagttgtccacatc

SEQ ID NO: 59961 - DNA, 50 bp, Homo sapiens
caacaagtttgcctccttcatagacaagctctgtggctgtgggctgctgg

SEQ ID NO: 59962 - DNA, 82 bp, Homo sapiens
aaaggaatcgtatcgtatgtccgctatccagaacctccactctttcggagaacaaggggtctgtggaaatcatgagaaagga

SEQ ID NO: 59963 - DNA, 75 bp, Homo sapiens
aggcactgctttttcatgacggatctatcttgggatcccatggctttctttactgggctctggggccccttcacc

SEQ ID NO: 59964 - DNA, 100 bp, Homo sapiens
gtcgtggccggaggagtctcagagctgtcagaaagtaccaaatatgccccaacagcggcaagaccagcatcatcagagtgccatgatgcacccagcgtca

SEQ ID NO: 59965 - DNA, 89 bp, Homo sapiens
tcatgtattgaagaattccaatcccagttcatttttgcctccatccctgggatttgctggtagaagaaagggaatcagcgctgactgag

SEQ ID NO: 59966 - DNA, 50 bp, Homo sapiens
atagactctcccatcccaacatccttagatggctcaatcacaaaggagtg

SEQ ID NO: 59967 - DNA, 112 bp, Homo sapiens
cacgcacgggatccagagcgccgcgcacttcgtcatgttcttcgcgccctggattttttatcaagcagaaatgcatcgaacaacgagaatcaagatcactgagctaaatccc

SEQ ID NO: 59968 - DNA, 100 bp, Homo sapiens
ccgggcttgggctgcgtggagaatactttttgcgatgcctactggagactttgagtacttcgactccgtggacatctgtaaggtgcactcggactggcag

SEQ ID NO: 59969 - DNA, 101 bp, Homo sapiens
cgactctggcctctgaaacactaccactgctggcgctgaccttcatcacagacaacagcctggtggcagcgggccgcatcatcgagtgcacacactgtggc

SEQ ID NO: 59970 - DNA, 100 bp, Homo sapiens
tttggctacacacttatagatcttctgcactgtttacaggcacagatctgctgatttgggtcctactttaatgacaagacctggacaaccagcacttacc

SEQ ID NO: 59971 - DNA, 96 bp, Homo sapiens
ccctcgtgctcggcttcctgcgcgataaccaactctcagaggtggccaataagttcgccaaagcgacaggagcttagagacgggggttcaccatgt

SEQ ID NO: 59972 - DNA, 75 bp, Homo sapiens
cggtgaactctgtccagttttcaaaccacacaggaaaacgaagccccctcctgtattgacagctgggaattgtgg

SEQ ID NO: 59973 - DNA, 75 bp, Homo sapiens
aaaaaaaagaggaattccagaagggccaccccgacctccaagggcagcctgttttgtttggctatgccaccacag

SEQ ID NO: 59974 - DNA, 100 bp, Homo sapiens
cggacgctcgcctgccggctgagcaaatgaagctcgtgaccgagaacctgaaggaggaaccaatggaaagcgggaaggagaaggcaacctgagtgcccag

SEQ ID NO: 59975 - DNA, 100 bp, Homo sapiens
cccgagaagaagttgaggcgctatgataagttctgaacgtcgaaaagaaaagtctcgagatgcagccagatctcggcgaagtaaagaatctgaagttttt

SEQ ID NO: 59976 - DNA, 100 bp, Homo sapiens
agtttttgtttcaaaagaaacatgttggaagatcaaaggcacagagatgaccttggatttagactcatctccgaacaggtcagccatcacccaccaatca

SEQ ID NO: 59977 - DNA, 97 bp, Homo sapiens
ctgggccggagcagccgcgggcgcccgaggggccgagcgaggttccgtggggaccccactgcctggagtacaggtgcgcattgtctcagaaaaccca

SEQ ID NO: 59978 - DNA, 100 bp, Homo sapiens
ccgcgggaaaggcgcctatcaggaccgcgacaagccagcccagatccgcttcagcaacatttccgccgccaaagggatgatcatggtgattttactgctg

SEQ ID NO: 59979 - DNA, 87 bp, Homo sapiens
atgttatctccagatgccgcgcaactgtctgatctcagttcatgctatccagtcagttcgctgctattcccatgggtcacaggagac

SEQ ID NO: 59980 - DNA, 75 bp, Homo sapiens
acctatcctccttcaggaccaacgaaatctactttcttcaatgtgttaaccaatagtcaggcttcagcagaaaac

SEQ ID NO: 59981 - DNA, 100 bp, Homo sapiens
tcatccagatggtccccgagttcgctgccagccccaagaaggagaccctcatccagctgatgcccttcttcgtgtcagactatgatgactggagaccgtc

SEQ ID NO: 59982 - DNA, 98 bp, Homo sapiens
tgcgtgcccctcacctggcgctgcgacagggacttggactgcagcgatggcagcgatgaggaggagtgcaggtgaatcctggttctttcgttggctac

SEQ ID NO: 59983 - DNA, 100 bp, Homo sapiens
gtggtgaaggagtgtgtgcagcggtccaactggcccaccttcaacactccctctaagcacccagacctctagtggcagctccaccctatccaagaagagg

SEQ ID NO: 59984 - DNA, 97 bp, Homo sapiens
tggacagacggccaagtctatggagccaagtttgtggcctcccaccctatccaaatgtaccaggtgcacacatcttgaccaactcagcagcaaggtg

SEQ ID NO: 59985 - DNA, 100 bp, Homo sapiens
ttcaccgtgtacctgggctcgagcctgcacatgaagttacagaatgtctgaaggggacagtgtgggagaatccgtccatgggaaaccttcggtggtgtac

SEQ ID NO: 59986 - DNA, 100 bp, Homo sapiens
gcggaagaccaaagaggatgagaaggacgacaagcccatccgagaccctgactaaagcttgaaatgctacatttccaaggtgaagatgtgtgggcacatg

SEQ ID NO: 59987 - DNA, 75 bp, Homo sapiens
atctcattgaagcttggaattacatagctggaaaggatcttacagggacttcactgtgactttgcttgcctgatg

SEQ ID NO: 59988 - DNA, 83 bp, Homo sapiens
ccgagggcaccaaggcggtcaccaagtacaccagctcgaattggttgaatctggcgatgtggaacccatggatatggagggct

SEQ ID NO: 59989 - DNA, 74 bp, Homo sapiens
cattgttgatgttcagcgtgtattagaggtctaggctgtatagaagacaatgaaatatttgacaatgcaatggc

SEQ ID NO: 59990 - DNA, 75 bp, Homo sapiens
aaaagaagcagttcctgatgttacaaatgaacaaggatctcccagaacaggccgcccgcctgaagaaactacaag

SEQ ID NO: 59991 - DNA, 50 bp, Homo sapiens
accttgtgctccaggctgccccataataaatgggggctccggaggtggcg

SEQ ID NO: 59992 - DNA, 83 bp, Homo sapiens
tagccctctacttttcaagacaccaagtgagaggccaaccagtgcaagaagaaacacacgctgctgtgccccgactttgcccg

SEQ ID NO: 59993 - DNA, 75 bp, Homo sapiens
cctactctggggcttcctgctccagctggtggggtggaagacaacccgtgagtattacaccttcatgtgggttac

SEQ ID NO: 59994 - DNA, 100 bp, Homo sapiens
aaggattccaagtaactcttatttgggtggtagatctctgtagaaatgtaaaagaaagaataacaagggaatgcaaagagaagggtgttcagtttgctcc

SEQ ID NO: 59995 - DNA, 98 bp, Homo sapiens
cccaccgccgcccgccgggaggaccgagcctaagagggcagccgcctgaaggaacgcgacggcggcgcccgcagcaggggaacaggaacctgataaag

SEQ ID NO: 59996 - DNA, 100 bp, Homo sapiens
cgccaaatatgacttcaaagctactgcagacgacgagctgagcttcaaaaggggggacatcctcaaggttgggggccgtcccgctcctaaggcaggaaga

SEQ ID NO: 59997 - DNA, 98 bp, Homo sapiens
aagaacagtacagtattaccttgtcggatggcagttcctgatctatgtggtgaatcttggaagcaaccagtaccttttctctgtcatagtggatccta

SEQ ID NO: 59998 - DNA, 75 bp, Homo sapiens
ccctggcaaggcagttggagagtgccattgaagatgcgaggaggcaggtggaacgtgtgatcaccattatgcaga

SEQ ID NO: 59999 - DNA, 75 bp, Homo sapiens
ggcgtcttggcccgggcagcagtggcggcagcgcccgagagagaaggagctggcaaacagccctgactgtcccca

SEQ ID NO: 60000 - DNA, 100 bp, Homo sapiens
gtccgtaatcagtgacgaggtccgctacgtaaatccctttgcggcgggatgaagtcattgctgtttccgaaaaggtgattgtgaagcttgaagacctggt

SEQ ID NO: 60001 - DNA, 80 bp, Homo sapiens
tggacctgcggccgcccgtgtgtgacgtcagcaaattgtggctactaatttgccccctgaagatcaagatggctctgggg

SEQ ID NO: 60002 - DNA, 75 bp, Homo sapiens
ccttttgaggatcagacatcactgggcattgacactgagaggcccattctgcaagtggacagctgtgtctttgct

SEQ ID NO: 60003 - DNA, 48 bp, Homo sapiens
tgcactgaaatctaaggatcggaaagatcctgtggtattgtggaaatt

SEQ ID NO: 60004 - DNA, 108 bp, Homo sapiens
gatctgtgctgaccacaggaattggatctactagtgcaggtagtgggcagcagtcagtgacaggtgtaacctctgtggatgacagcaacagttactggaggatacggg

SEQ ID NO: 60005 - DNA, 86 bp, Homo sapiens
gctgagtgtgccacacaggtagccctggacggcattcagtgttttggacagtcattttgtttactcattcagccctgttgcaggtc

SEQ ID NO: 60006 - DNA, 82 bp, Homo sapiens
gaacggaggcctgtgcgcccacacacggtcgaggagaggccccctttcatccctgaaggagtggtggctcgcaggaagagga

SEQ ID NO: 60007 - DNA, 50 bp, Homo sapiens
cttcggcatgtccttcgcctgccagtctgctgagcttgcaagacctctgc

SEQ ID NO: 60008 - DNA, 107 bp, Homo sapiens
cttcttttgagcagttggcactacccgtcttgaggaatgaaccgtggagcatgcaacacatcccggcactgttttcggccttctgtggcctcttggtcgccctttct

SEQ ID NO: 60009 - DNA, 75 bp, Homo sapiens
ccggagagagccgtaggcaggaccccgggacaccctggaagccaggaaatgatgaagacactgaggctcagagag

SEQ ID NO: 60010 - DNA, 75 bp, Homo sapiens
agcaaggtcaatatgcagaaaatgctcccagcttggcagcagcatgatgtacaagaactatgcagagtcatgttt

SEQ ID NO: 60011 - DNA, 78 bp, Homo sapiens
ttggcatggcctgtgccatcagtatcttaatgaaggcagctgagtatgtcccagagaaggtgaagaaagcggaaaaga

SEQ ID NO: 60012 - DNA, 100 bp, Homo sapiens
cgctcttcctctctcagctggtgttcgtgattgggatcaaccagacggaaaacccgggtcgggtgtgctgacagccggctgttaagccctgcctgccccg

SEQ ID NO: 60013 - DNA, 89 bp, Homo sapiens
gggacgggggcagattgccttcgacgacttcatccagggctgcatcgtcctgcagccacaagtatatggttatgatgacttgcagatgc

SEQ ID NO: 60014 - DNA, 78 bp, Homo sapiens
tggactggacagcagtggcgtccgcttttctctaaggaacccggagcatcagatccatgctgctgctgactcggagcc

SEQ ID NO: 60015 - DNA, 75 bp, Homo sapiens
cctgggatccgcaggttccctacacggtctcctgggtcaagtggtggtgaccgcggtggcttcaaaaattttggt

SEQ ID NO: 60016 - DNA, 98 bp, Homo sapiens
aggtcctgaaaaagaaaatgtcaggactgtggtgaggacagtaactctctccaccaaacaagctagtgatgacctggaacttctctaccacatcccag

SEQ ID NO: 60017 - DNA, 100 bp, Homo sapiens
accatgtccgggaggcgcttccacctctccaccaccgaccgcgtcatcaaagggggaaatttgcagtggtgagaaaatgtataaagaaagattctgggaa

SEQ ID NO: 60018 - DNA, 90 bp, Homo sapiens
aaaacatcggaaaccgtcaagtacctgacgcggggcaagattctgctgtgcacaggttacgagaagtttctgagaagctgaacaaatata

SEQ ID NO: 60019 - DNA, 83 bp, Homo sapiens
gtaccgggttcatctctctagggagtgccagacagtgggcgcagtgtgtatgtacagagaaccatcgctacatgaaattggag

SEQ ID NO: 60020 - DNA, 50 bp, Homo sapiens
caaggcctgttggtccatccagagtgattctctcgggcctagccgtcctt

SEQ ID NO: 60021 - DNA, 82 bp, Homo sapiens
gggccgctgaataagcttccaaaatgatgggggatatgagactttctactcggaatatcctgagtgttgcgtggatgtaaaa

SEQ ID NO: 60022 - DNA, 75 bp, Homo sapiens
gaagaatccccccgaaaggaccccccagatgcacaaagcagggtcatcagaagcctctcgattcaaaagatgata

SEQ ID NO: 60023 - DNA, 82 bp, Homo sapiens
ttcacagcactctgggcgaaaattggatgtgaaaatgaagccagaccgaggatattagaaatggctactccccagtcaattt

SEQ ID NO: 60024 - DNA, 89 bp, Homo sapiens
gacactggcattggaacttcctgttctgatagcgtggaaggttttgatgatgatggttcagaatttcatgaacatatatttctggagaa

SEQ ID NO: 60025 - DNA, 83 bp, Homo sapiens
ctgctggacgggcggcgggtgaagctgcagctctgtatggaggggctcccggagggcctgcgtttcccggacaaactcaggat

SEQ ID NO: 60026 - DNA, 100 bp, Homo sapiens
caactatactgtttgtaaaaggagaagatggacttattttgagtcacttgccaaatggcccaactgctcattttaaaatgagcagtgttcgtcttcgtaa

SEQ ID NO: 60027 - DNA, 75 bp, Homo sapiens
aagaaagtaaagttggaagttaagggagacaaagttgaaaacaaagtgctgagcctaatgggaggtgactggatc

SEQ ID NO: 60028 - DNA, 83 bp, Homo sapiens
cagaaagatggcatcatttttgccctcaaaagaaatggcaggagaaaattcagatccagttaacacaatcatttgagaaagaa

SEQ ID NO: 60029 - DNA, 100 bp, Homo sapiens
ggcggcatcggctgcgagctcctcaagaatctcgtgctcaccggtttctcccacatcgacctggatcatccagcagctcgtcaacggcatcatcacgccc

SEQ ID NO: 60030 - DNA, 82 bp, Homo sapiens
gagacattgattttgttgaagatgactcggacattttacatgaataacctgaagcccccacaagcaaaaaggaagatacaac

SEQ ID NO: 60031 - DNA, 100 bp, Homo sapiens
cgctggaggagctccccagctggtggctggagcgaccccttgttctttggtggcgctggcaggatgacgcaaaacacggtgattgtgaatggagttgcta

SEQ ID NO: 60032 - DNA, 100 bp, Homo sapiens
cgccaatccacttcctgtggcaactacaggggaaacattaaagaatgtgcttcagagagaaaggaaatgaaaccaaatggaaatctggatctacacaaac

SEQ ID NO: 60033 - DNA, 88 bp, Homo sapiens
aatgaagacgacattcagtttgtcagtgtggaatacatgttggtatcttttgatcatgaaaataaaaaagtccggttggtcctgtctg

SEQ ID NO: 60034 - DNA, 100 bp, Homo sapiens
tattggatgaagaaaggaaggaacctgggatggttgtgagggaagggacaagaagatactgccctgataccccatcagcctgagtctcttaaaggccttt

SEQ ID NO: 60035 - DNA, 75 bp, Homo sapiens
catcacgtacaaaacaaactgaaaacgcaagccaggctaaacagttggcaggcacccaataactatagaagtccc

SEQ ID NO: 60036 - DNA, 100 bp, Homo sapiens
ggggcaagcggaaggtgatgcccaagatggaccaggttggcctcattcagcttgggcaggagcaggtgctaatccagcccctcaacaactcccagggccc

SEQ ID NO: 60037 - DNA, 89 bp, Homo sapiens
agcgagggcttcggttcgaaggggccctgaaaaaccaaatgggcatgtacaacgccaccacccggcaggtggaaacggagctcttcccc

SEQ ID NO: 60038 - DNA, 75 bp, Homo sapiens
ggaaagacacctggccagcggtccagagctgatgcagtcgcaatgtatctgctgagcaaaaagatgaaaacaaag

SEQ ID NO: 60039 - DNA, 50 bp, Homo sapiens
caacgaggcgctggtggtttcaggtttaagaattgtttaagctgcatcaa

SEQ ID NO: 60040 - DNA, 89 bp, Homo sapiens
ccatgaccacaaccaccaccttcaagggagtcgaccccaacagcaggaatagctcccgtctccaaaaaaagttggtgatgacattgcca

SEQ ID NO: 60041 - DNA, 80 bp, Homo sapiens
ctcccagcaccacagtccttctgcagtccctcgtccagccacccccaggtcttcggggacgaggaagccacagccccatg

SEQ ID NO: 60042 - DNA, 51 bp, Homo sapiens
acggaaatgtgtcatcgaaagccaggttctgccggagacttccatttggcc

SEQ ID NO: 60043 - DNA, 74 bp, Homo sapiens
cccctccctcagcttccgccccaaaagagactaaggtgtcagtatgttcttcaagctgctctgctcctgggccc

SEQ ID NO: 60044 - DNA, 100 bp, Homo sapiens
agatgactgtcaagaatataccactgaggtcattgctagaatcgtggatggaagcagattcactgagttcaaagccttttatggagacacattagttaca

SEQ ID NO: 60045 - DNA, 48 bp, Homo sapiens
aggattccaagtaactcttatttggagccagcattcgaacgttcactc

SEQ ID NO: 60046 - DNA, 90 bp, Homo sapiens
cgctgttgcccgcggccccccagccgctggagaaggagaacgacggctactttcggaagctttctgctgctctggagcgccgtcctcatc

SEQ ID NO: 60047 - DNA, 122 bp, Homo sapiens
tgacatcattgcaatcaagtcacctgacacatttgtgagaactatttatgcagtgctagttgccgcagaccaatcaaaggggctgcaggccggccattagaactcagtgatttcaggatgga

SEQ ID NO: 60048 - DNA, 75 bp, Homo sapiens
ccagcaaccatgagtggttccatgatgggaagtgacatgaaaggcctaaagaatgtatttgacgaagcaatattg

SEQ ID NO: 60049 - DNA, 101 bp, Homo sapiens
cagactcagcctcaggtagatggtttccgtagatggtggctttctttggacccttgacatcaaccagttactatttgattgtagaaggcatgaaacaaaaa

SEQ ID NO: 60050 - DNA, 119 bp, Homo sapiens
gcgacagcagccaggagtcatgagcgacagcggcgagcagaactacggcgagcggatgatcatgacgcagtcctgaggtttaatggggcacccacagccaacttccaacaagatgtggg

SEQ ID NO: 60051 - DNA, 76 bp, Homo sapiens
cagaaattctggaacacctatatggtcagaagttgagtagcaggggcctaggagggctcgaagccttcacagcgat

SEQ ID NO: 60052 - DNA, 101 bp, Homo sapiens
ctgcgcttccccatggggctggcctgcggcgcctgggcgctctgagatgttggcgccagcagctggtgagggccctggggtggacctggcggccaaagccc

SEQ ID NO: 60053 - DNA, 82 bp, Homo sapiens
ggattttatccaccggcactgccaagatcaggcagccctgcaagttgggggccatggagagaggctacaccagtgtcgagaa

SEQ ID NO: 60054 - DNA, 75 bp, Homo sapiens
gatgaagatgctgttagcctttgcagtctcgacataagtatctgaacagaattaagacgaacgagctttcacaat

SEQ ID NO: 60055 - DNA, 101 bp, Homo sapiens
ggggattgcctggcaggacgtgaaggggaagaggcccaccctggagtaaccctcactggagaatccagaggctgaaggtgatgtggccgccctcaaccgac

SEQ ID NO: 60056 - DNA, 75 bp, Homo sapiens
ggggggcctcgcctgagagagtgagactagacgcttgaagcaaagctgccatcccagaagacgacatgctctcag

SEQ ID NO: 60057 - DNA, 82 bp, Homo sapiens
tcaggatatgacaggggtaacacccttccagatgatttttgaggttgcatctgcactggagaaatggaagacagcaatccgg

SEQ ID NO: 60058 - DNA, 83 bp, Homo sapiens
gcgctggaacagttgcagggtcacagaaacatcgaacccgaaaacagtggccaaatgtcaggtaactcccagaagaaatgttc

SEQ ID NO: 60059 - DNA, 74 bp, Homo sapiens
ggagacaacagaaacagaaacgattgtggaaacaggtataccaagcttggctacgcaggcaacactgagcccca

SEQ ID NO: 60060 - DNA, 100 bp, Homo sapiens
gccatggggagcctcagcggtctgcgcctggcagcaggtcaaaatgcagatcttcgtgaaaacccttaccggcaagaccatcacccttgaggtggagccc

SEQ ID NO: 60061 - DNA, 96 bp, Homo sapiens
tcagctggagaacgcggctaaagttctgatgaaaggagatgaagttgctggagcaggcaggttctctgaaaggctccctgagtgtggaagagcagc

SEQ ID NO: 60062 - DNA, 100 bp, Homo sapiens
ggggaccatggtgctgccggcgcctcctccgcgggcgtgaaggcggcgctcctactccctccccggactccgcgggaagacaactgttagttttgtggct

SEQ ID NO: 60063 - DNA, 101 bp, Homo sapiens
agctctgaaaaactcttcaacactgttattgtaaacaaaggtgtcatggagaaactccagctgggcccagagattctgcagcgggaaaatccaaggcttat

SEQ ID NO: 60064 - DNA, 74 bp, Homo sapiens
agaagcctgaaaagtcgcagcgagctggagccgccggaggtgccaagtcctgccctgccaacttcttggcagct

SEQ ID NO: 60065 - DNA, 100 bp, Homo sapiens
cccgagaaattgaggccgttgtacaaccatccagcagcaaaatgatgcttcaacacccaggccaggtctctgcctcggaagtgagtgcttctgccatcgt

SEQ ID NO: 60066 - DNA, 100 bp, Homo sapiens
cagacctgtgacaagtgtaacaccatcatctgggggctcattcagacctggtacacctgcacagaacattactactggatggaaatccattccgagttcc

SEQ ID NO: 60067 - DNA, 100 bp, Homo sapiens
gccaatcccaggaggaaaaacgatctgccttctggagactgcgccgtcctcccgggagagccagaaagaggacatggctgctgggcagcgggaagcgagg

SEQ ID NO: 60068 - DNA, 90 bp, Homo sapiens
cgagccgggcggggcgagggcagctccggacccctgcagctgcagacatctgcttcaccaaggagctacactcccacttcttcagcttgg

SEQ ID NO: 60069 - DNA, 100 bp, Homo sapiens
cagttatcgggtgtgaccgccgccgcccaggttgcactgctgtgatccatcctcatctcctaaagatgcatcctgacttatctccacacttgcacactga

SEQ ID NO: 60070 - DNA, 50 bp, Homo sapiens
caaaaatccagaagtacaagcagtctgggagacattacctcatccctcaa

SEQ ID NO: 60071 - DNA, 100 bp, Homo sapiens
tttccacttagattcagacctgattgagaggatccagaatccagatctctggaatagctaccaggcaaagaaaaaaactatggatgccaagaatggccag

SEQ ID NO: 60072 - DNA, 95 bp, Homo sapiens
gtggagagatcataatttggggttcaagattccagatgcctgaaaacttcatgcctcctgttcccatcacatcaccaatcatgaacccgttgggt

SEQ ID NO: 60073 - DNA, 74 bp, Homo sapiens
actgtttaagacttatgaatgacatgacagctggtactgaagatttaccccccaaaaaaaattgtcaatgagaa

SEQ ID NO: 60074 - DNA, 98 bp, Homo sapiens
gctccgggtgcagggaaaggagaaacaccagacactggaagtctcactgtctcgaatctctgaccgcctgcgccggaactggcccccctccttcttgt

SEQ ID NO: 60075 - DNA, 96 bp, Homo sapiens
aacactgagaaccaagtcaacccggccacctttgggaaggaggaagagttcatcgattggtggagcaaattctttgcctccataggggagagggaa

SEQ ID NO: 60076 - DNA, 78 bp, Homo sapiens
gtccatcacctcccctccttccaccagaagccatacgggagagagactctgtgaaggtaaagaaggtagtcaatgtgc

SEQ ID NO: 60077 - DNA, 100 bp, Homo sapiens
tccttctgctgggccctgaaggcagacgggataatgtggttggccaaggcctgttggtccatccagagtgaggcgacaggaagaagggtattacagccgc

SEQ ID NO: 60078 - DNA, 51 bp, Homo sapiens
ctgtgatggcatctttcatctaacacgtagcacaggcggagtgcagcggag

SEQ ID NO: 60079 - DNA, 75 bp, Homo sapiens
ccgggagcacttcgagaagctggagaaggctcagctgtcgcaggccctggaggagctgggaggccagaaacaaag

SEQ ID NO: 60080 - DNA, 100 bp, Homo sapiens
cttgactactcgcatcgcgcactttttggatcggcatctagtctttccgcttcttgaatttctctctgtaaaggagctcagagtcaagatctccactgaa

SEQ ID NO: 60081 - DNA, 100 bp, Homo sapiens
ggcggcggcgcagctcggaacccgccagggtccagggtccaggttccagcgcccggcggcccagcaccgactagatttccttcagctgatgattgactcc

SEQ ID NO: 60082 - DNA, 90 bp, Homo sapiens
gcagaagtcgcgtgtctaggtgagtcgcggtgggtcctcgcttgcagttcagcgaccacggctttatcctgtggataaacgcagagtgaa

SEQ ID NO: 60083 - DNA, 100 bp, Homo sapiens
ccgctgaggaaggctgtagtgtcggggccgaagcggacagggaattggaggagcttctggaaactcctacctcccggcagcctctccaggcccagaactt

SEQ ID NO: 60084 - DNA, 100 bp, Homo sapiens
ggggaaacagcaagcggcgtggacgaccgttgctgagctggtgtggaacgtctgtgatcaggtagacgttacatccaagaggaaataatccaggcaagga

SEQ ID NO: 60085 - DNA, 87 bp, Homo sapiens
cttcctttcactggagtttacttggtccagaacatccactagcctcactaaagcattgttggaaactgttactacatttttactgga

SEQ ID NO: 60086 - DNA, 75 bp, Homo sapiens
gcggggaccttgccttgcccggggtcataaataaagttcatcttaaggcaaatcatgtggtcaagagagatgttg

SEQ ID NO: 60087 - DNA, 75 bp, Homo sapiens
gtctgacatggaggatgatttcatgtgcgatgatgaggaggactacgacctggtctacaaggaagtcttcacgag

SEQ ID NO: 60088 - DNA, 75 bp, Homo sapiens
ctttgacctcttcgatgtgcgagactttggaaagttgcagtaccatgcaggactagcatctggccttttaaatca

SEQ ID NO: 60089 - DNA, 75 bp, Homo sapiens
gaagaatgcaatcttaatttgcctgtatgggacccaaggataacaacgaacttgatgcaagtgataggtttgcca

SEQ ID NO: 60090 - DNA, 88 bp, Homo sapiens
caagcacacccaatggacagcatgcctcaccaagtcacatgacaagcaacctgatggccaaaagaaaggaagaaaatttttcctctcc

SEQ ID NO: 60091 - DNA, 82 bp, Homo sapiens
tcatttgaggagtgggaacaggcttcggcgaacacaaagaattaagatgctctggtttcaaggaaatagcatgcaacttgcc

SEQ ID NO: 60092 - DNA, 89 bp, Homo sapiens
gcggttcaggtttggccgctgccggccagcgtcctctggccatggacaccccggaaaatgtccttcaagaacggagaccaacctgggct

SEQ ID NO: 60093 - DNA, 95 bp, Homo sapiens
ggacccgaagcctaaattccaggagggcagcctgcttctgcaaagtggtacgatcgaagggactatgtcttcattgaattttgtgttgaagacag

SEQ ID NO: 60094 - DNA, 98 bp, Homo sapiens
ggaaaaggtcaaacagtacaaccagaagctcaggtatcattgcccagtgcctaagatcttttatgttcagctcactgtaggaaataatgaattttttg

SEQ ID NO: 60095 - DNA, 75 bp, Homo sapiens
ccgcatactccatcctcagtgaggtccagcaggagtgaaagctggacattgaagaagccaaaatctgtttccaag

SEQ ID NO: 60096 - DNA, 51 bp, Homo sapiens
agcgatagcccagtggatggccattccagatatgagggaaggcaccattgg

SEQ ID NO: 60097 - DNA, 74 bp, Homo sapiens
cagatattagcacagcagaccttggtgatgtgctacaggtgattcgttggaaaaattcattgtctctagagatt

SEQ ID NO: 60098 - DNA, 75 bp, Homo sapiens
cgtgctttccacgacggtgacacgcttccctggattggtggaggtgaagccggtgctgccaagagccatgcccag

SEQ ID NO: 60099 - DNA, 98 bp, Homo sapiens
atacttccactgtgcgttgtatgcatcttcatgaaaaaagggtgcaatatgtgacttctgtgaagcttgggtttgccatggtaggaaatgtctcagta

SEQ ID NO: 60100 - DNA, 50 bp, Homo sapiens
gatgatgacgacaatgatcctgagaatagttactacagtgtggagtgttg

SEQ ID NO: 60101 - DNA, 100 bp, Homo sapiens
gccgtggctccggatctcttcgtctttgcagcgtagcccgagtcggtcagcgccggagggaaacggcatacactggagaagaatgtgttggttgtctctg

SEQ ID NO: 60102 - DNA, 73 bp, Homo sapiens
aataggctgccagcaaacagtcttccgcaggaaggagatgtggttgcagtccatgagctgggaaaggaggcag

SEQ ID NO: 60103 - DNA, 95 bp, Homo sapiens
actccgattctagaggactgagtgacctgcaggttctctccataaatgaagaagggctaaggcgatgcgaagagaatacaaaagtctttggtcgg

SEQ ID NO: 60104 - DNA, 100 bp, Homo sapiens
aacaagagtcggcactgggaacagctgtgcgtagaccagaccagtgacttataagtcctattttgtaacggattatgatccaaccattgaagattcttac

SEQ ID NO: 60105 - DNA, 82 bp, Homo sapiens
ctccgtgtccccgctccgccgcccgagcagggggatatgagactttctactcggaatatcctgagtgttgcgtggatgtaaa

SEQ ID NO: 60106 - DNA, 76 bp, Homo sapiens
ctgggagaagatggctttaaagaatacacttcaagcagcctggcatcctcgctacaacctcattgttgtgggccga

SEQ ID NO: 60107 - DNA, 100 bp, Homo sapiens
cactatcaaagttctctttgcatctcagctttcttcacagaagtcagtgccgtgggtacccattttaaaatccctgccactttgggctatcgtagttgca

SEQ ID NO: 60108 - DNA, 102 bp, Homo sapiens
ataactggcaaaggtgcttcggggacattccaggaattacatgaacgacagccttcgcaccgacgtcttcgtgcggttccagccagagagcatcgcctgtgc

SEQ ID NO: 60109 - DNA, 100 bp, Homo sapiens
cctcaagaccgagaacctcctgctggatggcaacatggacatcaagctggcagcttgcttggctcaggaacaacagaagagaataaagaaaatgacctca

SEQ ID NO: 60110 - DNA, 48 bp, Homo sapiens
gcgagagcttcgagcggactcaggtgaaatgtatagatgttgttcagg

SEQ ID NO: 60111 - DNA, 60 bp, Homo sapiens
gttcgtgatagacaccacagtcttgagccatgggaccacaccaccaccaccacaaccaat

SEQ ID NO: 60112 - DNA, 73 bp, Homo sapiens
gagtgctgattcggtactgctttctgctgccgctcaggagtcaaattgactttatcagctttaatcgatggga

SEQ ID NO: 60113 - DNA, 90 bp, Homo sapiens
accagcagggaccttgggtcacatgacaatctctctccaccttttgtcaattccagaatacaaaaattcacaatgacaacagtgacagtg

SEQ ID NO: 60114 - DNA, 100 bp, Homo sapiens
gttcgagcagatcgacaagtccgggagctgggcggccatttaccaggtattagaaaactactcggatgctccaatgacaccaaaacagattctgcaggtc

SEQ ID NO: 60115 - DNA, 90 bp, Homo sapiens
ctcaaaatctcttcttctaagagcacactgtcagacatctggatggtcacttactgagcagcatgtcagtgaaaaaaccagtgaatcgcc

SEQ ID NO: 60116 - DNA, 100 bp, Homo sapiens
aggaagctacacttttcaccaaggaactggtgctgcagcgagaggtggagccgccaccaaaatgcagattttcgtgaaaacccttacggggaagaccatc

SEQ ID NO: 60117 - DNA, 100 bp, Homo sapiens
ggagcactcggtcatgtacccggtggactcggtgaaggaagagagaagggcacagttacctaagtatcaacgtaatcttcctcggccaggacaggccccc

SEQ ID NO: 60118 - DNA, 140 bp, Homo sapiens
cgcgctgtaagaagcaacaacctctcctcttcgtctccgccatcagctcggcagtcgcgaagcagcaaccatgaattagctacatccatctgatggcacattttcgaatgcacactcaaataaaaaaccaaacagctgcc

SEQ ID NO: 60119 - DNA, 100 bp, Homo sapiens
gaaaactcgaggcaactattgtgcacaaatgaagatgtttccagccctgcctcggcggaccaaagggaggacgaagaggtcccaacaggacatcttactg

SEQ ID NO: 60120 - DNA, 75 bp, Homo sapiens
actgcgcggcattctttgagggacccccattcaagttcaagttcacaattggctctgagcacttcaagacgacat

SEQ ID NO: 60121 - DNA, 98 bp, Homo sapiens
gtgaccaggagcccacagtgggcgagatgaccttgaatgatgccatgaggaacaaggcaaggctgtcaattacaggaagtactggagaaaatggacgt

SEQ ID NO: 60122 - DNA, 75 bp, Homo sapiens
accacggagccggcagcggcgcgggaggccgtgcgggcatccgcatgctggacggcgatgtcacagatgtggtcg

SEQ ID NO: 60123 - DNA, 95 bp, Homo sapiens
gaaactgatcagacgaactacgaacccctggacgggagagtctgccggcggagaatataaggagttgtaagacgttcatcgccgtgttatccttg

SEQ ID NO: 60124 - DNA, 98 bp, Homo sapiens
ccagccgactggagcaggcagcagcccagaagcctaaagaaactgttccaactcttgctccaaaaactctttcagtagcagcagcttttaatgaagat

SEQ ID NO: 60125 - DNA, 83 bp, Homo sapiens
cggacctctggagtgcccccagcccagagcccggagcaggccgggctctcgccatgggtcactgtcgcctctgccacgggaag

SEQ ID NO: 60126 - DNA, 99 bp, Homo sapiens
gcacggatggaaagatggagatgaacctctaacacagtggaaaggaaccgttctggatcaggttgtgggcccacctggtacaggcaaaacagatgtggc

SEQ ID NO: 60127 - DNA, 50 bp, Homo sapiens
atgctgcattgctgccaataagggggccagaagcctgtcttagatgttca

SEQ ID NO: 60128 - DNA, 100 bp, Homo sapiens
cgggatttgaaaaggaaacagaagaactgggcagcccggcagcccgagccgaccaaatttgactacctgaaggaggagtgcacttgccggcggtcccaac

SEQ ID NO: 60129 - DNA, 100 bp, Homo sapiens
agccagtcaaggttgtctgtctgtccatccactcaggacatctgcaggtaaggagtgccaatggaccgatgcctgcctgtctcatccctgtgcaaatgga

SEQ ID NO: 60130 - DNA, 122 bp, Homo sapiens
tcaccactgtccaaattcagaagctcagaacgctggactctccctttgcagaagcctaaagaaactgttccaactcttgctccaaaaactctttcagtagcagcagcttttaatgaagatga

SEQ ID NO: 60131 - DNA, 90 bp, Homo sapiens
gcctcggcagccttgcgctgctctaatggtccggacttccgtgtccacacccactcgcccgggtctatggccacggtcggagagtggtcc

SEQ ID NO: 60132 - DNA, 75 bp, Homo sapiens
ccagctaaagtttgctcgaagccttcagtccgttgcagaggatgaaacaagtgaagatgctaactgtcttgcttt

SEQ ID NO: 60133 - DNA, 100 bp, Homo sapiens
gagactcaaagtcctcagagcaagagatgaccttatcacaggttccattcagagccgatacatcagcatgagtgtgtggacaagcccacggagacttgtg

SEQ ID NO: 60134 - DNA, 83 bp, Homo sapiens
cagctggactatggcatctatgttatcaaccaggagtctactcttcatcttgtgttgagacttcgtggtggtgctaagaaaag

SEQ ID NO: 60135 - DNA, 82 bp, Homo sapiens
gggaaactaaaaacgcatctatctaacgtttaccctagcaaaccatcgtgagatggagaataaagaaactctcaaagggttg

SEQ ID NO: 60136 - DNA, 100 bp, Homo sapiens
cagtatataaggtcaccgcccggtactatactggcaattgctggagaagattttgcaattgttgcttctgatactcgattgagtgaagggttttcaattc

SEQ ID NO: 60137 - DNA, 99 bp, Homo sapiens
cttggaaagtccaagaggcccaagatgggccatcaactgagaaagaccttgacgaaaagaagaaagaacctgcaattacatcgcagaacagccctgagg

SEQ ID NO: 60138 - DNA, 106 bp, Homo sapiens
ctccctgctgttcgagtacctgcccagaggggcccactcgctgtcccggcgtgatggtgggcatgggtcagaaggattcctatgtgggcgacgaggcccagagcaa

SEQ ID NO: 60139 - DNA, 99 bp, Homo sapiens
ggcaatatactgttacgatccagttgaagattactggatgcacgtacagaatacattcagccgtcaggatgtgatggagctgcttgaagaagatctcac

SEQ ID NO: 60140 - DNA, 98 bp, Homo sapiens
tatttctcgtagcaataatattagctgttttgcaccttcatagtatgaaaaggattgaactggatgacagctcctctggtgcaagtgtggtagctatt

SEQ ID NO: 60141 - DNA, 75 bp, Homo sapiens
cccaggagtcatcggacgccagaatctggttgattcttcaccacactgaaaccattaggaaaaatccttgtggtt

SEQ ID NO: 60142 - DNA, 100 bp, Homo sapiens
aatgtggatctggcaaagatcagttccatccttagcagtttaacatcagtcatgaaaaatactgagggagctggatgagctgaaaccatggatagagaag

SEQ ID NO: 60143 - DNA, 82 bp, Homo sapiens
gggccgccgctgctacctgcagcgccgtgtggcacgacacaaaaatcagccaagacaatgcaaactccagtgaacattcccg

SEQ ID NO: 60144 - DNA, 51 bp, Homo sapiens
ctatagtaacttggtgtcactgggagtatgctgctgctgttccgctttgcg

SEQ ID NO: 60145 - DNA, 100 bp, Homo sapiens
atcccgagtaccggcccaagagacctgccaaccagtttgtgcccaggtggacgacccaccggagcccgtgtacgcgaacatagagaggcagccccgggcc

SEQ ID NO: 60146 - DNA, 100 bp, Homo sapiens
gccgcccgcgccagcaagaggatcgtcctgccggagcccaggtgggatgtgtgtgggctgaaattccgagctgcggttgtgcatgagaatacacccttcg

SEQ ID NO: 60147 - DNA, 100 bp, Homo sapiens
cttaccgacactcttgatgacctgatagcagcattaataataagctacagcagccggaggcagcggccggagtgttagaatatgccatgaaacactttgg

SEQ ID NO: 60148 - DNA, 89 bp, Homo sapiens
cggctggcaggctgtggacgcaacgccgcaggagcgaagccaggaaaccatccacggagcagcccctgtacagcagcagcctgtggggc

SEQ ID NO: 60149 - DNA, 97 bp, Homo sapiens
ggcatcagagaagtgaaattgactcagggcatctgcctggagcaaaataagacctccagctgtgtaacagttaacctcttccacatgcagcatctgc

SEQ ID NO: 60150 - DNA, 100 bp, Homo sapiens
tgtcaaagagaaagtaacaagaatcattcttgcagcatttcgtcacacttccaccctgggcagcgtgtttggggacgcgtactatgagcagcagatggcg

SEQ ID NO: 60151 - DNA, 83 bp, Homo sapiens
cgggatttgggtcgcagttcttgtttgtggatcgctgtgatcgtcacttgggtggcccagttgaaatccttcccttcctctac

SEQ ID NO: 60152 - DNA, 82 bp, Homo sapiens
cgtccagagccaaggtccagggggcaaggtcgtggctctgtcaacagactcaatagaaagactcccagtgtataacaaagct

SEQ ID NO: 60153 - DNA, 75 bp, Homo sapiens
cagaggcttgaaactgtcacactctctgatgtaaaggatggagtaaatcaagcagcacctgcatttggatttggc

SEQ ID NO: 60154 - DNA, 75 bp, Homo sapiens
agagctggagctcagcagacattcgcccaacaatgtggagctcatactgaaaaccatcaataaccagcacagcgt

SEQ ID NO: 60155 - DNA, 82 bp, Homo sapiens
gcagcggcagcaccgggagtcagcagagtgaagccctccagtgccctggtagccgccagtccccgcctggcgttttgaggtt

SEQ ID NO: 60156 - DNA, 50 bp, Homo sapiens
gtgagtatgagcgtagagtggaacgggtgtcggagatgtatgcagtgtga

SEQ ID NO: 60157 - DNA, 100 bp, Homo sapiens
attacttctgcctggactgcattgtcgaatggtccaaggtgccccacgcccggctgtgacggctctggccacatcacagggaactacgcttcacaccgga

SEQ ID NO: 60158 - DNA, 83 bp, Homo sapiens
ctttaaccatggcgtccctcttcaagaagaaaaccgtggatggtagttgtcctgggaacccctgcagaagaagatggtggtgg

SEQ ID NO: 60159 - DNA, 75 bp, Homo sapiens
ctttcctggcacaggagacttgagggatggccaggccatgttatgggatctcaacgaaggcaaacacctttacac

SEQ ID NO: 60160 - DNA, 75 bp, Homo sapiens
ttgtgttactcaagaagtgccagactcccgccaggcagaaactgaaggatgggtcatcagttaaggaagttgaaa

SEQ ID NO: 60161 - DNA, 74 bp, Homo sapiens
cggcggcggctgcggtcgaagaaggggacgccgacaagagtgtgaacatggctacgcctcttcattcccgtcca

SEQ ID NO: 60162 - DNA, 100 bp, Homo sapiens
atctggcccccccgcagaaaggtctcggagaacggcctggagcaggacacattggcgtgagacctgggagtacgttgtgccaaatcattgccacttgcca

SEQ ID NO: 60163 - DNA, 98 bp, Homo sapiens
cgagaggatctggtgtaccaggcgaagctggccgagcaggctgagcgatacgacgaacccagcgggtgccgcttctccacccgaggcttccacctcca

SEQ ID NO: 60164 - DNA, 97 bp, Homo sapiens
cagctggcttctggagggcaccacatagaagatgagacgtgcaggtaccatcaggaagcagcgggataagctgataaaggaaggaaagtacacccct

SEQ ID NO: 60165 - DNA, 82 bp, Homo sapiens
ccggaagaaactgtccgagaagcccaaacttggatttacactgggcaacgtggttggaatgtatctggctcagaactatgat

SEQ ID NO: 60166 - DNA, 100 bp, Homo sapiens
aagagctcaaagatttggtttgaatgtctcttcaatctccagaaaggcatttgggcagtccttctccatccaccggaaggttgctgaagatggagagact

SEQ ID NO: 60167 - DNA, 98 bp, Homo sapiens
caattttttgcatagcttcaacatccctatgcagttaaaaatatacaacattgaagatcggacacgggtatatgagtagaccagtgatgagtggccca

SEQ ID NO: 60168 - DNA, 75 bp, Homo sapiens
gctgagtattacaggcatttttttctaatacaaagtcttgtagtgtgggttttcctttggaatatggataaatac

SEQ ID NO: 60169 - DNA, 75 bp, Homo sapiens
cctcagttcccggcggctcttgcggggcacagcaacctacagctggagtcgagagtctggggcaatggggcagga

SEQ ID NO: 60170 - DNA, 75 bp, Homo sapiens
aacaagcctatcagcaagaaggaaatgattcagaggtccaaacgttgatgcggatgaaattaaaaggctaggaaa

SEQ ID NO: 60171 - DNA, 98 bp, Homo sapiens
ggagtacatggagcacgtgtacctcatccacagggcctcctgccagccccagcccctggagaggatgcagcctgaacccccgccaacaaacaaatggc

SEQ ID NO: 60172 - DNA, 100 bp, Homo sapiens
ttcttaaaaaggctcagaaagatggatttttgcatgagacgcttctggacaggatctagtgaaaagccatttgatgtatgcggtcagagaagaagtggag

SEQ ID NO: 60173 - DNA, 90 bp, Homo sapiens
tgagggtctccagggttctttggggcccgaggcgcattctacattctaaaggggagctcagtgaagatagacataaacagtatgaggaat

SEQ ID NO: 60174 - DNA, 76 bp, Homo sapiens
tgcaagcaagtcaccaaggaaggctgtgagcagttcatagccgagatgtcttatttaggtcagttaacgtccatac

SEQ ID NO: 60175 - DNA, 75 bp, Homo sapiens
gtggtctaaagcttcggcacaagggcccaactggaattccacttacggcgttaaaaggatctgaacaaagtctgc

SEQ ID NO: 60176 - DNA, 50 bp, Homo sapiens
aagaatccactgttgctactgaaaggggagtatatgttgctgcagtacgg

SEQ ID NO: 60177 - DNA, 75 bp, Homo sapiens
ccttttgcctcagatactattttgaaggcagctgttaaatctaagaaagctacagatacctataaactctatgtg

SEQ ID NO: 60178 - DNA, 100 bp, Homo sapiens
cttatcagcactatttgaaacttttatctcatctggcttggcgcctgaggttctcccattagcttactgcagagtgggtctgggcatctgctacgacatg

SEQ ID NO: 60179 - DNA, 75 bp, Homo sapiens
agagcgctactcctggcagtgcgtcaatcagagcgtcctgtgcgctgaactcgtttgagcagctgtgcatcaatt

SEQ ID NO: 60180 - DNA, 108 bp, Homo sapiens
ctgcaccctgcccagaggtccctcagcaaagatggtacaaaagagtctttggaggatgcggctttgatgggcgcatattaaatttcctattgactacccctattcacc

SEQ ID NO: 60181 - DNA, 80 bp, Homo sapiens
cctaggccaaccagagattcatctttcatgcagtgacatgttgataaaaaatgatggtttacccaaggtccagcctagcc

SEQ ID NO: 60182 - DNA, 108 bp, Homo sapiens
cggggtcgagatggcggcgcctttgaggattcagagcgactgggcgcaagccctcagggaactctaatgatccaggacaaagaagttaccctggagtatgtatcaagc

SEQ ID NO: 60183 - DNA, 90 bp, Homo sapiens
tggccagatttgcagatggctctgctgtagtacagccgggtgggcttggactgggcgtgctccatggcagagatcctgcggtcactcaac

SEQ ID NO: 60184 - DNA, 80 bp, Homo sapiens
atggcttgaaggtggtggaaattgatggagaccccaagtgggaggtactggcacacggatgaggagtcgtagaagagggg

SEQ ID NO: 60185 - DNA, 75 bp, Homo sapiens
cctggatggatacctgaagacttcagccttgtcagttcattcggctcctaaagaagtagcagtgtccaaggaaca

SEQ ID NO: 60186 - DNA, 100 bp, Homo sapiens
ccggatgttgcggacagtatgaggcaagcgcagggggacggggaccagcagctgtcgccgccgctctcaggtgaaatcgccatgcttggtggtgtgggag

SEQ ID NO: 60187 - DNA, 90 bp, Homo sapiens
tggaagagaagaccaaggagtcactggatgtgagcagactgacccgggaagcctcagagaaccgtgaaagctctgtatgactacaaagcc

SEQ ID NO: 60188 - DNA, 99 bp, Homo sapiens
gaactgacagatcaacttgacaaaagtgttcagctgtcatggaccccaggcgatgacaacaatagccccattacaactggtgtcatagatgaagattat

SEQ ID NO: 60189 - DNA, 100 bp, Homo sapiens
tggcgcgagccccgtcctccttcgccgccgcgcacaaccgcacgtgcaggtgaaatgacaatggatgctctgttggctcgattgaaacttctgaatccag

SEQ ID NO: 60190 - DNA, 75 bp, Homo sapiens
cacccgctccgcgccgagggctggaggatgcgttccctggggtccggtgtaatgttcaagctcagaaatgcctta

SEQ ID NO: 60191 - DNA, 75 bp, Homo sapiens
gcggtatccctgtctcagcgaagtggtgaaagagcatcagagccaacacgaggagctaaagaaacagcacagtga

SEQ ID NO: 60192 - DNA, 75 bp, Homo sapiens
gcggccggaccgagcgcctcgacctcggtctgagggcacctggacgatgacggattaccgcacgggttctgcaca

SEQ ID NO: 60193 - DNA, 83 bp, Homo sapiens
ttacaactggctatctccccggtttccaatacttatctacaggaatcgccatgaccccagctctgagggaggcaacagcaaag

SEQ ID NO: 60194 - DNA, 100 bp, Homo sapiens
taccactacttgaatcagtctggatgtgtagaagacaagacaatcagtgaccaggaatcctttagggaagttattctctttcagtctcacatggcaacga

SEQ ID NO: 60195 - DNA, 90 bp, Homo sapiens
agggttacgtcctcgtgggattcgttggcggtggctgagaaccttcgagatctgcggtctggggtctggttgaaagatggcggccctcac

SEQ ID NO: 60196 - DNA, 90 bp, Homo sapiens
ctgcagtccaatcctctacagcatctctttgaagttggacgtgataagtatgagcctgcagctgtttcagaacaaggtgataaaaagggc

SEQ ID NO: 60197 - DNA, 90 bp, Homo sapiens
gagatggagttcaaacgcggccgcttccgactcagcctcttcagcgacctgcccgaggagcaccgggggctgctgaccatccgctacccc

SEQ ID NO: 60198 - DNA, 118 bp, Homo sapiens
gtttcgggccagcgacccgctgctcagcgtcctcatgtggggggtaaaccactcgatgccttcaattaagttgcagagttctgatggagagatatttgaagttgatgtggaaattgcc

SEQ ID NO: 60199 - DNA, 90 bp, Homo sapiens
acagatgaagacagatgcaccaacgagttgccaccttccagagaagaggtacgagatgacaagacaaccataaagtgtgaaacctccccg

SEQ ID NO: 60200 - DNA, 101 bp, Homo sapiens
agtcactgaggataagaacaatgcctcccatgttgtgtatcctgtcccggggaatctagaagaagtggtactgactgtcctcacccacacccctgcccctc

SEQ ID NO: 60201 - DNA, 75 bp, Homo sapiens
ccctggacaacagcctgcacaaggacctgctgggcgccatctccggcattggccaagatgctgaattatcaggga

SEQ ID NO: 60202 - DNA, 82 bp, Homo sapiens
tcttcaggtagagaaggactccaggtttacccaaggtccagcctagcccctaggcaccatgtcggacagtgatctaggtgag

SEQ ID NO: 60203 - DNA, 75 bp, Homo sapiens
cggggctccaggacggcgcccttagcgacaccatggagtacttcttgcaagcagagctgacaagcaacgtcttaa

SEQ ID NO: 60204 - DNA, 100 bp, Homo sapiens
ctaagaatattattagcacaagagcaccatactttgaggttttctggatatgccgcagaaggatccgtgccagaagcaagcctgtgagatacagaaatgt

SEQ ID NO: 60205 - DNA, 75 bp, Homo sapiens
gaagctcttaagagcgcggccggaaagcaggtcacagtttgctgtggacatgcagacaacatcctccagaggact

SEQ ID NO: 60206 - DNA, 74 bp, Homo sapiens
acaggaagtgtcacacagcagtcaagtatgtcccaaacgtctgagctttttaatagatacgagagagcaattta

SEQ ID NO: 60207 - DNA, 82 bp, Homo sapiens
gtgaagttacaatgaggctgatgcgtgatcagcgagagcctttaatgagattcctgaatttgacaacttgtacctggatatg

SEQ ID NO: 60208 - DNA, 100 bp, Homo sapiens
caagaagaaacgcctggtgcagagccccaattcctacttcatggatgtgaaatgcccaggtacgcaaagagaaccagtggtgtgaagagaagtgaaatgt

SEQ ID NO: 60209 - DNA, 100 bp, Homo sapiens
tagcagcagaagagaagaagaagcaggatgaactgaaacggattgccagagaattggcagaaggctcatgctgaagattcggttatggaccatcatttcc

SEQ ID NO: 60210 - DNA, 97 bp, Homo sapiens
gagtacttatgaaacttatgccgccaggaattgcctatctgtttgccaaagcttatctggtttccaagaaaccgcagtacctggacacatgtattcg

SEQ ID NO: 60211 - DNA, 100 bp, Homo sapiens
aaagacagatgtatggctgacaagacgctcccagagtgttcaaaattacctagagcagcacttgaggcatgtcacaagggctggggcgtcagcgtcgtgg

SEQ ID NO: 60212 - DNA, 101 bp, Homo sapiens
gtggtgcgctgtcttcccgcttgcgtcagggacctgcccgactcagtggtttgttgataagccggggcccttcgtgggaccctgcggtcactggatcaggc

SEQ ID NO: 60213 - DNA, 100 bp, Homo sapiens
ggctgctggagagttgaatgccagccaccagccatgggagctcgaggccatgagcagatataccagcccagtgaacccagctgtcttcccccatctgacc

SEQ ID NO: 60214 - DNA, 98 bp, Homo sapiens
tcaggagtgaagctgcagaccttcgcggtgaggagtttgaggtgggcagcattacttccatctttagcaatcgggccgtggtgaaatacagtcgtctg

SEQ ID NO: 60215 - DNA, 75 bp, Homo sapiens
gtgagggttctggttcccgccggcgagcacttcaaatgcttcaccttcagaaggcgcaccactagcaggaagtta

SEQ ID NO: 60216 - DNA, 100 bp, Homo sapiens
ctgaaaactccctcttcgactcccgcgggtggcccctctggcatgggtcaaagaattgactgtagatccaactgctgctggtgatgttcgtccaataatg

SEQ ID NO: 60217 - DNA, 74 bp, Homo sapiens
ccttctatgctttcctggctagcaaattctgtgaatatgaaaggagatttcagagacgggatttcgccatgttg

SEQ ID NO: 60218 - DNA, 75 bp, Homo sapiens
caacctctacaaggccaagttcatctcctccgtcaccagccacatctaccagcacttgcacctcctgcgccgccg

SEQ ID NO: 60219 - DNA, 90 bp, Homo sapiens
agatgatcttggaggaaatgaagaagccgacagaggatatgtgtctgactgaccaccaggtacaggtttgcagattccgccagcagcaca

SEQ ID NO: 60220 - DNA, 97 bp, Homo sapiens
caaaccgctagcaaagggagaagtctcgggtttgacaaagccctccaagccacaaaactgtggtgaatggaaaagaatgtataaacttcgcctcatt

SEQ ID NO: 60221 - DNA, 50 bp, Homo sapiens
gtgtatcaaagtgtggactgagggatttgtcttggctgttactatgacac

SEQ ID NO: 60222 - DNA, 74 bp, Homo sapiens
gggacagactggccgttgctgtggagacgcctgaactgataaatttcaaacggaagagagtggcagcatttaga

SEQ ID NO: 60223 - DNA, 51 bp, Homo sapiens
cttagcggtagtaactttgtgttatggagatctggaagccctcaaaaagga

SEQ ID NO: 60224 - DNA, 100 bp, Homo sapiens
gaggttgcaggactctttctgttcaggccagaccctctgggagcttctcagccattttccacagatcaggttctgggccggagaaggggcgacgttcggg

SEQ ID NO: 60225 - DNA, 50 bp, Homo sapiens
ctgtggtcacttgattttggagaaggccatgttacaggagctgaattttg

SEQ ID NO: 60226 - DNA, 75 bp, Homo sapiens
gaggcgattgcgggggcctgggctaggctattttggcattctgctggatatatgttcgtaaataccaaagtcggc

SEQ ID NO: 60227 - DNA, 100 bp, Homo sapiens
cgggagcacccttccctggaactgctacaggcttcctgaggctgcggtggtcacgcttcgcccgtgtcctcctcacccgctcctgcgccatcctgcccac

SEQ ID NO: 60228 - DNA, 98 bp, Homo sapiens
tgcacatttgtgatgatagccagtcccgagagccagccttaatacagatattggcagctgctgcagctgagcgagatgtggtttatttcacctttggg

SEQ ID NO: 60229 - DNA, 100 bp, Homo sapiens
gtttgcatgaagtcgagtagttcagttgtggaattggttatgctactgtgttctcagcctcctgacaaggtgatccgggcgggccccgcaggaattttat

SEQ ID NO: 60230 - DNA, 98 bp, Homo sapiens
atcggtggtaacgacggcctcagcaggcggggaagatgaaaggagaaactccagaaaatcttgccaaacttctgaccaggatgtatttaaaatcagaa

SEQ ID NO: 60231 - DNA, 100 bp, Homo sapiens
gcgggcggcttgggcagcccgcgggcgcctcaggtatgacgctgggcgggatggcttcatcgacctgatggagctgaagctgatgatggagaagctgggg

SEQ ID NO: 60232 - DNA, 99 bp, Homo sapiens
cggcctacgtgaacaacctgaacgtcaccgaggagaagtaccaggaggcgttggccaagggtgttcctgatccaagcagaaccctgttatttgaagagc

SEQ ID NO: 60233 - DNA, 82 bp, Homo sapiens
cgtcactccgtctcgccctgccccggcggggggtcaggatcctccacaggtcaaaatgcagatcttcgtgaaaacccttacc

SEQ ID NO: 60234 - DNA, 99 bp, Homo sapiens
gacaacaggatcgtctcgtccaaggtgctacagaatattttagaaacagaaaatgaatattctaaagaacttcagactgtgctttcaacgtacctacgg

SEQ ID NO: 60235 - DNA, 100 bp, Homo sapiens
aacacctcaaggttgaagcagaagaataaggagaaggataagtcgaaggggaaggcgcctgaagaggacgaagagcccccctccatgcgcctgaaggccc

SEQ ID NO: 60236 - DNA, 101 bp, Homo sapiens
tgtgttcttctggatcccttttgtctacttctattatgaagaaaaggatgatgatgatactagtaaatgtactgaatccctttgcccacgtccagctgaag

SEQ ID NO: 60237 - DNA, 99 bp, Homo sapiens
atgggaagtgaggtgaaaagcttctgcagcgagaagtgctttgcggcctgccgacgagcctacttcaagagaaataagttgcctttccccatcttcctg

SEQ ID NO: 60238 - DNA, 74 bp, Homo sapiens
gcccgtatagttcagggccggacagcgagcggcggcgacttgccagtaagacagccctgacagcacgctccagc

SEQ ID NO: 60239 - DNA, 83 bp, Homo sapiens
gagagagcgagctgagtggttgtgtggtcgcgtctcggaaaccggtagcgcttgcagcatggaaccacgtgaatgttgagggg

SEQ ID NO: 60240 - DNA, 100 bp, Homo sapiens
caagttatagttgtggcttctggaaagggtggagtcggaaaatctactacagcagaacatggcagagaagtttctggatggagaacttcctctggattcc

SEQ ID NO: 60241 - DNA, 75 bp, Homo sapiens
aagcacattaacatcagcttccacaggagaggctcctgagcgctaggtccgcactgtggtgactgaacccagaag

SEQ ID NO: 60242 - DNA, 90 bp, Homo sapiens
ggttgatgacattgacgacaggcgggagtttcaggaaactctgcatgattctggaacagagtgcacaccaggagaatctaagaatttggg

SEQ ID NO: 60243 - DNA, 124 bp, Homo sapiens
aaggcaagaccgaattcagaaggatatcgacgtcgtgatccagaagtccagagctgaggactgcctgtttgcagatgtccagaaggcttcttgggggaatattgtcaacatcgagacccctgtg

SEQ ID NO: 60244 - DNA, 100 bp, Homo sapiens
tctggcctcggcgccaagatcccagtcacaattatcaccgggtatttagcacccagtcagcttgaagagtttcaaatggaccctaccactgagaaatcaa

SEQ ID NO: 60245 - DNA, 90 bp, Homo sapiens
cgccataccttggaacagcataactggaacatagagtatcagcagcgtcgccagcaggagaatatgcagcgccagagccgaggagaaccc

SEQ ID NO: 60246 - DNA, 75 bp, Homo sapiens
gcttcctcccagcgttcccaaatcattcgctccaagttccgatctgtccagggaccttgacccagcccctctcag

SEQ ID NO: 60247 - DNA, 113 bp, Homo sapiens
attatttcccctccgactgggccggtgccatcggaaaccggagtgaccagaggagggacacggctggtgagattggagagatgaaggatggagtcccagagggagcacaactt

SEQ ID NO: 60248 - DNA, 51 bp, Homo sapiens
agagaaagtgattacagacattgccgggacaatgcttctggagaagctgcg

SEQ ID NO: 60249 - DNA, 98 bp, Homo sapiens
aaggcttctaaagtatacgccacagcacatccattgtggagcagccttttgggcatctacaaatctgaaggacaaaacatggttcaagcatctgggca

SEQ ID NO: 60250 - DNA, 100 bp, Homo sapiens
cttaggaatccgggcttttgctgatatgcatgcatgtaccgaccttctgaacaaggccaacacctatgcaggacaatgaaaagcgaaccccattgcacgc

SEQ ID NO: 60251 - DNA, 100 bp, Homo sapiens
ttagttctgtaacgccatctcccaccccagagaacgagtatggcatgcagctgtaccagaattatatgcatccatatcaaggtagaagtggctgcagttc

SEQ ID NO: 60252 - DNA, 88 bp, Homo sapiens
aggagctttttgcttagcactgaaaattctggataatggtgaatggttgctgcccattgaaagagctgctcggaagcagaaggcccgg

SEQ ID NO: 60253 - DNA, 75 bp, Homo sapiens
ctagaatatacaaagacaaaaggagattctgatgaagaagttattcaagatggccatgctggagtatctgccaac

SEQ ID NO: 60254 - DNA, 50 bp, Homo sapiens
cgtggaagaaggaattcagaagcatcaagttttgcgtttggctccctaat

SEQ ID NO: 60255 - DNA, 49 bp, Homo sapiens
gacactttctcagttacagagaggctggagcattggatttgctaaagga

SEQ ID NO: 60256 - DNA, 49 bp, Homo sapiens
gctcatgggcacggctcgggacggagagctggagctgctggcaggagag

SEQ ID NO: 60257 - DNA, 98 bp, Homo sapiens
accccgcggccgcaccttcccgccttctcaggcctccggtgtggctgtctctgatggtgtcatcaaggtgttcaacgacatgaaggtgcgtaagtctt

SEQ ID NO: 60258 - DNA, 90 bp, Homo sapiens
cactagatttggaactacggtgccattttctgtcacccaggctggagtacagtggcacgatcacagctcactgcaccctcaacttcccag

SEQ ID NO: 60259 - DNA, 100 bp, Homo sapiens
gctgcttcctcttgtgcggaggcacgggctccttctgctggatcagacttcgcggcaacctccgggactctgacgaacaagaggaaagtatggggaagga

SEQ ID NO: 60260 - DNA, 100 bp, Homo sapiens
ccacttgcagcatggagtcgcccgcctcgagccagcccgccagcatgccccagtccaaaggaagctcttcgtgggcggtcttgactggagcacgacccaa

SEQ ID NO: 60261 - DNA, 100 bp, Homo sapiens
cgtcatcacagtcaactatcgacttggagtactcggaggtatctttaaaatagcttcctgggcagatctagtaaatgctcacgtggtgccaggctcagga

SEQ ID NO: 60262 - DNA, 83 bp, Homo sapiens
agcccttcagcgaggaagctacacttttcaccaaggaactggtgctgcagcgagaggtgtttcccattaaacactaccaggac

SEQ ID NO: 60263 - DNA, 101 bp, Homo sapiens
cagagcctcgcctttgccgatccgccgcccgtccacacccgccgccagacggccgaagccctgcagcccacgctacagccggagatgcagctcgagcacgg

SEQ ID NO: 60264 - DNA, 80 bp, Homo sapiens
cttgttaacatttccagataatgtagaacattgtgaaacaggcatggaagaggagatggttcgtgttacgcagtggccgt

SEQ ID NO: 60265 - DNA, 83 bp, Homo sapiens
ggacgttcggccaagggaccaaggtggaaatcaaacgtttactcctggcttgggggcattaggaagcactggaggctcttcgg

SEQ ID NO: 60266 - DNA, 100 bp, Homo sapiens
cttttgaaggtgcaagatactatataaaattcatctgaaaactacattaagatgaagacctttgaaggtttctgtgctttgcatctcgctgcaagtcaag

SEQ ID NO: 60267 - DNA, 82 bp, Homo sapiens
acccttgccgctgctgtcctgcgaccccaagcagctggtaatgccgctgtcatcaaatatgaggagaaacctccaaaaccag

SEQ ID NO: 60268 - DNA, 83 bp, Homo sapiens
atagatacaatcagtttcacataagtttgtcactcaagccctatcagaaggttggtttgaattggctggcattggtacataaa

SEQ ID NO: 60269 - DNA, 75 bp, Homo sapiens
cggcgtctccggggaaagccgtggccccgagggcggatccgagctgggagtgtccactcgccttccaccagcatg

SEQ ID NO: 60270 - DNA, 100 bp, Homo sapiens
cagctgacgaagctcgggacaggatcaaccggttcctcccaggcggcaagctgtctctgcttggaggtgccctgcccatgtttgagctggtggagctgca

SEQ ID NO: 60271 - DNA, 101 bp, Homo sapiens
aaccaacgacaagaccaagaggcctgtggcgcttcgcaccaagaccttggcggaccttttggaatgttcaaaccttgtactactcagctgatcacaagctg

SEQ ID NO: 60272 - DNA, 90 bp, Homo sapiens
gcagtaatgtcagcgagaatgacgtgctatgggaagagggcaaggcagccttggagcagctgcttaagttcatggtgcaccctgccatct

SEQ ID NO: 60273 - DNA, 100 bp, Homo sapiens
gacagtgttctgctttcatggagttcacagaagagtcgaggaggattatgatcttttgggtgaaaaaataatgtcctgtggtatggatcattctcttaaa

SEQ ID NO: 60274 - DNA, 98 bp, Homo sapiens
cagcaactcccccatcgtatgaatctgaagaacgcctcaggcggggtgatgacctcagattacagatggccctggaagaaagccgaagggacacagtt

SEQ ID NO: 60275 - DNA, 83 bp, Homo sapiens
tggagagcttcagcttcctcaatgaagacgaagatgaagacaatgatgttcctggggacagccgcttacaaacacgcagatgg

SEQ ID NO: 60276 - DNA, 83 bp, Homo sapiens
gtgacatctgggccggaccagctggtgctgcgcggcgcaggtgactattatatggttaaaaagattttggaggaaaacagttc

SEQ ID NO: 60277 - DNA, 87 bp, Homo sapiens
aacaggaacatgaagccttgataaaacagcagttttacttttctcacaaaaacttgtaagacaatgagttacaaggcactaatagtt

SEQ ID NO: 60278 - DNA, 90 bp, Homo sapiens
acaccagacctacggagggagctggaaattcctgacgttcattgatctggtggcctttttgaagatgtaactattagagctgggcattct

SEQ ID NO: 60279 - DNA, 85 bp, Homo sapiens
atgcaccctttttgtcagattatcaggatgaggcagccctagcaaaccaagagtgagccaccttggaagtagatcctgcagtccc

SEQ ID NO: 60280 - DNA, 96 bp, Homo sapiens
gcggagacccttcgagaaatctcgtctcgaccaagagctgaagctgatcggaagaaatgttggctatttggcgatgagaggtggtgaacagtgacc

SEQ ID NO: 60281 - DNA, 100 bp, Homo sapiens
ctgaagccggcgctgctctgtggggctctggccgcgcctggcctggccgggaccatgacaccaatgggaatcccaatggggaagtcgatgctggtgcttc

SEQ ID NO: 60282 - DNA, 51 bp, Homo sapiens
ttgaaagtcttgtgtaatgaagcagaacgatttcgagatttactactgcct

SEQ ID NO: 60283 - DNA, 75 bp, Homo sapiens
aagctgtggaagactccaagccctactgggaggcacggagggtggcgaggcagcataccataaagtctccaaagg

SEQ ID NO: 60284 - DNA, 100 bp, Homo sapiens
cgcggaaatgttgtccaaagttcttccagtcctcctaggcatcttattgatcctccagtcgagggagttgaccacatttggccatttcccagaagggccc

SEQ ID NO: 60285 - DNA, 100 bp, Homo sapiens
aggactgctacgtctttgcccaggagtacgcacctgctggggacctgtttgacatcatccctccccagactggctttgggcctgggaggaaagaagagag

SEQ ID NO: 60286 - DNA, 75 bp, Homo sapiens
agattctgctcacggaactgcaggactacaggaatatgtggaagctgtctcttttcaacacttcatcaaaacacg

SEQ ID NO: 60287 - DNA, 101 bp, Homo sapiens
actcctcccggaggcgacatggggcacccggtgtaccgcggcgagaagccccagctgcactacgcggatatgttcaaggaatgagtgatttactttcccct

SEQ ID NO: 60288 - DNA, 100 bp, Homo sapiens
gatcgtgaccgagaccgtgaccgagagcgtgaccgagagcgcgaatatcgtcatcgttagaagggggagaagcgagcggacatccagctgaacagcttcg

SEQ ID NO: 60289 - DNA, 82 bp, Homo sapiens
gttaattcaacagttcaccaccattaccggtgatgctgtggagtcttcaaaaagcccgaccactctggattacaaatttaca

SEQ ID NO: 60290 - DNA, 100 bp, Homo sapiens
cagtgacccagaccctctcctttccctttgagaccgtgaagagaaagatgcaggtgcagtagacattgttgcaatcatgatcggcaatctgaaaggcaca

SEQ ID NO: 60291 - DNA, 80 bp, Homo sapiens
acccaggataacccctccagcggcaaagccaggctctccccagacttcacagagaatgcagttgtcttgacttcaggtct

SEQ ID NO: 60292 - DNA, 98 bp, Homo sapiens
gcggatcgccgcgctcagcgacaaacaaggccgttgccgtctgcacccagaccctgagccgccgccgccggccatggaggtggcgcccgagcagccgc

SEQ ID NO: 60293 - DNA, 98 bp, Homo sapiens
agcttttcagagatgagtatgcgctgtatagaccactgcaggatgaccggaaagaagggatgaccgcgtttgtggaaaagagaaaggccaacttcaaa

SEQ ID NO: 60294 - DNA, 82 bp, Homo sapiens
ctacagccaagctccaagtcaatatagccaacagagcagcagctacgggcagcagagttttaaaatcaaagatgggaaaatc

SEQ ID NO: 60295 - DNA, 50 bp, Homo sapiens
gctggtttcattcgaggtttcgggccggtcaaaatgcagatcttcgtgaa

SEQ ID NO: 60296 - DNA, 75 bp, Homo sapiens
cccgccgccgctgctgctgctgctgtgctcaggcctggccggacagaatgtaaaaagggcagctctctggcatgt

SEQ ID NO: 60297 - DNA, 100 bp, Homo sapiens
cacttgtacgcctgtggaacgggggcttttcatccaatttgcacctacattgaaattggacatcatcctgagacacagataatgtacaagtggatagagc

SEQ ID NO: 60298 - DNA, 101 bp, Homo sapiens
gccacaatttccatcaaaaagtgattaagcagagaatggagaagaaggttgattccagactcagcccacctgcacccaggtgaaataaacagctttattgc

SEQ ID NO: 60299 - DNA, 83 bp, Homo sapiens
aaaagcgaaatgggcacaccacaggcaacaagattgacctggctgaaaggagagaggtttcccagcagcgagctgaagaattc

SEQ ID NO: 60300 - DNA, 100 bp, Homo sapiens
tcccaaaagattatcccctccgacctcctaaaatgaaattcattacagaaatctggcacccaaatgaagcagcattaagaggtcttctgggagccttaac

SEQ ID NO: 60301 - DNA, 112 bp, Homo sapiens
ggagcaaagggcagtcggcggagcttcgccaaggctggcgcagtcgggtgataaaagaaaatgtggctgaagttacccgaagttcagcttgcagtgtaattcagaagagtta

SEQ ID NO: 60302 - DNA, 83 bp, Homo sapiens
ctgacgctcgtggggctgcagtactcgggcaagaccaccttcgtcaatgtcatcgcgagtgctccaagctcccgaagccgaag

SEQ ID NO: 60303 - DNA, 100 bp, Homo sapiens
agaaattggattggcggtgattttcatgactacaaagaattactgtgatcctcagggccatcccagtacaggccataaaattttgagtagaaaaatccag

SEQ ID NO: 60304 - DNA, 100 bp, Homo sapiens
aaacctgttttgcatttgccttgacaccacaacaagtgcagcaaatcagtagttccatgagcatctttccttgaagaagtacattattgacattgtggtt

SEQ ID NO: 60305 - DNA, 100 bp, Homo sapiens
ccagttggaagcccgggaccgtttaaaaaactggtctgccatcatggatgttctcgcagaagcaaatggcacctttgccttaaaccttttgaaaacgctg

SEQ ID NO: 60306 - DNA, 76 bp, Homo sapiens
ctttccctccagctctgtctatcctaccaaggctgatgaaccaattgcagattatgctgcaatggatgatgtcatg

SEQ ID NO: 60307 - DNA, 101 bp, Homo sapiens
gtaaaggatgttcatgaagattcaataacagttgcatttgaaaacaacagtgcctgatttgagatggggtcccaggtctcggtggaatcgggagctctgca

SEQ ID NO: 60308 - DNA, 87 bp, Homo sapiens
gctctctcctttccctgttagacatgtatctagatcaccatggcgactggacagaagttgatgagagctgttagagtttttgaattt

SEQ ID NO: 60309 - DNA, 75 bp, Homo sapiens
taaaagatcttcaaaaggagcagaaaactttacagggcttcaagcagcaagctcttacagtatccacagatcctg

SEQ ID NO: 60310 - DNA, 88 bp, Homo sapiens
tgtccagcatccgaccaccgaggctggagggggagaacacccagctgcaagctttcttcctggtggcagatgacatcatggattcatc

SEQ ID NO: 60311 - DNA, 50 bp, Homo sapiens
gattctaattcaacaaatcataacttggaatatattattcgagtgcaaag

SEQ ID NO: 60312 - DNA, 90 bp, Homo sapiens
gcaggctccagagctgagcttatctagtcaggatttggaggctgattcaccccaagagtggccgttcctaccacgaggagttcaaccctc

SEQ ID NO: 60313 - DNA, 119 bp, Homo sapiens
cgaggcgtcgccgcatcccggacggtacttctgccactgctgctccgtggagatcgtcccgcgcctgccgggctgaagaagatgcagagcagcctgaagctggtggactgtatcatcga

SEQ ID NO: 60314 - DNA, 74 bp, Homo sapiens
aacaagctggaggagctgtggaagggccagctcttccgaggctccagcctgcttttccgccgggtgtcatcagg

SEQ ID NO: 60315 - DNA, 75 bp, Homo sapiens
cctgtacagcctgcagaactgccaaatttgagtttcatcatggtgactatgaaaaacagtttctgcatgtactga

SEQ ID NO: 60316 - DNA, 100 bp, Homo sapiens
caggtgggcaggagctaccactcagcaccatgagcaccgccacagggccactgtgggctcgagtaggggatgaccacctgctgcttcttcagggagagca

SEQ ID NO: 60317 - DNA, 74 bp, Homo sapiens
ttttaggcggtatcaaatggaaagtttttccaaatattcatctgtacagcttcagaatggcagaagatgatcca

SEQ ID NO: 60318 - DNA, 74 bp, Homo sapiens
gaagctattacattgcttgaacaaaataattgggacttagtgcgatcaccagaatataccaattgtcggtatct

SEQ ID NO: 60319 - DNA, 75 bp, Homo sapiens
attggcccaggatgacagctggagaatggagtcaggttaataatccagttgcatgagaaggaacagcatgttcaa

SEQ ID NO: 60320 - DNA, 74 bp, Homo sapiens
tgaaaaataccacgacaaaaccaccctagggcttctttcctgtcgttgttggctttattagaagagtgccagtc

SEQ ID NO: 60321 - DNA, 74 bp, Homo sapiens
cttcgcgcgcgaacccggctttcgcatttgggaccctgcaggagaggtggagaagagcgagtacttgagaaaga

SEQ ID NO: 60322 - DNA, 100 bp, Homo sapiens
ccaaggaggacgagggccggttgccgggcgcgggcgagaaagagatgtggtatggtgtattcctgtgggcactggtgtcttctctcttctttcatgtccc

SEQ ID NO: 60323 - DNA, 82 bp, Homo sapiens
cggctccttcggagacatctatctcggctctgacgcccgctctgcggcttcggtgtttgaacaggccacagtccaggagcgc

SEQ ID NO: 60324 - DNA, 100 bp, Homo sapiens
aagagtgccacttgcacataaggagtgggaattcgaactgagtcaagctacaacttcaagcagaagagagaggagttgtgtctatcaaaggagtgtgtgc

SEQ ID NO: 60325 - DNA, 90 bp, Homo sapiens
gaaagaaatgagcagctttggataatgacgacagcaacccgaagacagggaaatttagaaagtgaaattcgttattctacatggaagaaa

SEQ ID NO: 60326 - DNA, 101 bp, Homo sapiens
ccagcggctgaggaggggccccagcagcccccgaaggccctatcaggacatggagtatgaaagacggtgaccattgtgaggtagatattttgttctaattt

SEQ ID NO: 60327 - DNA, 100 bp, Homo sapiens
cgacgcccgcaggtcctcgcggtgcgcaccgtttgcgacttgagccaagattttcttcttcactcctcgcttggtggctcccagccagaggccggcagtg

SEQ ID NO: 60328 - DNA, 98 bp, Homo sapiens
aatttgactcctgattctgtgaccttgagcttcatagaggaaatgaaagactcctctatggaaagtctattgaagacaatgaagtatatttgcctaat

SEQ ID NO: 60329 - DNA, 100 bp, Homo sapiens
cagcaagcagaggctgggggggggaaagacgaggaaagaggaggaaaacaaaagctgctacttatggaagatacaaaggagtgtgaacatggctacgcct

SEQ ID NO: 60330 - DNA, 74 bp, Homo sapiens
tgcacccttctgtacccatcagtaacgatgaggtatgtgaaagcaagaacagagctaacatgggattatggcta

SEQ ID NO: 60331 - DNA, 100 bp, Homo sapiens
cttgaatgtctcctttgcctttgagctcatgcaagatggagggttggaaaagccaaaaccgcggccagaaggtaggaatgaattgatagccagatacatc

SEQ ID NO: 60332 - DNA, 75 bp, Homo sapiens
aaaggaagagagcactgcagccagtgaaaccactgagacacgttgaatccgaggtgacatctgtggtctggccga

SEQ ID NO: 60333 - DNA, 101 bp, Homo sapiens
catgagggaaaagggacgtaggaagaagggcaggacctgggcggaggccgccaagacgcctttctgagaaaagtctacagcattctttctctgcaggttct

SEQ ID NO: 60334 - DNA, 100 bp, Homo sapiens
ggaagatggcggatctggaggagcagttgtctgatgaagagaaggggaaactgactctactctgtgatgccaagacagatgggagtttccttgtacacca

SEQ ID NO: 60335 - DNA, 100 bp, Homo sapiens
ccggaggtgacaacaataacaagactgtccttcggacaagttttagccccagcatgagaccagatgtaagctctcctccatccagctcctcaacagcaac

SEQ ID NO: 60336 - DNA, 75 bp, Homo sapiens
aagacatttcctgctcggaaccttgtttactaattgtaaaggatcagatttgtgatgtgagaatatctgacataa

SEQ ID NO: 60337 - DNA, 100 bp, Homo sapiens
cggatcgctgtcattaaaaattaagcgtggcttttgaggaagatgtgacaactaccggaggatctgtgccagttcagaagcaggcgagcctcttccctga

SEQ ID NO: 60338 - DNA, 100 bp, Homo sapiens
agatgatggcccatacacgtgttctgttcagactcaacatacacccagaacaatgcaggtgcatctaactgtgcaaggtgatgcagaagatggggaagaa

SEQ ID NO: 60339 - DNA, 73 bp, Homo sapiens
agctatcaggggaagatatgcatcagttccatcgagccattactacagaaattcaccatcaccttggctctgt

SEQ ID NO: 60340 - DNA, 83 bp, Homo sapiens
ctactgtgcgctcgatccagcaccatggggaagcgggacaatcgggtggtgtgccagaaggctggcgagatctccctcctgaa

SEQ ID NO: 60341 - DNA, 100 bp, Homo sapiens
agcccatcgtgctgcagtacgtgcctcatgatcgcttcaacaaggtgaggtcccagcttgaagagaaagaaaacaagaagttccctgtgtttaaggccgt

SEQ ID NO: 60342 - DNA, 100 bp, Homo sapiens
aggtgttaacctcagaagatgaatataatctgttgtctgacaggcatttcccagaccctcttgactcctgggattctgctcagagaaccaaagatgtttc

SEQ ID NO: 60343 - DNA, 100 bp, Homo sapiens
ggcggatcatattccttcatctaccatggctcagccgggaactctgaacctcaataacgagagtgtcaatccatatctacaaggacagagactggataat

SEQ ID NO: 60344 - DNA, 74 bp, Homo sapiens
ggagcacatgcacaaccgcttcgtggtctaccgggacctgaaggtgccaggcccacccccaggtgttcccgcgc

SEQ ID NO: 60345 - DNA, 100 bp, Homo sapiens
tggcaaggtgcatcctgaaatcatcaatgagaatggaaaccccagctacaagtatttttatgtcagtgccgagcaagactctgcacttgatggatcagct

SEQ ID NO: 60346 - DNA, 100 bp, Homo sapiens
gtgagatgtttcatcccaacagacaggaagatgtcacccaagcgcatagctaaaagaaggtcccccccagcagatgccatccccaaaagcaagaaggtga

SEQ ID NO: 60347 - DNA, 75 bp, Homo sapiens
ggaaattatgaccaagtacctcaccccaaagcttcacttaaaggacaagaagcgatttgaaaaagctaaccagga

SEQ ID NO: 60348 - DNA, 87 bp, Homo sapiens
ttataaagagaaggaatctgtgaatgccaaagttcttaagccaagtatcttcaagaccttctcatggagagtgtgaatttttccccc

SEQ ID NO: 60349 - DNA, 50 bp, Homo sapiens
cgggtgtctcgtgtgtgaacatcacagatcaatgaactgagccatgttca

SEQ ID NO: 60350 - DNA, 100 bp, Homo sapiens
tgcacagcaacttggagaagtggtgaagcttcatccccatgaactaaataatctcctgtctaaagcaaatactgtggtctggggttgcaaatgaaccatt

SEQ ID NO: 60351 - DNA, 96 bp, Homo sapiens
ggcatcagggaggctttcagccggagaagcgagtttcagctgagactaattgagcagcgtgatactttgaaagaaacaaatgaagagcttcgatgt

SEQ ID NO: 60352 - DNA, 100 bp, Homo sapiens
ggtgccccggacaggtgtggccagcacgtcttgccaagaccccaccaccccacccacccgcatctgtggccttctgttaagtgggcagaccaacatccac

SEQ ID NO: 60353 - DNA, 50 bp, Homo sapiens
caacacgcccctcaactggctgctcctggtaacgtttttatccatggatg

SEQ ID NO: 60354 - DNA, 74 bp, Homo sapiens
attccgaagcaatcttcctgctaaggccattggacacagaatccgagtgcctaaattaacaatggcgaaatgca

SEQ ID NO: 60355 - DNA, 88 bp, Homo sapiens
agattccatggccaggccccactggaggagatgaggaaggctgccgaggatctggaaattatttgtttagtgaatgaccctaggcccc

SEQ ID NO: 60356 - DNA, 89 bp, Homo sapiens
tggaaggcacagctcactccagcactacgtgaccagcacgttcctggagccgagagaatggtcagtgtcttgggacaaggtgcgcattc

SEQ ID NO: 60357 - DNA, 75 bp, Homo sapiens
tggccatgttcctcgtccactacgggcatcgctgaacatactgacttgtggagtcattggctcctattcggtggt

SEQ ID NO: 60358 - DNA, 75 bp, Homo sapiens
gagcctcctgtggatatctgtctaagtaagatggaccacacatccccgacctacatgcttgctaacttaacccac

SEQ ID NO: 60359 - DNA, 82 bp, Homo sapiens
cgagggcaactttggaggccccctggaaggctttaggatccaggagcaggccgggctctcgccatgggtcactgtcgcctct

SEQ ID NO: 60360 - DNA, 99 bp, Homo sapiens
ctcgggaagagggagagcaaacttggctcagcccagttgaccccctgtttacagtgccagcgccaccaccgccgatttccagcagtctcacgcctcaga

SEQ ID NO: 60361 - DNA, 75 bp, Homo sapiens
gcctgaatacatgatttaaacaagagatttccacagaagcatcttcatgatacagttaagaggaatcttgacagc

SEQ ID NO: 60362 - DNA, 74 bp, Homo sapiens
gaatctgaggtggctcacgttgaccaactctttgatgatgcatccaggtcctggacccaagccagaagcctctg

SEQ ID NO: 60363 - DNA, 82 bp, Homo sapiens
ccgggggcggccacggtgatgagccgggcctggcggacgcggcgccatcgcagtcagatccacctccgacccttaagccaga

SEQ ID NO: 60364 - DNA, 75 bp, Homo sapiens
ccgatggctctgtgcaacggagactccaagtgtaatgttcaagctcagaaatgccttatgtggatcgtcagaatc

SEQ ID NO: 60365 - DNA, 73 bp, Homo sapiens
aactctgcattctcgcttcctggaggtcatttcttcagatagctccccagctgtggaaaatgagcatcctcaa

SEQ ID NO: 60366 - DNA, 98 bp, Homo sapiens
gtggttgtgtggtcgcgtctcggaaaccggtagcgcttgcagcatgttggccaagtgaaatttgatccacccttaagaaaggagacagaaccacatca

SEQ ID NO: 60367 - DNA, 75 bp, Homo sapiens
gctgcggttcggctgctgccgagcattttgaaagcgaagcagaagccgtagaatcagcggcgagcctgttgaaag

SEQ ID NO: 60368 - DNA, 100 bp, Homo sapiens
ctatcaagtagaaaaacaacaccaacagattctgggtggagagattcaaccagttagcgtgaaagttggagataaagttcttctcccagaatatggaggc

SEQ ID NO: 60369 - DNA, 74 bp, Homo sapiens
ggagatggagacgctgcagtctcagaatgaggaaaatggggagcaggaggctgacaatgaggtagacgaagaag

SEQ ID NO: 60370 - DNA, 75 bp, Homo sapiens
aggtttttatctgaacgagtaaatggaaggccagattacctgtccctaatactgagcagaagctggtgaatgaaa

SEQ ID NO: 60371 - DNA, 96 bp, Homo sapiens
gacgaggaggaggccatggtggtggccgtaattccgcggcccgagccgatgctcagagaatttcttgaggttggcaaaaagcagcctgctctggat

SEQ ID NO: 60372 - DNA, 85 bp, Homo sapiens
tgagaaggatgaagccacacaaggaatagccaggccagaagaaggaaggcctgtggtgagtgggacaggaaatgacatcaccacc

SEQ ID NO: 60373 - DNA, 98 bp, Homo sapiens
gcccttagcgaccccgcccgggccccctcagagtaaccagagagcacagagaaatgctggtgaaactggccaaacagaacaccaacaaggccaaagac

SEQ ID NO: 60374 - DNA, 74 bp, Homo sapiens
accccattttccgccagaacctccgcattgcccttctgggccgaatccgggtgcatggtattggcgggggccac

SEQ ID NO: 60375 - DNA, 90 bp, Homo sapiens
gtgcttttgaaccactggaaagtgaggaattttgaagtacaccgtggtgacattgtatcattggtggggagctgatcaccttctattact

SEQ ID NO: 60376 - DNA, 74 bp, Homo sapiens
ggggactcacggccgggacactcagggcaggaagccatcttcgacaagagcacagggaaggttgttttgaagac

SEQ ID NO: 60377 - DNA, 76 bp, Homo sapiens
attcgcagtggtcgcttcttctccttgggctgaagaagatgcagagcagcctgaagctggtggactgtatcatcga

SEQ ID NO: 60378 - DNA, 102 bp, Homo sapiens
gtggaagtgagaccgaaatagactctgaagtaatatctggactttgaaattgattggctaaaagatgtgtgtgaaaagaataagtggagtcacaagaattcc

SEQ ID NO: 60379 - DNA, 100 bp, Homo sapiens
gaggcggaagtaaaagcgaactacagtggatgggtgcagttcagggtccggcgggcggtggcctccgtggtgggcggctggctgctgtgtctgcgtgacc

SEQ ID NO: 60380 - DNA, 83 bp, Homo sapiens
ccgacagtgccctgagggccttcgagagctaccgcgccagacaggattgaaagaaggtggcaagaggaagaagcagaagcaga

SEQ ID NO: 60381 - DNA, 100 bp, Homo sapiens
ggaacaaggagaagaaccatggagactggaggaagaattcccaagccagagctttccagtgtcccagaagcttttgttgacaattccagtttccgaacaa

SEQ ID NO: 60382 - DNA, 83 bp, Homo sapiens
ttcacagtttgcgggactcagtcccatcactccaaggagagaagtttgcaatggattttggataaacaagatctgttgaagga

SEQ ID NO: 60383 - DNA, 100 bp, Homo sapiens
gagtctcaatatctgtcttcggtggactccttcggcagtccacccaccgccgccgcctcccagacttgccttcaaggtgtgcaagtaaggacttatctcc

SEQ ID NO: 60384 - DNA, 83 bp, Homo sapiens
acaggcttccagtacgagctggttaggaggcacagggcgtcggacctgcacgagctgtctgagttgcatgctgagaatttgaa

SEQ ID NO: 60385 - DNA, 80 bp, Homo sapiens
gggatctaggcgacatggagccattgaagggaacaacacccttgatggaagatgttaccgagtacttcagtgaattcctt

SEQ ID NO: 60386 - DNA, 75 bp, Homo sapiens
atcaagcaggcagcgggctttgccagcaaaaccgaaacagcacctgtggaatcctctcaagaggaacagtcattg

SEQ ID NO: 60387 - DNA, 51 bp, Homo sapiens
cattaacctccagctttttaagcaggttacgagaagtttctgagaagctga

SEQ ID NO: 60388 - DNA, 100 bp, Homo sapiens
ccatgaatcaatgtctggtagccaccggcactcacggccatctggctgctgtgcacaggcgctcgtgaggctgccttccggaacattaagaccattgctg

SEQ ID NO: 60389 - DNA, 96 bp, Homo sapiens
gtctcagcagccatgtataagtccctagaactggcgattggacgatttgaaagtgaagatttgacctccatagttattgatctggatactattgat

SEQ ID NO: 60390 - DNA, 75 bp, Homo sapiens
atcaactgagagagatgcttaaaaatcaccagttactttaatgagtgtgagcagctgtgcccggccaagttttcg

SEQ ID NO: 60391 - DNA, 87 bp, Homo sapiens
ctgatggagagctgaacattactcttccagaagaggaagagagaagggcacagttacctaagtatcaacgtaatcttcctcggccag

SEQ ID NO: 60392 - DNA, 82 bp, Homo sapiens
agggcttctcctatgactacgtctttgactggaacatgctgaaattctgggccgaattcattttgttttcctgcctcctgct

SEQ ID NO: 60393 - DNA, 90 bp, Homo sapiens
gtgtcctctgcctaccagaagacagtacctgtcgaagctgattgctcatttagaaagtggatgtgtgggataacatgtccaatgtgtccg

SEQ ID NO: 60394 - DNA, 83 bp, Homo sapiens
gaacctttgctgtctatggatctgctctaaaccttatagcctgcttatgggggaagacaatgcagatcttcgtgaagactctg

SEQ ID NO: 60395 - DNA, 83 bp, Homo sapiens
tgccggctgctccgcaccccggggtcccaggaagggcggcccagtacatatccagccatactcatggaccccagtgatttccc

SEQ ID NO: 60396 - DNA, 75 bp, Homo sapiens
ctgagggccttcgagagctaccgcgccagacaggtctcctctgagcctccggcctccataagacccaaaacagat

SEQ ID NO: 60397 - DNA, 71 bp, Homo sapiens
ttttgatgtggatgatgccaaagttttattaggagaacccgtacagatagcgctgactctggacattgcaa

SEQ ID NO: 60398 - DNA, 80 bp, Homo sapiens
ccatggcagggaacttttggcagagctcccactagactgggctaatgctaatgtcagcagacagattgaggacactgtat

SEQ ID NO: 60399 - DNA, 100 bp, Homo sapiens
catccgcctttgatcgtcttcctcttcagccatccagatgggaaactcttgtctagtgatgtgactcattacgtgatcccagactggaaagttgttcaag

SEQ ID NO: 60400 - DNA, 73 bp, Homo sapiens
cggcgggcgagtgactgcggccacgcctgaaaggcgactctcctgtcctggatgcctcatcccttagtttcaa

SEQ ID NO: 60401 - DNA, 87 bp, Homo sapiens
cttttatggacgagttcttttctgagttcacacaaaagatgttggacaatttctacaattttgcttcatcatttgctgtctctcagg

SEQ ID NO: 60402 - DNA, 75 bp, Homo sapiens
ggggtcttcctcctccgccgttgacagtgattctaccagaaaggaatgaagaacagaaccttcaggaattgagtc

SEQ ID NO: 60403 - DNA, 101 bp, Homo sapiens
ctcagaaggtgccctctttgcaacatttcaggaaaacagagaaagaagtgataggagggctctgtaggtactggtgaccccggccggggcaggccccggga

SEQ ID NO: 60404 - DNA, 75 bp, Homo sapiens
cgggaaggaagatccggcgcggggcacaggatccggagctggagcccccagtatgcagttggcagtagatgtgca

SEQ ID NO: 60405 - DNA, 98 bp, Homo sapiens
atcgtggatggggaaatcatgactgcagtcacaatgaggatgtcacattaacttgttatgctttctaaaaccaatttttccaacaacaacgatttccg

SEQ ID NO: 60406 - DNA, 98 bp, Homo sapiens
gccacagattgtcgcctgcataatgtcttcaatgacttccttatgctctctaatacccagttcattgagaatgttggttcttacttgaaatctccaaa

SEQ ID NO: 60407 - DNA, 50 bp, Homo sapiens
caacaaccgaacatacccttctatccaggctttaaactccagagaacctc

SEQ ID NO: 60408 - DNA, 75 bp, Homo sapiens
gggccagctggtggaggcgatagacgagtatcagatgtaagaatgattgatgttggctgatattggagtgctcat

SEQ ID NO: 60409 - DNA, 133 bp, Homo sapiens
ctgtccgcccccttggccactgatcccccgaagagcttctgtcgccgctctaggattgcagagggaatggcatacatcgagcggaagaactacattcaccgggacctgcgagcagctaatgttctggtctccg

SEQ ID NO: 60410 - DNA, 75 bp, Homo sapiens
tttgaatttgacatctttacccgactctttcagagagctagcaatctagagaatagtacctatgacctgtacacc

SEQ ID NO: 60411 - DNA, 90 bp, Homo sapiens
ctggcagcatgtatatcttttgatgttgagaaagaactggagatgcagatcagcatgaggcaggagatggaattggctatgaagatgctg

SEQ ID NO: 60412 - DNA, 100 bp, Homo sapiens
cggtggaaaacacagatccagagtgttactggcttacaaattggattgagcatgtgcagtctttgccaacaaaaaaaattaccaagaaacctattccaga

SEQ ID NO: 60413 - DNA, 95 bp, Homo sapiens
ctcgcctcgactccaaatggttgaaaacagatatacaggatgctgtatgattatgttgaaaggaaacgaaaagaaaattcaggagcccaactgca

SEQ ID NO: 60414 - DNA, 82 bp, Homo sapiens
tgctcacacatggacaggtcaaagtattttgacaggtcatcgctgaacgggccaatgaaatgaacgccaatgaagactgtag

SEQ ID NO: 60415 - DNA, 96 bp, Homo sapiens
cttcctttttcgacgcctccgccgccgcctgaggaggcgagctagccgggagttacaccgccaccgccaggagtctcgctctcagtcaaaatctcc

SEQ ID NO: 60416 - DNA, 50 bp, Homo sapiens
ttacatcgactggatcaattcgcaacacccggacctaccgtgtggccgtg

SEQ ID NO: 60417 - DNA, 89 bp, Homo sapiens
tttgaggtccggcatgcgggcgtctggaggaacagcacagcatgctgggctctggatttaaagctgagcgcttaagagtgaatttgaga

SEQ ID NO: 60418 - DNA, 75 bp, Homo sapiens
aagcacctggatgagacatttgctacagcatcccacattaagtcaacggaagcctgatgttactttggattttat

SEQ ID NO: 60419 - DNA, 75 bp, Homo sapiens
aaaggtggtagagttgtcatctttcaacaggagcaggaggaagaagaatttggacttgatgaagaagatgaagat

SEQ ID NO: 60420 - DNA, 100 bp, Homo sapiens
ctggattacacacagcaagttcctgcttctgggacagctctactgacgacatgcgtcgggatgtccaggaaatttttcgcatgaccccccacgagaagca

SEQ ID NO: 60421 - DNA, 83 bp, Homo sapiens
agaaacctggatctttgctagaaagagagtaggagctgtggcgcggggccttccaggagtctgagctatgagtggcccctgtg

SEQ ID NO: 60422 - DNA, 75 bp, Homo sapiens
gtccattcgaagtgttggcagtcacaggagagaactcgatgccaccgcaacggtattggcgaaccggcaggatga

SEQ ID NO: 60423 - DNA, 97 bp, Homo sapiens
aatttacagagatcatcctcttcagaaacagtgtcatggagaaactccagctgggcccagagattctgcagcgggaaaatccaaggcttatttatgc

SEQ ID NO: 60424 - DNA, 100 bp, Homo sapiens
cgtgatatgttccagttgcacatttcctgcaaggactccaaagtggtgagggaacagagttcagaggcagcagaaactggagttagtgaaaatgaagaga

SEQ ID NO: 60425 - DNA, 90 bp, Homo sapiens
ggatttgatacgactgccataaacaaaagctattacaatgtggagtctgatgacttttcacagtaccaactcaaaggcttgcttaaaaag

SEQ ID NO: 60426 - DNA, 83 bp, Homo sapiens
gagcagcagtcctgcctgcaaagcctcttctggacttgaggcaaacccaggagaagaaggaagttgtggaagaggcagaaaat

SEQ ID NO: 60427 - DNA, 75 bp, Homo sapiens
ggccgggctgcgcccgcttcttgcagccccagtggaccacctgcatttgccgcccacccctccgagcagtcacgg

SEQ ID NO: 60428 - DNA, 88 bp, Homo sapiens
gtgatctgcgatcgagcctcggtcaaggagaatttggtgttcacttggcagaactgactgtagatccccagggggcactggcaatccg

SEQ ID NO: 60429 - DNA, 80 bp, Homo sapiens
agctgtcatcacaaaagagttgattgaaattatctctggtgctgcagctctacggtatccaactgttgaaaaacgagcca

SEQ ID NO: 60430 - DNA, 131 bp, Homo sapiens
cgggggggcggagacgcacggagcggccgggggctcggccgggccgtcccggcctgcgcagcctgagaaccccgacatcgtcctggtgcactacctgaacgtgccggccatcgaggactgcggcaagcctt

SEQ ID NO: 60431 - DNA, 100 bp, Homo sapiens
atgttggagtgggcccacgggggcttcaagcccactgggatcgagggcctcaaacccaacaacacgcaaccaggtcagaaagcaacattgaatgcagaag

SEQ ID NO: 60432 - DNA, 100 bp, Homo sapiens
gaggcccagactggtccatccccatcttggactttgtggaacagaaatgtgaagggatttatttaatggggatgtgttcaaggcaagagcgaattcagaa

SEQ ID NO: 60433 - DNA, 90 bp, Homo sapiens
gtcgaagctctgtaagaagaaaacactttgtgggccaggctgacaaacgggctcatcataatgcactggaacgaaaacgtagggaccaca

SEQ ID NO: 60434 - DNA, 100 bp, Homo sapiens
gcagtccgtatgctgagaacctggagcaggaatgcggggaagctgatacccattgacaacatgaccaatgagatggagcaaagggttgaacctcataatg

SEQ ID NO: 60435 - DNA, 75 bp, Homo sapiens
gacaacctgctgcgggatcccaaatcggaagtgaattcggattgtttgctggtgctgaatgtggagtaaatgcag

SEQ ID NO: 60436 - DNA, 50 bp, Homo sapiens
aggagcgccggaacgccgaggcccagtggagttcaagagtttttaagaat

SEQ ID NO: 60437 - DNA, 50 bp, Homo sapiens
agccccttctttaaaagactctgagactgtacctcccacaaggattaccc

SEQ ID NO: 60438 - DNA, 101 bp, Homo sapiens
ccgatttaaagctgagctgcgaggaaaatggcggcgggaggagcggaaagaatgtcggagcgggccgcggatgacgtcaggggggagccgcgccgcgcggc

SEQ ID NO: 60439 - DNA, 87 bp, Homo sapiens
caaaacttgagaaaggaagtactcgccgagtggaacgggcaatgaggcagacacagattcaaacgctcaagaaattaaggacattta

SEQ ID NO: 60440 - DNA, 73 bp, Homo sapiens
tccgatatgggcaaaccaagaagatgatggacaaggcagtggttgcaggaatccagcaggctcacgcggaaca

SEQ ID NO: 60441 - DNA, 100 bp, Homo sapiens
ctccccgccaaggcccgtgcgaggttcatcatgcctagtggcgtataagaagaccccgccaccggtccctccacgcaccacttcaaagccgttcatctca

SEQ ID NO: 60442 - DNA, 60 bp, Homo sapiens
ctatgagtgcacctgtcaagtcgggtttacaggtaagcggaagggtacagccaatgcccg

SEQ ID NO: 60443 - DNA, 90 bp, Homo sapiens
gaagaatgtgcttggtcacatgcagcaggagttcttcttccactgcatggcaggacgagagggcctggtggacactgctgtgaaaaccag

SEQ ID NO: 60444 - DNA, 100 bp, Homo sapiens
cagctctgtaaaagccccgcctctgccttcggatagattggtttttcagcagcagatgctgtaacaggactgaaattggtagaagagggagtacccaaag

SEQ ID NO: 60445 - DNA, 83 bp, Homo sapiens
cgtggatgccctgcaccgggtccggcagctctggcattgcccgtgacccctcagaaagaatggctgcacatggacactgtcga

SEQ ID NO: 60446 - DNA, 100 bp, Homo sapiens
tatatgtatgacttttaaaagagagagcttgtgaaactgagggaataggaggtcttgctggagttgctagaacaatgtgtggatggcttatggaaggcag

SEQ ID NO: 60447 - DNA, 100 bp, Homo sapiens
ctgggagcagaagggaggctccaagacctcatcaacaattaaggagccgatcaagtcccgggccccgcagctgcacctggagtaccggttctacaagcag

SEQ ID NO: 60448 - DNA, 73 bp, Homo sapiens
cgtgcatgaaccaaacccacttcgttcaagacaggtgtttaagcggtgtccgcaatgttgccagtgtctgtct

SEQ ID NO: 60449 - DNA, 100 bp, Homo sapiens
caagaagcacacaggaaaaggagcttagctgctgctcgaattacatctttacaagaggaggtgaagcatctcaaacataatctcgaaaaagtggaaggag

SEQ ID NO: 60450 - DNA, 100 bp, Homo sapiens
ggagttaaggacattccaggcagaggcaagagggagacgtggtgggcggtccttcctgtgacacgacccttgagtgacagttctatttgattgcctccgg

SEQ ID NO: 60451 - DNA, 100 bp, Homo sapiens
cgagccagcgcccggagcaagcggagctcccccaagagccggaaagaaggcccgagacatgtatgcagaggagcggaagaggcagcagctggagagggac

SEQ ID NO: 60452 - DNA, 90 bp, Homo sapiens
cgggtctcaggtcatggcggtcgcggggcccgcgcccggagctggcgccagcctccctgcccttcgctatcctgacgctggtgaacgccc

SEQ ID NO: 60453 - DNA, 113 bp, Homo sapiens
cagaggcataaggttcgggaagaggttgttaccgtgggcaactctggggctgataggatgtcttcatttggtgattttgttgcattgtccgatgtttgtgatgtaccaactgc

SEQ ID NO: 60454 - DNA, 100 bp, Homo sapiens
aaagtgtttgcatctcagtggttgaatcataggcaagtggtgtgtggcacaaaatgcaacacggctctgaaagtgttccagctgaaatttcagatcggac

SEQ ID NO: 60455 - DNA, 83 bp, Homo sapiens
tcgaccggagcagagagctggcgagcaaggtggtgtttcataagatgtcacccaacgagaccctctttttggaaagtaccaac

SEQ ID NO: 60456 - DNA, 88 bp, Homo sapiens
taatcttcacttccgggggcactgaggtgtaaagcaggccctctggctcaccaagaccaagttaatagaaggccttcccgagaaagtg

SEQ ID NO: 60457 - DNA, 75 bp, Homo sapiens
caactttttcagtccttcccccaagaccaggcgccagggcgaggtcggcagcggcacagcgaggtcggcagcggc

SEQ ID NO: 60458 - DNA, 82 bp, Homo sapiens
gttgtatacccaaccaccactgaaatttgtattatcgggggacccacggggtcattgtggtttacgacgtcaccagtgccga

SEQ ID NO: 60459 - DNA, 94 bp, Homo sapiens
gaagctctggtcagtgccatgatccggcaggagcgctccacatcctaccaggagcaaaatgatgcttcaacacccaggccaggtctctgcctcg

SEQ ID NO: 60460 - DNA, 123 bp, Homo sapiens
gccatccgcctcctcatgcggagggacaagaccctgaagatctgtgccaaccactacagttaacacagaaatctgcctcctgggccatgccgcttctaaggcctgtttcttctcatgagcccc

SEQ ID NO: 60461 - DNA, 124 bp, Homo sapiens
ttccacctacctcaacaacccgtacgtgcggaaggccctcaacatcccggagcagctgccacaatgggacatgtgcaagttcaagggcagcaggaaagacgagatcctgggcatcgccaacaac

SEQ ID NO: 60462 - DNA, 74 bp, Homo sapiens
gatcttccggtggcgggaactgcagtcatggatcatattacggtacccaagggctatctgaagcagtgccggaa

SEQ ID NO: 60463 - DNA, 100 bp, Homo sapiens
tacctcctggctgccgtgaataggcagcctaaaggaggtgaaacagcagaaatgcctgacatgtatccccctggagagtatgacctagctgggtttgccg

SEQ ID NO: 60464 - DNA, 83 bp, Homo sapiens
ttttggggggaaactaggtcgatggtcggcggcgcccggatgggcagctgagaccatggtgaatccgggcagcagctcgcagc

SEQ ID NO: 60465 - DNA, 50 bp, Homo sapiens
cgccatcgttgctgccttcttcgtcaagatcagtgtgcgtgtgaccacca

SEQ ID NO: 60466 - DNA, 82 bp, Homo sapiens
tcggcttgtcctggctcttgccctcatcctggttctggaatcctcagttcaagccacccggcccaagttgaagaagatgaag

SEQ ID NO: 60467 - DNA, 82 bp, Homo sapiens
gcagatacccgcggtgcaccgcctgctgggagcgccgctcaaggtgtggacactgccagcggctgcagccgacttggaatga

SEQ ID NO: 60468 - DNA, 126 bp, Homo sapiens
ctgtctcaacgatacctattttctagtgctgagatcctgagacaatgatggcagaaacggtggacacaagcgaaatggtcaacggcgctacagaacaaaggacgagctctaaagagtccagcccca

SEQ ID NO: 60469 - DNA, 51 bp, Homo sapiens
aagcgatccacaatctgttagaaagatctttgatggaaaacagattccaca

SEQ ID NO: 60470 - DNA, 100 bp, Homo sapiens
cccacccctcctgtaacccagcctgtttcacttcttgaaactaatctggattcactccctctggttgatacccactcaaaaaggacacttctgattaaga

SEQ ID NO: 60471 - DNA, 111 bp, Homo sapiens
gcccgccgcccgcgcctgttccgcagcccgcgtccgcgccggccccacagctctgcgtccggacaatgcagatcttcgtgaagactctgactggtaagaccatcaccctcg

SEQ ID NO: 60472 - DNA, 75 bp, Homo sapiens
gcccgcgggccaggagagcgctcggcgggctctgacgcccgctctgcggcttcggtgtttgaacaggccacagtc

SEQ ID NO: 60473 - DNA, 100 bp, Homo sapiens
tcctgcgtcatcaacttaggcgtaagactttgaccccgacgcaggcttcagtgattgccgcggatcagaagcctgagcactttggctcgagacaattaag

SEQ ID NO: 60474 - DNA, 90 bp, Homo sapiens
ttgacacgctgatgcaggaatggtccccggagtttgaagagcttttgggcaagctccccctccggggctccgcgggacactggatctcca

SEQ ID NO: 60475 - DNA, 141 bp, Homo sapiens
tgaatataaatacaaaagagaaataagtcagcacaacatcaatcctcatcaaggaaatgctatacttgaaaaggtggcttcccacacttctgactcggacgttccttccggtgtcactgaggtggtcgtgaagctctttga

SEQ ID NO: 60476 - DNA, 99 bp, Homo sapiens
ctttagtgaaatgggctaataatgctggcaaagtggaaaaatgtgcggctgtgtttgatgtggacaagaagaaagggttgactctgattgagctctggg

SEQ ID NO: 60477 - DNA, 100 bp, Homo sapiens
gtcaccggcttccgcatccaagatgaagagctgcccggcagctctgacagactcagaggacgagtccccagaagacatgaggctcccaccctatggcctt

SEQ ID NO: 60478 - DNA, 75 bp, Homo sapiens
ccccctgcccatttggttttgggaatcttgacgaagcctgatctggtggacaaaggaactgaagacaaggttgtg

SEQ ID NO: 60479 - DNA, 89 bp, Homo sapiens
ggaaacaatccttctgtttctttaaaactggaagaaaggaaatcctcattgacgattcaatttgttgaaggccaatttgtggactccta

SEQ ID NO: 60480 - DNA, 85 bp, Homo sapiens
caccgacatggaacagggactcactggggatccataatgagatggcatcaacatcagataaaggtgcccaaggaagaaatgacaa

SEQ ID NO: 60481 - DNA, 100 bp, Homo sapiens
ggctcgccgcgcccacccgctccgcgccgagggctggaggatgcgttccctggggtccggccttgccttacacccagacaaaactctcgttgcaactggc

SEQ ID NO: 60482 - DNA, 76 bp, Homo sapiens
ttgggtttctttcttaaaggactgatttttagaactccacatttgaggatgagcccagctctgggatggatccctg

SEQ ID NO: 60483 - DNA, 100 bp, Homo sapiens
gtcgcgaccacggcggctgcagggagcaggcacagccccgcaggatcccaagccctgcagactaccgcagccagcgcatgtgcagtctttgccaacaaaa

SEQ ID NO: 60484 - DNA, 78 bp, Homo sapiens
tggccgtccggcctccctgacatgcagatgtcagtattgaatatggtggtgaggcgtgaccctggcaacactgaacct

SEQ ID NO: 60485 - DNA, 73 bp, Homo sapiens
gaaaaaagacatgggactttggtgtgggatactgaggtgaagccaggaagtgaccgcacaatgactcaagcta

SEQ ID NO: 60486 - DNA, 75 bp, Homo sapiens
agcagaaattgaaaagtactgcccagagaattttgtagacatcaagaaaatgtggacacagacttgccaggcagc

SEQ ID NO: 60487 - DNA, 87 bp, Homo sapiens
tttgaaacgattaaattgattagcaatggagcctatggatacagatccacgggttttagaaaaacaagaattacagcagccaaccta

SEQ ID NO: 60488 - DNA, 82 bp, Homo sapiens
atcctttgctgctctgtctgccggttcttgagcaaaatgatgcttcaacacccaggccaggtctctgcctcggaagtgagtg

SEQ ID NO: 60489 - DNA, 100 bp, Homo sapiens
ctggctccttggcagcaatggctgtatttgaagataagtttaggccagacatggagggtgatgaattagaagacaatggaaagaatttctacgaatctga

SEQ ID NO: 60490 - DNA, 139 bp, Homo sapiens
acgcggcggcgcggctgccggctggatgggaagttaatgtttacggcgaagtctactcaacgtttccaaggatcagttcgacagcttagacaagcatacacaatggggaattgacttcttggaaagatatgccaaattt

SEQ ID NO: 60491 - DNA, 100 bp, Homo sapiens
gagtgattgaacagaagaagctgatacctgggggagataatgtaactgtgtgcaaggataacagccacttccggctcctgcgtcgctccggaagcctgcg

SEQ ID NO: 60492 - DNA, 100 bp, Homo sapiens
tccttgatacctctcactattctactgctggaagctcaagtgctacggcccagttccctcaacctgacccagtatgtagaagccagtctctgcaggcggc

SEQ ID NO: 60493 - DNA, 98 bp, Homo sapiens
ctcagaggacaacgaagtgttcggtatctcagatgaagacatcatcaacattactcttcctactggagtccccattcttctggaattggatgaaaacc

SEQ ID NO: 60494 - DNA, 100 bp, Homo sapiens
cggcggcgggagaggcgccggggccgcacaggttttgaaagagggaaggaagatatttctcaaaataaagatgaatcttcactttctatgtcaaagagca

SEQ ID NO: 60495 - DNA, 100 bp, Homo sapiens
cggctcggcgcacagcccgcccgatcctacacagaacatcactttccaaacggagtccagtgtggcagagcaggaggcggagttccagagccccaagtat

SEQ ID NO: 60496 - DNA, 98 bp, Homo sapiens
cctggatccagatgatgtcttggcagatgttgttgaagataaagacaaggtgttttattccaaacgtctatgctgctttgttcactgcagctcttgtt

SEQ ID NO: 60497 - DNA, 100 bp, Homo sapiens
gctgctcaagagaggcacgggacaggtcccagaatatgggaaaccatctttgtatggcagcctgacttgtcaaggaattggcctagatggcatcccagag

SEQ ID NO: 60498 - DNA, 50 bp, Homo sapiens
cgtgccctctgagggccccaaggaactctaatgaatcattgattgaccag

SEQ ID NO: 60499 - DNA, 100 bp, Homo sapiens
ctgaccccagagtggcagaaaggctgatgcagcaggaattgtgaagtttcatgaacactacctgggtgagaacacagtggaaaactcaagtgacttccag

SEQ ID NO: 60500 - DNA, 100 bp, Homo sapiens
cggccaaggacctggccgacatcgcggccttcttccgatccgactacatgaggaaataattgacttttataacttcatgtccccttgtcctgaagaagca

SEQ ID NO: 60501 - DNA, 83 bp, Homo sapiens
cctggagttaaggaacagatccccggaggaggctccccacaggtgcaggaagccgccgcccagccatggacggggaggagcag

SEQ ID NO: 60502 - DNA, 95 bp, Homo sapiens
atgcttattttctgcttccaaaggtccagagcattcagctgtctcaaatgcaggatattcaaatagaagccttgctgatgagagcctgtgagccc

SEQ ID NO: 60503 - DNA, 88 bp, Homo sapiens
ctgaattggcagcgaggtcgcggcaggttcgaggttaatttggagtggcccctggagtcagtttcctacaccatccgaggccccaccc

SEQ ID NO: 60504 - DNA, 82 bp, Homo sapiens
taaagcactgtatgatacattttctgcttttggtaacatcctttcatgtaaggaggaagaacgtgcaaaacgtgaggagcta

SEQ ID NO: 60505 - DNA, 75 bp, Homo sapiens
ccctgagctgcgtgagaacccgcccatgaagccagatttctcccagaatcaggaaacccaggcccaacggcaggt

SEQ ID NO: 60506 - DNA, 50 bp, Homo sapiens
tgcttccggagcgagcaggaggacgaggtggtgagaccaggagtgagaac

SEQ ID NO: 60507 - DNA, 83 bp, Homo sapiens
ccggggcccgagccccgcccggcccgggccatgtcggtgggcgagctctacagccagaacactatggctatgcatcctccaac

SEQ ID NO: 60508 - DNA, 90 bp, Homo sapiens
acattcatatctgtgtaaaggattgcaagagaagttcttcaagaggaaacccaaagtccttgggaatactctggagcagtgcaatgtgtg

SEQ ID NO: 60509 - DNA, 75 bp, Homo sapiens
tgacagtctgcatgtgcagttttcaggttatttcttatgagggtcatggatatcccctatctaaacttggaagga

SEQ ID NO: 60510 - DNA, 75 bp, Homo sapiens
gtttgaaagattttgcattcaacattcaggctatcagtgagtatctcgctgtgtttaagaagactgtgtcctccc

SEQ ID NO: 60511 - DNA, 83 bp, Homo sapiens
aaagtgaactttgataatgtcggacttggttacctatctctgcttcaagtttcctgtcagccctcctgttgtggatctcagaa

SEQ ID NO: 60512 - DNA, 100 bp, Homo sapiens
ggagttcatggtgttagcgcaaaagttctgaatggcatccgtcctaccggaaacctaggaaaagggtccagcgagggcactatctctatggccgagggtg

SEQ ID NO: 60513 - DNA, 74 bp, Homo sapiens
aaaaaactttcaggccctgttggaggagcaggaagtggcggtgcgagggctgctgcacagcgagcggagccgcg

SEQ ID NO: 60514 - DNA, 75 bp, Homo sapiens
ccgaggtggtctgcaccaagcgcagcaacacgggagtggagacctttggcgacttggcctttggcgacatcttcc

SEQ ID NO: 60515 - DNA, 100 bp, Homo sapiens
tgacattgacagcaaacagagattcgggttctgccgcttatcttcaggagcgaagagctgcttctgtatcttaagctatgccctttgccttctgtacgag

SEQ ID NO: 60516 - DNA, 83 bp, Homo sapiens
gagggacttctgcagagagagtgcgcagaaggattccgggagcacagttccgccgagctgtgggcagaatcctgttagacaag

SEQ ID NO: 60517 - DNA, 82 bp, Homo sapiens
ccagagtagcccccagcccagccccaggacattttcacaggaaggacacggtcatgaaagcaaatttgcacaaggtgaaaca

SEQ ID NO: 60518 - DNA, 82 bp, Homo sapiens
aggtcagaaggaagcaccacacagaggtgtgttccagagaacaagccttcagacatttgctatattgacgctgagctgtcag

SEQ ID NO: 60519 - DNA, 73 bp, Homo sapiens
tggcagcaaacaattgacattcacgttaaagaggggttacattccgaaaagcaaatgggagatggacacatct

SEQ ID NO: 60520 - DNA, 75 bp, Homo sapiens
tggacgcctaccgcatctacttgctgggaggctgtggcgtgctgggtgtcggcatctggctggccgccacacagg

SEQ ID NO: 60521 - DNA, 100 bp, Homo sapiens
cgccgatcctccaggcatgccccgctacgagctggctttaatcctgaaagccatgcagcggcaaatcctgaaggaacccaaagtggctgcttctgttttg

SEQ ID NO: 60522 - DNA, 96 bp, Homo sapiens
gtgaacagcagcggccgctgatcggacgctccccctctgtctctcacactcaggttcctgctcattttccacaaggccgcggcaggggagctgcag

SEQ ID NO: 60523 - DNA, 74 bp, Homo sapiens
gggccgcaccgccagggactggggtgagcggcccaggattctcaaagttggattggtggaaacaatgaaccatt

SEQ ID NO: 60524 - DNA, 80 bp, Homo sapiens
cttcactcctagttaccagaaaggtggaatctggatgagtggagacttcaaatcatcccaacaccagagaacactaaatg

SEQ ID NO: 60525 - DNA, 100 bp, Homo sapiens
caaggttctggacaagatgaagtctttctgccaggagtacttcttgcaagcagagctgacaagcaacgtcttaaaaacaggcgtggtgcgctgctgcgtg

SEQ ID NO: 60526 - DNA, 75 bp, Homo sapiens
aaaaggacgtaatactccactgtgcgacagagaaactccagaaaatcttgccaaacttctgaccaggatgtattt

SEQ ID NO: 60527 - DNA, 73 bp, Homo sapiens
tgggagatggataccgacttgtgctcaacgaagagcagacacagtttcttaaagagctggtggagcctgtgtc

SEQ ID NO: 60528 - DNA, 78 bp, Homo sapiens
acaagaagagggcggagcggagacgggagtattatgaaaagatcggtgtgggccgaagatatgctcatgtggtgttga

SEQ ID NO: 60529 - DNA, 100 bp, Homo sapiens
cagaaggctgctgccgccggacgcctccattgtttgaccacaacaagggccggattctcacccagccacaatggtgcgcatgaatgtcctggcagatgct

SEQ ID NO: 60530 - DNA, 50 bp, Homo sapiens
cctacgcagagctcatcgtccttgaccccaccaacaactgaacgctttgg

SEQ ID NO: 60531 - DNA, 100 bp, Homo sapiens
tgacttctccactggttcctgggcaccgaaagatttattcaggagattgagcatgctctgggtcttggcccagccaaacagtgtcctcttcgagagtttc

SEQ ID NO: 60532 - DNA, 100 bp, Homo sapiens
gaagattccataattgaggatgaagatgatgaagccgaggtagaagaagatgaacccacagatttggtcaagaagaagagagattggccctagaaactgc

SEQ ID NO: 60533 - DNA, 100 bp, Homo sapiens
cgtctttccgtcctctgaggcgacggccgcggctgcacaggaatccatgggaaagagctatgatgggagagcttatgtcatcactggcatgtggaacccc

SEQ ID NO: 60534 - DNA, 90 bp, Homo sapiens
ggaagcgatggcttcagacagcatatttgagtcatttccttcgtacccacagtgcttcatgagagcataagcagtactataatggatgta

SEQ ID NO: 60535 - DNA, 90 bp, Homo sapiens
cggcaggcgcggccatggcgcagctgggaaagctgctcaaggagcagaagtacgaccggcagctgagatgcaccagcaaggaatactgaa

SEQ ID NO: 60536 - DNA, 83 bp, Homo sapiens
ctaccccgcagttcccggacatgatcctctccgcctctcgaggtacggactaagggtgtgaaggaagccggtgagaagcctcg

SEQ ID NO: 60537 - DNA, 100 bp, Homo sapiens
caagacgaagacagccacagaatcaaccaggaccattgcagatcctgtgttgccataagcccttggcccacatttaagtgggaatgcagctagcttggat

SEQ ID NO: 60538 - DNA, 101 bp, Homo sapiens
ccgccatggcgtccaacatggaccgggagatgatcctggcggattttcaggtgttacctcattttgaaagtcttgggaaacaggaaaaaattcctaacaaa

SEQ ID NO: 60539 - DNA, 101 bp, Homo sapiens
ctcgagtcctgccgcctcccgggagtgccgtgcgccgcagcccgggcccaggccccggcagcgcctgggacaaggaatctacttgaaaatggatcggttta

SEQ ID NO: 60540 - DNA, 100 bp, Homo sapiens
ctacagtgttctcgacttcgtcgctggtttgcagtaagcattggctactggcatgacccttacatacagcactttgtgagactgtctaaagagaggaaag

SEQ ID NO: 60541 - DNA, 82 bp, Homo sapiens
cagtggattgaactgttgacgaaacagtttaataatagtcaggcagcttgtgaggcccagagcatgattcccatcaatgagc

SEQ ID NO: 60542 - DNA, 80 bp, Homo sapiens
gcaggagcggagacctggacgccctggacaagcagcacagagtctctctgagaaatcaaggaaagtattccgaatatttc

SEQ ID NO: 60543 - DNA, 88 bp, Homo sapiens
tcctgcatggtttcaagggacgtaccaggaggatggtgcccagctcctccgcctctgatgcagaatttgatgctgtggttggatattt

SEQ ID NO: 60544 - DNA, 119 bp, Homo sapiens
gatgaggagaaatactcacttccagttgtgcaaaatgactccagtcgaggcagttctgtctcttcgaatcttcaggcaaaagaatggaccccagcaggaaaagcaaagcaagagaattc

SEQ ID NO: 60545 - DNA, 100 bp, Homo sapiens
tgttacttttatggaaggaaaagccaggtgtgaagtctggcaacaagaggtcttcatctcactctagcccaggtagtccaaagaagcagaagaatgaaag

SEQ ID NO: 60546 - DNA, 75 bp, Homo sapiens
caaaacgccaggcggatctcagaaggccagttcaaaggccaccaccacctatcatgacagatggtgaagatgcgg

SEQ ID NO: 60547 - DNA, 75 bp, Homo sapiens
ctactgagctggacctcatgttctgcatagacgaagaaaactttggacagacctgcagccagttacctactgcga

SEQ ID NO: 60548 - DNA, 75 bp, Homo sapiens
atttgttaaggattccaagtaactcttatttggttacaaaagtggatgaaaccagagggatcgcacatgtttatt

SEQ ID NO: 60549 - DNA, 50 bp, Homo sapiens
gcccgggagatgcagccagtttacaggagtcatggccggcttcaacatgg

SEQ ID NO: 60550 - DNA, 74 bp, Homo sapiens
cgcagtggtcgcttcttctccttgctttcaagatgttagaaagttcaagccagaagtttcttcagggtttggtc

SEQ ID NO: 60551 - DNA, 100 bp, Homo sapiens
ctcaagaaaatcttcgaagacttttcaaatgacagcccatatcaaggcggtgtattctttttgacaattcattttcctacagactaccccttcaaaccac

SEQ ID NO: 60552 - DNA, 75 bp, Homo sapiens
tgaagttccaattcaaaagatgtttgaaaagctggctgcaccaccaccgcctgtgctgatgcaccatggagagtc

SEQ ID NO: 60553 - DNA, 103 bp, Homo sapiens
cccggggggagcgcggggcgacgctggctgcagggacccggtgacagcgtgagagaaaccaaggtgtatgttggtaacctgggaactggcgctggcaaaggag

SEQ ID NO: 60554 - DNA, 74 bp, Homo sapiens
catgacagcattaaagacgactcggagggcgtcccggaggacctgctgttcttctacgagcacctcaggaaggg

SEQ ID NO: 60555 - DNA, 50 bp, Homo sapiens
ctggtcaaatttcagccatcagcaaaattaaacaaccaccatgtcgagca

SEQ ID NO: 60556 - DNA, 75 bp, Homo sapiens
caagcttaggaccacccaccatgcctatccagtttgaaggatgacctctaggaagaaagtgttgctgaaggttat

SEQ ID NO: 60557 - DNA, 75 bp, Homo sapiens
ttcgcccacaggtgtactcatcgccattgacctggcctataacttgcacaggatttgttaaggattccaagtaac

SEQ ID NO: 60558 - DNA, 75 bp, Homo sapiens
ggcctcccgcccgccgcgctccagatgaagtgtgagcactgcacgcgcaaggaagtttatctcgacaatgctagt

SEQ ID NO: 60559 - DNA, 114 bp, Homo sapiens
ggcgctgtcggtgctgcgcttggcgctgctgctcctggcagttaccttcgcagagacgagttgtactgctgtcacaggaaatggacgctggattacaagcatggcagctcaggc

SEQ ID NO: 60560 - DNA, 98 bp, Homo sapiens
cagagctggagagtctggagctgctagttgaggccagtgcagagaagcttcccaggggattcctgggttcccccgaaagacaagcgaggtcattgcag

SEQ ID NO: 60561 - DNA, 83 bp, Homo sapiens
ctggtgtggttcggagccgcggccctgggcgctgcctatggcacagccaagagcggtaccggcattgcggccatgtctgtcat

SEQ ID NO: 60562 - DNA, 100 bp, Homo sapiens
tccgctcagctttatcggccgcatccggcctttggcggagaaaaccggcatctgcaaaattcggccgcccaaggtggggaacgccaagcacaacgtgcat

SEQ ID NO: 60563 - DNA, 100 bp, Homo sapiens
cgacctcgacgtcttgcctgtgtcccacttgttcgcggcctatagaccatggtgaatccgggcagcagctcgcagccgcccccggtgacggccggctccc

SEQ ID NO: 60564 - DNA, 51 bp, Homo sapiens
agtctttccaaaaggtcaaggttcacaaggcgcagtggctcacacctgtaa

SEQ ID NO: 60565 - DNA, 75 bp, Homo sapiens
taatggtggtattatggaaaattccaagtaaagaactgagggtcagatttgtgaccgcaacaagggaaaacatgg

SEQ ID NO: 60566 - DNA, 51 bp, Homo sapiens
cgcccctggggacgccgccctcccgggtactccaaagattcaggtttactc

SEQ ID NO: 60567 - DNA, 82 bp, Homo sapiens
ggatgggaatcgtagtcttcctaggagtttaaataacagatgcgggtgaaagatccaactaaagctttacctgagaaagcca

SEQ ID NO: 60568 - DNA, 96 bp, Homo sapiens
ggaacgggaacggtcgaggacaggaagtgagtcatcacaaactgggacctccaccacatctagcagaatggctggcgtggctcaccgattccacag

SEQ ID NO: 60569 - DNA, 100 bp, Homo sapiens
atatatttgtgagaacaaagaaaaactccagaaatttttgaggaacgttcactcacagggtacgctcatggagagagggcgcagagcaaaccatgtcacg

SEQ ID NO: 60570 - DNA, 100 bp, Homo sapiens
tgcaccgcaaagcggggacccagaccctggagcctcagttggaagcagccgatccagcctgcggagcctgtggggcagggtgttcctgaaaagaaggtac

SEQ ID NO: 60571 - DNA, 100 bp, Homo sapiens
ctcggggagcagatcccccatctctggcagtgcagtgtgcctgggagctgtctggaacattccgcaaatgcatttcatcttctcagatacagcggtgctt

SEQ ID NO: 60572 - DNA, 100 bp, Homo sapiens
ttcctatccaaatacttttgaatggcaatgtaaacttccagccatcaagcccaagactgaatttcaattggccccccagaagttgcaagtagaacaagag

SEQ ID NO: 60573 - DNA, 100 bp, Homo sapiens
aaaacttcagagcaaaacatcactgtaattcttgctgtagaaagcttaaacttccagatgatggaccatttggattgtgcaacaaatgaagaaaaccctg

SEQ ID NO: 60574 - DNA, 50 bp, Homo sapiens
ggcttcccggacaggattgacgaggcgtctctggccgagcctctttttgt

SEQ ID NO: 60575 - DNA, 83 bp, Homo sapiens
ggaatgaaatcttccaagtccaaggatgtgattcttacagaagcagagattgatgctcaccttgttgctctagcagagagaga

SEQ ID NO: 60576 - DNA, 90 bp, Homo sapiens
tccctgagagccacctgcctatacaggacttcacaacgggataaagtgaagtagcttcggcttgtgaatgtgcattgcagagacgtggga

SEQ ID NO: 60577 - DNA, 116 bp, Homo sapiens
cccaggagcctgccccgccctggggacgaagagctgcagctcctcctgtgcggttgatcatggccttgccaggttggtgacagtatattgtgagcatggtcataaagctgccaaaa

SEQ ID NO: 60578 - DNA, 102 bp, Homo sapiens
acagaaattccatgctgccttcagcttcctttgccgctctgcatcatgttgcaaacttggaaatcatgtcttagagatcaaggagccaagagatgagacaag

SEQ ID NO: 60579 - DNA, 75 bp, Homo sapiens
gagcgcgagcggcgcgagaaagttcttctgtgtggcagttcagaatgatggatcaagctagatcagcattctcta

SEQ ID NO: 60580 - DNA, 87 bp, Homo sapiens
cccacctcccgcacatcatgcagttgcaggttcaatggctactgcttgtcctccagactctttttgaatcagagccgacaggcactt

SEQ ID NO: 60581 - DNA, 100 bp, Homo sapiens
caggccagtcgcctccaggccaagagggatccttcacccgtgtctggtgctgctacccccgtatgatgatgccactgtgaatggtgctgccaaggagcca

SEQ ID NO: 60582 - DNA, 90 bp, Homo sapiens
ccagaatatggtcaagcagaaagccttgcgagttttaaagcaaaagaggatatgctcccataatactctcagatagtgaagaagaagaaa

SEQ ID NO: 60583 - DNA, 100 bp, Homo sapiens
caccgtcaggcataaattgattattcctcgcccacatctgtgccagattgcccccgaggaattagcacttgttcacaacttgaggaaaatgatgaaaaat

SEQ ID NO: 60584 - DNA, 116 bp, Homo sapiens
ccaatatgaagtgggtacagttttcaaacctacacgttgatgttccaaaggatttgaccaaacctgtggacaacaccatcgacttcctggagtacgtggcagctctgaatctcgtg

SEQ ID NO: 60585 - DNA, 51 bp, Homo sapiens
gaactgtggtccatggtaaagttttacagaaatgcactcggtgatggaaag

SEQ ID NO: 60586 - DNA, 80 bp, Homo sapiens
ggcttaatctgatgcagaattaccgctgttgggtggtgtgcagatcctgccttactaaactgtttgaagcaaaaaaacac

SEQ ID NO: 60587 - DNA, 80 bp, Homo sapiens
cggagtccttggggacggagcagcgcgtcgtggggcgagcggcaggccaagtcctgtatctgccatgtctgtggcgtcca

SEQ ID NO: 60588 - DNA, 75 bp, Homo sapiens
aggaaaacaaaagctgctacttatggaagatacaaagggaatggaaactgaaagtggaaatcaggaaaaggtaat

SEQ ID NO: 60589 - DNA, 100 bp, Homo sapiens
ccgtgatctccagcgccggcctcctcagtgcgaagaagctgcagccgcacctggccaagggcgaacctcttcccggccgctctggtgcacttgggagccg

SEQ ID NO: 60590 - DNA, 90 bp, Homo sapiens
ggccgccgcgctcccgcccgggcgcccagctatgtactccccgtactgcctcacccaggctgaaggtgatgtggccgccctcaaccgacg

SEQ ID NO: 60591 - DNA, 90 bp, Homo sapiens
taccattcctcagacttcttcacatggtgctaacagatttgacctgaaggagaagaaggagaaggtggaggagaaggcaagccggaaaga

SEQ ID NO: 60592 - DNA, 100 bp, Homo sapiens
aaccaaaatcctaatgaactccagtagagacaattcccacccatttgtaggcctggcttttaaactggagaccattcctcaagaattttgtatccaaggc

SEQ ID NO: 60593 - DNA, 50 bp, Homo sapiens
gccgcgcgcctttgtgcgcgcgccgagaattaaacaaccaccatgtcgag

SEQ ID NO: 60594 - DNA, 100 bp, Homo sapiens
gaagatgacgtgtatggaaactcatcaggacggaagcacaggggccactcagagtcgcccgagaagctgtgggtgagcgtggaggatgctcagatgcaca

SEQ ID NO: 60595 - DNA, 75 bp, Homo sapiens
agtgtttggtttgtgataaaacactcctggggaaagagtcactgcagtgttctattgatccacctgaagaattag

SEQ ID NO: 60596 - DNA, 75 bp, Homo sapiens
cccagctttaaaggagatgcaggagaaaatacggcattgctaggactggagaattgggaaacttgatagcccctt

SEQ ID NO: 60597 - DNA, 74 bp, Homo sapiens
atttgtgaatcagattaatactgctgtacctttaccagataacttgtctgcatttcaagaacaacctaccagag

SEQ ID NO: 60598 - DNA, 90 bp, Homo sapiens
cgcgctgctcctgctgctcatcccggtggccgccgcgcaggagcctcccggagctgttgtgcagccaatggctgtgatcaaaaattcaac

SEQ ID NO: 60599 - DNA, 51 bp, Homo sapiens
aagcagatctggatcatcaaagacagggaaggatggagacgctgaaggata

SEQ ID NO: 60600 - DNA, 100 bp, Homo sapiens
gtattccctggggatggcgcatcacacaccaaagtcggtgctgctgggcattgtgatcctgcttgcttaccgcctggagttcacggacaccttccctgtg

SEQ ID NO: 60601 - DNA, 75 bp, Homo sapiens
ggctccccgtcgtcctggtgctgcagcgtgatgtcttggcattgcccattttcaagcaggaagattccagccttc

SEQ ID NO: 60602 - DNA, 100 bp, Homo sapiens
tttcagcagttggccacaacttcattgctgggaaaagttgaccacgttgttcctgagcctgggacaagcctgctcgctgcctttgaccagtggagggaat

SEQ ID NO: 60603 - DNA, 100 bp, Homo sapiens
ggcctggcaaacgaaagcgaagattcaaacaataatgttcccagcaatgagtattacccagcagatctgcaagttgctccaacccaggatctacggagaa

SEQ ID NO: 60604 - DNA, 75 bp, Homo sapiens
agaggagcggagtctgccaggtggtgtccatcatggttttgggtctagtaatactggttctgtgtttggtcaagc

SEQ ID NO: 60605 - DNA, 88 bp, Homo sapiens
ggattaatccagttttaccagacttccaaaaagatgatttcaaggggatgtttaatactggaactcgctttgaacgcttgcttatgag

SEQ ID NO: 60606 - DNA, 82 bp, Homo sapiens
aagtgaccaggctgaaagggaagcaatactcgtgtgctttgtagctgagcagtttctaaataacacagccactcaactgaca

SEQ ID NO: 60607 - DNA, 96 bp, Homo sapiens
gactttgagccctaccttactggacagtcaaatcaggaatgttttgaccgagtctgcgaggatcgcccgtggcaaaatcacagacctggccaacct

SEQ ID NO: 60608 - DNA, 75 bp, Homo sapiens
gtcccgcatggcggcgcacaggaagcacggtactccaaagattcaggtttactcacgtcatccagcagagaatgg

SEQ ID NO: 60609 - DNA, 98 bp, Homo sapiens
tacgggacccaaatgtcaaactaccaaatgggcgagacacacctgcactcttcaacttcaccactcaaggcaatttgaatcaacccatagaagtgaca

SEQ ID NO: 60610 - DNA, 83 bp, Homo sapiens
cctctcgcctcgggtctcgggggccgctctgggatcccggccaccagcaattgtccgacgatcgtcaccggattgaggagaaa

SEQ ID NO: 60611 - DNA, 50 bp, Homo sapiens
tgcccaacaaacagaggacagtgttttacagctcccagcacagtaggaaa

SEQ ID NO: 60612 - DNA, 100 bp, Homo sapiens
catcacttccagctcaggttggaaccataatggactcctcctatagtgccaatagagatgtgtgcacagacccaggccatgcagatactggtgcctctaa

SEQ ID NO: 60613 - DNA, 100 bp, Homo sapiens
ctgcagcgaaagcaaggactcagggaaccggcagacacaagcaggtggcatggtacaatgaactcttgcctccagccttccacctaccgctgccaggacc

SEQ ID NO: 60614 - DNA, 82 bp, Homo sapiens
ccccaactgtgggagtgtctgtggctctgcagagagaaggcatagactcccaggagaatgccgtgaatggagaacacctgtg

SEQ ID NO: 60615 - DNA, 90 bp, Homo sapiens
tgagtctacagttataccaagtggatagtagaacttatctactggatttccgtagtattgatgtttcggagcaacatcccctgtcacctg

SEQ ID NO: 60616 - DNA, 107 bp, Homo sapiens
tgacacggttcgaaagcagtcagagtcttcctttattactggagacataaacagttcagcgtcactcaacagaggtctgctggagtttgctggaggtccactccaga

SEQ ID NO: 60617 - DNA, 75 bp, Homo sapiens
tgcagtacacaactcccagctgaaagcaaatgcagccctgaggatttggctactgcatataacaacagggggcaa

SEQ ID NO: 60618 - DNA, 75 bp, Homo sapiens
gagagtgcgcagaaggattccgggagcacagttccgccgagatttccaatttccaagcctgatgggatctcccag

SEQ ID NO: 60619 - DNA, 100 bp, Homo sapiens
gcttatccaacgccaaccaaagatttgcatcagccatctcttagtccagcaagtcctcatagccaggttgactaagataacacgcacaggtccttcagct

SEQ ID NO: 60620 - DNA, 82 bp, Homo sapiens
aactgtccaaggctttggcagcttgggcactgtttaaaggaaagttccgagaaggcatcgacaagccggaccctcccacctg

SEQ ID NO: 60621 - DNA, 118 bp, Homo sapiens
ctttttcttaattacaaactgatagatggtccacatctcaactaacagtattgacgctgtaagagcatcagattggctctaccagtgcacctggacagggaggaatcctggctcagcg

SEQ ID NO: 60622 - DNA, 100 bp, Homo sapiens
aaccggggtttggagggcagaaattcatggaagatatgatgccaaaggtctacttccagtggaggtgagaatgggggtggacgaaaagagaaatccctaa

SEQ ID NO: 60623 - DNA, 122 bp, Homo sapiens
attaattgttctagtctccaggcccagtacatggatgcttgttggatgaattaatgaaccttgacccacaccaaggaagatgatccctatgatcttgaagatgtttctgcacagaaatgagg

SEQ ID NO: 60624 - DNA, 98 bp, Homo sapiens
caccccatacctgctgcctgtggcatttattactttgaagtgaagattgtcagcaaaggaagagatggaactattactttggcttatgtaaatattgg

SEQ ID NO: 60625 - DNA, 100 bp, Homo sapiens
ccaggaagagggactggaaccatctcagaagccatgcccctcaggctggaacttgccctgtctcctcgcagatgagaaggagttgagccttccaagaaga

SEQ ID NO: 60626 - DNA, 98 bp, Homo sapiens
ccgacatgaagggcgcaaacagagcactactgaggcccagaagaaagcagctccagcttctactaaacaggcagacctgttatcctaaactaggtgag

SEQ ID NO: 60627 - DNA, 75 bp, Homo sapiens
gagggagagtcccgcctgaagaaacctggatctttgctagaaagagaggatttttacctcctataactccaccag

SEQ ID NO: 60628 - DNA, 100 bp, Homo sapiens
aaagctggtattgaacaagaaggatattggttgccaggagatgagattgaaccatattacgttcgttgcatcaaacccaatgacaagaaatctccacaga

SEQ ID NO: 60629 - DNA, 83 bp, Homo sapiens
ctcaatatctgtcttcggtggactccttcggcagtccacccaccgccgccgcctcccaggcagcagcccggcccgtcggagca

SEQ ID NO: 60630 - DNA, 100 bp, Homo sapiens
atgtgcatctgcaaaactggatacatcagaattgatgattattcatgtacagaatggacagcaaattatggatgaacctatgggagaggaggagattaac

SEQ ID NO: 60631 - DNA, 88 bp, Homo sapiens
gaatcaggattttgcaaggaaacacttcgtattactattgcagggtgtcatgattgactttggcctatgatgttggcccttaaacacc

SEQ ID NO: 60632 - DNA, 82 bp, Homo sapiens
cacggccaccctactgcctggaggccggggagccgacgcctgcaattctgtggtgttcttggtcacacatttatggagtttc

SEQ ID NO: 60633 - DNA, 100 bp, Homo sapiens
aggcattttgctgtctcctcctaatacggaaaccctgatagattggtgtgatgaaaaggaacttaatttgatattaacaactggaggaacaggatttgca

SEQ ID NO: 60634 - DNA, 75 bp, Homo sapiens
atccctcagcctggtgagggtgatgttcgggaggaggccttgtccacagagtctcattctgtcacccaggctgga

SEQ ID NO: 60635 - DNA, 76 bp, Homo sapiens
aaagagagctgtctccagagaaaagctggtggtggaaaacatggacatacttgttcagatcagatccaactttagc

SEQ ID NO: 60636 - DNA, 100 bp, Homo sapiens
gacgcaggcaccttcctcagtcgcgccgtgcagtgccctgcaggagtcattaaatcaaaacttcatgctgatcatcacccaccgagaagtccagcgggag

SEQ ID NO: 60637 - DNA, 96 bp, Homo sapiens
gctcctgctgtaaggagtgcatgctgtgtcttggggccctttgggacgagtgctgtgactgtgttgcctttgaagtaaattttatggatgatgtag

SEQ ID NO: 60638 - DNA, 100 bp, Homo sapiens
tatgttgtgaaagaagcagtagcagtgaatctacagggacgccatcgaatccggtccttatgtcgtcagaagatcgagaagctcaggaggatgaattgct

SEQ ID NO: 60639 - DNA, 100 bp, Homo sapiens
gggggctccagagactgcccacccaggaagtctggtggcctggggatttgctttgtgtccctggtgatgttggaacattaatgatggaacatggccaaac

SEQ ID NO: 60640 - DNA, 101 bp, Homo sapiens
cccccagcggccgccggctcccccacgagaaccgcatgcacgagtctctcatgctcttcgactccatctgtaacaacaagttcttcatcgatacctccatc

SEQ ID NO: 60641 - DNA, 75 bp, Homo sapiens
tgacgtccatcagactgcacggcggccgcctgtggtgctactactccaaaggattcggcgggaagtatggggtgc

SEQ ID NO: 60642 - DNA, 75 bp, Homo sapiens
gttggatctacactttctcaagcactgtgatcttcaaataaacctccacagctgttgagaaaaaggagaaacctc

SEQ ID NO: 60643 - DNA, 74 bp, Homo sapiens
gaaaaggcaaaaatcccatctaccgcaactctcagttcgagagtaaaggttgctcgtgggggccccgcgggcag

SEQ ID NO: 60644 - DNA, 89 bp, Homo sapiens
caactcggggcggccactcttgccaggaggcgtactccaaagattcaggtttactcacgtcatccagcagagaatggaaagtcaaattt

SEQ ID NO: 60645 - DNA, 100 bp, Homo sapiens
actttgaaggatcctattgtttctataggattttattgcacaaaggcaacggtgactttcaaattattcaagcggagaaatgttgctacagcagaagaag

SEQ ID NO: 60646 - DNA, 80 bp, Homo sapiens
agctaccacctgccagtctgaagcaccgagatggcctcaactccatatagcatagattcagattctttgggaatggagtg

SEQ ID NO: 60647 - DNA, 100 bp, Homo sapiens
aaattatcaactggcttgataagaatcagagctgacaaggaaggtttcgagcgttttgctggcaaagggatttcttacaacctccaggcatgcgtctttc

SEQ ID NO: 60648 - DNA, 82 bp, Homo sapiens
gagtatgcttcgtttttcgccgtcatgggcgcctcggccgccatggtcttcagcggatctctctaggagctgacactcgaac

SEQ ID NO: 60649 - DNA, 98 bp, Homo sapiens
atacctctgcgatcccgggtcatctccagatgctagggttatggatgatgaacaatggcctcctccaacagccctctgccttgatgttgctcccctgc

SEQ ID NO: 60650 - DNA, 75 bp, Homo sapiens
cctggccccttccctgctccactgactggaggcacaggccaaggagtgacactgctgatcctgtaacatggagga

SEQ ID NO: 60651 - DNA, 96 bp, Homo sapiens
caacggcggcctccaggcctcaggccccctcaccatcctagaggtcaagatcagctctggctagcttccttcttcggtgagaaccacctggaggtg

SEQ ID NO: 60652 - DNA, 100 bp, Homo sapiens
ggaagatttacttggcaattgaaattcctaaggacggtctgaagagccaagagctatttgatgaaattagaatgacctacatcaaagagctaggaaaagc

SEQ ID NO: 60653 - DNA, 75 bp, Homo sapiens
ctgagggcactggcctagttcccgacttgtttctcaggtatcttctgtatgacgtcaaccccccggaaggcttca

SEQ ID NO: 60654 - DNA, 80 bp, Homo sapiens
aaaatatcgttgacaaaacttttttccatcaagagaagatggggagccccgaggatgacctgattgggattccattcccg

SEQ ID NO: 60655 - DNA, 75 bp, Homo sapiens
gtgagcgtcgaggaggcgcaggagactgaccgcaacggcagggaaatgaatggggtgctgaaaggaatgctctca

SEQ ID NO: 60656 - DNA, 100 bp, Homo sapiens
ttcccttccttcatatgaggaagatcagggatcaaaactcattcgaaaagctaaagaggcaccattcgtacccgttgcctcctgacaaggtgatccgggc

SEQ ID NO: 60657 - DNA, 50 bp, Homo sapiens
ctgggatcccggccaccagcaattgtccgatccccgtcgaggtcaagatc

SEQ ID NO: 60658 - DNA, 75 bp, Homo sapiens
ctttcctaccagaccctgaaattcacgcatcaggcgcgggaagcgacttcagctacgggacggacgagtacgacg

SEQ ID NO: 60659 - DNA, 106 bp, Homo sapiens
gagtgctggaacttctggggatggggcatcgtctgtttgtgcctcggcttctggcgatctttaatctcatgaagtacgacagctacagccgcttcttaaagtctga

SEQ ID NO: 60660 - DNA, 100 bp, Homo sapiens
agttactccctgataacttcatagctgcctgtacagaaaagaaaatccccgttgtttttcgattgcaagaggtattgaagcccctgggtgataatttgat

SEQ ID NO: 60661 - DNA, 83 bp, Homo sapiens
tcccgagaccgtcctggcgcgatgcgtcaagtacactgaaattcatcctgagatgagcttaaagcttttcaagccaggccaag

SEQ ID NO: 60662 - DNA, 75 bp, Homo sapiens
tgactatctggaagaccagcaaggaggaagagagttctggcctcaagaggatgttgcttcagagtgtgaagtcaa

SEQ ID NO: 60663 - DNA, 100 bp, Homo sapiens
cagtcaactagtaactgatattcagccagttcttgaagcaaggggctttgttatgcacctaaagccatattggaagctccagaagaaagagcaccccccg

SEQ ID NO: 60664 - DNA, 125 bp, Homo sapiens
tcttccccgcggagcccgcgcagtccgcgcagccctcatcgcaactgggcccgcgcgcaggagctggaggatcttcagaagaagcctcccccatacctgcggaacctgtccagcgatgatgccaa

SEQ ID NO: 60665 - DNA, 100 bp, Homo sapiens
gccttggtggtttttaggaaacttgagaagcaactatacacctagaagtaatggctcaactgatttacagacaaatcagaaagggctattgcaagacacg

SEQ ID NO: 60666 - DNA, 58 bp, Homo sapiens
gctaccagccctgggcagcgagctgcaaaactggcggaggcagtgacctcagactctg

SEQ ID NO: 60667 - DNA, 82 bp, Homo sapiens
aaaacgggcggtcgagcagaacgtgtagccgcgtcccctccagtccgctccgggcagatgtgaagttcatttccaatccgcc

SEQ ID NO: 60668 - DNA, 82 bp, Homo sapiens
cgacgttccatctgtggaaggacctaccaaccagccatcactggtgcaagctatatttaacggagatcctgatgaagttcga

SEQ ID NO: 60669 - DNA, 101 bp, Homo sapiens
ttgaagccgcctctgtattacttaccagacattcacggcatggtgtaactcccacctccggaaggcggggacacagatcgagaacatcgaagaggacttcc

SEQ ID NO: 60670 - DNA, 100 bp, Homo sapiens
gaggagactctcctctctcatccgcacgcacaatatcgggcagaaagataatcacggtcatgccttgactgcattggtaaaaattctatcatgttagaaa

SEQ ID NO: 60671 - DNA, 95 bp, Homo sapiens
atctatcagcaggctccgggctgaagattgcttctcttctctcctccaagaatgtggccccgtcccagagcaccacccgagacatcaggagccca

SEQ ID NO: 60672 - DNA, 100 bp, Homo sapiens
cggctgcagagctacacccgccagaaccagacgtcctgggtcctctccagcatggcagccctctactggagggtgaaaggccaaggaaagaaggcaatcg

SEQ ID NO: 60673 - DNA, 101 bp, Homo sapiens
tgggggagctgctgggcgaagcacgctactacctggtgcagggcctgattgaggactgccagctggcgctgcaggttgtgggcccacctggtacaggcaaa

SEQ ID NO: 60674 - DNA, 82 bp, Homo sapiens
gtggcctaccaggcctacgagcgctcgcgggacatccaggtatcacagatgtcgtaagaatctgaatcctccaaaagacaga

SEQ ID NO: 60675 - DNA, 100 bp, Homo sapiens
tgaaggaggctgcaaatgttgtggtcaagtgcctcacccctttctacaaggagggcaagtttgcttccaaggtgtgggcccatcgctggatggatctgtc

SEQ ID NO: 60676 - DNA, 74 bp, Homo sapiens
gtgctgtacaagtggaccaactatctgagcgcacttctcagaacttctggatgagttttcccagaacgtcttgg

SEQ ID NO: 60677 - DNA, 75 bp, Homo sapiens
gcacctctgtttgggggtcctcagatccccagacttcaagggagatttttaattttgtactaaaggcaattcgtc

SEQ ID NO: 60678 - DNA, 120 bp, Homo sapiens
accgggatcgtgaccgagaccgtgaccgagagcgtgaccgagagcgcgaatatcgtcatcgttagaaggggatgttcgtctaaccccagaagactttgctagagctcagaagtactgcaa

SEQ ID NO: 60679 - DNA, 76 bp, Homo sapiens
gacagtggagacactggcattggaacttcctgttctgatagcgtggaaggacgagattgaggagctgcgggccgag

SEQ ID NO: 60680 - DNA, 71 bp, Homo sapiens
cagctcttgcttcactaccagcaggaggctaaagagatattgtccaggctccccttccctgcgggcatatc

SEQ ID NO: 60681 - DNA, 98 bp, Homo sapiens
gattctcgacctgctaacagaactggaccttttcgggtgcaaatagctatgggcaacttggcctcggccataaggaagatgtgctgttgccccagcaa

SEQ ID NO: 60682 - DNA, 90 bp, Homo sapiens
caccacgtaggtactgtgtgaggcccaacagcggaatcatcgatgcaggggcctcaattaatgtatctgcctgaagcaggacattctaaa

SEQ ID NO: 60683 - DNA, 116 bp, Homo sapiens
atacaagtttaaccacaaatcatcaatatgtttcttctggatatccttcacttcaaaatagcttcataaagtcagcatttaaatcaaacggtattgagatggattgggttatgaaa

SEQ ID NO: 60684 - DNA, 90 bp, Homo sapiens
atgcagccagtagcttggatccttgtgggcatgatccataatcggtttcaaggagtcacccacttgcaatctgttccctgcatccaaaag

SEQ ID NO: 60685 - DNA, 75 bp, Homo sapiens
gcctgaagaaggtcagtgtgcttgcttggagatcaggacgcaaaggcttgttagagtgctgtgcaagatgtctgg

SEQ ID NO: 60686 - DNA, 75 bp, Homo sapiens
acaatctcaacgacagctctcagcagctacaggaagtgttgatggcgtctctgaatccaagttgcaaatctgtgt

SEQ ID NO: 60687 - DNA, 89 bp, Homo sapiens
agcgggtgacatggaaggggcagtacaagcttacgtctctgctcttcagtacaatcctcacattggagatatatttccacagcatctgg

SEQ ID NO: 60688 - DNA, 96 bp, Homo sapiens
ctctggcacctacgtctgcactactagaatgacatgtcacatagaccagctgaacacttggtatgatatgaaaactcatcaggaagtgaccagcag

SEQ ID NO: 60689 - DNA, 93 bp, Homo sapiens
gaacactttgcagaaatgacgagaagcccctcggagcaggcctgacggctctacatttggcctgtgccaatggtcatccagaagtagtaactc

SEQ ID NO: 60690 - DNA, 98 bp, Homo sapiens
gctgccacaccagcaccagcaagcggcattggctgcgggtgaggtggctttgaccccgggttgcccggccagcacgaccgaggaggtggctggacagc

SEQ ID NO: 60691 - DNA, 100 bp, Homo sapiens
tacaaaaaggtgcatataccactggttgatgccggcccaggatggatcagacctgtgaactacccagaagaaattgtctgctgcccttttccaatccagt

SEQ ID NO: 60692 - DNA, 73 bp, Homo sapiens
ggactttgggcgtcccattgccatggtcctgaggcacgtgaatggccaggatcagattgtgcccggcctgtac

SEQ ID NO: 60693 - DNA, 101 bp, Homo sapiens
gtgcttggtgtcgtttttccttgagctgaacgtcttgcaacagtggccgcacgcataggaatacaaacaagtgatcctaatgctgtggtcatgggattggc

SEQ ID NO: 60694 - DNA, 147 bp, Homo sapiens
taagccccagctggacttgagtattgacagcctggatctgagctgcgaggaggggaccccactcagtatcaccaggaggagatgttaaagtaacccatcttgcaggacgacattgaagattggtcttctgttgatctaagatgatta

SEQ ID NO: 60695 - DNA, 98 bp, Homo sapiens
ggaagaaccacaggccctggcctgccttgggccggggatttaacacagtatccctctgaagaagatatgatcgaatgggccaagagggaaagtgagag

SEQ ID NO: 60696 - DNA, 100 bp, Homo sapiens
ccaagcaagaagaaagacgtggcagcaagcgggagtcggggatagtgtcatcggttcggtaaagtttctgttctctgatgggcaccagttgcgtcttgaa

SEQ ID NO: 60697 - DNA, 74 bp, Homo sapiens
ctggggctcacggacatcaacgaggcctacgtggagacgctgaaggatgacggaggctggacacccatgatctg

SEQ ID NO: 60698 - DNA, 49 bp, Homo sapiens
gcggcggcggcggcggcggcggcgcagcttgcagacggtctgtcgagct

SEQ ID NO: 60699 - DNA, 90 bp, Homo sapiens
gtagtattggcattcccattgctgtgcctacaccttcgccacccactattggaccaggagttattcctgatgaagctaaagctttgtctc

SEQ ID NO: 60700 - DNA, 98 bp, Homo sapiens
ctttagcgcccatctccaacgtaacctcggcgccggtgacgtccctcccgctggtcaccactccggcaccagtccaaagcagcatatgtactcttcta

SEQ ID NO: 60701 - DNA, 100 bp, Homo sapiens
cttaatcatcatcagagtatcctacacaaagttgtctctgaccaaggaactcatttaatgatgggctatctgaagaggaacggggacgggagcctgctct

SEQ ID NO: 60702 - DNA, 88 bp, Homo sapiens
cttcttcagctctgagaccaccgcagcccactccctaggttctggctccttggcagcaatggctgtatttgaagataagtttaggcca

SEQ ID NO: 60703 - DNA, 90 bp, Homo sapiens
cgtgattcccgtgattgcgttacaagctttgtctccttcgacttggagtctttgtccaggacgggaaggtgaagaaggagctggaccctg

SEQ ID NO: 60704 - DNA, 82 bp, Homo sapiens
agagtttgtggaagatggcgcctgttgtgacagggggacggcaaaacagaacagaaaggcggagataaaaagaggggtgtta

SEQ ID NO: 60705 - DNA, 102 bp, Homo sapiens
tggtcgccgcgtccttggctggcgtccgccgccatgtctgcgcatctgcaatggatggtcgtgcggaactgctccagtttcctgatcaagaggaataagcag

SEQ ID NO: 60706 - DNA, 75 bp, Homo sapiens
cagctctccatcagccagagcgttcacgtagccgtcaaagaattatatccagatcgagagacagaagattctgaa

SEQ ID NO: 60707 - DNA, 74 bp, Homo sapiens
caagaaattcaaggacagtgaaggctgtcacccttgacccaaactttctggatgcttatatcaatttaggaaat

SEQ ID NO: 60708 - DNA, 75 bp, Homo sapiens
tcagtcccttctccatgaaatggtacacgcagaacatggtattctagaatggattctgggaaagaaagatgtcat

SEQ ID NO: 60709 - DNA, 99 bp, Homo sapiens
gcggccgggagagtagcagtgccttggaccccaggggaggagccccagccccgcgacgaggaggaagcggagctggagctgctgaggcagtttgacctg

SEQ ID NO: 60710 - DNA, 100 bp, Homo sapiens
ctgagcgcgtccaggcctgacagctctgcggctcgggccctgaggtacctgaaagaattccgcacagagcagtgcccactctttgtgcaacacaaatgca

SEQ ID NO: 60711 - DNA, 98 bp, Homo sapiens
cggacggggagctgaacgtggacagcctcatcacccggctgctggagggaagaaatgttggctatttggcgatgagaggtggtgaacagtgaccatac

SEQ ID NO: 60712 - DNA, 96 bp, Homo sapiens
tcctggggaacccgttcagcacaccagtggggcagtgcctcggtgagaaaggagattccggtgacataggaccccctggtcctaatggagaaccag

SEQ ID NO: 60713 - DNA, 100 bp, Homo sapiens
cctgtgacctgtggagacacggccagatctgccctccagctcccacatcaggacgagaaggagccctcgagttaccgtgggagctgtgggagctgccctg

SEQ ID NO: 60714 - DNA, 100 bp, Homo sapiens
ctggtggatgacagcgtgagtgacaccccaggggggctgggaaacgaccagaatccaggttcccagttcaatctcatccctcccagcagctccccttcca

SEQ ID NO: 60715 - DNA, 74 bp, Homo sapiens
ggaaacgcagacactgaactttgggcctgaatgggtttggaaatcccttgtctccaggttgctgggattgactt

SEQ ID NO: 60716 - DNA, 83 bp, Homo sapiens
gaggagacttccttgcttctttggagaatgatatcaaaccaggaaatttgtgcacagagataacacaggggatatgccatatg

SEQ ID NO: 60717 - DNA, 83 bp, Homo sapiens
agaagccttcctggctgatgcaaagtggattttgcacaactgcatcatttataatgggggatcaaaatacttgctggatggtg

SEQ ID NO: 60718 - DNA, 76 bp, Homo sapiens
gagtctctgtcctctgcatctgacgagggtgacaatagagtgtggtgtcatgtttgtgagagagaaaacactttcg

SEQ ID NO: 60719 - DNA, 75 bp, Homo sapiens
gtggaacagattcagaaggagcaggattaccaaaggttgagtgatgtctcttccccaagatcaataacttcgact

SEQ ID NO: 60720 - DNA, 76 bp, Homo sapiens
ctcatctcagcgcatgatcagttctcagtggaagatagatgataagcctgtaaaaattgacaagtgggatggatca

SEQ ID NO: 60721 - DNA, 101 bp, Homo sapiens
cgaagcatcacgtccgcttcccgacgctgagggcagccccgtccagggtaaccatgtgcgaccgaaaggccgtgatcaaaaatgcggacatgtcggaagag

SEQ ID NO: 60722 - DNA, 100 bp, Homo sapiens
ccgtgttcgtggacaaggagaacctcaccatgccgggcctcaggttcgacaacatccagggccgttgctccagggagaactgcaaatatcttcatccacc

SEQ ID NO: 60723 - DNA, 98 bp, Homo sapiens
atcacatctcattttgcaaagggttgaacagacacggtagaagactcgcccattttggaatgtgaccgtctgtccttcaggagaggacaccagggtgg

SEQ ID NO: 60724 - DNA, 74 bp, Homo sapiens
gatggatggactgagacgcagagtgtaccaggggatgctggactgcatggctggagtgcagtggcgtgatctcg

SEQ ID NO: 60725 - DNA, 100 bp, Homo sapiens
cctcattgaagctatgcagtatttctttggcatcactgcagctagtaatttgccttctggattcaaatgcagccctgaggatttggctactgcatataac

SEQ ID NO: 60726 - DNA, 75 bp, Homo sapiens
gatctagaagtcactttggaagaagtatatgcaggaaattttgtggaagtacgtagagaatacaggaaattcttc

SEQ ID NO: 60727 - DNA, 49 bp, Homo sapiens
tatccagtttcctggatggaccaaggaatgttttaaaggaagttgggct

SEQ ID NO: 60728 - DNA, 75 bp, Homo sapiens
tgacagtccatatgtaaccaaatattatggatcctatctgaagtttcctccagcttatggaggcatatctgaggt

SEQ ID NO: 60729 - DNA, 100 bp, Homo sapiens
tgaccctcgaaaaaaagatggagccctgcatatgattggctctttagctgaaatacttctgaagattgatctggatactattgatgtaagcaacctcaac

SEQ ID NO: 60730 - DNA, 78 bp, Homo sapiens
ttctaggtggaaagaatctgatgagccttttaggcctgttcaggcagttccttttagtcttgacagtgttgcaaattc

SEQ ID NO: 60731 - DNA, 100 bp, Homo sapiens
tctctttattcagaagctacaagacctggagaaaaagtactatgaggaaccaaggaaggggatacagaaaatgtcactgaaattcacaaatgcaaaacgg

SEQ ID NO: 60732 - DNA, 60 bp, Homo sapiens
gtcccatcactccaaggagagaaggtaatatctcccagctgtaatgatgacatcacagtg

SEQ ID NO: 60733 - DNA, 75 bp, Homo sapiens
taacatttgcagagcgctttcacagatggactctcgtcctgtcacccaggctggagtgcagcggcgcaatctcgg

SEQ ID NO: 60734 - DNA, 106 bp, Homo sapiens
tcttccagctcccctcacccaacgtcgtacttaattcagtgcacaaatgagatgaatgtgaacatcccacagttggcagacagtttatttgaaagaactactaata

SEQ ID NO: 60735 - DNA, 100 bp, Homo sapiens
tttgatcctcagcgtcgtgcccgagaagctaaacaaccagctcctgagcctcccaaaccttacaggtgaaaccagcccagagaagttacgggatttgccc

SEQ ID NO: 60736 - DNA, 83 bp, Homo sapiens
ttagccgagagtacacagctgctgtagaagccaaacaagtgggatgtcctggaacaggtggaggcctatcaagctgaggctcg

SEQ ID NO: 60737 - DNA, 89 bp, Homo sapiens
tgttcccctcgcggaggaaagcggcgcagctgccctgggaggacggcagtggctccggaagcctggttggcattgacaacaaaatcgag

SEQ ID NO: 60738 - DNA, 90 bp, Homo sapiens
gccctgggtgaagtgctccgtcgcccttgcctccagtatggtttgaagtggtgaacatggatttttctcggcttcacatgtacagtcctc

SEQ ID NO: 60739 - DNA, 96 bp, Homo sapiens
tcatctgcgatggacagaataactgtcaagacaacagtgatgaggaaagctgtgaaagttctcaaggacaagcactgatcctgaggggatactgtg

SEQ ID NO: 60740 - DNA, 90 bp, Homo sapiens
tgctgtagtcacaggaggtgtagagaggaccccgggacatctgaaagccaggaaatggttcgaagtcaacaataccattcttcacccaga

SEQ ID NO: 60741 - DNA, 83 bp, Homo sapiens
ggcctctcgcccacactgaccccgggggagcggcagcagatcaggatcctcatgaccagccaaagagaagaagaattaggaag

SEQ ID NO: 60742 - DNA, 100 bp, Homo sapiens
gccctacgagtttttcagcgaagagaacgcgcccaagtggcggggactactggtgcctgcgctgaaaaaggcacggaatgttaacactggtgaattagca

SEQ ID NO: 60743 - DNA, 75 bp, Homo sapiens
aaccgcgaagcacccagcggctggcgcctggagcgtcttttggttagctttatacgtctacgaatatttactgca

SEQ ID NO: 60744 - DNA, 100 bp, Homo sapiens
gaggcaccgggatcgtgaccgagaccgtgaccgagagcgtgaccgagagcgcgaatatcgtcatcgttagaaggtagctacagcaagctgggtagcaggc

SEQ ID NO: 60745 - DNA, 98 bp, Homo sapiens
tgagacccaaactgctcatacagaattacgcatttccacttctaatgacagcaactctggaaagtggcttctaactcggcgcattttcttagtggatg

SEQ ID NO: 60746 - DNA, 83 bp, Homo sapiens
cagggttgctgtgagaattgagggggaggcaattctgtggtgttcttggtcacacatttatggagtttctgaagggcagtgga

SEQ ID NO: 60747 - DNA, 75 bp, Homo sapiens
cagagagaaaatggatttatgcacgtgtggttctcaaatataggcattctgatgggaacttgtgtgttaaagtaa

SEQ ID NO: 60748 - DNA, 98 bp, Homo sapiens
cagaaaccccgttgacaaggcactgctttttcatgacggtacttcgtactggatttcgaggctggcatcctgcagtattttgtgaatgagcaaagcaa

SEQ ID NO: 60749 - DNA, 74 bp, Homo sapiens
gcccagaggggcccactcgctgtcccgaaaaccaattctgtgtcctcggaggaccacagcccagttgggcccca

SEQ ID NO: 60750 - DNA, 74 bp, Homo sapiens
ggttggtgcttcctgttcgcagctgcggcatgcttttttaggaccaaaggatatatttccttactcagaaaata

SEQ ID NO: 60751 - DNA, 100 bp, Homo sapiens
tgctgtttctcttcgccgacgaaagtgactgagaccgaagatgatagtgatagtgacagcgatgatgatgaagatgatgttcatgtcactataggagaca

SEQ ID NO: 60752 - DNA, 98 bp, Homo sapiens
agaaacctgggtgaactttcacggacaacctcagaggacaacgaagtgttcggcaaactcttccacatagactttggatatattttgggtcgggatcc

SEQ ID NO: 60753 - DNA, 80 bp, Homo sapiens
ctcccacaaacacatcgtgtacctctatggcgtctgtgtccgcgacgtggagagaggcagtggagaaggtgacacagcac

SEQ ID NO: 60754 - DNA, 100 bp, Homo sapiens
tctgctcactggtctctttgccgtctcccgatgctcccataatactctcagatagtgaagaagaagaaatgatcattttggaaccagacaagaatccaaa

SEQ ID NO: 60755 - DNA, 98 bp, Homo sapiens
gggccctcccccagcagtatcctgcatcgggagaaaacaagtccaaggatgaatcccagtccctgttacggttgctgatatgtgttcaagatgagtgg

SEQ ID NO: 60756 - DNA, 100 bp, Homo sapiens
attcttcagaaagtgaacttggcattttagatctaattcaagttaaaagcagccttcgccttatcccagatgatctatccctcctgaaactctaccctcc

SEQ ID NO: 60757 - DNA, 100 bp, Homo sapiens
attgagtcaatgctttgcattctcagtcctctgcataaagctgagagatgcctacagattcatgttacatgtaaagctgtcctcatttgtgactatggac

SEQ ID NO: 60758 - DNA, 101 bp, Homo sapiens
tatccccgttcgccaccaattatgggagggctggccaacttctgctacagacgactcagtaagaatgattgatgttggctgatattggagtgctcattcac

SEQ ID NO: 60759 - DNA, 75 bp, Homo sapiens
tccttactttgtcttggtatactacatggcaaaatgggaaagaaggacagaataacgggctcccagattcacaag

SEQ ID NO: 60760 - DNA, 100 bp, Homo sapiens
ttgaaccaccaaaagtccattatgaaactgttcctgagggaagacctcaattaccatgacccaacagtgaaacacagcaccttccatggtgaggataagc

SEQ ID NO: 60761 - DNA, 100 bp, Homo sapiens
agcaaattaaaaacaggatgaaaaagactgattggctcttcctcaatgcttgtgtggagtgtgaacatggctacgcctcttcattcccgtccatgccgag

SEQ ID NO: 60762 - DNA, 87 bp, Homo sapiens
caagaagtaggcattgaccccttgtccagttactctaacaagtctggaggtgcctggaatacttattaagaaacgatgcaaatccag

SEQ ID NO: 60763 - DNA, 100 bp, Homo sapiens
cggcgcccagtggcggtgtgaactgtgaggagttcgccgagttccagtttaaggaagaaatctctaaacgttttaaatcacatactgaccaacttgtgtt

SEQ ID NO: 60764 - DNA, 100 bp, Homo sapiens
gtttatgtatggagaggatccaagcaatgccatgccgacatatctgaagagatggattaagaatgctttggattaaggattgtggagcacatttcaatca

SEQ ID NO: 60765 - DNA, 83 bp, Homo sapiens
ggggcagcggctgtctcacggaccacggcggcgcccgcagctcctcaccggaacaagatcactcaaggtgaaggataatctac

SEQ ID NO: 60766 - DNA, 88 bp, Homo sapiens
gaagaagaagaaatcccagcaaataggaaaattaagtttagtagtgctcctattaagatggcttgttcaatcagtatatcagtcaaca

SEQ ID NO: 60767 - DNA, 75 bp, Homo sapiens
gaagagggaagacacgcggaaacaggtgtaatggataggtaacagagaagacctcgtcccttcctagtcagggca

SEQ ID NO: 60768 - DNA, 82 bp, Homo sapiens
gaattggtgacaaaatcagaggcatactttatagacatctttccaggaacagcgtgaggaggacagaagcacccaacaggac

SEQ ID NO: 60769 - DNA, 82 bp, Homo sapiens
ttccgccacggccgtctctggagagcagcagcccaagaggagagggtttgaccgcttcggaccagatggcacgggcaggaaa

SEQ ID NO: 60770 - DNA, 80 bp, Homo sapiens
gcccggccaagctatcttctcgctagcaggcttgccgctgttccgtaacccagtgattccagtcttggctgtggtatgaa

SEQ ID NO: 60771 - DNA, 82 bp, Homo sapiens
tcctctactccaacgcagtggccgaggaagctgcctgcccggtgtctgcccctgaggagaggaacttcctgaagtgctccga

SEQ ID NO: 60772 - DNA, 90 bp, Homo sapiens
ggaggccgtcggggagacgctgtggtgtgactggggcaggaccatcagtgtgaagcctcagtttaggtcatctggtggttcagaacactc

SEQ ID NO: 60773 - DNA, 75 bp, Homo sapiens
gccctacaacacccccagcggccgccggctcccccacgaggtgtattgccaggaatggcccctcctatcgtaccc

SEQ ID NO: 60774 - DNA, 106 bp, Homo sapiens
cgccctttccacctcgcggcagttcgcagccgctcttctaaaacattcaaaccaaagaagaatatccctgaaggatctcatcagtatgaactcttaaaacatgcag

SEQ ID NO: 60775 - DNA, 75 bp, Homo sapiens
caagtttgagtgttgctggaacggttcggataggcttcctgtgtccagtaccggttagtggtccgggatgtgaac

SEQ ID NO: 60776 - DNA, 100 bp, Homo sapiens
tcccattttgctcagcgactgtttgatgacgtcccgcagggtgactatgaccagagcaggaccaaagtgctgcacatgagcctgaaccccaccagtgtgg

SEQ ID NO: 60777 - DNA, 134 bp, Homo sapiens
gcatctcggcctcctctgccaccagggagctggacgagctgatggcttcgctgtcggatttcaaggcagcaaagctggccaagatgaagattccccccagtgagatgttcttgtcagaaaccgacaaatactcc

SEQ ID NO: 60778 - DNA, 98 bp, Homo sapiens
ctctggttcagactgcagtaaccagtactccaaagattcaggtttactcacgtcatccagcagagaatggaaagtcaaatttcctgaattgctatgtg

SEQ ID NO: 60779 - DNA, 50 bp, Homo sapiens
ctcccaagtagctgggattgcaggaatgaaatggcttgggccataagaac

SEQ ID NO: 60780 - DNA, 75 bp, Homo sapiens
ggccacctacagaaacaaaatgtcaacaaattgatggaggagaggagacgccgtgagcgggacgaccagatgtac

SEQ ID NO: 60781 - DNA, 100 bp, Homo sapiens
cgggaataacacaccggagacttttggggggaaactaggtcgatggtcggcggcgcccggatgggcagctgagctgaaccttagccggccgatcgaggag

SEQ ID NO: 60782 - DNA, 50 bp, Homo sapiens
agcggcgagcagaactacggcgagcggcacccaccaaggctccggatgtg

SEQ ID NO: 60783 - DNA, 90 bp, Homo sapiens
gtatttaaccaagttccaacaaaagaatgctgccgcagtgtttgccagctctgagcctgtgccaggattccagggggataccctgcagct

SEQ ID NO: 60784 - DNA, 80 bp, Homo sapiens
gaggccaactgcagaggaactggaacagaggaacattttgaaacgatttttagactctgaggagcagttggagctaatcc

SEQ ID NO: 60785 - DNA, 74 bp, Homo sapiens
attccggtcagggtcaagtcgtgttctgatcactactgacttgttgggccctgtggtaggaggctggtacaagg

SEQ ID NO: 60786 - DNA, 95 bp, Homo sapiens
tcacagaaagactgtagaaaatttccagttccacagaagcatggtgacatggaccagaaggagagagatgttatcatgagggaattccggtcagg

SEQ ID NO: 60787 - DNA, 75 bp, Homo sapiens
ccaggaggcatttgaagttccaaaatcatgaccaccccaggaaaagagaactttcgcctgaaaagttacaagaac

SEQ ID NO: 60788 - DNA, 75 bp, Homo sapiens
tcctatagaccagtgtaataccctgaatcccgtttttcgttggaatatacgttgcacatttatggcgattctgag

SEQ ID NO: 60789 - DNA, 98 bp, Homo sapiens
ggagctctgccggctcaacacgatggacttactgctggctttctgtgaagaattggaatcaatgatacaggagcaatttaagaaggggaagaacccca

SEQ ID NO: 60790 - DNA, 91 bp, Homo sapiens
cttggtttgcgtcctgcactgaaaggaaatgacggattttttctttatagctccaagctctacagattcttcaaatatattgagaataggg

SEQ ID NO: 60791 - DNA, 100 bp, Homo sapiens
tgtgcgctggccctcaaccatcagtccctgctttaagtttaaaattggtggtgaatggtggacatggatcgattataaccgcttccaggagctcatccag

SEQ ID NO: 60792 - DNA, 100 bp, Homo sapiens
cgcagtggtcgcttcttctccttggtctggacaaagtgccaaaggatcttccccctgacacaactctgctagacctgcaaaacaacaaaataaccgaaat

SEQ ID NO: 60793 - DNA, 98 bp, Homo sapiens
ggggatccccctgaagagttaccagatttctccgaagaccctacctcctcagccgcgggcgccgcagaactcaggggcttgggccccgccccaacccc

SEQ ID NO: 60794 - DNA, 98 bp, Homo sapiens
ataatgatatcagagagttaaaggctactggcaacatcgtggaggtgctgagattctgaaaaagagttccacgtcctcccttatcgagtctttgttcc

SEQ ID NO: 60795 - DNA, 98 bp, Homo sapiens
catgttttctgtctacgatggacatggagggtggtatttccaacattttggaggaactggttgtccagcctctgttggtatcagtcagtgctctgact

SEQ ID NO: 60796 - DNA, 100 bp, Homo sapiens
aagcgaagccttgaaaaagctgccctgagacggtgtcccgccgaaaggtgctcccgcagggacaaatgccaacaggcctgggaacctaatcgatttgctg

SEQ ID NO: 60797 - DNA, 71 bp, Homo sapiens
ccacttccaaggatatagagcaggcagatccagttcctaatggtttgcgagctttgccagttttctatgcc

SEQ ID NO: 60798 - DNA, 74 bp, Homo sapiens
ccacattgcccccttacaactcccaggagggaaatagtcgtgcaaggaattttggagagtaaaaggctgaacct

SEQ ID NO: 60799 - DNA, 100 bp, Homo sapiens
aaaaatcgccaaaaattacttggagcaaagggcagtcggcggagcttcgccaaggctggcgcagtcgtgtggacgaatgtggaacctcgctctgtggctg

SEQ ID NO: 60800 - DNA, 96 bp, Homo sapiens
cacagctgctgaaacagatgagaaggcaaacaagctcattgagtttctcacgaccagactcagattgatggacaacttttcttaattaagcacctt

SEQ ID NO: 60801 - DNA, 80 bp, Homo sapiens
caggacagcagagagttgtggagaaggtggctctgtttctcagtactttgaagttataactaatctgcctgaagacttct

SEQ ID NO: 60802 - DNA, 90 bp, Homo sapiens
ctacactagtcgcgggagccacgcagaggacgccggaacaccctggaagccgagaaatggtgcaaatatatacagagcttcataatcagc

SEQ ID NO: 60803 - DNA, 99 bp, Homo sapiens
gtggagaggaagcagaagggctctgaaggagcagaagttctgccagcgctatgaccagctcatggaggcctgggagaagaaggtggagcgcatcgagaa

SEQ ID NO: 60804 - DNA, 87 bp, Homo sapiens
cagagctgagcggcgcgggctccagactcgccgtggtcaagttcaccatgagaggatgtagaagacagaagtagctcagggtcctgg

SEQ ID NO: 60805 - DNA, 96 bp, Homo sapiens
ctgtccgagggtgctcttatttctacagagcctgtcatagggaactgcatggatagaagttctccaggacaagcagtggagctgccggatcacaat

SEQ ID NO: 60806 - DNA, 74 bp, Homo sapiens
cggagcggtccgcgagccaccgaggcccaggtgcagctctgtcatttccactctgctctgctgcacagaaggca

SEQ ID NO: 60807 - DNA, 106 bp, Homo sapiens
ggaaaatggattcagtttgcatctctccctcctttaaacagcttctccgggtctcagcatggtactttgaactcaagtaaacaaaagggaagattttctcgttgat

SEQ ID NO: 60808 - DNA, 87 bp, Homo sapiens
agtggggcagtgcactggagttcagcgccaacccaggggatgctgtgggccctgagggaaaggatcacagaggcgctgagccgggat

SEQ ID NO: 60809 - DNA, 105 bp, Homo sapiens
gccgcggcggggtgggtgcaagatgccgctgccggttcaggtgtttaacttgcaggtgcacattcaggttcccgagcacaaacatcaagataacgttcactgccc

SEQ ID NO: 60810 - DNA, 59 bp, Homo sapiens
ccaagcgtgaccagctttctgttgggaacactcaaagcttgttcagattattatcaata

SEQ ID NO: 60811 - DNA, 95 bp, Homo sapiens
aacatcctgctggatagggatggccacattaagctcacggactttgggttcgccaagaagctggtagacaggtcgacctggccgtctctgtttcc

SEQ ID NO: 60812 - DNA, 82 bp, Homo sapiens
gcgcgggaggtgttcgagaacgaccccgagacggaagttctactacatcaccctgctacgagaccccgtgtcccgctacctg

SEQ ID NO: 60813 - DNA, 100 bp, Homo sapiens
gctgcagccccaagacagagcgctactcctggcagtgcgtcaatcagagcgtcctgtgcgatcaggatcctcatgaccagccaaagagaagaagaattag

SEQ ID NO: 60814 - DNA, 100 bp, Homo sapiens
ctggtgcgcattgtctttccatcgagagccaagcgacaaggagacatctggaacaaactggtctgggaggggctgaacgtggtgaagacaggccgagtga

SEQ ID NO: 60815 - DNA, 96 bp, Homo sapiens
caattgtaaggccatcgattgttggtgccagttggaaagaaccttttccaactggcattgctcgggtaccacttgctggagctgctggaggccctg

SEQ ID NO: 60816 - DNA, 50 bp, Homo sapiens
tattatgctacatgaaaaggaagaggaccttttttctatcagtgcttatg

SEQ ID NO: 60817 - DNA, 100 bp, Homo sapiens
gccggcaagagggagttaaggacattccaggcagaggcaagatcatcacgaagtatgtatatgagctcctggaaaaggattgtaatttgaaaaaagtatc

SEQ ID NO: 60818 - DNA, 83 bp, Homo sapiens
ctgcgcgcgcgcctgaagtcggcgtgggcgtttgaggaagctgggtcgcgtggggcaggcagtggcgctgcgggccaaggcct

SEQ ID NO: 60819 - DNA, 101 bp, Homo sapiens
tggagtcgctttcatggtcttgctgattccactcaacggagctgtggccgtgaagatgcgcgccttccagagagacaagagagacacctccaacttcgaca

SEQ ID NO: 60820 - DNA, 74 bp, Homo sapiens
ctcgggtcgcccccaccattatttcgttgagccccatatgggggttggcaggcagcagagaggcccctttcaag

SEQ ID NO: 60821 - DNA, 98 bp, Homo sapiens
tagaggaagggaagtactccctggtgatggagtacatggagaagggcaacctgatgcacgtgctgaaagccgagagacagggtcttgctatgttgccc

SEQ ID NO: 60822 - DNA, 91 bp, Homo sapiens
ctacaaggaagggcaggatgtacccctgaaaccggatgctgagtaccctgaatggtctcggcgcggaagatggccggcggcgtggacggcc

SEQ ID NO: 60823 - DNA, 83 bp, Homo sapiens
cgcagaggaaaattcaggcaacgcctcgcgttgacaatgcagatcttcgtgaagactctgactggtaagaccatcaccctcga

SEQ ID NO: 60824 - DNA, 83 bp, Homo sapiens
ctcggcctcggcgtgctgcgcctccgcggctgccctgcgccaggtgtggacactgccagcggctgcagccgacttggaatgac

SEQ ID NO: 60825 - DNA, 75 bp, Homo sapiens
ctcggcgaggtgcccaccatcgagtccctgataggagagcgacttgcagttgtggaggtacagtgtgaacggctg

SEQ ID NO: 60826 - DNA, 74 bp, Homo sapiens
agatcttctgataaaagtacttgggattttaaagaaaaatgaccagtgtgcttttcttggagaaagaagaaaag

SEQ ID NO: 60827 - DNA, 100 bp, Homo sapiens
ggcggggtgcagaactgagcccaggccacagtaccctattcacgctctgtgcttgtgccaaggaccctgatgcttggtgtgacctgagtaaatttgacct

SEQ ID NO: 60828 - DNA, 97 bp, Homo sapiens
ggatgtggtaaaggtggagatttgctgaaatggaaaaaaggaagaattaacaagctagtttgtactggtgtactggcactccagtgctcacattctt

SEQ ID NO: 60829 - DNA, 74 bp, Homo sapiens
aaattacctccgagggaaacaagaaaacatcaaagaggtctagcaaaggtggatttggtgttgacttctctcaa

SEQ ID NO: 60830 - DNA, 50 bp, Homo sapiens
caatcctcagacgcctcacttaggacaacgtgcctgccagtgtagagccg

SEQ ID NO: 60831 - DNA, 95 bp, Homo sapiens
cgcgggctggttcgggatgagcgatggcatcggtcaaggtggccgtgagggtccggcccatgaatcgcagatatgaggccccaggattcctggcg

SEQ ID NO: 60832 - DNA, 80 bp, Homo sapiens
actggatgagcagcaaagggtcctggaaggaaagaatgaagaggccctgcaagattgaagaattggaggagaaacttaat

SEQ ID NO: 60833 - DNA, 75 bp, Homo sapiens
cggagctgcagccggttgggccggtgtactttcccggtctgccatcatggatgttctcgcagaagcaaatggcac

SEQ ID NO: 60834 - DNA, 82 bp, Homo sapiens
tgcgtcctgcactgaaaggaaatgacggattttaaagcataacccctactgtagaactaaatgcactgtgcatgaaacttgg

SEQ ID NO: 60835 - DNA, 51 bp, Homo sapiens
aacagctggagccagttactgggcaggggatcttcaatattcatgttattt

SEQ ID NO: 60836 - DNA, 100 bp, Homo sapiens
gagcgactcttacatgatgaacaaagtactgatgacaggtacaccaggggttggaaaaaccacactaggcaaagaacttgcgtcaaaatcaggactgaaa

SEQ ID NO: 60837 - DNA, 98 bp, Homo sapiens
cgagtagttcagttgtggaattggttatgctactgtgttctcaggttcaaaccttgtactactcagctgatcacaagctgcttgatgggaacctacta

SEQ ID NO: 60838 - DNA, 83 bp, Homo sapiens
cgagagtcgtctcctcgataccaaagtaatcaagtcagaggattatatgacttttatctgcctagagaagaactatggatcta

SEQ ID NO: 60839 - DNA, 104 bp, Homo sapiens
actccgcacctcggggacattattgcgcgtggaacggctgcttttggaagcaattctgtggtgttcttggtcacacatttatggagtttctgaagggcagtgga

SEQ ID NO: 60840 - DNA, 75 bp, Homo sapiens
tttgacgggagttgagaagtataaaggtcaaaatgcagatcttcgtgaaaacccttaccggcaagaccatcaccc

SEQ ID NO: 60841 - DNA, 99 bp, Homo sapiens
gtcgcgactctggcctctgaaacactaccactgctggcgctgaccttcatcacagacaacagcctggtggcagcggttaatgacaacaccaacacagcg

SEQ ID NO: 60842 - DNA, 101 bp, Homo sapiens
ggcaaagtctcacctgaaacagttgacagtgtgattatgggcaatgtcctgcagctagctgaaagcagagaacccagcagaggattctgggaaggtcctgg

SEQ ID NO: 60843 - DNA, 73 bp, Homo sapiens
gttgccgggtcatgttaattgggaaaaagaggtctgcggggtttccgagaggctcgccgggatttctggcggg

SEQ ID NO: 60844 - DNA, 83 bp, Homo sapiens
gacaacattgttcctggaacgccctctttttaaaaaaggtcagttcaaagatcctagaactcgcccggaagcagaggatgaac

SEQ ID NO: 60845 - DNA, 82 bp, Homo sapiens
ctctcaacttattcccttcaattcaagtaacagcccaaacaaattcgaatatcttctaaaacaggaatacctctcaatgtct

SEQ ID NO: 60846 - DNA, 75 bp, Homo sapiens
gatgcagaaggagatcactgccctggcacccagcacaatgaagatcaagatcaacaacccctccccgtcgtaaac

SEQ ID NO: 60847 - DNA, 100 bp, Homo sapiens
caacattcttgtcacactgaaatttccttctactgatctccaattgatgacagtgcaattttggattgccagttcagtgagttttatcatacgcctccac

SEQ ID NO: 60848 - DNA, 100 bp, Homo sapiens
actttcctctaaaatgcaagatacaatggaggagaacagtgagaggaatgacatctttgtgttcctgttaagcacacgagctggaggactgggtatcaat

SEQ ID NO: 60849 - DNA, 100 bp, Homo sapiens
ggtcaagtacacagagagacggcagccgctgtacagattcatcaccacgaaccccgagatgcccctgtccttcacaataagccgaggattctgggtgctg

SEQ ID NO: 60850 - DNA, 83 bp, Homo sapiens
cgcctccccgcgccgctcgcgcagccatgtccgaggagaagcccaaggtcaaaatgcagatcttcgtgaaaacccttaccggc

SEQ ID NO: 60851 - DNA, 95 bp, Homo sapiens
atcgtctcctgtgtggcgatggtcttcctgctggggctcatgtttgagatatggctcgtggacagcagaaaattcagtctcagcagaaaaatgcc

SEQ ID NO: 60852 - DNA, 100 bp, Homo sapiens
tgaccgagaccgtgaccgagagcgtgaccgagagcgcgaatatcgtcatcgttagaagctccctgcagcctggctgaccatgtttgatgctgtgctcatc

SEQ ID NO: 60853 - DNA, 90 bp, Homo sapiens
gacccttcctgagggccgagcaacagtgtagtggcgtattccacatagcaaacaggaaaaccagtagattcccagacatcgcgaagtgaa

SEQ ID NO: 60854 - DNA, 100 bp, Homo sapiens
gccggatccctccttctcccggcgcctcaagcggaagggaggtggggaagacagggctccagctaccacaggacgggctctgggtatagccgttccagtc

SEQ ID NO: 60855 - DNA, 100 bp, Homo sapiens
tttattcaccgcctccgaatttgcaaagaggaggaaggagggacttcttggcttctcccagcatagccccaggaaagaccacagcaagattctttcattc

SEQ ID NO: 60856 - DNA, 75 bp, Homo sapiens
catttggtaatttagcagaacttggacttggaccctctgtggaacacccgagtacctagcccccgaagtcattca

SEQ ID NO: 60857 - DNA, 83 bp, Homo sapiens
cctgagctctatctcagtgtacacgaatagcctaacatggcagaccagagacagcgctcactgtctacctctggggagtcatt

SEQ ID NO: 60858 - DNA, 51 bp, Homo sapiens
atcacggctgccagaggctgctcctacctcagaacagccctgtggccccca

SEQ ID NO: 60859 - DNA, 98 bp, Homo sapiens
atgccagttttttggaagtcttagttcgagatgtgtgtatttcatgtggcgacatgtctaagaatgtgagccagtcacagatggcaaaattgaaccaa

SEQ ID NO: 60860 - DNA, 100 bp, Homo sapiens
acacacgccttcaggtttgctcaggggtggagctgatcagaataatgttcagcatcaaccccctggagaacctgaaggtgtacatcagcagtcggcctcc

SEQ ID NO: 60861 - DNA, 99 bp, Homo sapiens
agctgctgcagaacgggagccgccacttcgaggactggatgattccaatgtacagccaatgatgagcagctgctgggctgaagggactggggccatttt

SEQ ID NO: 60862 - DNA, 74 bp, Homo sapiens
gccaagcctagcagctcgggcaaggatggtggaggcgagaacactgaggagtactatactggcaattgctggag

SEQ ID NO: 60863 - DNA, 100 bp, Homo sapiens
gccgatggcaatgtcttcaccactgggttcagccgcatgagcgagcggcagctggctctctggaatccgttgtctatcaacgtctatgactacaactgcc

SEQ ID NO: 60864 - DNA, 75 bp, Homo sapiens
cctgggactggacgtccgagaggtcagaatggcggcagcggagcatcgtcattcttcaggattgccctgctggcc

SEQ ID NO: 60865 - DNA, 108 bp, Homo sapiens
caaggtccggctgctggatggaggggattttgtcagcttgtcgtcaagagacacctatggctgccgatgaaggctcagcagagaaacaggcaggagaggcccacatgg

SEQ ID NO: 60866 - DNA, 82 bp, Homo sapiens
ggtcgccgcggggctggccgccatgcacaagctgcacttcctgcacagatgccatggacaatattaccaggcagaaccaatt

SEQ ID NO: 60867 - DNA, 51 bp, Homo sapiens
gattcgcagtggtcgcttcttctccttggagtgatttgggccccgatgttg

SEQ ID NO: 60868 - DNA, 43 bp, Homo sapiens
aaggtggaagatatgagccagtctgctggagtttgctggaggt

SEQ ID NO: 60869 - DNA, 82 bp, Homo sapiens
gaaggggtcctcagagttactgggtttggtgccctggttgtcagatgttggaaagcagtaggacggaacatactcttcgtgg

SEQ ID NO: 60870 - DNA, 51 bp, Homo sapiens
gctacgacatctgccctccatgaaagacattttaaatccaaaggatgtgat

SEQ ID NO: 60871 - DNA, 75 bp, Homo sapiens
tgaatctctgttccaaatgctttgctgagagttgtggttgtagaagacataaaaagatggaaaactatgctggag

SEQ ID NO: 60872 - DNA, 87 bp, Homo sapiens
gaattctaatttgaaccatgtttggattgaagccgcctctgtattacttaccaggctaactcaggtgagatggagccgctatagtcc

SEQ ID NO: 60873 - DNA, 75 bp, Homo sapiens
ggatatttgagagtccaactggcactgcctgggccgaggccactggtgcatatgttcccgggagggataagccag

SEQ ID NO: 60874 - DNA, 75 bp, Homo sapiens
cctccgccaccgtgcacatccgaatgggagggccaaacatgtgggctattacctctgaagaacgtactaagcatg

SEQ ID NO: 60875 - DNA, 89 bp, Homo sapiens
tgcagacaggagctgcctgctggcacacgtccaccgcctccaccacgagggcaggttcagagaaagacacctatggctgccgatgaagg

SEQ ID NO: 60876 - DNA, 101 bp, Homo sapiens
tatacctcttcactcaggctctgcccagaactcaagatactttggtgttgaacatttgggatagaagagagaaatttaaaattaaaaattttccatatttc

SEQ ID NO: 60877 - DNA, 100 bp, Homo sapiens
ttgttgccgctggggcgcgcagcacgccggggcccgcgagctggctgcgctctactcgccagatgagcgggatcgtgtgcagaagaaaaccttcaccaag

SEQ ID NO: 60878 - DNA, 82 bp, Homo sapiens
cgagacttaccagagccacaagggtttccaggcctgaggtgcccgccctggccccaggagaatgaaccagccgcagaggatg

SEQ ID NO: 60879 - DNA, 83 bp, Homo sapiens
gagaggagttccgcatggagaagttgaaccagctgtgggagaaggcccagcgacttcatggcggctgaagagatgcattggcc

SEQ ID NO: 60880 - DNA, 96 bp, Homo sapiens
ggaccatctgttcggaaccccagagcacgagtagtagtcttaagatctacatggggaggacagagaagcgcaaagaacaagagaaaagatgcatcc

SEQ ID NO: 60881 - DNA, 90 bp, Homo sapiens
gggtggcatggcggagaaggatgacaccggagtttgacgaagaggtggtttttgaggttgatggacggatggctacatggatgtgatgga

SEQ ID NO: 60882 - DNA, 75 bp, Homo sapiens
atggacagaggccgcggccccgcccccagggggcggcctgcggggccggatcgtggcacccagaggctgccagga

SEQ ID NO: 60883 - DNA, 75 bp, Homo sapiens
gatagatcatgcagagtattacctttacaaaggaggaggtggaggaggaggaggatggagagctgcccaagacag

SEQ ID NO: 60884 - DNA, 120 bp, Homo sapiens
gtgaagggtacttttcatggtgcatggaaggaaagccaatgcgcagtgaagctgtggtctaccaatctagacaactcagtggcaagcattgaggcaaaggctaatgtgtgctgtgttaaa

SEQ ID NO: 60885 - DNA, 100 bp, Homo sapiens
aacgaacccctcttcatgtggccgcatttctgggagatgcagagatcattgaactcctgattttgtcaggaaagaaaccttgactggttccccaggatga

SEQ ID NO: 60886 - DNA, 71 bp, Homo sapiens
gagattcatatgagagttatggtgatgcaactgtgacaatagctcacagatacacccccaaagagcaactg

SEQ ID NO: 60887 - DNA, 98 bp, Homo sapiens
gagcctcaggcggcagcgcttctagcatccagtcctggatgagccaatagctgaagctgtctgtattatcgcagacacggataaatggagtgtgcagg

SEQ ID NO: 60888 - DNA, 90 bp, Homo sapiens
gcttctcatgcaaaaggaatcgtgctggaaaaagtgtgtgatgaatgcagactctgctaccattttggctgtttggatcctcctttgaaa

SEQ ID NO: 60889 - DNA, 75 bp, Homo sapiens
aaatggacagtggagatgaagcctaagaatatgatcaggtgccattgttatagaacgaccaaatgtgaaatggag

SEQ ID NO: 60890 - DNA, 82 bp, Homo sapiens
cgcctagtaaacggggctgctggtgggccgcgtcgaagacatggaccagggctacggaggaacttgctactaccagcaccat

SEQ ID NO: 60891 - DNA, 50 bp, Homo sapiens
aggaagaagtctaagagtgaacacatggattaattgatgtatgttgagtt

SEQ ID NO: 60892 - DNA, 113 bp, Homo sapiens
cgcagtgccacttcgacatcgagatcaaccgggagccggtgtatgtggtagaagaccaaagaagagatgagctaggaccatccacctgcctcacagcctgctggacggctctc

SEQ ID NO: 60893 - DNA, 115 bp, Homo sapiens
ccggattatagtctctcgccacagcggcctcggcctccccttggattcagacgccgattcgcccaggatggaaaggcagatgtaaagtccctcatggcgaaatataacacggggg

SEQ ID NO: 60894 - DNA, 90 bp, Homo sapiens
tgatgattggactctaattgctagtcatcttcaaccctgtggcttcagatatgacacttacagcactgggccccgcacaaactcaggttc

SEQ ID NO: 60895 - DNA, 101 bp, Homo sapiens
ctgacggcgccggttcgctgcccggtccgcccgcggtgagaggtactagcaaaggccagacgtcttactcaacaacttccctgccaccacctccaccatcc

SEQ ID NO: 60896 - DNA, 80 bp, Homo sapiens
gttcaccaccgtggtggccgacacgggcgacttccacgatcgtgacgtctgcatccacagatctccaggattacacttac

SEQ ID NO: 60897 - DNA, 131 bp, Homo sapiens
gtttaaccaaatctcatgaaatggaaaatgtggacagtggagaaggcccagccaatgaagatgaagacataggagaagaagaagaggacagtgctccagtgaaagtggaagaacaaaggaagatgagtcag

SEQ ID NO: 60898 - DNA, 82 bp, Homo sapiens
gaagtacacatcggtttcccttccagccattggaacagccagtcagtctgcaggaagccaaactactgctaaaagaagatga

SEQ ID NO: 60899 - DNA, 90 bp, Homo sapiens
cgcgccggaccctgaggcagcgagatgcggaagggagagctgtttgactatctcacagagaaggtggccctctctgaaaaggaaaccagg

SEQ ID NO: 60900 - DNA, 49 bp, Homo sapiens
ctggatttggtgctgttggttcgaattcttccatctctatgacaacaag

SEQ ID NO: 60901 - DNA, 100 bp, Homo sapiens
aaaccaaagtctcttctgctgggaaatcccagtacagatcaccccatatcatgtgaacctcctcctggctggctatgatgagcatgaagggccagcgctg

SEQ ID NO: 60902 - DNA, 90 bp, Homo sapiens
tgcgcagcagaaagcatttaaccagcatggctacttcatattttggaaagcagtttttaagacaagaagagagaagggcacagttaccta

SEQ ID NO: 60903 - DNA, 100 bp, Homo sapiens
ctggaacaaggagaagaaccatggagactggaggaagaattcccaagccagagctttccagctgccactggtgacatgccaacttaccagatccgagctc

SEQ ID NO: 60904 - DNA, 100 bp, Homo sapiens
gccggctagaggaagaggcgttgcggcgaaaggaacggctgaaggccctacgggagaaaaccgggcgcaaggtaaattggcaggatgaggagcagcaaat

SEQ ID NO: 60905 - DNA, 96 bp, Homo sapiens
aaagccatgcccgaggatgctaaggggcagattgcagagggaatggcatacatcgagcggaagaactacattcaccgggacctgcgagcagctaat

SEQ ID NO: 60906 - DNA, 100 bp, Homo sapiens
aacacattgctgagcttgaaatccagtgtctaccatcagagggagatctctgccccctggggctgagagaccccaacctttccccaagctgaagctgcag

SEQ ID NO: 60907 - DNA, 96 bp, Homo sapiens
aaacgcaggcaagatgaattaaaacatgaatcaacgtatttacaacagttatcacgtcagaagagatcaattctacagaaatttccagtggttctg

SEQ ID NO: 60908 - DNA, 83 bp, Homo sapiens
ggcgccgcgctgctcctgctgctcatcccggtggccgccgcgcaggagcctcccggagctgaggttgacggatatattcagac

SEQ ID NO: 60909 - DNA, 100 bp, Homo sapiens
aggcgccagaggagccgccttctgcctcagaacggcgtgactcggaggatgaatgctatcaagtaagacaagtgtttgcccagaaacttcacaaaggcct

SEQ ID NO: 60910 - DNA, 100 bp, Homo sapiens
ttcgaggccattctggaggccagtcgcttactgaaaaggcaaaactgactttaaggtcaatgagctgaaggagaaaggcaacaaggccctgagcgtgggt

SEQ ID NO: 60911 - DNA, 100 bp, Homo sapiens
tcgccttttgccacctttccctttatttccggaggcattgcttctatgacagtgccagtgtacattgcggaggtctcaccacccaatttaagaggccgat

SEQ ID NO: 60912 - DNA, 100 bp, Homo sapiens
tgactcaatcatcactgttttaacaggggctgtttagaaatatatggccaaatctgtaacccggaaacagcaaaaaacttcttagcaaaggatcactaag

SEQ ID NO: 60913 - DNA, 90 bp, Homo sapiens
ggaagcccggctccgggccagcatccgagagcccggactggagccacaatggtgcgcatgaatgtcctggcagatgctctcaagagtatc

SEQ ID NO: 60914 - DNA, 84 bp, Homo sapiens
ggatccccgccgctctgtctacaacccgaggcctccggtgtggctgtctctgatggtgtcatcaaggtgttcaacgacatgaag

SEQ ID NO: 60915 - DNA, 74 bp, Homo sapiens
ccaacaccacgacaatccagtttcctgctaatttgcagcttcctccagtgaagtttagcaactgcaatggaaaa

SEQ ID NO: 60916 - DNA, 98 bp, Homo sapiens
aaaacgtggatgattactacgacaccggcgaggaacttggcagcccgtgatgctgatgagcgagagaagtggatccatgccttagaagaaacaattct

SEQ ID NO: 60917 - DNA, 74 bp, Homo sapiens
gcctctccgccactcatcaccaatgtcacggtggcagccacagcagcctcagggacctcagcaactatggcctc

SEQ ID NO: 60918 - DNA, 97 bp, Homo sapiens
ggtatctacggcctggacttctatgtggaaatggccagtgatgaactgagggagttgaggaatgccatgacccaggaggccatccgtgagcaccaga

SEQ ID NO: 60919 - DNA, 100 bp, Homo sapiens
tgtgaacaccttcttcagcttccttcgacgcaaaacagactttttcattggaggagaagaagggatggcagagaaggaactctttccagttaacagacag

SEQ ID NO: 60920 - DNA, 75 bp, Homo sapiens
tggaggtggaagccaacaatgcctttgaccagtatcgagaccttttctctcctgtcacaatggcatgatctcggc

SEQ ID NO: 60921 - DNA, 98 bp, Homo sapiens
ctcacgtctacctgcctatacacctttatggacaactagtacaccataaaacaggctgccatttgttggaagtacagtatgccaagtacatggaaaac

SEQ ID NO: 60922 - DNA, 100 bp, Homo sapiens
ctgggctcggtattccccttcctgctagtcctggtggatctgcagtacgaaggagatcatgaatcagacagataaaaatcaacaagaaatcccatcatac

SEQ ID NO: 60923 - DNA, 113 bp, Homo sapiens
cggaagcacgatctccggcagcggcctgggaactcttagctgagcaggcgagaggtatgtgtaatcctcgaaattatagtgacacacctccaacttcaaagagcacagtggag

SEQ ID NO: 60924 - DNA, 100 bp, Homo sapiens
ggcccaccctacatttagcgcatcatgtgatccggaatgaagctcgactgagaattgtaaaaactcttgaagacattgatctgggccctactgaaaaatg

SEQ ID NO: 60925 - DNA, 75 bp, Homo sapiens
ctaagccagaccggtcctcgtttgtaccgtccctcttcaggatcgaatcatcaatttagttgttggcagcttaac

SEQ ID NO: 60926 - DNA, 74 bp, Homo sapiens
gagaactatgtggcagatatcgaggtggatggaaagcagtgctactatatcggggccacagatgatgcagccac

SEQ ID NO: 60927 - DNA, 100 bp, Homo sapiens
ggccttggaaagagactctgcgtcaggtcacccagcagagatcagcaatccttggctcactgaggaggtttgaatggcaacatacttgtttaacattgaa

SEQ ID NO: 60928 - DNA, 51 bp, Homo sapiens
gcccatcgcagccgccccgaaggagccagccactcattggatttggaagat

SEQ ID NO: 60929 - DNA, 118 bp, Homo sapiens
gtttgtgtggatggggtcaacacttacaactgccgctgtcccccacaatggacagcttttcttagtgacactaaagatcgaggccctccagtgcagtcacagatctggagaagtggtg

SEQ ID NO: 60930 - DNA, 75 bp, Homo sapiens
ctattaagatgcaagtctacttcgatatgaattatacgaatcgagatattggggcaaatattctgaaaaaagaag

SEQ ID NO: 60931 - DNA, 100 bp, Homo sapiens
gctcaactaagaccaagtcctcgctggactgctcagggtgccagacctcatcgtatgaaataatgtactcttgctggagaaccgatcccttagaccgccc

SEQ ID NO: 60932 - DNA, 96 bp, Homo sapiens
ctggaagcccggagacatcagcggctgcaattttgctactcgctgctcggcgtggaactgtcagcgggctacattgagagacctcagctgattcga

SEQ ID NO: 60933 - DNA, 100 bp, Homo sapiens
gtgagaccctcacttcatccggctacccttcatctggatcaagcagtccatgctgaagtggctttaatggttcttgaagcttatcagaagtaccttgcac

SEQ ID NO: 60934 - DNA, 76 bp, Homo sapiens
ggcaactttaagaaaagtgactacttcatgcctttctcagcagtgaacgtgagcacgctgaaggcttacttcagat

SEQ ID NO: 60935 - DNA, 100 bp, Homo sapiens
ggaacaaaatgcataggacagtccaaaatgaggaagaacggctaaagaattacctccaaagccattgtcaagaccacagcagtcatctgcaccagtccag

SEQ ID NO: 60936 - DNA, 97 bp, Homo sapiens
tgaaccgttactacccacagatccttaccaacaaggaggcggaaaaggtgctgaggagatacccaagctccagtggttccatactggcgcctgcctg

SEQ ID NO: 60937 - DNA, 100 bp, Homo sapiens
ggactatgggggaactgatggcgttcctgttacctctcatcattgtgttaatggtgaagcacagcgattcccactcaagaatgaacaatccgtcagaaac

SEQ ID NO: 60938 - DNA, 100 bp, Homo sapiens
cctggacccagctgagcgggcggtcattcgcatcgcagccgccccgtggtgcctcctttgatcccgccaaagatcccagaaggggagcgcgttgacttcg

SEQ ID NO: 60939 - DNA, 100 bp, Homo sapiens
cttggatccgcgggacaagaaaattcatgcgttgggagctgaaagtgccgacagcattggtgccgtgttaaatagcaaagatgagcagagagaaattgct

SEQ ID NO: 60940 - DNA, 100 bp, Homo sapiens
tgaaaatcaacgacaacttgagcacaggatctcatagatcagaatatactggagcctgtaacccgtgcacagagggtgtggattacaccattgcttccaa

SEQ ID NO: 60941 - DNA, 97 bp, Homo sapiens
gatggctttaaaagtgctactagaacaagagaaaacgtttttcactcttttagtattactaggctatttggtgtaaaaggaagagaatgtctcctgg

SEQ ID NO: 60942 - DNA, 98 bp, Homo sapiens
cgggctgcagatgacagcaaagaggttgagagcttccagcagctgctcaatgctcggacacagaaacccttgggagagcagttccgaaaagaagttca

SEQ ID NO: 60943 - DNA, 75 bp, Homo sapiens
cttagccaactgagaggaaaagagaaataccatttcagacatgccaagataagccaatggacacgtcagtgttat

SEQ ID NO: 60944 - DNA, 101 bp, Homo sapiens
gtggagcagatccgatggagaggctgagctgctccaggacttgggctattgtggacgatgaaaggctctctgcagaggagatggatgagaggaggcggcag

SEQ ID NO: 60945 - DNA, 74 bp, Homo sapiens
tgcaccccaccttgatccagcggacttacggtccctcaacaccttacactaagtcaaagcgtggccacagagaa

SEQ ID NO: 60946 - DNA, 100 bp, Homo sapiens
ggcgctccacaatgggacactgagctttgtggaagcatttggcggcataccaccctgcactgtgagaacccagtgacttgattgtaaaaatttacagagc

SEQ ID NO: 60947 - DNA, 89 bp, Homo sapiens
ggccgtcaagaagggctcgaccgcgatttgttcctgatcttgaagatattgtaaattttgaagaactagtaaaagaagaaggtcttgca

SEQ ID NO: 60948 - DNA, 73 bp, Homo sapiens
caggcccggggaggcaaatcaggagctgccttctatgcaactgagggcttatcaacactgcaagctgtgctgg

SEQ ID NO: 60949 - DNA, 100 bp, Homo sapiens
tcccacctctggctcccaaagattggtttgcaaacttcgacaaaatactcttctccactcgctattggccaggctaccaacgtctttgtgaacatggagg

SEQ ID NO: 60950 - DNA, 98 bp, Homo sapiens
ggagcagctgggcacggcgtccagggcagctagggcctgggccgcggttcggccgcgccggccggtatgcaggtgccttgagagcttcaggggaaatg

SEQ ID NO: 60951 - DNA, 83 bp, Homo sapiens
cgcaaacccaaagatccccgttcctggagattctgattgaggtggacgacatccttggagaaggcagcgacgacagcgacagc

SEQ ID NO: 60952 - DNA, 51 bp, Homo sapiens
taagaaagtggacaaagagaggagtcaggtctattgaatgatggaactgtg

SEQ ID NO: 60953 - DNA, 100 bp, Homo sapiens
atgaagtattaattcttccactgatatctcaaaaggtgatctggacaaaggaacaggtatctcaggtacaccagaggatcgcttcctggcagaatttggg

SEQ ID NO: 60954 - DNA, 46 bp, Homo sapiens
ccgtttattaaaagagctgtggctgagtgctaacaggaatgaatga

SEQ ID NO: 60955 - DNA, 74 bp, Homo sapiens
cctctctacagtttgttgtagaaccaagtgaagccacaaacagatcaggtgttaaaccgcctgacttttgcgtc

SEQ ID NO: 60956 - DNA, 114 bp, Homo sapiens
aagcagcatgcccctgcccacagagcagccccccagaacagaaagaggtgacagagctgaatgaacctctctccaatgaagatcgaaatctcctctctgtggcctacaagaatg

SEQ ID NO: 60957 - DNA, 50 bp, Homo sapiens
tggtaggctatgaccacgagaagccagctgagatgccgcggcagtttccc

SEQ ID NO: 60958 - DNA, 75 bp, Homo sapiens
cggaatgctggagtcagtggaagacggagctggtcggcccgaaggcagtcatggatcaggtaatgcagtttgttg

SEQ ID NO: 60959 - DNA, 102 bp, Homo sapiens
aaataccagtccccagtgagggtgtacaaatacccctttgaattaattatggctccttgaaaagatcttttgaggtcgaggaggtcgagacacccaactcca

SEQ ID NO: 60960 - DNA, 91 bp, Homo sapiens
ctgtacccatggtttaaacaggactggctacctcatttgcagccatcactggtgcaagctatatttaacggagatcctgatgaagttcgag

SEQ ID NO: 60961 - DNA, 90 bp, Homo sapiens
caaggagctaaagcagcgtgcgttcagccctgggtgaagaaaatatttggaagctctgtgaatacatcaaaaaccatgaccagtatcctt

SEQ ID NO: 60962 - DNA, 100 bp, Homo sapiens
tgcagccacctcccaccacacaagacagtcattttgtttactcattcagccctgttgcaggtcccaataaactcttcataaggttgacagaagcaccctc

SEQ ID NO: 60963 - DNA, 101 bp, Homo sapiens
aaagcggcccatatcttcttcaccgacagcatcagctccctccagacagtgcccgtgaccctcctggggcctagggcctgcagccggctgcatgcagctcc

SEQ ID NO: 60964 - DNA, 100 bp, Homo sapiens
gccacctccccatatcctgagactgacagtgctttttttgagccttcccatctgacatctgctgctgatgaagttgccctcaaattggctgtagccacac

SEQ ID NO: 60965 - DNA, 82 bp, Homo sapiens
gagacttttctcagatgttggatatttgcttggaaaaacgtgtgggtacgaccttgttgttgacctcctgtactggagagac

SEQ ID NO: 60966 - DNA, 75 bp, Homo sapiens
tttgaccacaacatcagccctactattggatcctgcaaaagttccaggtgcccacactggaaacttggagatcct

SEQ ID NO: 60967 - DNA, 83 bp, Homo sapiens
cttaataatgacaatctcctcagggaaggggcagcacagactctatgctggtatcaagttcttcctcattgatttcatcttta

SEQ ID NO: 60968 - DNA, 100 bp, Homo sapiens
tgagcttcccaccgaagatgaacagggttcctggggcatcgacgatctccatatttcattgcaagggaaatgatcttcattggttagcatgtgccttata

SEQ ID NO: 60969 - DNA, 90 bp, Homo sapiens
cgggtgtctcgtgtgtgaacatcacaggaagatgagaatgtgcctactgctcctgatcctccaagtcaacatttacgtgggcatgggaca

SEQ ID NO: 60970 - DNA, 89 bp, Homo sapiens
aattcagcaacttatgttagaaatcttttaatgtggcattactgctggcagaagatttcaaaaggaaacaaagcttagcaggagaggag

SEQ ID NO: 60971 - DNA, 75 bp, Homo sapiens
gcgacagcagcagccatggaggacgagatgcccaagactctgttgtgaaacagctattttattcccaatgcgttc

SEQ ID NO: 60972 - DNA, 82 bp, Homo sapiens
tattggtcttaaaacagtaattggagaacttcctccagcttccagtgggctttttggtggtgctggagttggcaagactgta

SEQ ID NO: 60973 - DNA, 48 bp, Homo sapiens
ctgaatgtccaacatcagatgttgaaaatcttagacgaattttacaat

SEQ ID NO: 60974 - DNA, 75 bp, Homo sapiens
ctggcagccccgctctctgcagtggataagattgtggaccagctgcagcagttaatgcaggtgtatgacttggct

SEQ ID NO: 60975 - DNA, 75 bp, Homo sapiens
ctgttgcaatcaaggccatggcaaaataactggctcccaggcttggactatgtcagccatgaagacatcctcccc

SEQ ID NO: 60976 - DNA, 100 bp, Homo sapiens
cgtggtcagcgtgctcactaagggcaacaaggagatgaagctgtccgatggctcctacttcggggggtcctggcggcagagaccacgtcccagcaggagc

SEQ ID NO: 60977 - DNA, 74 bp, Homo sapiens
gcgcaccatctgaaaacaacatcatgcagtggaatgcagttatatttggccctggtacctgacagtgtaaagaa

SEQ ID NO: 60978 - DNA, 90 bp, Homo sapiens
gaaggatggaactatcttatgcacgttcgtgctggccgtgggcagcgccgtctttgatgccatgttcaacgggggaatggccacaacatc

SEQ ID NO: 60979 - DNA, 90 bp, Homo sapiens
agccatccaggcagttctgactttgtacgctcaagaagagcaatctgtactgcctgaagccgaccatctgctccgaccaggacaactact

SEQ ID NO: 60980 - DNA, 50 bp, Homo sapiens
ttatgcaggtggtggatgaaaaattgaaactaatctggattcactccctc

SEQ ID NO: 60981 - DNA, 96 bp, Homo sapiens
gggttaagattcggagagagaggtgctagtggctggacttgacctggaaaggtgtcatccttgaaggatagaataaatcagctgtcgtgttctcag

SEQ ID NO: 60982 - DNA, 74 bp, Homo sapiens
ctgaaccggcacctgcacacctggatccaggataacggaggctggcaggaaccgaatattgtatctgacgcatc

SEQ ID NO: 60983 - DNA, 96 bp, Homo sapiens
tctgtctgcagcccagacactgagagccgctttcatcaaggcagaaaaagtacatgagttaaatgaagaaataggaaaactccttgctaaagccga

SEQ ID NO: 60984 - DNA, 98 bp, Homo sapiens
cgccgccgccgccgcggtttgtcgccagaaggaagatggcggatctggaggagcagttgtctgatgaagagaaggccggatcacctcaacagtcacgt

SEQ ID NO: 60985 - DNA, 105 bp, Homo sapiens
ctgatcttaattagggtcagaaacgtcacctccttcccaccaccaggtgagacaggcattggcaaatccacgttaatggacactttgttcaacaccaaatttgaa

SEQ ID NO: 60986 - DNA, 50 bp, Homo sapiens
gccgagtagtcaccaaggcctataagcttcatcactggtccagctgtaat

SEQ ID NO: 60987 - DNA, 73 bp, Homo sapiens
tgaacacagtattgaaatgcatttgccttatacagctaaagccatggaaagtgggccacagttacatttcatc

SEQ ID NO: 60988 - DNA, 80 bp, Homo sapiens
ggcgcatgcaacaacaacttttggaagggtttggtgcacctcgatttggaggaagtagggcagggcccttatctggaaag

SEQ ID NO: 60989 - DNA, 75 bp, Homo sapiens
aggccttcctggcagagatggagaaggtctcctctgagcctccggcctccataagacccaaaacagatgacacct

SEQ ID NO: 60990 - DNA, 131 bp, Homo sapiens
gcttttttaaatggtgccaaaggaggtaacccttttcttttccgacaagtactggagaactttaaactaaaggatgagccccaagagcctcaagaacccaacaaggtgcccctagaagacacagagacaga

SEQ ID NO: 60991 - DNA, 90 bp, Homo sapiens
aaatactttctcttcaggatctgatctgaatgctgtgaaatcactaggaactccagagtttgacaagtatgcgcccaagctggacagccc

SEQ ID NO: 60992 - DNA, 99 bp, Homo sapiens
agtgcgaagaagctgcagccgcacctggccaagggctgcattgcgtcagattactgataaagctcgtgaatttggagctggtcctttgtttaatcagat

SEQ ID NO: 60993 - DNA, 100 bp, Homo sapiens
gggacaacacaggtcgcggaggagcgttgccattcaaggtggatggagagagaaagaaaaagccagagaggagagctggggtccacctcgagaatcaagg

SEQ ID NO: 60994 - DNA, 100 bp, Homo sapiens
ggcgtgctgggcctggacctctggcagttaagtgggcagaccaacatccacctcagcaaaaacttcttcctgacgaatcgcgccagggagcgctcagaca

SEQ ID NO: 60995 - DNA, 80 bp, Homo sapiens
ctgcagaaggtctctggagacatcttcagcaggcccgatgagagaaagggaaagttaaggatgctggagcagaacaatgg

SEQ ID NO: 60996 - DNA, 75 bp, Homo sapiens
caggagggcatggagatggagcccggactcctgggggatgcagaggctgggaggcggcagaatgcagccagagga

SEQ ID NO: 60997 - DNA, 75 bp, Homo sapiens
aggataaacttgaccaggtttccagtgaaataattttctggatatgccgcagaaggatccgtgccagaagcaagc

SEQ ID NO: 60998 - DNA, 73 bp, Homo sapiens
actcgtgtggttagccaatcattgcagcattacttagagctcggaaggggactacatggaaggttgtcttggc

SEQ ID NO: 60999 - DNA, 97 bp, Homo sapiens
agctcgctctgggagcctagaatgcatcagtgcccttgtggcgaatggggctcacgtcgaaaacagagttcagcatacctcataaaatttccagtga

SEQ ID NO: 61000 - DNA, 88 bp, Homo sapiens
ctggcggagcatgagcgccccaggtaactataactacccaatattgcagccatggagtccatgcttaataaattgaagagtactgtta

SEQ ID NO: 61001 - DNA, 82 bp, Homo sapiens
cctcgccccgggacagcgaggagctgagggaccctgtttacccaaggtccagcctagcccctaggcaccatgtcggacagtg

SEQ ID NO: 61002 - DNA, 88 bp, Homo sapiens
cagtactttgagaaaatggacgctgacatcaatgtcacaaaagcggatgttgaaaaggacagtcattttgtttactcattcagccctg

SEQ ID NO: 61003 - DNA, 98 bp, Homo sapiens
ggcgtctgagacttggtgggaacggaccttcctcttaggctgattcaccccaagagtggccgttcctaccacgaggagttcaaccctccaaaagagcc

SEQ ID NO: 61004 - DNA, 75 bp, Homo sapiens
gtgcagttgaaacttctgtagatctttctgagactctcttgagcctgagggatccattacagtttcaatgggtat

SEQ ID NO: 61005 - DNA, 76 bp, Homo sapiens
aataagtgttttaagaaagtggacaaagagaggagtcagattatggatgattggccagggtatgacttgaatttat

SEQ ID NO: 61006 - DNA, 74 bp, Homo sapiens
gagaacctagaaatcatacgcggcaggaccaagcaacaagtgttctgccagttctggataatccactgtccaag

SEQ ID NO: 61007 - DNA, 74 bp, Homo sapiens
ggaaccctggtcaccgtctcctcaggagaaccaggtgcatcagcgcattgcggagctgaggaaagcaggtctgt

SEQ ID NO: 61008 - DNA, 97 bp, Homo sapiens
agtctgtggtttatcattgtaatcagcttcttaccaaatacagaaggtaccttgttatcccataactttggtatcctgaaatctgaggattccacca

SEQ ID NO: 61009 - DNA, 100 bp, Homo sapiens
gcagcggcaaaacaactttcccatgtttccctctcctaaagcctggaatttcagagggggatatctgcattacctccacctcctccacctccaccaccac

SEQ ID NO: 61010 - DNA, 101 bp, Homo sapiens
cagcagctcagcagccacatatagagacacctgtgcatagcagatcatcttcacctattcctctgactcctagcaaggaagggagtgctgtgtttgctggc

SEQ ID NO: 61011 - DNA, 75 bp, Homo sapiens
ccaaatccaagatggcggccagcaggaggctgatgaagtataaccccgttttcacacgaatggccccttcacata

SEQ ID NO: 61012 - DNA, 75 bp, Homo sapiens
cggacgcgcccgggacgcgcggcggcaccgggaggccgggccgagcgatcctgataacttaagtgactctctctt

SEQ ID NO: 61013 - DNA, 100 bp, Homo sapiens
agaatttgtatagagatgtgatgttggagaactacagaaacctggtctccctagatctaagctggaaccagaaccaaatacaaagacaagagaatccaca

SEQ ID NO: 61014 - DNA, 76 bp, Homo sapiens
atccccatttgaggtctgtcggagctgcccttcagtgtgggacacttaacattcagggacgtggccatagaattct

SEQ ID NO: 61015 - DNA, 101 bp, Homo sapiens
ctggtctgcgatcctgaatgggggcggcgtgcccgccggggggctagtggccacgctgcagagcctcgggaagtgctcagcggctgcactggacgtcctcg

SEQ ID NO: 61016 - DNA, 83 bp, Homo sapiens
gatcttcaacaagaggacccaggagaaattcgccctcaaagtatcgagaaccttccctgcgaacttcagaggaacttccagct

SEQ ID NO: 61017 - DNA, 100 bp, Homo sapiens
tgaacgagctacatcatttgaggaatcagaacgcaagcaaaatgcgttaggaaaatgtgatgcatgtctcagtgtttcagccttttatgctgagtgtttt

SEQ ID NO: 61018 - DNA, 100 bp, Homo sapiens
gccacctgttcctcagttccaaccacaggtcgaatgagtgatttgagtgtaattggtcatccaatagattcagaatctaaagaagatgaaccttgtagtg

SEQ ID NO: 61019 - DNA, 78 bp, Homo sapiens
tttggaagaaatactttatactcttggactacatctttctcgggctcagatgaagtaaagaaggtcttagacaaattt

SEQ ID NO: 61020 - DNA, 101 bp, Homo sapiens
gaaaacgtagggaccacatcaaagacagctttcacagtttgcgggactcagtcccatcactccaaggagagaaggatttacttcagatgcaatatgaagga

SEQ ID NO: 61021 - DNA, 74 bp, Homo sapiens
tatgactataacctggggagcatcacagagagctcgctttggagggtcgagctgtgcagttttagcgggtacaa

SEQ ID NO: 61022 - DNA, 100 bp, Homo sapiens
acagctggtggcagcagatcacaaaagaaagaagattggcccatgcacaagctggaatgttctcccatggttgtttttggggaaaactggaatccctcgg

SEQ ID NO: 61023 - DNA, 98 bp, Homo sapiens
cttgcctggtttgaaaggagatcaaggaccaccaggactccaggtccttgaatgggcaagagggcacatgaagtacggcgtcctccacattcacggcc

SEQ ID NO: 61024 - DNA, 101 bp, Homo sapiens
gcggccgagtcaagccgccgcctcgacccagggcccgcgggccaggagagcgctcggcggggttgatttgggaagcagagcacagcagcccaaatttgctt

SEQ ID NO: 61025 - DNA, 83 bp, Homo sapiens
agcgcttcatgtgcaaccttgactgccaggaagagccagattcctgcatcagatgtcacctgtgagaatcccagatgtccttt

SEQ ID NO: 61026 - DNA, 82 bp, Homo sapiens
ggccgagtcaagccgccgcctcgacccagggcccgcgggccaggagagcgctcggcgggctgaccaactgactgaagagcag

SEQ ID NO: 61027 - DNA, 74 bp, Homo sapiens
tggtgcatgtctgtagtcccaactacttgggaggctgagcatgactatatgaaggaagaggaaggttttcctga

SEQ ID NO: 61028 - DNA, 98 bp, Homo sapiens
tagtacccaaggacgggacgggatgggcaaacaagcaggatcagcaagacccaaagaggatcgaagagtcagaccaaggcccttatgccatcatcctg

SEQ ID NO: 61029 - DNA, 85 bp, Homo sapiens
tgcaacccttccgggaagccatagctctgcatgctgtcaataccagcaaatatgcagaaagctatcggatccaaacctatgctga

SEQ ID NO: 61030 - DNA, 74 bp, Homo sapiens
gcttcaggctcgctccgtgcggttctgaatgcagtgatggggaatggtctgcttctttgcctcatcgattttct

SEQ ID NO: 61031 - DNA, 98 bp, Homo sapiens
acaccttatcacccacacccacacgtgttcaatacacctcccacctgtcctcaggcatatcaaaggaacttgacaagaggagtcggaagatttagaga

SEQ ID NO: 61032 - DNA, 82 bp, Homo sapiens
atcgaatctgggccaaatagaaaggcaacaagattgacctggctgaaaggagagaggtttcccagcagcgagctgaagaatt

SEQ ID NO: 61033 - DNA, 74 bp, Homo sapiens
aagatgtatgttcagcagttggacttaacgtatttcttgaggtttctgctttgggacaaccatacatctaattc

SEQ ID NO: 61034 - DNA, 75 bp, Homo sapiens
gtcggggatcggtcgcctgagagcttccccgggcgctgcctggacaggcctgcctgcgtgctgggacatgtctgg

SEQ ID NO: 61035 - DNA, 83 bp, Homo sapiens
cagagctagttcctctccagctcagccgcgtagcacatgattaagtaccggtacatcccgttcacacatgggaagagaaggta

SEQ ID NO: 61036 - DNA, 83 bp, Homo sapiens
ctgcgcgcgggaagatggcggaacaggctaccaagtccgtgctgtttgtgtgtctggcctcaaggaataggttctcctagtgt

SEQ ID NO: 61037 - DNA, 74 bp, Homo sapiens
tccactgccgcggccgtgggcccgaccgcggggacccatggcccactgcgtgaccttggttcagctgtccattt

SEQ ID NO: 61038 - DNA, 93 bp, Homo sapiens
ggacagcgggctggagcctgacgagctggcgggtgaaaggtgtagcagtcactcggcctacacccacagcatcgaccttgtgaacccagcgac

SEQ ID NO: 61039 - DNA, 100 bp, Homo sapiens
gcgctctcttcagtacagagctctctgtcctgcacaactttttcagtccttcccccaagaccaggcgccagggcgagtatgaagtgctcctttgtgtaca

SEQ ID NO: 61040 - DNA, 74 bp, Homo sapiens
acatttcctgcaaggactccaaagtggtgaggttgaatttcaggcaggatctgaaggccaacttctgcctcagc

SEQ ID NO: 61041 - DNA, 82 bp, Homo sapiens
gaagtctgtgtcaaacatccatatcataagtggaattttggagatattcaaaggtcgttcttccctctttccaatagatgat

SEQ ID NO: 61042 - DNA, 100 bp, Homo sapiens
ggcacattttacagaataagtcagatgactttctgtttctttatagctccaagctctacagattcttcaaatatattgagaatagggatgttgcaaaaac

SEQ ID NO: 61043 - DNA, 75 bp, Homo sapiens
ctcggccactccggtcccgacacctagcctgcgccctggccaacgtcaacattgggagcctcatctgcaatgtag

SEQ ID NO: 61044 - DNA, 83 bp, Homo sapiens
tgtgaggagactctcctctctcatccgcacgcacaatatcgggcagaaagataatcacggaatctttcaaagaagtaccaacc

SEQ ID NO: 61045 - DNA, 100 bp, Homo sapiens
gcagtttaagattaagaggcatacaccacttagtaaactaatgaaagcctattgtgaacgacagcactggatgtgtgtgagaagtggggagaaatgccac

SEQ ID NO: 61046 - DNA, 100 bp, Homo sapiens
agaatgtgaaggattatttactcgatgatggaactctggtggtttcaggaagcttttatcaaaatacaactcaaacctagctactccaatagcaattaaa

SEQ ID NO: 61047 - DNA, 100 bp, Homo sapiens
gttaattggagcctaccttccgcagcctccgacttattgcaggagtgaccaggacactacctcctagaagtaatgcccacagaaagcgcaagttgttcga

SEQ ID NO: 61048 - DNA, 100 bp, Homo sapiens
agagggtctggaggagccttctcaagaacagagacgtatttcattagctagtccacgtcagctttttaaggcttctaatatgacccagcgatggcaacac

SEQ ID NO: 61049 - DNA, 100 bp, Homo sapiens
tggaagctatagacccattaaatctttctacaatatgtgtcgcaaccattagaaaggatcgttccaggaagagaaaggagatccatctattaagtttttc

SEQ ID NO: 61050 - DNA, 100 bp, Homo sapiens
catccttctcacctaacactgggcccagagcaagagaggcatcctcaccctgaagtaccccatcgagcacggcatcgtcaccaactgggacgacatggag

SEQ ID NO: 61051 - DNA, 74 bp, Homo sapiens
atcgtcgtgaggatcgtgtgcattacaggagtcctccacttgccactggaactgctggaactgtggccgcaaag

SEQ ID NO: 61052 - DNA, 100 bp, Homo sapiens
tagcccttccggatcctgcgcgcagatgattcggaatgtcaagtttaagatcctggatgcggtggttgcccaggagcccctgcaccggggcgggggccag

SEQ ID NO: 61053 - DNA, 90 bp, Homo sapiens
caggcaactacctggctgctgaggtatctgctcgctcgtgggaccacaatgaattctttgcccagtttgctggtgaccacactctgctaa

SEQ ID NO: 61054 - DNA, 83 bp, Homo sapiens
ccaaggtggaaggaggggccgtgaggtgagagagtccgggagcccgagcttgagacaatgcagatcttcgtgaagactctgac

SEQ ID NO: 61055 - DNA, 100 bp, Homo sapiens
caggaacagtgtggcctctctggaactctgcagaccaactgccgtgggccagtatggaaattaccagcagtaagggacacacattctggctggagccctt

SEQ ID NO: 61056 - DNA, 100 bp, Homo sapiens
gaaatctggaaccgggatggcgacgtctacactgagtcggaggcgaagggaactctaatgatccaggacaaagaagttaccctggagtatgtatcaagcc

SEQ ID NO: 61057 - DNA, 99 bp, Homo sapiens
agggtgatcccttccttcatgtgccagggagatacttcaggggattaccggaagattctgctgaagatctgtggtggcaatgactgaacagtgactggt

SEQ ID NO: 61058 - DNA, 76 bp, Homo sapiens
gaagcagctggcttcactgctcagtgccagccatttttggagtctcctttggtatccgcaaactctacatgaaaag

SEQ ID NO: 61059 - DNA, 100 bp, Homo sapiens
tcctacagagatgcactgagatacaaacctcatacatctgtggatggatatactgaaccacacatccagcctaccaagtcgagtagcagacagaacatcc

SEQ ID NO: 61060 - DNA, 100 bp, Homo sapiens
ttcacatcatcgaggagacccagctcttccaggactttgagccagtccagaccctgctgctgtcttcaaagaagggtgagaactctgtctcagtcgacgg

SEQ ID NO: 61061 - DNA, 83 bp, Homo sapiens
ctctgctgtagtcctgttcttctggctctaagatctgaatgttgtgaccactaatttgacttaattcagtgcacaaatgagat

SEQ ID NO: 61062 - DNA, 75 bp, Homo sapiens
ctgaaaacagaagttcacctgcacatcttgttttccctaacatcaagaatggtacctatggagttgtgtataagg

SEQ ID NO: 61063 - DNA, 83 bp, Homo sapiens
gccagggcctggactacttctacgacctgctctaggcctgacctctcgggacacacccagccctgtggacccagacaccgtgg

SEQ ID NO: 61064 - DNA, 75 bp, Homo sapiens
atcatcaaatgcagccgagagacagagaagaccttctctgggggctacgtgcacgtgctgaagggtgtgctctca

SEQ ID NO: 61065 - DNA, 98 bp, Homo sapiens
tgcccagagtccgcggccggggcgcgggaggtgaatcaggtctaggaaaatcgactctcataaacagcctattcctaactgatctgtacccagaaaga

SEQ ID NO: 61066 - DNA, 100 bp, Homo sapiens
catcaccccctcctcttcattccgcagcagcactccgacagtgtctgctgttgcaaaaagaagaaaacattctctgcctgagttttaatttttgtccaaa

SEQ ID NO: 61067 - DNA, 75 bp, Homo sapiens
aaaatttacttctggatgccaatctgaatatcaaaatagcagaacattctagtatgccagtagaaaaaaatatca

SEQ ID NO: 61068 - DNA, 103 bp, Homo sapiens
gggaagatctttttcctcaattgatgagttttgatcatcctgagaaaaatgggccttggcctgcagacccaataaaccttccctcccatggataatagtgcta

SEQ ID NO: 61069 - DNA, 100 bp, Homo sapiens
cctggatctgcgatctgtttgtgaggctgataaaataccagtaatgcgtggacagtggtttattgacggcacttggcagcctctagaagaggaagaaagt

SEQ ID NO: 61070 - DNA, 75 bp, Homo sapiens
tggagggacaggatccggaggcgccagctcaacccttggtgtaaaaattgccaaagcagttgcctgccacaactt

SEQ ID NO: 61071 - DNA, 100 bp, Homo sapiens
ccttggacactgacggggatatgtacatcagccctgaggagttcaaacccattgctgagaagctaacaggatatggataaactggatgccagcagtgatg

SEQ ID NO: 61072 - DNA, 100 bp, Homo sapiens
cgatgtctgtggactgtcttgggcagcatgcagtgctttctggtggactgctgggacgggcccgatgggaagccggtcatctaccatggctggacgcgga

SEQ ID NO: 61073 - DNA, 101 bp, Homo sapiens
caagtggcaagcctatggactcaaaggctatcctgccccactgtgttctccttgcctcaaaagaaaactcggcacctgttaaacttggaggctttggggta

SEQ ID NO: 61074 - DNA, 97 bp, Homo sapiens
ccctgctggagctggccctgctgcttatggagcaagacagaaacgaagaggccatcaaacttttggaatctgccaaagctgtcgatgatgaaatcga

SEQ ID NO: 61075 - DNA, 83 bp, Homo sapiens
ctttgacttggtgttgaaagtgaaatgtcatgcctctgaaaatgaagtgtaaacaggaacatcgataagtagtgtaaaaactt

SEQ ID NO: 61076 - DNA, 100 bp, Homo sapiens
cgcccgccggcagcgccgctccccagggagggagtccgcagcctgaggagcagtgaggagaatgaataccttccaagaccagagtggcagctccagtaat

SEQ ID NO: 61077 - DNA, 96 bp, Homo sapiens
cgtgggcgacccggtgtgtggcgcgcccagagccccgcgtttcagccctagggaaggtctgccatcatggatgttctcgcagaagcaaatggcacc

SEQ ID NO: 61078 - DNA, 100 bp, Homo sapiens
ctccaggcccagtacatggatgcttgttggatgaattaatgaaccttgacccacaccaagctgcaattagaagtggatcggttggaagaactgaaaatgc

SEQ ID NO: 61079 - DNA, 75 bp, Homo sapiens
gcttgcagcggggacgcgaggacccgggctgggctttcctcacccgggtagtaggcctgtatcgattatgtggtt

SEQ ID NO: 61080 - DNA, 90 bp, Homo sapiens
agccatcagctatggagataggcagatgagtgcatgtgagggaaccctggcttgttcaacctgtcacctcatctttgaagatcacatata

SEQ ID NO: 61081 - DNA, 78 bp, Homo sapiens
taatataatcaactcctctgcctgaacaccttccaccatgaccacctcagcaagttcccacttaaataaaggcatcaa

SEQ ID NO: 61082 - DNA, 83 bp, Homo sapiens
attcctggaaaaagaagttcatcagattcaagtaagactttgaccccgacgcaggcttcagtgattgccgcggatcagaagcc

SEQ ID NO: 61083 - DNA, 100 bp, Homo sapiens
aacgccaaccaaagatttgcatcagccatctcttagtccagcaagtcctcatagccaggcatgctacaagtgaaaactgatgagaaactgaatgtgtctg

SEQ ID NO: 61084 - DNA, 83 bp, Homo sapiens
cagtggcggtgtgaactgtgaggagttcgccgagttccagacagcccacctgaggatattgaccataaggactcatatctcat

SEQ ID NO: 61085 - DNA, 95 bp, Homo sapiens
cgggtctgaccactctgttccccgggcagaagaggaggatctcccacctttccaagcaaggccaggaggttatcaatactctggctgaccatcat

SEQ ID NO: 61086 - DNA, 100 bp, Homo sapiens
actgcctcgatgccatccagcaagacttcgtgatttttaacagagaaaaggtcctgaggacaccgtgagccagccaggcctggccgctgggcctgaccgg

SEQ ID NO: 61087 - DNA, 100 bp, Homo sapiens
aacataaaattgaaacatggaggggtccctttctagagataggagaagagagagatcgctgtctcgggagagaaatcacaagccgtcccgatccttctct

SEQ ID NO: 61088 - DNA, 74 bp, Homo sapiens
attattttcagaactccacagaaaacttcattcacagccgtgctggtatagaggactctaagaagtggggcatg

SEQ ID NO: 61089 - DNA, 82 bp, Homo sapiens
ccccgcccctctcttccctggctggacttgcggagtccccgccgaagaacccgagggaatctcagtctttgaggagatttta

SEQ ID NO: 61090 - DNA, 51 bp, Homo sapiens
ctcatggacatggacactttcattctcatgtggaagtagtggaggaagtgg

SEQ ID NO: 61091 - DNA, 83 bp, Homo sapiens
ccatttctaccttgtatgcctcaatttgctggatttaagcactgctgcactttatgaggaactgtggctgcaccatctgtctt

SEQ ID NO: 61092 - DNA, 75 bp, Homo sapiens
ctaaagcttgaaatgctacatttccaaggagaggctcgggctgtgctgaagtgggcagatggcaaaatgatcaag

SEQ ID NO: 61093 - DNA, 97 bp, Homo sapiens
gcagctgccgccgccgccaccgagccgccgcgtgaatctggattgggaaagtcgacattaatcaactcattattcctcacagatttgtattctccag

SEQ ID NO: 61094 - DNA, 100 bp, Homo sapiens
ctcaggtcctcgggggcggcggccacgccaaggacggatatctacgtctgcatgatctcctttgcgcacaatgtagcagcacaagggaagtacattgcta

SEQ ID NO: 61095 - DNA, 100 bp, Homo sapiens
gcctgcccaaccgcgtgaccttgattgagttaatgaacttcacgcctcagcgtccagttctacttgtccaattctgaaaaggaacgttatgaaaaagaat

SEQ ID NO: 61096 - DNA, 74 bp, Homo sapiens
agctgcacaagaagtcatctaatgaggacgagatcctcaacagggaccctggacacatcatctcagagttggag

SEQ ID NO: 61097 - DNA, 100 bp, Homo sapiens
gcccggatgagtacgataccgaagcgggctgtgtgccccttctccacccagaggttgaaatcacaaagattagacacctttttagataggtgttcttcag

SEQ ID NO: 61098 - DNA, 100 bp, Homo sapiens
cgaaggggggctttatatggctgtatttgacttggcaattcctgctgaacaaataatttttcatggcgggttgtggcagcactgcctgaaggtatgagac

SEQ ID NO: 61099 - DNA, 100 bp, Homo sapiens
tttcaagacaccaagtgagaggccaaccagcgtttcgctcttgttgtccgggctggagtgcaatggcatgatctcagctgactgcaacctccacctccca

SEQ ID NO: 61100 - DNA, 75 bp, Homo sapiens
aaaggcttcggttggagcagcaaaagcatgagtacagtaccagaagttatcgttgcacggcactgtggacttcga

SEQ ID NO: 61101 - DNA, 96 bp, Homo sapiens
gaccggagcccgccagtactggttggagggcatgctgcggcatgagataggtccatattactgtggtgtgggagcagacagagcctatggcaggga

SEQ ID NO: 61102 - DNA, 98 bp, Homo sapiens
cccgctgccgggcaccgaggaccagctcaatgacagcaccctgtaacctggcaaccatctaaagatggagatcgtttaattggtcgcattttattaaa

SEQ ID NO: 61103 - DNA, 75 bp, Homo sapiens
cgctacagcagcagctaaaagaactgacagcccataaggagatagcatggcaagcattgcatctagtaaatggat

SEQ ID NO: 61104 - DNA, 75 bp, Homo sapiens
cttctaaaaggatatgtgttgctaatacccatctttactggcatcctaaaggttgacctgacagttcaagaaaag

SEQ ID NO: 61105 - DNA, 124 bp, Homo sapiens
cgtcgtcttcggtcggtttttcatcctttgatcccgcggtcccttcctgtaccttgtcctcaggaaccacgtgaatgttgagggggcgacacacaagcaggtggtggacctgattcgagcaggc

SEQ ID NO: 61106 - DNA, 89 bp, Homo sapiens
ggaggagctggatgtcatgttcagtgaactggtgggaaagctactattacctccaggcacggatggtggcaaagaaggcccgcgagtcc

SEQ ID NO: 61107 - DNA, 74 bp, Homo sapiens
gaactgtcccctacacggacccagatcatgccagcgttctcccggggaagtacttggaagagatcgccacacag

SEQ ID NO: 61108 - DNA, 82 bp, Homo sapiens
gtgtgaagtgggctgggtgctggacgagggcgcctgtgtgggccctgggaggagcggggacactgaggacctctctccaaat

SEQ ID NO: 61109 - DNA, 100 bp, Homo sapiens
ggatcggactttgagaaagtgcaggagcaactgggaaatgatggagctcgagtatatttagcttgccgggatgtggaaaagggggaattggtggccaaag

SEQ ID NO: 61110 - DNA, 82 bp, Homo sapiens
ggaaacaagctcctacttccagaaaaagtgctcctgggactccaggataccagagttgtctgctggttctcagcttgaagaa

SEQ ID NO: 61111 - DNA, 100 bp, Homo sapiens
gcattacgaaaaatacaggaaagctatggagatgtctatggaatttgcaccaaattgaaaacatctcccaatgaagatcgaagccgcggtcaaggccgcc

SEQ ID NO: 61112 - DNA, 100 bp, Homo sapiens
ggcaaaagttctcagggatgtcctattgctaagtggacggcggagactggctgagtggaaagcaactaaactgaagaataaattcggagaagttttggag

SEQ ID NO: 61113 - DNA, 101 bp, Homo sapiens
gttggaagcccgggaccgtttaaaaaactggcaaataagggcgagactgaaaaatcaagtcactcagttgaaggagcaagtacctggtttcacaccacgcc

SEQ ID NO: 61114 - DNA, 74 bp, Homo sapiens
cgagccgggcccacctccccaccaaggaaggtttggtgcacctcgatttggaggaagtagggcagggcccttat

SEQ ID NO: 61115 - DNA, 82 bp, Homo sapiens
cacgctgcctactgcacacacatgtgacaatgtcagtgcctactgcctgcatattgctgaggatgatggggaggtggacacc

SEQ ID NO: 61116 - DNA, 76 bp, Homo sapiens
ccttattttttctcatggatgttcttcttcgagtatttgtagaagggcttgcttccggcgtcatggctcaaagggc

SEQ ID NO: 61117 - DNA, 75 bp, Homo sapiens
gggatttgctgatcaagtggaagagattttaagtgtggcatacaagaaagagctttatggatatcgcaatttcgg

SEQ ID NO: 61118 - DNA, 98 bp, Homo sapiens
cagctgcggggcaagatggaggcgctgattttgcctttctgagaaaagtctacagcattctttctctgcaggttctcttaactacagtgacttcaaca

SEQ ID NO: 61119 - DNA, 100 bp, Homo sapiens
cccagatcacctcgctcgacgtgttgcagcacatcctcatccgagcctttgatttgagtggacagatgtgctggtgctgagctgtgatctgataacagac

SEQ ID NO: 61120 - DNA, 88 bp, Homo sapiens
agcgccgcgccttcgcccagaagatcagcaggggccctcctcgccaaagacagcctagagaggacggcaatgaagaagataaagaaaa

SEQ ID NO: 61121 - DNA, 82 bp, Homo sapiens
cggagcccaaacccggggcaggcgggcagctgtgcccgggcggcacggccaggtgacttaagagattaaaattaatttggtt

SEQ ID NO: 61122 - DNA, 98 bp, Homo sapiens
cgctgctacctgcagcgccgtgtggcacgacacaaaaatcagatctgaaattcagagtgtagctctgagacttgcttccaaagtcatttcccaccaca

SEQ ID NO: 61123 - DNA, 90 bp, Homo sapiens
caaacccaggcgaaatcattactataaggctaaaagagatgctaagagaatgcctgcaaaagaagtcaccattaatgtaacagatagcat

SEQ ID NO: 61124 - DNA, 75 bp, Homo sapiens
gtcaactttactgagaattttccacctcctgacacaacaccactcattgactatattgtggagtatgactatgat

SEQ ID NO: 61125 - DNA, 96 bp, Homo sapiens
tgatgatgaacagtttgtcccagattttcagtctgataaccgagagaagtttgctgaggaatgccttcaagcacaaagtgatgaatgactgccttc

SEQ ID NO: 61126 - DNA, 101 bp, Homo sapiens
aactctatcccaggaatacagctttgcattagagagacaagagagacacctccaacttcgacaaagagttcaccagacagcctgtggaactgacccccact

SEQ ID NO: 61127 - DNA, 88 bp, Homo sapiens
acaccaccgcactgtcgctgcccgcctgccctgaggagtccccgctgcttgatcagcttgaacgggtctttttacgacttggccatgc

SEQ ID NO: 61128 - DNA, 111 bp, Homo sapiens
ccagctgactgcacttcttttttgagaaaggaaggaatatatcctgactgattgattaaagcaaggagagccaatcatgactggcaaaacacagaccagcaacgtcaccaa

SEQ ID NO: 61129 - DNA, 100 bp, Homo sapiens
cgaggagagccggcggcgggaggccaaggtaaattcgaaccaccattatttcacccgaatgtgtacccttcggggacagtgtgcctgtccatcttagagg

SEQ ID NO: 61130 - DNA, 87 bp, Homo sapiens
ctggtggtttgtgtatgacgccgagggacctcacatcaacttctaccagctggagattgctgcgatgattgacactgagtttgccaa

SEQ ID NO: 61131 - DNA, 98 bp, Homo sapiens
gggaaccgagtctgtgcaaagcctcctgcttccctgggcgctgcctatggcacagccaagagcggtaccggcattgcggccatgtctgtcatgcggcc

SEQ ID NO: 61132 - DNA, 100 bp, Homo sapiens
gctgccgctatggatgatcgagaggatctggtgtaccaggcgaagctggccgagcaggctgagcgatacgacggagcttgaagaaatccgcaaatgtggg

SEQ ID NO: 61133 - DNA, 100 bp, Homo sapiens
gtggtggcgctgctcatcgtttgcgacgttccctcagcctctgcccaaagaaagaaggagctactacccacagatggcatgatccgaaaacactctcatg

SEQ ID NO: 61134 - DNA, 100 bp, Homo sapiens
gatcgtcgccacctggatgctggaggtggaggcaatgcccagagctgtggcagccaccttgcagccgtgaagcaccagtgggaatgacagtcaagagaac

SEQ ID NO: 61135 - DNA, 83 bp, Homo sapiens
caggaagtgtcacacagcagtcaagtatgtcccaaacgtctgagtcctaagcagacttaaagccaagaaaataagaagaggaa

SEQ ID NO: 61136 - DNA, 100 bp, Homo sapiens
tccaccgtgagaacaccgtctaccgtgccggtggtggtgtgcacattgagccccggtatagacagttcccccagctgaccagatcccaggtgttccagag

SEQ ID NO: 61137 - DNA, 50 bp, Homo sapiens
tatcaatgcaggacgtacagttcaggaaaaatgccagctgtgggacaagg

SEQ ID NO: 61138 - DNA, 83 bp, Homo sapiens
gtcaggttgattatcgagcaaaactttgggcctgtaatttctgttttcaaagaaatcagatgactgtccaagtgcctccaaag

SEQ ID NO: 61139 - DNA, 75 bp, Homo sapiens
caacttccataccgggagatggagcatttgagacagcgacgtggccgtggaactgcccttcaccctaatgcaccc

SEQ ID NO: 61140 - DNA, 100 bp, Homo sapiens
catcacacaaaaaggatatgaaaagaagaggtcaaagttaattggagcctaccttccgcagcctccgagtaagaatgattgatgttggctgatattggag

SEQ ID NO: 61141 - DNA, 82 bp, Homo sapiens
tcttcttccagggactcagcacctggcaggcggcttacagggagaacacagttggcctccaccgtttctgccccacagaaaa

SEQ ID NO: 61142 - DNA, 82 bp, Homo sapiens
cttctatttccaaagtatgttgcacccagaacactctgctccagccaaggtggtgagggcagctgttcctaaacagcgcaaa

SEQ ID NO: 61143 - DNA, 82 bp, Homo sapiens
ccgcccaggcgcagatgcgggccctgctggaccagctcatgggcacggctcgggacgcacagcgactcggactccgaccccg

SEQ ID NO: 61144 - DNA, 90 bp, Homo sapiens
gagccaagcctgatgccagcatggtgacctccttcagcacaccccccaccccagaacggaacaaccggcctgccttcttctccccatccc

SEQ ID NO: 61145 - DNA, 100 bp, Homo sapiens
ttcccgtagggtgaacaacccgttcttgcctcaggccagtcgcctccaggccaagagggatccttcacccgtgtctggctgaccccgcactacatctacc

SEQ ID NO: 61146 - DNA, 109 bp, Homo sapiens
ggcgagaggccttacaagtgcactgtgtgtggccagtcatttaccaccaatgggaacatgcacagacgcaggaggagggagacgcactgatgacatcgggccgctcctg

SEQ ID NO: 61147 - DNA, 100 bp, Homo sapiens
gaatcaaaactatgaccctagggagtgaggaggagagtgaaaaatgcgagagggctgaacccccctcatcgtgtcaagtcaatctccatgacaactttca

SEQ ID NO: 61148 - DNA, 50 bp, Homo sapiens
tcccctcgcccgcccgggccgccagggcgaactttctgaccaagtataca

SEQ ID NO: 61149 - DNA, 75 bp, Homo sapiens
accggtatattgcaaataccgtagagtagtttatgccaacgtgacttcattcatacagatgaaccaaggatcggg

SEQ ID NO: 61150 - DNA, 97 bp, Homo sapiens
ctcctcgtgcctggcggcgtgggcccgggcgagcagccctgcctccggacggtcattgaatctttgggaattattatttataaagcactggactatg

SEQ ID NO: 61151 - DNA, 80 bp, Homo sapiens
gcatctgcgatgtgaggaaaggcacctccaccagatgccgtagggccaggtgagctgctgtgaaggactcattcttggta

SEQ ID NO: 61152 - DNA, 100 bp, Homo sapiens
tccagctctgcctggagcactcgctggccgactgcgccgagctgcacgtcctcgaacgcgaggccaacagccccgttcctccaggagtgatccaaaatgg

SEQ ID NO: 61153 - DNA, 83 bp, Homo sapiens
tggggagtgtctgtctgtgcaggtggtcaactgcagccgtgtattcagccttaggattttcaaaatggctgcagctcctcaag

SEQ ID NO: 61154 - DNA, 50 bp, Homo sapiens
tgcggatttctgctatgatgacagctttttgcctgaattcatcaatggag

SEQ ID NO: 61155 - DNA, 75 bp, Homo sapiens
ttccttggaacctgtgcagggataccctacagactcaaggagtcagacagtgaatttgacagcttcagccaggtc

SEQ ID NO: 61156 - DNA, 76 bp, Homo sapiens
gtttgcacttcgagatcaagagaagtatctgtatcgatatcctggtggggagatgtatgtccctgggaagctgcat

SEQ ID NO: 61157 - DNA, 80 bp, Homo sapiens
ctcttcccaaacgcatctcagcacatgccctgggaggagcggggacactgaggacctctctccaaattggcctctcaact

SEQ ID NO: 61158 - DNA, 50 bp, Homo sapiens
aaatctcaaagccatgtctcaggtactataagatctccgtggtgctcatg

SEQ ID NO: 61159 - DNA, 75 bp, Homo sapiens
aggaacggctcatggacgtcatggctaaagagatgctcaccaagaagtccacggaggcaagtgaggcctatctgg

SEQ ID NO: 61160 - DNA, 100 bp, Homo sapiens
tagccacgttgctgttaaaccgagcggctgctgtggatttcaccgcaagggacttaaccaccaccatgtcgagcaaaagaacaaagaccaagaccaagaa

SEQ ID NO: 61161 - DNA, 101 bp, Homo sapiens
gtggacgttgtctaaatttcggtagccatggcacaagaatatagattcttgggatggccagcatattccagtacttttctccattttttgtggtttattag

SEQ ID NO: 61162 - DNA, 75 bp, Homo sapiens
gttgcagatcctgattgtaggtggtgtccagctccagactgtggattttcatcaccgtgaattgcttgagcacag

SEQ ID NO: 61163 - DNA, 98 bp, Homo sapiens
tggaccggagaagttccgttaccaggatgatttcttgctagatgaaagtgaaaggaagctgttgaagttattgaagtacctgttgctatattctaaga

SEQ ID NO: 61164 - DNA, 98 bp, Homo sapiens
gaaaatctcaggaatctggtctcattggaacacagatatgtagaactcttcttgaattctacagcaggagcaagcggtggtgcttatggtagccaaat

SEQ ID NO: 61165 - DNA, 100 bp, Homo sapiens
ggggcaagacgggttcagttcgtcatggggctgtttggaaagacccaggagaagccgcccaaagaactgctccttcgagaactcatagaacggaagacca

SEQ ID NO: 61166 - DNA, 90 bp, Homo sapiens
agtggctcacttgcatgtatttggaacaaaaaaaggagatgcctggcagccccgctctctgcaagagatgcaggtcagctcctccagtac

SEQ ID NO: 61167 - DNA, 75 bp, Homo sapiens
cctgtatctgtgcaggcaatgtggtcatataaaagtgggtctggagtaaacaacagaagaactgagctatttttg

SEQ ID NO: 61168 - DNA, 100 bp, Homo sapiens
gcagggagcctcctcaagtgggaaccactgagattaactcattatccgttggcagggagaagaaatgggtgaccgttggtgacacatccctacgaatcta

SEQ ID NO: 61169 - DNA, 90 bp, Homo sapiens
aacagtgtggataaattacgcttgcataccaccaatcacaggcacgaggcggccctgaagctctacaagtccctgctatgtggatatttg

SEQ ID NO: 61170 - DNA, 75 bp, Homo sapiens
tgatcctgactttcttggggtttgtgggagcagaccctctttcccagctgcccgctcctcagcacccgaagattc

SEQ ID NO: 61171 - DNA, 100 bp, Homo sapiens
tcggaggaaccggctccttgcgtcccgcctccctgggagctccgcacggatgaagaactggtggatgtttctgcatctgtcttaccagaattgaaaagag

SEQ ID NO: 61172 - DNA, 75 bp, Homo sapiens
ctcgggagctggctgaagatggctactctggagttgagaaaatcgcgctgcaactcaaagccacgctggagaaca

SEQ ID NO: 61173 - DNA, 82 bp, Homo sapiens
ctatgccaatcagcatttcacattcctcatggttggttcaaaggtttatcaggtagaagatgtgtgtgaagaagaaatgcca

SEQ ID NO: 61174 - DNA, 100 bp, Homo sapiens
cagtgtttgagaattacacggccagttttgaaatcgacacacaaagaatagagttgagcctgtgggacacttcgggctgatcagctgaccgaagaacaga

SEQ ID NO: 61175 - DNA, 101 bp, Homo sapiens
cctggcctgcgcgccgctgcccgcgccacagagcctgccttctggtacaagatgcctgtggaatgttcggtgaagtgcacttggagttcaccatgtcgaag

SEQ ID NO: 61176 - DNA, 98 bp, Homo sapiens
ttacttcaaatccaaaccagtagagaccccacctgaacagaatggcaccctcacctcccagcccaacaacaggtgccctcccggttgcagagagcttc

SEQ ID NO: 61177 - DNA, 96 bp, Homo sapiens
atgacttccttcagtggaccactctgcaatgaccgtgcttttgaagatgatgatatcacgcacgttgaaggaagtgtagatcctattcgagatata

SEQ ID NO: 61178 - DNA, 83 bp, Homo sapiens
gctgcgctcgcgcccggatccctcagatgcctgaggaaacccagacccaagaccaaccgatggaggaggaggaggttgagacg

SEQ ID NO: 61179 - DNA, 99 bp, Homo sapiens
gacgcaccgctccagccgcccgcgggccagcgcaccggtcccccagcggcagccgagcccgcccgcgcgccgtttggcaatgaggagcagcagctggcg

SEQ ID NO: 61180 - DNA, 100 bp, Homo sapiens
cagtggtcgcttcttctccttgatccgtgggcgtgagcgcttcgagatgttccgagagctgaatgaggccttggaactcaaggatgcccaggctgggaag

SEQ ID NO: 61181 - DNA, 101 bp, Homo sapiens
gagcggctgcagatggagatgaaggaggacgacgtttcttttctcatgatgtgggaagaatatcctgatgtttatggggtcaggcggtcaaaccgaagcag

SEQ ID NO: 61182 - DNA, 100 bp, Homo sapiens
gcgagactggagcagagccgctgggcgccggagccgaggcgagcgccgcgcgcaccactgcaattcatgatgaccaataaactggacacggcaatgtggc

SEQ ID NO: 61183 - DNA, 96 bp, Homo sapiens
gaaagatggagatgaacctctaacacagtggaaaggaaccgttctggatcaggtggaatatgtgatcaagtgtgacatgtcagctctgcagaagat

SEQ ID NO: 61184 - DNA, 75 bp, Homo sapiens
tattgtttcaggcacagagtcccattcagcaggaatatcacaggagtgatgctgtgttcttcactgcatgatttc

SEQ ID NO: 61185 - DNA, 90 bp, Homo sapiens
gtcgggctctggaggaaaagaaaggtgtaaagggtcaagtttttgatcagaatggaaatccattacccaatgtaattgtggaagtccaag

SEQ ID NO: 61186 - DNA, 78 bp, Homo sapiens
ttggggccctttgggacgagtgctgtgactgtgttggagcggcctattgccaattcatggacatgctcttccctggct

SEQ ID NO: 61187 - DNA, 75 bp, Homo sapiens
tgtgcattggcccgatcaagcctgacttctagccaagatgtctttggtggacttgggaaagaggttgctagaagc

SEQ ID NO: 61188 - DNA, 83 bp, Homo sapiens
caaaggtgcttcaaaggagaatgcagcaccgaacaagatttgtgatgaaatggagcctggaacaaactcttttcgggtagaat

SEQ ID NO: 61189 - DNA, 100 bp, Homo sapiens
gaagactcatcggagcgtgtggatttgagccgccgcattttttaaccctagatctcgagtgcctggtgaagaatgtgatgggatcactagcatgtctgcg

SEQ ID NO: 61190 - DNA, 100 bp, Homo sapiens
aggctgccactgtggagcagttcgttttgaagtttgggcctcagcagacttgcatatatttgactgcaattttcggctttgtgagaaaccttaccatcaa

SEQ ID NO: 61191 - DNA, 90 bp, Homo sapiens
ccatgaacgaggagtacgagacgaggttcctgtgcaactcttcacagggaatgaccctgcataaaaaggcagctgaagatagactggcaa

SEQ ID NO: 61192 - DNA, 76 bp, Homo sapiens
cgtccggggatcgggatgtccctcctccttctcctcttgctaggtgttaagccccacctacaagcagagaaatgaa

SEQ ID NO: 61193 - DNA, 75 bp, Homo sapiens
agcacgtccaggctgaccacgagcttttcctccaggcctttgagatttctcttcagcaacgggtagcagaattgg

SEQ ID NO: 61194 - DNA, 100 bp, Homo sapiens
tggaccagctgaagggccgaggggggccgtttgtggatggcgtccactccagacaggtgcagttcaggagcagatgagatccaagggaaaccgagatagg

SEQ ID NO: 61195 - DNA, 50 bp, Homo sapiens
gaagacgttccttgaggaggtttgaaaaaagtaaaaggccaagctatgat

SEQ ID NO: 61196 - DNA, 50 bp, Homo sapiens
ggcctctcaaagtgctgggattacagctgattcagaaaggcaccaagtta

SEQ ID NO: 61197 - DNA, 75 bp, Homo sapiens
gcagaacgtgctgcagcagagcgcggcgcagaaggaaagaccacagcaagattctttcattcgtctcctcctagc

SEQ ID NO: 61198 - DNA, 50 bp, Homo sapiens
gctgagctgtgctacagccatcgccaagcttcttggacacttaatgattg

SEQ ID NO: 61199 - DNA, 83 bp, Homo sapiens
gcggacgctcggggcacctgcgtccagcgagaggagcgcggcagggggccgggggcccaggagtgcctgtgaagaaaacgggg

SEQ ID NO: 61200 - DNA, 82 bp, Homo sapiens
cgtggacacacaagcaccccaataacctcaagcttcctgggtctgcaggtccagccggctggcaccctccatgtacccaggg

SEQ ID NO: 61201 - DNA, 74 bp, Homo sapiens
ctcatgagagcgcggccggaggacagtcttccgtgtgtgctaagatcgtgcagctcctggggcagaatgaggtg

SEQ ID NO: 61202 - DNA, 75 bp, Homo sapiens
ggcgccatggcgaccggagcgaacgccacgccgttgggtgccccccactcggccagcagcgcatccctgcactct

SEQ ID NO: 61203 - DNA, 83 bp, Homo sapiens
tggacatgagccccctgaggccccagaactatcttttcgggagtgcatccgccccaacccttttccccctcgtctcctgtgag

SEQ ID NO: 61204 - DNA, 83 bp, Homo sapiens
ctccaggcccgcgaccgtccgccagtcgtcccgaggcccagctgagagccagcctggaggttacccagcagcaggccacccag

SEQ ID NO: 61205 - DNA, 74 bp, Homo sapiens
agtaatcaagcagcagccagagaatgggaggtatatgccaatctaacatcttgtcaagctcttggaaatatgtg

SEQ ID NO: 61206 - DNA, 75 bp, Homo sapiens
cgcggggtctgtgctgagaataatggcccggttggcccgggacgagtggaatgttgccagattttctgctgtgat

SEQ ID NO: 61207 - DNA, 90 bp, Homo sapiens
cgccctgcgcacgctcctctgggtgggggccaagcctgcacggtgaacctatgggtcgtggaacaaaagttatcctacacctgaaagaag

SEQ ID NO: 61208 - DNA, 51 bp, Homo sapiens
aaaccagccttagactatttttcaaacacttggattagaagaacaagaaag

SEQ ID NO: 61209 - DNA, 103 bp, Homo sapiens
aatttgtagatgaggggaaagccactgttcggttaaaggagcctcctgtggatatctgtctaagtaagggttttggccaaattgggcgagggcacaaaataac

SEQ ID NO: 61210 - DNA, 50 bp, Homo sapiens
gggaccttcagccgtgaactggttgtactcagactatctctactttgcaa

SEQ ID NO: 61211 - DNA, 100 bp, Homo sapiens
ccaggaagcctatggcaagtgcaaggaatttggtgacgacaaggtgcagcttgccatgcagacctatgagatggaatctgtctgctattcaggatagaga

SEQ ID NO: 61212 - DNA, 76 bp, Homo sapiens
ccctgcagtacctgcagaaggtctctggagacatcttcagcaggaaaaccagcattggaatcagctgattcaggat

SEQ ID NO: 61213 - DNA, 74 bp, Homo sapiens
attaatgctaaatttgtgaatgctgtgtatgataccttacttaatactctgttcgctgatgtggtcctgctctg

SEQ ID NO: 61214 - DNA, 75 bp, Homo sapiens
gtggatgtcggcgaagccgcgggcgagctttggaaacatgatgagcaaggagaagcgagaggctgtcagtaaaga

SEQ ID NO: 61215 - DNA, 75 bp, Homo sapiens
tcactagtccagacatggatgaaataactcacgttgaagaagtagttgtgactttgcagcttggaggtgacaaag

SEQ ID NO: 61216 - DNA, 87 bp, Homo sapiens
tctggacaagctggaatgcatccaagagaatccctcaacatgctgccttatgccagcctggaccatcttggaggcagtgtaggatca

SEQ ID NO: 61217 - DNA, 75 bp, Homo sapiens
agccgagttcaacatcctcctggccaccgactcctacaaggtgtctgcttttggggcagagttttcatcggaggc

SEQ ID NO: 61218 - DNA, 101 bp, Homo sapiens
taacccaaagatcgtgcagctcttggcaggagtagctgatcaaaccaaggatgggggcaagattcttgccaagagaattaatgtgcgtattgagcacatta

SEQ ID NO: 61219 - DNA, 75 bp, Homo sapiens
tcggtttcctaggcaagatcgacgaactgcgcctcttcccgccggaactttcttgtctgcacagaaagtcccagt

SEQ ID NO: 61220 - DNA, 82 bp, Homo sapiens
ccgccgctcaccccgcggccgcaccttcccgccttctcagttgatattcactgatggactccaaagaatcattaactcctgg

SEQ ID NO: 61221 - DNA, 102 bp, Homo sapiens
caacatcccattcagcagggtgaaccacagcaagttcatggtcacggagaaggcagcctacatagggggggccctcagcctcttggccttgaacgggctgtt

SEQ ID NO: 61222 - DNA, 74 bp, Homo sapiens
cggcaccagtcagaccgatatgtcaaaattaaggatctcttatacagacgcaccaaagccctcattgactatga

SEQ ID NO: 61223 - DNA, 149 bp, Homo sapiens
gcttcattcagatgtggtggaatatgccaaggaaaaactggagagcttcatcaaaaatagtgatagctttgataaagacaaagcatggaggacacaagaatgggaggaaaggcggactctcaggaacttcattcttcacgtggtttatg

SEQ ID NO: 61224 - DNA, 98 bp, Homo sapiens
tggtcctgtactcgctggtctttgtcctcttctgtgatgaagtgagacaggacctgaaggagaagaaggagaaggtggaggagaaggcaagccggaaa

SEQ ID NO: 61225 - DNA, 97 bp, Homo sapiens
atggcagatggcttatgaaccacaggtactggtgtggcatactcggacagagaagcccaagatgaagcaggaggagcagctgcagcggcagggccgg

SEQ ID NO: 61226 - DNA, 74 bp, Homo sapiens
gcttaagtagctacaggggaaaatattctgagctcctgggctataacgaaaagccaataaatctacaaatgttt

SEQ ID NO: 61227 - DNA, 85 bp, Homo sapiens
ggctggcgatggaagatggaaggaaggagcgcagcgggtgagcttgtcggccacagactgctacattgtgcatgagatctacaat

SEQ ID NO: 61228 - DNA, 100 bp, Homo sapiens
ttctgataactcaggatttacttgaaacaaaaggagaccctaatcttcagctttggagtttaacccttctgccaatccagaggcaagcacaatattccag

SEQ ID NO: 61229 - DNA, 88 bp, Homo sapiens
gcatcccgcaagtcggaacccggcggatcggatcccgcagatcggagacggggcctggagcaaattgccttcaagaacctggtgcaga

SEQ ID NO: 61230 - DNA, 82 bp, Homo sapiens
cggagagctggaggagaggttcaaccgcgccctgatgaggacggggacttggttgccttttccagtgacgaggaattgacaa

SEQ ID NO: 61231 - DNA, 100 bp, Homo sapiens
atccagaggagtggaaggctcccccttgactaaagctatgtaaaaaaagattggtctgaccatgctctctggtgggaaaagaagagaacttggcttctga

SEQ ID NO: 61232 - DNA, 75 bp, Homo sapiens
aggacaagaacaaagtgtgctgaaacagtattatgtctcagtcctgtgcaaagtgagatgagctgtagcctttgg

SEQ ID NO: 61233 - DNA, 83 bp, Homo sapiens
agtaagaagaattccagtcttataaagttaagaacattcctgacgacccctgccgccattttcttcttgattttgcccagtca

SEQ ID NO: 61234 - DNA, 83 bp, Homo sapiens
gcggtggcagccatgttgttacaggtgatttggcttctgcacagttaggaggagcaccaaaccgatgggaggttttgtcagcc

SEQ ID NO: 61235 - DNA, 50 bp, Homo sapiens
ctgaaggacagtgacttattattggtgaactatgacaatgtagtggacac

SEQ ID NO: 61236 - DNA, 110 bp, Homo sapiens
tgtagaaagagctaaacaagtagaagagttcctgcagcgaaaacgggaagctatgcagaataaagctcgagccgaaggacatatggactgtgggccctctcttggattag

SEQ ID NO: 61237 - DNA, 75 bp, Homo sapiens
ccgggagcgcggcggagacgatgcctgagatcagagtcacgcccttgggactgcaagatggaggaaggcgggaac

SEQ ID NO: 61238 - DNA, 101 bp, Homo sapiens
gcccctctccccaagcgcgggcccggccagcggaagcccctgcgcccgcgccatgactgtgccctgtccacggtgcctcctgcatgtcctgctgccctgag

SEQ ID NO: 61239 - DNA, 98 bp, Homo sapiens
gggactacggcatccgcgccggcctcgtccagaacgtggtcagcaagaacatatgctgtcaggaggataagagatgccttcagagaaaataaaaatgt

SEQ ID NO: 61240 - DNA, 96 bp, Homo sapiens
gactcttctttagctttacagagaaatatgagattacggagcagcgcaagattgatcagaaagctgtggactcacaaattttaccaaaaatcaaag

SEQ ID NO: 61241 - DNA, 75 bp, Homo sapiens
ctgccatgggacgtggggtccaccggtacaggaagcaatgaggctccccaagaacacacctgaggaaaaggacag

SEQ ID NO: 61242 - DNA, 74 bp, Homo sapiens
accaaacaaccagaagaagtatttgatgtcttagagaaacttggagaaggctttgtgggtcacttcaagtctcg

SEQ ID NO: 61243 - DNA, 100 bp, Homo sapiens
tgccgacatcgacgccgcctggcaggccctgcgcaccagagatggagtttcactgtgtcagccaggatggtctcgatctcctgacctcgtgatccgcccg

SEQ ID NO: 61244 - DNA, 75 bp, Homo sapiens
gatggaatgcaggtctggagcatccctggtttcccaaactctcgattgcctcttgcaagcagatgacctgggagc

SEQ ID NO: 61245 - DNA, 100 bp, Homo sapiens
ttctgactgcagttcttctgagtgtgctgctataccagtggatcctgtgccagggttacgaagtgacagtgctggtgcgggactcctccaggctgccatc

SEQ ID NO: 61246 - DNA, 83 bp, Homo sapiens
tgaagcgcgagcgcgacgagtataagcggagggggagctgatcaccttctattactattggaagaagacccccgaagcagcca

SEQ ID NO: 61247 - DNA, 100 bp, Homo sapiens
gacagtttgaggatgcagatgttgatcactgaaaatgatttatgcaagtttaagactccccatccccaggatgtcaacctcagtccctcaaggccatacc

SEQ ID NO: 61248 - DNA, 100 bp, Homo sapiens
ctgggagcccgcggccggagaagggctgcgggttagggggccggcgcccgcggttcagtctggggatgaccttttccccaaagatgataaaggtaatgcc

SEQ ID NO: 61249 - DNA, 100 bp, Homo sapiens
atttctcataatatggataaagctctgaaagaagggttatgatgatggctacgggggtgaatatgatgaccagacctatgagacttatgataacagctat

SEQ ID NO: 61250 - DNA, 85 bp, Homo sapiens
tgcttcctgcttcatagataagagctgaactcgtttgagcagctgtgcatcaattacaccaatgagaagctgcagcagctcttca

SEQ ID NO: 61251 - DNA, 82 bp, Homo sapiens
gatgagtcatgtggcagtggaaaatgcgctcgggctggaccagcaggtgttgacttcaaaatcaaaactgtagagctaagag

SEQ ID NO: 61252 - DNA, 83 bp, Homo sapiens
tcttcggtggactccttcggcagtccacccaccgccgccgcctcccaggacttgcaattgtgaccaaatatattacaaagggc

SEQ ID NO: 61253 - DNA, 100 bp, Homo sapiens
aaggcagacgcatcccgaactcgctggaggacaaggtactccaaagattcaggtttactcacgtcatccagcagagaatggaaagtcaaatttcctgaat

SEQ ID NO: 61254 - DNA, 75 bp, Homo sapiens
ttgagccgcgcacgctacagtacaaggcctctgaagaacacctgaagcagcactacattgacctgaaagaccgac

SEQ ID NO: 61255 - DNA, 51 bp, Homo sapiens
gcttctgcatctaggaatgaaggtcctgctgccgtgaccagccagtctcct

SEQ ID NO: 61256 - DNA, 109 bp, Homo sapiens
gcgatgacagctgtaaagcacgaacaggaatacatggaagtccgggagagaatacacagagccaatgactctgttagaccaaatatgactttaaaggccatgatcacag

SEQ ID NO: 61257 - DNA, 87 bp, Homo sapiens
cgccagcggagcgaacccgagagcgtggagcgggctgggccagctgttccaaagacctaatgcgcttgctgtccagcagttgacagc

SEQ ID NO: 61258 - DNA, 102 bp, Homo sapiens
gcctgtgaaggtgacagtgggggaccctttgtcatgaaggagctttggttcggagacaggcaaaggagccatgtgtggagagcctggtttctcagtacttcc

SEQ ID NO: 61259 - DNA, 90 bp, Homo sapiens
cttctgagcagctgggattatgaaggggtggcctgcccctccacatctgtgggatatctcatcagcccctggggtagatcccagcccccc

SEQ ID NO: 61260 - DNA, 100 bp, Homo sapiens
aacttgcagaaatcacattggaccctcctcccaactgtaggtccaggtcaagacctcgtctccgttctcatagtcgtagcagtgaaaggtccagtcacag

SEQ ID NO: 61261 - DNA, 90 bp, Homo sapiens
tactgctccctggagcagccaggccagggcggcagcaccagcgccttcgagcagctgcagaggtcccggaagaagatgaagtaccggacg

SEQ ID NO: 61262 - DNA, 90 bp, Homo sapiens
cagagcccgggacagagcctggcagaaggcagatggatgctcgtgcccgtcggctggatgaatgaaaggaaatcacttcttcattttatt

SEQ ID NO: 61263 - DNA, 83 bp, Homo sapiens
cttcagaaaaagcatccccgaggaggaagacgaatcgttaaacatctgaaagggtcaggtcccccacggcccttcaggatgaa

SEQ ID NO: 61264 - DNA, 74 bp, Homo sapiens
gatgctgccagggtccctgaagagggaagacacgcggaaacaggtttcctatcctgggagcaggagagtgtgcc

SEQ ID NO: 61265 - DNA, 100 bp, Homo sapiens
gtttactggtaacaataagatctgtggttggaattatgaatgtccaaagtttgaagagctcagaggatgaaacaggaaactgagtcataaaacactacta

SEQ ID NO: 61266 - DNA, 100 bp, Homo sapiens
aaacggagccagcggctgaggaggggccccagcagcccccgaaggccctatcaggacatggagtatgaaagacgctttgattgctaacccaaggaggaag

SEQ ID NO: 61267 - DNA, 75 bp, Homo sapiens
gatcctgcgcgcgggggaactagctggagggcaaggcgggaacaccctaaaatgaccaatgtgtgatttcagtgg

SEQ ID NO: 61268 - DNA, 100 bp, Homo sapiens
gctcagggtatccaagtatttgatcctggggagtctgattcagatgacaactgtacagatgtcactgatggtcctagaacaattggagattcatacgcac

SEQ ID NO: 61269 - DNA, 100 bp, Homo sapiens
cttgtcctggtataaagatgatgagattccttttgcaataaaaacaacaccaggtgcctctcaaattcttgccaaaacaattctacatgcaaagattttt

SEQ ID NO: 61270 - DNA, 100 bp, Homo sapiens
aattattctggtgtttatatctgtaaagtgaccaattcccttggtcaaagaagtgaccaaaaagtcatctacatttcagcagtttataagaaggctgaac

SEQ ID NO: 61271 - DNA, 82 bp, Homo sapiens
cggcggcgggaacgattgggctgagcagaggacgacatgttgcttttcgtggagattgttgtgtccactgtatcctggcttg

SEQ ID NO: 61272 - DNA, 100 bp, Homo sapiens
ctaaattccaagatgccatctgttattaaattaatagaagatgaaattgcaaccattcttaaatctacattgaaaggactagaatatttgcactttatga

SEQ ID NO: 61273 - DNA, 82 bp, Homo sapiens
ggtcgccctcaaggccatgatcaaaacgtcaccgacgatgagggcgcacctgctgtcctggagcttccgatctctgttcggg

SEQ ID NO: 61274 - DNA, 100 bp, Homo sapiens
ggttcgattcatcaaaaagatgctgtaaatgatgatgattttgagccatacttaagtagccagacaaatcaggttcttcacacacccccattcggcgtag

SEQ ID NO: 61275 - DNA, 83 bp, Homo sapiens
cagcagtcgaattttgtaaaatgtatgctgatggtagcatatgtttagatatccttcagaatcgatggagtccaacatatgat

SEQ ID NO: 61276 - DNA, 75 bp, Homo sapiens
agcgaggagtccatggacttcctggataagagcacagatgtcggtgcagatctcttgtccatgtgccagcgaaac

SEQ ID NO: 61277 - DNA, 80 bp, Homo sapiens
cgcgcctcccattgcagcctttgtgataactgcgtagacccctttgctgatgcaactaagggtgacgacttactcccggc

SEQ ID NO: 61278 - DNA, 89 bp, Homo sapiens
ttattactttgaagtgaagattgtcagcaaaggaagagatggaatggagatgtatgcatttcgattcttcatccgcctgtagatgaccc

SEQ ID NO: 61279 - DNA, 100 bp, Homo sapiens
aacccacatgcctctaccaatggacagctctcagtccacactcccaaaagggaaagatgccaattctcggaagcaagaagcagagtggaaagaaaaggca

SEQ ID NO: 61280 - DNA, 80 bp, Homo sapiens
ccatttagcattgatgggaagatggtagctgtaaacctggccactggaaaacgaagcttggcggagaaccagatcagtaa

SEQ ID NO: 61281 - DNA, 75 bp, Homo sapiens
gacgttttgaaaaaccaggacgaaaagatgtagggtcttgctacgtacgttgcccaggttggaatgcagtggcgt

SEQ ID NO: 61282 - DNA, 118 bp, Homo sapiens
tgtgcagtggcacctgcgcgaagctggccaaagcctgcccagacggctcacctgtgcgggatggaacaaaaggtttacccaaggtccagcctagcccctaggcaccatgtcggacagt

SEQ ID NO: 61283 - DNA, 100 bp, Homo sapiens
ttcagggcgcacaacgtgcctttgaagctgccgatgccagagccaggtgaactggaggagcgatttgccatcgtgctggatttggtgctatggagaaatt

SEQ ID NO: 61284 - DNA, 98 bp, Homo sapiens
ctaatgaagatgctattaaggaggacccagatgatgtggtaccagttggccaaagaagagcctggtgttggtgcatgtgctttggactagcatttatg

SEQ ID NO: 61285 - DNA, 100 bp, Homo sapiens
taaacacaaacaaaagggtgatgggattattttactgcatgcactgctgaggaacgtcaaggtcgtgggaaataaaaggcagttctacacagactgcagc

SEQ ID NO: 61286 - DNA, 102 bp, Homo sapiens
ggaaggacggctctatcagcatgggaaacttacactgctgcataatggagaacctctctacattccagtaacccaggaatccatcaacagcatcaagtccag

SEQ ID NO: 61287 - DNA, 95 bp, Homo sapiens
gaagaatgaaaaaaccaaaattatcgccaagattcagcaatttaacggatgaagagtcccggaaaaattgggaagaatttggaaatccagatggg

SEQ ID NO: 61288 - DNA, 75 bp, Homo sapiens
ggctcaaagaaagatgattatgccatcgaggagggcacgctggaggagatcgaagaggaggtccggcagaagaaa

SEQ ID NO: 61289 - DNA, 75 bp, Homo sapiens
aagacagtggcccttacaagcacatctctcctggggacaccaaggtgatgaagggagtatgccagcagatatagc

SEQ ID NO: 61290 - DNA, 80 bp, Homo sapiens
gttggtggtgaggccctgggcaggggcttctggaagacaagagtaaccagcttttcttcgggaaagtgggccgacagatg

SEQ ID NO: 61291 - DNA, 73 bp, Homo sapiens
tttgctatgatcattgacaaactggaagagagatcgcggattcaggtgtggctctatgagcaagtgaatatgc

SEQ ID NO: 61292 - DNA, 100 bp, Homo sapiens
ctagtcaaagaacgctttctgttcaagaggcagctgcgtatttaaaactcctggcaaccactatttgagtttctgcctctacaaatttgactattctagg

SEQ ID NO: 61293 - DNA, 86 bp, Homo sapiens
cgaggagttccgcccctttctggcaaagatgagggggattcttaagctggtggagctgtctaaggctcaagatatagaagcaggag

SEQ ID NO: 61294 - DNA, 80 bp, Homo sapiens
ataacgaatgtgatatcaaattggcagaatgttacgttcataacttactaaggattagtgtatattttccaaccttgagg

SEQ ID NO: 61295 - DNA, 75 bp, Homo sapiens
cctgcgcgagtggagctctgaagaagctctgagcggagttgtgttcttccccagtaatagttatgcacgagtgcg

SEQ ID NO: 61296 - DNA, 97 bp, Homo sapiens
caagtgatcctcccaccttagcctcctaagtagctgggaccacagagacattttaaatccaaaggatgtgattagtgtccagctggaagacactacc

SEQ ID NO: 61297 - DNA, 74 bp, Homo sapiens
agtcaactccttcaagcatataagtggtcaaacaagacaatgcagatcttcgtgaagactctgactggtaagac

SEQ ID NO: 61298 - DNA, 100 bp, Homo sapiens
cactttgcaaaaaaacttgatcctcgaagagaaggtggtgatcaaaggtcatcaagagttcatataactagagctgtcctggagcaatttttatcttttg

SEQ ID NO: 61299 - DNA, 74 bp, Homo sapiens
attttgggtcttcttcttaatcccatatctggacatctggaacatccatgcactgccagtgaaagatgtagaag

SEQ ID NO: 61300 - DNA, 50 bp, Homo sapiens
gaccattccgtatggagagccgggtgctgaaggtcgccatcctggctgag

SEQ ID NO: 61301 - DNA, 74 bp, Homo sapiens
gtccgtctgcgacccgaggcctccgctgcgcggtctttccctagcaactactgggacaagtttgtcaagcgcaa

SEQ ID NO: 61302 - DNA, 100 bp, Homo sapiens
tcgactttttcagagactgggacttggagcagcagtggtgtgatgaatgcagactctgctaccattttggctgtttggatcctcctttgaaaaagtctcc

SEQ ID NO: 61303 - DNA, 100 bp, Homo sapiens
tgtggaggctgaggaggcggcggcggagatctgggacacaactcagatgggaagttcatcgcccgggcacagcggatagagtacgactgtgaactagttc

SEQ ID NO: 61304 - DNA, 100 bp, Homo sapiens
gcatctgaaaaagctgtggaaggctctggataaggaccagtacctgcccaggaaactggttcctcgtctatggccgctactgcagccaggtggagtcagc

SEQ ID NO: 61305 - DNA, 89 bp, Homo sapiens
ggaagcaggactcggggcacttggggtgaatcgaaacgcatcaccctggtcctccagcagccacagtctggaggtccccaaggacatcg

SEQ ID NO: 61306 - DNA, 90 bp, Homo sapiens
cgggaacaacgcgagtcggcgcgcgggacgaaggtccctgtgcgttttattgcgacctgccggtgggaactttgtctccgagtcggagca

SEQ ID NO: 61307 - DNA, 74 bp, Homo sapiens
ctcaacctgttggtgaagcggatctcccagcaaggttttaaatgatacctgggtttccttcccttcgtggtctg

SEQ ID NO: 61308 - DNA, 100 bp, Homo sapiens
tgcccagttccccagttctggcagattctggaaactgtacattgaagcagagtgtcgtgtgggagccaatgggagatgggaagaaaatcatttccttggc

SEQ ID NO: 61309 - DNA, 74 bp, Homo sapiens
caccaggtcaccctggaagagtcgctggccgaaggaaaggggactaccacaggtatctggcagaatttgccaca

SEQ ID NO: 61310 - DNA, 98 bp, Homo sapiens
acctgttctggcaggatgtctgaaggggttgtcctcacttctgtgcaacttcactaagtccatggaagaagtttcagaagaggagccccgccgaggca

SEQ ID NO: 61311 - DNA, 100 bp, Homo sapiens
ccaaacaaacaaaatattcactgatgagcgacttcaaggagaaaagccttacagatgctcatgggaagggtgtgagtggcgttttgcaagaagtgatgag

SEQ ID NO: 61312 - DNA, 83 bp, Homo sapiens
cttcattgctctgtgtgccaccggtgaatgacctatgctggcatgtccggtgtctctcctgcagtgtttgcagaacctcccta

SEQ ID NO: 61313 - DNA, 73 bp, Homo sapiens
catggccattatggccgtcaacacctttgtgaaggttacaagccctgtgacccccaggtgatccgagaccgcg

SEQ ID NO: 61314 - DNA, 100 bp, Homo sapiens
actccactatccacttcatgccagatgccccagaccacgagagcctcaagcttctccagagagctatcagttgagggatttgcagttgataaaatggctg

SEQ ID NO: 61315 - DNA, 90 bp, Homo sapiens
cggggccactgcactgggtgattcacgtgtgcccaggccctgaggtgggccggacctgggagtggcagcttcgagagctgtgcccaggag

SEQ ID NO: 61316 - DNA, 75 bp, Homo sapiens
cagcctcctgagtaactgggactataggtgatttggatattgaagatgacatgaaagcacagatgaattgctttt

SEQ ID NO: 61317 - DNA, 78 bp, Homo sapiens
tttaatcggggtggtggcaatggtcgtggaggccgagggcgaggaggaggtgttgcccatggcccccggggccccaca

SEQ ID NO: 61318 - DNA, 75 bp, Homo sapiens
aagaaaatggatttcgttatatcccctttagaatatatcaggaactgcaagcacatgttgaccagataactgaaa

SEQ ID NO: 61319 - DNA, 79 bp, Homo sapiens
atcggcggcagctgtgagggggttccgggaagatggtgctgatcaaggaattggttaccttcccgccaatgtagaccgg

SEQ ID NO: 61320 - DNA, 74 bp, Homo sapiens
gaccgagagcgtgaccgagagcgcgaatatcgtcatcgttagaagagtcaactactggattttctgtctggcaa

SEQ ID NO: 61321 - DNA, 75 bp, Homo sapiens
gtgtgaatttggaagggatcgtgtggcatgaaacagaagaagagacagaagagatgggtgatgaagaagttttct

SEQ ID NO: 61322 - DNA, 100 bp, Homo sapiens
tgcacacagcctcctcatcaccacggaagggaagctgtggagctggggttggcgctgtacgtttatgagtacctgctgcacatcggtgcccagaagtcag

SEQ ID NO: 61323 - DNA, 51 bp, Homo sapiens
ggaagaatgccggtcacagcccaggagtcatccgtccttggctcaggattt

SEQ ID NO: 61324 - DNA, 100 bp, Homo sapiens
ctgagctggagcgggtgctgcaggcgccgccgccggacgtcggcaacggagaaggaaatgggtcctgatgaatatgaagagatggaagaagaggaggagg

SEQ ID NO: 61325 - DNA, 95 bp, Homo sapiens
tcagaactgctccaaaagactcctgtcatccagcttgtgctcttcatcccctgaatcctatgaggaactgagatctctgttgttaggaagatcga

SEQ ID NO: 61326 - DNA, 103 bp, Homo sapiens
ccgattttgttggcatcgaattcgcactgatgaaaatgggctttgtcctgcatgtagaaagaagaagctcattcacacagaagacccatttaatgatgaacat

SEQ ID NO: 61327 - DNA, 74 bp, Homo sapiens
gccatgcgctggttccagcagaaggtagagtacagagagatggatgaaagcttggccaacctctcagaagatga

SEQ ID NO: 61328 - DNA, 100 bp, Homo sapiens
caagaaaggcagcgaggtggagagcggttcaaaccttgtactactcagctgatcacaagctgcttgatgggaacctactagatggacaggctgaggtgtt

SEQ ID NO: 61329 - DNA, 75 bp, Homo sapiens
agcggtttgctggaggaggtcttcctggacctggaggaaaactaggtgtctgtgttcactccaggctgaagttac

SEQ ID NO: 61330 - DNA, 100 bp, Homo sapiens
gtctccagagccttctctctcctggccagaggcattgatgtgcagcaggtttctttagtcatcaactatgaccttcccaccaacagggaaaactatatcc

SEQ ID NO: 61331 - DNA, 83 bp, Homo sapiens
gcaaaagtcatggcaacttctggatgtgcagcaatcagatttatcattcgggtggatcagtacaagggaaagcgggatttgga

SEQ ID NO: 61332 - DNA, 100 bp, Homo sapiens
agaaggacttcggaatgcactacaacaggaaaatcatattatagatggagtaaaggacaggaagatgtcacccaagcgcatagctaaaagaaggtccccc

SEQ ID NO: 61333 - DNA, 82 bp, Homo sapiens
ggcactgggcgactctgtgcctcgctgaggacctgcctagagctggaacgttacctccagagcgagccctgctatgtttcag

SEQ ID NO: 61334 - DNA, 76 bp, Homo sapiens
caggaaaatacacctgttgttgagggtatttgaagtataccatacaactgttttgaaaatccagcgtggacaatgg

SEQ ID NO: 61335 - DNA, 96 bp, Homo sapiens
gacggtacttctgccactgctgctccgtggagatcgtcccgcgcctgccgatccagagacaatggccccgatgggatggagcccgaaggcgtcatc

SEQ ID NO: 61336 - DNA, 135 bp, Homo sapiens
actgtgtgaggcccaacagcggaatcatcgatgcaggggcctcaattaatgtatctgggaggtatggaaacattggaacttcaaaaggacatcaaagaagaatcagatgaagaagaagaagatgatgaagaatct

SEQ ID NO: 61337 - DNA, 100 bp, Homo sapiens
cagacattaacagtatttactgagagctcatcagatttgttggacgatttaagtctcgtaaagaacgagaagctgaacttggagctagggcaaaagaatt

SEQ ID NO: 61338 - DNA, 49 bp, Homo sapiens
caacaggatcgtctcgtccaagcttgacagagccaattcgctattaaac

SEQ ID NO: 61339 - DNA, 75 bp, Homo sapiens
acctgggcgctcagcccccggatcagcctgcctctggggcgatgccagtccctccactccagaggagaacgaaac

SEQ ID NO: 61340 - DNA, 100 bp, Homo sapiens
atggagctctaaaaacatcttcaggatttcttgctaagtccagcatagttgaaggtgtgtttccattgtagaaaacctggtcatggaattgcagattgcc

SEQ ID NO: 61341 - DNA, 101 bp, Homo sapiens
gggcgcccggcgcaccgtggggactacatatcccagcatgccgcggcgccggcggagcgaggcgaggcgcgccccatggctgggggttatggagtgatggg

SEQ ID NO: 61342 - DNA, 98 bp, Homo sapiens
cagatttttgtgaagatgttacagagggataagcctattgagatgcagctcacatcagcaaaatgtaacagatcaactcctagcaatcatgatcggat

SEQ ID NO: 61343 - DNA, 101 bp, Homo sapiens
cttcgtggccgctgtggtgaatgggagcgcgcagggcgcacagatcggtttttgccaatccagaagactgtgtagcatttggcaaaggagaaaatgccaag

SEQ ID NO: 61344 - DNA, 98 bp, Homo sapiens
gctcctgcatctgcctccccatgttagagccacagctgaaacaactacaaacaaaatatgatgaacttaaagagagaaagtcttcccttaggaatgca

SEQ ID NO: 61345 - DNA, 75 bp, Homo sapiens
cagacttcttagacttggaggaggtatgcctggactgggccagagagctattgcttaccttttcccaagtggttt

SEQ ID NO: 61346 - DNA, 89 bp, Homo sapiens
gagaaaaccagctgagacagggcgccacttactagggggatatgagactttctactcggaatatcctgagtgttgcgtggatgtaaaac

SEQ ID NO: 61347 - DNA, 82 bp, Homo sapiens
gaagatcgcaccgcggacgcccgctgagcttggcgcacgggccgaccagcgggccccactggctctgccagctcttctgccc

SEQ ID NO: 61348 - DNA, 100 bp, Homo sapiens
agacccagcagaggcccctaggacgctcctaggcctgcgtaagtgaggaaacagctgatcctgctcctgtggcctccagcctcagcgaccgaccagtgac

SEQ ID NO: 61349 - DNA, 99 bp, Homo sapiens
gaaactccttaaaagatgcaatatcctacatgcagatatcaagccagacaatatcctgttatgaagaagccaagaatttattgaccaagaccaagatat

SEQ ID NO: 61350 - DNA, 90 bp, Homo sapiens
atgccacgggggccaacacttggacatagctaaaacgtcatcctctcttcagtgatgtggactgggaaaatctgcagcatcagactatgc

SEQ ID NO: 61351 - DNA, 75 bp, Homo sapiens
aaatggattccaaaggagatgtctctggagttctgattgcaggctatgttggaggacccacatgtagtgtcattg

SEQ ID NO: 61352 - DNA, 101 bp, Homo sapiens
ctaggcagcggaggagcccgaccgacccgtgccgcgtatgatgctgtccttgacagaaatgtggccattaagaagctcagcagaccctttcagaaccaaac

SEQ ID NO: 61353 - DNA, 100 bp, Homo sapiens
gtcactggcagactcgagactgtaggcactgccatggcccctgtgctcagtaaggactcggcggacatcgagatgccttcaattaagttgcagagttctg

SEQ ID NO: 61354 - DNA, 100 bp, Homo sapiens
agtccagagactcatccccgccctgtgggagaagcacagtccacaggatgatgatgctgaagctatccttgctgcagacttcgaaattggtcacttttta

SEQ ID NO: 61355 - DNA, 83 bp, Homo sapiens
gcccgcccttgatcttcgctgtggcatggcggacgaggggaagtcgtacagcgatgtgcactcccagcaacacccctgccacg

SEQ ID NO: 61356 - DNA, 89 bp, Homo sapiens
ctcgtcctgctacagacagctttgatgactacccacctagaagaggtgatgatagctttggagacagatcaagcgtgctttccttatcg

SEQ ID NO: 61357 - DNA, 82 bp, Homo sapiens
caggcagctctgtccagtggagtgacccgttgccagagtgcagaggtcacgagaagagaatgccttctagatgcaaaatcac

SEQ ID NO: 61358 - DNA, 100 bp, Homo sapiens
cgtctctctgctgcggcgcggggaccgctgtgctctcggaccctgatgcttggtgtgacctgagtaaatttgacctccctgaggaaccatctgcagagga

SEQ ID NO: 61359 - DNA, 75 bp, Homo sapiens
tccgtttgttcaggaaccaccagtgacagagttcgatacaagaggctgttttcctagcgtggcttgctgcctttg

SEQ ID NO: 61360 - DNA, 100 bp, Homo sapiens
ctaccatccccctccggggtcaggaaagaaactgctgtgccagcaaccaaaagtggcttttcatggcctgccactgaaaatcaagaaagaaccccacagt

SEQ ID NO: 61361 - DNA, 98 bp, Homo sapiens
cggagatcctgatgaagttcgagcactaatatttaagaaagaagatgttaactttcaggttgatgataattagaagcatgctttccactgaacttccc

SEQ ID NO: 61362 - DNA, 97 bp, Homo sapiens
acaccgtgcacattctctgttctaagtgccttaagagaggatcgcccaatccacatgcttttccagactgcctctttaagctatgtcccatgaaccg

SEQ ID NO: 61363 - DNA, 82 bp, Homo sapiens
ctgcgctgtgatgcctgcagagctgtggcttaccaggctttatcctgtggataaacgcagagtgaacgagtttggggagtcc

SEQ ID NO: 61364 - DNA, 100 bp, Homo sapiens
ttgagctccaggagttcgtctcttacgtctgcggaagtgcagctgcctcagttcttagcgcagggatcaaggtggtcggacattgtgtggtgtaatgagg

SEQ ID NO: 61365 - DNA, 75 bp, Homo sapiens
aaagaacttcttcccaaaatggtaccttctccaggcaaattccgttcccctgcagcaccatctcctttggctctt

SEQ ID NO: 61366 - DNA, 82 bp, Homo sapiens
cgagtcgcgcggaggcggaggcttgggtggagtacgacaaggagttctcccctcgtcagcgacaccacaaagagttcaagtt

SEQ ID NO: 61367 - DNA, 96 bp, Homo sapiens
ccactatttttccaaagtggtggatgagacatttctcttgggaagttgtgcatctgacaggaatatagtactgtacgatatgaggcaagctactcc

SEQ ID NO: 61368 - DNA, 90 bp, Homo sapiens
gaacgaactggagctgctgatggagaagagtttttgggaggaggcggagctgccggcggagcttaccatgcgggatactatgaagtatgt

SEQ ID NO: 61369 - DNA, 51 bp, Homo sapiens
cctgcatcttttgcgctctcaagatttgcctgaagacctggataatctcca

SEQ ID NO: 61370 - DNA, 76 bp, Homo sapiens
agcaagactggagtccctgatggaattatgcagtttattaagaaaactttagaaactgttcctttggagaggaaaa

SEQ ID NO: 61371 - DNA, 100 bp, Homo sapiens
ctgcttccaaaggagaaccgcagtgaaagatttttgatcaccatactgaagaggatatagataaaagtgctaacagtgtattgataaaaaacctgagcag

SEQ ID NO: 61372 - DNA, 50 bp, Homo sapiens
gaaaatctccccggtgactttcagctgagtcagtgctgattctctcaaat

SEQ ID NO: 61373 - DNA, 100 bp, Homo sapiens
gagatgaaagtttccgggaattaagtccagtttcttttcaatataggctggtcatcaatgctgctttgggatttgacacatttgttgtcatgagacatgg

SEQ ID NO: 61374 - DNA, 90 bp, Homo sapiens
cggccatcttgtgttgttgaggctgaggactgactggggttctgagactccctgtcccggaccgcaggtctcctctgagcctccggcctc

SEQ ID NO: 61375 - DNA, 99 bp, Homo sapiens
tctactttggctttaagaatgtggaactactgttttccggtttggtgatcaatacagctggaggagaagtgtttgaaattgaagagcatatcagcgagc

SEQ ID NO: 61376 - DNA, 82 bp, Homo sapiens
ccccggcccgactctatcacaagaaggtgagaagccctaccactgcaactgggacggctgcggctggaagtttgcgcgctca

SEQ ID NO: 61377 - DNA, 97 bp, Homo sapiens
tcccagtcagtctcaggagaagaaatagatgcaatggatgttcagcagctttcacaaatagtaccaaaggcgcggatcaagaagatcatgcagacgg

SEQ ID NO: 61378 - DNA, 100 bp, Homo sapiens
tgggacgggtttagcggcagcctcttcggctgcccggcagctctgacagactcagaggacgagtccccagaagacatgaggctcccaccctatggccttt

SEQ ID NO: 61379 - DNA, 75 bp, Homo sapiens
caagtttgtgaaagaaaggacagagattgaactcagctatgcaaagcaactcagacctgatggccaaaagaaagg

SEQ ID NO: 61380 - DNA, 83 bp, Homo sapiens
gtcccctgcaccatgagctggggcaccgagctctgggtcgggaaagaggttaaagaagacacgcaagtatgatatcatcacca

SEQ ID NO: 61381 - DNA, 75 bp, Homo sapiens
cccatgagactgacgcaggaccctattcaggcagagatcctacaagaatccaggatgatgatcccagattgccag

SEQ ID NO: 61382 - DNA, 75 bp, Homo sapiens
ggaatgttcatggcgctcacctggcaaacccacctcctggctcttggctgtgggaagaaggagaaagggccaacc

SEQ ID NO: 61383 - DNA, 82 bp, Homo sapiens
cccgcccggagccccggcccccacaggtcaaaatgcagatcttcgtgaaaacccttaccggcaagaccatcacccttgaggt

SEQ ID NO: 61384 - DNA, 96 bp, Homo sapiens
ggcggcgggccgaggagccgggcgcaatggagcggaagaggtcatcatcagatttgaaatatttaaagtggatacaaaactatttcagcaatgcag

SEQ ID NO: 61385 - DNA, 83 bp, Homo sapiens
aaaaaggataaggagatcatagcagagtacgatactcaggtcaaaggtatccagctcacatagaagacattgactacgaggaa

SEQ ID NO: 61386 - DNA, 100 bp, Homo sapiens
aaactacctgtgcagctccagagagctatggctgcagaagcagaagcgtcccgcgaggcccgcgccaaggatcctgaaggatcagaagttgacatggtag

SEQ ID NO: 61387 - DNA, 88 bp, Homo sapiens
ctctatcgcactgctaggggttctgctgctgggtgcggcgcgcctgccgcgcggggcaggtagtccaggggatcctgctcatctcagc

SEQ ID NO: 61388 - DNA, 98 bp, Homo sapiens
gagcttggcgatgatgacgtttttacaggggcctggctgtggattgggtccatgacaaactctactggaccgactcaggcacctcgaggattgaggtg

SEQ ID NO: 61389 - DNA, 75 bp, Homo sapiens
gtcccgagcccgcggggcagctaccgctcgaccctctttcccagctgcccgctcctcagcacccgaagattcgcc

SEQ ID NO: 61390 - DNA, 51 bp, Homo sapiens
cagattcagaggatgacagttgcaattgagccccatatgggggttggcagg

SEQ ID NO: 61391 - DNA, 100 bp, Homo sapiens
tggaaatgagacaattgaagctcaagcagagcttacagtgcaaggtgccaatgggtcatgtttggttagaaggtgacaatctacagaattctacagattc

SEQ ID NO: 61392 - DNA, 97 bp, Homo sapiens
aacgatgtggctgcccggcagacgacagagatgctgaagctacacagatgttattgatgttgtccaggccctgcagacccacccagactcaaatgtc

SEQ ID NO: 61393 - DNA, 82 bp, Homo sapiens
cgtccagcacctacgtcccgctgccgtcgccgccgccaccatgcccaagagaaaggcgccatgtcagaaccggctggggatg

SEQ ID NO: 61394 - DNA, 100 bp, Homo sapiens
gaggaatatggcgctcttaggcagccgagcggagctggaagcggacgagaattgcctgaggttctgtccattgaggaggaagtggaagaaacagagtctt

SEQ ID NO: 61395 - DNA, 82 bp, Homo sapiens
acagccggcagctgagcctggtggcctccgttctcttggcccagatgtggacgagtgctcactagcagaaaaaacctgtgtg

SEQ ID NO: 61396 - DNA, 75 bp, Homo sapiens
gcagccgccgccgcagcgcgaacatggacgccgtcaacgccttcaaccaggaggattttttatcaagcagaaatg

SEQ ID NO: 61397 - DNA, 75 bp, Homo sapiens
gagggccctgtgggtgctgggcctctgctgcgtcctgctgaccttcggtacaatgactcttcttgcttttcacct

SEQ ID NO: 61398 - DNA, 90 bp, Homo sapiens
aggatggtgatccgtgtatatattgcatcttcctctggctctacagcgttctcaaaagtctatggtcctgtgttcaccgtgtattttggc

SEQ ID NO: 61399 - DNA, 100 bp, Homo sapiens
attatatcgcatcctatggctcaaagaaagatgattatttcttctggatctgcctcagtcctgacacacagcagctcgggaaatagtctaaaacgcccag

SEQ ID NO: 61400 - DNA, 83 bp, Homo sapiens
tcatgttctgcacctcaggagggaattcagcctcagtgatgtccatgagcaattctgtggtgttcttggtcacacatttatgg

SEQ ID NO: 61401 - DNA, 101 bp, Homo sapiens
gacctcacttgcttctgggatgaggaagaggcagcgcccagtgggacataccagctgctgtatgcctacccgcgggaactgggaacagccaggtgccccaa

SEQ ID NO: 61402 - DNA, 82 bp, Homo sapiens
ccgctgggctggccctgcagggaccatggaatccagagctgaggccctggtggtggcaaccgcctgtgtgccactgaaaatc

SEQ ID NO: 61403 - DNA, 101 bp, Homo sapiens
ggcgagcagggagcggagtaccagcacttcatccagcagtgcacaggatccaaactactggatacaggtgcatcgcttggaacatggagatggaggaatac

SEQ ID NO: 61404 - DNA, 74 bp, Homo sapiens
tgcatctggagagtttctgtgaccccaggggagaagataaacattgacgatcttgaggatgaccctgtggtgaa

SEQ ID NO: 61405 - DNA, 100 bp, Homo sapiens
agattgggaatgaaaagaggtgaagaaattgcttcctcaggattttaaactgtctacggttcttaacctcatctgttaagttcccatgcctggagaagct

SEQ ID NO: 61406 - DNA, 100 bp, Homo sapiens
agaccgcggccgggaccgagggtagagcagagccggagccaggtgcaggccattggagagaaggtctccttggcccaggccaagattgagaagatcaagg

SEQ ID NO: 61407 - DNA, 87 bp, Homo sapiens
gacaagtcacaccactagaaattgatattctatatcagcttgcagacttatataatgcttcaggagtcctgctctgttgcccaggct

SEQ ID NO: 61408 - DNA, 82 bp, Homo sapiens
gtaaacggggctgctggtgggccgcgtcgaagacatggaccagggctacggagccgcggcgagtcctttgcacatgttggca

SEQ ID NO: 61409 - DNA, 100 bp, Homo sapiens
tgtggttctcccgagaccccggcttcatgcccggctggctgactgttgcctgggtggagggtgagacaaagatgtctccccgttcaatgttgtggcctgg

SEQ ID NO: 61410 - DNA, 100 bp, Homo sapiens
gacagccccgaagacgccgacctcttccactccgaggaaatcaagggtctgggggtggtggcatctcccctaaaggaagtggtccctctgtggcaagtga

SEQ ID NO: 61411 - DNA, 100 bp, Homo sapiens
tccttgaaggaaatgacattgagcttgtttcaaattcaggttttggctacgggcctccacctccaccgccagatcagtttgcccctccgggggttcctcc

SEQ ID NO: 61412 - DNA, 83 bp, Homo sapiens
acctgctccggagtcataaagaggacgccgggacaccaagaagcagggaaatgttgcagagtgggcaggatcttaagacccga

SEQ ID NO: 61413 - DNA, 96 bp, Homo sapiens
cgccctgagtcactgcctgcgcagctccggccgcctggctccccatactagtcgccgggggggccctcagcctcttggccttgaacgggctgttca

SEQ ID NO: 61414 - DNA, 82 bp, Homo sapiens
tagataacagcttccgccaggcggtgatgaagaatccccccgaaaggaccccccaggtggatcagtacaagggaaagcggga

SEQ ID NO: 61415 - DNA, 75 bp, Homo sapiens
cagaagggacgtgagcccagccgaggtaccgctgaagaggaatcaattttgcttcgcttttttgcaaatgcattc

SEQ ID NO: 61416 - DNA, 75 bp, Homo sapiens
tttggtttaaagaattaaaaggaagaacaacttaagagcttcttcaaaggatgcaatgcagtatgcttctgaatc

SEQ ID NO: 61417 - DNA, 100 bp, Homo sapiens
atgggcggcgctgcccaacttgaggaccggccgcgcgacaagccgcaggacactcatgaggaccatgatacttccactgagaatacagacgagtccaacc

SEQ ID NO: 61418 - DNA, 87 bp, Homo sapiens
cggcggcgcgcagcgtgtcaggcggagagacccgccgccagggattaaagcctgtggtttccacagaagcaccacctatcatatttg

SEQ ID NO: 61419 - DNA, 87 bp, Homo sapiens
agagagccaccggaggagcagctcacctgagagacggagccccggctcgcccgtgtgcagaggaccgcagctgaatgcacagctaga

SEQ ID NO: 61420 - DNA, 98 bp, Homo sapiens
acagatcctctgctcattgccatgaaggaactcaaatttggagcaagaggtggtggtggccttcccccgaagaaatttggtaatcctggggagcgttt

SEQ ID NO: 61421 - DNA, 90 bp, Homo sapiens
gcatcacagggaacttgagaacctcaagggcagactctcagcgttctcatctctcttccttcaccatgaagctgatggacaaattccact

SEQ ID NO: 61422 - DNA, 95 bp, Homo sapiens
ggagctgaatctgccgcagctagaaatgctcaagaaccagctggaccaggtccaagtgtgcctgccatcaactaactatccaggctacagcctgt

SEQ ID NO: 61423 - DNA, 100 bp, Homo sapiens
cagttacaaattcagtgccttctgcagtttccccagagctcctcaagaataacggaagggagggacttcaaaatgagcgtccctgactacatgcagtgtg

SEQ ID NO: 61424 - DNA, 87 bp, Homo sapiens
gccagtgtttccacaatggaaccaattgttttacagtctgttccacatgatcattgtaataagtttccaaccggaggccctatcggc

SEQ ID NO: 61425 - DNA, 98 bp, Homo sapiens
agataattgaagttggtgacaccccaaaagaccgagctctcttcaacggagcccaaaagtgactcaaatggatagtgaagtccaaaacggaaagcggc

SEQ ID NO: 61426 - DNA, 108 bp, Homo sapiens
gatctggagaggaagattgagtcgctggaggaggagatccggttcttgaggaagatccacgaggaggacccatgggccgtggaggctatggaggtggtggcagtggtg

SEQ ID NO: 61427 - DNA, 95 bp, Homo sapiens
ctaagatctcttccccttgtccatagcctagatcgagctccctgtgtgcaccgcgcgctgcccgaggcgctttctcaagtcaaagaaggccctgt

SEQ ID NO: 61428 - DNA, 109 bp, Homo sapiens
gcctcttcctttttcgacgcctccgccgccgcctgaggaggcgagctagccgggagttacaccgccaccgccaggtgcactgctgcaatgggctctgagctggagacgg

SEQ ID NO: 61429 - DNA, 100 bp, Homo sapiens
tgaggagctcgcctgctgccctcttgcgcgcgggaagcagcaccaagttcacggccaacgccttggcactaggaaatgcatcttctgcagacaccgggtt

SEQ ID NO: 61430 - DNA, 75 bp, Homo sapiens
aaagctgtaatcatgtcttctgtatgacttgtattcttaaatgggcagagcagccattgtttgatgtcctgtgac

SEQ ID NO: 61431 - DNA, 98 bp, Homo sapiens
atgagcggaagcttcgaggcatgatggtcgactacaagaagagggcggagcggagacgggagtattatgaaaagatcccagggtgtcggcgccgagct

SEQ ID NO: 61432 - DNA, 83 bp, Homo sapiens
caaacttcccatccctgacccaggagtgtctgtccatctcagcgtgctgtgaaaattaagaagccaatcaagacgaagttcag

SEQ ID NO: 61433 - DNA, 100 bp, Homo sapiens
tcacgctgccccccgacgagatcttccgcaacctggagaacgccaagcgcttcgccatcgacatagcacaggaagtcctggagaacctgaaggaccgctg

SEQ ID NO: 61434 - DNA, 151 bp, Homo sapiens
attctgtctttgtgtcctgagatcaaatggcacttcattggccacctacagaaacaaaatgtcaacaaattgatgggcctggagctgctgaagactgctattgggaaagctggctacactgataaggtggtcatcggcatggacgtagcgg

SEQ ID NO: 61435 - DNA, 98 bp, Homo sapiens
gaaaatcattctgccttattacgccgtctccaagatgtagctaatgaccgtggttcccactgaggttttttgcatgtctgacacccatgactccacct

SEQ ID NO: 61436 - DNA, 100 bp, Homo sapiens
cagggtgcgggagagccccttgcagaagacgccgtacgaggtactaggttttgacaagcttgcatcatgcgtgagtataagctagtcgttcttggctcag

SEQ ID NO: 61437 - DNA, 85 bp, Homo sapiens
gagctctcgatggaaccaaggatgacagcactaattctaagaacgccagatcaagtgtcccaagtgtgataagctgttcttgaga

SEQ ID NO: 61438 - DNA, 74 bp, Homo sapiens
gcaggcgccgccgccggacgtcggcaacggagaagggtcggtgtacccgagagaactgcaagtaccttcaccct

SEQ ID NO: 61439 - DNA, 83 bp, Homo sapiens
cttttcatgagccacaaacggacgtcattgagtgcaaaagtgctaggtggcgacagtgctatgagggccttccagaacacggc

SEQ ID NO: 61440 - DNA, 100 bp, Homo sapiens
cgccggcctccggggagaaacgatttcgatggggtcctctatcatatttcaaatcctaatggagacaaaacaaaagtgatggtcagtatttctttgaaat

SEQ ID NO: 61441 - DNA, 95 bp, Homo sapiens
cacttacaaaaggcaaaattatctcacacatcatccggcatatggtcagcagataagcagagagccctagaagaaaccaaagcctacaccaccca

SEQ ID NO: 61442 - DNA, 100 bp, Homo sapiens
ttagagatcgttttgatggatatatcttccttgacagcaaaggacatggacatcttccagcaacagatctcgagaagacagctggctaaaatccttattt

SEQ ID NO: 61443 - DNA, 100 bp, Homo sapiens
gagaaaaggcctaagaattttggcattgggactgtggagtttattatggactcaaaacataatttctgtttcatggagatgaatacaaggctgcaagtgg

SEQ ID NO: 61444 - DNA, 83 bp, Homo sapiens
ctgaaattcatcctgagatgagttatacatgggaagctgttgataccaaaaataatgtactttataaaatcaacatctgtgga

SEQ ID NO: 61445 - DNA, 83 bp, Homo sapiens
atactctgatgacctactgaagaagcttctcaaaggtttactcctggcttgggggcattaggaagcactggaggctcttcggg

SEQ ID NO: 61446 - DNA, 100 bp, Homo sapiens
ctaaagaaattattcttgatgatgatgagtgtcctttacaaatcttcagggaatggccaagtgacaaaggttgctccttgagggcaggacagttcttatg

SEQ ID NO: 61447 - DNA, 100 bp, Homo sapiens
ccgtcagagttggactgttggaaaattggaattgctttcttcagggccttcaatgccattcatcaaagagggggagaaaactggttgtcctggatgtttg

SEQ ID NO: 61448 - DNA, 73 bp, Homo sapiens
caacagaaagaaaaagggccaaccactggggaaaatcgggaccagtattcacatctgctaagtgatcattttc

SEQ ID NO: 61449 - DNA, 50 bp, Homo sapiens
cctgctaacagaactggaccttttcgatggtgggcagtggtggtgctggc

SEQ ID NO: 61450 - DNA, 75 bp, Homo sapiens
agagccctccggccagcggggaggctctttggtgtaacgggaaactgcgctgcctgtagtaagctcatccctgcc

SEQ ID NO: 61451 - DNA, 75 bp, Homo sapiens
ttataaagttattgctaagtgtgggaattttagctaaggttgttggtacagaggaacgtattcctattcccctca

SEQ ID NO: 61452 - DNA, 89 bp, Homo sapiens
acagatcgcgctcgggtctcggcctcctgagtgccggaaaaccagtgagtctggagagctgcatgggctcacaactgaggaggaatttg

SEQ ID NO: 61453 - DNA, 100 bp, Homo sapiens
actgcaaaggccaatgttggtgctggcaaaaaggttttctgtctcaactggtctctgacaagcctctgactgaatgtatccgtgctggccactatgcagc

SEQ ID NO: 61454 - DNA, 75 bp, Homo sapiens
caaagtccttggaagcaagtggctgttcttgtagttttctgcatagataaccatattttctgctcttaagaatct

SEQ ID NO: 61455 - DNA, 97 bp, Homo sapiens
tcttgacattaccttttcaccagactatccgtttaaaccccctaaggctcagctggaagctcagaaagccacgcaggacttccagagggccacagag

SEQ ID NO: 61456 - DNA, 100 bp, Homo sapiens
cttcaggcaaggaacacccttgattgcattttctttactacctcatgaacagaaggctgcatatctggttggtgtctctgaccccaatagccaagctgga

SEQ ID NO: 61457 - DNA, 75 bp, Homo sapiens
gtttgaacaaactcgaagaacagctgtggaaagaagttgcaaaacactgggcaaagccatgactacagtagtggt

SEQ ID NO: 61458 - DNA, 90 bp, Homo sapiens
gatggaggagtacgcgcgagagccttggtggtctgagctcggcctatgggggcctcacaagccccggcctcagctacagcctgggctcca

SEQ ID NO: 61459 - DNA, 95 bp, Homo sapiens
cagagccaccagcgcagcgctgccatggagcccagcagcaagcaaacggggattcagcgtccgatcctttggaacagggactcacgtgaagcttc

SEQ ID NO: 61460 - DNA, 76 bp, Homo sapiens
ctgataagcagaggattagaaaagatgctgtgggcccgcaagagaaagcagaggtctccgtgttggtcctcttcgc

SEQ ID NO: 61461 - DNA, 98 bp, Homo sapiens
cggcgccagctggagagcagcttcgcggagcgactggagagccagagacactctgacctggtcacagccagagacacttggaaatcctccatctcccc

SEQ ID NO: 61462 - DNA, 123 bp, Homo sapiens
ggatcgtgaccgagaccgtgaccgagagcgtgaccgagagcgcgaatatcgtcatcgttagaaggtagcctttccagtaaatatatgactcagggaaaagcctcagcgaagaggacccagcag

SEQ ID NO: 61463 - DNA, 50 bp, Homo sapiens
cagactttctcaactcgttcgaacacagaatgttcttggtgagaagggcc

SEQ ID NO: 61464 - DNA, 98 bp, Homo sapiens
ggtcaacctcacccgagagcagtgccaggatccaagtaaagtcccaagtgaaaacaaggataaagccgacaagagtgctctggccaccaaagtgagcc

SEQ ID NO: 61465 - DNA, 126 bp, Homo sapiens
ctggaaatccggcggcgccagccactcggagctaatccacaatctccgcagtgttacagaacatcctggacactgaaaaagaatatgctaaagaacttcagtctcttcttgttacttacttaagac

SEQ ID NO: 61466 - DNA, 83 bp, Homo sapiens
gtttcggtcatctaaaggaggttttaaacagtataacaggtctgccatcatggatgttctcgcagaagcaaatggcacctttg

SEQ ID NO: 61467 - DNA, 83 bp, Homo sapiens
agttgttgctctaggagctgaaaccagtgggtagatgtcgttctgaaacgcaggtcttcaaagcttcacctttctccaaaggc

SEQ ID NO: 61468 - DNA, 101 bp, Homo sapiens
aagcaacattgtgattttaagactcataactagttcacatccaagcatttgggtaacaatgaataatccagaatggctactctgatctatgttgataagga

SEQ ID NO: 61469 - DNA, 75 bp, Homo sapiens
gatggaaacttatttaaggatggctgacttaccgtatcagatcgacattctggtcaacaatggtggaatgtccca

SEQ ID NO: 61470 - DNA, 50 bp, Homo sapiens
cggagccgcgcagccctcggagcacgggggatatgagactttctactcgg

SEQ ID NO: 61471 - DNA, 100 bp, Homo sapiens
gtctttgagcaggatgcttctggagacgagaggtccggccctgaggactcggaacaggcctttgagagcagccagaagtacaaagaggggaagtacatca

SEQ ID NO: 61472 - DNA, 100 bp, Homo sapiens
ctcaagaagcagagagtctacctgcccgacgcgttcgtggagaggagcagcggttgctgttggaggagctcctttgaataaacctgcccaccaccaagaa

SEQ ID NO: 61473 - DNA, 100 bp, Homo sapiens
ggaggcagtgccgcttcggccgaaggcccgagcgcccgaggcgtctgggatggtgtgggaccggatctgaagaaaacccttgctgtgttattagataaca

SEQ ID NO: 61474 - DNA, 80 bp, Homo sapiens
gaggagaaggaaggcatggaaagttccagccggttcgagagctagatggggacccagagcctgctcttgggaacagccag

SEQ ID NO: 61475 - DNA, 74 bp, Homo sapiens
aaatgaagggcgccctggaataggttcgccgaagagagagtaagctgtgctagaacaaaaatgcaatgaaagaa

SEQ ID NO: 61476 - DNA, 90 bp, Homo sapiens
ggaggcgacagagacagcagcaggagtcttttagtcctgctatacagctgcaccttgtacatcaagctccatgtaatgttcctccttacc

SEQ ID NO: 61477 - DNA, 83 bp, Homo sapiens
cgcacctccactccatcctgaaggctaccaactacaatggtcaggcagcagttgagtgaaatgaagagccacgtagaggatgg

SEQ ID NO: 61478 - DNA, 73 bp, Homo sapiens
ttttgacttgtttggaggtgttgatattgaatagggaaaacctgctttctgcaaacaactgaaaaagctgcat

SEQ ID NO: 61479 - DNA, 75 bp, Homo sapiens
tgcagaagcccattatggctgtaactggagatgacacagatttggatttccaggaggtagtcatggtaccatgcc

SEQ ID NO: 61480 - DNA, 100 bp, Homo sapiens
gaaagctctcaaagcatgcttcagtggattgacccaaaccgaatggcagcatcggcacactgctcaatattttaccaaatgttgcaagaactctggagtt

SEQ ID NO: 61481 - DNA, 82 bp, Homo sapiens
ctcattcacatacgtcaaggaaattgagacctccttgaggcccgccgcccgcgggcccacgagtgcctgggtgaggctctgc

SEQ ID NO: 61482 - DNA, 98 bp, Homo sapiens
cagtcctctccaccaagagcctcttccttggccagaaggtttgcagtaatgagctgaagtgtgtgtgtaacagacactggataggttctgattgcaac

SEQ ID NO: 61483 - DNA, 90 bp, Homo sapiens
gtaaatgtgagtggaagccatgaggccaaaggcagttgtattgaccctgtattcagtggatcagctggcaccacccaaatagataaattg

SEQ ID NO: 61484 - DNA, 96 bp, Homo sapiens
atcgacatcctcagaccctactttgatgtggagcctgctcaggtgcgaagcagaaattcatcaaacctatcttcacggatgagtcctaccttgaac

SEQ ID NO: 61485 - DNA, 82 bp, Homo sapiens
ccgcagtcagccggggacctcgtccgagcccacccgcctttggagagagaacgaggtgctcaaagtccaactgaagaaatat

SEQ ID NO: 61486 - DNA, 75 bp, Homo sapiens
gggcctcccctgtcgccctgaatgtccagtatgctgacctgacctttgaccagacggcgtggggggacagtggtg

SEQ ID NO: 61487 - DNA, 76 bp, Homo sapiens
cccacggtggctggagaaggaagcaaaggaccttctggtgaaggtcgatggcgtgaacattcagggttttgccaac

SEQ ID NO: 61488 - DNA, 100 bp, Homo sapiens
caacgattgctgtgaaagtcaacccggagcgtgaggacagtgagactcgaacaccatgctgtgacctacaagcaaactaaatagccaacatttctgaacc

SEQ ID NO: 61489 - DNA, 100 bp, Homo sapiens
cagacggcgacagtggcggcggcgccatggcagggcttgcagattcccaacttcttctggagcctggggatcggtcacactggtgcgtggtggcatactg

SEQ ID NO: 61490 - DNA, 74 bp, Homo sapiens
ccgttttcgcgtggttcttttgcaagagaacggagaccaacctgggctgaagaaagaagattaaatgctgaaac

SEQ ID NO: 61491 - DNA, 100 bp, Homo sapiens
tgttaacaaatgtgagattgccaggtttatggctacaaatgatttgatgacggaactgcagaaagattccatcaagttggatgatgatagtgaaaggaaa

SEQ ID NO: 61492 - DNA, 75 bp, Homo sapiens
tccaagagcacattgcctggtaagatgtgttcagactgcatcacagtgcttccgatacaagcgacaaaaatcgag

SEQ ID NO: 61493 - DNA, 98 bp, Homo sapiens
tcatggttccatcagccgccttcatcaaatcaaacagatcaacaacccctccccgtcgtaaacgctgaggaatgatgtggcaagaatgccatgatgtt

SEQ ID NO: 61494 - DNA, 75 bp, Homo sapiens
cgccggcagaggatccagtgttcaccatcctggccccggaaggtggccgcgcaccagttccctgaggtacggttc

SEQ ID NO: 61495 - DNA, 120 bp, Homo sapiens
gccgaggcaggcctgacccggggccgggcagcccgcgcgactttcgagcatctgttaagaacatcttcagccagccggcctgcttccctgccaagagtgcctgcgatggaaagtgccaag

SEQ ID NO: 61496 - DNA, 75 bp, Homo sapiens
ggcttctggttctcacttgtcgattggctgcaatgccgtcagctgggcccctgctgttgtacctggaagcctcat

SEQ ID NO: 61497 - DNA, 100 bp, Homo sapiens
ccatggtggattttgatgaaggctctgatgtatttcagatgacttggattgggaatcgaagaaggaaatatcgtttaatggggattgaagttccacctcc

SEQ ID NO: 61498 - DNA, 50 bp, Homo sapiens
actggttctacacgcgagctggtgtgagatgcacaatgcgaaacctaggc

SEQ ID NO: 61499 - DNA, 80 bp, Homo sapiens
gcgagagatcccgtccgccccagccgcgtctgggccaggagaaaagtttggtgccctggttgtcagatgttggaaagcag

SEQ ID NO: 61500 - DNA, 90 bp, Homo sapiens
ccggacggacatgggctcctgaagttgcgccgctgccggtcgggggaagagacctgacaggtggtcctggctctgccatatgacaccccc

SEQ ID NO: 61501 - DNA, 80 bp, Homo sapiens
gctagcagagaagagaatgctggtttctaagcatgaattgaggaacagaagaagcagagcagatgatcggagcagcattt

SEQ ID NO: 61502 - DNA, 74 bp, Homo sapiens
ggccatcaaagtgattccccggaatcgtgtgctgggctggtcccccttgacatttgtcttcaccgacagcccag

SEQ ID NO: 61503 - DNA, 83 bp, Homo sapiens
tgtggatgtcggcgaagccgcgggcgagtctttcccagggaactccgatgaagtgttccaacaaaatgagcgagtgaaccaag

SEQ ID NO: 61504 - DNA, 98 bp, Homo sapiens
tcacgtgtcgggtgtcccttctggatggtactgatgttagtgtggacttgccaccaccaaaatgccagaagagatggacaagccactgatcagcctcc

SEQ ID NO: 61505 - DNA, 74 bp, Homo sapiens
ccaggactttctgcttttgtagatcaacctaagcagatcggacagctggcttttaaaggaatgaagagactcaa

SEQ ID NO: 61506 - DNA, 100 bp, Homo sapiens
ggcaacttcgcggtggtcaagcgggccacgcacctcgtcaccaaggccaaggctctgtccagcagtgtaagctccagcaagctgttctccagcagcactg

SEQ ID NO: 61507 - DNA, 98 bp, Homo sapiens
tgagctgtccatgcagccatggaacccgggttacagcagtgagggggccacggctcaagattcgctcagcttattttgagttagtctctgcattgtgc

SEQ ID NO: 61508 - DNA, 74 bp, Homo sapiens
ggatttcaccacaagaagggctgccagccactgtagtctgcagatcaaagctctggcgaaaatccatgcctttg

SEQ ID NO: 61509 - DNA, 100 bp, Homo sapiens
cacattcttctaatccaagcaataacccaagcaaaacttcagatgcaaggcgtggagctatttcctatgacagttctgatcagactgcattatacattcg

SEQ ID NO: 61510 - DNA, 97 bp, Homo sapiens
cggccggaccgagcgcctcgacctcggtctgaggaagctgaatatggtgggcatgatcagatagatttgtatgacgatgtcatatctccatctgcaa

SEQ ID NO: 61511 - DNA, 75 bp, Homo sapiens
gcagcgtctccttcccgttctccaggtatccgtgcggccactccagcacacgcagtatgagcgcttcatcccctc

SEQ ID NO: 61512 - DNA, 50 bp, Homo sapiens
cggggagcggagccatggcctccgggccatcgatgcacccctcggagcta

SEQ ID NO: 61513 - DNA, 73 bp, Homo sapiens
gaagggtaaccgagagatggtatatgactgcactagctcttcctttgatggatctcacattcttgaaggtggc

SEQ ID NO: 61514 - DNA, 71 bp, Homo sapiens
caaggagcggcaggagcaggaagaggccaggaggaagctggaggaggctgcattgaggcgtgagcaaaaga

SEQ ID NO: 61515 - DNA, 97 bp, Homo sapiens
agaacctgaagtagcaaaggcaagaaggcaacgacgttccatctgtggaaggacctaccaaccagggttttgacccaccacatcagagtgacacaag

SEQ ID NO: 61516 - DNA, 75 bp, Homo sapiens
tatagctctgtatgagaaggacaacacctacttagcgggacctggacttcaccatcgacctggacttcaagggcc

SEQ ID NO: 61517 - DNA, 100 bp, Homo sapiens
tgaaaacatcaccaaatgatgaacccacgagcaaaaagggatttctactaggatgccagcccccatcagattgcgggagctgatccggaccatccggaca

SEQ ID NO: 61518 - DNA, 75 bp, Homo sapiens
cggagctgtgcgagagcctcctcacttggatccagagacaatggccccgatgggatggagcccgaaggcgtcatc

SEQ ID NO: 61519 - DNA, 98 bp, Homo sapiens
ttggacagtccaatgtcaacattgcccagcaagtgtgccggtggtggtgtgcacattgagccccggtatagacagttcccccagctgaccagatccca

SEQ ID NO: 61520 - DNA, 100 bp, Homo sapiens
gcttccgccactgtacggagcggagccagaggcctcccgtgcccccaggccacacacgtacttcaccccacacccagatacctggcttggtgactttaaa

SEQ ID NO: 61521 - DNA, 98 bp, Homo sapiens
tggcattacacctaaaggattagaacatacatatgatagttgagaaagacacatattctgatcatgaagaaataaacacaagttaaatatgactaagc

SEQ ID NO: 61522 - DNA, 100 bp, Homo sapiens
acatgcccaagaggggacttgatgttaacaaatgtgagattgccagccaagcaggttgagtatctggtcaatgaaaagcacatctacctgctgccaagtg

SEQ ID NO: 61523 - DNA, 100 bp, Homo sapiens
gccagagcgtggagcgctgcgcggcgcggcggccgggccctcgagacggggacgtgaccgacgcggtggccctgcgggtgcgctcgggaatcctggagca

SEQ ID NO: 61524 - DNA, 90 bp, Homo sapiens
tgaggttgaaaaacctgacttttatcatcatattgataatctcaggagaactctatgcagaaggttccagcaacagatagaaatgcttta

SEQ ID NO: 61525 - DNA, 100 bp, Homo sapiens
aagagcagcgagaatggcgcgggggccgaaggccagagaccaggatttggctacggaggcagagcgtccgactataaatcggctcacaagggattcaagg

SEQ ID NO: 61526 - DNA, 75 bp, Homo sapiens
ttatgacaatgttaaggaatatctggagagtgctgaggaatgtaaacaagtttgctgggccttgcgagacttcac

SEQ ID NO: 61527 - DNA, 75 bp, Homo sapiens
ggaacaagcaactggctattgaaaaggtgtactattgactggaagaaaggaaagaatgttactgtcaaaaccatc

SEQ ID NO: 61528 - DNA, 100 bp, Homo sapiens
ctagcttctaccacgccttctctggagcccagaagatcctaagtgtgaacgtgaagtccccagccctgctgctgagccagttgctgccctacatggagaa

SEQ ID NO: 61529 - DNA, 75 bp, Homo sapiens
ggccatcaagatgatgtggaacatctcgagtgatcagcagctggactgtgccttggacctaatgaggcgcctgcc

SEQ ID NO: 61530 - DNA, 50 bp, Homo sapiens
gggccatcgtccagtgctcgtgctcaatattgcacccactcgtcaggatt

SEQ ID NO: 61531 - DNA, 82 bp, Homo sapiens
cggatgccctgcagtacctgcagaaggtctctggagacatcttcagcagtgatgtcttggcattgcccattttcaagcagga

SEQ ID NO: 61532 - DNA, 76 bp, Homo sapiens
ggacaacctcagaggacaacgaagtgttcgcggttaagaagattgtctaccaaatatagaacagaaaagatatatc

SEQ ID NO: 61533 - DNA, 100 bp, Homo sapiens
tagagagaacatttcatgtagatactccagaggaaagatgagagatgctgacaaacattatataaaaccaattacaaaatgtgaaagtagcacacagacg

SEQ ID NO: 61534 - DNA, 75 bp, Homo sapiens
gaacagttaatcctcaatttaagcctgatctaacccctagaaacagatatctccggagcatttggataatgtgac

SEQ ID NO: 61535 - DNA, 81 bp, Homo sapiens
gatgaccaaagagaagatactcgtattaagcctatttataatctatatgcaatttcgtgccattcaggaattctgagtggg

SEQ ID NO: 61536 - DNA, 71 bp, Homo sapiens
agaactcgtcatgctctttgtagcgtggtgcttctgttgctcacagcacatggcacaagagtgcctgccat

SEQ ID NO: 61537 - DNA, 51 bp, Homo sapiens
cagattgatcgaccagcaacagggacggtcatcatcctgaaccacccgggg

SEQ ID NO: 61538 - DNA, 100 bp, Homo sapiens
atctgaaggcagccctgcgtcaggaattcagcaacctggaagagaaagcatgtacctacatcagatctaaccttgatcccagcaatgtggattccctctt

SEQ ID NO: 61539 - DNA, 101 bp, Homo sapiens
taaccatcttattcagtgtataatggactctcagaataaaggaaagacctcagagtgttctcatattggtaaaggttttcaaggtgtcatgaaaagatggg

SEQ ID NO: 61540 - DNA, 51 bp, Homo sapiens
ctcggaggctgcagcaggaacggaggggcaagattcttgccaagagaatta

SEQ ID NO: 61541 - DNA, 83 bp, Homo sapiens
ggagcgcgggggcggctcctgctcttcctggactcctgagcagaggcagctatcaatggtgtaataccacaggaaaatggcat

SEQ ID NO: 61542 - DNA, 100 bp, Homo sapiens
cttttaaccctggtagaatgaatgtggcaggagacttatttcagaatggagaatttgcaactcatcatagtcctgtgtttgccagctctgagcctgtgcc

SEQ ID NO: 61543 - DNA, 74 bp, Homo sapiens
aatggcctacgtcgtcataccgggcttccttgccctgtccggggggttgtagaaggtgatttagctgccataga

SEQ ID NO: 61544 - DNA, 100 bp, Homo sapiens
caccgggatcgtgaccgagaccgtgaccgagagcgtgaccgagagcgcgaatatcgtcatcgttagaagcttctcacctggggcgggtgggttctgcacc

SEQ ID NO: 61545 - DNA, 75 bp, Homo sapiens
aagtgctgttcacacagtgagatgcattctgccctgccaaggtaaccctgctggggtcagttatcttcacattcc

SEQ ID NO: 61546 - DNA, 89 bp, Homo sapiens
ccaaggactgtctgaacgtgctgaacaagagcaacgaggtaagcactatcctttgtactccctcaacgtggcctccatgtggttgaagc

SEQ ID NO: 61547 - DNA, 78 bp, Homo sapiens
cttgccacagtccacatgtcccggattgcagaggaaagtggtcgcttatggtcagaggagcagcctgctcaccctctc

SEQ ID NO: 61548 - DNA, 109 bp, Homo sapiens
gcagccgatcatggcggatggcccccggtgcaagaggcgcaaacaagccaatcccaggaggaaaaacgcttcagttgtggagggccaaaagggtatcattcttcgagct

SEQ ID NO: 61549 - DNA, 82 bp, Homo sapiens
agaagctaatcttgtacttcaagaggaggaatcacgctcggaaacaatgggattttttatcaagcagaaatgcatcgaacaa

SEQ ID NO: 61550 - DNA, 100 bp, Homo sapiens
ggaagtaattcgaacagaacctataattgttcgactacactgttcacttacacagtatttaaatggcccagtcgtgagatggagaataaagaaactctca

SEQ ID NO: 61551 - DNA, 100 bp, Homo sapiens
tggcagacctctacgagcaggagcagtacagaacattcttgaaggccttcccgctgatgggggagacacaagagcgtgagcgggtcctcacacacttctc

SEQ ID NO: 61552 - DNA, 88 bp, Homo sapiens
acgtctcgaactttctatgtgcagcctcatctagttgaatctgaagatgtggacctgctgatgaagagggctgattgtatctaactta

SEQ ID NO: 61553 - DNA, 102 bp, Homo sapiens
gaccaggcggaggcgtcgcgggagcctttggggcaccacagagatgcggactggctttgggcctgggaggaaagaagagagtggagccccgccagactccaa

SEQ ID NO: 61554 - DNA, 101 bp, Homo sapiens
cggtcggtgccccctgcccgggccctcctgaagaggcggcgctcagacagctgaaccttattcacagtgaaatcagtaatttagccggctttgaggtggag

SEQ ID NO: 61555 - DNA, 100 bp, Homo sapiens
caagggaccttctccggcccctccagctgccccctgtgtggcaaacctttcttgagctcaggtttgtccagaggggttgcgtttatccggtttgacaaac

SEQ ID NO: 61556 - DNA, 74 bp, Homo sapiens
ggatggatcagctgtgaaaaactctttggatgattctgccaaaaaggtgtatgcaacagcgttattgcaacagg

SEQ ID NO: 61557 - DNA, 100 bp, Homo sapiens
ccatgggccggacatctactgggtcagcttcatcctcggcggcggtggccgctagctccaaggaaggaagtgtatctctggggaacgtgctgcctacagc

SEQ ID NO: 61558 - DNA, 100 bp, Homo sapiens
atttgctaagtggaagccagaagaggaggaaaatgttttgccacgtggatgtgaagatttcctctaaaagcttagcagtgtctgcaaaaacgaatctttt

SEQ ID NO: 61559 - DNA, 83 bp, Homo sapiens
gagaaactgaagcgggacgttgagctctttcgacgtgtagcagcagctttgccgggaatggaaagcacacaggacagaagcag

SEQ ID NO: 61560 - DNA, 100 bp, Homo sapiens
tagaagccataagtgaaactagcagtcagataatttttatggtgggacgaggatacctgtctccagatctcagtaaggtacggagtaactgtccaaaagc

SEQ ID NO: 61561 - DNA, 100 bp, Homo sapiens
aggagagcatcttggacttgtccaagtacatcgacaagacgatccgggtaaagttccagggaggccgcgaaggctttgatggattctaatcttccaaggt

SEQ ID NO: 61562 - DNA, 75 bp, Homo sapiens
ggactactgttgaaaaaatttccagtgagatgctcagcctacagaaggagagagagaaatctggaaccagatcag

SEQ ID NO: 61563 - DNA, 100 bp, Homo sapiens
tggaagggaacgggaacggccatgagcactgcagcgattgcgagaatgaggaggacaacagctacaaccgggggaaaggtctgggttcctaagcagaagc

SEQ ID NO: 61564 - DNA, 100 bp, Homo sapiens
aggaggaggccatcatcatgaaggacgtgcccgactggaaggtcatcaagagagagggcacaggtacagagatgcccatgattggggaccgagtctttgt

SEQ ID NO: 61565 - DNA, 83 bp, Homo sapiens
ggaaaaacgagccaaacttcgtgaaattgaggcccatggacagaccttcacgttcccagatctgtttcccgagaaagacgaga

SEQ ID NO: 61566 - DNA, 74 bp, Homo sapiens
atagcccttctgtttgggatacttttattgaaggattgaaagatgttgaaagtgtgatgaacagtgtggtatcc

SEQ ID NO: 61567 - DNA, 83 bp, Homo sapiens
ggccgcccagtgggcctggagcagctgcggcggctcggggtgctctactggaaggagcatcagatccatgctgctgctgactc

SEQ ID NO: 61568 - DNA, 76 bp, Homo sapiens
gaagaggtggagtctgtgcatcgcatcctggctgccatattgcacctggcgatcagtgggtgaccgcggctgcgag

SEQ ID NO: 61569 - DNA, 98 bp, Homo sapiens
tcagggacctgcccgactcagtgagccaatggccaaaggccctgccaagaattcagaaccagaggaggtcatcccatcccggctggatatccgtgtgg

SEQ ID NO: 61570 - DNA, 75 bp, Homo sapiens
cttcaactctgttcacctgcttgcagcaattctgtggtgttcttggtcacacatttatggagtttctgaagggca

SEQ ID NO: 61571 - DNA, 83 bp, Homo sapiens
aagtctgtgtcaaacatccatatcataagtggaattttggagatattcaaaggagttgatccccctcatattgtgtacagcat

SEQ ID NO: 61572 - DNA, 100 bp, Homo sapiens
ggtggggcgcagcttcgagggccgggagctcctggtcatcgagctgtccgacaaccctggcgtccatgagcctgggtctccgtctctccaccgggggctt

SEQ ID NO: 61573 - DNA, 100 bp, Homo sapiens
gaagacacatccatcggtggttccagggagcattgcattcagtttacctcaggcatgcccaagagaatcgtaaatgcaaaaattgcttgccttgacttca

SEQ ID NO: 61574 - DNA, 82 bp, Homo sapiens
ccttttcagggcccccaaactgtcacagaaagagctgttaacacttcctagataacgggcatccgtgggctctgagaagctc

SEQ ID NO: 61575 - DNA, 89 bp, Homo sapiens
tttcagttattacaggaagcaggtatctgcattagttaccatgtatagccatgaagaagatattgatagtgccattgaggtcttcacac

SEQ ID NO: 61576 - DNA, 76 bp, Homo sapiens
tgcacagccacagcgccgagatggagtttggcaatgaggagcagcagctggcgtgggccaagcgggagagcgagaa

SEQ ID NO: 61577 - DNA, 98 bp, Homo sapiens
aggcatcggaggcggctgcgagagtggcagaggagctggcggagagcggcctgcgggcgatcgggccgaggccggatcacctcaacagtcacgtcaga

SEQ ID NO: 61578 - DNA, 100 bp, Homo sapiens
cgtggcggagtgcaacgccgtgcggcaggcgctccaggacctgctcagcgagtacatgaataatgtgatgatcctgcaggaagtgcaggagagacccccg

SEQ ID NO: 61579 - DNA, 100 bp, Homo sapiens
cagaattatgcagttgctcgatgtgcctcctggtgaagacaaggggggatatgtgatcaaagcatcagaagcattagtgccagcagtagttcccaagggc

SEQ ID NO: 61580 - DNA, 73 bp, Homo sapiens
ggatcccagcctcaggcgtgcgcggacggtgtgcgggtatcataactattgtggattcaaaatatggattaaa

SEQ ID NO: 61581 - DNA, 100 bp, Homo sapiens
gatattagtgcaaactccaatggcccaaaacccacagaagttgtattagatgatgacagagaagatctttttgcagctattgacctgaaaagtggttctg

SEQ ID NO: 61582 - DNA, 82 bp, Homo sapiens
cgccgccagcatgttgggcgccccggacgagagctccgtgcgggtggctgtcagggcagcagagaagaaagtggtgaaaatt

SEQ ID NO: 61583 - DNA, 75 bp, Homo sapiens
ggccggcaccgcattgaggcaggtgtgcaggactttccttatcccagttgattgtgcagaatacactgcctgtcg

SEQ ID NO: 61584 - DNA, 98 bp, Homo sapiens
ggggattctcgacctgctaacagaactggaccttttcggtcaaaatgcagatcttcgtgaaaacccttaccggcaagaccatcacccttgaggtggag

SEQ ID NO: 61585 - DNA, 100 bp, Homo sapiens
cattgtaacaggagtgctggacagatgtgcctgtctgtcgcaggctgaggagcgccagatcgcccaggaccacaccgcagcgtaactgcaggcctctcag

SEQ ID NO: 61586 - DNA, 102 bp, Homo sapiens
ctcacagtttgctctgctcttccaacaccagtggaagatgatcacatcccagcattactctactgactggcagagacaggagaggtagatgtccacgcccac

SEQ ID NO: 61587 - DNA, 50 bp, Homo sapiens
ccaaattgtcgccattaagaaagatttgaccctaaagcatggctggagga

SEQ ID NO: 61588 - DNA, 75 bp, Homo sapiens
tgatgatatccttctcaaccttgtgggatgtgaaaactctgttactgaagatatctcccggggccaattcagcat

SEQ ID NO: 61589 - DNA, 114 bp, Homo sapiens
cttatactcctcccagtgacgggtctggagtgcgtgggggaccggctgttggcgggaccaagaatcgccttcagccctgtctggtgcatccttggcagaaagtgaggaggaaaa

SEQ ID NO: 61590 - DNA, 75 bp, Homo sapiens
acaagctgccggggatcctgcgctggtttgaggtggtgcacatgtcgcaggccgaagaacagttgagaattgttg

SEQ ID NO: 61591 - DNA, 100 bp, Homo sapiens
ctgaccaccaatcagatccgtaagccgcggcgagtcctttgcacatgttggcaacacacgcatccgcatcggcctccctgcccacaaagcgccacaacgg

SEQ ID NO: 61592 - DNA, 87 bp, Homo sapiens
ggaacagccacagcagcctcccaaggagtctgcaagttggattcactccttctccagttgcacagccacacccttcagctggcctta

SEQ ID NO: 61593 - DNA, 90 bp, Homo sapiens
ggaggtctctcgcgggacctctctcaccgccaccgtggatggtgatccccactttgttgtggatttccccctgagcagactcaccgtgtg

SEQ ID NO: 61594 - DNA, 100 bp, Homo sapiens
gtaagctaaaaacaaaatcaaccgggaccccagcttttcagaactgcagggaaacagccatcatgagatccagctatgggacacagcaggacaagaacga

SEQ ID NO: 61595 - DNA, 83 bp, Homo sapiens
gaaagcaacgttttgagccacaactgtcacaactccaggctgcccccaagtgtaactccagcactgtgaggtttcagggattg

SEQ ID NO: 61596 - DNA, 75 bp, Homo sapiens
ctggggtgactggacagaccttcaactttgtgctcatcaacagttccagacaaagttgcaaacctggaggcaaac

SEQ ID NO: 61597 - DNA, 48 bp, Homo sapiens
agagagtccaccaacaggctttgtatgggaatttcttagccataggct

SEQ ID NO: 61598 - DNA, 100 bp, Homo sapiens
gagatacctaggccgggagagggagaacacagttggagaaaatcggcagctgagacggccttggccgagtccgaaattgaagttcagaggaagaattgcc

SEQ ID NO: 61599 - DNA, 75 bp, Homo sapiens
agcgggaagaacgggaaaacaacctgcccgaagacaatttgagttctgtgaacctgcatttgttgttggtaattg

SEQ ID NO: 61600 - DNA, 100 bp, Homo sapiens
gcaggaagatggtggccgcaaagaagacggtctagatgttgatggaatatatcgagttagtggcaatctggcaacaatacagaagttaagatttattgtc

SEQ ID NO: 61601 - DNA, 98 bp, Homo sapiens
attggcaccaagccttcccagttatcataaccttgaatggcgactagatgtacaggttttaaatgcacagagagcaggatacaaggcagccatagttc

SEQ ID NO: 61602 - DNA, 96 bp, Homo sapiens
aaatccaaaaggaaaactgatcacatggagagaactgcaagtgtccttcgacgggagagctgagggcagcagtaaaatccaggcccgaatggaaca

SEQ ID NO: 61603 - DNA, 100 bp, Homo sapiens
ctctcagcaggcctttgctggacagatgaagagtgacttgtttctggatgattctaagaggagacctccgagcagctggtggcgctgaagccctggatca

SEQ ID NO: 61604 - DNA, 100 bp, Homo sapiens
gcgccgctgaacggatggctgagggagccccgcggatcgtttaggaaagccggccagggtttgggatgctctgacagacaattacatcccttcactctca

SEQ ID NO: 61605 - DNA, 50 bp, Homo sapiens
tagaggagctgcctattctttataatagggatgtattcttggcctgggta

SEQ ID NO: 61606 - DNA, 75 bp, Homo sapiens
aaccctttctatgtactgcgcctggatgtggccagaataacaagcctttgtattcatttgaagataatgcagact

SEQ ID NO: 61607 - DNA, 78 bp, Homo sapiens
gccaaagcctactacaagtcctcgcacctaaagtcgcacctgcggacgcacacaggaggcatacacggaatacctgag

SEQ ID NO: 61608 - DNA, 100 bp, Homo sapiens
taaacgttctaaaaagaggcgaaaggaagcaagcagttcagaagagccaaggaataaacatgcaatgaacccaaaaggagagacacatctcaattcaaag

SEQ ID NO: 61609 - DNA, 122 bp, Homo sapiens
tgcgacagcaagggggttgtccacgaggaacaaattgtacatttgcccattctcaggaagagcttgaaaagtacgaatgtgaagaatcttttacgaccctaaacgtagacattagaaatcac

SEQ ID NO: 61610 - DNA, 82 bp, Homo sapiens
cggtacatctgaaagccgggaaatggccgactcgcgggccgctgcacccaccgccaaggacaaaaggagcccagcgctacta

SEQ ID NO: 61611 - DNA, 102 bp, Homo sapiens
accaaggctatgacacaaagtcggacatctggtttgagcacaaaatgaacataattagggaaaataaggatctggcatgtttctacacaacaaaacattcat

SEQ ID NO: 61612 - DNA, 49 bp, Homo sapiens
gggcgtactccaaagttgttcaggaacgaacctcaagaaggcatgaagc

SEQ ID NO: 61613 - DNA, 101 bp, Homo sapiens
cgcgaggaggcgcgggaggtgttcgagaacgaccccgagacggttggagcaaaacgtcccactcactggaggcacctgaggacgacgggggctggtcaagt

SEQ ID NO: 61614 - DNA, 98 bp, Homo sapiens
cacttatcaagctgccatacctgagttgagaactccggtgttcccttcccaaagaacttccttcagatctgcaagaagatcctgtgccgccttttccg

SEQ ID NO: 61615 - DNA, 83 bp, Homo sapiens
agcagatgcgcattttgatggatgagagtccggagtgttgtcatgtgaagcctgccatccaggaacctccaatagttattagt

SEQ ID NO: 61616 - DNA, 73 bp, Homo sapiens
tttcatggatgtaaggatgcccaatcccattgttaggcatgcggcaactgctccacctcattcgtgtcctccc

SEQ ID NO: 61617 - DNA, 50 bp, Homo sapiens
agaaggaagtctgccttgccatcagctatcatggtgaacttacttcagat

SEQ ID NO: 61618 - DNA, 100 bp, Homo sapiens
cagatggcagccagtcagtggtggagagtacaggggctcaggtccaggtggcaggggatatgctacccaactcaactgagcgggccatcactattgctgg

SEQ ID NO: 61619 - DNA, 82 bp, Homo sapiens
gaagcagccgatccagcctgcggagcctgtggggcaggtgtgcccccgagagcctgaagacacgcaccttctcccatgccag

SEQ ID NO: 61620 - DNA, 83 bp, Homo sapiens
agctaggacgcggaacatcccagaggccagcatcaacatattaagatgttctacgaggagcatttgcacttggacgatgagat

SEQ ID NO: 61621 - DNA, 127 bp, Homo sapiens
caggagccctggaaaggagaaggaataagacggcaggaggaagagagagagagggcactgaaggagccgtatttgggcactctgtggagacgccgcacatcagagcagagccatcccaagatctcag

SEQ ID NO: 61622 - DNA, 74 bp, Homo sapiens
aatgtccgcatcgcaaccaccgccctggccatctaccatgtgtgatgtcttggcattgcccattttcaagcagg

SEQ ID NO: 61623 - DNA, 90 bp, Homo sapiens
ctactactactactacatggacgtctggggcaaagggaccacggtcaccgtctcctcaggaccaagaatcgccttcagccctgtctggtg

SEQ ID NO: 61624 - DNA, 98 bp, Homo sapiens
cccagacggctcacctgtgcgggatggaacaaaaggccaagaataaggagacgggtgctttggctgcggccaaagtcattgaaaccaagagtgaggag

SEQ ID NO: 61625 - DNA, 100 bp, Homo sapiens
caaagcagcaggaagataccacaatcagaccctccggtggcagatatctacctagcatctcagtacacatcctatgccataagtggtcccacagtacaag

SEQ ID NO: 61626 - DNA, 100 bp, Homo sapiens
ggacaacagtagtagcagcagctgccttcttggacgcctttcagaaagtggctgacatggccaccaacacacgtggacaatgaaggccaaacagctctac

SEQ ID NO: 61627 - DNA, 100 bp, Homo sapiens
gcccggtttggcactgctcctgctggccgcctggacggctcgggcgctggaggtgtaccatagatgaccgggtaacccgggtggcctggctaaaccgcag

SEQ ID NO: 61628 - DNA, 50 bp, Homo sapiens
cccgtgaaggagaagcacgcccggccacggatgataccatcggggacctt

SEQ ID NO: 61629 - DNA, 100 bp, Homo sapiens
tcggagcaacgagcgcagcgccgcaagctgaacagctgggaagagaagaccagcagcgactgcaccgaaaccggaagctggtgctcatggtggacttgga

SEQ ID NO: 61630 - DNA, 50 bp, Homo sapiens
cagtgcatcttttgcacagctaaagacgagaatccaggacttgaatcgta

SEQ ID NO: 61631 - DNA, 82 bp, Homo sapiens
gaagcgcggggcggcggcgaaaggacgggaacccgagcgtcatgttagggtgaagcagaggacctcagtgctgaacatgcta

SEQ ID NO: 61632 - DNA, 73 bp, Homo sapiens
atttgttaaggattccaagtaactcttatttggtgtgtttccattgtagaaaacctggtcatggaattgcaga

SEQ ID NO: 61633 - DNA, 100 bp, Homo sapiens
gtctccggctgcacagcgctcaggttgtttgatgtgtgcacagtgtcacgaacagacagagaaaccaaactaactttagtgtttgaacatgtcgatcaag

SEQ ID NO: 61634 - DNA, 100 bp, Homo sapiens
tggcctcggcgattatggacccggccgaggcggtgctgcaagagaaggcactcaagtttatgattctggacaatcaggaagtccaagccacaatgatcct

SEQ ID NO: 61635 - DNA, 104 bp, Homo sapiens
cgcccagaataaagccaagctcatctctgagacccggaggaggttcgaagctgagtatgtgacagaaaaggcgacggcggattgacagaagtatgattggagag

SEQ ID NO: 61636 - DNA, 100 bp, Homo sapiens
acggcgacgcagcccgcggcagaagtctgaacaagtgtcggaggccgagttactcccacagctgagcagagccccatcccaggctgcagaaagtagtcca

SEQ ID NO: 61637 - DNA, 75 bp, Homo sapiens
aaggagagcaattagtgagacaggggcaagattcttgccaagagaattaatgtgcgtattgagcacattaagcac

SEQ ID NO: 61638 - DNA, 101 bp, Homo sapiens
aaatacctctgacccctccagggcagagacaagaaagcgcaaggaatgtcctgaccaacttggacccaggatgatcctttcaaaaataaagccttgttatt

SEQ ID NO: 61639 - DNA, 99 bp, Homo sapiens
cggcgcgtcgactgcccagagtccgcggccggggcgcgggagacaatgcagatcttcgtgaagactctgactggtaagaccatcaccctcgaggttgag

SEQ ID NO: 61640 - DNA, 78 bp, Homo sapiens
taagagcctggtgagacggagctatcggcgccgcggcaagagccagcaggtggagggagaattcactcagaagcctgg

SEQ ID NO: 61641 - DNA, 75 bp, Homo sapiens
tgggtcctcggtcggtacagtctctgcacctcgcgccccagcagttcctcagtttgaaactacatgtaattacgt

SEQ ID NO: 61642 - DNA, 96 bp, Homo sapiens
ccatcaaccccctggccagctgcaagaccgatgtgctcgtcacggaagaccctgcagatgtcaggtatgaaattgaaggctgtgaagtgatttggg

SEQ ID NO: 61643 - DNA, 100 bp, Homo sapiens
aaagccaaatggagctcagaaagctgtatggacctctgtgtgggttgaagtacaatggcacaatctcggctcacctcgacctctgcttcctgtattcaag

SEQ ID NO: 61644 - DNA, 83 bp, Homo sapiens
gccctctacttttcaagacaccaagtgagaggccaaccagcaattctgtggtgttcttggtcacacatttatggagtttctga

SEQ ID NO: 61645 - DNA, 100 bp, Homo sapiens
gagaaagctgaagacaaacaaaagttagaattcttgaaaaaaagcatgttattgaattatcaacatcactggatctgggattggcacaagactctgctac

SEQ ID NO: 61646 - DNA, 74 bp, Homo sapiens
ccctgggtgtggggaaccgcgctgaggagctggaaactttcccggcagcggaaggagagttttacatggaagtg

SEQ ID NO: 61647 - DNA, 80 bp, Homo sapiens
cagctactccaacccaaacaacaaccaagccagtttaatgacttaattcagtgcacaaatgagatgaatgtgaacatccc

SEQ ID NO: 61648 - DNA, 75 bp, Homo sapiens
attggccacctacagaaacaaaatgtcaacaaattgatggagtggaatgttggctgtccgtgaaaaccgctacat

SEQ ID NO: 61649 - DNA, 82 bp, Homo sapiens
cccgggcctaccccctggactccctggagaagcagatggaaaaggtgctgtcccacaacctgtacacggtcctgcacatccc

SEQ ID NO: 61650 - DNA, 74 bp, Homo sapiens
agattacttccatcagtattgagccaggagttgaggtggtaaattcactccagcagcaacctcaggctgcatcc

SEQ ID NO: 61651 - DNA, 90 bp, Homo sapiens
ttcaatgacctctggagacttgacctaaacagcaaagagtggatccgacctttggcttcaggaggtgctcctgtaccctggccacagccc

SEQ ID NO: 61652 - DNA, 100 bp, Homo sapiens
accccagcatgcccagcactgcggctggtctatgttaacaatgaatgggcaaccagtgttggggaaggagggagctttggagaacttgctttgatttatg

SEQ ID NO: 61653 - DNA, 87 bp, Homo sapiens
gggaatgatattcagtggtgtttttctcaggtgaaaggagcagtagatgatgatgtagcagaagatgcctgaggaagtgcaccatgg

SEQ ID NO: 61654 - DNA, 51 bp, Homo sapiens
catgattccaggtggctcaatggctctgtgtgctccgggatggagcaggtg

SEQ ID NO: 61655 - DNA, 90 bp, Homo sapiens
agaagaaggacttcggaatgcactacaacaggaaaatcatattatagatggagtaaagataacaacgaacttgatgcaagtgataggttt

SEQ ID NO: 61656 - DNA, 98 bp, Homo sapiens
aaagagaagaggcagcagtcagagaaaaccttcatgcctaagcctttccgctgtgcccattgccattactcctgcaacatatctggctctctgaagcg

SEQ ID NO: 61657 - DNA, 99 bp, Homo sapiens
tgaatgtggggctcccagaccttcaaaccaaagggccaatacctggatatggttctgttggttgaatctggcgatgtggaacccatggatatggagggc

SEQ ID NO: 61658 - DNA, 83 bp, Homo sapiens
gggagcccctcggctcacgaggcgcctcaggccctgtcgggctccagctacgagttccagggagctctgtcctggtgaccgtg

SEQ ID NO: 61659 - DNA, 74 bp, Homo sapiens
cagaaccagactctgatagcaatcaggagcgtaaagatgaccgagagagagcggccttcctcacccagtccgtt

SEQ ID NO: 61660 - DNA, 100 bp, Homo sapiens
gttggacctttacctgtggaggcaacactggccaagaagaggaaaggtactccaaagattcaggtttactcacgtcatccagcagagaatggaaagtcaa

SEQ ID NO: 61661 - DNA, 100 bp, Homo sapiens
aaggcagtgagggggaaccaggaataagagctgaggccctgacgtggatgggcaaactgcaggcctgggaaggcagcaagccgggccgtccgtgttccat

SEQ ID NO: 61662 - DNA, 100 bp, Homo sapiens
aaacatttagaacgatgtgaacatcgaatcatggaatcccttgcatggctctcaggttacacatcattttggaatgactgtatatcatctggattacgtg

SEQ ID NO: 61663 - DNA, 82 bp, Homo sapiens
tccggggaggtcacctgacgaggagggaactctaatgatccaggacaaagaagttaccctggagtatgtatcaagcctggat

SEQ ID NO: 61664 - DNA, 74 bp, Homo sapiens
gcacctttcggcttctgagacggcggcagcagcggcattcagagctcatggtccatgtgggtggattgattcag

SEQ ID NO: 61665 - DNA, 74 bp, Homo sapiens
tcttcccacggacgcgcgagacaatgaggagaaccttcaacaactagtactgcttcaaattatccagatgtgtt

SEQ ID NO: 61666 - DNA, 75 bp, Homo sapiens
cccattatttccacctattgagcatgagtacagtaccagaagttatcgttgcacggcactgtggacttcgagtct

SEQ ID NO: 61667 - DNA, 98 bp, Homo sapiens
ctgcaagcaagtcaccaaggaaggctgtgagcagttcatagccgagatgtctggtcttctaagtcagagacatcaaaacctggaccttctggattaca

SEQ ID NO: 61668 - DNA, 75 bp, Homo sapiens
aagaagaatcaatgctttggcccctggtgacatgtacatggtgtaatgacaggaatacaaacaagtgatcctaat

SEQ ID NO: 61669 - DNA, 76 bp, Homo sapiens
gaggaggatggcggagtcggggctcctgacgattgatatgctgctgaaagaatatttactctctggagacatatct

SEQ ID NO: 61670 - DNA, 75 bp, Homo sapiens
gggatgattataggcgtgatgatagagccttgttagatgacttggataaagaactaaacaactacattatgcgat

SEQ ID NO: 61671 - DNA, 99 bp, Homo sapiens
cccaactacacttggcctttcgacgacatcatcgtcttcgcctatgcctgccaggctgctgatgtggacgagtgctcactagcagaaaaaacctgtgtg

SEQ ID NO: 61672 - DNA, 80 bp, Homo sapiens
tgtggtgacttgtggattttcactgtgattccagcagtctcagcagcactgatgctggattgtttaccaatgatgaggga

SEQ ID NO: 61673 - DNA, 75 bp, Homo sapiens
atccaagtggccatcttgtgcagcgggatcccccagaagaggaaataccattttgtactctaaaatcctttccag

SEQ ID NO: 61674 - DNA, 100 bp, Homo sapiens
tcggcttcatgctgtgcagcaagaacccggttcgaacctctgacatgggtggctatgctacttgccatgacttcactgaggctgtcattgctgccttgcc

SEQ ID NO: 61675 - DNA, 83 bp, Homo sapiens
ctccgcgagggcaccatggaggtgaatgcaggtttggtgcacctcgatttggaggaagtagggcagggcccttatctggaaag

SEQ ID NO: 61676 - DNA, 100 bp, Homo sapiens
gtgggatcgatgtttcaatattggaagcgctttgatttacagcagctgcaggtctcctctgagcctccggcctccataagacccaaaacagatgacacct

SEQ ID NO: 61677 - DNA, 75 bp, Homo sapiens
gaaagatatggaattatttcgtgatatccaagaacaagcactgcaggcaacagatcccctaatttgtggctgaaa

SEQ ID NO: 61678 - DNA, 88 bp, Homo sapiens
gcagcggagggacggcagtctcgcgcgctggagaagaagcaggcgctccctccattccagccacagatcacagacgactacggtctgg

SEQ ID NO: 61679 - DNA, 100 bp, Homo sapiens
gttgcggagcctgcatctctgaagctgcctcggtaaaagagaacctgctttcatgcaagatgctgctgcactgcaaacgggatgagcttcggaaactgtg

SEQ ID NO: 61680 - DNA, 100 bp, Homo sapiens
cgtcatcacagtcaactatcgacttggagtactcgcaacagggagctgccaccaccgtgtactgtgctgctgtcccagaactggagggtctgggagggat

SEQ ID NO: 61681 - DNA, 75 bp, Homo sapiens
gctgtgtggacctaattgactgcttgtcccagaagcaatttaaggagcaggtgatcgaggagttctacaaccaga

SEQ ID NO: 61682 - DNA, 82 bp, Homo sapiens
gcagaaataccagtccccagtgagggtgtacaaatacccctttgaattaattatggctgtcaataaagttcttcggaatcat

SEQ ID NO: 61683 - DNA, 74 bp, Homo sapiens
ctctccctcggggcggagaaccaaacgtgaaagaggagccacgagatgaggaggaagaggccaagatgaaggct

SEQ ID NO: 61684 - DNA, 75 bp, Homo sapiens
ccgtgaacggacagtcccccccagtgttttacctcaatcatatatccacacaagtgcttctcttgacatttctcg

SEQ ID NO: 61685 - DNA, 98 bp, Homo sapiens
actgcgggcccgtagctgggctctgcgaggatgaatttcacccattcatcgaggcacttcttccacatgtccgtgcaattgcctatacttggttcaac

SEQ ID NO: 61686 - DNA, 87 bp, Homo sapiens
aacggggcgagcctggaggattgtcactccaacctcttttcgctggattctgaaaccttccttgtatccctcctgagacatctttgc

SEQ ID NO: 61687 - DNA, 75 bp, Homo sapiens
atctatgaagtcatggtcttggccatggacaatggtcaaaaccgctttccgggatgccgctgcaaagcacagtgc

SEQ ID NO: 61688 - DNA, 51 bp, Homo sapiens
gttcttgactccgctgctcgccatggtatgatctcgtgaaatcttgagaga

SEQ ID NO: 61689 - DNA, 50 bp, Homo sapiens
tgacaattcaggagacccagctgggaccgtataatagacgctggccccaa

SEQ ID NO: 61690 - DNA, 90 bp, Homo sapiens
tctgaagcatctgcttacaagcggttaccctggataccccgatgaacaggaaatcaatgcctgaggctgacttcagctcctggacaccct

SEQ ID NO: 61691 - DNA, 99 bp, Homo sapiens
cagtgaagcatttcgcctgaccattacacgcaaagatattcaaactctaaaccatctgaattggctcaatgatgagggtgtcaaattgagaaccaggta

SEQ ID NO: 61692 - DNA, 98 bp, Homo sapiens
ttaccattgtgaaagaaggttgggttcagaagagggctattcctacttgtacggactttgaagtgattcagtttcctctacggatgagagactggctc

SEQ ID NO: 61693 - DNA, 71 bp, Homo sapiens
tgctcccatcattgatgtggtgcgatcgttctaattgctaatccagtatttgcggatagctccaaactggg

SEQ ID NO: 61694 - DNA, 83 bp, Homo sapiens
ctctaatggtccggacttccgtgtgaggccactgtctgcagctcccgtgaagatgtccactccagacccacccctgggcggaa

SEQ ID NO: 61695 - DNA, 90 bp, Homo sapiens
ccggaggaggcattaacgagaccgggaacctctttcaggagctataaaagaaagggaggaatcatgtccacaattgcagctttctatggc

SEQ ID NO: 61696 - DNA, 75 bp, Homo sapiens
gccaaatgtgtctccagcccacacttccagaatggctttgactacttactaacatacagtgacaatccccaaacg

SEQ ID NO: 61697 - DNA, 98 bp, Homo sapiens
ccatggaccatcctgctggtcagcactgcggctgagacagcatcttgctgccacccaggctggagtgcagtggtgcagtcttagcttactgcagcctc

SEQ ID NO: 61698 - DNA, 75 bp, Homo sapiens
ccgagtcagaacccgagtgctgcttggcggcgagtatgaaagttttcaagacgcctacaagtggaaaatgcactc

SEQ ID NO: 61699 - DNA, 100 bp, Homo sapiens
tgcagaggaaagaaaagaatacattcctgattacctgccacccattgtgtcttctcaagaagtatcaccttttgccatgatagcatttctttcattggac

SEQ ID NO: 61700 - DNA, 186 bp, Homo sapiens
gccgacgcactggaggtcatccccatggccctctctgaaaacagtggcatgaatcccatccagactatgaccgaagtccgagccagacaggactggaacactctgcgcatgtcctggagaaaggtgggaaggtcttcagtgccacccttggcctggtggacatcgttaaaggaaccaactcctact

SEQ ID NO: 61701 - DNA, 100 bp, Homo sapiens
cagcgttacagtaatgttccaggactcgctgattcttgagaagagtcaaaactggagctctcaaaaaatggaccatattctgatttgctgtgtttgtctg

SEQ ID NO: 61702 - DNA, 100 bp, Homo sapiens
aggaagaaacctcagacagatcgccggggaggcagcgcgggatcccagcctcaggcgtgcgcggacggtgtgcgggtacttcgtcagtttgtaagacatg

SEQ ID NO: 61703 - DNA, 83 bp, Homo sapiens
gccgggttgagctgcggcacacgtgcgacggccgtgatgaagttcgcttaccggacaatgcagatcttcgtgaagactctgac

SEQ ID NO: 61704 - DNA, 100 bp, Homo sapiens
attacagtgcctacttggaaagaagaagagatagcgacttgccccagtccaaccccagagcggccctttctaaggcacaaaatgatgtgatggaaatgaa

SEQ ID NO: 61705 - DNA, 95 bp, Homo sapiens
caaataaaagagccctgcaatttgaagatacatgagacagcagccaaacccccaggtctctcaggcagctgcagagcttcaacagtactgtatgc

SEQ ID NO: 61706 - DNA, 74 bp, Homo sapiens
gaaaaagcgaaggacttttttcaggcagaaaacaagtctcgtctggacgcacatctccatcccccagcctgact

SEQ ID NO: 61707 - DNA, 75 bp, Homo sapiens
tccgcgtgggtcatcctgggcgccatctctgtgtatgattgataatattgtcctgatgaaggactcagatacagg

SEQ ID NO: 61708 - DNA, 100 bp, Homo sapiens
gaaaaacactagagacagacggctggcagagaatttggatggagagacccggaactgccggaagtgattcagatgttgcagcaccagtttccctcggtcc

SEQ ID NO: 61709 - DNA, 50 bp, Homo sapiens
acatcccgcagtacaagaactggagagattaaggatacttggcatcaagt

SEQ ID NO: 61710 - DNA, 100 bp, Homo sapiens
agcacctcatcccctggatgggggaccacaagatcctcatcgacagggtaaatgggaagttggtagctctgaaggtgatcaggctgcaggaagaagaagg

SEQ ID NO: 61711 - DNA, 75 bp, Homo sapiens
tcggcagcaagaacagagagagaggtggacagatctgagagatactgaggaaaatatatgcagatgatgaacatt

SEQ ID NO: 61712 - DNA, 98 bp, Homo sapiens
gagaaaatggacgctgacatcaatgtcacaaaagcggatgttgaaaaggagtctactcttcatcttgtgttgagacttcgtggtggtgctaagaaaag

SEQ ID NO: 61713 - DNA, 74 bp, Homo sapiens
tgatggccagccatcccttgaaccccctatggctgctgcttttggtcaaaatgcagatcttcgtgaaaaccctt

SEQ ID NO: 61714 - DNA, 98 bp, Homo sapiens
gaaaactaggcccctgcgcggccaacgcccaggatccgcaagctgcgcgcccacgagatagctgatcagcttccttgggttttgctgatgacacaaga

SEQ ID NO: 61715 - DNA, 74 bp, Homo sapiens
gaggcacccggacctcgtcaggccgctgcagatgaccattccagatgtggaagatgtgaaatttgtcatcaatt

SEQ ID NO: 61716 - DNA, 100 bp, Homo sapiens
atctccaggaaggacttcgagaccctctacaatgactgcaccaacgcaaggcctgatcacttgaacggacatatcaagcaggtgcacacttctgagcggc

SEQ ID NO: 61717 - DNA, 75 bp, Homo sapiens
acacgcgcagccccggcctctcggcctctgccggagaaacagggcgtgatggtgggcatgggtcagaaggattcc

SEQ ID NO: 61718 - DNA, 107 bp, Homo sapiens
catccgcgaggcaggagagaggaggaggagtgcggcgcggcggccccgggaccaaggagggagtaccctgacttctaccggaagctctacggcctcttggacccctc

SEQ ID NO: 61719 - DNA, 90 bp, Homo sapiens
tctatcctcctggccgtcctcctcacggtcctcctggctgtgctcatatacacctgatcgaaagctgctttgcgtcgcagttggagcagc

SEQ ID NO: 61720 - DNA, 100 bp, Homo sapiens
ctgttcacatcatcgaggagacccagctcttccaggactttgagccagtccagaccctgctgctgtcttcaaagaagccccagtggacaggaaagctaag

SEQ ID NO: 61721 - DNA, 100 bp, Homo sapiens
aactgtcggaacagaaccaaaggctattggatcagctcagcagggtaccacaagagccaggccatctatctggagtcaaaggacaaccagaaactgagct

SEQ ID NO: 61722 - DNA, 100 bp, Homo sapiens
agatttttttgttctaccaggtgcctaggaatgctaacagtctgggaccacatagaccaccagcggcaacctttggcactgcatccatgagcatgcccac

SEQ ID NO: 61723 - DNA, 80 bp, Homo sapiens
ttcttcctcaactatctcgctgacacgcaggatccatcagttacacaagtgacaagaaatgttccaccaggacttgatga

SEQ ID NO: 61724 - DNA, 96 bp, Homo sapiens
atgggctttgctcagctgtcgggggaagaaacccagtcgtatatatggacaggtccaagcatctcattttgaaggcctaatcacaaccatagttgg

SEQ ID NO: 61725 - DNA, 129 bp, Homo sapiens
cgcgactcgcttctttcggttctacctgggagaatccaccgccatccgccaccatgccgggaccacatacatctttgggaaggggggagcgctcatcacctacacgtggccccccaatgacaggcccag

SEQ ID NO: 61726 - DNA, 83 bp, Homo sapiens
tgtagatggcctccttgttcagttgcctcttccagacacgatgaggcgagtggtacgacagagcaagtttcggcatgtatttg

SEQ ID NO: 61727 - DNA, 88 bp, Homo sapiens
ttgagaccgtgaagagaaagatgcaggaattgaatgatctggcacgggaccctccagcacagtgttcagcaggtcctgttggagatga

SEQ ID NO: 61728 - DNA, 101 bp, Homo sapiens
ttgtcccacaagatggaatttttagtcctacatcaaatctgcttcttttggaccttggtcatctaaagaaggcaattctcaagttcaactactcagtgcag

SEQ ID NO: 61729 - DNA, 75 bp, Homo sapiens
acgtttggtggaccagtgttcccgtggcttgtgttgggaggctatgatggaggtatctttaaaatagcttcctgg

SEQ ID NO: 61730 - DNA, 100 bp, Homo sapiens
caagacctggcatcaggctcctttctgtcaaggtgtgtgcagtggcctcagggatccggaaagtctaggactgaacttctcctaacatccagtaatgggg

SEQ ID NO: 61731 - DNA, 100 bp, Homo sapiens
aggatgaagacctccatgatgagccatctccacttaatgactgtctcacattggccggcaacttgttccaggggaacttatgacattttagtaacaaaag

SEQ ID NO: 61732 - DNA, 129 bp, Homo sapiens
tcctagatttcaaagcgggaggctccttgtgccacattcttgcagctgcctacaaattcaagagtgaccagggatggtggacccaagtggagagattgtggaactggcgaaaggtgcatgtccctggaa

SEQ ID NO: 61733 - DNA, 100 bp, Homo sapiens
tccagttgactctatccaggcagaagagtggacctcattcagtaagttgaaggcctttagggaaaagactgaggtacccagaagaagaaggaattctgcc

SEQ ID NO: 61734 - DNA, 132 bp, Homo sapiens
ctcagaactgttccttcagccaaagaaacaagccgtggaataggtgtatcaagtaatggtgcaaagcctgaaaagcgtaaaagatgtgttgttttcaatcaaggtgaattggatgctatggaataccataca

SEQ ID NO: 61735 - DNA, 100 bp, Homo sapiens
gcggcggcttcttccgtgggacaatatgttcaagagaatggccgaatttgggcctgactccggcgggagagtaaagtctctggctgatgaacttgctctt

SEQ ID NO: 61736 - DNA, 50 bp, Homo sapiens
cgtcaatcagagcgtcctgtgcggtgtgaccaattcagtgaaaggaacga

SEQ ID NO: 61737 - DNA, 100 bp, Homo sapiens
gtgcaagtattttcagcgagggtactgtatttatggagaccgctgcagaattcccttcttcaagttctgctaccagtgtggccgctccatcggggtccgc

SEQ ID NO: 61738 - DNA, 98 bp, Homo sapiens
cggcgcccatccaagacctggaggccctgcgcgcgctcacggcgctcttcaaagagcagcggaaccggtaacggggtggatatgcagcctacagatat

SEQ ID NO: 61739 - DNA, 75 bp, Homo sapiens
ctggaacacacatcagtcacgatgacgtagctttgccaaagacttagaagctaagcagaaaatgagcttaacatc

SEQ ID NO: 61740 - DNA, 75 bp, Homo sapiens
agagaattatgcacctgacagcatctattacctttgccttggaatacaggagcttgtagattttcagtggaaact

SEQ ID NO: 61741 - DNA, 82 bp, Homo sapiens
gtgtatcgcttccgggtgagggctctgaatgatggagggatccacctcagacatcggcagcaagaccagaatggccgagtct

SEQ ID NO: 61742 - DNA, 136 bp, Homo sapiens
gcagaatttcaaaatttctgcattcacggagaatgcaaatatatagagcacctggaagcagtaacatgcaactctttcaccatgcctggatcacttcctttgaatgcagaagcttgctggccaaaagatgtgggaa

SEQ ID NO: 61743 - DNA, 98 bp, Homo sapiens
cgccggccgggggacgagctcggagcagcagccaggtggccctggtacagtggacggaaagtgtgggcttaaccctggtgggccgagaccagtcttcc

SEQ ID NO: 61744 - DNA, 100 bp, Homo sapiens
caagagcgcccacttggaccaccggcacccaggagagggctcccccatgtcagatgggaaccccgagcacccctcagacaaagaaccggcgctgcaaact

SEQ ID NO: 61745 - DNA, 98 bp, Homo sapiens
ttttcgttggtggtgttcagttgtggcggttgctggtcagtaacagccaagatgctgcggaatctgctggagatctattgggaaactgattataacca

SEQ ID NO: 61746 - DNA, 100 bp, Homo sapiens
tcagcacgtgggacagagatcatgacaactatgaagggaactgcgcagaagaagatcagtctggctggtggtttaacagtgctgtgctgtggctttcatt

SEQ ID NO: 61747 - DNA, 99 bp, Homo sapiens
agcaccatcggggagacaagcaaggataaagtaattcctaataaagtggggacatattgtatccagtttggttttatgatggataaaacaaatattctc

SEQ ID NO: 61748 - DNA, 74 bp, Homo sapiens
catgacgtgaggccgtggatgcaggcattaagatcctgaggtgcagaggcaattcccggaggactacagtgacc

SEQ ID NO: 61749 - DNA, 100 bp, Homo sapiens
gcaccataggccgaagcacccgggcggcttcaatgatccatcctaaagaggtgccccctgaggccatcttgctggcagtctaccttgaactgcagaatgg

SEQ ID NO: 61750 - DNA, 100 bp, Homo sapiens
cccagcgccaccatcgcctgtcacctggacccgcgcgtgttcgtggacggcctgtgccgggccgccatggcatcagatgaaggcaaactttttgttggag

SEQ ID NO: 61751 - DNA, 88 bp, Homo sapiens
agagccttgcaaataatagcaagatatgtaccatccaggagcgagaacccgagcagcgccatgagcaacactaccgtcgtccccagca

SEQ ID NO: 61752 - DNA, 100 bp, Homo sapiens
attgctttgaaagcaaggaagtctgcaatcagaaacggagactgttcatctgtttatcccagctctatcagtcggtgccatcatcggcaagcagggccag

SEQ ID NO: 61753 - DNA, 88 bp, Homo sapiens
gggaaagccgtctacactctcacctatgaagttatagaccttactcatgataacaaagatgatcttcaggctgccattgctttgagtc

SEQ ID NO: 61754 - DNA, 100 bp, Homo sapiens
gttggaagcagccgatccagcctgcggagcctgtggggcaggtagatttcgggcagacaacttgaacaagctgaagaacctatgcagcaagacaatcgga

SEQ ID NO: 61755 - DNA, 83 bp, Homo sapiens
tgtcatccagccttagcaaaccagagacaatgcagatcttcgtgaagactctgactggtaagaccatcaccctcgaggttgag

SEQ ID NO: 61756 - DNA, 101 bp, Homo sapiens
gcagttatatcatgaatgtacgcttgtccatgctgacctcagtgagtataacatgctgtggcatgctggaaagatacgggcagctgtatgttctcttcttg

SEQ ID NO: 61757 - DNA, 75 bp, Homo sapiens
atgaccagattgaaagtttaaggcagcgctttggagggggccaggcaaagttggatattgcgtttggaacacacc

SEQ ID NO: 61758 - DNA, 100 bp, Homo sapiens
gggagccgcagatcagtccaagttgacggacaggaggcgaaatgtgcaaatgtttatggcatgtgtttgatgatctcagaggctcagtatccttgtcctg

SEQ ID NO: 61759 - DNA, 89 bp, Homo sapiens
gaaccccgggcagcccgggaaatctccaagtcagaaaggctccgtatgtggatgtgatctgtttgaacagctactactcttggtatcac

SEQ ID NO: 61760 - DNA, 73 bp, Homo sapiens
atcctaccatgtcagccttcccagtagctggaactacaggtcatttcttcagatagctccccagctgtggaaa

SEQ ID NO: 61761 - DNA, 101 bp, Homo sapiens
tgcgctgcgaccccgactacctgcgcggcgcgctcggccgcctcaaggtcgcccaagtggttcatgaaccatcgagctccagccaatggccgctacaagcc

SEQ ID NO: 61762 - DNA, 83 bp, Homo sapiens
aaactggcaacatctggacccatctgcttgggcactgtgttggcactcactgaaaataacttcgatgacaccattgcagaagg

SEQ ID NO: 61763 - DNA, 75 bp, Homo sapiens
cagtttggggcaagtttatacgggcaacaaagaaacccttttccaaagagaaatgaagaagaaaactgtatgtac

SEQ ID NO: 61764 - DNA, 83 bp, Homo sapiens
agaaggtcttccacttgcagtcacgatctcactggcttattcagtcaaagctggcgccttcctctgttgggccagcggtacct

SEQ ID NO: 61765 - DNA, 93 bp, Homo sapiens
cgagtcctagatgtcaataaccagtccttcagagaacaagagttgttgacctcctgtactggagagacattaagaagactggagtggtgtttg

SEQ ID NO: 61766 - DNA, 100 bp, Homo sapiens
ggaagacctgcgtcctttttcgtttttcggatgatgccttcaatactacctttatttccaccataggtaaacctagcctttaagcaacctggaaagaggc

SEQ ID NO: 61767 - DNA, 76 bp, Homo sapiens
ctcgagacgtcttcccgccgtccccggctccaggagaccccacgactttgccttcaaaagaaacagcatttttaaa

SEQ ID NO: 61768 - DNA, 80 bp, Homo sapiens
ctagtccgcttctaccagcgtttcgccctccacgcccttcaggaggagcaggccagactcaagatgaggctgtgggacct

SEQ ID NO: 61769 - DNA, 75 bp, Homo sapiens
aagcagttcaacgagaatgaagccatccaatggatgcaggaaaactgacccaacatgagtgaagtttcctgcaag

SEQ ID NO: 61770 - DNA, 82 bp, Homo sapiens
cttcaaatcgtcaccctcatggtcgctccgattatttactggcaagatgagcaggattaccatgaaagaaaagtccagatgg

SEQ ID NO: 61771 - DNA, 75 bp, Homo sapiens
acgcagctccacagacagccccagctcggtgttcctcagatcaacctctagaatcccgtagactctgcaacaagc

SEQ ID NO: 61772 - DNA, 75 bp, Homo sapiens
aaaatttcctagaagcttgcagaaaaattggtgtacctcagctttgatgaccatgacccagctgtgatccatgag

SEQ ID NO: 61773 - DNA, 100 bp, Homo sapiens
cggcgccgctgcctgccgaggtgcgggagagcctggctgagctggagctggagctgtcggaaggtgtcatggagaaactccagctgggcccagagattct

SEQ ID NO: 61774 - DNA, 74 bp, Homo sapiens
aggccagtgttgtccctactgcatagggtcttactacatattgcaacagaagataatattggaggtgaagaggg

SEQ ID NO: 61775 - DNA, 82 bp, Homo sapiens
cgccccccgggggcgggaagctggttttgcactgattgcaaaaataaagtcctccgagcatacaatatccttattggtgaac

SEQ ID NO: 61776 - DNA, 75 bp, Homo sapiens
cttacctgtcaccttggctctcccacccaatggagatggctctaatgattagaagcccaggacccaggaaggaga

SEQ ID NO: 61777 - DNA, 100 bp, Homo sapiens
ttcagagcagcagaagccggcgtcgtcggatgttgtgttgcccgccaccatgagctacacaggttggatccatgccgtctacacccctgtagactctttg

SEQ ID NO: 61778 - DNA, 99 bp, Homo sapiens
ttatgtccaggattcaaaaagtttaggactgctaaggtgatgatctttgaactggcttaccacgtgcagtcatttctcagcgagcataacaagccccct

SEQ ID NO: 61779 - DNA, 73 bp, Homo sapiens
aggcgctcgggggccgaactggccctggactacctctgcagtggtggggtcagatgctgtggactctgggacc

SEQ ID NO: 61780 - DNA, 98 bp, Homo sapiens
ccattacaagatatacaatctcaatacgaggattctctccaccacatagaatctgcagttttgaagaggcaaagggtttggataggatcaatgagaga

SEQ ID NO: 61781 - DNA, 90 bp, Homo sapiens
ctgctgctcaagcagaccacctccttctatgccctgctcacctgcggtatcatcatcgccagagtcctggtggaggacgatgagatcatg

SEQ ID NO: 61782 - DNA, 90 bp, Homo sapiens
tagcctaacaagatggaagcaggtttaaaattttacataagaagttacctttttcagaaggaggccccaaccctgagcacaacagcaacc

SEQ ID NO: 61783 - DNA, 100 bp, Homo sapiens
actcatcactatgtcagtcatcctcttaaccccaggcagcagtgaggatgccagagttcatgggtttctagaagacaagttttcaactgcagatacaaac

SEQ ID NO: 61784 - DNA, 83 bp, Homo sapiens
aaacagctatatgggaacaacatacagtgacgcttcacagggtgacttaagagattaaaattaatttggttgctgttggttct

SEQ ID NO: 61785 - DNA, 101 bp, Homo sapiens
ggcaacaattttctgtacaccaatggaaagtgcgtcatcctaaggaacatcgacatcgcccaggaccacaccgcagcgtaactgcaggcctctcagcgaaa

SEQ ID NO: 61786 - DNA, 50 bp, Homo sapiens
tttgcgcaacgccaacctcaggcgagatgcctcctccagctggtgatctc

SEQ ID NO: 61787 - DNA, 98 bp, Homo sapiens
agctggtcatcatgatgaaacttagacacattttcatggagtgataatgaaaggagcagcagccgcattaatatcccagagagagcaagtggaccaga

SEQ ID NO: 61788 - DNA, 82 bp, Homo sapiens
tggagaatgatgtcatcatgcatgctctcactaagcagttggaggctgtgtctgggggtgaatctctacattaagaacttgg

SEQ ID NO: 61789 - DNA, 100 bp, Homo sapiens
atctgctctgagggcggatggggctgtggtggaggctgtgcatcgacttgacctcatcctttgcaacaaaactgcttatcaagaagtattcaaaccagaa

SEQ ID NO: 61790 - DNA, 100 bp, Homo sapiens
tccacggccagagccctggatgtcatttggaaaaacactagagacagacggctggcagaaatgctgagccgattatcaggattagcaaatgttgttttgc

SEQ ID NO: 61791 - DNA, 90 bp, Homo sapiens
ctccagtctctaacgttttagaaaatcataacaagcggttctctaccctgtaaaggatactcattaacccacctgaaaacatggaagaaa

SEQ ID NO: 61792 - DNA, 88 bp, Homo sapiens
gccattggcatgttcttcaccgcctggttcttcgtatgaaatccacgatgggatgaacctggagctttattatcaatagatgagaatc

SEQ ID NO: 61793 - DNA, 100 bp, Homo sapiens
ggcggcctgggctgctgactgcgcacttggaatagtagcaggcggcggcggcggaacgccaggcaggtggagtctcactctgtcaccaggctggagtgca

SEQ ID NO: 61794 - DNA, 100 bp, Homo sapiens
ctggcgtccgcgcgctgcacaatggcggctctgaagagttggctgtcgcgcagcgtaacttcattcttcagcatttaaatcaaacggtattgagatggat

SEQ ID NO: 61795 - DNA, 100 bp, Homo sapiens
tctgcagagagtgccatcatgaatccagcctctaaggtgatagctctgaaaggagtggttaatgtgttgctaacaactccactctgggtggtaaacacca

SEQ ID NO: 61796 - DNA, 100 bp, Homo sapiens
cggccgccaccaggtcaccctggaagagtcgctggccgaagcctacttctgcttcctcctggccgctctgggtgtgacagctggtgcccatcgcttgtgg

SEQ ID NO: 61797 - DNA, 82 bp, Homo sapiens
atgtccattctctacttactgatgttcctcctccttcagagatgcccgagtggtaaaagacatggcaacaggaaagtctaag

SEQ ID NO: 61798 - DNA, 83 bp, Homo sapiens
ggacaatggtcaccgtctcttcagaggctgacccgcggctgattgagtccctctcccagatgctgtccatgggcttctctgat

SEQ ID NO: 61799 - DNA, 100 bp, Homo sapiens
ggttccccggcccacagtgggggtgtgcaaacccgagagaactgggaagtgcacggctgtctataacgtgctgccgggtctcaggatggaggagtgaagt

SEQ ID NO: 61800 - DNA, 100 bp, Homo sapiens
cggaaagcatctattgtgaaaaacctaaaggataccttagacacttcgtgtatgatcatgtgttcgctgagaagatcacttccttgcaaggtcagccaag

SEQ ID NO: 61801 - DNA, 75 bp, Homo sapiens
ggcgggcgccgcgggacctctccgggccatggaggagaaatgtctgaagtaagacccctctccagagacatcttg

SEQ ID NO: 61802 - DNA, 97 bp, Homo sapiens
ccagtgctattcctgcttactctaaaagaggggacattgtttttgtatgtttgagacggaggcagatgagaagagggagatggccttggaggaaggg

SEQ ID NO: 61803 - DNA, 95 bp, Homo sapiens
tgaccgagagcgcgaatatcgtcatcgttagaaggcatatctcacagatttcctctgccagtttgctcagcagccctgctacataatgttttcag

SEQ ID NO: 61804 - DNA, 89 bp, Homo sapiens
gctcttgtgaactgcgaacttccccttacctcctctctctggctcgggagctggcatgtttgctgtgactgcaagaaggatttttgctc

SEQ ID NO: 61805 - DNA, 82 bp, Homo sapiens
tcacctacctggatgagaacgtcaagtccagctgctcgcccgtctacattggtggctattatcatggaaaactaatttttcc

SEQ ID NO: 61806 - DNA, 97 bp, Homo sapiens
tcaacaacattatcagatgttcttgacagagtgtcagtttatgatgtctctggagcagcaagtgacagaaattgtgtggttctcagtgatattcaca

SEQ ID NO: 61807 - DNA, 101 bp, Homo sapiens
gaccatcatctgatcagtctagcaggagacagtgtttcacaaaatgattttccttctgaagctcccatctccttgaatctttctcataacatctgcaatcc

SEQ ID NO: 61808 - DNA, 74 bp, Homo sapiens
aatcacttagtctccactttttcctccagggaggacctcattaaggggcggagaaactcatcatccacctgcgg

SEQ ID NO: 61809 - DNA, 100 bp, Homo sapiens
agccgaaaacaccctgcaatctttcagacaggatgtttcaccaaggaaatattgagagagaagtcggccaggtaggatgaacacaggcaatgactgcgca

SEQ ID NO: 61810 - DNA, 48 bp, Homo sapiens
agaagtaaagattttgctgaaaagctcctgggtagaactgcacttcag

SEQ ID NO: 61811 - DNA, 100 bp, Homo sapiens
tcctgtccctgctgctaatggagcaatacgtttccattgtgatcccaccttctgggcaaagaatgtagtcaatttaggatgttatcggcttcaatatggc

SEQ ID NO: 61812 - DNA, 90 bp, Homo sapiens
ggcttcttggcctggttatataatgaaaggtggccaaagcattctggatggcaatcgggggagacagagatgaaattgaaggcctttcat

SEQ ID NO: 61813 - DNA, 76 bp, Homo sapiens
ttgccagatctgcagagatcaaaacaagccctccaggaactcactgttccttgcctgtatctccccttggttcaat

SEQ ID NO: 61814 - DNA, 95 bp, Homo sapiens
ctttggcatcactgcagctagtaatttgccttctggattaaatgcactcggtgatggaaagagagccactattctgaagaacacttggccaaagg

SEQ ID NO: 61815 - DNA, 100 bp, Homo sapiens
gcgatccatgcccatccgaaaggatgatgaagttcagcttccacagcgcggcacctgtacctccggggtggcgctggggttggctccatgaccaagatct

SEQ ID NO: 61816 - DNA, 100 bp, Homo sapiens
gaagaggacgggctttaggctggaagcgccttagaggagccatttttccagtgcttagatgagtacgaagatgatgaagcagggcagaaagagcggaaac

SEQ ID NO: 61817 - DNA, 88 bp, Homo sapiens
tgcaaaggagtccctagagacacctagtaatggcttcctgtgtccagtaccggttagtggtccgggatgtgaacacccttcagatcct

SEQ ID NO: 61818 - DNA, 75 bp, Homo sapiens
ggaagatggcggctgtggtggagaatgtagtgaagctccaccttctgggtgaaccctcagttcaagatccggctg

SEQ ID NO: 61819 - DNA, 100 bp, Homo sapiens
gttccggcccgaggacaccgactaccagcagggggtgatcgctgagctgaaggtgcgcagggacccccaggtgagccccatgcactgcctggacgaggaa

SEQ ID NO: 61820 - DNA, 74 bp, Homo sapiens
cttggttcttccacctctgccactaattcgacatcagtttcatcgaggaaagttggaaatctacatttctgaag

SEQ ID NO: 61821 - DNA, 50 bp, Homo sapiens
ggacgacatgttgcttttcgtggagagttgtggaaagtaaaaatgtagcc

SEQ ID NO: 61822 - DNA, 51 bp, Homo sapiens
ccgcgctgtgtcccgtgttttctgcgtgagatgtcaagccctccaacatcc

SEQ ID NO: 61823 - DNA, 82 bp, Homo sapiens
tgcgctcaatgacagggaccaggggggcggcagcgctggacacccagcctccaggaaatctggcattttttaaagtttgcgc

SEQ ID NO: 61824 - DNA, 90 bp, Homo sapiens
ttcatttacagagcaacttgatgaaggtacacccaatagagaggacactggggttgggaaatcaagcatcgtgtgtcgatttgtccagga

SEQ ID NO: 61825 - DNA, 95 bp, Homo sapiens
ttgatcactgttcctgattgtgacattgtgcaagtgttaaattgtgtgccttttgttcctgaagaaagagcaaggggaagttgattgttggcccc

SEQ ID NO: 61826 - DNA, 97 bp, Homo sapiens
gtcgccgccacctcctctgatctacgaaagtcatgttacccaacaccgggaagaacctctctatccagggcctccgctggtggctacagtggctggg

SEQ ID NO: 61827 - DNA, 87 bp, Homo sapiens
agcccggacggcgcctctcgaacgagtgtgggcgcgaggcagtcgtggcattcctggtggctttccatcagaacaagcagctcatcg

SEQ ID NO: 61828 - DNA, 100 bp, Homo sapiens
gcctccttcaccgccgcagaccccttcaagttctagtcatgtgtggcaaaggagcagagaactttgacaagttcttcacacgaggacagcccgtcttaac

SEQ ID NO: 61829 - DNA, 78 bp, Homo sapiens
cttggattttttccagtctgatccttttgttggcagctacgacttcccggccgtgctgcgctggttcgcggagcgcgt

SEQ ID NO: 61830 - DNA, 80 bp, Homo sapiens
ctcctcggagtccttggggacggagcagcgcgtcgtggggcgagcggcagccctgggcgctgcctatggcacagccaaga

SEQ ID NO: 61831 - DNA, 100 bp, Homo sapiens
taaaaagccgggctctaaaaacttccagaatatctttccaccatcagccactctgcatctttccaacattcctggaagtagtggaggaagtggaagtcga

SEQ ID NO: 61832 - DNA, 100 bp, Homo sapiens
agaagatgggaaactctacctgtgtgtgtcaagccccaccatcaaggacaagccagaacttaaaaggagtctagaaaatccagcagaaaggaaaatggaa

SEQ ID NO: 61833 - DNA, 138 bp, Homo sapiens
tcctgtccttcgagaccatcgacaagatgcgccgcgccagctcctactcctccctcaactccctcatcggttggtcaaagaaaaagtgatgtatgaaaaagaggcaaaacaacaagaagaaaagattgaaaaaatgag

SEQ ID NO: 61834 - DNA, 87 bp, Homo sapiens
attccaagtaactcttatttgagaagaagttcgtgccccaattcctcaaaagcaggaaatactggtggaaccagaaccattatttgg

SEQ ID NO: 61835 - DNA, 100 bp, Homo sapiens
cggggatacagcctggaaggtgcgtgtggggctgggtctcggagtgggagacgtggagtgcagtgagtgttgcagagagctgctggacacagtggataac

SEQ ID NO: 61836 - DNA, 83 bp, Homo sapiens
ccctgtcaagaaggtgccggtggtgcgagtcttcggagcgaccccggcagcaattctgtggtgttcttggtcacacatttatg

SEQ ID NO: 61837 - DNA, 50 bp, Homo sapiens
tgtgcacctgtgccagcatctttctcaggcaccatgagccaggacaccga

SEQ ID NO: 61838 - DNA, 96 bp, Homo sapiens
gcatctgctcaacgacgaggacctgacgcagatcccagatgcagtgactggttactacctgaaccgtgctggctttgaggcctcagacccacgcat

SEQ ID NO: 61839 - DNA, 98 bp, Homo sapiens
aaccctgaagtgcttgatatcacagaggaaactctgcattctcgcttcctggaggatgtcatccaagtctccaagaagttcctgccaggcatggccat

SEQ ID NO: 61840 - DNA, 100 bp, Homo sapiens
ccgcaagtacccgtccatcatagtcaactgcgtggaagagaaggagatggtaacctgcacctcaatgtgacggcggaggccttcagcccctcgctcctgg

SEQ ID NO: 61841 - DNA, 98 bp, Homo sapiens
aagaagcgggcggcgtgcctgtgcttccggagcgagcaggaggacgaggttgcatcataaatacaaaggactgaagttataaaagagaaaagagaagt

SEQ ID NO: 61842 - DNA, 97 bp, Homo sapiens
gcggtggcgagaggtgcggcgaaggaggcagaggcacttatgcttgtcagaaaaatggctacaaacttcctagcacatgagaagatctggttcgaca

SEQ ID NO: 61843 - DNA, 100 bp, Homo sapiens
ccattctgattcttgacaccagatgcaggatggatggcaagcggcggccaggcccagggcccggggtgcccccaaagcgggcccgtgggggcctctggga

SEQ ID NO: 61844 - DNA, 82 bp, Homo sapiens
aaccgagcccctcctcgcagccaaattgtggctactaatttgccccctgaagatcaagatggctctggggatgactctgaca

SEQ ID NO: 61845 - DNA, 100 bp, Homo sapiens
ctcaccgttctgcccccagaactagatacagtctcgctgtgatgcccaggctggagtgcaatggcgtgattttggctcactgcaacctctcccacccagg

SEQ ID NO: 61846 - DNA, 80 bp, Homo sapiens
cactaagccacgatttggatcaccgtggtgtgaataactcttacatacagcgatttcaacactacacttgcacaatgtct

SEQ ID NO: 61847 - DNA, 93 bp, Homo sapiens
ctcccgggcggcgaccggggcctgggtccacgccgagggcaggacgaacttcaccagcctgtgggccaaagctgaccaactcccccaccgtca

SEQ ID NO: 61848 - DNA, 98 bp, Homo sapiens
tcctgcgccggccttgcctcggaacaaactgcctattttattggcatttttaccttcctgtgggtagaacggcccatgacggcaaaaaaaaagcccaa

SEQ ID NO: 61849 - DNA, 75 bp, Homo sapiens
accagctgcttcaaattggacttaagtctgaatttcggcagaatttagatccaaggattaatgtcgtgcttgctg

SEQ ID NO: 61850 - DNA, 50 bp, Homo sapiens
cgtgtcccccctttgggagctgctcaggtcaaagttggaaattgtaatac

SEQ ID NO: 61851 - DNA, 100 bp, Homo sapiens
gtggccgtcctgcggtaccagccaccccctgagtatggggtaacgaggagtggaaacaaaatgtcagtcagtgtgcatgagaaccgcaagtccagggcca

SEQ ID NO: 61852 - DNA, 75 bp, Homo sapiens
tgcagactgaccccaactgggccaacttcctgtatgatgcctccagccaccaggctggagtacagtggcacaatc

SEQ ID NO: 61853 - DNA, 80 bp, Homo sapiens
catcctggatgaagccaccagcgctttggatgccgagagcgagtatctggtgagaagccctaccactgcaactgggacgg

SEQ ID NO: 61854 - DNA, 82 bp, Homo sapiens
atttgcttttctggggagtcctggcggtttttattaaggctgttcatgtgaaaggaaattcacagtatggccaacagcaaga

SEQ ID NO: 61855 - DNA, 83 bp, Homo sapiens
gaagccaccagcgctttggatgccgagagcgagtatctgctctttcaccatgcctggatcacttcctttgaatgcagaagctt

SEQ ID NO: 61856 - DNA, 108 bp, Homo sapiens
cagaccctggagcctcagttggaagcagccgatccagcctgcggagcctgtggggcaggaggagatgaccgccgggttctgctatggcacatggaacaagccatccac

SEQ ID NO: 61857 - DNA, 89 bp, Homo sapiens
cgttcgaggagatcatcctgcagtcctccttgaagctgcccttgaagacttcccgactctacaataacttggagacagagagactggcc

SEQ ID NO: 61858 - DNA, 74 bp, Homo sapiens
ggatactcatcatttgcagcaaactcagcactgctggaagattatatctggatcaccaccagagcaagcccttt

SEQ ID NO: 61859 - DNA, 75 bp, Homo sapiens
gccaaatatgaatttttatttggcagatctgaagggaaagctccagatactactttggcagcatgtaagcagctg

SEQ ID NO: 61860 - DNA, 127 bp, Homo sapiens
ataaagacttcaaatggaaattagatgcaatattgaaaaacgtgcccaatttgttacacatggttcactgagacttttttgacggagagggacaaacaatccaagtggagtggaattcctcagctgc

SEQ ID NO: 61861 - DNA, 90 bp, Homo sapiens
ccatggcattcctcagggaatactttgagaggttggagaagctgagtcagtgctgattctctcaaatagagcttgaaggataaatcttca

SEQ ID NO: 61862 - DNA, 48 bp, Homo sapiens
tttgtgccacagatgggtgatgaggagcctgatgcccaggaccctcga

SEQ ID NO: 61863 - DNA, 75 bp, Homo sapiens
tgaactctgttaatcctcacgaccacctcatgagctttcatccatcccaggggaatcacttacctatgccagcac

SEQ ID NO: 61864 - DNA, 88 bp, Homo sapiens
gcagccggcgggtacctgcggccaattcggtggaacgaggacgcggactgcgaaggcaggggcttggaagaattctgtggaagagtgg

SEQ ID NO: 61865 - DNA, 131 bp, Homo sapiens
tttggattaaggaacagcgagctgtttgacccctttgacctcttcgatgtgcgagactttggaaaggtttggtgcacctcgatttggaggaagtagggcagggcccttatctggaaagaagtttggaaacc

SEQ ID NO: 61866 - DNA, 50 bp, Homo sapiens
ctcggcgcggcttccgcttccggtgtcgtgaaaactacccctaaaagcca

SEQ ID NO: 61867 - DNA, 100 bp, Homo sapiens
tttgccaccattccttcaaatgaggttctcagaggcactgtgactgacttccctggatttgatgagcgggctgatgcagaaactcttcggaaggctatga

SEQ ID NO: 61868 - DNA, 87 bp, Homo sapiens
tttcgccgctggcgtcaggactattttcacgttttaatgccgagaggtctctgtgacgattttgatttggagtccaggaatgagact

SEQ ID NO: 61869 - DNA, 100 bp, Homo sapiens
ggcaagtggtgtgtggcacaaaatgcaacacgagccagcccctgggcaacaaagtggaaatggagattgtgagcatgttggaaaaaaacgcaacacttct

SEQ ID NO: 61870 - DNA, 86 bp, Homo sapiens
aggcggagtggcgcccggcgaggtagcgccaggcgagaaatcaatgtggactgaacataaatcacctgatggaaggacttactact

SEQ ID NO: 61871 - DNA, 100 bp, Homo sapiens
ggacatctgaaagccaggaaatggttataatcaccaacagatgagtgaaggacacaggcagaaatctgaattttataaccgcacagcatctgaatcaaat

SEQ ID NO: 61872 - DNA, 82 bp, Homo sapiens
gccggcccgcgggtctacttcctcaaaggtctcctctgagcctccggcctccataagacccaaaacagatgacacctcttcc

SEQ ID NO: 61873 - DNA, 100 bp, Homo sapiens
cccccgcatcctgtttttcctgagcaaccagagaaaccacttgaccttgcacatatagtaattctgcttggtcagaatcgtgatggcattgtgttcagca

SEQ ID NO: 61874 - DNA, 74 bp, Homo sapiens
agcatacatgacaaaatgtggccacagcttttggctttcaaggatatgctgtattcagctcaggaccaggcacc

SEQ ID NO: 61875 - DNA, 51 bp, Homo sapiens
gagcgggcccagcgtgccaggcatgggagacatccacgacagcgatggcag

SEQ ID NO: 61876 - DNA, 100 bp, Homo sapiens
tttttagagatcgttttgatggatatatcttccttgacagcaaaggtcaagttcccttttcaatactggattcctcaaaagaatgctatttgaatctctt

SEQ ID NO: 61877 - DNA, 103 bp, Homo sapiens
ctcgttgcaacacggactccttggacatgtgtatcagtggcatctgtcagcatacagagctaagctaggaatgctgaacactgtgtcgaagatccgagggcag

SEQ ID NO: 61878 - DNA, 96 bp, Homo sapiens
cagcatgagctccgggtccggatccctgcgaaccaatcagaaacgctccctctacgtcagattcctataggcaatggaaactgatctcaattccca

SEQ ID NO: 61879 - DNA, 51 bp, Homo sapiens
ggggccggggctgcggggcgaggggtgttgggctcttcattggtgtggatc

SEQ ID NO: 61880 - DNA, 103 bp, Homo sapiens
cagcttccccgcggcggcggccggcagcggcgagatcgtccaactgaacgtaggggggaccaggtggatccgatattgaatatctggacttctataagcctgt

SEQ ID NO: 61881 - DNA, 100 bp, Homo sapiens
gtgaagccacacagtgtccagatacgagggcagcctggcatcctcgctacaacctcattgttgtgggccgatacccagatcctaatttcaaaagttgtac

SEQ ID NO: 61882 - DNA, 95 bp, Homo sapiens
ccgcggggcgctgggccgccagcctcggcaccgtcctttcctttctccctcgcgttagacctgcctagagctggaacgttacctccagagcgagc

SEQ ID NO: 61883 - DNA, 100 bp, Homo sapiens
agaatctgggcgtcgctctagagaacctgtggcatattccttggagtatctccaggttgagaattcatgatccgcttggaatgggtttagatctcggaat

SEQ ID NO: 61884 - DNA, 75 bp, Homo sapiens
ccgggtcttggccccgtccttacctcacagcacccagtcagcttgaagagtttcaaatggaccctaccactgaga

SEQ ID NO: 61885 - DNA, 75 bp, Homo sapiens
tggagctttgcagctgacctacatctcgaaggaggcctctctgcgcttcactctgccgggctccggcactgaggg

SEQ ID NO: 61886 - DNA, 95 bp, Homo sapiens
cgagaagcctgaaaagtcgcagcgagctggagccgccggagatatgtcttctccgactactatgaagaagcctgaaaagccattgttcagctctg

SEQ ID NO: 61887 - DNA, 75 bp, Homo sapiens
ccttccggcgcaccgaccagatgtttctcaggaaagccaagcgagagctccagaaagcagtggggcctgagatca

SEQ ID NO: 61888 - DNA, 100 bp, Homo sapiens
gacctcaatgcctttgttcacctgattgaaattggaaatggtcttgtcacctttcaacttcgaggactggaattccgagtggttctcaccattcaggaag

SEQ ID NO: 61889 - DNA, 100 bp, Homo sapiens
agcgctactcagagcagcacaaggaagctgccttcttcaaagagctggcatcctgtcggctcacaagataatagccagctccccagaaatgaacctgccc

SEQ ID NO: 61890 - DNA, 96 bp, Homo sapiens
caggaaggcaagaagcagtataagatgatctgccatgtgttcgagtcggaggattgtactaatggtcacttgatgtgcgctggctgttttatccac

SEQ ID NO: 61891 - DNA, 102 bp, Homo sapiens
ggtgatttctgcatttccaactgagctctctctccagatcggattcaaccgcacatcatgacagatgttccggctacatttacccaggctgagtgtaatggg

SEQ ID NO: 61892 - DNA, 88 bp, Homo sapiens
tgccccaggctgcagagcccatagccaccttctatgggttaaggcaacaggagcaagagcagctctacctgaggtcaggtgtggtgtc

SEQ ID NO: 61893 - DNA, 74 bp, Homo sapiens
gagaggtgctgtgctgtgtatgaagaggcagtgaagactctgccaacaggagagaaggttgcacatgtacatag

SEQ ID NO: 61894 - DNA, 100 bp, Homo sapiens
gaccgtccgccagtcgtcccgaggcttgggcactgtttaaaggaaagttccgagaaggcatcgacaagccggaccctcccacctggaagacgcgcctgcg

SEQ ID NO: 61895 - DNA, 100 bp, Homo sapiens
ccagcccgcctctgtgccactttgcatcccacgccggaggaggcattaacgagaccgggattgcagtaacggatgctccgcagagtgtaccggagaagga

SEQ ID NO: 61896 - DNA, 117 bp, Homo sapiens
agagtgctgagggcacatctgaaaccactggaggttggcgacatggaggtcagaggtctcaaaaagctgtcaaaaagccctatacttaacggagaccagccacagacttccttcctg

SEQ ID NO: 61897 - DNA, 96 bp, Homo sapiens
cgagtccccatgctgacctggagcacctgcgctttcactatccaggcaattgcttgctcaccagtgcatgaaggaggtgcgtcgagctgccttgca

SEQ ID NO: 61898 - DNA, 75 bp, Homo sapiens
caacagtctgcatggaggagtcagagggtttgataaaatccccgtcgaggtcaagatcaagatccaggtctattt

SEQ ID NO: 61899 - DNA, 100 bp, Homo sapiens
cagtgctgctagtaatgaaacctaccaggaacgcttggcacgtctagaaggggataaggagtccctcatattgcaggcatgctgcagacagacctttccg

SEQ ID NO: 61900 - DNA, 75 bp, Homo sapiens
cccagatgcccaccgggatggagaaggaggaggaatcgcaatatgttatgttgcatgacatggtggcaactcata

SEQ ID NO: 61901 - DNA, 100 bp, Homo sapiens
atttgaaccatgtttggattgaagccgcctctgtattacttaccagacctccttgaggcccgccgcccgcgggcccacgagtgcctgggtgaggctctgc

SEQ ID NO: 61902 - DNA, 82 bp, Homo sapiens
gcaccagcacgcctggctaaatgatgtctttctacctaaagatattgacctagacagtgtggatatggatgagacagagagg

SEQ ID NO: 61903 - DNA, 75 bp, Homo sapiens
tcaacgaatcatccacgcacctgcagctctgctgagagagtgcaagccgtgggaccctgtattcagtggatcagc

SEQ ID NO: 61904 - DNA, 50 bp, Homo sapiens
ggaccgcttcccccgagccagcagggctctggaacttcatccattctcta

SEQ ID NO: 61905 - DNA, 75 bp, Homo sapiens
tcaatcagctcatccgtcagctgaactagacccaggtgttatccacgtgaccaaggaagtgaaagaagtggcaac

SEQ ID NO: 61906 - DNA, 75 bp, Homo sapiens
ggagacctcctgggacacttggttgtttacattcagagctctatcaataagaggaatacatattacagtgaattc

SEQ ID NO: 61907 - DNA, 75 bp, Homo sapiens
gagaactacagccacctcgtctcagtggtgtgtggaccagttgacaaagatccaaactgaattacaagagacagt

SEQ ID NO: 61908 - DNA, 75 bp, Homo sapiens
gacgttcatatcattgtcttccacagatgtgtcaccaaaccaggacttgattattcttagaaatgcacttgacct

SEQ ID NO: 61909 - DNA, 90 bp, Homo sapiens
ggcggcgggcatcttcttcgtgaggctgctcttcgagcgctccttccaactcctcagaacctccactctatggatctggacctctggatt

SEQ ID NO: 61910 - DNA, 82 bp, Homo sapiens
ctggacgaccaggtcatcctgctgcgggcagggcaacaggtttgtctatgctggctctaactcgggcgtggtccaggccccg

SEQ ID NO: 61911 - DNA, 85 bp, Homo sapiens
gttattccagtcaaacttggaataattggagtagttaacaggagcctggtggccagactgccctgaagagtcccccaggagtctg

SEQ ID NO: 61912 - DNA, 74 bp, Homo sapiens
ctctgcaggttgcaggaaatgagagattcaggcttcttcaggagaaagcaagtacactggtaccttggactgtg

SEQ ID NO: 61913 - DNA, 82 bp, Homo sapiens
cacgcttcctctccagagtgatcaagtgtgacccgccattttgcagactctgatcacagtgaaacgttccatgggaacttgg

SEQ ID NO: 61914 - DNA, 100 bp, Homo sapiens
ttcaattgaaaagcctttgaaattctttcaaactggagccttattggagcccgagggcaacatccttcgagaccggttcaagagcttccagaggaggaat

SEQ ID NO: 61915 - DNA, 97 bp, Homo sapiens
ggaaaaaagggcgggaagtggcgtggccaagattcgcattgaagatgacgggagctacttccaaattaaccaaatatacgagaacgccatgattgct

SEQ ID NO: 61916 - DNA, 100 bp, Homo sapiens
acggcggccacctgagtggcgcggcggtgtcagcatgcagtgacctggagttcagggaagtggcaaacagattgcgggactggttcaaggcccttcatga

SEQ ID NO: 61917 - DNA, 80 bp, Homo sapiens
cgtagacaccagctccgaaatcaccaccaaggccgacgcctccccccagggtcagctgcgggctcccaggcctaggcgcc

SEQ ID NO: 61918 - DNA, 100 bp, Homo sapiens
cctctctccctgatcttacgtgctcaaggagtaagtccatgagtgatgtcagcgcagaagatgttcaaaacttgcgtcagctgcgttacgaggagatgca

SEQ ID NO: 61919 - DNA, 129 bp, Homo sapiens
acgacgagagcctgcgaaagtacaaggaggccctgctgggccgcgtggccgtttccgcaggacgtggagtcggactctgccaagcagtttttgcaggcagcagaggccatcgatgacataccatttggg

SEQ ID NO: 61920 - DNA, 87 bp, Homo sapiens
tggcgaaggagccggctccaagtaagactttgaccccgacgcaggcttcagtgattgccgcggatcagaagcctgagcactttggct

SEQ ID NO: 61921 - DNA, 100 bp, Homo sapiens
tatatagagatgtgatgttggagaactacagaaacctcgtctccctggagaatagtgacagtggtacaggaaagaaagaaaaagaaaagaaaaacagaaa

SEQ ID NO: 61922 - DNA, 100 bp, Homo sapiens
gcctgacagctctgcggctcgggccctgaggacaagaggaatttccttcgtgaccctccggctggcgtgcaatttaatttcgactttgatcagatgtacc

SEQ ID NO: 61923 - DNA, 119 bp, Homo sapiens
gatgctgatggggctggacctgctggtgttcgcccacgaccatggtgtcatggagaaactccagctgggcccagagattctgcagcgggaaaatccaaggcttatttatgccaggctga

SEQ ID NO: 61924 - DNA, 98 bp, Homo sapiens
gcatgaagtcacagggctactgttttccaatcctcagcagagagagatcatcattgcctgaatttagctttgtgactgcaagagcaagaccagttcct

SEQ ID NO: 61925 - DNA, 98 bp, Homo sapiens
ggagggcagccggggggccgtgaaggcgtcggccggaggacaccccatcgtgcaggtgcctgtgaagcatgtgtaccgtgtgctgcagtgccaggagg

SEQ ID NO: 61926 - DNA, 82 bp, Homo sapiens
ctcgccatgccggcccggcggctgctgctgctgctgacgctgctgctgcccggcctcgggggtcaccgaagtccccacacgc

SEQ ID NO: 61927 - DNA, 75 bp, Homo sapiens
ctgaaccgcgcggccgaaccctccgagatctgttggtaatctgaggatttttattctacgtcgtcttgacagatg

SEQ ID NO: 61928 - DNA, 100 bp, Homo sapiens
cctgccggcagctccaaccatgggaggccgcgtctttctcgagcccacccacctttgggttcctgttggacatcgatggagtgcttgtgcggggccacag

SEQ ID NO: 61929 - DNA, 83 bp, Homo sapiens
gaggaggaggaggattcagggaataggagctggggagcccttctgcgccacaggacaaattattggattccagcacagtgact

SEQ ID NO: 61930 - DNA, 100 bp, Homo sapiens
cacggctccatcatcacccaggcgcggagggaagacgccctggtgctcaccaagcaagaactgcatgaacttgcccccagacaaggtccagctgctgagc

SEQ ID NO: 61931 - DNA, 50 bp, Homo sapiens
cagagcgatcgctattgctgaaatctttcaccaacaatcaccagtggttt

SEQ ID NO: 61932 - DNA, 95 bp, Homo sapiens
gaagatattctgctgtcatggagattctgcccccgtggagactcccagagggaagcccccactcaacacccgctcccaggctccgcttctccgat

SEQ ID NO: 61933 - DNA, 83 bp, Homo sapiens
tccactttcgccagcccgtgccgcgagcgcggcctgcaggagatggactcaccctgtcacccaggttggactgcactggcctc

SEQ ID NO: 61934 - DNA, 50 bp, Homo sapiens
acggaatgcctcttaatgccgtaatgttgcaggtcagtggaatccagttt

SEQ ID NO: 61935 - DNA, 98 bp, Homo sapiens
agaaggtctctggagacatcttcagcaggaggagctcaagcacttcgaagccaaaatcgagaagcacaaccactaccagaagcagctggagattgcgc

SEQ ID NO: 61936 - DNA, 87 bp, Homo sapiens
caatgccattgaattctccaacaatggaggccagtggctggtctcaggttttataggatcacattgacaaaagtaccatggagtttt

SEQ ID NO: 61937 - DNA, 97 bp, Homo sapiens
ccagttcagaagccacccaaaagtaatgttaacaataacccagttgattatggaagattcccacaagagtaccacgtcagagacagcacctcaacct

SEQ ID NO: 61938 - DNA, 75 bp, Homo sapiens
gcggaaggtgatgcccaagatggaccaggtgaaaggtgtagcagtcactcggcctacacccacagcatcgacctt

SEQ ID NO: 61939 - DNA, 90 bp, Homo sapiens
gcgttgctcttgcttttcctcgctggggtgtacggtaaagtcagtgataaatcttttgtttgctgcatatactggagatgtgtctgcact

SEQ ID NO: 61940 - DNA, 82 bp, Homo sapiens
ggtgaagctggagatatttcggctatcaagcccagagagagacgtggagagggacgtcttcctgtatagagcgtacctggcg

SEQ ID NO: 61941 - DNA, 96 bp, Homo sapiens
gcactgagtgaccaagtgtgacaccagctggactcattgtgtccattgctctcttgcagcacctggggctcatggaaacctcctgcaaaagtggaa

SEQ ID NO: 61942 - DNA, 82 bp, Homo sapiens
gatcaccatcagcagagttctctcctgctgctcctcctggcattgaagttgatatcgatgtggagcacggagggaaaagaag

SEQ ID NO: 61943 - DNA, 74 bp, Homo sapiens
catgagctcagttggctgcaggagcagctagcacagaacccagcgggtgccgcttctccacccgaggcttccac

SEQ ID NO: 61944 - DNA, 100 bp, Homo sapiens
cccaagcctttgatgacaaaccatttgggcttcctgtagacacccttttcctgcgcaacagagctgggcctccctttctctaatttcccccttaacatgc

SEQ ID NO: 61945 - DNA, 82 bp, Homo sapiens
cgcggggcgctgggccgccagcctcggcaccgtcctttcctttctccctcgcgttaggcataagatgcacatttttctgctc

SEQ ID NO: 61946 - DNA, 100 bp, Homo sapiens
gagaaaattgaaatcttggctcctccaaatgggtctgttcctggagacagaattacttttgatgctttcccaggcttgtctggagcgggaaagactactg

SEQ ID NO: 61947 - DNA, 79 bp, Homo sapiens
caaataccagctcgacaaagatggggttgtcctctttaagaaggttctggaggacacgtgccggcggcaggacttcaac

SEQ ID NO: 61948 - DNA, 98 bp, Homo sapiens
tgggacaccgcggaagtcgggaaatggccgagacgcatccagagctttcgtgaccggggactgttctgaagcaggcctcgtggatgacgtatccgacc

SEQ ID NO: 61949 - DNA, 83 bp, Homo sapiens
tgacggcggagaggcgccccccgcagcaggccgccatggcatcagatgaaggcaaactttttgttggagggctgagttttgac

SEQ ID NO: 61950 - DNA, 100 bp, Homo sapiens
agatgctatagtctggtatcaaaagaagggggaaatttgcagtggtgagaaaatgtataaagaaagattctgggaaagaatttgctgcaaagttcatgag

SEQ ID NO: 61951 - DNA, 87 bp, Homo sapiens
cggggagtgtcgcagccctgaagttgcctcttctggtgtcaaagcttttggacattcctggggggtttgttaaagttgttaagaata

SEQ ID NO: 61952 - DNA, 90 bp, Homo sapiens
cccggtaccaagaaggggagtgcccgcggcagttcattctgaatctagacttgctcagcctaatcaagttcctgtacaaccagaagcgac

SEQ ID NO: 61953 - DNA, 105 bp, Homo sapiens
accacagcactaaataaaccacactggtcctccccagcccagccttcctcccaactcaggagaacaaggggtctgtggaaatcatgagaaaggacttgaatgacg

SEQ ID NO: 61954 - DNA, 76 bp, Homo sapiens
aggaaacctttccaacacagatgtccaagctgccaaactactccagtggttttggcggcaagtatggcgtgcaggc

SEQ ID NO: 61955 - DNA, 98 bp, Homo sapiens
cccaggacgagctcaaccccatccactgccgcggccgtgggcccgaccgcggggacccggtctgcggaagagggagctgctgaaggagctgctaccag

SEQ ID NO: 61956 - DNA, 82 bp, Homo sapiens
cacggtcctaagagctgggcaccaggaagcgaaggctggacggcggctccctggaccaggtgctgaaagaggccaagaggat

SEQ ID NO: 61957 - DNA, 106 bp, Homo sapiens
ggaaacacctctacctcctgcgaggcctcccgggctccgggaaaactacactggccaggaccaagaatcgccttcagccctgtctggtgcatccttggcagaaagt

SEQ ID NO: 61958 - DNA, 75 bp, Homo sapiens
ggacatcttcatttacagagcaacttgatgaaggtacacccaatagagagggcaggattcatcaaattgaatatg

SEQ ID NO: 61959 - DNA, 80 bp, Homo sapiens
tgaggtgcttgtcggtctggactgatgaaaatccatatggtatcatgatattagctggtttgacatcaagtcatttgtga

SEQ ID NO: 61960 - DNA, 100 bp, Homo sapiens
gcagggcctgcagcgggagctggacggcgagcgcgagcggcgcgagaaatatgggtttagggagtagctgccatttatcccttcccaagagagcagaggc

SEQ ID NO: 61961 - DNA, 82 bp, Homo sapiens
ggaacacttcagtgcattcaagtttttcagaagaagtgaagtcaagatgaagaaccatttgcttttctggggagtcctggcg

SEQ ID NO: 61962 - DNA, 75 bp, Homo sapiens
gggcgggaagatggcggctgggttcaaattgatctggatactattgatgtaagcaacctcaacagacagtttttg

SEQ ID NO: 61963 - DNA, 75 bp, Homo sapiens
ccctgtaaccataatcattccgaagcaagtgccggtggtggtgtgcacattgagccccggtatagacagttcccc

SEQ ID NO: 61964 - DNA, 50 bp, Homo sapiens
tgcggcgcccaccttcgggaggatcagtctgcagatctccaggggagccc

SEQ ID NO: 61965 - DNA, 50 bp, Homo sapiens
aattgtggaaaagtcactctggaagtcctgacggccacgctggatctgga

SEQ ID NO: 61966 - DNA, 80 bp, Homo sapiens
gaaaacttcatagctacagttcgagaagttgtgaacagactcgatcgttagggaatgatggatagctcccagttgatcca

SEQ ID NO: 61967 - DNA, 103 bp, Homo sapiens
cgcctgggccgcgcgctatggcaccttcgcctggcccaccactcccagaggaagcaggtcctggggaccaaggtggacgcggagcgtgacggcgtgaaggtgc

SEQ ID NO: 61968 - DNA, 50 bp, Homo sapiens
gtttccatctcttcagagatgaaccagggaaagcaggcaggatgggagag

SEQ ID NO: 61969 - DNA, 85 bp, Homo sapiens
atagtacctacagcagcactccaggggccgttgacatttagggatgtggtcatagaattctctcaggaggagtggcaatgcctgg

SEQ ID NO: 61970 - DNA, 100 bp, Homo sapiens
cagaaagagtaaaaccttttatgacaggggctgcagaacaaatcaagcacatccttgctaatttcaaaaactaccagaagtggtccaaaggcaaagttcg

SEQ ID NO: 61971 - DNA, 100 bp, Homo sapiens
cctcttagatggcaccgaatacagctgtgacctggagatagtagttcctcagggaagaacagaaaagaggaaagttatatatttgagtcaaagggtgatg

SEQ ID NO: 61972 - DNA, 50 bp, Homo sapiens
tcaggaatctggtctcattggggaaattcaactactgaggaggttacggc

SEQ ID NO: 61973 - DNA, 90 bp, Homo sapiens
cgaggagccctgttccaaagcctcctggaccgtccaagaacttcgagagctgtgcccaggagtgaacaaccagccctacctctgtgagag

SEQ ID NO: 61974 - DNA, 87 bp, Homo sapiens
ctgtgtgtggccagtcatttaccaccaatgggaacatgcacaggtgttggatcccagaacaagaatgattttattcaagatgttgac

SEQ ID NO: 61975 - DNA, 98 bp, Homo sapiens
cgccgcctccgccgctgcctcaggagcggaacaacgtcggcgagcggggtttgtgactggttatatcctctagttcctgatagatctccggttctgaa

SEQ ID NO: 61976 - DNA, 74 bp, Homo sapiens
agggaagtcgcctctgtgctcgtgagtgcatggggtataaggattgacttctaaagactcttggtacgtgagga

SEQ ID NO: 61977 - DNA, 75 bp, Homo sapiens
aagaattcaagaagtgagttgctgtttgctccataggcttacattaggtatgaaattgaaggctgtgaagtgatt

SEQ ID NO: 61978 - DNA, 99 bp, Homo sapiens
gccatggaagaaatgatgatggaaatgaagtataataccaagaaagccccacttgggattgtcaatgaggcagatcagattccgatttgacgggcaacc

SEQ ID NO: 61979 - DNA, 50 bp, Homo sapiens
gcaaccccagatccatttacactttacacagctccacagctgggtcctgc

SEQ ID NO: 61980 - DNA, 82 bp, Homo sapiens
actcctcccagtgacgggtctggagtgcgtgggggaccggctgttggcggactccgtgggaaggaggcttgtttaaactacg

SEQ ID NO: 61981 - DNA, 100 bp, Homo sapiens
cacaggttggttgaggggtttaacaaggctaagaaggtgatgacacaatgactggtgatgggggagaataccttaggcctgaggacctaaaagaactggg

SEQ ID NO: 61982 - DNA, 75 bp, Homo sapiens
cccagttggcccagaggatctcttctaacatccagaagatcacacagtgttgaaatggaagttccagtattaccg

SEQ ID NO: 61983 - DNA, 75 bp, Homo sapiens
agtcaatgctgaggtccactactccctcctgaaagatgccgaatataccaactctcctttggtacctacattctg

SEQ ID NO: 61984 - DNA, 98 bp, Homo sapiens
gtgaatgtattgactggagtgagagaagaaatgctgtggcatctgttgtcgcaggtatattggtgctgccacgggacctggagaaggaggatgccccc

SEQ ID NO: 61985 - DNA, 90 bp, Homo sapiens
ggcgtttgttgcagctacctgcacttctagatgggaccctcacaatgatcccaatgctcagggggatgccttcaagactctcttcgtggc

SEQ ID NO: 61986 - DNA, 50 bp, Homo sapiens
cccgagggtcggctctaccaagtaggagctgagagaagataatatcattt

SEQ ID NO: 61987 - DNA, 120 bp, Homo sapiens
tctcaatatctgtcttcggtggactccttcggcagtccacccaccgccgccgcctcccaggtcaaaatgcagatcttcgtgaaaacccttaccggcaagaccatcacccttgaggtggag

SEQ ID NO: 61988 - DNA, 82 bp, Homo sapiens
cttgattccagggcctgccctgctcctggtggcacccagtggcctgtactactgtggtgcttcatgccccacctccaaccaa

SEQ ID NO: 61989 - DNA, 80 bp, Homo sapiens
gtactcaacatattgactgtatttgggctgcagcacaggttactcactataaacaatatccacccaacacaagcaaagtt

SEQ ID NO: 61990 - DNA, 87 bp, Homo sapiens
ttagaatctcaaacaagacaacttgagctgaaagcgaaaaactatgctgaccagaaatgtcctcatttaaacttttttttaacaact

SEQ ID NO: 61991 - DNA, 75 bp, Homo sapiens
ggccggagtacgtcgttcccgctgcgctaggggaagcgggcagtgtgtgttttaatagaaaagttgtcactttcc

SEQ ID NO: 61992 - DNA, 100 bp, Homo sapiens
aagaatgggattctgaccatctcacatgccacactgagatctgtatctgtggacctgaatgttgatccctcgcttcagattgacatacctgatgcgctca

SEQ ID NO: 61993 - DNA, 83 bp, Homo sapiens
aggaacgaggcaaggagctaaagcagcgtgcgttcagccctgggatgcctggagttactgtaaaagacgtgaaccagcaggag

SEQ ID NO: 61994 - DNA, 100 bp, Homo sapiens
cccaggaaaacaccgagtcggaatactatgccaaagaaatccataaattcgacatgatccaggggctggcggagcacaatattaataaggcagcggaaag

SEQ ID NO: 61995 - DNA, 98 bp, Homo sapiens
tcaaatggatctctttctccacccatcccgagaacagtgggatagtaacatctttttgagggaagaattggcttcctttcttgaaagtggtgaaggta

SEQ ID NO: 61996 - DNA, 97 bp, Homo sapiens
cctaagaaaaagactggaaaggattcttacgtagagaaatcgacactcttaatgaacgtttagctgctgaaggacaagcgattgatggagcagagct

SEQ ID NO: 61997 - DNA, 83 bp, Homo sapiens
cggcggtgtgggcgcgtcaggccgcgacgagggcgctgaggcctctccttccgatgaaaagagaaaggaagaatggactacag

SEQ ID NO: 61998 - DNA, 82 bp, Homo sapiens
ccgcggtccccaccgtgcagcggggcatcatcaagatggaccttgctaagcagtactctgacagactagaatgctgtgaaaa

SEQ ID NO: 61999 - DNA, 83 bp, Homo sapiens
ccccgggcgcatgaagcagagctgcatcatgcggcagtgcatcgcggacaatcatatcctgattcagcccttcctccacaaag

SEQ ID NO: 62000 - DNA, 75 bp, Homo sapiens
gccccccgcccccccagtctcggagatctcagaggcaccgactgggagatatagcccttggcgaggtgcctggct

SEQ ID NO: 62001 - DNA, 100 bp, Homo sapiens
gaaagaaacaagttcttggcaagagaggcatcctccttgaagtatttggctgaggagttttcaatcccattggtaaacctcacaaatgtggatattgtgg

SEQ ID NO: 62002 - DNA, 82 bp, Homo sapiens
gcggtgagcgcccatatgggggttctggagagcggggtgtggggtgacagagttagtccttgataattgcctgtgtgtcaat

SEQ ID NO: 62003 - DNA, 96 bp, Homo sapiens
gcaggcaaggtggatgatgccagagctctcctacaggagtacatcgatgcccaccctgagaccatcgtcctggacccgctccctgccatcagaacc

SEQ ID NO: 62004 - DNA, 110 bp, Homo sapiens
gatgccaataaagagttttctacatatgcagatgctctctggtggggcacaaatagcctaacatggcagaccagagacagcgctcactgtctacctctggggagtcattg

SEQ ID NO: 62005 - DNA, 90 bp, Homo sapiens
ggcgtggccaagattcgcattgaagatgacgggagctacttccaaattaaccaagtggtcttttggtgccttaatgaagagtcggatttt

SEQ ID NO: 62006 - DNA, 50 bp, Homo sapiens
tgtttgtcaccacaaaaaggacagatagaaaatgctgctgaagaacctag

SEQ ID NO: 62007 - DNA, 75 bp, Homo sapiens
ccacgatagtgccaggcctatgttggaggagctctttgttcaatgcctagccacctattcctacagacacggcag

SEQ ID NO: 62008 - DNA, 100 bp, Homo sapiens
tactagcatggtgctcaccaaggtgtctgccagcacagtccccactgacgggagcagcagaaatgagatcctgaggaggatgaaggggctggccctggag

SEQ ID NO: 62009 - DNA, 80 bp, Homo sapiens
cagaagggacctggagcttttccggaaaaaggtgctgtgactatctaagcctccttttagaggactcagaagaagaagaa

SEQ ID NO: 62010 - DNA, 100 bp, Homo sapiens
caaacttggattttttccagtctgatccttttgttggcaataacgaaggaggcccaacttcattcaataaggagcctgacggatttatcccagacggtag

SEQ ID NO: 62011 - DNA, 100 bp, Homo sapiens
cgccaatccaaaccgaaagccagaagtattcaagtcaaacaacgttgaaatggattgggtgttgaagcatactggtccaaatagtcctgacacggccaat

SEQ ID NO: 62012 - DNA, 82 bp, Homo sapiens
cccggcccacagtgggggtgtgcaaacccgagagaactggcttttcctccgcaaccatgtctgacaaacccgatatggctga

SEQ ID NO: 62013 - DNA, 101 bp, Homo sapiens
aggcgatcgacgccaccgactcttgtatcatgagcattggatttgatcacatggaacttgtttcctgtccacgcaatgtgtctgaatgcagccatgactgt

SEQ ID NO: 62014 - DNA, 88 bp, Homo sapiens
ggccaccggaggagcgggagccaagcaggctcttgtcaggatggtgaagctgttcatcggaaacctgccccgggaggctacagagcag

SEQ ID NO: 62015 - DNA, 87 bp, Homo sapiens
tgaggaaaattcagttgttgtgcctcatggagtctccttaaccaaaactgccaagaaaggcttggaattgaaacaaaacctgataga

SEQ ID NO: 62016 - DNA, 100 bp, Homo sapiens
tggattaatcgaattacagctgctagccaggaacatggactgaagtatccagcgctcattgggaatttagttaagaggcttcaggtacaactggccacag

SEQ ID NO: 62017 - DNA, 75 bp, Homo sapiens
cgtggcgctcatcaccggtatcacaggccaggagttcttggtttcgactcagaaaacatatggtgctgacctggc

SEQ ID NO: 62018 - DNA, 83 bp, Homo sapiens
gccctcctgcgatctagaatggaggttgtggctcactggattgctgaaagccgcattgccattgagaagatccgcttgttgac

SEQ ID NO: 62019 - DNA, 50 bp, Homo sapiens
ctagaagagccatccagatatgcatgctgcagacagacctttccgtcctt

SEQ ID NO: 62020 - DNA, 74 bp, Homo sapiens
gcagcggggacttcggcggcggcgcctcaggcacctcggcccggggcggcaccttcctacttctgcccagccac

SEQ ID NO: 62021 - DNA, 98 bp, Homo sapiens
gaacggaccctgccccttgctggccatcctcaatgttttgctcctggcctggaaggttatacagtggttgctggaagaaaaattgtgtgcgctgcagt

SEQ ID NO: 62022 - DNA, 90 bp, Homo sapiens
agtagccgctccgagtggaggcgactgggggctgaagagcgcgccgccctctcgtcccactttccaggcccgatgagagaaagggaaagt

SEQ ID NO: 62023 - DNA, 82 bp, Homo sapiens
caggcgctcgggggccgaactggccctggactacctctgcagatacgggacgtgcaggaaacactgatgccccaggtcctga

SEQ ID NO: 62024 - DNA, 82 bp, Homo sapiens
aaaacagcagatttcccaagagcagcggaaaatgatccagtcacaggcccgatgagagaaagggaaagttaaggatgctgga

SEQ ID NO: 62025 - DNA, 75 bp, Homo sapiens
cagtccacgcaggagatccatgagaagagggagagacaagctcaacgagaagatgccctcgagctcacggagaag

SEQ ID NO: 62026 - DNA, 74 bp, Homo sapiens
gcggccccgcagcagctccaagaaggaaccaagagaccgaggcctttcccaccggtagagaaacttccagacca

SEQ ID NO: 62027 - DNA, 100 bp, Homo sapiens
cgtctaggggagcgaaggctgaggtggcagcggcaggagagtccggccgcgacaggacggacagtatttatgatgaaatggaagagaagtggtcaaaaca

SEQ ID NO: 62028 - DNA, 75 bp, Homo sapiens
agcgcctcgcgctgattctcacgggcccggctgccggcccccgctctgccctgggttcaggataagtttgaggtg

SEQ ID NO: 62029 - DNA, 75 bp, Homo sapiens
aaaattactgatacagagacgatggtcggaatcagatttgaaaatgaaagtactgacttccttttggtagtactg

SEQ ID NO: 62030 - DNA, 100 bp, Homo sapiens
ggggccctttgccactcccttggcaaggagagccgagacctcagttcccggcggctcttgcggggcacaggtagaacaagtcagccagttggctgtgttc

SEQ ID NO: 62031 - DNA, 60 bp, Homo sapiens
gacaacatggaggccgtgaagaccttcaatagcgaggtactccaaagattcaggtttact

SEQ ID NO: 62032 - DNA, 75 bp, Homo sapiens
tccagcaccagcttccagttagtggatatagcacaccatccccagccagctgctctttggcgtaaattgcaatcg

SEQ ID NO: 62033 - DNA, 100 bp, Homo sapiens
acacacactatttcgttatgacagccaaaaagcagagtttgctggacaaaggagtgatactacatgtcaatgagctgaaggagaaaggcaacaaggccct

SEQ ID NO: 62034 - DNA, 98 bp, Homo sapiens
gatggtcaacagaaaagattttgctgtcaaagttgtgtcagtgaatacaaacaggcatcagtgtcattccaggacgtgactgtggaattcagccagga

SEQ ID NO: 62035 - DNA, 83 bp, Homo sapiens
cttcctcctccgctaccaccaccacaccagaaactagcaccagccccaaatttcatcgcaagcaggactggtcagaccatgct

SEQ ID NO: 62036 - DNA, 100 bp, Homo sapiens
acagcaagttcatggtcacggagaaggcagcctacatagtgcctgatttgagatggggtcccaggtctcggtggaatcgggagctctgcacgtggtgatt

SEQ ID NO: 62037 - DNA, 75 bp, Homo sapiens
gttcgagtgttgcagagcctgcggggcaagatctgtccctgtgcgttttattgcgacctgccggtgggaactttg

SEQ ID NO: 62038 - DNA, 100 bp, Homo sapiens
ccgacgctgctgtggtcgctgctgctgctgctcggagtcttcgccgccgccgccgcggccccgccaggacggttcactgggaaacatcgatgacctggcg

SEQ ID NO: 62039 - DNA, 100 bp, Homo sapiens
tgaagatttgacctccatagtttatccagaatggttgcagagtcatcgggaatctctacctccagagcagtttgaaaaatatcaggagcagcacagcgtc

SEQ ID NO: 62040 - DNA, 100 bp, Homo sapiens
aagaaaaccttatcagcactatttgaaacttttatctcatctggcttggcgcctgaggttctcccattagccagatgacgtgtactactgtggaataaag

SEQ ID NO: 62041 - DNA, 98 bp, Homo sapiens
gtatatgtgagagagaatattcagggctcgtgcaatccgcttcagacaggatggtaacgaagccgtcggaggattcttctctcagattgggcagctgt

SEQ ID NO: 62042 - DNA, 83 bp, Homo sapiens
tcagttggaagcagccgatccagcctgcggagcctgtggggcaggtgccatgcctctgcaactcctcctgttgctgatcctac

SEQ ID NO: 62043 - DNA, 90 bp, Homo sapiens
gtcttccacccttggccacctccccaggtgatgcctgaagctcaagggactgtgtccaccctcaggtacacggtcctcttctcgcacggc

SEQ ID NO: 62044 - DNA, 101 bp, Homo sapiens
tgaaggacagcggcaccgccagacggccagaaagttccgccatgagctggggcacggagctgtggcttagaccatgctcagcctccaagcagccttgtcat

SEQ ID NO: 62045 - DNA, 83 bp, Homo sapiens
acatgcccgtcctatatgacagggtttggaaatcccttgtctccaggttgctgggattgacttcttgctcaattgaaacactc

SEQ ID NO: 62046 - DNA, 75 bp, Homo sapiens
acagatgccattcggtttttggttgggacgcagtctcttaaatatgataatcagctgcaagctttcttcctggtg

SEQ ID NO: 62047 - DNA, 99 bp, Homo sapiens
gtggcttgtgatccatgggcgagtctacgatgtcacccgcttcctcaacgaggttggattcagatgccgaggacacagtacttcctcagaaagaagaca

SEQ ID NO: 62048 - DNA, 83 bp, Homo sapiens
ggaccagggaagcagtgaaaatgatgagagatatgggcttaggtcacgagcaaggatttggagccccttgtttaaaatgcaaa

SEQ ID NO: 62049 - DNA, 117 bp, Homo sapiens
gatgcccctcctccaccagaggactgggaggagcatgtcaacaggttagcactctacgtatatgaatatctgctccatgtaggagctcagaaatcagctcaaacatttttatcagag

SEQ ID NO: 62050 - DNA, 100 bp, Homo sapiens
ctggaaatgaaaatggagagttctacctacgaatgatcacggaagccttggcccaaggtgggatgcacataagagcccggttcccgcctaccaccgctgt

SEQ ID NO: 62051 - DNA, 90 bp, Homo sapiens
gcccccagcacgtccaccaacctgaccatgacctttaacaaccagctgaccactgtccacaaccaggtatgtacaagctgtgaggacaac

SEQ ID NO: 62052 - DNA, 100 bp, Homo sapiens
agcgcggcactgttggggggcaggagaaaggtctgtacaacccaccctacagtgctcagtcacaccctgctgcaaagacccaaacctacagacctctttc

SEQ ID NO: 62053 - DNA, 85 bp, Homo sapiens
tagtgtaaattcctggaccccgggccgagatggacgaaaaaatgtggttccttgtgttctctctgtaaatggggacctagaccga

SEQ ID NO: 62054 - DNA, 97 bp, Homo sapiens
tcagattggaccctgtaaaagctgtaaaatgataacagaggtaccatcactgaacgaagttccccttcattatttgaaacctaatagttttgtgaaa

SEQ ID NO: 62055 - DNA, 73 bp, Homo sapiens
ttcacccgcgggggaccctactggcaggaggtcaagatagccttggataccagttactggactttcattaatc

SEQ ID NO: 62056 - DNA, 82 bp, Homo sapiens
ttttgctctgcgacggctgcgatgcgggcaagagtgagccatggagctacgtgtggggaacaagtaccgcctgggacggaag

SEQ ID NO: 62057 - DNA, 96 bp, Homo sapiens
ttagctacagatcagctcttgcttttatgggatagaatcctaggatacaactctctggaaattcttgctggccccaatacctatgaagacgcagcc

SEQ ID NO: 62058 - DNA, 100 bp, Homo sapiens
aaaagatgatagctttagttgctcttttggttgaacagtctcgatcagaaagtaatcctaaattggagagtcagagagtaaataaaaaagtcaataatga

SEQ ID NO: 62059 - DNA, 75 bp, Homo sapiens
agcctcttccagtgggcagggtcagcaggcccaaacccccacagaacaccttccaccatgaccacctcagcaagt

SEQ ID NO: 62060 - DNA, 85 bp, Homo sapiens
gacgggtccctgaggatcccgatgcctacgagccaagatgctcaggatggaaacatgcagctgactgtgctgactgaccgctccc

SEQ ID NO: 62061 - DNA, 74 bp, Homo sapiens
ccagcaagaggatggggccctggatgagggggaagggcctcaaagccagaagcatcctgaggttagcattacac

SEQ ID NO: 62062 - DNA, 98 bp, Homo sapiens
ccaccatgagccatggccatgtccgtgagcgccgaggacgacgactatgaatcggagccggaccaggaatccagcactacgccctgccctctactgac

SEQ ID NO: 62063 - DNA, 50 bp, Homo sapiens
gaggaactcagccctgattgcggaatatgaagacaaggctggaagaccta

SEQ ID NO: 62064 - DNA, 98 bp, Homo sapiens
gaagattcaccaaataagctatatactttggttacctatgtacctgttaccactttcaaaagaacgactgaagctggtgactgttttgggtgctggcc

SEQ ID NO: 62065 - DNA, 75 bp, Homo sapiens
tgagcagaggacgacatgttgcttttcgtggagaacccagcttagactagaaagtctagaagacacacacataat

SEQ ID NO: 62066 - DNA, 50 bp, Homo sapiens
gccggcgcttacctctgctacaggtttcttgcagaacataaattattagg

SEQ ID NO: 62067 - DNA, 74 bp, Homo sapiens
ggctcccctctcaggacaacccagatgtgcaacaaagtgcgatggcccagtactacggggagattggcatcggg

SEQ ID NO: 62068 - DNA, 90 bp, Homo sapiens
ggcctgggagcttgctgcagcttcaggtctgcagcggcggcgcctgattcccgccccactgcccgacaccactgccctgggccgtaagcc

SEQ ID NO: 62069 - DNA, 100 bp, Homo sapiens
gaagacaaggccttccagtttggaagtggaccacttggataagaagggccagtgtgcgcttgtccacagtgccctacggggccacggtgacattctccag

SEQ ID NO: 62070 - DNA, 74 bp, Homo sapiens
ctgaactctttgaaggaaaagaatatgatgggcccaaagtggacatctggtgccctcttccaggacaaacttgg

SEQ ID NO: 62071 - DNA, 80 bp, Homo sapiens
ggtctggagtgcgtgggggaccggctgttggcgggctggacggcagtctggaaacgaccaatgagatcttggactctgcc

SEQ ID NO: 62072 - DNA, 83 bp, Homo sapiens
gtgtacaaatacccctttgaattaattatggctgaagatgagaatgtgcctactgctcctgatcctccaagtcaacatttacg

SEQ ID NO: 62073 - DNA, 74 bp, Homo sapiens
ctgccctacggcttctccgccatgcaaggctggcgcgtctccatggaggtgttggtgtctgtccagtcccttat

SEQ ID NO: 62074 - DNA, 80 bp, Homo sapiens
agtagacattggtggaaacatttaacaatgcagatcttcgtgaagactctgactggtaagaccatcaccctcgaggttga

SEQ ID NO: 62075 - DNA, 75 bp, Homo sapiens
cttaggagcagcttggcctaaagggtttattacccagaactctttgtctgggtcagtcaagaaccatttccaaac

SEQ ID NO: 62076 - DNA, 50 bp, Homo sapiens
ggcccaggcgcacacggaagtggttccattacagcttatagaaagtgttg

SEQ ID NO: 62077 - DNA, 51 bp, Homo sapiens
caacattcagacccatttccagtcatgaggtgtggatgaatggaacatagc

SEQ ID NO: 62078 - DNA, 96 bp, Homo sapiens
ggtgaacatttgtagcattgatttcccggatctggtaacatggcaaaagattggtagacggaggagaagtccatccccaccacccaccagaaggcg

SEQ ID NO: 62079 - DNA, 74 bp, Homo sapiens
agcgccaccctgtggacatcagcgccatccccgagcagcggtggaagctggtcctgaacgaggctgtgggggcc

SEQ ID NO: 62080 - DNA, 130 bp, Homo sapiens
cggagcttatactcctcccagtgacgggtctggagtgcgtgggggaccggctgttggcgggtttggtgcacctcgatttggaggaagtagggcagggcccttatctggaaagaagtttggaaaccctggg

SEQ ID NO: 62081 - DNA, 103 bp, Homo sapiens
tgctgcgccacgcgcgcctcgggcctgggcgcagaggatcggccgggcgcggcgggaaggagccctcctctgatgcacaggataagcagtttggtacttggag

SEQ ID NO: 62082 - DNA, 90 bp, Homo sapiens
cgcctggtctctttcctgtggccagcccaggtgctggagaatctggtaaaagcaccattgtgaagcagatgaggatcctgcatgttaatg

SEQ ID NO: 62083 - DNA, 95 bp, Homo sapiens
tgtgcggcacatcgcagacctgtcaccaggagacaaggacgagcctgtggagtgggagacacctgacctttctcaagctgagattgagcagaaga

SEQ ID NO: 62084 - DNA, 83 bp, Homo sapiens
gagtcagctcccctttctcgcccagcgcccccaggccgctcccggggctcacgaactgtcagaccttcagcagcctcagctgc

SEQ ID NO: 62085 - DNA, 83 bp, Homo sapiens
caagcccagacaatgccggtggaggaatttgtggctggctggatctctgagttactgaaagctctcgaaattacggttacaat

SEQ ID NO: 62086 - DNA, 100 bp, Homo sapiens
ccagactgccctccacttgtgcagaagggtgaatgccatgtcaactttgttcggaagctgttcaacggttttgtgtatagcatttgaggttcttcagggc

SEQ ID NO: 62087 - DNA, 75 bp, Homo sapiens
ggttattcttaatcctgtaaatacgaatctttccaaaggagatgcccggggcagataagagtagccaagaggcgg

SEQ ID NO: 62088 - DNA, 100 bp, Homo sapiens
tggaaacttggtggaagccactggtcaaccctcagctccccatgagaaacccatctgctggcaaggctaagattagaacagctcataggagagtcatgat

SEQ ID NO: 62089 - DNA, 74 bp, Homo sapiens
gacaacatggaggccgtgaagaccttcaatagcgagattaaggcagttgacaatggtcgccctcaaaagtcatc

SEQ ID NO: 62090 - DNA, 75 bp, Homo sapiens
agttatctatcacttccaaagttcaggagcttcagaacttgtattggcatactccacacatctgtaccattcttg

SEQ ID NO: 62091 - DNA, 100 bp, Homo sapiens
tggaaccttcttttgtttgtcagcagccaaggtgtttccaggaagttcagagagaacagatatctctgaaagtgtgaacttcgatgaggagactgatgga

SEQ ID NO: 62092 - DNA, 75 bp, Homo sapiens
tttggagttcttacaacatggcagacattgacaatggatgattcaacagccacacaaagcagcaacattttttgg

SEQ ID NO: 62093 - DNA, 82 bp, Homo sapiens
atcagctccaggcctgggaaagtgaagaaatgcactcggtgatggaaagagagccactattctgaagaacacttggccaaag

SEQ ID NO: 62094 - DNA, 74 bp, Homo sapiens
ccgcggcggcagcagcagtgagaggcgaagttcttctgtgttgtgcaggcggagctgaaccattgcaacagcat

SEQ ID NO: 62095 - DNA, 87 bp, Homo sapiens
ctgttagtagcaaacctactactcctactataggtatggagagtcggcttgactacactgtgtggagcaagttttaaagaagcaaag

SEQ ID NO: 62096 - DNA, 75 bp, Homo sapiens
gccccagagccactgagcactggacagtcagagaggccaaacagatattgatgatgttaagaagttcaaaccggg

SEQ ID NO: 62097 - DNA, 89 bp, Homo sapiens
ggaaaatatggaaacaggaacaggactgactccagtgatgacgcaggccttaaggagaaagtttcagatttgaaaaagggcgcatctat

SEQ ID NO: 62098 - DNA, 100 bp, Homo sapiens
gggttctagaaatccaggcaggcatctatcttgaagctactctccagagagaccggatcttcaaacattttaccaggaagcgccaaagggctatgcgaag

SEQ ID NO: 62099 - DNA, 100 bp, Homo sapiens
cggccgccctccccagcccaccagctggccactaaacgcccgtggttgccaagctcgcagacctctgaagagagtgccattgagacgggttccagcagtt

SEQ ID NO: 62100 - DNA, 100 bp, Homo sapiens
cttcaccaacgctcgcgactgcttcctccacctgccgcggcgtctcgtggcccagctgcatctgctgcagatagctgatcagcttccttgggttttgctg

SEQ ID NO: 62101 - DNA, 76 bp, Homo sapiens
ggttcgagatggagcgggcgcactgggaggtggaacgggccgaactgcaggttaatgttcgtgaagaaattgaaga

SEQ ID NO: 62102 - DNA, 100 bp, Homo sapiens
atcagctgaccatatacttaatgactcctaaaatctcgtggacttctaaggttatcaatactctggctgaccatcatcatcgtgggactgactttggtgg

SEQ ID NO: 62103 - DNA, 75 bp, Homo sapiens
gaagcaatttacgatgacgttccaagggaaaactcagactctgaaccagatgaaaataaacccatctggatgcat

SEQ ID NO: 62104 - DNA, 90 bp, Homo sapiens
tggcttcacaattgaagatgaagaactttctcatttgggatcagcgatatttcctgaggaaatgtttcaacgtgcgcaagcgttgcggcg

SEQ ID NO: 62105 - DNA, 50 bp, Homo sapiens
acaccggagacagatgtcagtactgacccaggaccacccccaccttctcc

SEQ ID NO: 62106 - DNA, 75 bp, Homo sapiens
ctccgcccggacccccggccccgccgtgggaccggccagccttgcagctgtatgatccaggagctcgcttccgag

SEQ ID NO: 62107 - DNA, 75 bp, Homo sapiens
gctgccgcgactgggaggagcgccggaacgccgaggcccaggttatcaatactctggctgaccatcatcatcgtg

SEQ ID NO: 62108 - DNA, 83 bp, Homo sapiens
ctttaccccagaacctcctttacacagtatcagaaccttcatcgctgtggagaacattgacagctactgcgtgctcatctcct

SEQ ID NO: 62109 - DNA, 51 bp, Homo sapiens
ctgctgcactttgggttcaaggcgacagtattaataggggaccctattacc

SEQ ID NO: 62110 - DNA, 97 bp, Homo sapiens
tacttctggccactgggcgagcgtctggcaggactggaacttccttttatgatgatgccccaccctctaattcctgtcagcctacctccagcatctg

SEQ ID NO: 62111 - DNA, 50 bp, Homo sapiens
acccactggaagcctagaaatgtgtaaagaactggccaagtccaaagccg

SEQ ID NO: 62112 - DNA, 83 bp, Homo sapiens
cagagaccagttttcaccagatggtttcagaaaagggatccctaacatcagaagagtttgctaagcttgtgggaatgtctgtc

SEQ ID NO: 62113 - DNA, 139 bp, Homo sapiens
ctcggagctttcgtcacctgtccttctacattttcgatagagacgttttccggagggattccatcataggtattgcattcctgctgaggaggagaacaagctggaagatgtggtccacaccctgctgcaagccaatggc

SEQ ID NO: 62114 - DNA, 113 bp, Homo sapiens
cgagtatgcttcgtttttcgccgtcatgggcgcctcggccgccatggtcttcagcgcgtccgtctccaagagagtatgaagagagtgcgtctgtagggcagggaagatggcgg

SEQ ID NO: 62115 - DNA, 90 bp, Homo sapiens
cgatggcctagcacgtggaattcgcgaagctgccaaagccttagacaagttgagcaatgtttaaagcgtttgaaaaacatgaatttggag

SEQ ID NO: 62116 - DNA, 97 bp, Homo sapiens
tggctttgacgccgagagctacacgttcacggtgccccggcgccacctggagagaggccgcgtcctgggcagaggtatagccttcacagacctcccg

SEQ ID NO: 62117 - DNA, 74 bp, Homo sapiens
agacataaactcaaccccttctcttccaaaagtggaatgcagtagccctctgggcctgggatattgtggttgat

SEQ ID NO: 62118 - DNA, 129 bp, Homo sapiens
ctgcgcggaagtcggccatggactggaaagaagttcttcgtcggcgcctagcgacgcccaacacctgtccaaacagacaaattattggattccagcacagtgactcacttattcaagataactgaaaac

SEQ ID NO: 62119 - DNA, 100 bp, Homo sapiens
gcgaaggatccccaacggggaggccaacgtgaagaagttttgtagtgcatccctgagcatgagcacagaatgaagcggcgtttggatgaccaggagtcac

SEQ ID NO: 62120 - DNA, 50 bp, Homo sapiens
cgaccggagcagagagctggcgagcaagtattaaaggtggaagaaggtcc

SEQ ID NO: 62121 - DNA, 100 bp, Homo sapiens
tgtctttcaatgaacactttaatattttccttactgctaaggatcccaaagaatatcttccatttcttaatacacttaagaaaatggaaactaattatca

SEQ ID NO: 62122 - DNA, 90 bp, Homo sapiens
gatgaaggaaatgctaaagcgattccaaggtcgttactctctgacctatatctacactgggctgtccaagcatgttgaagacgtccccgc

SEQ ID NO: 62123 - DNA, 100 bp, Homo sapiens
accgtcctaacgccgggccggcagcaaggagaaagaccacagcaagattctttcattcgtctcctcctagcctgggggaccaggctcgaactgaccctgg

SEQ ID NO: 62124 - DNA, 97 bp, Homo sapiens
tgacccgctaccggaaggccatcgccaaggcctcaggagtgcaagtagctgatgaagtatgtcgcattttttatgacatgaaagttcgtaaatgctc

SEQ ID NO: 62125 - DNA, 96 bp, Homo sapiens
cagaaacacagcctgatgaggaggaagaagaagaagaagaaaaagtttctcaaccagaggtcctatggcagcgtatacaaagctattcataaagag

SEQ ID NO: 62126 - DNA, 83 bp, Homo sapiens
ctcaccttagccccgcgcccgaggattttttatcaagcagaaatgcatcgaacaacgagaatcaagatcactgagctaaatcc

SEQ ID NO: 62127 - DNA, 100 bp, Homo sapiens
ttgagtccacaggcaaggcccccgctgtgattggaaccaggctgcatgctgctgtggcaattgcttgtgttgtaatggccttttacgtcctgtttataaa

SEQ ID NO: 62128 - DNA, 100 bp, Homo sapiens
ggctcgctctctcctggggacacagaggtcggcaggcagcacacagagggacctacgggcagacatcctgagctattatctcctctgcaaccgggccgtc

SEQ ID NO: 62129 - DNA, 75 bp, Homo sapiens
ccttcgtacccacagtgcttcatgagagggatttcccagatgacccaggcatgcagtgggacacagagcacgtgg

SEQ ID NO: 62130 - DNA, 83 bp, Homo sapiens
gctagcatcactcctgtccttcacttgcacctcctgcgccgccgccccccatccaaggatatgccttcaagcctccacctaga

SEQ ID NO: 62131 - DNA, 100 bp, Homo sapiens
gagttcaaagattctttgtagcagacactgcaaatgaagctctcgaggctgctaagagactaagagaccaagacacattccaccccagtggggggtccca

SEQ ID NO: 62132 - DNA, 96 bp, Homo sapiens
gagtctccgcgtcccgctcgctgggagagaggtacctctccttttccctctccctttccctaaggttgcacgttttcaaaaaatacctaatggtga

SEQ ID NO: 62133 - DNA, 74 bp, Homo sapiens
ctgcagtctggaactcctgggctcaaaccatcctcccacctcagccttactgaccccaattcttggcattcaga

SEQ ID NO: 62134 - DNA, 78 bp, Homo sapiens
gggagcagcagcaagaagtggtttcaaggaaccgaaatgagcagatgcagcagatccgcatgtcccttcgcgggaagg

SEQ ID NO: 62135 - DNA, 100 bp, Homo sapiens
aggacttcatgaggcgcattgagtgctatgagaactcctacgagtcgctagatgaggacctggataggctgccggagcagcagtcagaacaactgcggtg

SEQ ID NO: 62136 - DNA, 75 bp, Homo sapiens
cctacgaggaggtgcgcgagaagtacaaaggttggacacgagttgccgctggttgtccaaatcaacaaccaggtc

SEQ ID NO: 62137 - DNA, 100 bp, Homo sapiens
aggcaccgtggtccgactcaacaaggcagcattgagctacggtgcgggcggcacccagagactcacccgtgctgttgggaagtcgctggcgatggagatg

SEQ ID NO: 62138 - DNA, 82 bp, Homo sapiens
gcaaccattgacgccatgtcgggttattcgagtgaccgagaccgcggccgggaccgagggagcttactccacgggaacagcc

SEQ ID NO: 62139 - DNA, 80 bp, Homo sapiens
gaccgacccctctgctcgcggccgcgcctttgagagctcttcagtatccccatcagccagtttccgaggtgctgagaagc

SEQ ID NO: 62140 - DNA, 90 bp, Homo sapiens
gaacttcggagagctcagattagacaagttggatggcttgaggactggtactaaaaggaaacgtgactgggaggccattgccagcagaat

SEQ ID NO: 62141 - DNA, 75 bp, Homo sapiens
ccgatccagcctgcggagcctgtggggcaggtagttcctgaaatgactgagatattgaagaaaaaatgaatcagg

SEQ ID NO: 62142 - DNA, 100 bp, Homo sapiens
ccgttgtgtgaaaattgcctctcccgccccaaagctttgcctcctcaccatgaacggcccaccaagaaaacacattgtggagcgctatacagagttttat

SEQ ID NO: 62143 - DNA, 100 bp, Homo sapiens
aggtccgggagctggccagcgccgtccggaacgccaaatacttggtcgtctacacaggcgcgggaatcagcacggttttgaaaaaccatcagcaatccag

SEQ ID NO: 62144 - DNA, 75 bp, Homo sapiens
cacgactgcctgggacctggccaagggctccacacaccaagaccaagtgtctgagcagcaggagagagccttcac

SEQ ID NO: 62145 - DNA, 74 bp, Homo sapiens
tgttccagtatttaaagctattcaaccagatgagtccaatgtgctgattgctgctaacagtcagggtacaatta

SEQ ID NO: 62146 - DNA, 89 bp, Homo sapiens
ccacagctaagacgccaggactccctggaagcctagaaatgactgagcaagtggagtagcagaaccaggagcctcttccatacatgagg

SEQ ID NO: 62147 - DNA, 98 bp, Homo sapiens
acagcttggtgaagagttactagctcaagagaagattacagtatgtggggacacccatggccagttctatgacctcctcaacatattcgagctcaacg

SEQ ID NO: 62148 - DNA, 83 bp, Homo sapiens
ccgagtcctctccagctcagagacccctgccaggaccctgcccttcaccacaggtctatcagccacagtctctgcaagtttcc

SEQ ID NO: 62149 - DNA, 80 bp, Homo sapiens
ctgaagacgtctgcgtgagaatagagaccaccgagtaatagctcttcaagtctgcaataaaaaatggcctccaacaaaac

SEQ ID NO: 62150 - DNA, 74 bp, Homo sapiens
gccaggaggaccatgtgaatggggccagagggctcccgggctgggcaggatatgctgcaggctgctagtcatta

SEQ ID NO: 62151 - DNA, 90 bp, Homo sapiens
tgcagccctatgagcatctcatctgcggcaagaacgccaatgtgagattacgtactataggtgaacttttagctcctgcagctccttttg

SEQ ID NO: 62152 - DNA, 100 bp, Homo sapiens
tatggacaaagttcttctcaagtatacagaatataatgaacctcatgaaagcagaaccaactcggatattgttgagaacaactctgctcatggtgattac

SEQ ID NO: 62153 - DNA, 80 bp, Homo sapiens
caccactgtcccacagcgagagcttcggggtccccaaggggaggagccagcgcaaagagcacaagcgggagatttacgac

SEQ ID NO: 62154 - DNA, 101 bp, Homo sapiens
aaaaagaagtccaagaagcaaaaaagggactgctaagaagataccaccagcattgcagtgtcgagatggctatgaaccctgtgtaaatgaaggaatgtgtg

SEQ ID NO: 62155 - DNA, 114 bp, Homo sapiens
gcggagctaggagctggcggcgacggccacaggggcggcgacggcgcagtgcgaagcgaaacagggattatcagcatagaaagaaagccttgtaaccatcaggtagatacagca

SEQ ID NO: 62156 - DNA, 100 bp, Homo sapiens
gggaaaagaaagaatgtatgaggagaattctcagcctaggtagcctttccagtaaatatatgactcagggaaaagcctcagcgaagaggacccagcagga

SEQ ID NO: 62157 - DNA, 75 bp, Homo sapiens
ggccggaggagtcagctgtgtgtccagaacgtgccatggagacgcttaacgcatgtgcctaagcctggacacaag

SEQ ID NO: 62158 - DNA, 100 bp, Homo sapiens
cgctgcagaaccagatccgggagcacgtcatctccatcgagggcggcgctggcggcggccctgggacccgcggaagccggcatgctggagaagctggagt

SEQ ID NO: 62159 - DNA, 75 bp, Homo sapiens
ctaagcctgcacagccgcggcggcagcagcagtgagagtttccccctttctagggtgaggatggttctacacagc

SEQ ID NO: 62160 - DNA, 90 bp, Homo sapiens
cacgagctgtgtggtccatgatgagtggacaggttgctggaccccgccaacagagcccacctgggcctggaggagcagctgagagagctg

SEQ ID NO: 62161 - DNA, 100 bp, Homo sapiens
gctgctagcagaaaatcaaaacgctgattaaaagaagcacgttttcggctttgtgagaaaccttaccatcaaacacgatggccagcaacgttaccaacaa

SEQ ID NO: 62162 - DNA, 90 bp, Homo sapiens
gtatgaggtcaaatccgagaacctgggccaaggcgacaaggctttggtgaagcacgtgcagtctaaaggatacccaaatgaacgttttga

SEQ ID NO: 62163 - DNA, 98 bp, Homo sapiens
acctccacgccaagaagtacctgaagcccagcgcccccaaatacatcaagatgtttgtactggatgaagctgacgaaatgttaagccgtggattcaag

SEQ ID NO: 62164 - DNA, 75 bp, Homo sapiens
tcccacttcttcagcttgggcaagtgtgtgcctgtgtgccgaggaactcgaatcatttatgacagaaagtttctg

SEQ ID NO: 62165 - DNA, 100 bp, Homo sapiens
taagcttgaaagaaatacaggtcctggcaaggcaatggaaagactgtgggctgtttagtgccatgcaccctttacagtgtgtcctccaagtgcagaggtc

SEQ ID NO: 62166 - DNA, 75 bp, Homo sapiens
ggcgattcgtgttcgtgagggccttttctgagacggtaaagaacaggtccaagaaaagctcaaagaaagcaaata

SEQ ID NO: 62167 - DNA, 156 bp, Homo sapiens
gcattggaaattagagcaacatcattatatccctcacgtagttcttggtaaaggtccacctggtggggcttggcatggacaactacacccttcagatcaaccctaattcaggcctctgtaatgaggatcatttgtcctacttcacttttattggaa

SEQ ID NO: 62168 - DNA, 100 bp, Homo sapiens
ggaggttcagtggacccttggagccatcctctacaggacccgctttctaccattaagatctccaagaggtttgtctcattctccttgggctgtaaaaaag

SEQ ID NO: 62169 - DNA, 83 bp, Homo sapiens
catacaggaaaaactttccagccattggtactccaaagattcaggtttactcacgtcatccagcagagaatggaaagtcaaat

SEQ ID NO: 62170 - DNA, 113 bp, Homo sapiens
gaaggatatcgacgtcgtgatccagaagtccagagctgaggactgcctgtttgcaggtcagcccaaggccaaccccactgtcactctgttcccgccctcctctgaggagctcc

SEQ ID NO: 62171 - DNA, 75 bp, Homo sapiens
gtcagacgcagccgtagacaccagctccgaaatcaccaccaagcctcaaggagctggagtcccaggtgtcgggtc

SEQ ID NO: 62172 - DNA, 100 bp, Homo sapiens
cgcccctcggggaagatggcgccctcggggctgaaggcggtggtgggggaaaccgcttacaaacacgcagatggcaagaagattgatggcaggagggtcc

SEQ ID NO: 62173 - DNA, 88 bp, Homo sapiens
gaactgaaagatcagatagcagagctgaatcatgaggtgtaattgaaaagtgatcctctcttcagagatgtcaaaaacaaacaaatcc

SEQ ID NO: 62174 - DNA, 100 bp, Homo sapiens
tgggaatcagcaattttgcacagaaactggcgatggaatatgagaggagccctctggaaagaaaaggacagaccctgtgctttcatgaaagtgaagatct

SEQ ID NO: 62175 - DNA, 50 bp, Homo sapiens
ccgttcccttcggccgtcacaggtcctgctgtactagccaccaaagcagc

SEQ ID NO: 62176 - DNA, 82 bp, Homo sapiens
ccctgccacctcagatatttaatggcgaccgatactgtggacatctacaaatctgaaggacaaaacatggttcaagcatctg

SEQ ID NO: 62177 - DNA, 50 bp, Homo sapiens
tcatctcgcagaacgccatcaaccagcttttttggctttcacccccaacc

SEQ ID NO: 62178 - DNA, 82 bp, Homo sapiens
aggccggagctgaggagaacgactgggttcgcctgcccagcaaatgcgaagacctcctgccccccgaggtctgcagtctcct

SEQ ID NO: 62179 - DNA, 75 bp, Homo sapiens
tatgagtgatgacaaaccctttctatgtactgcgcctggatgtggccagaaccaatttagaacttgaattgattc

SEQ ID NO: 62180 - DNA, 75 bp, Homo sapiens
gagaactacggtgtgaagactacctatgatagcagtctttcttcttatacgcctccaagactgcagagaatgcca

SEQ ID NO: 62181 - DNA, 100 bp, Homo sapiens
cttgcctgagattgtggaggaatttgagaagctgatggtccaacaggcacttcagacaccacctccaacaacacagcaaccgtgatttccacagcgcctc

SEQ ID NO: 62182 - DNA, 113 bp, Homo sapiens
catggcggtggaggacgaggggctccgggtcttccagagcgtgaagatcaagatcggtgagaagccctaccactgcaactgggacggctgcggctggaagtttgcgcgctcag

SEQ ID NO: 62183 - DNA, 98 bp, Homo sapiens
aagcttggtagcagaaactctaatcaactacagccaattcgcctatgcccatcctacaatatctgtgaagattgtgaagcagggccatatggccatga

SEQ ID NO: 62184 - DNA, 100 bp, Homo sapiens
gaacaagcaaggagtcatatatccttcatatgatccatcttagtgaagaattaggatacagctgtgcggtcagagaagaaacgccttaggaagccaagca

SEQ ID NO: 62185 - DNA, 88 bp, Homo sapiens
agagtctgggccgcgcgggagccgcagggcgccctagccttcgcagaaacgatggcggaggaagaagccataaggatgagtttaccat

SEQ ID NO: 62186 - DNA, 75 bp, Homo sapiens
cgggactcaagtacaactcccggcacgaggttggcgtgcagtggtgtgatctcagctcattgcaacctctgcctc

SEQ ID NO: 62187 - DNA, 98 bp, Homo sapiens
gcgacccggatttccagccagagctgagcggcgcgggctccagactcgccgtggtcaagttcaccatgagaggaggttgacggatatattcagacgtt

SEQ ID NO: 62188 - DNA, 98 bp, Homo sapiens
atgtttctacacaacaaaacattcatggagggggaagtacaagactgtcatgtcttaaaatatacgtcaaaggaaaactgtaatggaaaaatggcaac

SEQ ID NO: 62189 - DNA, 76 bp, Homo sapiens
tggaaccgcacgcgtggcatacggaagggttgaaaaataccggccacagaccctgaatgatctcatttctcatcag

SEQ ID NO: 62190 - DNA, 74 bp, Homo sapiens
acagctggagcgcccagaggcgagccctggtggaggaagagagcaaggtccgtggtcctgtcagtggaagcccg

SEQ ID NO: 62191 - DNA, 98 bp, Homo sapiens
ggacgcctgtccgaccgcctcggcaggaaccgggaccgccagcgcaggaggttgtgggtctgtcttgaacacaaatggtgaggttgaaatggatgcta

SEQ ID NO: 62192 - DNA, 74 bp, Homo sapiens
ccagcactggtcatgtctaaagctatcagaggactcctgaaacctggagagctacctgctgtataaaggctggc

SEQ ID NO: 62193 - DNA, 98 bp, Homo sapiens
gaacagtgtggcccgccatgttcttctccgcggcgctccgggcccgggcggctggcctcaccgcccactgggtgactcacaaccaagagaacgtgttt

SEQ ID NO: 62194 - DNA, 100 bp, Homo sapiens
cggcgcgcgggggcgacgcgcgggaacaacgcgagtcggcgcgcgggacgaaggactttttttatgaagacatggagtccttgacgcagatgcttagggc

SEQ ID NO: 62195 - DNA, 100 bp, Homo sapiens
ctcgacctgggtgaatgtactcttttcagcaaccatatcctccctcctgttgccagatcctaaatgcccaggagatgttgattttcataatagtgactgg

SEQ ID NO: 62196 - DNA, 96 bp, Homo sapiens
cgcgcacctgtcccagggcctccgaaggctcaggaggagtgaaagcctgtcagaaaaacaagtgaaggaagcaaaatctaaatgcaaaagcattgc

SEQ ID NO: 62197 - DNA, 100 bp, Homo sapiens
ccctaaatgccatgcgtatctttaagaaattttatcttttgaaacacgttctgattaaccaaggcctcattagaaagaaggctgctgggctggaatcagc

SEQ ID NO: 62198 - DNA, 99 bp, Homo sapiens
aactgaagactctctgcttttgccacagcagttcctgcagcttccttgagactgggcatttagctatggagacattattatcccttacttctaaacgag

SEQ ID NO: 62199 - DNA, 90 bp, Homo sapiens
gctcaaggcatcaaagctgacagagaaactgttgcagtgaaggtgtttcaggcctcacctgaagatcatgaaaaatacggtggggatcca

SEQ ID NO: 62200 - DNA, 97 bp, Homo sapiens
aaacggcccttggatgatggagcaaattcctgagcacttgatggctcatgctagttcagcaaatattgggcccttcctggagaagagaggctgtatc

SEQ ID NO: 62201 - DNA, 75 bp, Homo sapiens
gcccaatagacaactctgggctattttcagagcccaaatcttgtgacaaaactcacacatgcccaccgtgcccag

SEQ ID NO: 62202 - DNA, 100 bp, Homo sapiens
ctctcgcgggcgggagaacggaaaactcccaacttcctggaatccactgcgaagaagacgtcaatgaatgttcttcaaacccttgccaaaatggtggtac

SEQ ID NO: 62203 - DNA, 51 bp, Homo sapiens
atttggcttcaatgtcatattttggattgctgacagaactggaatctcctg

SEQ ID NO: 62204 - DNA, 99 bp, Homo sapiens
ggtacttgaagattaaaggccttactgagttactatgcgagtcagaagaaaacatttgaaattaatcccagacacccgctgatcagagacatgcttcga

SEQ ID NO: 62205 - DNA, 82 bp, Homo sapiens
ttcggaaagactgttccaaaaacagtggataattttgtggccttagctacaggagaggcttcttctcatatcggtaattcca

SEQ ID NO: 62206 - DNA, 101 bp, Homo sapiens
tccttgagggaggagattcagcccggcgatattgtcattattgatcagttcattgacagtttgcagaaaaaacttcagcatgtgccaggaacacaacctca

SEQ ID NO: 62207 - DNA, 97 bp, Homo sapiens
tatcaacaccagtaacagtgtgtggagatatccatggacaggactgaatttgctcttaaagaaatcatgtcctctggaggtgctgaagatgatatcc

SEQ ID NO: 62208 - DNA, 100 bp, Homo sapiens
taaacaatttgaacaacttgaacaatcacgacaggaaacatgcagttgatatcaatgatgtcaaacggctgaaacctggctacttagaagctactgtgga

SEQ ID NO: 62209 - DNA, 100 bp, Homo sapiens
tagataagaatatccaccagtcggtgagtgagcagatcaagaagaactttgccaagagcaagtggaagctgtggatggaaaagcaccacttgctactgga

SEQ ID NO: 62210 - DNA, 101 bp, Homo sapiens
gggaggattgtaagatactgtgcctttgctccagggcatttgtggagtgttggtaaatcatgcttattgctacagtttacagacaagaggtttcagccagt

SEQ ID NO: 62211 - DNA, 100 bp, Homo sapiens
cacgaatctgcccacccctcctgtaacccagcctgtttcacttcttggcaacaagaatgggtgaatcagcaaagggaagatattgaaaggcaaaggaaac

SEQ ID NO: 62212 - DNA, 100 bp, Homo sapiens
ctggccgtgagacgtttcgggagccggagtctctccaccgcagacatgacgaagatgtatttccactacacaaaattttccacctctgggataccttact

SEQ ID NO: 62213 - DNA, 74 bp, Homo sapiens
cgcctcctgcctcgaagacctgaggagcaaggacgcaaacatgcagatctttgtgaagaccctcactggcaaaa

SEQ ID NO: 62214 - DNA, 95 bp, Homo sapiens
agatggcactttccaaagtggatgcctccggggagtgtggacgaatgtggaacctcgctctgtggctgtgttcccttggcactccttagtcccct

SEQ ID NO: 62215 - DNA, 74 bp, Homo sapiens
gccaaggaaaaactggagagcttcatcaaaaatagtgatagctttgataaatcgatgctatagaagacaaacaa

SEQ ID NO: 62216 - DNA, 90 bp, Homo sapiens
cagtgacatgcccatgcgagtacctgaggaaggacagaaactggtgagtgactgcacagagttcactgaaacggaatgccttccttgcgg

SEQ ID NO: 62217 - DNA, 102 bp, Homo sapiens
atgttcacgtgacatcaagaggaagcggaaaccagtggccacagcatctttgtctagccccagtgcagaaacctctgtagaggagcaggatgcaaccgacag

SEQ ID NO: 62218 - DNA, 100 bp, Homo sapiens
cagggactgggggctcccaggctgagctggcccagagcaccatgtcaatgagaaagaaggaggaatctgaagccttggtagagacggggtttcaccctgt

SEQ ID NO: 62219 - DNA, 100 bp, Homo sapiens
cccgcgtggccccttaccgcatcctgcaccagacccaggactcccaggtctactggacagtggcgtgtgatgaggacggggacttggttgccttttccag

SEQ ID NO: 62220 - DNA, 126 bp, Homo sapiens
ccctggagcaggagctccctggagctgtctttatcctctgtgatgtgactcaggaagatgatgtgaagctgtttgagggcatgaaggcgttcaaaggcaaagaccagcaggtgcgcctcttccgcc

SEQ ID NO: 62221 - DNA, 75 bp, Homo sapiens
ggaaccgttacgggaactgaagttgcggacctggccatgacccccctgatccctcagagcaaggatgagaacagc

SEQ ID NO: 62222 - DNA, 98 bp, Homo sapiens
cctgggctcaagtgatcctcctgcctcagcctcccgagtacctgagattagcccaggaatataaatagtttctggaaaggacactgacaacttcaaag

SEQ ID NO: 62223 - DNA, 82 bp, Homo sapiens
tgttaacatctttaaggcaggagctgatgaagagagagcagagacagctcgtctgtgcacagccagagaacaacacatcaca

SEQ ID NO: 62224 - DNA, 82 bp, Homo sapiens
cagagactgctgagcccgtccgtccgccgccaccacccactccggacacagcctgggccgagccagtggcccccagaggatg

SEQ ID NO: 62225 - DNA, 72 bp, Homo sapiens
tttaaccctcagcctcagagtcagatgcagggttcaagcccatgaacatggacaagaaatattccagaaaaa

SEQ ID NO: 62226 - DNA, 86 bp, Homo sapiens
ctaatgtcagggcagaccccttcaaagaactaaggaggtacagttcgaaccagagcttttccacaataccatcgtgtgtgagaaac

SEQ ID NO: 62227 - DNA, 51 bp, Homo sapiens
catcacattttgtaccgaaacctattgaagctgctaaatcctgaagatgac

SEQ ID NO: 62228 - DNA, 100 bp, Homo sapiens
gaagagccatctcatcgctaatgctgacgtgcagtccattgctgtagctgacgtattgggaagaatgtggtttgcgagaaggcagcaacatcggtggatg

SEQ ID NO: 62229 - DNA, 75 bp, Homo sapiens
tgctcgacgaccaagaggcgaagagtggtttgagtccagccaatgacactggagccaaaaagaagaaaaagaaac

SEQ ID NO: 62230 - DNA, 51 bp, Homo sapiens
gctcccccatccccacagtataaaaagagtaccaagttcgatccatagcaa

SEQ ID NO: 62231 - DNA, 87 bp, Homo sapiens
tccatcctcttcgactatgagtatttgaatccgaacgaaggaacatcatcttcagcgggctatttcagcacagcaggtgtatggcga

SEQ ID NO: 62232 - DNA, 82 bp, Homo sapiens
gagaggacagaggtgcctggggcaacctccaccttgacggttccaggtattctctactgccgctgatggtcaaacgcaagtg

SEQ ID NO: 62233 - DNA, 100 bp, Homo sapiens
agaagaaatgggctcgaccccccatttccatgaactttgaggtatgaaaatgaaagtcttcagaatggaaggaagtcaactgaatttccaagaaaaatac

SEQ ID NO: 62234 - DNA, 51 bp, Homo sapiens
gctgcggctcatcgaccgggaggcttaatgccagaccgggagttggaggtg

SEQ ID NO: 62235 - DNA, 134 bp, Homo sapiens
gcccgtggcgcgcgcgcggccgcccctcggccccggagcccctcggcggcgccaccatgtactcgggagccggccccgacaatgcagatcttcgtgaagactctgactggtaagaccatcaccctcgaggttga

SEQ ID NO: 62236 - DNA, 98 bp, Homo sapiens
tgacggctccctgctgttcgagtacctgcccagaggggcccactcgctgtcccgttttcccatcatatgattcccggtcctcctggtccccacacaac

SEQ ID NO: 62237 - DNA, 73 bp, Homo sapiens
ccgagcgcccgaggcgtctgggatggtgtgggaccgggtgcaatggatgagcttcatagtctggatccaagaa

SEQ ID NO: 62238 - DNA, 100 bp, Homo sapiens
aaacagttacagtgaactctatagattctgctggtatacagctacatccaggagagaatgctgacagtcctgcaggctggctacagcaaacatcattcaa

SEQ ID NO: 62239 - DNA, 99 bp, Homo sapiens
gcgagtgctgcggtaccttgtagaagtggaggagctcgccgaggaggtgctggcggacaagcggcagtaaaggcatgacttcctggcaccacagggaaa

SEQ ID NO: 62240 - DNA, 88 bp, Homo sapiens
caaatgaagagatttttatcacagactggtggtgtacaagggagaagaagccacattccaaatctcaggcctccagaccaacacagac

SEQ ID NO: 62241 - DNA, 97 bp, Homo sapiens
ggggcgactggagccatggcggagtcggcgcctgctcgggacccattccaacaatctcgtaaaacatggtggattactatgaagttctaggcgtgca

SEQ ID NO: 62242 - DNA, 100 bp, Homo sapiens
cagcgcagtgacagtgcagaaccccggcgcggcccttggttcatccacataaaacttatttcacagtagctgaaaaagggagttttccagatattatcat

SEQ ID NO: 62243 - DNA, 51 bp, Homo sapiens
ctggggataacattcatgcagaacatcaggcgccaagcccatctttgtgtg

SEQ ID NO: 62244 - DNA, 75 bp, Homo sapiens
gctctcgcttcgtcctacacttgcgcaaatgtctccgctgtgtgttctcatttcacccaaaacctttggacagtg

SEQ ID NO: 62245 - DNA, 82 bp, Homo sapiens
ccaccttctccctccttgggctccttcgaccccctggctgagctcacagttcaaagtgtcaagaacaagcctctcttctttg

SEQ ID NO: 62246 - DNA, 82 bp, Homo sapiens
cccaggtgtaagcgcagaaagcaggcgaacccgcggcgcaataacggtattgctggatgctgtgccaaaacaacagttgctc

SEQ ID NO: 62247 - DNA, 83 bp, Homo sapiens
aagactgaaagagtcgaatggtttgttggcagagaagatggcgaattagaagatggtgaaatagacgatgcaggatttgaaga

SEQ ID NO: 62248 - DNA, 98 bp, Homo sapiens
cgagctctttgccctttacccatcagtggacgagtatttgtgtggaagtaatcgaaaagacaacatatttattgatcctggataccaaacatttgagc

SEQ ID NO: 62249 - DNA, 101 bp, Homo sapiens
ggcttccgcccctttccggcggagtggagatcctattcagaggggccggtctctctaaatatgccccagcctcgaagcggaggatccctgtgtcccagccg

SEQ ID NO: 62250 - DNA, 74 bp, Homo sapiens
tgctgggcacccacggagcctccggggctgaggttgacggatatattcagacgttacgacacggatcaggacgg

SEQ ID NO: 62251 - DNA, 89 bp, Homo sapiens
gtagaaaactggtcaaggaagctaaagccattgatctggtgacgaaagccacagaggaggacaaagccaagaactacgaggaggcgctg

SEQ ID NO: 62252 - DNA, 96 bp, Homo sapiens
aagaagaagttggaaaatgaggtggaacaaaggcatacacttactagaaatctagatatttccttgatagctgccgtgccagtactctattggctg

SEQ ID NO: 62253 - DNA, 82 bp, Homo sapiens
acctggatcatggctgccgcgccgccgctacgggaccgcctgagctttctacaccgggtcaaaatgcagatcttcgtgaaaa

SEQ ID NO: 62254 - DNA, 82 bp, Homo sapiens
ctgcgtggcttgtcaggaactcgactcagacgtggataaagataatcccggcccagcgctggcgcagtgagaacttcgagag

SEQ ID NO: 62255 - DNA, 100 bp, Homo sapiens
caaacagctatggtgatgattagagacatactaatgtacatgggcttttttgaagaagaagaaggtaaagagtatatttataaagagcctaagctgacag

SEQ ID NO: 62256 - DNA, 82 bp, Homo sapiens
agccgcgaggaggcgcgggaggtgttcgagaacgaccccgagacgacagtactactggtatgacgagcgggggaagaaggtc

SEQ ID NO: 62257 - DNA, 75 bp, Homo sapiens
ttccagcttcggaacaagagaccctggttccagcaacagatagaaatgctttaagttcactctggggaaagctgg

SEQ ID NO: 62258 - DNA, 95 bp, Homo sapiens
ttcggaagtgccaaggtcatccggtccctccacgggcggctgcagggtggaggtgctggagaatctggtaaaagcaccattgtgaagcagatgag

SEQ ID NO: 62259 - DNA, 100 bp, Homo sapiens
ggtcgcggggagctccgaaccgccggcgcccggccatggcggtctccaggatattaatgcacacgcctgtgttactggtaaacccatcagccaaggggga

SEQ ID NO: 62260 - DNA, 50 bp, Homo sapiens
aactacagaaacctggtctccctaggtttgaagaaaaggcccaagtggat

SEQ ID NO: 62261 - DNA, 100 bp, Homo sapiens
cagaaaggaactggctaccgttcggactatttgtagtcatgtacagaacatgatcaagggtgttacactggaagaacacccaaacccaggaaagagatac

SEQ ID NO: 62262 - DNA, 100 bp, Homo sapiens
atccaagtgcgcgccctggcgggtccggaccaagttaacaagcacaagccctggctggagcccacctaccacggcatagtcacagagaacgacaacaccg

SEQ ID NO: 62263 - DNA, 80 bp, Homo sapiens
ggagcagcagactcggacgtggacgcctttttccggacagcgttgacagaaggctacgttggggccctgcacgagaatag

SEQ ID NO: 62264 - DNA, 96 bp, Homo sapiens
aatggggatactcttccactctctaaaaatgcagatcatttactgcacctaaagacaaagactgatgaagtatttctggaagcccagattcagaat

SEQ ID NO: 62265 - DNA, 89 bp, Homo sapiens
attgagctgtgcacgaccacaccgctgatgaagacaaggactcacagtggctgcaaggaggttgtggctcactggattgctgaaagccg

SEQ ID NO: 62266 - DNA, 83 bp, Homo sapiens
gcgggagtgttcgttgtgccagcgactaaaaagagttgatattcactgatggactccaaagaatcattaactcctggtagaga

SEQ ID NO: 62267 - DNA, 74 bp, Homo sapiens
cgagatccgggccgtgaacgaaagcagtgacggaggagcttgtaccaccgttttctggatatgccgcagaagga

SEQ ID NO: 62268 - DNA, 90 bp, Homo sapiens
ttactccctttccagtgccatcaagttctccatcttctattgaggatgaatttcatcctttcatcgaagcacttctgccccacgtccgag

SEQ ID NO: 62269 - DNA, 90 bp, Homo sapiens
cctcaccagacagatcgctgtcaaaaccctagagactaaggtgtcagtatgttcttcaagctgctctgctcctgggcccaagctattctc

SEQ ID NO: 62270 - DNA, 85 bp, Homo sapiens
cctgaggagattcgcaagaccttcaatatcaaaaatgactttactgaagaggaggaagcccaggaacatgagaacatcaatggtg

SEQ ID NO: 62271 - DNA, 82 bp, Homo sapiens
aggacttcgagcagcctctcgccatttcccggcctcttctgaaacagtctccctggagcaaccatcagagcagtggctgggg

SEQ ID NO: 62272 - DNA, 88 bp, Homo sapiens
gaagatggagttggtgatgtgcaacatttcggtctggggtttccagagtccgcggttttgctaagaagccgcagtgatgttgacgcgg

SEQ ID NO: 62273 - DNA, 74 bp, Homo sapiens
aaggatcaggaccgcaagtcccgtcttatgggacttgaggccctcaaggagtctcgctctcagtcaaaatctcc

SEQ ID NO: 62274 - DNA, 75 bp, Homo sapiens
ggagaaagttaactgaattggtgacacttcgggtctctcacagaggaagcaggaactcagggagtgagctacaag

SEQ ID NO: 62275 - DNA, 74 bp, Homo sapiens
acctcatcagtgagctgtccctgctggaggagcgcttccgggttcaagggcatcaagaagggaggcgtaacaga

SEQ ID NO: 62276 - DNA, 100 bp, Homo sapiens
aatcagcccatggcttacgctgcacttccatcccacggtcagcaccctggaggggtattatgtggatgatgccttgcagggccagggagtttacacttac

SEQ ID NO: 62277 - DNA, 75 bp, Homo sapiens
ccgccgctctgtctacaacccgaggcatgatgggtggctatccgccaggccttccacctttgcagggcccagttg

SEQ ID NO: 62278 - DNA, 82 bp, Homo sapiens
caacagtaccgcaaggaccccaaagagtgctgcaagttcatgtgtctggacccagacatgcaagaaagcacttcagccaagc

SEQ ID NO: 62279 - DNA, 96 bp, Homo sapiens
gtcgtcatcgacttgtacaccgaagaacggccgcgtggacatgatccacatcgcggacaccaaggtcgccaggcgttatggggatttcttcatccg

SEQ ID NO: 62280 - DNA, 102 bp, Homo sapiens
ctcgctgggagagaggtacctctccttttccctctccctttccctaagaacccagcgggtgccgcttctccacccgaggcttccacctccaacgagccatgt

SEQ ID NO: 62281 - DNA, 75 bp, Homo sapiens
ggaggaggattttgggaacacatcaggccgtctctgtttgaacaacttagcagtgtctgcaaaaacgaatctttt

SEQ ID NO: 62282 - DNA, 50 bp, Homo sapiens
ccttcaatccgctctactggaatgtgaaatggtggagtcaatgaagaaag

SEQ ID NO: 62283 - DNA, 100 bp, Homo sapiens
cggtcgaccccagccagcgcagcgacggggcgctgcctggcccaggcgcacacggaagtgttgagaagctgatgtctcctcgacttccaactggaacctt

SEQ ID NO: 62284 - DNA, 98 bp, Homo sapiens
tgtgaaactgctttctaaaacaccagaactcaacctgatcccagctctcctgttggcttcgtgcttggggtagatcttcttcacatattccccctgga

SEQ ID NO: 62285 - DNA, 105 bp, Homo sapiens
tcgagcagcggacgccggtctctgttccgcaggatgatattggggcctgtgaatccatcatgaagaagaaaaccaagcaggatttccaggagctaatcaagactg

SEQ ID NO: 62286 - DNA, 88 bp, Homo sapiens
acggtctgcccacccaacgcgaagacgagatggagcagaaggaagggaagctctctgaggatgggaccaccgtctccccagctgcgga

SEQ ID NO: 62287 - DNA, 75 bp, Homo sapiens
tgcagtgtcttccacaacctgggaactgtggctgcaccatctgtcttcatcttcccgccatctgatgagcagttg

SEQ ID NO: 62288 - DNA, 100 bp, Homo sapiens
tgtggcatgtgcccagaatggattggaagtttcactaagtagtttgaacctggctgttcctccaccaagatttgattatatgcgtcaggcaggagaagtg

SEQ ID NO: 62289 - DNA, 128 bp, Homo sapiens
gagtgctcctcattaagtgctgtctcccccagcgaatcggtggccatgatctctagggaaaaccggaccaccccagattgtgaacgagcattcccagaggagaggccagaggtgctgggccagcggag

SEQ ID NO: 62290 - DNA, 74 bp, Homo sapiens
gctccgtggctggttcccggcgagctacgtgcagttgctggagattgagatggccatcctgcggttcccttacg

SEQ ID NO: 62291 - DNA, 90 bp, Homo sapiens
cgggggtcgggggactggccagctcaaccgcttcgtgcaactctccgggcggccgcacctgccagttaaacgagaagattcatcaccgct

SEQ ID NO: 62292 - DNA, 100 bp, Homo sapiens
cgcccctcagcagcctggcagcagcccccggggcaagagcaggagcccggcaccccccgccgacaaggaggctcattcagttcctgatctcactggtgca

SEQ ID NO: 62293 - DNA, 100 bp, Homo sapiens
gcttgggccgccgagctggacccggaccggttttggactccgtgggaaggaggcttgtttaaactacggatgcttttcaaagatgattatccatcttcgc

SEQ ID NO: 62294 - DNA, 75 bp, Homo sapiens
agcagcggaaaatgatccagtcacagatgcctggagttactgtaaaagacgtgaaccagcaggagttcgtcagag

SEQ ID NO: 62295 - DNA, 82 bp, Homo sapiens
tcccagcagagtgtctcgctctccaaaagtgtctccatacagaacattactgggagaatacttatctctggcgcacatcact

SEQ ID NO: 62296 - DNA, 75 bp, Homo sapiens
ttaaacagccaaaacagttcattcatattcagcgccaagaataaaatctttatgaactaacaagatgaattaaag

SEQ ID NO: 62297 - DNA, 75 bp, Homo sapiens
caaatactcctgtaaatttgagtgtgggacaagaatccttcaagaaacaggaaaaaactcctaaaacaccaaaag

SEQ ID NO: 62298 - DNA, 98 bp, Homo sapiens
aaggattccaagtaactcttatttgaaatatcactttggaggccatgtgcagatcagatttggaagtgaccaagactggaggcagggacaccagagtt

SEQ ID NO: 62299 - DNA, 98 bp, Homo sapiens
gagattcatatgagagttatggcatcaataacctgcaggacgtgtgggagacgagtgaaggcgagtgcaatgtcatgctggaatcccgctttgagaag

SEQ ID NO: 62300 - DNA, 100 bp, Homo sapiens
gatcctctccgtgggagccagcgagcctctctccctgatcttacgtgctcaaggccggagcctcaacagaaagctcctttagttcctcctcctccaccgc

SEQ ID NO: 62301 - DNA, 100 bp, Homo sapiens
caagcataccacctcaatctttgatgactttgcacattatgaaaagcgtcaagaagaggaggaagccatgcgtaggaaatctccaaattggacatccaga

SEQ ID NO: 62302 - DNA, 112 bp, Homo sapiens
ttggaacctcactgaaaattggtattgttggattgccaaatgttggatagggccagatttgagtgtgtgaatttttgagtgaaacctggaacccaaatgagaagaaatctgc

SEQ ID NO: 62303 - DNA, 95 bp, Homo sapiens
ccggtgccggcggaggcagagcacaggccggagagcaccaccagcctcaagtactacagccttccagcagccttcccagacccacagatcacacc

SEQ ID NO: 62304 - DNA, 100 bp, Homo sapiens
ccggccctctcggcgtccgccagcgatggcacagtccacctggaaggccgctgtggtggaaggatgtttgactgcagagatgtggcattcactgtgggcg

SEQ ID NO: 62305 - DNA, 80 bp, Homo sapiens
gaaaaccttctccaccagaatccagctcacgctggtagttgatgtcacttggcgatattcctgcaaacatgaagaggtga

SEQ ID NO: 62306 - DNA, 99 bp, Homo sapiens
agagttcggaacatgtcgcctgatgaaatcaagatcccgccagaaccccctggcagatgttcaaatcacttgcaaacggccaatgggaacgtggaggcc

SEQ ID NO: 62307 - DNA, 88 bp, Homo sapiens
tttatattcatctcaaaaacaaaattctgaactcaggacttggcaagtgacgcatccaaagaagacattgacactgctatgaaattag

SEQ ID NO: 62308 - DNA, 100 bp, Homo sapiens
aaatatgtttggtgaaacacttcataaagcagtgcaaggttgtggagcacacccagcaatacgaatggcaccgaaatgcactcggtgatggaaagagagc

SEQ ID NO: 62309 - DNA, 83 bp, Homo sapiens
gtactagtctcaacgagagacccaagaggtcgcgtggggcaggcagtggcgctgcgggccaaggccttcggcttcaacgtgct

SEQ ID NO: 62310 - DNA, 73 bp, Homo sapiens
gcaaatgaccactgtcctgagaggacgtgggtgaggggcagatcagacctattgtgaccgcctggtgcaggac

SEQ ID NO: 62311 - DNA, 100 bp, Homo sapiens
tcgtacctgagcctcttctacatcggtttctacctcaaggacatggagcgcttgaaagaggcatgaatgacttcagctacctacacaccaactgctttga

SEQ ID NO: 62312 - DNA, 100 bp, Homo sapiens
ggcattttgctgtctcctcctaatacggttggttttgcggattgccactgatgattccaaagcagtctgtcgtctcagtgtgaaattcggtgccacgctc

SEQ ID NO: 62313 - DNA, 75 bp, Homo sapiens
caaaaagccgagtagagaagttatcaggtcagtcatatcatttggatcaaaaaatagaacaatcggagttgcagc

SEQ ID NO: 62314 - DNA, 100 bp, Homo sapiens
tagcagcgggtgacatggaaggggcagtacaagcttacgtctctgctcttcagtacaatcctattatgatgcatcattatcacagaagaaattcgtgtct

SEQ ID NO: 62315 - DNA, 74 bp, Homo sapiens
gacaacgccttaacccaaggaagtgactcaaactgtgagaacttcagtggtgaaagtggtgctggaaaaacagt

SEQ ID NO: 62316 - DNA, 100 bp, Homo sapiens
catgtcaagcgaagccttgaaaaagctgccctgagacggtgtcccgccgaaaggcttttgacctttatgaacaaagatatgctgctgtgaagatacatca

SEQ ID NO: 62317 - DNA, 100 bp, Homo sapiens
tcaggttacttcttcctcaacaccagcaccgcagatgttgtcaaggtggcctaccaggaggccaggggtgtcgccatgaccagctcagctagtgagcaag

SEQ ID NO: 62318 - DNA, 80 bp, Homo sapiens
tcgccgaccgctacgctgtctactggaacagcagcaaccccagaagtcaacgaaaggttccgttgtccttgaccacgtat

SEQ ID NO: 62319 - DNA, 97 bp, Homo sapiens
gtgctgacgtcttcctggaggcattggctcggctcaactatctgctcagaagcgggaagctgagccgagagctggactttgtcagccaccacgtccg

SEQ ID NO: 62320 - DNA, 82 bp, Homo sapiens
cggcgaacgcggagagcacgccatgaaggcctcgggcacgggaaagcaggcaggatgggagagtcgccgatagaaccacctc

SEQ ID NO: 62321 - DNA, 75 bp, Homo sapiens
agaaatccgaggcaatgtacttgtattgagtcagcacaaatttgcaagacaaatttacatgtattggagaccaga

SEQ ID NO: 62322 - DNA, 75 bp, Homo sapiens
gctgacccagggctgggcggagatcctggtccggaggcccacagctatgaggtgtcaggtcgcattgaggccatt

SEQ ID NO: 62323 - DNA, 90 bp, Homo sapiens
gccggccggctgcgaagacgcggtgggccgcccctccggtagtgggcagcagtcagtgacaggtgtaacctctgtggatgacagcaacag

SEQ ID NO: 62324 - DNA, 90 bp, Homo sapiens
tgccgcgccaccgagtccggaccggagactttggggcctaactagggattgttcgtgtagagcaaaagaataacactttttttgacatga

SEQ ID NO: 62325 - DNA, 98 bp, Homo sapiens
tgcaccggctttctctgagttcttcaggatgaattcgctctggtctagcatcctgaggttagcattacacttctcccagtggagcccatgacttctga

SEQ ID NO: 62326 - DNA, 101 bp, Homo sapiens
gggcgattcctgtctaagaaaaggaggatttcgtgcctgccagtgtagagccggtggagcagctgggctcggcgctgaggtttcgccctggctacaacgac

SEQ ID NO: 62327 - DNA, 50 bp, Homo sapiens
gcctcctaatccctagccactatgatccagcacacggaagacatggagaa

SEQ ID NO: 62328 - DNA, 75 bp, Homo sapiens
ctgccacaaaccaggccaagatccacgctgacgcagagcggaaggaggagccttcacgtaaatgggtccagtcat

SEQ ID NO: 62329 - DNA, 96 bp, Homo sapiens
tacttcgtgctgtgcgggatcgacgcggacagcgggctggagcctgacgagctggcgggatattgactgggtacagacagagaagcacgtgtttga

SEQ ID NO: 62330 - DNA, 101 bp, Homo sapiens
agtatacagaaaatcggtgaagagaggttttgaattcacgcttatggtagtggcttgctcaatgtgccgatggaagatgtgaatctaagttctggacacat

SEQ ID NO: 62331 - DNA, 50 bp, Homo sapiens
ccaaagtgcccggacccaaaacaggaagttgcttatcaagtgtcccacaa

SEQ ID NO: 62332 - DNA, 84 bp, Homo sapiens
ggaagaccgcgcgcagggcctgcagcgggagctggacggcgagcgcgagcggcgcgagaaacaggagcattggtttgaaaaggc

SEQ ID NO: 62333 - DNA, 83 bp, Homo sapiens
gacaccccagaggccctcatcaacgcgggagacttccacggcctgcaggaactgtggctgcaccatctgtcttcatcttcccg

SEQ ID NO: 62334 - DNA, 101 bp, Homo sapiens
ctccaacttttctgctttcgacttagaaaaaagaaccagatgtcaaaactgatttcagaaatgcatagttttatccaggccaagctataacatcagaaatg

SEQ ID NO: 62335 - DNA, 75 bp, Homo sapiens
cagacatggcgacattgacagtggtccagccgctcaccctggacagagtctgaagatgatgagaaactgaaaaag

SEQ ID NO: 62336 - DNA, 98 bp, Homo sapiens
gaagatgggcgacccggatctcctggaagtgttggcggaggaaggaggatcccttttcccccagaaattactcaatgctgaaacctctcaaagtggta

SEQ ID NO: 62337 - DNA, 100 bp, Homo sapiens
gactcctcttccggcggcctgaccagccaggagagcaccatggaacgccagaagccaggttcaagaacatgaagactcgggtgactcagaagtggagaat

SEQ ID NO: 62338 - DNA, 96 bp, Homo sapiens
ctgcaagattgtggtgcacacgccctgcatcgagcagctggagaagcactattcctgatcagagaactccagttgcttcaacacacagtatcagta

SEQ ID NO: 62339 - DNA, 51 bp, Homo sapiens
ggaaattcccagaggactttggagaccagcttgctcatcagtttggaagga

SEQ ID NO: 62340 - DNA, 123 bp, Homo sapiens
ggacgccggatgagttgcttttaggcttgctggcccgcggggctgtccaggcacgcgaggcccctcagccagagactgctgctactttgaaacgtacgatagaggccctgatggacagaggag

SEQ ID NO: 62341 - DNA, 126 bp, Homo sapiens
gagcttgatgaagaaatggagaatgaaatttgcagagtatgggatatgtcaatggatgaggaaagtgaaaaggtttctgaatatccagcagtgattgtggagccagttccaagtgccagattagag

SEQ ID NO: 62342 - DNA, 100 bp, Homo sapiens
ctttatgactcaccttattttgtttttccgtactctgggactacagaccaaggctcatgtagcctcactggagggcattgccccggaagatcaagtcgtg

SEQ ID NO: 62343 - DNA, 120 bp, Homo sapiens
agaatccttatactgagtcagtggatattcttgaagatcttgtcatagagtttatcactgaaatgagacatggtcttcctctgttgttcagaggtgtgcagtggtgtgatcatagctcac

SEQ ID NO: 62344 - DNA, 98 bp, Homo sapiens
ctactacgcacagtgctaccgccacatgctggacttgcagaagcagctgggcagccatgtgaagatgtgcttgcttcccctttgccttctgccatgat

SEQ ID NO: 62345 - DNA, 75 bp, Homo sapiens
gcactcttctccttcacagtaaagtggctggacaaagtggccttggagagtatgcctctgctaggcttcaccatt

SEQ ID NO: 62346 - DNA, 50 bp, Homo sapiens
ccagtgcgcccgcatcgtcgaggtgtgttagaagaagcaagattttttgg

SEQ ID NO: 62347 - DNA, 83 bp, Homo sapiens
cgacgtcttgcctgtgtcccacttgttcgcggcctataggaaacatttactagggacaacttttgagtgtcagaccctgtgga

SEQ ID NO: 62348 - DNA, 80 bp, Homo sapiens
gagaaacccactgaagacgtctgcgtgagaatagagaccaccgagaaaaatggctacaaacttcctagcacatgagaaga

SEQ ID NO: 62349 - DNA, 82 bp, Homo sapiens
gccagccgcaccatgccgctcctaagcctgcacagccgcggcggcagcagcagtgagaggccaccagcttgggctccccacg

SEQ ID NO: 62350 - DNA, 75 bp, Homo sapiens
gcaacacctgcggcctcactgggacccccaggaggtgaccctgcaggtggagatcctagaaggcaaggatgccgg

SEQ ID NO: 62351 - DNA, 82 bp, Homo sapiens
gcagtcacttgtacagcgccggtcaacatcgcggtcatcaagtactacaaagatcattccactcagcctgggacgatgggga

SEQ ID NO: 62352 - DNA, 50 bp, Homo sapiens
ttgttgtttacacgccagttattaatgtatccagcagaaatcaggaagta

SEQ ID NO: 62353 - DNA, 82 bp, Homo sapiens
cttggcgaggttcagactcttggagccagaagctacatgacccctaaacgacaccttcagcagtaaacaagataaaacaact

SEQ ID NO: 62354 - DNA, 90 bp, Homo sapiens
ggccagatgcagatctgaagacctattttactgataagaaaacacatctttacacactaatgcgccctatccactcctccacatccagcc

SEQ ID NO: 62355 - DNA, 133 bp, Homo sapiens
gttctggtttgccactgggggtgctggcttctgcatcaatcgcaaactggctttgaagatggctccgtgggccaggaaccaggtgcagatgggtctcttccttcctgcccccatctctctcactcctggctca

SEQ ID NO: 62356 - DNA, 100 bp, Homo sapiens
gttttacaaattcatgaagcgaattgctgcttgtcaggagcagattttgagccagttgtttggggaagaagatgctgatcaagaagtatctcctgacaga

SEQ ID NO: 62357 - DNA, 87 bp, Homo sapiens
gaactactcaaacaggtcgcagcattatcaaaggggccgcgatgggcctcttggaacattggtgtgttcatctgcattcgatgtgct

SEQ ID NO: 62358 - DNA, 51 bp, Homo sapiens
atttcaacatgcctctgacaatctctagttgtgttccatgggaaccggtac

SEQ ID NO: 62359 - DNA, 75 bp, Homo sapiens
ctgcaactcatccgatgcaagtatttcatacacctactgtggtgaaggtaggcaatgaagttgctacaggaacag

SEQ ID NO: 62360 - DNA, 93 bp, Homo sapiens
tcttcgtgggagtcatgaccgcccagaaatacctgcagactcgggccgtggccgcctacagaactcttgatgtttcagtgagctttaatggag

SEQ ID NO: 62361 - DNA, 50 bp, Homo sapiens
aacagcctatgtgggcttccacggagatgcaagtgctgctggaccaggcg

SEQ ID NO: 62362 - DNA, 100 bp, Homo sapiens
gccccgcgtctccgcagcgcgcccaactgcatcctcctggccatgttcctcgtccactacgggcatcgttaagatccttctattctacgtaatattttat

SEQ ID NO: 62363 - DNA, 100 bp, Homo sapiens
ggagcggaccccgacagctgctgaccctctataaccccacaggaactgcgcttcgcttccgaggatgcccgaaaagcatgtggggactcaacactgaccc

SEQ ID NO: 62364 - DNA, 76 bp, Homo sapiens
aagagaagatcatcgagcatttcaaacgaccaagcggagcagccagctggcagtagcgccctgtaggacccccagg

SEQ ID NO: 62365 - DNA, 98 bp, Homo sapiens
gcactacctcctcctccccagttctactcaagccttattgaagagataggaactcttggttgggataagcccgatgagagaaagggaaagttaaggat

SEQ ID NO: 62366 - DNA, 75 bp, Homo sapiens
tctacatctcaagctcatattttgaagtgtttacggtcttcccaagggattgttgaagaaacttctgaagaggga

SEQ ID NO: 62367 - DNA, 82 bp, Homo sapiens
tagacatttacgcggatgtcggcgaagagttcaaccagtgttatagttttgccgctggactcttccctcccttcccccaccc

SEQ ID NO: 62368 - DNA, 50 bp, Homo sapiens
tggtgctcgaggctggcggcgaggaaggtttgtttgtaaaaacaatggtg

SEQ ID NO: 62369 - DNA, 98 bp, Homo sapiens
attatgtccattgttctcttggagcagctggtcatcatggcttaccttacaaatttgaagtacagcagatgttagaagaacctcagtggggattagta

SEQ ID NO: 62370 - DNA, 100 bp, Homo sapiens
aaccatgaacttcgaaacgtgataagaagcacctggatgagacatttgctacagcatcccacattaagtcaacgtgacagctatattgtgcgtgtcaagg

SEQ ID NO: 62371 - DNA, 100 bp, Homo sapiens
gacccatatgccaacccacctaactacggaaaacctgatcccaaaattattgaaaacactcgaaggaaatgcactcggtgatggaaagagagccactatt

SEQ ID NO: 62372 - DNA, 75 bp, Homo sapiens
ctctcttacaacaaaatggttttccactccattgttgttagaagccagctggttttcccatgggctatgcagcag

SEQ ID NO: 62373 - DNA, 75 bp, Homo sapiens
ctaaagcagcgtgcgttcagccctgggtaatctcaggggcgatataatcaatgaggtggtcctaaagttgctcaa

SEQ ID NO: 62374 - DNA, 137 bp, Homo sapiens
aggctggagtggtggaaagtgagaattaaagtccctcgccgcttggaaagtgcagccttctacaggatccctcttcgtcaagtccaccctggacgcaggaccctgaacctactgaggggatggggaaaaccagcaga

SEQ ID NO: 62375 - DNA, 99 bp, Homo sapiens
gtgcaccggaggtgaagtcggtgccacttctgccctggcccccaagatcggccccctgggtctggaggcagtggagaaggtgacacagcacatccacgg

SEQ ID NO: 62376 - DNA, 97 bp, Homo sapiens
tgccggagagataagggagagccgagaggaagcggggctccaccaagggtgccctggacatgctgaccaaggtgatggccctagagctcgggcccca

SEQ ID NO: 62377 - DNA, 78 bp, Homo sapiens
tccgtgggcgtaggaccctccgagccagcatcaacaacagcaacttgtgattggcggtgaccggatattcagttgcac

SEQ ID NO: 62378 - DNA, 75 bp, Homo sapiens
ccaagctctactccaggaagtgaaaatgtgctgcctcgagagccgctggtccccagtctatgtgaggatctcctg

SEQ ID NO: 62379 - DNA, 82 bp, Homo sapiens
agtacatctgtggacaaagcagtacctgaaacagaagatgtgcagggtgagcgagtgctgtgctttcatgggcctcttcttt

SEQ ID NO: 62380 - DNA, 83 bp, Homo sapiens
aaaagataaaagcccggatgaacttcaggtatccaaaccttgaaacctttgctctagatgtcaggcttgtttttgacaactgt

SEQ ID NO: 62381 - DNA, 83 bp, Homo sapiens
ggagcctcaacaaatctttgcagaacctgagtttgacagaggaatacaatgcagatcttcgtgaagactctgactggtaagac

SEQ ID NO: 62382 - DNA, 51 bp, Homo sapiens
ggggccctggatccagaccaagatggaggatgttgaggaagtatatgccgg

SEQ ID NO: 62383 - DNA, 74 bp, Homo sapiens
cccgtccggactcccccgatcccagagatggcaagaaagaagctgaaaaaatttactactttggagattgtgct

SEQ ID NO: 62384 - DNA, 90 bp, Homo sapiens
cgggatcgtgaccgagaccgtgaccgagagcgtgaccgagagcgcgaatatcgtcatcgttagaaggagccctctggcacaaatggaaga

SEQ ID NO: 62385 - DNA, 83 bp, Homo sapiens
gacttcggttcgggtgcgctgctcaaggacacggtctacaccgacttcgacggtttggtgcacctcgatttggaggaagtagg

SEQ ID NO: 62386 - DNA, 49 bp, Homo sapiens
gaagagcgggacccgagccctgtccaagtggtaagaagttcagaagcaa

SEQ ID NO: 62387 - DNA, 100 bp, Homo sapiens
gcaccaacaggtccgccaaatccggaagaagatgatggaaatcatgacccgagaggtgaggttagtacctgtctcctttgaggacccagagttcaagtcg

SEQ ID NO: 62388 - DNA, 49 bp, Homo sapiens
ggaagagagctctttcaacaagaaaaatcaacccaaggagatctgtgcg

SEQ ID NO: 62389 - DNA, 82 bp, Homo sapiens
ggatatcaagccagagaagtgcccgaggagagttaacagcacagccatgacagtgcagatcctgctgaagctggaccgcctg

SEQ ID NO: 62390 - DNA, 74 bp, Homo sapiens
acagaccttcactacctattctgacaaccagcctggtgtgcttattcaggatctcaaagatttcatgagacaag

SEQ ID NO: 62391 - DNA, 75 bp, Homo sapiens
gctggctcagccgcaagtacccgtccatcatagtcaactgcgtggaagagaagcgaacacttgccaagtatttca

SEQ ID NO: 62392 - DNA, 82 bp, Homo sapiens
cgggcatggtggtctggggcaacgcggaagacctgcctagagctggaacgttacctccagagcgagccctgctatgtttcag

SEQ ID NO: 62393 - DNA, 90 bp, Homo sapiens
cagaatccagctgttactccgtccgcggcctctcagctctagggccctctgcacactggcccccccaggcctgaccgccgctgcctacag

SEQ ID NO: 62394 - DNA, 82 bp, Homo sapiens
ggagaacctccccatcctgcagcagcccacggagaaggagaatacttatctctggcgcacatcactatatttggctgcctct

SEQ ID NO: 62395 - DNA, 76 bp, Homo sapiens
tcggatctgctccagtgtctccagtaccagttctaccaggtacaggtttgcagattccgccagcagcacagcaagc

SEQ ID NO: 62396 - DNA, 100 bp, Homo sapiens
tattcaccatcaacaaagaagaccacacactgggaaacatcattaaatcggagttaaatacctgtgcatcccagcagcggattcaccatctcaaaacctg

SEQ ID NO: 62397 - DNA, 97 bp, Homo sapiens
ctgtaaccgctataatgaggatgatgcaaaggcagcaagagatgcacaggaggtctcatcacaactacgtcaaggaagctagaccgagaacagcaag

SEQ ID NO: 62398 - DNA, 83 bp, Homo sapiens
aaatctactactgttcatggcagcaccttatgaagctaggcagccccttgtccagcccgagggatcctcatcagggggcccag

SEQ ID NO: 62399 - DNA, 83 bp, Homo sapiens
gtgcagccgcgaggaggcgcgggaggtgttcgagaacgaccccgagacggtaatcattaccaaatgaggaggaaaggacgatg

SEQ ID NO: 62400 - DNA, 101 bp, Homo sapiens
ccagcatgacaggatggaagtacaagtgtcagcacctatgatggaatccgacgtggtaggcccagagcagatactgtccgcgatttaataaatgaaggaga

SEQ ID NO: 62401 - DNA, 82 bp, Homo sapiens
agagaaattctcatgatagcttccaagggacaaggtgtcaacaatgtgccggtttgttgataagccggggcccttcgtggga

SEQ ID NO: 62402 - DNA, 74 bp, Homo sapiens
atgtctgacagccctgtgtgacaccaagataagtaacccctgctgttcgtggcatttgccctgtgtatgttttg

SEQ ID NO: 62403 - DNA, 98 bp, Homo sapiens
gaagagtcagtggaaggcacggcaatctatttaccagaaagaagagattttatcgacatcgaaagtaaatttgccctaaggacccctgaagacacagc

SEQ ID NO: 62404 - DNA, 75 bp, Homo sapiens
ttgacctctcaatgaaagtgttgaaacaggatgggaaatattttacacagctggaggagagcaggagtgttcaga

SEQ ID NO: 62405 - DNA, 100 bp, Homo sapiens
cttgtgtcaccatgctattatgcatagaaagtctgaacagcagaagaagcaacaggaggctgagaaactgcatcgacaagaaaggaaaagactccgtcgt

SEQ ID NO: 62406 - DNA, 82 bp, Homo sapiens
gttgtcattgatggtctcaatgttgccaaaatgtttcctaaagttcgtgaatctcaacttgcaggggtgatgtgcaagctcc

SEQ ID NO: 62407 - DNA, 75 bp, Homo sapiens
atcttaccttgcccaccaacttcagagatttgtccaaggtgaccaagaatatggcccaggtgaccaaagccctgg

SEQ ID NO: 62408 - DNA, 51 bp, Homo sapiens
ggaggaagaggaagaggaggaattagtggaaaatgtttcaacgtgcgcaag

SEQ ID NO: 62409 - DNA, 75 bp, Homo sapiens
tcggtggagcagacgctactcccgctggtttctcaggaccaagaatcgccttcagccctgtctggtgcatccttg

SEQ ID NO: 62410 - DNA, 100 bp, Homo sapiens
gcggctctaacggggctttctacaaggatgtgatcttcgtggtggaaagctaaattttaaaaccaccccaatggatgcagacagtgatgttgcattggac

SEQ ID NO: 62411 - DNA, 100 bp, Homo sapiens
ctgttcttcagtggaccaagcatgatgattcttcagataacttctgtgaagctgatggcaaaatcctcaatgatgatactgctctcaaagaatataaaat

SEQ ID NO: 62412 - DNA, 99 bp, Homo sapiens
aataggtgactgccggaaaaaagggaactttgaatattgtcaaggcaggatggggaagcagaatagcaaactggcccctgaagtgatggaggacctggt

SEQ ID NO: 62413 - DNA, 75 bp, Homo sapiens
gcatactggcccagtgagagccttggatgtgaacattttccaggtttggcagttctctaccagtggaccaatctt

SEQ ID NO: 62414 - DNA, 75 bp, Homo sapiens
cctgcagcgccagcagctggactatggcatctatgttatcaaccaggctttaaactccagagaacctcatatgtg

SEQ ID NO: 62415 - DNA, 100 bp, Homo sapiens
catcctgatgtgcagttaaaaaatctgcccttttatgatgtccttgatgttctcatcaagcccacgagtttagcatggaggatgaaaaggaagatagtaa

SEQ ID NO: 62416 - DNA, 100 bp, Homo sapiens
agtccgcgagccccgcactctctcgatgagtcggagaagtcccgttatgggtgctacatgtgtgctttcagagcagtagtgtgaggaagcttggagtggg

SEQ ID NO: 62417 - DNA, 74 bp, Homo sapiens
acttctaagagaagcaatgggaatttacatcagcaccctcaaaacaggtccaggttcacactagaaggccaaaa

SEQ ID NO: 62418 - DNA, 100 bp, Homo sapiens
agagagcgtcccagcttctttgaaagagggcaggttggatttggtctagggagtcccagaaagaagtagaaaaagagagagaagcctaccgtcggagaac

SEQ ID NO: 62419 - DNA, 83 bp, Homo sapiens
ttactaccagggccggaggattaccatcaccggaagaccctcgagatgcccctcctccaactcgtgctgaaacccgagaggag

SEQ ID NO: 62420 - DNA, 100 bp, Homo sapiens
gccgtggctctagcaggctccactaactggggctacgactctgatgggcagctcctgggcaacgtgctggtctgtgtgctggcccatcactttggcaaag

SEQ ID NO: 62421 - DNA, 88 bp, Homo sapiens
cagacatggacaccaaacatttcctgccgctcgtatgagaatgagtcggccctgaacctttatgagacttgcaaggtgcggaccgtga

SEQ ID NO: 62422 - DNA, 75 bp, Homo sapiens
aggcaatgctggatagataccgaattcttatcacaaaggcgcggatcaagaagatcatgcagacggacgaagaga

SEQ ID NO: 62423 - DNA, 83 bp, Homo sapiens
aagcttctgaaccatccacacatcataaagctttaccagaaagacgagaatccaggacttgaatcgtatcttcccactttctg

SEQ ID NO: 62424 - DNA, 84 bp, Homo sapiens
tctgcacatacctcagcgggaaaaacagtatgcgccgaattgttaaaggaaatgggctggcaggaagacagtgaaaatgatgaa

SEQ ID NO: 62425 - DNA, 75 bp, Homo sapiens
tgtggaaggatcaacagtcaattgtgtactagcattccaagcctactttggggataaaggattatttggtcttct

SEQ ID NO: 62426 - DNA, 112 bp, Homo sapiens
tttttcctcctcggctgcgccgcgtgtcctcggagcgcggtccctgtattggtctcctgctcctagagaagtcaatgaaaggattctattttgcaaagctgtattatgaagc

SEQ ID NO: 62427 - DNA, 50 bp, Homo sapiens
cctgaacatcatgaattcccaagaaggagagaatctggacgaggctagag

SEQ ID NO: 62428 - DNA, 50 bp, Homo sapiens
accagaagaaaacctgaatctctgagagctcccagctcctccagcagccg

SEQ ID NO: 62429 - DNA, 92 bp, Homo sapiens
atcgtggtggtcggatttcaccacaagaagggctgccagggagatcttgtgcgaaaactcaaagaagataaagcaccccaagtagacgtaga

SEQ ID NO: 62430 - DNA, 96 bp, Homo sapiens
gatgagagaccactctttccccaatgtggcaaaggagcagagaactttgacaagttcttcacacgaggacagcccgtcttaacaccacctgatcag

SEQ ID NO: 62431 - DNA, 100 bp, Homo sapiens
aggcccagggcttcacagaggataccattgtcttcctgccccaaaccggcctagttccccgagagcgttcagacagtgggggctcaagctcagagccatt

SEQ ID NO: 62432 - DNA, 100 bp, Homo sapiens
tcggaggagtactcggtgaaatcctgtcctgaagactgtaaggcctttccccctggtgctcttcatcctttaccaaagagacaagcacttgaaaaaagca

SEQ ID NO: 62433 - DNA, 82 bp, Homo sapiens
ttcacctggaacatcaaccacgcccggctgatgctgctgatgcaaggaatcccctgggctcccgtccactccactgctgacc

SEQ ID NO: 62434 - DNA, 82 bp, Homo sapiens
ttctgcagcctcagtgctactcaggttccagcaagacctggagcaggtgcaggtcccaggtgtgacaccttcagcaggtctc

SEQ ID NO: 62435 - DNA, 75 bp, Homo sapiens
caaggctttgttggtgttggaccgttcgatattacattgtggggcatggagctgggccttctgagcatgcagaga

SEQ ID NO: 62436 - DNA, 90 bp, Homo sapiens
tgggggatttctacgacccggagcacccgacccctgagtctgaattccacttgctgctctttcactgatcagcgttggataaatcgagcc

SEQ ID NO: 62437 - DNA, 100 bp, Homo sapiens
cagccaggagaaggagttcgtgcaggcgtacgaggatgtgctggagcggtacaaaggtaagaatgattgatgttggctgatattggagtgctcattcaca

SEQ ID NO: 62438 - DNA, 83 bp, Homo sapiens
gcaaggagctaaagcagcgtgcgttcagccctgggcattgttgcaaaacataaggagttggaggggaccagccaggcttcagc

SEQ ID NO: 62439 - DNA, 82 bp, Homo sapiens
cgccgtctgctgttacctcttgtactccaaagattcaggtttactcacgtcatccagcagagaatggaaagtcaaatttcct

SEQ ID NO: 62440 - DNA, 75 bp, Homo sapiens
tcgcttggttaaaacctgacacttttaacaggtgaatcaggtctaggaaaatcgactctcataaacagcctattc

SEQ ID NO: 62441 - DNA, 74 bp, Homo sapiens
aggatttttgtcaagattggataaaccatgtatcacattgattgtagagaggtcctgcttgaagctttgttcct

SEQ ID NO: 62442 - DNA, 75 bp, Homo sapiens
actggactacttacaaaaatgtgtctaaaaagcacggcaagctcattacgttcttacgaacattcatgaagtctc

SEQ ID NO: 62443 - DNA, 148 bp, Homo sapiens
cgggagaggcccagcgggagtcgcggaacagcaggcccgagcccaccgcgccgggccccggacgccgcgcggaaaaggtgatgtacctgctcccccttcaccttctgccataattggaagcttcctgaggccctcaccagaagcagat

SEQ ID NO: 62444 - DNA, 74 bp, Homo sapiens
gtggatcgctgtgatcgtcacttgccttcctaatgatggtgatgaaaaatatgagaagaccataattaaaagtg

SEQ ID NO: 62445 - DNA, 80 bp, Homo sapiens
tggtttgaaacagcttcacaagggcacagcctttgcagcgagcagggcagcagtgctgagaccgctccagaggagaccga

SEQ ID NO: 62446 - DNA, 100 bp, Homo sapiens
ggcgaatcacttataaatggcgccgaagcaggacccgaagcctaaattccaggaggtactatactggcaattgctggagaagattttgcaattgttgctt

SEQ ID NO: 62447 - DNA, 100 bp, Homo sapiens
tttgtcaagtgggtaggactatcctactggcactgctcctgggccaaggagcttcagtgctgggctttgacaaacttcctctgtggggtaccatcctcat

SEQ ID NO: 62448 - DNA, 76 bp, Homo sapiens
cagcagaactgtatcaaggaagtggagcagttcacccaggcatatgggcaacaaagctatggaacctatggacagc

SEQ ID NO: 62449 - DNA, 83 bp, Homo sapiens
aaggaacacccggcagagcccacatccacgggagctggtcctcagccctcgctctcgctggcggagcagcacctggagtcgcc

SEQ ID NO: 62450 - DNA, 100 bp, Homo sapiens
gtgaagggctggaggccccggcggctagatgatgaccactggatcgtcgacacagactacgacacgtatgccgtgcagtactcctgccgcctcctgaacc

SEQ ID NO: 62451 - DNA, 75 bp, Homo sapiens
tggatgatgccaaagttttattaggtgggtcctacgtgtatgaactcagcgcagtcctcatacacagaggagtga

SEQ ID NO: 62452 - DNA, 100 bp, Homo sapiens
tgggcagcagagtttatacagcagcagggatgtggatgagactatcagttggattaaggaaaaggagcagttaatggcctctgatgattttggccgagac

SEQ ID NO: 62453 - DNA, 75 bp, Homo sapiens
aggaaactggggctgtggtgcctttgggggtgatgccaggttaaaagagatgaaaagatgggccaggagtccagt

SEQ ID NO: 62454 - DNA, 80 bp, Homo sapiens
gagcagttccatcagctcagccaggtcttacctcctgccccccgaggtctgcagtctcctgaacccagcagccatctacg

SEQ ID NO: 62455 - DNA, 82 bp, Homo sapiens
caggagtcatcggacgccagaatctggccttcctggatgctctgcagaaccaggctgaggccagcagcaagatcatcggcca

SEQ ID NO: 62456 - DNA, 100 bp, Homo sapiens
agacttttatgaaatgttagccgaaagaaggaagtgttttagatcacagtttggaaagcctcatccaccgccttcgtggtttgtgtgacaacatggaacc

SEQ ID NO: 62457 - DNA, 97 bp, Homo sapiens
aaagcttggagtgtcttgtgaagtcattgatctgaggactataataccttgggatgtggacacaatttgtaaggacttggcctttaccctggaagag

SEQ ID NO: 62458 - DNA, 74 bp, Homo sapiens
taatttcaatttgaaaacaagtggaatagtgctgtcttccttggaatacaatagatatggctggtgggtaggag

SEQ ID NO: 62459 - DNA, 75 bp, Homo sapiens
acagtagtggaagatgtaaagcaatatttcgagcagtttggcaaggcgaagctggtccgttacatttgtaagcag

SEQ ID NO: 62460 - DNA, 83 bp, Homo sapiens
ctggaaattgcgctggaccgtcgccttgctcctcgccgcggcggggactgcaggaatgtgggtgccggcaggacaggcgattg

SEQ ID NO: 62461 - DNA, 82 bp, Homo sapiens
cagcagctgagaaaggagctcggggactcccccaaagacaaggtgtccctgttacctgagaatgacagatggaatgaaacta

SEQ ID NO: 62462 - DNA, 98 bp, Homo sapiens
tagaggacctgtgcaacaacctcttgaggatcgaatcttcactcccgctgtctcagcagtctacagcacgcatcaggatactcaaagtggaaaggatc

SEQ ID NO: 62463 - DNA, 49 bp, Homo sapiens
cctggccctctaccaaaccgtggggatggaagggtctaagacgtccaac

SEQ ID NO: 62464 - DNA, 82 bp, Homo sapiens
ggctggagcaggagatcgccacctacagccgcttgctagaggttgaggacgctcagtggggcaggagaccctgtaggaggac

SEQ ID NO: 62465 - DNA, 75 bp, Homo sapiens
gcacatcgtggtggtcggatttcaccacaagaagggctgccaggtctctaattaacagaagatggcaaagcccag

SEQ ID NO: 62466 - DNA, 89 bp, Homo sapiens
accccatcacagaagatgagtacctggagaatgccttgaagctgatttcaggtcttatatccagatggccaggctcagatgattcaccc

SEQ ID NO: 62467 - DNA, 82 bp, Homo sapiens
gaaatctgcaagcccggaagtttcagaagagagaagtggagatcctgatgtttctcagtgccattgtgatgatgaagaaccg

SEQ ID NO: 62468 - DNA, 90 bp, Homo sapiens
agtgcgcgccctggcgggtccggaccaagggcgccctgcgtccggcagaggaggcgagcatcccgctcaggtgatgaggaacccctcgcg

SEQ ID NO: 62469 - DNA, 97 bp, Homo sapiens
accgactctcaaatgaagtttcaagacttgagtctgaagttggccattggaggcatattgctcagcaagaaggctcactttgtgctcaacattgcct

SEQ ID NO: 62470 - DNA, 75 bp, Homo sapiens
ggaactgcaagacaggaagagaggccgtgcccctcaggaatgtatcctgtcaggtataatgtcagtgaatggcaa

SEQ ID NO: 62471 - DNA, 74 bp, Homo sapiens
ccggacttcctctcagaagaggaccgcggaacgctgaccggaaaggagattgagattgacattgaacctacaga

SEQ ID NO: 62472 - DNA, 96 bp, Homo sapiens
caaggtcctagaactcaggaagagtgatgtggttttggataaggtaccattgttggatactggtgacatcatcattgacggaggaaattctgaata

SEQ ID NO: 62473 - DNA, 113 bp, Homo sapiens
cggaccaggggcgagggctacccgctctttgccgtgacaacaccgttcccccagccgggctggacctgaaggagaagaaggagaaggtggaggagaaggcaagccggaaagag

SEQ ID NO: 62474 - DNA, 97 bp, Homo sapiens
gacatgtcatcaactcagctggtgtcatggagaaactccagctgggcccagagattctgcagcgggaaaatccaaggcttatttatgccaggctgag

SEQ ID NO: 62475 - DNA, 101 bp, Homo sapiens
gagacctacccgaacgacgcgggcgagcggggctttggacgccggtggagacgcaggcgagattgtctccagctttaagaccacgacatcgagagctgcct

SEQ ID NO: 62476 - DNA, 73 bp, Homo sapiens
aggcggcggagcgcgagagcttcgagcggactcaggtacctggactatgccagagtccccaatagcaatcccc

SEQ ID NO: 62477 - DNA, 100 bp, Homo sapiens
cgagaggaggcgttggtcagaggagtcttcatgaaggtggtgaagcccaagggcaagcaggaggacttcaagacgacagttctggagggtatggagacgg

SEQ ID NO: 62478 - DNA, 99 bp, Homo sapiens
cacagatcttgaactactgaaggaactacagcaggtcagagaacagatggaggaggagcagaaagcaatgaggttggatggcaagcatgtggtgtttgg

SEQ ID NO: 62479 - DNA, 83 bp, Homo sapiens
ctgtgagggactcttgcaccccgactgcaagcttcaggtgttggagttaacgtccctaaaacccgccggactttctgtaagaa

SEQ ID NO: 62480 - DNA, 101 bp, Homo sapiens
ctcgccgtgctctctcgcggcggccggcggggcccgcgctgcagccggagacccggagaaaggagtccctgtgaagcaggaagagtgagggcaggttcact

SEQ ID NO: 62481 - DNA, 101 bp, Homo sapiens
tggcgggtgtggacgccactacagttcatcaacatcaactacgtccctctgaaggtaaagagaaatgtgtatgaccttacaagtatccccgttcgccacca

SEQ ID NO: 62482 - DNA, 76 bp, Homo sapiens
atgttgagcctttttggcctggcttgtttgcaaagcacacagcaagaaggaggccatcagcaaactgggaagagga

SEQ ID NO: 62483 - DNA, 75 bp, Homo sapiens
gctgacgtggctcttgccctggcaagtgctgcctcccaaaatggtcctggacccaagccagaagcctctgcaaag

SEQ ID NO: 62484 - DNA, 90 bp, Homo sapiens
gtaagtggatcacacgcgccggctgctgctactactaccactttgggctgatggcaactgaccccatatcatgtgaacctcctcctggct

SEQ ID NO: 62485 - DNA, 82 bp, Homo sapiens
acgggaagaagcagctggacccgctcaccatctacggcatccggtaataccctctaccatctgctttggtcagggtgccgct

SEQ ID NO: 62486 - DNA, 82 bp, Homo sapiens
ctacgcctacatcaacttccagcagcccgcggacggccaccagcttgggctccccacggagggcagcaagtgggacttgggg

SEQ ID NO: 62487 - DNA, 98 bp, Homo sapiens
ggacctgagccgcgaggacacgggctgcaacctgcagcacatcagcgaccgggagaacatagacgggacagcaatcagacctattgctttgagagctg

SEQ ID NO: 62488 - DNA, 75 bp, Homo sapiens
aaaatggacgagtaatcgcctgctttgattcattgaaagatccagtttatggaaaaggaaaacttggagaaatcc

SEQ ID NO: 62489 - DNA, 100 bp, Homo sapiens
agagcatctgctgcacccaagcctgagccggttcctgttcaaaaggacttggaaaacagtgtgggtgaacttagtgaaggacaaagaccccagctaacag

SEQ ID NO: 62490 - DNA, 101 bp, Homo sapiens
gcagggcaacacctctacaaggatctgcagccatttatattgcttaggctactgatgagaccctttttgctcttcctgctgcatctgagcctgtgatacgc

SEQ ID NO: 62491 - DNA, 89 bp, Homo sapiens
gtgaatcattaaagagcaaaggagaagttttcccgtggctcccacgctgctattcaaaacttcctggctcctacaagtgctgggaagac

SEQ ID NO: 62492 - DNA, 76 bp, Homo sapiens
tggccggaggaagctcaccttcgacgaggaagcttataaaaatgtggtgaagccttgaaaggaaaggtcacagttc

SEQ ID NO: 62493 - DNA, 100 bp, Homo sapiens
tttctcgagaagcaggtggaaacatgagcattcagtttcttggtacagtggtcacctatgagatagagaccaatgggacttttggaatccagaaagtttc

SEQ ID NO: 62494 - DNA, 83 bp, Homo sapiens
catctttcagcagttggcacacatggttaaggaacaggaggaaaccattcagaggtggtactatgacagcctgagccgcggag

SEQ ID NO: 62495 - DNA, 75 bp, Homo sapiens
gctggctttaatcctgaaagccatgcagcggtatgactatgaatatgatgaaaatggtgacagagtcgttttagg

SEQ ID NO: 62496 - DNA, 87 bp, Homo sapiens
ggtttgtactatcctcggtgctgtggtgcagagctagttcctctccagctcagccgcgtaggttgtgaactaaaggccgacaaagat

SEQ ID NO: 62497 - DNA, 75 bp, Homo sapiens
gtcaaaggaacttttaacccagcgcattggatattcatttaagaaggatgagattgagaattctattgtacaccg

SEQ ID NO: 62498 - DNA, 49 bp, Homo sapiens
cctcccaagtagctgggatcacaggaacgaggcccagcaaaaagcagag

SEQ ID NO: 62499 - DNA, 100 bp, Homo sapiens
gctggccctcgggctgcgggagccgggctaggacgccgagcggtgactccccgccgctcccgggggccgtgacgcccgtgatgctgatgagcgagagaag

SEQ ID NO: 62500 - DNA, 98 bp, Homo sapiens
gggcagaggcgggactgtcgtctggggcatgatgccttcttctgtagagtgggcgctttgcagaatacgtgttgaatgaaatcactgatctaggaaaa

SEQ ID NO: 62501 - DNA, 98 bp, Homo sapiens
cagctgagacggcagcggcagcttctcagacactaccccaagcagtccttcaccatggtggcggacaccccggaaaaccttcgcctcaagcaacagag

SEQ ID NO: 62502 - DNA, 74 bp, Homo sapiens
tgacgttgcaaaggcgcttaatcggcctccaacgtttccccaatgaagaagactcatttcataagtttgtggct

SEQ ID NO: 62503 - DNA, 103 bp, Homo sapiens
actggcgggctccgtggaagcgtggccggcagcgtcccggacgaggagcaaaagatacagatattgtggatgaagccatctattacttcaaggccaatgtctt

SEQ ID NO: 62504 - DNA, 75 bp, Homo sapiens
tcactgacttcaagaatgaagccgcggaccctcctggattttttatcaagcagaaatgcatcgaacaacgagaat

SEQ ID NO: 62505 - DNA, 101 bp, Homo sapiens
ttccagttccgcacgcgctgggattcggagcttcagcgggaaggagtttctgaacttctggaacaaacaggacacattggagctggagagcccctcgctga

SEQ ID NO: 62506 - DNA, 90 bp, Homo sapiens
acttggatagacttatacctcaggtatttaccttgctgtggattgctgactggatggtccatcacttctggaggaaaggaaaggacccgg

SEQ ID NO: 62507 - DNA, 72 bp, Homo sapiens
cttggactggatccaccactatgtccccaaaaagccctctatcgtccgagctttgtgcacccaggggctgcc

SEQ ID NO: 62508 - DNA, 98 bp, Homo sapiens
ccgatgcaccgagtccagcccaggaaaatggagaggatgctttggagtctgcaatgaagaatggcctgtggggtcacgctctgctacttgcaagtaag

SEQ ID NO: 62509 - DNA, 75 bp, Homo sapiens
gcaggagcagcttctggatgaaatacatcgtgagaagagaggttgcttctagaactgctggagttactgtttgac

SEQ ID NO: 62510 - DNA, 82 bp, Homo sapiens
gtactggtgcccatcctgccttcaagtacctggccccttccaattgaagacttgtgcagtttaacatcccagtcactgccca

SEQ ID NO: 62511 - DNA, 50 bp, Homo sapiens
gcgatggcttacaatgttcagcaaggatgttttagaagaatgtatgtctc

SEQ ID NO: 62512 - DNA, 89 bp, Homo sapiens
cacaaaataagctggaaaaatctgagatactctcttaacttactggaataaagtatcacctcaggagctcataaacattcttatacttt

SEQ ID NO: 62513 - DNA, 75 bp, Homo sapiens
atttgacaagactaaaaacacttctctcagaaacagagggtaagatgatcatgcaggataaactggagaaggagc

SEQ ID NO: 62514 - DNA, 74 bp, Homo sapiens
gatggtggactcttcattccaatgggcaaaatcctgacagatgactttgcagacaaggagggtctggaaatggg

SEQ ID NO: 62515 - DNA, 50 bp, Homo sapiens
atggggctaactccagaatcccccattgccactgaagatcctggtgtcgc

SEQ ID NO: 62516 - DNA, 82 bp, Homo sapiens
tcgtcatcagaaactgaaggcaactttgtctatcgcacagcaagatgagtatcatatggttcatctagtatgtacttctcgg

SEQ ID NO: 62517 - DNA, 75 bp, Homo sapiens
aaatgtggacagtggagaaggcccagccaatgaagatgaagacataggaggtaggagcaacggtgggaatgccct

SEQ ID NO: 62518 - DNA, 98 bp, Homo sapiens
gcagggcagtgtggtgtccagccggatccagcatctctccaccatcgactacgtggaggacgacaccatccagcacatgagagacagcaagcacatcg

SEQ ID NO: 62519 - DNA, 73 bp, Homo sapiens
catggagacgggcgtccgggcagcggagttcatcaagaattacatgaagaatgtgcagctctcactgctaaca

SEQ ID NO: 62520 - DNA, 75 bp, Homo sapiens
gttcgaagctgagtatgtgacagggaatctgactaagcacatgaagtcgaaggcccacagcaaaaagtgccaaga

SEQ ID NO: 62521 - DNA, 100 bp, Homo sapiens
aggagggcggcgggactgcactcgagtgtccagacctgctcgatggtattttgaaggtggcgtctcatctgtctacctctgggatctggatcatggcttt

SEQ ID NO: 62522 - DNA, 50 bp, Homo sapiens
tcatgttttggctttggggctagggtgtttctcctgagaaagaaaaaaac

SEQ ID NO: 62523 - DNA, 100 bp, Homo sapiens
tcttcaacaggtttgtctcagcgcagggaccctccgggcctgctttggaaaatatttacaccagcagctccagttcataccaataaagaagatcctgcta

SEQ ID NO: 62524 - DNA, 100 bp, Homo sapiens
ctgcaagcagtcttccaggctttgcggctgccaaaggaataattgagacgtctgagttgagcaggtctctaattaacagaagatggcaaagcccagccac

SEQ ID NO: 62525 - DNA, 101 bp, Homo sapiens
acggacagcccatcgtgtgaactatagagtttgtggacagatttatattgaagaaatatttgccattgctaaggaattgctaaaaacagaaattgatgctg

SEQ ID NO: 62526 - DNA, 82 bp, Homo sapiens
ccagaccctggagcctcagttggaagcagccgatccagcctgcggagcctgtggggcaggattaacacagattcctcagatc

SEQ ID NO: 62527 - DNA, 100 bp, Homo sapiens
atcagaactatgttcttaaatgggattatacatatgcaaacatgacctttcaagttcagtggctccaagaaactccagaaaatcttgccaaacttctgac

SEQ ID NO: 62528 - DNA, 89 bp, Homo sapiens
acaagatcttggaaacattatataccttggggaaagctgattcaatcaccttctgctgcttggatgggtggatttggtgctcagcctcc

SEQ ID NO: 62529 - DNA, 100 bp, Homo sapiens
caggagtgggatttatatcaagcagtacctggagtagaacagaaaaattattatgtctgtgttcccttgggactcattggaaattgtacagtgacatctt

SEQ ID NO: 62530 - DNA, 100 bp, Homo sapiens
ccgagctggacccggaccggttttgggtcgcacggggcaggcggttgcagttcgagccaaggcctttggattcagcgtcatattttatgacccctacttg

SEQ ID NO: 62531 - DNA, 74 bp, Homo sapiens
ggcctggtttgatactgacctgtaaatcatcctttagaatggtgtgctcttgcttgcacagcttttgaatgagg

SEQ ID NO: 62532 - DNA, 92 bp, Homo sapiens
ccactgcctacaaaccaccctctcctgaccctgaagaactgtgctttggacatcagacagtgcaggagaagaatgtgatgcggcagaagggg

SEQ ID NO: 62533 - DNA, 96 bp, Homo sapiens
cattcctgctaggtgccatattcattgctttaagctcaagtcgcatcttactagtgaagtattctgccaatgaagttaaagattggtgcctggcca

SEQ ID NO: 62534 - DNA, 75 bp, Homo sapiens
ctgggttctattttccctcctcaaactgactttgcagccacggagaggcatcatggccgccctcagaccccttgt

SEQ ID NO: 62535 - DNA, 75 bp, Homo sapiens
agcctcctgagtagcttggattacagactgcctcttcaaggtgtgccccatgaaccgctactcggcccagaagca

SEQ ID NO: 62536 - DNA, 148 bp, Homo sapiens
actggctctcctagaatacaactaataacactaaaaggatgatggacagcagcctgagagacacaatctgacgttaaaagtttaacaaccggaacagctccagtctgcagctcccagcgtgatcgacgcagaagacaggtgatttctg

SEQ ID NO: 62537 - DNA, 109 bp, Homo sapiens
gcgacggccttgagcgaggaggagctggacaatgaagactattactcgttgctgaacgtgcgcagggaggctgcgtcatcaccatctcgggacgcatgaccttcacgag

SEQ ID NO: 62538 - DNA, 98 bp, Homo sapiens
gctgcccagcccaaaggcccatgaggggatgcagttatgggctctgtcgccgtgggcaaaagaaggggaacgtggcccagaaacactgggttggacct

SEQ ID NO: 62539 - DNA, 100 bp, Homo sapiens
acaggagctgggccgtgactacaggacctgtctgacgatagtccaaaaactgaagaagatggtggataagcccacccagctttgtgtccctggtgatgtt

SEQ ID NO: 62540 - DNA, 75 bp, Homo sapiens
atgggcccacggacagattctcaagggaggagttagagtggcagattctcaacctgaagctgcgggaagcagagc

SEQ ID NO: 62541 - DNA, 50 bp, Homo sapiens
ctgagccccagcaccagtcacctccaggtgtatgtggaatttgatgatct

SEQ ID NO: 62542 - DNA, 117 bp, Homo sapiens
gtggccatggggagcctcagcggtctgcgcctggcagcaggtcctgggaactccaacaagggagcaaatcagagaaatgaacccaaactacacagaatttaaattccctcaaattaa

SEQ ID NO: 62543 - DNA, 80 bp, Homo sapiens
caacgtccgactgcactcacacgacgtgcgctatgggtcaggtggcagtagagaagagcatcacagaagttgctcaggag

SEQ ID NO: 62544 - DNA, 101 bp, Homo sapiens
cgcggtggcaggagctgacagagtgatgggaaacgcgtgagccaggccgagaggtcagatgtaccaacagtaccagcaacaggccggctatggtgcacagc

SEQ ID NO: 62545 - DNA, 75 bp, Homo sapiens
gcagttttatccttttctgtacaacatcacttcttctgtttgcagtggaaatgctagtgagtcggaggaagaccg

SEQ ID NO: 62546 - DNA, 74 bp, Homo sapiens
ctctgatcgaaggggagtttccacagtgattgatgctgcctcagggactactggcattcagtgatgtggtcata

SEQ ID NO: 62547 - DNA, 100 bp, Homo sapiens
agccctgtggctgggggcagagctcagaccaaaggtgagaaggtgcggactacagagactcaagtgtttgtggccacaccacagaagaactttctccaag

SEQ ID NO: 62548 - DNA, 75 bp, Homo sapiens
gactacgacatccacttctaccccaccttccggagcttagaagcaaagttaagagactcatcagattctgagctg

SEQ ID NO: 62549 - DNA, 50 bp, Homo sapiens
ctcggaccaagcctcgggagctaaggagatcatgaatcagacagataaaa

SEQ ID NO: 62550 - DNA, 90 bp, Homo sapiens
aggcaagcggggcgccgacctcgggcggccccggcccgcgcccttgcccctcggccgggcggacggtcctgttattgccttggagtttaa

SEQ ID NO: 62551 - DNA, 85 bp, Homo sapiens
cgtctgccgcagagtcggcacctgaaggacatggagaaatgctgctcatggattctcccttattcaggtggacaacacaaaggtt

SEQ ID NO: 62552 - DNA, 90 bp, Homo sapiens
accgcagcagccgtcggagcacttactggagtccaagatgctaatgctccctcgtgaaagatgcttctgttcctctgattgatgttacaa

SEQ ID NO: 62553 - DNA, 99 bp, Homo sapiens
atgatgcaagatgtggcagaagaacaagaagttgagaccgagaatgtggaaacagacaggtgctctagttcacagctataggggaacaggtggaatatt

SEQ ID NO: 62554 - DNA, 100 bp, Homo sapiens
catattcgaagcaaatgatctttttgagaatggaaacatgacccaggttcagactactctggtggctctagcaggtctgacagcaccagttgcccttgaa

SEQ ID NO: 62555 - DNA, 80 bp, Homo sapiens
ctgctgggcttcgtccagatcgggaaggaactcgccgtgtgtgtgtcagagaatgttgctcctgtgccctgagtcaacaa

SEQ ID NO: 62556 - DNA, 90 bp, Homo sapiens
gccagaacggacaggggccgcgccgctgccgctgctgctggtgttagcgctcagtcaagggcttaaaagacaaccttcttgcttctggga

SEQ ID NO: 62557 - DNA, 100 bp, Homo sapiens
tttttctcatggatgttcttcttcgagtatttgtagaaggaggtgctgatactcaaagaaggtttaagttgtctgatctctctataaattccactgaatg

SEQ ID NO: 62558 - DNA, 83 bp, Homo sapiens
cccggggcacgtgcagaaaggagccccgcgagtggcgcgccggggatgtactccaaagattcaggtttactcacgtcatccag

SEQ ID NO: 62559 - DNA, 109 bp, Homo sapiens
cttacattacctgctatatctgtaaagggtatctgatcaagccaacaacagtgacggaatgcctccatacatgaactctaatgaatcattgattgaccagcactatttt

SEQ ID NO: 62560 - DNA, 100 bp, Homo sapiens
ggagcggaaggtgggaaagggccggaaaacacacgttcctccgaaaccggtttgcaagtccttgtagaggtactttgacccagccaacggcaagttcagc

SEQ ID NO: 62561 - DNA, 101 bp, Homo sapiens
aagcacgctactacctggtgcagggcctgattgaggactgccagctggcgctgcaggtctcctctgagcctccggcctccataagacccaaaacagatgac

SEQ ID NO: 62562 - DNA, 100 bp, Homo sapiens
caagacaccccttgaccagcacacactgcaaggagatcaggttgtagatgagcatgagagtgtggagcagagtcggcgagcgcaagtcgagcccatcaac

SEQ ID NO: 62563 - DNA, 100 bp, Homo sapiens
ctggccaaagcctgcccagacggctcacctgtgcgggatggaacaaaaggtgcagattgatgagtacgattactccaagcccatccaggggcaacagaag

SEQ ID NO: 62564 - DNA, 83 bp, Homo sapiens
tgacagaaatttacaaatacatcgtaaaatattttgatgagaaactctgtgaaggcatatttaaagtccttataaaggacatc

SEQ ID NO: 62565 - DNA, 83 bp, Homo sapiens
aaaggcgggactgccacgtccaagcaaaccgggaaaggagaggatcccggagccggtctccaactggtttggcaacaagagga

SEQ ID NO: 62566 - DNA, 87 bp, Homo sapiens
actaaaaagcagagcatttctggaaagaccacagcaagattctttcattcgtctcctcctagcctgggggaccaggctcgaactgac

SEQ ID NO: 62567 - DNA, 100 bp, Homo sapiens
cagcaatcggagccagtgtctagaggaccacacctgggcacctccctttcccatctgcaaaagtaatccagacaggcggtcagtttccaccatgaatctt

SEQ ID NO: 62568 - DNA, 75 bp, Homo sapiens
cgagaccctagaggcctgcggcctgcgatgagcagcaccagcagtaagagggctccgaccacggcaacccagagg

SEQ ID NO: 62569 - DNA, 90 bp, Homo sapiens
aatggtttggctgtgataggagtatttttaaaggtaactcaactggacccaaataaatcattattggaggtaaagttgttccctcaagaa

SEQ ID NO: 62570 - DNA, 74 bp, Homo sapiens
gcgaatcccgaggcaatctcggaggcgtaagctggcaccattcatcgccaaacgccgaacccccaagattcaag

SEQ ID NO: 62571 - DNA, 96 bp, Homo sapiens
caaacgtctacactgtacatgctttttattacaagactacggagcataggaggaaaattcatcatctgcctcggccaccttcgaggacttccagat

SEQ ID NO: 62572 - DNA, 98 bp, Homo sapiens
agatgcatggacccagctcagcgggacgcgccgctggagaatgaagggtcatggagtcctggagatgccctcaggcaccgggaagacagtatccctgt

SEQ ID NO: 62573 - DNA, 100 bp, Homo sapiens
aggatctgtgactgccacccctccccccacccgggctcggcgggggagcgactcatggagctgccgtaagttcaaaaggtgatgacctatcaacagccat

SEQ ID NO: 62574 - DNA, 109 bp, Homo sapiens
actaactgggtttgaatcaaggtcccgtcccttgctgattgtatcaccttggaaacactgtgctcctgttctggcaaagctgcgcccaccgcctgacaatcaggacgcc

SEQ ID NO: 62575 - DNA, 75 bp, Homo sapiens
gccagatccgctttggagggagaaaggagattgcctcggattccgacagcagcttcttggacacttaatgattgt

SEQ ID NO: 62576 - DNA, 102 bp, Homo sapiens
acggccgatgccatgaaccgcgaagtcagctccctaaagaacaagctcagccattcaaactcctccccacgacactctgaagcagcgacggcacagcgggaa

SEQ ID NO: 62577 - DNA, 75 bp, Homo sapiens
gcaagtagcggcggcgcttcaaggtggacaagagcaaggaccaagtgtggaaggtcttaatgtaccaacaaaggc

SEQ ID NO: 62578 - DNA, 90 bp, Homo sapiens
tgcagacgttatcggatgaatcggatgaggtacggttcctggagcagcagaacaagatgctggagaccaagtggagcctcctgcagcagc

SEQ ID NO: 62579 - DNA, 75 bp, Homo sapiens
taaagccttgggctcccttgcaggattcagaagtgtatttagcatctctaggtgaaattgatcttcaaattctct

SEQ ID NO: 62580 - DNA, 101 bp, Homo sapiens
gacatatcactgcattcaatacctagatgatggcagcaggatgggtgtggaagcagtgatggcacttttggaggggaccccagataccccagcctgtgtag

SEQ ID NO: 62581 - DNA, 85 bp, Homo sapiens
ttttctgttttgcctgaatacatgatttaaacaagagatttccacagaaggataattctggcctcatagaacaagttgggaagtg

SEQ ID NO: 62582 - DNA, 75 bp, Homo sapiens
ccggaaggctccctcggtcgcgagtatctccgtttcctggatgtgaaccttttgaagaaggtcagcaccaagaga

SEQ ID NO: 62583 - DNA, 94 bp, Homo sapiens
tacgacctggaagattagataagatcatctatatcccacctccagatcacaagatgaccccacacagaacagaaaccggatcgcaagcttccca

SEQ ID NO: 62584 - DNA, 100 bp, Homo sapiens
ataaattgcaagcattctatccaaatgatctgcgagtgaagagggacgagggaaaagaaacaaagccacagacgcaacttgagactcccgcatcccaaaa

SEQ ID NO: 62585 - DNA, 82 bp, Homo sapiens
atgctcaacttcggtgcctctctccagcagactgcgctggctggaggcgtgatcctgggtgtggccctgtggctccgccatg

SEQ ID NO: 62586 - DNA, 100 bp, Homo sapiens
agttggtcgattcaggaacatggtgcaaactgcagtggtcccagtcaagcctctggacgagaccagccagatgagcgacctcccggtgaaggtgatccac

SEQ ID NO: 62587 - DNA, 83 bp, Homo sapiens
ctccaactttgcgacggaaatgtgtcatcgaaagccaggttgtgaccgagattcccgacgagagagactgaggggaagagagg

SEQ ID NO: 62588 - DNA, 100 bp, Homo sapiens
gcccgttgtgtttgtgaaacagagaaagataggcggccatggtccaaccttgaaggatctcttccacattcctccttcttataagagcacagtaacacta

SEQ ID NO: 62589 - DNA, 100 bp, Homo sapiens
gctgcccaactggccatcagagtcaccaaccccaatgccaggctgcgcagtgaagaaaatgagcgcagacggggaagcggagccaacatgccagtggccc

SEQ ID NO: 62590 - DNA, 101 bp, Homo sapiens
ctggattgttgacaatgaaggactgacttctctaatgtcatcttgcagtttagtaggaccagagctccatgggggcaggtacctgggtggaatctctcctg

SEQ ID NO: 62591 - DNA, 100 bp, Homo sapiens
tgtgtcaaaaagaaataactcagctgaagcatcaggcagtcgatgatgtgaagaaaggttacatcaaagcagaagaaaagtcctatcaattacagaagct

SEQ ID NO: 62592 - DNA, 99 bp, Homo sapiens
caggtcctgagttgggagccagtggccctgagcaatagcacgaggcctgttgtctaccaagtgcagtttaaataaccattaaaaatctcaagtgacgac

SEQ ID NO: 62593 - DNA, 100 bp, Homo sapiens
tttgtgtatgccgattaccacacgcactttctgtactgcgtacgcaataatgacgatgaggacctgacaccagagcagaaggcagagcgtgagaaggagc

SEQ ID NO: 62594 - DNA, 50 bp, Homo sapiens
ggaaaacttctgcataccctggaaggcccagcttcccgatcagtggagac

SEQ ID NO: 62595 - DNA, 96 bp, Homo sapiens
agatctcttctgttctccactgctagtctcacagaaagttctccgctcccagacatgggtccctcggcttcctgcctcggaagcgcagcagcaggc

SEQ ID NO: 62596 - DNA, 83 bp, Homo sapiens
tgtacctgcaggcctcctacacctacctctctctgtttcgccgtgaggaagatgcggaaaaggctgtgattgacttgaataac

SEQ ID NO: 62597 - DNA, 90 bp, Homo sapiens
ctgagatgcaggctacagtcagatccctggaggattctgagaaacgaacccctcttcatgtggccgcatttctgggagatgcagagatca

SEQ ID NO: 62598 - DNA, 75 bp, Homo sapiens
ggcttccttcgttattggagccaggcctacaccccaggaactgtggctgcaccatctgtcttcatcttcccgcca

SEQ ID NO: 62599 - DNA, 100 bp, Homo sapiens
ctgcagtttctacctgaacgaattttctttcgatggcattaccagagtataggacactttcttcatgagcaacaaaccccaaagatacaaagacaagcta

SEQ ID NO: 62600 - DNA, 100 bp, Homo sapiens
ggccggttgccgggcgcgggcgagaaagaatgccacccagaggatgtttgaaattgactatagccgggactccttcctcaaggatggccagccatttcgc

SEQ ID NO: 62601 - DNA, 137 bp, Homo sapiens
ttcaacatgttgcctggaggtcccccagattataacacagccctggatgtccccagagacagataccatggagtagtttgaaacaggaacaaaatcttctgaaagctcggagcagaagcctttttggtcaacatgga

SEQ ID NO: 62602 - DNA, 100 bp, Homo sapiens
ggaattagaagttttgaagtcagctgaagcagttggagtgaagattggcaatccagtgccctataatgaagaaatggtggagtcaatgaagaaagtagca

SEQ ID NO: 62603 - DNA, 100 bp, Homo sapiens
gccgcagtggcgtcctggagccctcctcaggtccaggtcaagacctcgtctccgttctcatagtcgtagcagtgaaaggtccagtcacagaagaacgcgt

SEQ ID NO: 62604 - DNA, 75 bp, Homo sapiens
ctttcagccggagaagcgagtttcagctgatacttggcatatcgaaattttatgattgacacgtatcgtctaaac

SEQ ID NO: 62605 - DNA, 100 bp, Homo sapiens
gagaaacctgggtgaactttcacggacaacctcagaggacaacgaagtgttcgggtccttttgtacaagtggatgaactgatggaaattttccgaagatg

SEQ ID NO: 62606 - DNA, 100 bp, Homo sapiens
gaagatgtgcacctagggggcggctaccccgtgggctctccacacaaggagatgcaagtcaggtgattgggcctcttactgaaggacagagaagaaatgt

SEQ ID NO: 62607 - DNA, 75 bp, Homo sapiens
ggaagactgcatacagaaattactctaccaacaacataagcttcttggacacttaatgattgttggcaagaaatg

SEQ ID NO: 62608 - DNA, 100 bp, Homo sapiens
accaggaatcgcagatgagagccaaaatgaaccagatggagaaaacccacaaagaagtcacagaacaactgcagaaacctgctcctccaaagccagagcc

SEQ ID NO: 62609 - DNA, 99 bp, Homo sapiens
tcagaagcaggagaccgctaacagcctgccagcccctcctcagatgcccctgccggagatccctcagccctggctgtttttttgaagaagcaggatgct

SEQ ID NO: 62610 - DNA, 75 bp, Homo sapiens
gtcccgaccctggccgccccgagcggagcctggagcctgcctgctccgcttcagcggactctcgctggtctacct

SEQ ID NO: 62611 - DNA, 73 bp, Homo sapiens
gtggaacggctgcttttggaagattgttctctggggccggactgagaaatgcctgaaggagacgacggaggag

SEQ ID NO: 62612 - DNA, 83 bp, Homo sapiens
cactgtctctccgacgcaagactgtcccggcccgggcgcacatggcacagcactcaagcctacggccccaccagtgtagccag

SEQ ID NO: 62613 - DNA, 49 bp, Homo sapiens
gaagttcaaattcccttgaccgccaatggagatcttcgtggatgatgag

SEQ ID NO: 62614 - DNA, 96 bp, Homo sapiens
gggctcgccttgtatctcaacaccctgagtgcggatttctgctatgatgacaggaagcatatgtgcctcttttcttacccaaagttaccaattgcc

SEQ ID NO: 62615 - DNA, 82 bp, Homo sapiens
aacatggactcatcttcatggaaacgtctgctaagactgcttccaatgtagaagaggtcagtgtgagaagaagattgtttct

SEQ ID NO: 62616 - DNA, 75 bp, Homo sapiens
cctggcctactactacaagtgtcacaaggtgtggcctgaagtcactgatcctgagaagttcgtgtatgaagatgt

SEQ ID NO: 62617 - DNA, 100 bp, Homo sapiens
ctggctggtatctttgtggtccacatcgctactgttattatgctatttgttagcaccattgccaattgtggggtgatcagccccagatttgacgtgcaac

SEQ ID NO: 62618 - DNA, 90 bp, Homo sapiens
agatatgcctgctaacatggataagcatgccctgaaaaagtatcgtcgagaagcctatcatcggtcttggtggatgtcagtgcttactcc

SEQ ID NO: 62619 - DNA, 83 bp, Homo sapiens
gcggtgtgcaagtccgactggaacagctccaattaaggaacagctatatcctgcttccttctgtaagcagcatcgacttgtgc

SEQ ID NO: 62620 - DNA, 100 bp, Homo sapiens
cctcctcatcagcgaatccatgatattgatgaccatgagatccctgctcagaacccccttcctgtgtggcctgctctgggccttttgtgccccaggcgcc

SEQ ID NO: 62621 - DNA, 100 bp, Homo sapiens
cacaagtgttatctctgtaccgggcgatgctgagagagagcaagcgtttcagcgcctacaattacaggtgaagaatatgtaaagagcctaactgctaacc

SEQ ID NO: 62622 - DNA, 100 bp, Homo sapiens
cacagtgaaggccgactccttagtttcttggaacagtctgagcacaagacttcagaggagaaggcagagcccccccaggctatgaatgccctgatgcggt

SEQ ID NO: 62623 - DNA, 101 bp, Homo sapiens
gaacatgaagccagtcctgacaatgggcagaacgaattcagtgatatcattaagtccagatctggtgattcgcaaggggtggctcaccatcagcaacattg

SEQ ID NO: 62624 - DNA, 100 bp, Homo sapiens
agcaatagagctaatcccctcagttaccaatccagaaaaccttccatcgctgccagatattccacccatacaggaacggaaaacagttcttccttcaaag

SEQ ID NO: 62625 - DNA, 82 bp, Homo sapiens
gcagccgatgcccgcggccggagagctggaggagaggttcaaccgcgccctggccctgggcagtgacggggttcgggtgacc

SEQ ID NO: 62626 - DNA, 100 bp, Homo sapiens
ggcctgcacggacggtgttggttgggccaatggagatcttcgtggatgatgagacgaagttgacgctgcatgggttgcagcagtactacgtgaaactgaa

SEQ ID NO: 62627 - DNA, 80 bp, Homo sapiens
tgcagcttgcgtttggggctttcgacatgacaggtcactagagtctattatcctcccagtccacaacgctgaaccgtggc

SEQ ID NO: 62628 - DNA, 75 bp, Homo sapiens
gagacagttccacttgatgtcttgcagatcaagttgccagtagtcatcagagtaccaaaactgatctatttctca

SEQ ID NO: 62629 - DNA, 82 bp, Homo sapiens
ccacagctgagaagtgtttgcataaaattaatgggaaaccccttccaggagccacacctgtggtgaaaactattggcttgag

SEQ ID NO: 62630 - DNA, 74 bp, Homo sapiens
tccccatcaatagacagcattcagaaggaccccagccatgaagatggacctacagctaaaaaattaaagactga

SEQ ID NO: 62631 - DNA, 84 bp, Homo sapiens
caaccttctgcgttgcgaagacagaatcaagctgtgtctttggtgcaacactaacaaggcttgtctggactacccagttacaag

SEQ ID NO: 62632 - DNA, 59 bp, Homo sapiens
aacacacacccccactggagaagctgaaggaatttataagtatttgaccgtactcaaaa

SEQ ID NO: 62633 - DNA, 75 bp, Homo sapiens
gggggagccccgggagccgcacgaaagaagatgctgatatgctacaacacggatgaacctggaggacgtggtgca

SEQ ID NO: 62634 - DNA, 87 bp, Homo sapiens
agccccaccgggcctgccaccagcaacccaaactccagcatcatgttggcaagctctctgatgtaaaggatggagtaaatcaagcag

SEQ ID NO: 62635 - DNA, 106 bp, Homo sapiens
aagttcaagatggccgccgcggagacccagtcgctacgggagcagccagaacaatgcagatcttcgtgaagactctgactggtaagaccatcaccctcgaggttga

SEQ ID NO: 62636 - DNA, 75 bp, Homo sapiens
gtgaaattgccggcaagagggagttaaggacattccaggcagaggcaagaactcaagctccatgaggagatgttt

SEQ ID NO: 62637 - DNA, 75 bp, Homo sapiens
cgccccctgaatgagttgctaaccccccagggtcccagtctgcgctcctcagaccaccggcaggtgaacagcctg

SEQ ID NO: 62638 - DNA, 74 bp, Homo sapiens
ttagcgaaagaaaccctctctgagttcttgggcacgttcatcttgattgaggaggtgcgccagtctgtaactcc

SEQ ID NO: 62639 - DNA, 100 bp, Homo sapiens
catcagacaggtccgtcaaaatctttgatgtgcgcaatggagggcagatccttatcgccgacctcaggggattttctctgtgggcagttctttttgtttt

SEQ ID NO: 62640 - DNA, 100 bp, Homo sapiens
gggccatgattgcacccttgcacttcctggaggtgaaactgggcaagaggccccagcccgtgaaaagtgaggagagcgaagacctggagaaacagaacgc

SEQ ID NO: 62641 - DNA, 100 bp, Homo sapiens
agtcaccagatattgctcaaggtgttcatcttgacagaaatgaagaagacattggtgctggagaccaggacctgtatgaggctggagagaagaaatgggg

SEQ ID NO: 62642 - DNA, 100 bp, Homo sapiens
tggctgactacctgctgtacaccctcaacaaacaccagcgctttgggcttctccagggaaagtgaccgaggcagtgaaagaggccattgacgcagggtac

SEQ ID NO: 62643 - DNA, 100 bp, Homo sapiens
gaccatggctccctgcagtaccctttaacggccgccagatcccacccttggacccccatgaaaatggaaacaatggaacaatcaaagttgagaagccaac

SEQ ID NO: 62644 - DNA, 83 bp, Homo sapiens
ggaggaaacacctcaggacacggcctacaacaccaagagttacagaatgtctgaaggggacagtgtgggagaatccgtccatg

SEQ ID NO: 62645 - DNA, 100 bp, Homo sapiens
agtggcatccctagctccagccgcaatgccattaccagttcctacagctccactcgaggcatctcacaggggaggaacatcatcgtgttctacggctccc

SEQ ID NO: 62646 - DNA, 90 bp, Homo sapiens
tggctgtggagagcccgtccgacagcgctgagactattgggaagaagttacctgcaactacagcaactccagactcatcaaaaacagaaa

SEQ ID NO: 62647 - DNA, 108 bp, Homo sapiens
cgcgtgtcctcggagcgcggtccctgtattggtctcctgctcctagagacaatgcagatcttcgtgaagactctgactggtaagaccatcaccctcgaggttgagccc

SEQ ID NO: 62648 - DNA, 74 bp, Homo sapiens
agagcgtgaatttgcctcggggacgcctctccaggtctcagcatcagaggagcccaggaggaggaccctcccga

SEQ ID NO: 62649 - DNA, 98 bp, Homo sapiens
aaaacagtgatcgctaagaactttgccgataccttaggatacaacatagaacctattatgctctatcaggcagctgctcccaaccccagaacctttgc

SEQ ID NO: 62650 - DNA, 96 bp, Homo sapiens
tgctgctgctgctgctgctggtggcccctttgcagatcatggaagggaagtggttgctgtgtatgttactggtgcttggaactgctattgttgagg

SEQ ID NO: 62651 - DNA, 51 bp, Homo sapiens
agtgcatcaaaggtgtgaacacagggacacttgacattcagggacgtggcc

SEQ ID NO: 62652 - DNA, 100 bp, Homo sapiens
aatgggaggccaatcaatgcagcattaggaaggcttcattcagctcagcaccaccttggaacgacaccgtaactatccgcactagaaagttcatgaccaa

SEQ ID NO: 62653 - DNA, 100 bp, Homo sapiens
cccaggtgtaagcgcagaaagcaggcgaacccgcggcgcaataacggtccaaggatcttataaaggaagctatccttgacaatgactttatgaagaactt

SEQ ID NO: 62654 - DNA, 75 bp, Homo sapiens
cccagacgcggcacagagagggcctgggagcttgctgcagcttcagctcgggttcatgacgctctcgatattcct

SEQ ID NO: 62655 - DNA, 98 bp, Homo sapiens
cggtggcgttggtgctgtttgcggatgctgatgcaggttattcagcttctcaaggctggaaaagcgaaggaagtttcctacaatgcactagcctcaca

SEQ ID NO: 62656 - DNA, 111 bp, Homo sapiens
caaagactggcaaaagcacaaggattctcgctgtgacagagacaacaccgagtatgagaacctcctgacaaggtgatccgggcgggccccgcaggaattttatcccctcac

SEQ ID NO: 62657 - DNA, 101 bp, Homo sapiens
ataccagtctcctgtccgagtctacaagtacccgtttgagctggtcatggcgtgttttacgacgacgacttgactgatgctgtgtttaaaacgctctcccg

SEQ ID NO: 62658 - DNA, 83 bp, Homo sapiens
cactccagccacagggtccccaactaccggcggctggagacgcagagaggtgcagaccatgaattacgtggggcagttagccg

SEQ ID NO: 62659 - DNA, 75 bp, Homo sapiens
ccgagactctagaagaaatgccctccgggtcacaggataaggtgcccctgggcgctgggattgctctagcctgta

SEQ ID NO: 62660 - DNA, 104 bp, Homo sapiens
tctcgctccgtggccttagctgtgctcgcgctactctctctttctggcctggaggctatccagctgtttcacctgtctcggaaagtaacatctctggtccctga

SEQ ID NO: 62661 - DNA, 90 bp, Homo sapiens
gttctagtaactatagaaatgtgtaacgccctcaacaggatattgctgcatatcgtgccaagggcaaaagtgaagcaggaaagaagggcc

SEQ ID NO: 62662 - DNA, 82 bp, Homo sapiens
gacgtggcagcaagcgggagtcggggatagtgtcatcggttcgggaaccctactctggaaactgtcagtcccagggcactgg

SEQ ID NO: 62663 - DNA, 100 bp, Homo sapiens
tgtgctagagtcatcacttcccattgggctgaggacatgaagcctttattacaaatgatttgggatgtgagaactaaagccagtgtacacacattatctg

SEQ ID NO: 62664 - DNA, 100 bp, Homo sapiens
gttcttctggaatgtcttgggggttttgatcctgtcactgtgggtatttgaagtataccatacaactgttttgaaaatccagcgtggacaatggctactc

SEQ ID NO: 62665 - DNA, 50 bp, Homo sapiens
gttatagcagaggaaatgagttatatgtaatccttgaggaatcaccacac

SEQ ID NO: 62666 - DNA, 75 bp, Homo sapiens
tgcgaatgatcctgaagcctcaaagtttcatggagagcctgacaaggagctgaatcctaagaagaagatttggga

SEQ ID NO: 62667 - DNA, 75 bp, Homo sapiens
ggttacagtttcgactcctctctgcaagtgaataggcccagaaaggtgccaagatcaaggctcgagatcttcgcg

SEQ ID NO: 62668 - DNA, 75 bp, Homo sapiens
aacgaatcatccacgcacctgcagctctgctgagagagtgcaagccgtgggggcttccgttacaagatgaggtct

SEQ ID NO: 62669 - DNA, 123 bp, Homo sapiens
cagaatgtttcatcattactaacaggatattcctcatgacattgctgtctggtgcgttgtagaagacaagaactcaaaggtggcctggttgaaccgttctggcatcatttttgctggacatga

SEQ ID NO: 62670 - DNA, 100 bp, Homo sapiens
cagaaagaaggacagggatcacaaacactcagagtggaaaaagtaccatcatttgaaacaggcttacagcttcgccatgggctgctggcccaagaatgga

SEQ ID NO: 62671 - DNA, 90 bp, Homo sapiens
gccaagaagtatcttcgaacagatgacagagtagaacgtgtacgcaggtgcagtgacttctatgttttgggttgatgctgaattagggag

SEQ ID NO: 62672 - DNA, 98 bp, Homo sapiens
cggggagtgtgccgcacacacaaagtgcggccccgttattgttcctgaggaacatctccagagctcttcagaaaccaggctgctttcaggaacattgc

SEQ ID NO: 62673 - DNA, 75 bp, Homo sapiens
ggaaaagttatagttcttgtcaataaggaggggttcaaaatgggactaactcttgaaggcacagtattttgtctc

SEQ ID NO: 62674 - DNA, 75 bp, Homo sapiens
tttctctgcagatagcctctatacccgttgagtgcttccactggggatcaggcattagaagttctacagtacctc

SEQ ID NO: 62675 - DNA, 51 bp, Homo sapiens
caggatggaccaaagggggcagcatgaacaaggctcagttatgatgtttga

SEQ ID NO: 62676 - DNA, 75 bp, Homo sapiens
ggggacgggccgtgggcccccggaacgagtgatgaaccagtggcagatattgaaggccatacagtgcgtgtggcg

SEQ ID NO: 62677 - DNA, 50 bp, Homo sapiens
catggtcatgagcttcgtcaacctcgggagtgcatccgccccaacccttt

SEQ ID NO: 62678 - DNA, 89 bp, Homo sapiens
gcgggtggaggttcgagcgctgttctcgctccggagccgctgcacatttcggagaggagaggcagcagcatggcgagtgtcctgtcccg

SEQ ID NO: 62679 - DNA, 100 bp, Homo sapiens
gctgtggggagatttcagtgcattgcctcccctgggtgctcttcatcttggaccaaccctggaatggtccccagccatggattcagtcccagatcttatt

SEQ ID NO: 62680 - DNA, 100 bp, Homo sapiens
cttgagggatgcacctatggattccattgaatgggctgaagtggtgatcaatgtgaacaatattctcaagttccagggtcacccccgagaggacaacagg

SEQ ID NO: 62681 - DNA, 100 bp, Homo sapiens
ggcgtgaagcatcacattgccagtgacatagcttcagacagtctgaacaacccagtcctgccagctccagctccagctccagctccagcttcacaccatc

SEQ ID NO: 62682 - DNA, 100 bp, Homo sapiens
tcctgatcagctgtcagattgttctgagagtctcatcgctgtcctcgaaaccaaaaacttttgctagaaaatcagcttttacgagagaaaactcatggcc

SEQ ID NO: 62683 - DNA, 83 bp, Homo sapiens
ctaggtccaaacgctaggtggctgggtccaggaactgtggctgcaccatctgtcttcatcttcccgccatctgatgagcagtt

SEQ ID NO: 62684 - DNA, 76 bp, Homo sapiens
cttgcaggagaccctaccaacaggaatcggataacaaggagctaaaggctgacccaaaatgaactcaacgatgaag

SEQ ID NO: 62685 - DNA, 73 bp, Homo sapiens
ttttgccccctcatcatgtgaatgttcttcccccacttcatattaaaacagattcttacgctgtatgacagta

SEQ ID NO: 62686 - DNA, 50 bp, Homo sapiens
caccatccggaagtgaaggctgatggggcgccaatgcttcggcattagag

SEQ ID NO: 62687 - DNA, 50 bp, Homo sapiens
agcccctgccagagaggctggaggacatggatttgattgacatactttgg

SEQ ID NO: 62688 - DNA, 80 bp, Homo sapiens
cttcaggcgacccgtactgggcctactctggaagggaaaaggccgaggcatcagcgtgtgaagaccgcaaagacgatccc

SEQ ID NO: 62689 - DNA, 83 bp, Homo sapiens
ccgtgttgcagatatatctggggatattagaaatggctactccccagtcaattttcatctttgcaatctgcattttaatgata

SEQ ID NO: 62690 - DNA, 88 bp, Homo sapiens
gtggctgtggcgacatgtcgacctgacgctctacacggattccccagctttccgttgcacaaacagtgaagtgacagtccagcccagc

SEQ ID NO: 62691 - DNA, 97 bp, Homo sapiens
ctgctggtgggtgttccagctggaagtaaccccttccgggagcctagatcctgtgctttactctgaagactcgccaagcagatagaacttcagttca

SEQ ID NO: 62692 - DNA, 75 bp, Homo sapiens
gtgcacagaaagctgtagcaagtttatctgttaagcttgaacaagctatgaagatgaatgaaccaaatgcctatg

SEQ ID NO: 62693 - DNA, 100 bp, Homo sapiens
tggtcaagcgggccacgcacctcgtcaccaaggccaagacactgtcacatgaacccaaagtccttcaagagggtctccttcagttggactccatcctctc

SEQ ID NO: 62694 - DNA, 100 bp, Homo sapiens
gccgccccgctcggtcctccacctgtccgctacgctcgccggggctgcggccgcccgaggtccctgtgcgttttattgcgacctgccggtgggaactttg

SEQ ID NO: 62695 - DNA, 90 bp, Homo sapiens
cattctgggcctgctcacggcagtgccacctgccagctgtcagcaagttccaagatgagatgggattctccaacatggaagatgatggcc

SEQ ID NO: 62696 - DNA, 98 bp, Homo sapiens
acaaatctgaagatggtgtcaaagagaaattctggaatcaagaacccagtctcggttgccaacagactcttatgtgaagggcagaagggcaagctctc

SEQ ID NO: 62697 - DNA, 80 bp, Homo sapiens
cggaaaccggtagcgcttgcagcatggaaacccatcaacagctggctgataagaagggcctccatgttgtggaaatccgg

SEQ ID NO: 62698 - DNA, 100 bp, Homo sapiens
ggcctgatggaagacgacggcaagcctcgtgccccgcaggcacccctgcactcggtggtacagttctgggaggtgatcagtgatgaacatggcatcgacc

SEQ ID NO: 62699 - DNA, 76 bp, Homo sapiens
cttcgttttgtgaaaggccaatttcatgaatttcaagagagtaccattggggtgctggtcccaaaggcgataacat

SEQ ID NO: 62700 - DNA, 100 bp, Homo sapiens
tcaggagtgcatcatggaagaggacaatcgcgctccccaattgtggcgcaaggaaacttggatttaactggccagaagcaggtattcaaagcagagaaca

SEQ ID NO: 62701 - DNA, 98 bp, Homo sapiens
tgcggccggcggtgtagacgccccttcgccgggacctggcacccgaatccggcctgccgggcaatgaagagtctccattgaatgttttgggaggattg

SEQ ID NO: 62702 - DNA, 75 bp, Homo sapiens
cttatgatggacctaggactgctggacacaattgggaaaactggttattttaccaaggctttaactggaatggtg

SEQ ID NO: 62703 - DNA, 51 bp, Homo sapiens
cattgatctagaagagtatattgtaaccccaagaaaggcatcagggttctg

SEQ ID NO: 62704 - DNA, 82 bp, Homo sapiens
cctgtacagactcctcctgaggaggggccctcctcctctgactgcctccaacgtaaaaatgcttgtggtcgcttcataaaca

SEQ ID NO: 62705 - DNA, 75 bp, Homo sapiens
gtttttcgccgtcatgggcgcctcggccgccatggtcttcagcggagcatcagatccatgctgctgctgactcgg

SEQ ID NO: 62706 - DNA, 120 bp, Homo sapiens
gccggggcgatgctgtgggtctcgttgggcgccggtgtcctggcctcttcctcaggatgccttccgcgccttccaccctgacctggaattcgtgggcaagttcttgaaacccctgctgat

SEQ ID NO: 62707 - DNA, 76 bp, Homo sapiens
agtgatgagatttcacatattgttaatcgtattgctcctcaggaattagcttaccgaaaggagatggtgagagctg

SEQ ID NO: 62708 - DNA, 82 bp, Homo sapiens
tccagacccacgcggcgccagttctccggcgggaaggaaaaccgcgcagagaggcagttgtgaaaaacttcaggacaaaaat

SEQ ID NO: 62709 - DNA, 100 bp, Homo sapiens
gtgcctgccattcttatcatttctaagcaggttcatgccagcccagaacagagaatcagaaatgcatcttctgcagacaccgggttaagagggtctctgg

SEQ ID NO: 62710 - DNA, 95 bp, Homo sapiens
gtgatgattccctgcctgcagagggttacatgggctttagtctcggagcgcgttctgccagaaaatatttacaccagcagctccagttcatacca

SEQ ID NO: 62711 - DNA, 98 bp, Homo sapiens
tgtggttgtcagtcttctcatccctaagctggaacagtgaaccatggagctgtatttcggtgaatatcaacatgtgcagcaggaatatggggtccatc

SEQ ID NO: 62712 - DNA, 82 bp, Homo sapiens
ccatctcctgctgctggcccgctgggaggacacacccctcgtcatactcggtgttgaagactgggacatgttggatgttgat

SEQ ID NO: 62713 - DNA, 91 bp, Homo sapiens
cgagtaagccagcggcaggaccagcgggcgggggcccacgagtcaaaatgcagatcttcgtgaaaacccttaccggcaagaccatcaccct

SEQ ID NO: 62714 - DNA, 80 bp, Homo sapiens
ggtggaagtgcggggctccaatggcgctttctacaagtataaggatgcatttatgaaagcaaatcctggctacaaatggt

SEQ ID NO: 62715 - DNA, 50 bp, Homo sapiens
aaggatctctttggcaagtttgtttcgtgtggctgatcaaagaaagaagg

SEQ ID NO: 62716 - DNA, 80 bp, Homo sapiens
ttccctagagggttacgggacagatgcagttatctacattaagccattttgcagactttgatcacagtgaaacgttccat

SEQ ID NO: 62717 - DNA, 100 bp, Homo sapiens
gactcatccccgggagtgttgagcaaatcctgatcctaactgttgtcttggagtatttgggctgagcttgtacaccacagaaagagatctaagagaagtg

SEQ ID NO: 62718 - DNA, 75 bp, Homo sapiens
aaacatacagtcgcctctgacaagccaggtgaaatgacaatggatgctctgttggctcgattgaaacttctgaat

SEQ ID NO: 62719 - DNA, 100 bp, Homo sapiens
gacctgcacgacgttcatagttgactccacagatccggggatgagttccacccgttcatcgaggccctgctgcctcacgtccgcgccttcgcctacacct

SEQ ID NO: 62720 - DNA, 75 bp, Homo sapiens
gattccaagacatccctgctgagagagccaagctgaccaggtgtatggagaccaggacatgcatgaggttgtgcg

SEQ ID NO: 62721 - DNA, 96 bp, Homo sapiens
gttaaggattccaagtaactcttatttggatggtggccgatcctgataaccctttggtgctggacatcctgacgggctcttccacctcttactcct

SEQ ID NO: 62722 - DNA, 90 bp, Homo sapiens
aaaagaaatagagatcggtgtgtagggggagtggccagcggaagcctgccacctcctatgtgcggaccaccatcaacaagaatgctcgcg

SEQ ID NO: 62723 - DNA, 100 bp, Homo sapiens
gttcctcttccacctaccaccgccagcgcaggcatagcgatttcttgagtttatggtcgaggagcacgagctgcggaaggagaggatccaggaggattac

SEQ ID NO: 62724 - DNA, 75 bp, Homo sapiens
gagctgtgaggtcatcggaatcccgacacctgtcctcatctggaacaagattatgtttgagactttcaatgtccc

SEQ ID NO: 62725 - DNA, 83 bp, Homo sapiens
gcgaagtagaggatgccgaggagaaaacagcaggcacccaagcgggcggcaggaattacatgaacgacagccttcgcaccgac

SEQ ID NO: 62726 - DNA, 82 bp, Homo sapiens
gactccagagagcattcaggagatgtacgccgcgatcaaggctgaccctgatggtgacgggctggaccccaatggagaacag

SEQ ID NO: 62727 - DNA, 90 bp, Homo sapiens
acgcttgttatgttttcatcacttctctccagaaggaacaggaaatatagtggtcattatgattagctatccaaaaggaagagaaatttt

SEQ ID NO: 62728 - DNA, 100 bp, Homo sapiens
gaactcaagaaaatcttcgaagacttttcagaaagtccatcagcttgataatggaggagaacaatgactccacggagaacccccaacaaggccaagggcg

SEQ ID NO: 62729 - DNA, 95 bp, Homo sapiens
tgaacgtttgtgcgtcaggtttgagtttctgtccaaactgaggcatcaccacaggcggagcccacccacctttgggttcctgttggacatcgatg

SEQ ID NO: 62730 - DNA, 78 bp, Homo sapiens
cctccaacattgatgttcctccagcaaggagaacatttcaggataggaataggccaagtgctgagaagatgagtctta

SEQ ID NO: 62731 - DNA, 74 bp, Homo sapiens
aaaagcagttcaacgagaatgaagccatccaatggatgcaggaaaactggtcctgaacgaggctgtgggggccc

SEQ ID NO: 62732 - DNA, 90 bp, Homo sapiens
tttaggcagcttacaactcacaagtgcatgggagattcctgcatcttttgcgctctcaaggccacagagatgctggttcacaatgcccag

SEQ ID NO: 62733 - DNA, 50 bp, Homo sapiens
cgctgctgcccctgttgctgaccatgtgtccacaggatgaaatgtccgag

SEQ ID NO: 62734 - DNA, 72 bp, Homo sapiens
ttgtccagcgactccggggcctgatgaatgacatcgtgaaaattgataccaaggccattccactgtttggga

SEQ ID NO: 62735 - DNA, 83 bp, Homo sapiens
aaggccaggctgactatgaagaggtgaagaaagagctgaacttttaacctggagacttgccggcttatggtttcaatgctgga

SEQ ID NO: 62736 - DNA, 75 bp, Homo sapiens
gccacctcctcctttagaaaactgatcttaatacagagtggtggatatgttcttggctttaaaatagatcctgtg

SEQ ID NO: 62737 - DNA, 98 bp, Homo sapiens
cggggttgactccgggggcgcggcgaggagctagaggagcgggagaaggagcgaaagagaaagagggaggaggaggagcggcggaaacagccgcctgc

SEQ ID NO: 62738 - DNA, 83 bp, Homo sapiens
cgccgcccggggcgaggcagggccagcagcaggcgggagagctgttgcgcagccattggtacctgtattggggaaacatagca

SEQ ID NO: 62739 - DNA, 98 bp, Homo sapiens
ttgggttcagttttcttcagaagaaggacttcggaatgcactacaacaggaaaatcatattatagatggagtaaagccaccaattaccctagttatgg

SEQ ID NO: 62740 - DNA, 74 bp, Homo sapiens
ttgaatgaaattaatgaagctgtacctcaggtgaagttttatgaagaggtggagtgtgttactcttggggctgg

SEQ ID NO: 62741 - DNA, 73 bp, Homo sapiens
caatatctctgggctttcacaggtgaaatgacaatggatgctctgttggctcgattgaaacttctgaatccag

SEQ ID NO: 62742 - DNA, 115 bp, Homo sapiens
gcggcggccagcctggcgtgggtgctgcgggccgcgttcgggggcgcaggacgtgagcctgcacttcgtgctctggggctgcctgcacgtgtaccagcgcatgatcgacaaggcg

SEQ ID NO: 62743 - DNA, 50 bp, Homo sapiens
agaggacaccctgagcgattcaggggctgagtgaataccagaggaacttc

SEQ ID NO: 62744 - DNA, 74 bp, Homo sapiens
cagcctgtgggagtctctatgctgcagtgcctgaaacaaccagagagctacgggaaaggaagggcttggcttgc

SEQ ID NO: 62745 - DNA, 100 bp, Homo sapiens
aggaggtgatcgccaccatcttttcctccgcctggtgggtccctccctgctgcgggacagcagctgagctgtaggtaaaacttgcctactgatcagttac

SEQ ID NO: 62746 - DNA, 50 bp, Homo sapiens
caccaagaagtcttctccttcaggtgtattacctgactgcttaaccgatg

SEQ ID NO: 62747 - DNA, 100 bp, Homo sapiens
cagagctagttagcatggatgaggaaaaatttgtggatgccgttaactctgcctttcaacatggccaatctttcctaagctgctcagcttacaagaaaag

SEQ ID NO: 62748 - DNA, 75 bp, Homo sapiens
ttgttaaggattccaagtaactcttatttggttcatcatgcctagtggcgtataagaagaccccgccaccggtcc

SEQ ID NO: 62749 - DNA, 75 bp, Homo sapiens
gtccaatgtcaccccaggatgatgaagcagaagagggagtccaatgtgctgattgctgctaacagtcagggtaca

SEQ ID NO: 62750 - DNA, 97 bp, Homo sapiens
cttattcatgggctcaccgctgaggttcgacgggcgggtggtactggtcaccggcgcgggggcaggttggtcaaagaaaaagtgatgtatgaaaaag

SEQ ID NO: 62751 - DNA, 74 bp, Homo sapiens
acagggtctgtgttacagactgcagaggatgtgcagaaactaatctggattcactccctctggttgatacccac

SEQ ID NO: 62752 - DNA, 101 bp, Homo sapiens
cgcgcgggcaaggaagtgctgctggaagcggtcttgcgagtggctggttccctgcagaagagcacagaagtgatgaaggccatgcaaagtcttgtgaagat

SEQ ID NO: 62753 - DNA, 90 bp, Homo sapiens
gtgagcagaaactcctcctcgccttatcaggtcaccatccttgtcagcctggccctagctttccttgcgtgcatcgtgttcctggtggtt

SEQ ID NO: 62754 - DNA, 101 bp, Homo sapiens
tgaaagaccactatctggagtttgaggtctgagcgggaaagttccgaagaataggagtggctgagttagctacggagttcatttggggccgggaagcagag

SEQ ID NO: 62755 - DNA, 75 bp, Homo sapiens
agcagcagattaccctgtgctgtggaagagcacccagtaggaggcatacaccatacatggtacagccagagtacc

SEQ ID NO: 62756 - DNA, 51 bp, Homo sapiens
ccgaactaagcagggcggtcgggggtgtgcaactgaggaacatggctcaag

SEQ ID NO: 62757 - DNA, 83 bp, Homo sapiens
ctggcctgggcgctccggtggcggcggaggacgctgctgaccggggcggtgggctccctgctcctggaatggtacggctggca

SEQ ID NO: 62758 - DNA, 100 bp, Homo sapiens
ccgggatcgtgaccgagaccgtgaccgagagcgtgaccgagagcgcgaatatcgtcatcgttagaaggaaatgcatcaaggaccattatagaaaggatcc

SEQ ID NO: 62759 - DNA, 100 bp, Homo sapiens
gaggacgggctttaggctggaagcgccttagaggagccatttttccaggttagtggttacttggatgattgtacctgtgatgttgaaaccattgatagat

SEQ ID NO: 62760 - DNA, 75 bp, Homo sapiens
actttaaagttgtcactccactgtcttacgaagtttctgatggcaaggggagagccagttgcgcagagccctgca

SEQ ID NO: 62761 - DNA, 100 bp, Homo sapiens
aacaaagctgaggtccagatgaaagagaagtttctggtcactccccaggattatgcgcggtctgcagactcgtgaatgacgtctaccgcgtgtataatcg

SEQ ID NO: 62762 - DNA, 75 bp, Homo sapiens
cgtcccggcgccgtcgcgccactcctccgagatcaaatctaaatcgctgtggtttccgaggctcttcatacctgg

SEQ ID NO: 62763 - DNA, 75 bp, Homo sapiens
ctgcagctgctcgcctgtctccgtcggaagggagcccaagctttgcagaggaggaacggctgaagctcccaattc

SEQ ID NO: 62764 - DNA, 75 bp, Homo sapiens
catgacgataagcaaccagcatttagagctgtttatgaagcactgagaaatactggtcgaattgacaaatcttac

SEQ ID NO: 62765 - DNA, 100 bp, Homo sapiens
gaatttcgtaaccagaagccgaagccggagaaccaaggtgatctgcaactctttcaccatctgtaatgcggagatgcaggaagttggtgttggcctatat

SEQ ID NO: 62766 - DNA, 100 bp, Homo sapiens
atctgatgtggtgcttttgaaccactggaaagtgaggaattttgaagtacaccgtggtgacattgtatcattggtgtttaaccaccaaggactctgagag

SEQ ID NO: 62767 - DNA, 101 bp, Homo sapiens
tggaaacttattggcgtctgcctcacgagacagaaccgtgagactctggattcctgataaggaactgggaacagccaggtgccccaaagcaaatacgcgga

SEQ ID NO: 62768 - DNA, 98 bp, Homo sapiens
tcagctggagcaagaagaggacctgtgcagggcagagcaggaggccccccgaggtatcgagaaccttccctgcgaacttcagaggaacttccagctga

SEQ ID NO: 62769 - DNA, 83 bp, Homo sapiens
ggccagcgctgctggcgggcgttaggacaatgcagatcttcgtgaagactctgactggtaagaccatcaccctcgaggttgag

SEQ ID NO: 62770 - DNA, 80 bp, Homo sapiens
gcgtgatgaaacagttcctggaaactgccattaacctccagctttttaagcaggtttccaatacttatctacaggaatcg

SEQ ID NO: 62771 - DNA, 83 bp, Homo sapiens
ggccgctctgcgggactctgaggaaaagctcgcaccaggtgagaagccctaccactgcaactgggacggctgcggctggaagt

SEQ ID NO: 62772 - DNA, 80 bp, Homo sapiens
gcccaggaccgtccaggcgtagcaagtcccctgcctccaccagctcagaggggcacagccgaacccttcccgaggctcca

SEQ ID NO: 62773 - DNA, 101 bp, Homo sapiens
cgccgccccgcgggggagggcggagctggcgcggcccctagctttctccttctggtgtggggcccgagatttctcacattggcaaactgagagattttctt

SEQ ID NO: 62774 - DNA, 100 bp, Homo sapiens
atccaagtccggctagtacgcgaattggagaaaaagttcagtgggaagcatgtcgtctttatcgctcaggtcaaggtcagcatctcctcgacgatcaaga

SEQ ID NO: 62775 - DNA, 75 bp, Homo sapiens
tcttgtttgtggatcgctgtgatcgtcacttgattataagcgccatggctatggctagtgttaaattgcttgccg

SEQ ID NO: 62776 - DNA, 75 bp, Homo sapiens
gagagccctgcgcctcgcccgcccggaccagcctgccccggcgccgagagttctctgtggcccatgaccttcggc

SEQ ID NO: 62777 - DNA, 90 bp, Homo sapiens
tcatgctgaccaccaatcagatccgtaagctcccctgggacctgtggccgccgcccacagaccatgctcctggggcgcctgacttcccag

SEQ ID NO: 62778 - DNA, 50 bp, Homo sapiens
cagccgggccccacgagtggggatgaagggcgccctaatggagatcatcc

SEQ ID NO: 62779 - DNA, 101 bp, Homo sapiens
aagagtctccgcggtggaggtctgcgttgctcttgcttttcctcgctggggtgtacgaggatgtactgagtaaagatgctggggaatgtgcaatatgcctt

SEQ ID NO: 62780 - DNA, 82 bp, Homo sapiens
ccaagtcaaacgcagaaggactgcctcactgagcaaccaagaagcaatttgtgatctaccaggttggcttgatccccagtca

SEQ ID NO: 62781 - DNA, 116 bp, Homo sapiens
cgcatgacagaatcccatctgatggtcaccagtcaatctttgagagctacagagacttctgaagtggagagtctgcgacctcctcggttcttcaatgaagatggagttatcagacc

SEQ ID NO: 62782 - DNA, 50 bp, Homo sapiens
ttacgatttaaaacttcgccagaatttgcccagatgaaggactgcatgcg

SEQ ID NO: 62783 - DNA, 51 bp, Homo sapiens
gttccttgtcctccctctgcacaaggggtattccctcagcggatactacac

SEQ ID NO: 62784 - DNA, 98 bp, Homo sapiens
gcgcggccttcccatcaccatcacagagagcgatgtctgtggctgtcctctctattggaaagcccccatgttcagggctgcagggggagagaagacag

SEQ ID NO: 62785 - DNA, 98 bp, Homo sapiens
cgtctttcttctctgggcgcccaccaacaatggatggcaactccctgctctcggtaccaaggtatggcatttcaaatatagatacaaccattgaagga

SEQ ID NO: 62786 - DNA, 50 bp, Homo sapiens
cgcctcgctgtccctgcggcttctggggtgtatccaaagtgtgtacatca

SEQ ID NO: 62787 - DNA, 130 bp, Homo sapiens
cgcctctgacgcgacatctggacacggcgcggcgctggcgctgccggagctgtcgacccggcctggcgccggactaggtcatgatgatgggcagcgcccgagtggcggagctgctgctgctccacggcgc

SEQ ID NO: 62788 - DNA, 50 bp, Homo sapiens
cagagggccgagaaggacaggatcagcagtccagagcgtgagtccattca

SEQ ID NO: 62789 - DNA, 75 bp, Homo sapiens
tgacaaaccctttctatgtactgcgcctggatgtggccaggttagcatggcctcattgaaagaactagatcaaag

SEQ ID NO: 62790 - DNA, 96 bp, Homo sapiens
gcgatggcgagagggggcaccggaggtgacaacaataacaagactgtccttcggacaagttttaggtttgaattttgggaagattttgaagaagac

SEQ ID NO: 62791 - DNA, 90 bp, Homo sapiens
cgagcactgaactgtgtgacccagcccaaccccagccctgggtcagctgatggggacaaggcctctgatccggaagcaggtgtggcccgg

SEQ ID NO: 62792 - DNA, 118 bp, Homo sapiens
gtctgtgttcccttgggactcattggaaattgtacagtgacatcttctgggatttagtctggactgttctgatggctacatgtgcaaaatacactttcaaattaagaatgggtctgtg

SEQ ID NO: 62793 - DNA, 82 bp, Homo sapiens
ggagagactcgccggccgagggtggccctaggggcagcgagcaagacagcaagcagctacgagttccagggagctctgtcct

SEQ ID NO: 62794 - DNA, 51 bp, Homo sapiens
tttccacagtgattgatgctgcctcaggactttccatgcgtagaaagccac

SEQ ID NO: 62795 - DNA, 100 bp, Homo sapiens
cggctcttcccggcgctctcctggctcccttctgccccagctccgtctcggcggcggcgggtgaccaaagccacgtaatgtccgtagttcgctcatccgt

SEQ ID NO: 62796 - DNA, 111 bp, Homo sapiens
gattcacccacagcggggcggcggcggcggcggctgcggcccaatataggccgagacgcatccagagctttcgtgaccggggactgttctgaagcaggcctcgtggatgac

SEQ ID NO: 62797 - DNA, 50 bp, Homo sapiens
agacgatgaagccccctctgatggttcactacaaagcacttgaacgatga

SEQ ID NO: 62798 - DNA, 75 bp, Homo sapiens
cgctgaccacatctgtggatgtgaaaattgaaatgtgtgaatgacaactactggtttgggagggacaaaagctgt

SEQ ID NO: 62799 - DNA, 100 bp, Homo sapiens
cgcggattcaggtgtggctctatgagcaagtgaatatgcggatagaaggctgtatcattgtacgcagtgatccgattcaaccagtacttcaaggtgaagc

SEQ ID NO: 62800 - DNA, 100 bp, Homo sapiens
gggatcgtgaccgagaccgtgaccgagagcgtgaccgagagcgcgaatatcgtcatcgttagaaggcatgcatatcattctgtttcaactccccctgttt

SEQ ID NO: 62801 - DNA, 89 bp, Homo sapiens
aggatatcgacgtcgtgatccagaagtccagagctgaggactgcctgtttgcaggttccccctaaaggactcaaaacgtctaatccaat

SEQ ID NO: 62802 - DNA, 106 bp, Homo sapiens
taaagccaagctcatctctgagacccggaggaggttcgaagctgagtatgtgacagacatatctgaagagatggattaagaatgctttggattaaggattgtggag

SEQ ID NO: 62803 - DNA, 83 bp, Homo sapiens
ctttccctcaacagacagctttttctcaacagcccaatgaatggcagttcggaaaaccctcattcctcctcagcctcctgatg

SEQ ID NO: 62804 - DNA, 50 bp, Homo sapiens
agaaataccactatcttcctgaagtgtcctcttcctgactatactcctcc

SEQ ID NO: 62805 - DNA, 74 bp, Homo sapiens
gcgagatccgctgctgctgaggagaggagcgtcaacagcagcaccatgggtggttcccctctctcagcgaagtg

SEQ ID NO: 62806 - DNA, 89 bp, Homo sapiens
agaacatgctcacatcttcaggtgcctcattcacatacgtcaaggaaattgagacaatgcagatcttcgtgaagactctgactggtaag

SEQ ID NO: 62807 - DNA, 100 bp, Homo sapiens
gcccgacctgcacgaatacgcctcgataaacagggccgtgccgcagatgcccaccggaatggagaaggaagaggagtcgttccagggccctgcgaaccag

SEQ ID NO: 62808 - DNA, 90 bp, Homo sapiens
gatgagacatttgctacagcatcccacattaagtcaacggatgctttcattggatttggaggaaatgtgatcaggcaacaagtcaaggat

SEQ ID NO: 62809 - DNA, 90 bp, Homo sapiens
gtgagcacaacccgaagcggcctgtgacctgtgaacagggctgtggtttggcctgtcactgctcctcatcctcctgagccgtggtgaaga

SEQ ID NO: 62810 - DNA, 90 bp, Homo sapiens
aggaagcaaaaaaggctaagcaagcatctaaaaagactgcaatggctgctgctaaggcaagatgtatccaatgactttgaaataaatatt

SEQ ID NO: 62811 - DNA, 100 bp, Homo sapiens
cggcgtgctactgagttcggccggtccgagtcactgtgcgtcgcctgggcccgttcctggtcttctcccccagtgtttcagctgaaccatccgttcatct

SEQ ID NO: 62812 - DNA, 100 bp, Homo sapiens
ccaagatctacgccatgcactggggcacagactccagacctgcaggctgggacaatgaaaagaaaatagctattttacatgaaaattttacaaccgtgaa

SEQ ID NO: 62813 - DNA, 50 bp, Homo sapiens
tcccatgctctgctgagcacggtggtccagagggggcaaacctctttatt

SEQ ID NO: 62814 - DNA, 96 bp, Homo sapiens
ctgatctcaaactcccacggtcaagcgatctgctggcctcggcctctcaagagtgggtgcagtggaccccatcatggagaagttcaacacatccag

SEQ ID NO: 62815 - DNA, 87 bp, Homo sapiens
ccagatcacccacaaggacccgaagacaggaaagctgaggacttcaccagcgctgatttggagcaagaggtggtggtggccttcccc

SEQ ID NO: 62816 - DNA, 88 bp, Homo sapiens
ccatccgagggatgctgaaaacctttgggcttcatggagtcgtcttagatgttgattcaaatgtgacagtgatgataacatgggtgcc

SEQ ID NO: 62817 - DNA, 82 bp, Homo sapiens
gaaggggtcccgaagccccctgcaggaactctacaacccaatccaggttggtcaaagaaaaagtgatgtatgaaaaagaggc

SEQ ID NO: 62818 - DNA, 90 bp, Homo sapiens
ccctgcgaacctgtatgtgcgaggacacaactcagatgggaagttcatcgcccgggcacagcggatagagtacgactgtgaactagttcc

SEQ ID NO: 62819 - DNA, 85 bp, Homo sapiens
atctttggatggcttacatcttcctgaatcgagcagagaaactgttcggcgttgggctatcttgactgcaagaaacttggggaaa

SEQ ID NO: 62820 - DNA, 96 bp, Homo sapiens
tggcgagcaggacagcatgctgcctgagttcatggctcagttccacgaaaagatctaccagatgctgaagaacttactccagctctctccagaaac

SEQ ID NO: 62821 - DNA, 75 bp, Homo sapiens
gatcgcagtccggaggtgaggcggaactctgagcgtgccaagttggaggccgccattgccgaggctgaggagcgt

SEQ ID NO: 62822 - DNA, 83 bp, Homo sapiens
gcatttaaccagcatggctacttcatattttggaaagcagtttttaagacaattaaaagagatgtttccaggttttcgactag

SEQ ID NO: 62823 - DNA, 82 bp, Homo sapiens
aacgaccaagagggtgttcgactgctagagccgagcgaagcatataacacgtgggaaccggaggagaacatcctggacccca

SEQ ID NO: 62824 - DNA, 75 bp, Homo sapiens
acataacctgaggagccgggggaagctggccttggggccatagtgtatgaaggccaagacaagaacccagaaatg

SEQ ID NO: 62825 - DNA, 100 bp, Homo sapiens
cggcgtccccaggataagtcacagggctatgcaaggagtgaatgtttcagggtggagaagaatctgcttgtctatgggatggacagattcctggtgaaag

SEQ ID NO: 62826 - DNA, 50 bp, Homo sapiens
ccaggctcgagttgatgcccacagaccatattttacatccttccacgcct

SEQ ID NO: 62827 - DNA, 82 bp, Homo sapiens
cgcggtggagcgggacacgaacgtgaggtggcgagaggcgtgctgaccagtctgccaggagacagcgtgactctgacctgcc

SEQ ID NO: 62828 - DNA, 75 bp, Homo sapiens
gcgtgtccctgcagcgaaggatcctgctaggtcttgactccactaacggggacttctcatacggctttgaacttg

SEQ ID NO: 62829 - DNA, 75 bp, Homo sapiens
ccctggatacggtcactttctacaagtgtgctggaattgatgttcgtctgtgtgatgttggtgaggccatccaag

SEQ ID NO: 62830 - DNA, 100 bp, Homo sapiens
aaaaagctgtggaaggctctggataaggaccagtacctgcccaggaaactggccttctctgactaccagatccagcagatgacagccaacttcgtggatc

SEQ ID NO: 62831 - DNA, 82 bp, Homo sapiens
cttcgtcatgttcttcgcgccctgcattttgaaagcgaagcagaagccgtagaatcagcggcgagcctgttgaaagaaccca

SEQ ID NO: 62832 - DNA, 97 bp, Homo sapiens
aggggcgctcccgggataaacattatgtttgagaccttcaacaccccggccatgtacgtggccatccaggccgtgctgtccctctacgcctctgggc

SEQ ID NO: 62833 - DNA, 100 bp, Homo sapiens
caaaagtgctcaacttcctccagaaactttggcgacaatgttggcctgtctgcaagcttgtgcaggggctctgaggaaggcaacacaatggtacccaaga

SEQ ID NO: 62834 - DNA, 101 bp, Homo sapiens
agcgaccgggagaacatagacgtccctggctctacctcttctgccacaaacgtcagcatggtggtatctgccgaccctttgtccagcgagagggcagagat

SEQ ID NO: 62835 - DNA, 146 bp, Homo sapiens
ccactcccaccgccagctggaaccctggggactacgacgtccctcaaaccttgcttctaggagataaaaagctatcatggtgaacttacttcagattgtgcgggaccactgggttcatgttcttgtccctatgggatttgtcattg

SEQ ID NO: 62836 - DNA, 96 bp, Homo sapiens
ctgcagagtgaagagaaaatagcaaacgatccagacggcagggagtgcatcaaaggtgtgaacacagaggatgtctacagttgctttcgcttccta

SEQ ID NO: 62837 - DNA, 83 bp, Homo sapiens
acaggccatgctctggcaaaaacaatgagtccctggaacgccagatgcgtgaaatggaagagaactttgccgttgaagctgct

SEQ ID NO: 62838 - DNA, 100 bp, Homo sapiens
gtggcgtcacggcgccagctcctcccgacgccgaggttaatccctatatcctgaagaagaacatgatcctcatgacaaatcatttctatgcagcgatctt

SEQ ID NO: 62839 - DNA, 100 bp, Homo sapiens
tgtcctcgcacctggatggcagcaggggcgccggggtcctctcgacgccagagagaactcgatgccaccgcaacggtattggcgaaccggcaggatgaaa

SEQ ID NO: 62840 - DNA, 75 bp, Homo sapiens
tacctcaggggccgtccccaggacactgtccggatcttccctccctggtgttggagcgggccggagagaagtaga

SEQ ID NO: 62841 - DNA, 75 bp, Homo sapiens
gcaaggaccagtccctcggggggaacgtggtcatcagtggtcagtgggggttttggcttggtttgaagaaggtga

SEQ ID NO: 62842 - DNA, 100 bp, Homo sapiens
attgaatatggacccaagagtcagcggtatattagttcagttaccactaccaggagcggcctattgccaattcatggacatgctcttccctggctgcatt

SEQ ID NO: 62843 - DNA, 75 bp, Homo sapiens
gcaggatgcaggaggagctggcgtgggagaccgacggccgtactccaaagattcaggtttactcacgtcatccag

SEQ ID NO: 62844 - DNA, 75 bp, Homo sapiens
cggagggtttcccgcggcgggtgaggcgctggtgcctgagattgtgagggagacccaggacctaattgaacaagg

SEQ ID NO: 62845 - DNA, 88 bp, Homo sapiens
tgagacagaagtacaacgtgcgatccatgcccatccgaaaggatgatgaagttcagacttattctggactcttctgtgtagttataaa

SEQ ID NO: 62846 - DNA, 80 bp, Homo sapiens
tcctgacagcctggaacaacgtcaagtacgggcgtgatggtgggcatgggtcagaaggattcctatgtgggcgacgaggc

SEQ ID NO: 62847 - DNA, 100 bp, Homo sapiens
ctagctactgcacgtacttcataaagcaggactctaaaagctttgggctcatgcacaattagttcgagaagttgatgtggagaaggtgtctgcttttgag

SEQ ID NO: 62848 - DNA, 74 bp, Homo sapiens
tgaacaccgggagctactatgagcacgtgaaggatgaaatctttgacatggtaaaaccaaaggatcctttgaaa

SEQ ID NO: 62849 - DNA, 100 bp, Homo sapiens
ctgtatgtatggcacctgctgcctctggggaaagacttattccatcggatttctgaggttctgcaaacaggtgcagacattccatggaggcctgctgcag

SEQ ID NO: 62850 - DNA, 100 bp, Homo sapiens
gtccagctttcttcacatcggggacatcgtctccctgtacgccgagggctccgtcaatggcttcatcagcactttgggatgtccagctcgccgctgtcca

SEQ ID NO: 62851 - DNA, 74 bp, Homo sapiens
aggattccaagtaactcttatttggaacaaccaggaagctatatgagaaaaagcttttgaaactgagggaacaa

SEQ ID NO: 62852 - DNA, 100 bp, Homo sapiens
gtacgtgtacatcatttacggcatgtacttctgcatgaacatctccagccaggatgtgaagttcatttccaatccgccctccatggtggcagcggggagc

SEQ ID NO: 62853 - DNA, 75 bp, Homo sapiens
taacccttgatcctcctcctaattgcaggcagttgcagtggtgcagaatggctgacctcagtcttgcagatgcat

SEQ ID NO: 62854 - DNA, 100 bp, Homo sapiens
atctccaacgtaacctcggcgccggtgacgtccctcccgctggtcaccactccggcaccaggagaaccggagccttaccatcaaacttcggaaacggaag

SEQ ID NO: 62855 - DNA, 100 bp, Homo sapiens
gggagagatcgttggttcacagggaagtcgcctggaaaaaccaatagtggccataatcatcagaaatggagaaattatccccatgtcttcagaatttacc

SEQ ID NO: 62856 - DNA, 98 bp, Homo sapiens
ccgagacatgggccacactgatagaatagagaatttgagaaaaatctgggtctttctaaaaactgctttgtaccatctccagggagagcaaggttgga

SEQ ID NO: 62857 - DNA, 51 bp, Homo sapiens
taaagatgcgcctctgcgatttgcaggcatctatcatttcccgtaaaaaag

SEQ ID NO: 62858 - DNA, 98 bp, Homo sapiens
agttatggcacacacagtgggacctagacaaagggagagggtgaccgacatcccaactagtccaggccttcgcgtctcctgcgccagcagacggtgcc

SEQ ID NO: 62859 - DNA, 97 bp, Homo sapiens
caagacccttgtgctcgttgtcgccgcggtcctgctgttggatctcatagatcagaatatactggagcctgtaacccgtgcacagagggtgtggatt

SEQ ID NO: 62860 - DNA, 75 bp, Homo sapiens
ttatgagagatttttgggacctgaaatcttttttcatccagaggtgctttgtaacagagccagactggtttccta

SEQ ID NO: 62861 - DNA, 82 bp, Homo sapiens
cgcgggtctgctctgtgtgccatggacggattggtgctgaagacatggacggcttccaggcagacacggaggaggaggaaga

SEQ ID NO: 62862 - DNA, 88 bp, Homo sapiens
ttaaatgccgcaccctacggcatcgaaaggtgtgtgcagtggcctcagggatccggaaagtctaggactgaacttctcctaacatcca

SEQ ID NO: 62863 - DNA, 74 bp, Homo sapiens
aagattgaaggaaggtgatacaatgatggggcagcaagtggccaatgagggccccaaggctgttgcagctcctc

SEQ ID NO: 62864 - DNA, 90 bp, Homo sapiens
aaaatgggtgatgtcaaagagaactatcttgaaacatttatttccagtccaaagctccaaacaggcatgcgaggtgcctttggaaagccc

SEQ ID NO: 62865 - DNA, 80 bp, Homo sapiens
accgcaacattccttatccaatcccttaccggcaagataacccctgtgacagaaggctactgttgctgtaacaaagggca

SEQ ID NO: 62866 - DNA, 90 bp, Homo sapiens
cccaggcataaaatcatctccatattctcaggcacagagaaagagtctccgggaccattatggcagtcaagtggacgggtgggcattctt

SEQ ID NO: 62867 - DNA, 73 bp, Homo sapiens
gctgaaacaatgggacccatgggttgggtgctgataagactgtgaaaggcccagatggactgaccgcctttga

SEQ ID NO: 62868 - DNA, 100 bp, Homo sapiens
ggtgcgcactgcgggcgcatccctgccccggcgccgtccgtgcccgcgggacctgacagccgggtcagaggtgctggagaatctggtaaaagcaccattg

SEQ ID NO: 62869 - DNA, 51 bp, Homo sapiens
gagaaatgagatgatagccaaaccctcagatggagtttcactcttgttgcc

SEQ ID NO: 62870 - DNA, 95 bp, Homo sapiens
agctgcggaatttgcggctttggcagattatggtgacaagctgaacatggagctgagtgagaaatacaagctggacaaagagagctacccagtct

SEQ ID NO: 62871 - DNA, 100 bp, Homo sapiens
ctagaactcagttgtgcgttgcggccagtcgccactgctgtctgttgtgtcgggtctggactcccctgccaagactagctccatggaaaagaaacttctc

SEQ ID NO: 62872 - DNA, 98 bp, Homo sapiens
gggcccgactcctccgacgccgatccggacagcggcacagaggagggaggaccagtcctgcctctgttgtagaagacatgtggtgtatataaagtttg

SEQ ID NO: 62873 - DNA, 87 bp, Homo sapiens
gaagtgacgcagagaagtttccgggactgtatggtttgaagtggtgaacatggatttttctcggcttcacatgtacagtcctcccca

SEQ ID NO: 62874 - DNA, 96 bp, Homo sapiens
gctgagtggtttttcggatcatgtctggtggctccgcggattataacagggaaatcctcattgacgattcaatttgttgaaggccaatttgtggac

SEQ ID NO: 62875 - DNA, 74 bp, Homo sapiens
caaaaacgaaagcaactggagctcaggtatgcagaatctgtgggagcaaaacattatcatacttcagccaaaca

SEQ ID NO: 62876 - DNA, 75 bp, Homo sapiens
gcagagcaaagactccagtaacactcaagcaaagaagagttgagcacaatcaggaaggatttgatgccctggatc

SEQ ID NO: 62877 - DNA, 100 bp, Homo sapiens
gaggaggttcgaagctgagtatgtgacagagtcgccaacatccagcagcagctggcccggcttgacaatgagtcctggccaagcacggccgaggctgaca

SEQ ID NO: 62878 - DNA, 100 bp, Homo sapiens
ccactggacctccaaggaagccacgtgcagacatctacaaccttcgatctcctgacgaatcctggctctgcagagagaacagcccagaaaagaaagttcc

SEQ ID NO: 62879 - DNA, 100 bp, Homo sapiens
cgtggggcttggactctcccccaggttggctcagctcctcaccaccatcccactgcctgttgttgttacaggcccaaaaactgcgactggcatacacaag

SEQ ID NO: 62880 - DNA, 100 bp, Homo sapiens
ggggctgtgaaaatgaagaaaatgtacctcaaacacagtgcaaacactcagatgcttcacctgaacctaaaatggtgagcgagagtcaccatgaggccct

SEQ ID NO: 62881 - DNA, 100 bp, Homo sapiens
gcgaatcctggcccaccgcctgcccaaccgcgtgaccttgattgagttaatgaacttcacgcctcagcgtccaggaggtggtccaggccacgctggtggt

SEQ ID NO: 62882 - DNA, 100 bp, Homo sapiens
cagtgcactggctgcctggggtggcaaggctgcaaacaaggaggcaacccaggaggcttttatgaagcgggccatggagcctgtgttggaagagatggtg

SEQ ID NO: 62883 - DNA, 82 bp, Homo sapiens
cgcgctctgccgcgaggcgcgcgccgcgcaagtcttcttcctcaaagggacaggctggcctgacatggaaggtgaaacaagg

SEQ ID NO: 62884 - DNA, 100 bp, Homo sapiens
ctacacgatgagcgtgtgttggttgctttcggccagcgggacggcatccgagtggatgattcaacagccacacaaagcagcaacattttttggatgcatt

SEQ ID NO: 62885 - DNA, 96 bp, Homo sapiens
ggcgggtgcgctgggagcctgggccgggagccgggtgagggcgccgagaggctcggtgggcgcgggcggcgagccacaccatatcctggtggattt

SEQ ID NO: 62886 - DNA, 96 bp, Homo sapiens
attcgatggacatggacatgagccccctgaggccccagaactatcttttcgggggatatgagactttctactcggaatatcctgagtgttgcgtgg

SEQ ID NO: 62887 - DNA, 100 bp, Homo sapiens
gggaatcatcgtcgtgaacacagaagttggtcctgagaaaagggtgccagcgatgcctggatcgcctgtggaagtgaagatacagtccagatcctcacct

SEQ ID NO: 62888 - DNA, 90 bp, Homo sapiens
ctctcgggcatcgggcaggaactgggcgccggcgcttacagcatgaggtgtgaacttcaacccggagcactgcagccccaatggcaccga

SEQ ID NO: 62889 - DNA, 51 bp, Homo sapiens
ggcaagcgttggttctgtgcgcctcagctgtgaaagttgtgtagatttact

SEQ ID NO: 62890 - DNA, 98 bp, Homo sapiens
ctatgatatatatgggaagagaggactggaaatggaaggatgggagcaatcatcctcttccagtggtagcgtgtttgggtctggaaacactggaagag

SEQ ID NO: 62891 - DNA, 100 bp, Homo sapiens
ccaacacataaaaattatttatccaacagctcctcccaggttttatggcaggaattcttcctatgttcatggtggagtagatgctagtggaaagccccag

SEQ ID NO: 62892 - DNA, 98 bp, Homo sapiens
gcggccgtgggggagatctgtgaggaagatgataagatcagatgggcgtctagatgggactatattctggagtctatgcctcatacccacattcagtg

SEQ ID NO: 62893 - DNA, 75 bp, Homo sapiens
atgttgctattgcaggacggagatccacctctgatgttcactgaagagtaccagaaaagtctgctagagcagtac

SEQ ID NO: 62894 - DNA, 83 bp, Homo sapiens
cttgcttggagatcaggacgcaaagaaatgagccgtcagactgctacagcattacctaccggtacctcgaagtgtccaccatc

SEQ ID NO: 62895 - DNA, 87 bp, Homo sapiens
aatcttcaaagagtctcttaccttgtgtttgatgaagcagatcgaatgtttgacatgggatttggctgaaagtcacaacatgaaaaa

SEQ ID NO: 62896 - DNA, 74 bp, Homo sapiens
tcgaggccgctgctgctggcgctcctgtcgttgggtgctgatagtctgcagcacaggtttagctgggattatgc

SEQ ID NO: 62897 - DNA, 97 bp, Homo sapiens
cagattttggcagattatggctttgtccccacccagcactgatgatattataaagccttctggcggccgcccctggtttctcctggggggtgatgag

SEQ ID NO: 62898 - DNA, 100 bp, Homo sapiens
ggcaggtccacttcgaaatttgctcttcagactgatggactcaactgtcccagatgaaatccaagaggacacagcattgttggttttgccatgtactatt

SEQ ID NO: 62899 - DNA, 50 bp, Homo sapiens
aagacaacaagcaattttttgaataagacctggaagtttgttgaaggtct

SEQ ID NO: 62900 - DNA, 100 bp, Homo sapiens
ggcacattatgatggagcgggagcgcaagcggcaggggagatacttcaggggattaccggaagattctgctgaagatctgtggtggcaatgactgaacag

SEQ ID NO: 62901 - DNA, 84 bp, Homo sapiens
ccaaaaatgtgcatactcacagagttagagagagggatggtgatcaatgaactgagccatgttcaaatccctgttatgttgatg

SEQ ID NO: 62902 - DNA, 109 bp, Homo sapiens
aaggggcttcttccagagccaaggaggaagggttgtccgggcaggatggggaagcagaatagcaaactggcccctgaagtgatggaggacctggtgaagagcacagagt

SEQ ID NO: 62903 - DNA, 50 bp, Homo sapiens
cagcacgtgcacagccagctggaggagctcgggttcatgacgctctcgat

SEQ ID NO: 62904 - DNA, 100 bp, Homo sapiens
cagcaggggactgcgggtcgcgtcctggccgccgagaacatccagtcatggataaaaatgagctggttcagaaggccaaactggccgagcaggctgagcg

SEQ ID NO: 62905 - DNA, 100 bp, Homo sapiens
gagcgccatggctcactccccggtgcagtcgggcctgcccggcatgcagccacaatggtgcgcatgaatgtcctggcagatgctctcaagagtatcaaca

SEQ ID NO: 62906 - DNA, 75 bp, Homo sapiens
gaactcaaagtggatgaggaaacttttccttccctccatgagaaagaagccagctctgtctgacggcagcaatcc

SEQ ID NO: 62907 - DNA, 73 bp, Homo sapiens
tgggctgaagtacaaagtcaagaaacgaaatcctgaagttcgacatgtagatttggagatactgtgagtttga

SEQ ID NO: 62908 - DNA, 95 bp, Homo sapiens
actgcagccagttactatggcagttgcaaaatattcaggagaccgtcgttgccttgtatttccagagaacagtcccagtcggtacctccttttcc

SEQ ID NO: 62909 - DNA, 100 bp, Homo sapiens
tgctactgccttgagtctcattttgtttccctctggaaaccacatgtgtaccttgtttgcaacagtatggttatttgctggtataaaggatggagaaagc

SEQ ID NO: 62910 - DNA, 80 bp, Homo sapiens
gcagtacctgcagaaggtctctggagacatcttcagcagggtcccctggaagtgacgctgactcagccagtgaggagcgg

SEQ ID NO: 62911 - DNA, 75 bp, Homo sapiens
ccccctgtctctgccctcctggcgggcccggcggctctcactatccaggtgagaagccctaccactgcaactggg

SEQ ID NO: 62912 - DNA, 75 bp, Homo sapiens
tctgaagttgccaggcttcccaacattcttgtctgtgaatcagcatgattcttcagaggctcttcaggttctcct

SEQ ID NO: 62913 - DNA, 100 bp, Homo sapiens
agacctactgcagccacgcgggcgagcggctgtgtggatgtcggcgaagccgcgggcgaggttcatctgcagaagccagcggacgcctctgttcaacttg

SEQ ID NO: 62914 - DNA, 109 bp, Homo sapiens
caactgcaggaacaccgtcacgctgctggaggagctgtggcagaggtaaaacttcgagatgatcaatatacactggaacacatgcatgcttttggaatgtataattacc

SEQ ID NO: 62915 - DNA, 78 bp, Homo sapiens
tttcgggctgccgagggtgttcttgacgattaatcaacaggttcagccgtctgtatatctccccagatacctgaaact

SEQ ID NO: 62916 - DNA, 98 bp, Homo sapiens
agaaatgttgaagaagctgcacaggattctgtttctggcgtctgcatacgcaagtccccaactcgctgaggagagctgttcagctatggctgctgtca

SEQ ID NO: 62917 - DNA, 100 bp, Homo sapiens
atttgtttctgctgaccgcgggccctgccctgggctggaacgaccctgatcatagcaatggatcatttaacttgaaagctttgtcaggaagctctggata

SEQ ID NO: 62918 - DNA, 51 bp, Homo sapiens
gtcggcggcgcccggatgggcagctgaggtaaagggagaagatgaggaaga

SEQ ID NO: 62919 - DNA, 100 bp, Homo sapiens
agagagagagcgcgagagatggagatgggcagacggattcatttagagctgcggaacaggacgccctctgatacgcaaacatgcagatctttgtgaagac

SEQ ID NO: 62920 - DNA, 100 bp, Homo sapiens
tgatctaagtgtgtgcacacaatgctacatcatggagaaagcagatcttgtcatagttggtgctgaaggagttgttgaaaacggaggaattattaacaag

SEQ ID NO: 62921 - DNA, 51 bp, Homo sapiens
ccaacccccaaattggctgggacagggagacataagacatcagtcagtaca

SEQ ID NO: 62922 - DNA, 100 bp, Homo sapiens
cgactgccgcgcgatagtcagggagctgtgcgggtcctggttgcaagagaggagccagaaaacttcggctccatgttggaactgtcgtggaagggaacga

SEQ ID NO: 62923 - DNA, 51 bp, Homo sapiens
gtggtgactgtgcatctggagaagagcggcactgcagaggtggagctgaag

SEQ ID NO: 62924 - DNA, 75 bp, Homo sapiens
gtggctgtgttcaaaaccacccaaaggttgcaaaagcttctcatttcagagagatgccaggatcctaagtgcctg

SEQ ID NO: 62925 - DNA, 118 bp, Homo sapiens
ctggtatcttgttgacaagatttgcctctgcacagtttcccaatgtgggcctttggagtgacgctgtgggaactcatgactctgggccagactccctacgtggacattgaccccttcg

SEQ ID NO: 62926 - DNA, 89 bp, Homo sapiens
ggggagtggaaaggctctcagtgaaaaagctagatgctggtgtgccagaaaaaataagcctgatttccagagatgagaagagtgtactt

SEQ ID NO: 62927 - DNA, 88 bp, Homo sapiens
agaaacattaccgtcatattccacccattactaaggaccatggccaacctggagcgcaccttcatcgccatcaagccggacggcgtgc

SEQ ID NO: 62928 - DNA, 100 bp, Homo sapiens
tagcctcagaacgatatgataaagacgatgaagccccctctgatggccgaccagtgcacgggtctccagggcttcttggttttccacagctttggtgggg

SEQ ID NO: 62929 - DNA, 100 bp, Homo sapiens
catcaaggaaggcaagcctgcctgcttctgcatcgacagatagccgtcttcagcttgagccccatcactaggaatagaaggacagtctgtggaagtttcc

SEQ ID NO: 62930 - DNA, 100 bp, Homo sapiens
aaagaggatacctctgcgatcccgggtcatctccagatgctagggttatggtactttccaggagcagatgagccattacagtatccttgtcagtattcag

SEQ ID NO: 62931 - DNA, 98 bp, Homo sapiens
gacccagttcactgtggctggcaggatggtgaagaaaggctcaagtggtcctgtcgaagtatttatcactgagactccgagtcagcccaactcccacc

SEQ ID NO: 62932 - DNA, 100 bp, Homo sapiens
attcggcggcgcccgggacggcggcggacctgtcgcgatgtcagggctgcgcctctctgcagcagcctgattacatcaaccccagagccgtgcagctggg

SEQ ID NO: 62933 - DNA, 74 bp, Homo sapiens
aatttaaacaccaggaagcaatggatgtgaaggagttcaaagttaataaggaagttattgccagcgccatttta

SEQ ID NO: 62934 - DNA, 113 bp, Homo sapiens
cgcgagcacagagcctcgcctttgccgatccgccgcccgtccacacccgccgccagaggtggcgagaggcgtgctgaccagtctgccaggagacagcgtgactctgacctgcc

SEQ ID NO: 62935 - DNA, 113 bp, Homo sapiens
gtgaccatcgctccaaccaaaaccgtgaatggtgtctggaggagtgagagccggcagacaatgcagatcttcgtgaagactctgactggtaagaccatcaccctcgaggttga

SEQ ID NO: 62936 - DNA, 100 bp, Homo sapiens
gcgatcctttatttataggaggaccaagaccaaccatggccaagttaatgagctgcatcctgtggccctataacactcttctccaaaaggacctgccaga

SEQ ID NO: 62937 - DNA, 83 bp, Homo sapiens
tctagagcactgtgtgtctccccggacgcgagcccgctcccctgagattttttatcaagcagaaatgcatcgaacaacgagaa

SEQ ID NO: 62938 - DNA, 82 bp, Homo sapiens
aagacaccgggaccccctgaaagcctagaaatgtgctccagctgaggctgcaacaaaggaggacgagagaacaactagtgga

SEQ ID NO: 62939 - DNA, 90 bp, Homo sapiens
cctcgccgtcactgttgtataaatcccgtgctttgaagaagaggagcacttcaaggtgctggtgaagatgaccgcccaggagctcgccaa

SEQ ID NO: 62940 - DNA, 100 bp, Homo sapiens
gggaactgtgggcgtcttctctccaaagaaggatgtacgaagtaggtccaaagttgttgaccgtatttacagtctctacaaacttacagctcataaacat

SEQ ID NO: 62941 - DNA, 100 bp, Homo sapiens
ggcccccacccaactacctgtgccacctgtgcttcaacaaaggacactacatcaaggactgcccccaggtggcctcagccccgagtccaagaagatcctg

SEQ ID NO: 62942 - DNA, 100 bp, Homo sapiens
tacatgctttttattacaagactacggagcataggaggaaaattcatcatctgagaatggatcttggagaatgtctgaaagtccatgacctggctttaag

SEQ ID NO: 62943 - DNA, 100 bp, Homo sapiens
tcacatccgatgcaccctttttgtcagattatcaggatgagggcaccgaccgtcacgagctaacttcctggaagagctttccgtctattttcaaattctt

SEQ ID NO: 62944 - DNA, 82 bp, Homo sapiens
agaaggctcttgtagcgtctagaaagactaagacaatgcagatcttcgtgaagactctgactggtaagaccatcaccctcga

SEQ ID NO: 62945 - DNA, 118 bp, Homo sapiens
tgccaatcccccctcacccaggcccctgtcaagaaggtgccggtggtgcgagtcttcggagcgaccccggcagttatacatgggaagctgttgataccaaaaataatgtactttataa

SEQ ID NO: 62946 - DNA, 75 bp, Homo sapiens
ggaagcgagatgtcgaagccgccacccaaaccagtcaaaccaggttcatatccagctttcagagtggcaccgtgc

SEQ ID NO: 62947 - DNA, 90 bp, Homo sapiens
ggcacaacggctgggagaggaaacttgatgcttctgggccaccatttgccagggcctcgctcgagatccccagctcaagggtatagtgac

SEQ ID NO: 62948 - DNA, 87 bp, Homo sapiens
tctttgctgtactttatatgatatgcttgcttctattaaaagtggtgatgaacttcaggatgaggaccagtcctgcctctgttgtag

SEQ ID NO: 62949 - DNA, 98 bp, Homo sapiens
tggaagtgtgaaagcattgatggaatgtgctttagaagttaaaaagcgtttaatagagcaagaagaatatttgaatgtccaagttaaggaacttgaag

SEQ ID NO: 62950 - DNA, 98 bp, Homo sapiens
ctgcacttcgcattttggcattgacatttaattttagggtcctttatatagaagggagagtaggcctgtctcctccctcctacacatttccagctcct

SEQ ID NO: 62951 - DNA, 100 bp, Homo sapiens
cctgtggacgcgtatcgccagcacgatcccaccgcacgttcagaagtcgggcaattgttctcttaactgaattaattagggaaaacttcaggaacagcaa

SEQ ID NO: 62952 - DNA, 82 bp, Homo sapiens
tgttgcgatggcgcagaaaccccgttgacaaggcactgctttttcatgacggtagaagaagaaaggtgccactccggcatga

SEQ ID NO: 62953 - DNA, 74 bp, Homo sapiens
gccacgtccaagcaaaccgggaaaggagaggatcccggagccgccctcgatttgaactgcccatgggaaccacc

SEQ ID NO: 62954 - DNA, 87 bp, Homo sapiens
gacagtaaactgtggaccttgaagttagcagttttgtccatcaactaaaggcacaaacagatacctcacttctactggtgctgatgg

SEQ ID NO: 62955 - DNA, 97 bp, Homo sapiens
ggcaagccctccgagaagaacctctacgccgacatcgacgccgcgtggcaggcgctgcgcacccggtaagaatgattgatgttggctgatattggag

SEQ ID NO: 62956 - DNA, 100 bp, Homo sapiens
gttgttgttggcgactgtgcttcaagcgataatttgcaagtaccttttgagtgaagaagaggaccacttcagtgaggaacagtacttggctgcagtcaga

SEQ ID NO: 62957 - DNA, 83 bp, Homo sapiens
ctgagagggaaaaggacgccgcggtcttcccaggcgtcgcggagagcagaacatccagtcatggataaaaatgagctggttca

SEQ ID NO: 62958 - DNA, 90 bp, Homo sapiens
caaagagtcaaggtggggagccaacatacaatgtggctgtcggcagagctggtagagatctgccggtctgccctctgccacactgctgcc

SEQ ID NO: 62959 - DNA, 90 bp, Homo sapiens
caggatgtgagcaacacgggaccggtggtcttcaagctgacagagaagctgacggaacagaaggagtggatgaagatataattgtgaccc

SEQ ID NO: 62960 - DNA, 50 bp, Homo sapiens
gctggactggatttattcagtgctattgacctgaaaagtggttctggaaa

SEQ ID NO: 62961 - DNA, 74 bp, Homo sapiens
cggcgccttcggcaaggtttacaaggacctgaaggagaagaaggagaaggtggaggagaaggcaagccggaaag

SEQ ID NO: 62962 - DNA, 98 bp, Homo sapiens
ttttccgctgccgctggagagaatctctgaggtccccaggagagcctgcctgcacggaagagacgcctcctcggagtagggctgattggagccattgt

SEQ ID NO: 62963 - DNA, 96 bp, Homo sapiens
ctactttgactactggggccagggaaccctggtcaccgtctcctcagacagaggtgttccaggccttgcagcggctccatatgaccatcttctccc

SEQ ID NO: 62964 - DNA, 82 bp, Homo sapiens
gaaggagcggaagaatggcagtgctcaaactcaccgaccaggggacggcaaaacagaacagaaaggcggagataaaaagagg

SEQ ID NO: 62965 - DNA, 100 bp, Homo sapiens
gaaggacctgagcctgacgcgggccgcgcgggtacagaagattatcgatcaaaattaagtggagactgctttgcggatctggcttgccctgaaaagtgtc

SEQ ID NO: 62966 - DNA, 73 bp, Homo sapiens
ttggaaaagattatatcccagttgccaatatgcacccaatgtccagggagcgtgcaaaatttgtcaaaagtgg

SEQ ID NO: 62967 - DNA, 100 bp, Homo sapiens
ctggaaacctcccactgtggctgcataaggaagtcacacttcttttctaaggtcacatgaggacttggcatctgactctgaagactgtcttgcctgcatc

SEQ ID NO: 62968 - DNA, 101 bp, Homo sapiens
aaggatgccattgagatggccagcaggaccctgatgctcccataagacagaaaatgccccttgatgatctggatagagaagatgaagttagattactcaaa

SEQ ID NO: 62969 - DNA, 100 bp, Homo sapiens
ctacttcaacggaaactagctcatctgtagagactgatttgcaacccttccgggaagccatagctctgcatgcaatgttcacagcatctttaccgggagc

SEQ ID NO: 62970 - DNA, 75 bp, Homo sapiens
ctgatgacacctttattttaaaagctgatgttccaaggggagctgaatatgtatctgcaagagagtggatgagga

SEQ ID NO: 62971 - DNA, 82 bp, Homo sapiens
gtggagatatggcgcaactgcggcgcgtgctccatctcgaaaagcgagaaaggcctccagaccaccaacactcagctcaagt

SEQ ID NO: 62972 - DNA, 97 bp, Homo sapiens
atcaaccaccaaagtgggaaacattgaaatcaaggattctcaaagttggattggtggaaacaatgaaccattgacaggctttacatggcgaggtggc

SEQ ID NO: 62973 - DNA, 75 bp, Homo sapiens
gggcgccctccgcaagggcggcggagaccggttacagtagccacgatggaggtgatgaacctgatggagcagcct

SEQ ID NO: 62974 - DNA, 98 bp, Homo sapiens
ccaaggtcaacaaggacaacaatgagatcgtggacaagatcatgggcaaaggacagatccagcagcagccgctcttctaaaacattcaaaccaaagaa

SEQ ID NO: 62975 - DNA, 74 bp, Homo sapiens
gacgacgtgtacctggacatcaccggacatggatttgattgacatactttggaggcaagatatagatcttggag

SEQ ID NO: 62976 - DNA, 50 bp, Homo sapiens
cattccttacatcttggctgataatttggaaacctctgcgccatgagagc

SEQ ID NO: 62977 - DNA, 90 bp, Homo sapiens
ggggattttagtggtgtataaccttggactcacactgctgtctctgtatatgttctgtgagcttaagagttggacagtggaggaccttca

SEQ ID NO: 62978 - DNA, 90 bp, Homo sapiens
cgcgccgggccctgtcgcgaacctccggcgcgctgccccgccggaccgtgatgccttcaattaagttgcagagttctgatggagagatat

SEQ ID NO: 62979 - DNA, 100 bp, Homo sapiens
cgtctgcaaagtagcgctggcaaccacaacagagaggccagcaacaggaggagcaggaggagcgtttccacttcaagcgtgacccttttgcctgtgggat

SEQ ID NO: 62980 - DNA, 82 bp, Homo sapiens
tgttgcttctgggccagaggaagagaatgagatgaaggatttgggggcagagcacttggcaggtcatgaaggggtccaactt

SEQ ID NO: 62981 - DNA, 76 bp, Homo sapiens
tccgtgcgcggagccgtctgcctgcatctgctgctgaccctcgtggaaagaccacagcaagattctttcattcgtc

SEQ ID NO: 62982 - DNA, 96 bp, Homo sapiens
ctaggatgtggttgtggagtacttagcatcggaactgcaatgttaggagcaggtgcacagccagaggacaacacatcacacacaagaaacagttgt

SEQ ID NO: 62983 - DNA, 75 bp, Homo sapiens
gaagccacgatccagaccgcaattaacaatggtacaggcacagaccccacaggctcctcggacactgggtccatc

SEQ ID NO: 62984 - DNA, 90 bp, Homo sapiens
cggcagagcaaggggcttacgcagaaggacctggccacggcttgggcactgtttaaaggaaagttccgagaaggcatcgacaagccggac

SEQ ID NO: 62985 - DNA, 100 bp, Homo sapiens
gacctgtgcaggtgaggacaggccaggaggagctggagttctgtgaaaagctgctacagacctgtttctccagcccagcggacgacagcatggatcggtg

SEQ ID NO: 62986 - DNA, 100 bp, Homo sapiens
atctccttgatctttcatggtctaaagtctatgttaacaatgaatgggcaaccagtgttggggaaggagggagctttggagaacttgctttgatttatgg

SEQ ID NO: 62987 - DNA, 75 bp, Homo sapiens
gaaaaactgcgaaaagatttggaagaagagaagacaatgagaagtaatctagagctttctaccaaatccttccca

SEQ ID NO: 62988 - DNA, 82 bp, Homo sapiens
tgcaaagcgaggctgaagaaggccaaggctgcagaagccaaagccacggaagctcttcgtgggcggtcttgactggagcacg

SEQ ID NO: 62989 - DNA, 73 bp, Homo sapiens
atttttggtttcttacatgaaaaatcaaaatggtacatttaaggagctgaagaagaagctgttcaaacgccgg

SEQ ID NO: 62990 - DNA, 96 bp, Homo sapiens
ctaataaatttggaaggaaacagttccctgtcttgggaaaaggagaactcctgactgattagcattcacaccagatcaatgtccgagttaccacca

SEQ ID NO: 62991 - DNA, 74 bp, Homo sapiens
ctttaatccagctactctacctctaacacagtacctgttaacaacgtttattcactggatctctgaatacccag

SEQ ID NO: 62992 - DNA, 116 bp, Homo sapiens
atatgaaaaggctgcttgaagacacaccattgttttcatggtacaatcaagaatggttttagggaagactgttgccggatgacaaggctgtcactattgttctgtactacctgaca

SEQ ID NO: 62993 - DNA, 74 bp, Homo sapiens
cagacagaacagttaatcctcaatttaagcctgatctaacccctagaaacagattcgggaactggagcctctcc

SEQ ID NO: 62994 - DNA, 50 bp, Homo sapiens
ttcaaagacctgttcttaaaaaaaggtgaagatcatgacggagaaggaac

SEQ ID NO: 62995 - DNA, 98 bp, Homo sapiens
cataaagtcatccctgtgtatgtaggagtgaatataaaaggacttcatctcctcaacatggaaactaaggcagttgtgaaaaacttcaggacaaaaat

SEQ ID NO: 62996 - DNA, 90 bp, Homo sapiens
agcggagacgcggtgctcctcgggcgccaagcggaacaagcacatcatgattgacttggggactggcaacaacaacaagattaactgggc

SEQ ID NO: 62997 - DNA, 81 bp, Homo sapiens
aggacaaggacagaatcaccagcactggctgaagacactacctattgcattaaaaaactcccacggaatcctcagagagaa

SEQ ID NO: 62998 - DNA, 80 bp, Homo sapiens
cgtggcagcctgaacggagtgtgcgacggattgggagtttggtgccctggttgtcagatgttggaaagcagtaggacgga

SEQ ID NO: 62999 - DNA, 99 bp, Homo sapiens
gggaacctgctcaaagccctgggtcgcttggaagaagccaagattgttgccttgcgtgaacaaaatgttcatatacaaagaaaaatggcatcaagcgag

SEQ ID NO: 63000 - DNA, 50 bp, Homo sapiens
cttttccctctccctttccctaagaagctgctgatgggagctccaccctg

SEQ ID NO: 63001 - DNA, 98 bp, Homo sapiens
tgtaaactcagcacgagccattttgcagatatacctgtgtttcccacaatcacagccactgtgacttttcaggagtttcgatacgatgaatttgatgg

SEQ ID NO: 63002 - DNA, 98 bp, Homo sapiens
gacaatgttctcaaagcatttacagtacctaaaaacaggtccctggcgagccccttgcagagcagcccgacggccatggaggctgaagagacgatgga

SEQ ID NO: 63003 - DNA, 90 bp, Homo sapiens
cttgagagatgagcaccagttacacaaggacttctttatccgagcgctggattgcatgagaaggtcacccttgtggttggagcgtcccag

SEQ ID NO: 63004 - DNA, 100 bp, Homo sapiens
aggaggaacgcgctaaggcaaagcacctggtgtctggggaagccaatgaaactcagattgcagaagcactgaagcgttacagtgaacgggcattctttgt

SEQ ID NO: 63005 - DNA, 100 bp, Homo sapiens
ctggaggacacacctaaacatgtggaatcccaatgccggtatgagtcgtcatccgaggactccagcacagcagagaacatctcagacaacgacagcacag

SEQ ID NO: 63006 - DNA, 75 bp, Homo sapiens
agggcctcgccatgtcctgctgcccggactacaaagctgatgaagacccagcattattccagtcagtcaagacca

SEQ ID NO: 63007 - DNA, 90 bp, Homo sapiens
cgttaggaaaatgtgatgcatgtctcagtgatgatgattattctccaccgtctaagagaccaaaggccaatgagctaccgcagccaccag

SEQ ID NO: 63008 - DNA, 100 bp, Homo sapiens
ggaagaaacctcagacagatcgccggggaggcagcgcgggatcccagcctcaggcgtgcgcggacggtgtgcggaacccacaatacattatatgcaccag

SEQ ID NO: 63009 - DNA, 100 bp, Homo sapiens
acaatcctgggacatttatctcagcagcaaaagtttgaagagaaccttagaaagttggtagctggcagtgttgtgatggcttttgaagaagtatgcccgg

SEQ ID NO: 63010 - DNA, 82 bp, Homo sapiens
aaagatcacagcagtgttccaagttctaaagagcctgctataactgcggtagaggtggccacattgccaaggactgcaagga

SEQ ID NO: 63011 - DNA, 100 bp, Homo sapiens
gaggggccaaggcagaagaaatcttggagaagggtctaaaggtatgtatattaggttaggctgggaagttttttttaaaaacagaaaaacgtgatggagg

SEQ ID NO: 63012 - DNA, 100 bp, Homo sapiens
agaccctgctgctttgggaggatttctcaggctatgccatggcagctgcagaggcccagggagagggcggagaaggaacagacttttatcaggtccgagc

SEQ ID NO: 63013 - DNA, 95 bp, Homo sapiens
ggtttgataatgtccttcccgtcagcctggcatttgacaaatgtacagcttgttcttccaaagaagatgagaatgtgcctactgctcctgatcct

SEQ ID NO: 63014 - DNA, 98 bp, Homo sapiens
ttcacgggatcacttttgtgaacttgatggcttggaaagagacaagtttgacaacaagactgtcacctttgaagagcacatcaaggaagaacacaaca

SEQ ID NO: 63015 - DNA, 82 bp, Homo sapiens
cggcgagagtgggcgagaacgtccactgcgggccggcgaaagctggagcattggtttgaaaaggccctacgagacaagaagg

SEQ ID NO: 63016 - DNA, 75 bp, Homo sapiens
gtgcccctgggcatcaccaacatagccatcgacttcggggagcagtgatttcctgaaggaaatataatgatctgt

SEQ ID NO: 63017 - DNA, 100 bp, Homo sapiens
tgaatgaaactctcagatcactgtataaccacccagtaccaaaggcaaatactcctgtaaatttgagtgtgtttgccagggtttggatacctgatccaga

SEQ ID NO: 63018 - DNA, 98 bp, Homo sapiens
gagggaggaagagaactactcctttttacctttggttcacaacatcatcaaatgctctgcttatgataatgtcaacaaagttcgagtagctatcaaga

SEQ ID NO: 63019 - DNA, 90 bp, Homo sapiens
gctttatggacttgcatcaggagtagcaagtctatgctccatcagcaagcactgccgactacaatagggactcgccaggctatccttcct

SEQ ID NO: 63020 - DNA, 100 bp, Homo sapiens
agagaaggatgatggtgaagctaaagaaatttctacacctacccattggtctaaacttgatccaaagacaatgaagacatagggcctgattacattccaa

SEQ ID NO: 63021 - DNA, 75 bp, Homo sapiens
ctcctcctgcttccctggctcatgttgctcacaggtcccctgacaagcccaccaggccccctgctgagatggctg

SEQ ID NO: 63022 - DNA, 75 bp, Homo sapiens
catggataagcatgccctgaaaaagtatcgtcgagaagcctatcatcggttggaccgacagttacaagacatagt

SEQ ID NO: 63023 - DNA, 100 bp, Homo sapiens
tccatccatttcgtggttcacccgctgccgggcaccgaggaccagctcaatgacagattccatcacccagcacaaggtctgtgcccctgaaaactaccta

SEQ ID NO: 63024 - DNA, 75 bp, Homo sapiens
ataatatagctggtattgaagaggtttatgctaaaactatcgatgggcaacagactattattgcatgtattgaaa

SEQ ID NO: 63025 - DNA, 98 bp, Homo sapiens
agtggtcccggaattaagaaaacagagcgacgagcaagaagcagcccaaagtcgaatgattcagacttgcaagtttgtatctacttgaacaagaatgg

SEQ ID NO: 63026 - DNA, 82 bp, Homo sapiens
gcgccatccccgagcagcggtggaagctgatagcctgggctggaagctcttctacgtcacaggctgcctgtttgtggctgtg

SEQ ID NO: 63027 - DNA, 113 bp, Homo sapiens
ggcagcagcccagacgcggcacagagagggcctgggagcttgctgcagcttcagacaatgcagatcttcgtgaagactctgactggtaagaccatcaccctcgaggttgagcc

SEQ ID NO: 63028 - DNA, 100 bp, Homo sapiens
agactgtcgacctaaagcctgactggggcaagggcttccgttacaagatgaggtctgtgtatgctcacttccccatcaacgttgttatccaggagaatgg

SEQ ID NO: 63029 - DNA, 100 bp, Homo sapiens
cggcagaggatccagtgttcaccatcctggccccggaagtttgaaaatctgaacacagttgctgagtgtctgttttctctggtcaacggtgatgacatgt

SEQ ID NO: 63030 - DNA, 74 bp, Homo sapiens
caggcacgcgccaccactcccagattgctcgctgtaagcagctcatctgtgaccccagctacgtaaaagatcgg

SEQ ID NO: 63031 - DNA, 100 bp, Homo sapiens
ctgtattatcaccaccccagatgacctggaggggaaaaatgaggactcagtggaactgctggtgttgggtcaatgatgccttccttcatgtgatacaggg

SEQ ID NO: 63032 - DNA, 75 bp, Homo sapiens
gagaaaggaagcaggcccgttggaagtggttgtctggagctctcaaacactgctgtcctgcaccagatgcggcgg

SEQ ID NO: 63033 - DNA, 51 bp, Homo sapiens
gaactactgccggagcttctgccagaatgcatctactcatgcctcgaaatc

SEQ ID NO: 63034 - DNA, 96 bp, Homo sapiens
tgtgccgccgctgccaacgtcgagcggcgacggctgcctaaagaatgttttttgatacaaccaaaggaaagaaaagagaataccaccaagaccagg

SEQ ID NO: 63035 - DNA, 82 bp, Homo sapiens
aaaggctgttatttacgtgaacacacagcatggatgatacttgttgatgccactgttatcatcctcctagcagaagatagtc

SEQ ID NO: 63036 - DNA, 50 bp, Homo sapiens
gctccccatccactctcacaaggcatctaataggattcaggaatcaaaga

SEQ ID NO: 63037 - DNA, 98 bp, Homo sapiens
tgaagatggacgaggtcctgtacagcatcgccgagaagttcaaagcagtattcagcgatttcaagagaagttttttatttttgctttgacacctcaac

SEQ ID NO: 63038 - DNA, 100 bp, Homo sapiens
cacatctgatatggcagaggaaactgaggatgcctggccgcaattctgtggtgttcttggtcacacatttatggagtttctgaagggcagtggagattac

SEQ ID NO: 63039 - DNA, 75 bp, Homo sapiens
caacctctcgtacatcggcgagggcgcctacggcatggtgtggttggtgacatcgtgaaagtcacaaggatgaat

SEQ ID NO: 63040 - DNA, 75 bp, Homo sapiens
gcacacctgaccaggaggtgaccgaggtgatggcatcagctgagaagggaaggaagcccatgtgaggacactgaa

SEQ ID NO: 63041 - DNA, 50 bp, Homo sapiens
gattcttttcaatacatcctaaaacagggcttcgtgggacacatatgcaa

SEQ ID NO: 63042 - DNA, 51 bp, Homo sapiens
tctaggaagcgctagacacatgtttcccaggcagctgcagacttgaaacag

SEQ ID NO: 63043 - DNA, 100 bp, Homo sapiens
gttagaaaggagacccgactgcaactgctggattgctgcaaggctgagggacgagaacgagacagcgtggaagatgaactggagatggccaccgtcaggc

SEQ ID NO: 63044 - DNA, 75 bp, Homo sapiens
gtggaaaggctctcagtgaaaaagatctgctgatttgggtcctactttaatgacaagacctggacaaccagcact

SEQ ID NO: 63045 - DNA, 100 bp, Homo sapiens
ccattaccactgcctcctttattgcagcaggaatttgtactatactggcaattgctggagaagattttgcaattgttgcttctgatactcgattgagtga

SEQ ID NO: 63046 - DNA, 75 bp, Homo sapiens
cggggacctggagctgacgcctattattgccttgtctgtcaagatccgcagttatgaagaacacttggagaaaca

SEQ ID NO: 63047 - DNA, 100 bp, Homo sapiens
tgccgcctcgctgtccctgcggcttctggggtcaagacagtcaccaccgaagagtacctggtgaaccctgtgggcatgaaccgctacagcgtggacacct

SEQ ID NO: 63048 - DNA, 103 bp, Homo sapiens
agtcacgaccaggaccttctgtgggactccagattatatcgccccagagattgtaaaccatggctgtgtggatacaagctcagcagctccaaggagaagccct

SEQ ID NO: 63049 - DNA, 83 bp, Homo sapiens
agcggccagatcggcttcatgctgtgcagcaagaacccgtgctactatatcggggccacagatgatgcagccaccaaaatcat

SEQ ID NO: 63050 - DNA, 73 bp, Homo sapiens
agaaatctttactgattccaatttggaagctgaaggtgttcctgaagtatctgaaaaatatgaaattagctct

SEQ ID NO: 63051 - DNA, 73 bp, Homo sapiens
aatttttaagacacgctgcaacaaagcagatgtcttatggtgaaattgaaggtaaattcttgggacctagaga

SEQ ID NO: 63052 - DNA, 90 bp, Homo sapiens
agatgtcaggatggtggctgacgaatgcctcaacaaagttatcaaagtgacagaccatgccaccactgccctgctccactatcagctgcc

SEQ ID NO: 63053 - DNA, 100 bp, Homo sapiens
ctagaactcagttgtgcgttgcggccagtcgccactgctagttaatagagtggatacaaccttgctgaagatgaagaatatacaatattgaggatatttt

SEQ ID NO: 63054 - DNA, 80 bp, Homo sapiens
atcgggagtacacagacatcatccgggagtgcatccgccccaacccttttccccctcgtctcctgtgagaattccccgtc

SEQ ID NO: 63055 - DNA, 100 bp, Homo sapiens
caagaaatcatcagttgaatgtagtgattcatcaacttaatgcccctttgtggcaggttgcacaccgatgctccagaattgtgagggagccatactctac

SEQ ID NO: 63056 - DNA, 95 bp, Homo sapiens
ggacagcatgttttttgaccgctttctccagtggaagtggttggaaagttatcagggaataccaagagcagagagagcatccaggaacctagatc

SEQ ID NO: 63057 - DNA, 90 bp, Homo sapiens
cctagccccaggattacaaggaaaagcaccaggcaaaccaccatcacatctcattttgcaaagggattgctgaaagtagtggatgacatt

SEQ ID NO: 63058 - DNA, 110 bp, Homo sapiens
catgctgaaacttagctatctgacctgggtgcgcttctccatctggctgctgatggatgtggacctgttggagaaccagctgggagtggcaggagcccaggccctctgtg

SEQ ID NO: 63059 - DNA, 100 bp, Homo sapiens
cgacgactcgctgtaccccatcgcggtgctcatagacgaactccgcaatgaggacgttcaggctgctaccatgaggttgaatcagaacaccttgctgctg

SEQ ID NO: 63060 - DNA, 78 bp, Homo sapiens
ttgtatcatcagattccatttcaacttctgccgacaacttttctcctgatttgagggaaattcagttcatgaagataa

SEQ ID NO: 63061 - DNA, 74 bp, Homo sapiens
agctactgtactggctattggaaggaggagattctgaagataaggaggatttctctgcctcttccaaacttttc

SEQ ID NO: 63062 - DNA, 90 bp, Homo sapiens
cagaaaggagttggggcttgatgaaggcgtggatagcctgaaggcagccattcagatcctgtttgaccaaactcagagatcaattaaggc

SEQ ID NO: 63063 - DNA, 100 bp, Homo sapiens
cctgagccccagcgctgatgcgatacaggtagttggcaaaaaaggagaaagccactaaggtacaaaagacactggacaaccatattgcaatcagatctac

SEQ ID NO: 63064 - DNA, 51 bp, Homo sapiens
gttcagcatccccaagcagggggaggtggaataacactcccatggatgaag

SEQ ID NO: 63065 - DNA, 100 bp, Homo sapiens
tcttccaaagctgcactgaactggaattacgagtctactattcatcctttgcttagaccatgctcagcctccaagcagccttgtcatcgacaaagaatct

SEQ ID NO: 63066 - DNA, 100 bp, Homo sapiens
tgcaactattcgcagtccgagcggtcctttcccataacctgtgcacggtgctgaaggttcctcatgacccagttgcccttgaagagcacttcagggatga

SEQ ID NO: 63067 - DNA, 98 bp, Homo sapiens
aacacaaagccggctacgcgctgcgaggttgtactcagactatctctactttgcaagttcgaataaatccgcggacgacttccatgagaaagtgacag

SEQ ID NO: 63068 - DNA, 82 bp, Homo sapiens
tggagacggtcgtagctgcggtcgcgccgagaaagggtggcccggtggaaatcctgccctttctgtacctgggcagtgcgta

SEQ ID NO: 63069 - DNA, 87 bp, Homo sapiens
taccccagcggccagatcggcttcatgctgtgcagcaagaacccggcacgagatgtgcgtaccaatgaagtggtggccatcaagaaa

SEQ ID NO: 63070 - DNA, 143 bp, Homo sapiens
ctgcctgccctggtggtggccgtgtctgttggctttacccgaacgaaaggatacggtacatccagctagcacgtctgagaatggtggatgtggtggagaaagaagatgtgaatgaagccatcaggctaatggagatgtcaaag

SEQ ID NO: 63071 - DNA, 100 bp, Homo sapiens
gcaagatccagatcgggatttacgtggagatcaagcgcagcgatggcctcaggcccaggcccaaggccaagtgagagagcccaggccacaggacatgctg

SEQ ID NO: 63072 - DNA, 100 bp, Homo sapiens
cgcaggacagcgcaggagccccggcgcatcgcggcgcgcacagacccaggtaatgtggaccgaactaccatgtacaaatttccatcttcttctctgttgt

SEQ ID NO: 63073 - DNA, 75 bp, Homo sapiens
cctttgagaccgtgaagagaaagatgcagacccaacatgagtgaagtttcctgcaagaaacgggacgactatttg

SEQ ID NO: 63074 - DNA, 50 bp, Homo sapiens
aaaaagttggtttggcattaaaggggatcatggaagctgataaagatgac

SEQ ID NO: 63075 - DNA, 100 bp, Homo sapiens
ggagcgtgaggacagtgagactcgaacaaaacctctgtagaggagcaggatgcaaccgacaggctgtggccggacagctgctgcccagcacatggagcct

SEQ ID NO: 63076 - DNA, 83 bp, Homo sapiens
gggaggtaagaagaaggcggaaggcggcggaggcggcggtcgccccggggctccggcggcggctcgcaaaggatctccttcat

SEQ ID NO: 63077 - DNA, 75 bp, Homo sapiens
tccggtcagggtcaagtcgtgttctgatcactactgacttgttgggcctgacacatttagggaagggcaccctta

SEQ ID NO: 63078 - DNA, 100 bp, Homo sapiens
cggtgtggcagcaagtcttagcagtggacgcgagacaccattcgcttttcacccaagatgatttgatgtcttataaaactctgatgaaccatgatggcta

SEQ ID NO: 63079 - DNA, 86 bp, Homo sapiens
ttcttctgcccagtatttgcagcagtaacagcacagaaaaatctgtgacccaggccttactgcttttgaacctgaagctttgggta

SEQ ID NO: 63080 - DNA, 71 bp, Homo sapiens
taaacagagaatacaagaggattatcttagaattttaagatacttcaggtggatccttttcataccttatt

SEQ ID NO: 63081 - DNA, 100 bp, Homo sapiens
aaactacaggttgaatttgatgaactgtttttgagggctgtcctacatgtgctgaaggccaaaagacagagctcataatggatgctatccataaacaaaa

SEQ ID NO: 63082 - DNA, 82 bp, Homo sapiens
ggcagctgtcccatgctctgctgagcacggtggtatcctgtggtctgaggccatcttcctcgaggcaaggccccagaggagg

SEQ ID NO: 63083 - DNA, 100 bp, Homo sapiens
cgctggagctaaactggagccgtccataggggtgaatggggaaccagacgtcctgggtcctctccagcatggcagccctctactggagggtgaaaggcca

SEQ ID NO: 63084 - DNA, 90 bp, Homo sapiens
gacggttcttgttccagtatgacaactatgggtccacagctgaggacattgtggagtggctgaagaagccaatatacccagtagaagaat

SEQ ID NO: 63085 - DNA, 100 bp, Homo sapiens
ggagaacaccggaagttggagaagagaagagcgttcctctttgcatcctctatgagaaataccgtgactgccttacggagtccaacctcatcaaggtgcg

SEQ ID NO: 63086 - DNA, 100 bp, Homo sapiens
gagcaagaaaagcctctgggagcagaagggaggctccaagacctcatcaacaattaaggttgaaaatgaatatggcagctactttgcctgtgattttgac

SEQ ID NO: 63087 - DNA, 100 bp, Homo sapiens
aacggcatggttggagtcagaagaggaagaagcagaactgggcagatatatttttgccatcatggatcagtttggagatatattagaaggtgaagtggac

SEQ ID NO: 63088 - DNA, 75 bp, Homo sapiens
gccggagtacgtcgttcccgctgcgctaggggaagcgggcaggaccatggccaacctggagcgcaccttcatcgc

SEQ ID NO: 63089 - DNA, 100 bp, Homo sapiens
tgctgattcctgcggccgcggtctacgaagaccaagtgggcaagtttgattgtatatttgccttccctccatgatctccaacactatccgataaagtaga

SEQ ID NO: 63090 - DNA, 99 bp, Homo sapiens
acaactccaaatcacacatctctgagcattctggggaaaagaaactacagtcatcacaatggtctggatgaactctaagaaggagctgatgtggaggag

SEQ ID NO: 63091 - DNA, 100 bp, Homo sapiens
cttattaataggaataccactattccaaccaagaagagccaggtgttctgttcctgctcctacgatgccaccacacactttgagacaacctgcaacgaca

SEQ ID NO: 63092 - DNA, 83 bp, Homo sapiens
caacaaatctggctctggcaccatgaacctcggaggcagccttaccagacaggcccaggatgttttggtgcaggagatggaag

SEQ ID NO: 63093 - DNA, 80 bp, Homo sapiens
aggatgcagcactggaagaaaatggtttggctgtgataggagtatttttaaaggttatgaagacagtatggagtttccag

SEQ ID NO: 63094 - DNA, 73 bp, Homo sapiens
cccggtacatctgaaagccgggaaatggcaaaagtcaacaactctagcttaattggagtaggctatactcaga

SEQ ID NO: 63095 - DNA, 99 bp, Homo sapiens
tgggtgctattgtgaggcggttgtagaaggaagacagagatgtcaatgaccccatgcccaaccgaggcggcaatggactagctcctggggaggacagat

SEQ ID NO: 63096 - DNA, 82 bp, Homo sapiens
ataacaaaagctgctcagagtctcaatgaacttgtaaaccaagaggagttcattgctattatgactggtgacatttaaagaa

SEQ ID NO: 63097 - DNA, 82 bp, Homo sapiens
agaaagtggttcaacagctccggctggaggccggactcaaccgcgtaaaagagattagcagaggcatttcatatcagtgagg

SEQ ID NO: 63098 - DNA, 90 bp, Homo sapiens
tgagtgaggtgctggctcacataggcacctgcctgaggaagatatttcctggcctctctccagtgtaaaagtcttgcagtgaaaaacccg

SEQ ID NO: 63099 - DNA, 83 bp, Homo sapiens
gattcagccagcacactcctcgcgagcaaggccaaatttgagtttcatcatggtgactatgaaaaacagtttctgcatgtact

SEQ ID NO: 63100 - DNA, 87 bp, Homo sapiens
aacttgtagaaggttgtgaaaaaactactaggatcacgcggcatgtattgaggcatttgcaagtaaaatcactggcatgttgttgga

SEQ ID NO: 63101 - DNA, 75 bp, Homo sapiens
ccgcagatgttgtcaaggtggcctaccaggaggccaggggtgtcgccatgatctcactgatgaaaaggcctccag

SEQ ID NO: 63102 - DNA, 100 bp, Homo sapiens
cggttggatgcgaaggagctgcagcatccagagtggagactgctgcacggactctggaaccatgaacatatttgatcgaaagatcaactttgatgcgctt

SEQ ID NO: 63103 - DNA, 100 bp, Homo sapiens
ccgctcgcaggcgccgcacggagttgcgtcccggggacttggggccgcagggaggtcatgcttcaccccttcctccatctgctgcacctaccactgattc

SEQ ID NO: 63104 - DNA, 132 bp, Homo sapiens
cgggcttgcccgggcatgtgggagctgccggctttccggacgccacgtgcagaccggaagagacacgcggggcttcagcatctctgagggtccccaaggaacatggctgggagccgtgaggtggtggccatg

SEQ ID NO: 63105 - DNA, 75 bp, Homo sapiens
ttctcttctccagaaaattttcagagacaagcagtgagtcaagggtccagagaaggaggagaagttgagacaggc

SEQ ID NO: 63106 - DNA, 100 bp, Homo sapiens
cacgctcagcgccgagggcgagatcgtgcaggtttcccaggatgccctgaggagaaccatcttccctctggggggattaacgaaagagtttgtaaagaaa

SEQ ID NO: 63107 - DNA, 83 bp, Homo sapiens
tctgcgctcctgcatctgcctccccattaatctcaggggcgatataatcaatgaggtggtcctaaagttgctcaaggctggat

SEQ ID NO: 63108 - DNA, 75 bp, Homo sapiens
gcccgggctgcggcgtgtgcgcgcccgccagctgctccggagatacgctctaagcgaaagacatgaggcctcagc

SEQ ID NO: 63109 - DNA, 96 bp, Homo sapiens
gcacgccaaaggcaaagaagaaaaaatgtccaaatcattaaagaactacattactattaaggttcgagaacttgtcttggacaattgcaaatcaaa

SEQ ID NO: 63110 - DNA, 75 bp, Homo sapiens
gccgcgcacggacttcggcagagggctcctcgcacctaccccagcaactcaaattcaccacctcggactcctgcg

SEQ ID NO: 63111 - DNA, 100 bp, Homo sapiens
tctggccgcctctgccgcagctggagctgggaggctgtggcgtgctgggtgtcggcatctggctggccgccacacaggggagcttcgccacgctgtcctc

SEQ ID NO: 63112 - DNA, 82 bp, Homo sapiens
acctcagtattctcaggaaacattcattcaaatagctcaggctttgaattgtattccatggtgccatctatttgtcctctag

SEQ ID NO: 63113 - DNA, 82 bp, Homo sapiens
ctcggacaagtacttcgacgaacactacgagtaccggatactcactttgtttccaaatgccatagctcgaaaattactgctg

SEQ ID NO: 63114 - DNA, 83 bp, Homo sapiens
cgctgagtggtttttcggatcatgtctggtggctccgcggattataacaggctgaaggtgatgtggccgccctcaaccgacgc

SEQ ID NO: 63115 - DNA, 97 bp, Homo sapiens
actgaacggaaccgcatcgactacgtcagctccgccgtccgtatcgaccacgccccggaccttccgcggccagagcaactttcatcctttgaaacgt

SEQ ID NO: 63116 - DNA, 100 bp, Homo sapiens
gatgacattgaaatttggcccagcccgaactgactcagtcatcattgcagatgtaggtgcaaaaaactacagacatctctgtgctgtttattacaacaag

SEQ ID NO: 63117 - DNA, 95 bp, Homo sapiens
gaaactttggaatctgtacccattattggtggtttttgggagactatctttggcaacaggccctgctgcaaaaaagaagtatgtcagttataata

SEQ ID NO: 63118 - DNA, 89 bp, Homo sapiens
ctggtgtggcatctgaagacagagagacttgccactggggtctccagactgtttttggtgcaaatatatacagagcttcataatcagcc

SEQ ID NO: 63119 - DNA, 83 bp, Homo sapiens
gccgccggccgggagggatccgggtcctgaaggtcctggacccaagccagaagcctctgcaaagcttccttccagacctgcag

SEQ ID NO: 63120 - DNA, 100 bp, Homo sapiens
gcagaactgcaggacatctgcaatgatgttctgaaaggaggtgtggcatcaggattcaagcacgtggtacccaacgaggtggtggtgcagagactcttcc

SEQ ID NO: 63121 - DNA, 50 bp, Homo sapiens
ggatgtttcagttcctccatttaacagattgttaaaggaaatgggctggc

SEQ ID NO: 63122 - DNA, 100 bp, Homo sapiens
gcagaatttagcatctattgggatgtcgattgcactttactgggggatttgcctcagatggagttacaggtgtctgctttttcaacgtgggagaaggagt

SEQ ID NO: 63123 - DNA, 131 bp, Homo sapiens
cgacctcttctgcggccggcctgggcaggtgtcttcctcgagaggcaggcaggggatcccggacaaggtgcttcctggaggggcctgccccactgttcctgtgctgagttccaggacagcctcaacttcag

SEQ ID NO: 63124 - DNA, 129 bp, Homo sapiens
tcgtttatcagcaattacaatggcacttcaatatggctcagaaagtgaagaagatgctgctttagctgggactgttgacatttagggatgtggccatagaattctctctggaggagtggcaacacctgg

SEQ ID NO: 63125 - DNA, 75 bp, Homo sapiens
acaaacgccgcaccaggtcttgtagcagcgcctcctcggtaactttcgaccgactttccccaagagaaaattcct

SEQ ID NO: 63126 - DNA, 101 bp, Homo sapiens
tgacagaggatgtctcctaaaggtgtctgacttccagcaactgctggcctgtgccagggtgcaagctgagcactggagtggagttttcctgtggagaggag

SEQ ID NO: 63127 - DNA, 83 bp, Homo sapiens
atataatccattctcggattctagaacaatatgatggacgtggtcacctgcatgacctttctgagtacgatgctgagtattcc

SEQ ID NO: 63128 - DNA, 88 bp, Homo sapiens
gcgtcgctcacgctgggagctgtagaccagagctgttcctattcggacatcttggctcctcccgtggacccttcaaaaaatgatacat

SEQ ID NO: 63129 - DNA, 83 bp, Homo sapiens
cttcgcagtctggaaagctttaggagttcacagtgtatctcaaatctgtgaagtattgtagaggagacacaaaaggaattggg

SEQ ID NO: 63130 - DNA, 90 bp, Homo sapiens
ctgcagtcccgggacaggatgttctccaagttcacctccatcctgcagcacgccgtggaggcgaatctacctgttactcgtattttggac

SEQ ID NO: 63131 - DNA, 82 bp, Homo sapiens
tgttgctgatcgcctgggtggttgttggcgtgtccctgcagcgaaggatcctggttgtcactattccaggtcctcaggatat

SEQ ID NO: 63132 - DNA, 98 bp, Homo sapiens
agcgagccggagccccgggcgctcgaatgcaggaagaagaagatggtggtcttgaagccttcgatgactttttccctgtggagcccgtgagccttcct

SEQ ID NO: 63133 - DNA, 132 bp, Homo sapiens
aacaagctgaaccccaaacccaaattcttcgttctgtgcggcgacctcatccacgccatgccagcttcacggtgatgatatggcatctgccagctctagccgggcaggagtggccctgccttttgagaagtc

SEQ ID NO: 63134 - DNA, 100 bp, Homo sapiens
ccgagggtctgtgtcaagagcggcaggggctgcaggagataagagaaacggaatctcattgtcctaatgttaaatatatatcatcagtgctcaatgttac

SEQ ID NO: 63135 - DNA, 88 bp, Homo sapiens
ccccgaaggctatttcgccgctggcgtcaggactattttcacgttttaatgccgagagggtctaaaattcccaggactccacagcttt

SEQ ID NO: 63136 - DNA, 100 bp, Homo sapiens
gagggattctggcatcagggaggctttcagccggagaagcgagtttcagctggggaactgtgtcaatctgacagaagcactgtcgctctatgaagaacag

SEQ ID NO: 63137 - DNA, 98 bp, Homo sapiens
aaacggcagaatgaaggaaatcctgaaagaggccattgaaactgctctggactgcctgaaaagcgccaacactgagccctactaccggaggcaggcgt

SEQ ID NO: 63138 - DNA, 82 bp, Homo sapiens
cgctatccactggcggagtctctctttccggattctgcctccctccgctaacctccggcatttccggagagttcttttgaag

SEQ ID NO: 63139 - DNA, 100 bp, Homo sapiens
ggaagcggcctggcaggggaaggatcgaggctgaaggtgatgtggccgccctcaaccgacgcatccagctcgttgaggaggagttggacagggctcagga

SEQ ID NO: 63140 - DNA, 75 bp, Homo sapiens
gggggccgctctgggatcccggccaccagcaattgtccggtgtaattacttcaagcctccaggatggcaatccag

SEQ ID NO: 63141 - DNA, 100 bp, Homo sapiens
cgcttcctgatgtctgctgagcgttacgacaaacttctccgagccagaagctgggcttacagagattctctaaaggcagaagaaaacagaaaattgcaaa

SEQ ID NO: 63142 - DNA, 100 bp, Homo sapiens
cttctgatggaaaccgctgaagttgaacaaaatggtggtctctttataatgatcactccaagaactgaggcccctgtcagcagtgtcagtaatagtttgg

SEQ ID NO: 63143 - DNA, 101 bp, Homo sapiens
atgggcggagttctcattccttctccagggagagtcgctgcagcaaaagatacagatattgtggatgaagccatctattacttcaaggccaatgtcttctt

SEQ ID NO: 63144 - DNA, 108 bp, Homo sapiens
gcgtgcggttgggaacgcggagcggacggattcgattcaacggggttccggaccgcgctgcgctatggagcaggtactctctgaagatggcagaagctcaccaagctg

SEQ ID NO: 63145 - DNA, 95 bp, Homo sapiens
aagatttggggaatctatagttaatcttggcgacattgacaatgatggctttgaaggcctggtgactcgactccggtatccagtttgttttggga

SEQ ID NO: 63146 - DNA, 95 bp, Homo sapiens
cgccgccgccgccgcccgcggggctgggacccgatgcggttagagccgcggagcctggaagagccccgagctatgccgagattttgctgtcctgg

SEQ ID NO: 63147 - DNA, 100 bp, Homo sapiens
cggaaacagagcaacccccggcagatcaagcgtgaccgggctggtccacaagtgggcatggaccaaagacgacgtgatcctccacgtgctcccgctgcac

SEQ ID NO: 63148 - DNA, 90 bp, Homo sapiens
gatgactgctacacctcagcccggggctgcactgccaccctgggcaacttcgggccgttgctccagggagaactgcaaatatcttcatcc

SEQ ID NO: 63149 - DNA, 83 bp, Homo sapiens
aaagaaatccgtagaagaaggaaaaatagatggcatcattgacaagagggagaaccgaagattacaggaggccagcatgaggt

SEQ ID NO: 63150 - DNA, 95 bp, Homo sapiens
cccaaggcctgcaccattctcctccggggggctagcaaagagattctctcggcctcctgtttcctgcgctttctccttttcctgtgaaatctccg

SEQ ID NO: 63151 - DNA, 90 bp, Homo sapiens
ggctgtgctcatatacacctggcccgccaagctgccccctgtgtgctattctttgatgagctggattcgattgccaaggctcgtggaggt

SEQ ID NO: 63152 - DNA, 75 bp, Homo sapiens
ggaaagcaaaggagtcagggatggctcttcctcaggcatgtggctgaaaccttttgaaggcgaagggtggaaggc

SEQ ID NO: 63153 - DNA, 100 bp, Homo sapiens
agccaggaatcccaaaacatatgtcggactgaatatgaagttaaagatcaagctgcaaaaggggatgaagttactcgaaaacgatttcatgcatttgtac

SEQ ID NO: 63154 - DNA, 100 bp, Homo sapiens
cccccattcattctggattggtggatctgaagtacaaaatattttccaggtttttcgttggaatatacgttgcacatttatggcgattctgagtgtgagg

SEQ ID NO: 63155 - DNA, 50 bp, Homo sapiens
tgaaacttaaggatgggatacagataccatgctgtgaagtccaggccaca

SEQ ID NO: 63156 - DNA, 90 bp, Homo sapiens
cgccgatggcggtgcgttccggccctcccccaacagcttctcccccgcggtcgccggagccgccagtgcggattttccatataatccagg

SEQ ID NO: 63157 - DNA, 83 bp, Homo sapiens
agaagtcacaaaacagcagatttcccaagagcagcggaaaatgatccagtcacagggagtggagcttggtttcgggatctcgg

SEQ ID NO: 63158 - DNA, 90 bp, Homo sapiens
gctgcagacggcgagacctcctgcacaggtacttcgtactggatttcgaggctggcatcctgcagtattttgtgaatgagcaaagcaaac

SEQ ID NO: 63159 - DNA, 50 bp, Homo sapiens
ttttgtcggtggttccagtttataacaagactcattctgaccagtttctg

SEQ ID NO: 63160 - DNA, 82 bp, Homo sapiens
cccagatatagccgttggtacaaagcgagcagctgatgcagctgtacagtgcgcgccagcggcggcggctgaaccggggcct

SEQ ID NO: 63161 - DNA, 85 bp, Homo sapiens
cgactttggagaaaccaccgtgctggaccgcttttacaatgcagttgacggactggacaaagcttctatagcaaactcagatggc

SEQ ID NO: 63162 - DNA, 100 bp, Homo sapiens
aacaggattggtcagctatccagaatttctgtgagcaggtgaacactgaccccaatgggttctgtacagagtaatgagatgtgtgacggctgcaaaccag

SEQ ID NO: 63163 - DNA, 82 bp, Homo sapiens
ctcgacagcatctcgggtaacaaccgagcccctcctcgcagcgtgagaagccctaccactgcaactgggacggctgcggctg

SEQ ID NO: 63164 - DNA, 100 bp, Homo sapiens
tttggttttactataaatccaggttagagccacagctgaaacaactacaaacaaaatatgatgaacttaaagagagaaagtcttcccttaggaatgcagc

SEQ ID NO: 63165 - DNA, 50 bp, Homo sapiens
tcatggcctacccgggatacggaggagggatggcccctgagttctgcagc

SEQ ID NO: 63166 - DNA, 75 bp, Homo sapiens
ggcgagagatggtcaggtctggagctcgaccgggccaggtcattaaatttgacggtggagaggaagtacttattt

SEQ ID NO: 63167 - DNA, 82 bp, Homo sapiens
gtagtgttcctgctcactttcttcaggtattccagcgtcttcaggaaacagtttagactctcttcaagatgacaatcctcca

SEQ ID NO: 63168 - DNA, 116 bp, Homo sapiens
aattcttccactgatatctcaaaaggtgatctggacaaaggaacaggtatctcaggtgctatacgtggatgacctgcttagttttaatttttggagaaatacattttataaaacat

SEQ ID NO: 63169 - DNA, 111 bp, Homo sapiens
cccttgttctccagtacaaccttcaaaacaactggaatatttagcaaggattcaaggctttcagtggagcttgcgatgataatggatcggctatatggaggtgtgtgctac

SEQ ID NO: 63170 - DNA, 82 bp, Homo sapiens
gtttcttccactcagcctgtgggagtctctatgctgcagtgcttgggcactgtttaaaggaaagttccgagaaggcatcgac

SEQ ID NO: 63171 - DNA, 75 bp, Homo sapiens
cagggcattcatttcaggctccttctaaatggccaagggtatgcagaagttggctagtcaatacctgaagagaga

SEQ ID NO: 63172 - DNA, 101 bp, Homo sapiens
cgaacttcttgtgaggaagttagggacgacttggaactggggaaacttgtttgcagggagagtcacaccgggacagctcatgtcctatattcagctcttca

SEQ ID NO: 63173 - DNA, 100 bp, Homo sapiens
ccagcggtccccgggtccgcagcttctggcggttcgggcggtcggcgaagcggccggcagatcctgaggaggatgaaggggctggccctggaggccgaga

SEQ ID NO: 63174 - DNA, 75 bp, Homo sapiens
tagctctgtatgagaaggacaacacctacttaggcctccagcacaaaggggcgcatggtgatgtctcgaggtggg

SEQ ID NO: 63175 - DNA, 101 bp, Homo sapiens
cggtctatggactttccgaagacgaggtgtgggccatgtttgaggattgccccagcattcagttctatgagtaataaatatccacaggctgttttcttgga

SEQ ID NO: 63176 - DNA, 75 bp, Homo sapiens
ggctaccatggaccatcctgctggtcagcactgcggctggaattaaggataacctagacgacataaagaggataa

SEQ ID NO: 63177 - DNA, 100 bp, Homo sapiens
aaaagtctggcctcggcgccaagatcccagtcacaattatcaccgggtatttaggtacatgtcccagagcaagcacacggaggcccgggagctcatgtac

SEQ ID NO: 63178 - DNA, 75 bp, Homo sapiens
ctgccaaaatcctgccttgctaaagtccagaagagcttaaagcagcgcctgggtaagagtaacatccaggcacgg

SEQ ID NO: 63179 - DNA, 73 bp, Homo sapiens
attgccacacggtggggcccaacgaggcgctggtggtttcaggcaaaatgggcatatcaagtttttgaccaaa

SEQ ID NO: 63180 - DNA, 99 bp, Homo sapiens
aaaacctgtggatacagagggacagaggcctactgtacatggcacatgaaattgaaaagtttcaaggttctgatggaaaaaaggaagacgaagaaaaga

SEQ ID NO: 63181 - DNA, 75 bp, Homo sapiens
gcctttagatgactctgcaatcacaccaatgtgtgaagtgacaggcgatcctgataacttaagtgactctctctt

SEQ ID NO: 63182 - DNA, 74 bp, Homo sapiens
ttcttgcgctgcatcgaagcctcagtgtgatttgttcatccaggagggggcccgtctgggaagaacccccgctg

SEQ ID NO: 63183 - DNA, 83 bp, Homo sapiens
ctccacctccggcttttgggggatcactgtcctctctcggcagcagggagtttgagcctttgctgaagccacacgtggctgtg

SEQ ID NO: 63184 - DNA, 75 bp, Homo sapiens
ccgtgaacgaaagcagtgacggaggagcttgtaccaccggcccgctacaacttcatccgaagcatggccgcctac

SEQ ID NO: 63185 - DNA, 75 bp, Homo sapiens
aaaaatgacacactggatcctgaactgacagtcattttgtttactcattcagccctgttgcaggtcccaataaac

SEQ ID NO: 63186 - DNA, 100 bp, Homo sapiens
cagttgctgatatagaaagtgaaccagtggtagaaagcacagaaactgaggggacataatcatcactcagtagctgtggaaatacaaagaactctgaatc

SEQ ID NO: 63187 - DNA, 101 bp, Homo sapiens
agatggcggacggcgtggaccacatagacatttacgcggatgtcggcgaagagttcaaccaggaaacttggatttaactggccagaagcaggtattcaaag

SEQ ID NO: 63188 - DNA, 98 bp, Homo sapiens
agaattagaaaggagctgcttcccaataaggaaacagaagttgacaaaagtgttgaagaactacgtggacggtgctgagaagccgggagtaaatgagc

SEQ ID NO: 63189 - DNA, 75 bp, Homo sapiens
tgtgccggccgtgagctgcggcaggacggctggaggtgttgacttcaaaatcaaaactgtagagctaagaggaaa

SEQ ID NO: 63190 - DNA, 90 bp, Homo sapiens
aggagtggagtaggggggacgcggcggcggcgttgacaatgcatgcttttcacttccactgcatctctcgctggctcaaaacacgacagg

SEQ ID NO: 63191 - DNA, 100 bp, Homo sapiens
gacagggtcgggggacacgcaggatgagccccgcgaccactggcacattcttgctgacagagaaaagaaaccttgtttattccctgtgaaaatgagaaga

SEQ ID NO: 63192 - DNA, 100 bp, Homo sapiens
gcgtccgccccgcgagcacagagcctcgcctttgccgatccgccgcccgtccacacccgccgccagggtttgccttcccggattgggcctacaagccaga

SEQ ID NO: 63193 - DNA, 87 bp, Homo sapiens
tgtgacagagacaacaccgagtatgagaaattgaagccttcagctgactgtggcccttttcgaggtctgcctctcttcattcactcc

SEQ ID NO: 63194 - DNA, 82 bp, Homo sapiens
gaaaagcgagaccgcgtgcgaggaccgggtttccaggcctgaggtgcccgccctggccccaggagaatgaaccagccgcaga

SEQ ID NO: 63195 - DNA, 89 bp, Homo sapiens
catggagaaattttgtgaagacattggtgttgaaccagaaaacagcattggggagtcagcaatgtccgttgtgttaaatcagctgctgc

SEQ ID NO: 63196 - DNA, 99 bp, Homo sapiens
agagagcttgggagactgagacaacaggctcaaagtctaactccccaggactataatctgaggtggtcaggccttttggtgacagtgggtgaagtcctg

SEQ ID NO: 63197 - DNA, 100 bp, Homo sapiens
gttatcttacattcaacccaggacacaagaaactccttcacatctggaagaacttgaagtactatactggcaattgctggagaagattttgcaattgttg

SEQ ID NO: 63198 - DNA, 82 bp, Homo sapiens
catctggccgacgccctcgttcctgtggctgacgtcttccacgtggcctacgtcctcatcaagtttgccaactcaccccggc

SEQ ID NO: 63199 - DNA, 75 bp, Homo sapiens
gacactctgaagcagcgacggcacagcgggaagaatgcaggaggccactgtctgcagctcccgtgaagatgtcca

SEQ ID NO: 63200 - DNA, 90 bp, Homo sapiens
cgggaggggcgaaggcgggcggcagaggcgatcagttccagaaagctgagtctgatctggattacattcaatacaggctggaatatgaaa

SEQ ID NO: 63201 - DNA, 100 bp, Homo sapiens
aaaaggaagtattacctgcgggggtgaccattaaacaggagcagaacttggaccagacctacttggatgatgaaactggcgatggaatatgagaggagcc

SEQ ID NO: 63202 - DNA, 101 bp, Homo sapiens
ggcggcgccggcagcggacagctcggacagcgcccagggccggagcccgagcccttggaggaaagcatcccatttgcagtaattggcagcaacactgtagt

SEQ ID NO: 63203 - DNA, 83 bp, Homo sapiens
caaggagctaaagcagcgtgcgttcagccctgggcacatggattaattgatgtatgttgagtttatggagctgccttttggtg

SEQ ID NO: 63204 - DNA, 100 bp, Homo sapiens
gaaactactttgataaatctaagtgttatgaatgtggggacaatcctccaaacacagactgtttgacttagaatcttcccttttttactccattcaagag

SEQ ID NO: 63205 - DNA, 100 bp, Homo sapiens
tgcggtggctgaagctgaaccgcactggcctctgctacctgcccgaggagctggccgccctgcagaagctgctacttgtcctgcactgacgaggatgaaa

SEQ ID NO: 63206 - DNA, 100 bp, Homo sapiens
aacagaagaagccctttgaggagcactggaggaagcacaccctgtcctatgtggacgttggcactgggaagcgcctagaagcctgcagctccggagcagt

SEQ ID NO: 63207 - DNA, 85 bp, Homo sapiens
ggacatcgcactcctgtatctccaagagatagaaaggccttgcattgcatcctgaacgagtgttggtagcaacaggacaagttgg

SEQ ID NO: 63208 - DNA, 90 bp, Homo sapiens
agaacatgttgaagtaccctgaattatacaaaacatctcagaatgccctggacttcaacaccaagatacttggatgatattgatgatgag

SEQ ID NO: 63209 - DNA, 75 bp, Homo sapiens
ggactttaggagaaagttgctgaaggcaggagggatgccacctgggacagcaagaccaggttctcgtggttgtcc

SEQ ID NO: 63210 - DNA, 100 bp, Homo sapiens
tggaaaagcagttgctcgaagaactcgagcgacagagacaagctgagcttgccgcacaaaaagctagagaggccagattacctgtccctaatactgagca

SEQ ID NO: 63211 - DNA, 75 bp, Homo sapiens
agccagacgacaagcacacactatggcgctgaaacggattaataaggcgggtgccccggtgatgactggtgcggg

SEQ ID NO: 63212 - DNA, 100 bp, Homo sapiens
cccgcgtacccggcgcagccagagccaccagcgcagcgctgccatggagcccagcagcaagcaaccatgtccaagggacctgcagttggtattgatcttg

SEQ ID NO: 63213 - DNA, 100 bp, Homo sapiens
gaaaagccagtattgcttgtgctcctaacaacctgtctcttgcctcacagaatgaggttcctgcggcacccctggaagaactggcctacagacggtcgct

SEQ ID NO: 63214 - DNA, 100 bp, Homo sapiens
tgaaattaatgaagctgtacctcaggtgaagttttatgaagagagtgagcacaaatggatcagatgaccctgaagatgcaggagctggtgaaaataggag

SEQ ID NO: 63215 - DNA, 100 bp, Homo sapiens
gccataaatttcataaatgaacgtgaaaagcctctggctctttatgtattttcgcataaccataaggtattcaggaaggaacacaatgtaccaaatgtaa

SEQ ID NO: 63216 - DNA, 90 bp, Homo sapiens
taatatagagcaattgaaaactacaaagcagcagttaacagatcaaggaaatggtggcagggcccagccccgaaccagacaagggacccc

SEQ ID NO: 63217 - DNA, 85 bp, Homo sapiens
cagcgccagcggccgagcgggcggcttcctggcctgggcgctccggtggcggcggaggtcacaccgacaaatctgaagcgggttt

SEQ ID NO: 63218 - DNA, 100 bp, Homo sapiens
ttgtgaggacgcggcagcccgtggagtcggctgagggaaaagcgaggcaaggcaggcggggtatttgaagtataccatacaactgttttgaaaatccagc

SEQ ID NO: 63219 - DNA, 51 bp, Homo sapiens
ggactgggtatcaagtaaacgaagggtctcactctgtcacctaggctggag

SEQ ID NO: 63220 - DNA, 75 bp, Homo sapiens
aacatctcctgctattccttgggctgcctttcctgcagctcttcacagatggaatcacaaataaacttattggct

SEQ ID NO: 63221 - DNA, 100 bp, Homo sapiens
caaactgggaaatccaatagtaccattaaatatccgtctcttcttagccaagcttgttattaatacagaagagtactatactggcaattgctggagaaga

SEQ ID NO: 63222 - DNA, 50 bp, Homo sapiens
ctcagttttcttggaaactacttgattctttctactaatccagatacttg

SEQ ID NO: 63223 - DNA, 75 bp, Homo sapiens
gtagaacatggaggatcgtcaggctctaaacaaaattctgagataattgacgaccttgccaacctagtggagaac

SEQ ID NO: 63224 - DNA, 75 bp, Homo sapiens
tacatctgcaaacaatggacggagattcttcactttacagataacaacgaacttgatgcaagtgataggtttgcc

SEQ ID NO: 63225 - DNA, 51 bp, Homo sapiens
agtccacactcccaaaagggaaagcctgtgggccaaagctgaccaactccc

SEQ ID NO: 63226 - DNA, 96 bp, Homo sapiens
gcaaaaagtaaaccacgatcgttatgctgattaattgctggccctcggagagtggaaatggctgtgatgtcaacatagaatatgagctacaagaag

SEQ ID NO: 63227 - DNA, 83 bp, Homo sapiens
cgtcttcgcaggacaccgcctcacagatcgactccagccctggcctcccacgactacatcctgaagattgtgcccacggttta

SEQ ID NO: 63228 - DNA, 96 bp, Homo sapiens
aaaactccaaactcctctccaccagcgccaagagatggactcaccctgtcacccaggttggactgcactggcctcaacctcctgagttcaagtgat

SEQ ID NO: 63229 - DNA, 97 bp, Homo sapiens
atggccccctggtttagggagggcaggccagaaagcagacccagggaggatagcacatgtcttcggctacactggtgaaggcatcgtgcctgctcca

SEQ ID NO: 63230 - DNA, 100 bp, Homo sapiens
tctgtctttgataataaagatgacattgccagttttgtcaaagggaaggtaaagattcggcaggatgatacgagttcatccatcaatttcctgactcgag

SEQ ID NO: 63231 - DNA, 100 bp, Homo sapiens
gaggttcagctgatgaagcttctgaaccatccacacatcataaagctttaccaggttatcagtgagctgaatggaaaaaacattgaagacgtcattgccc

SEQ ID NO: 63232 - DNA, 95 bp, Homo sapiens
gttctggaatcctcagttcaagaccaagatcactccatggatgaaatgacagctgtggtgaaaattgaaaaaggagttggtggcaataatggggg

SEQ ID NO: 63233 - DNA, 82 bp, Homo sapiens
agcaaagcgcccagcctgccgcctcgctgtccctgcggcttctggggtctatcaggtgtttgaaagtgtggctaagaagtat

SEQ ID NO: 63234 - DNA, 100 bp, Homo sapiens
ggacccgctgatcttccagctcccctcacccaacgtcgtgaagccgctctgtgacccacctctgaatcccacaaaactgcaccagagagccgggcgcaag

SEQ ID NO: 63235 - DNA, 74 bp, Homo sapiens
gggagcctcagcggtctgcgcctggcagcaggtactgtgagaatagagatgtttcgaaatatgcagaatgcaga

SEQ ID NO: 63236 - DNA, 74 bp, Homo sapiens
agcccgccagcatgccccagtccaaaggtcagccatgtcatctgagcctcccccaccaccacagccccccaccc

SEQ ID NO: 63237 - DNA, 110 bp, Homo sapiens
cggggagccagcgagcgcgccttcggcattggccgccgcgatgtcagctcagtgctgtgcgggccaggacgagattgaggagctgcgggccgagatgctggagatgcggg

SEQ ID NO: 63238 - DNA, 98 bp, Homo sapiens
caattacctcttttttgctctccctcgagaagctccagatggcgtcttccgtgggcaacgtggccgacagcacagaggcaaatttctggagatgtgca

SEQ ID NO: 63239 - DNA, 75 bp, Homo sapiens
ttgttaccagaattccaaaggttctgacatccgggaactgatcgaggtggatgatgtaatggaggatgattctct

SEQ ID NO: 63240 - DNA, 100 bp, Homo sapiens
aaatggcggacctggcgaacgaaggacgtggcccagtggaacatcgggagcctccggaccatcctggacatggtggagcgcgagtgcggcaccatcatcg

SEQ ID NO: 63241 - DNA, 100 bp, Homo sapiens
caatccaagccgactgatgactggagaggatggctactatttcaccaatctggtccttatgtcgtcagaagatcgagaagctcaggaggatgaattgctg

SEQ ID NO: 63242 - DNA, 74 bp, Homo sapiens
aaatttccaatcgagacgccaagaaaacaggtgaactgggatcctaaaggggaactgatcacagccgcacatga

SEQ ID NO: 63243 - DNA, 75 bp, Homo sapiens
gagtggtattatggtgtaaacaacgattctttggagttggactaaatgctcttccttcagaggattatccggggc

SEQ ID NO: 63244 - DNA, 82 bp, Homo sapiens
ctgggccttgaacattccgaaactgtcaagattggcaagctgcggcttgatgagacccaggaggcagagttccaggcccttc

SEQ ID NO: 63245 - DNA, 75 bp, Homo sapiens
aagattagtggctgctaaacttgaaccgaaaaggcatgaaggaactgactctcaagcagacctagaagatatcat

SEQ ID NO: 63246 - DNA, 100 bp, Homo sapiens
ccgctatccagaacctccactctttcggctaatctagacgaaatccagatgagttcacctacattccttagagctttaatgactgctgtttgtaaagcag

SEQ ID NO: 63247 - DNA, 105 bp, Homo sapiens
ttctgtctttgtgtcctgagatcaaatggcacttcattggccacctacagaaacaaaatgtcaacaaattgatggtgcacagccagagaacaacacatcacacac

SEQ ID NO: 63248 - DNA, 100 bp, Homo sapiens
ctgccttggagcagcagaaggcagcccatgagaaagaggtgaaccagctccgggagaaatgggagttgcaggagaacccctgccagtggatagtgaaaaa

SEQ ID NO: 63249 - DNA, 98 bp, Homo sapiens
gtctctgctcttcagtacaatcctgtagtagattccatggatgcattagataaagttgtccaggaaagagaagatgccctaaggcttcttcagactgg

SEQ ID NO: 63250 - DNA, 100 bp, Homo sapiens
ttggagatgagagagtcactgcagatggacgcatggaatatttgcttgtgatggagtactatcccaatgctgagtatgagtttatcagctctggtctcta

SEQ ID NO: 63251 - DNA, 82 bp, Homo sapiens
caccaggagaggccgggggcagccgccatcggcagcgccaggtgtccctacctgcaccggacgacgggggacacagaacgca

SEQ ID NO: 63252 - DNA, 100 bp, Homo sapiens
gaaaagacagtgttctgctttcatggagttcacagaagagtcgaggaggcaaaatttggtttctctaatattactggaattgattactctccttctgcaa

SEQ ID NO: 63253 - DNA, 82 bp, Homo sapiens
gagagcggtgcggaggactgaggttatcctgaatacatgtctaacaattttccttgcaacgttagctgttgtttttcactgt

SEQ ID NO: 63254 - DNA, 75 bp, Homo sapiens
tggaactagatgtgtctcgaaatgatattgagctcctggcagcttgcagagaagaatttcataggagactaaaag

SEQ ID NO: 63255 - DNA, 83 bp, Homo sapiens
ctgaaatgcacacgcttcagcatcagtctggtgtctactatgaaccatcctgtactcagaatgtgaatcatggtgtacttgtg

SEQ ID NO: 63256 - DNA, 75 bp, Homo sapiens
ctggtcgatgaagaggatgatgtttttggtgaaggaaaaatgccagctgtgggacaaggagtgcaggccgcacaa

SEQ ID NO: 63257 - DNA, 100 bp, Homo sapiens
gacggcagccacagcgtccgactcgactcggagggtttctgtgagagacaaattgcttgttaaaggtcactggaaggactgagcgcattcaggagcctgg

SEQ ID NO: 63258 - DNA, 75 bp, Homo sapiens
ctcttatcttcaacttcacaataaaaaaagaggggaatctcatccagaacagttgcgagaaagaatcaaagctgg

SEQ ID NO: 63259 - DNA, 100 bp, Homo sapiens
tttcatggtcttgctgattccactcaacggagctgtggccgtgaagatgcgcgccttccaggtgctggagaatctggtaaaagcaccattgtgaagcaga

SEQ ID NO: 63260 - DNA, 100 bp, Homo sapiens
cctgactttggtgtctgggaaagaggaagcaaatataataatggcagcacagagctacattcgaggaggcaagtgaggcctatctggttggcctttttga

SEQ ID NO: 63261 - DNA, 51 bp, Homo sapiens
caagcactgtgctaaagtgtttgttccagcaacagatagaaatgctttaag

SEQ ID NO: 63262 - DNA, 82 bp, Homo sapiens
gcgggagctggacggcgagcgcgagcggcgcgagaaactggagaagaagcaggcgctccctccattccagccacagatcaca

SEQ ID NO: 63263 - DNA, 75 bp, Homo sapiens
cagccagatggtagaagcgatggtgtgatccctcacatccacaaatctctgattggaaagaagggacagcagaaa

SEQ ID NO: 63264 - DNA, 83 bp, Homo sapiens
ttgcagcacttgttccccaaacaagtgctcctacattctggttattaacacggggatcaaagtctggtgtagaaataacagcg

SEQ ID NO: 63265 - DNA, 82 bp, Homo sapiens
caggaagcagagtggctatggtgggcaaactaagccgattttccggaaaaaggctttaatgactgatgaaacaatatccaat

SEQ ID NO: 63266 - DNA, 83 bp, Homo sapiens
gggttatggtgggaggagccgatactgagcttcttcctatttgccatgggagatgaagaaggcacagagatagatactctaca

SEQ ID NO: 63267 - DNA, 98 bp, Homo sapiens
gcctagaagctgcaatgattgaaggagaaattgagtctttacattcagagaattcaggaaaatcaggccaagagtctgtcttcaagaactatgatcac

SEQ ID NO: 63268 - DNA, 75 bp, Homo sapiens
ggggttcacgcggtcccgccggatcccgaagacgagggcctggaggaaacagtgaaagcccctcagggaaaaaac

SEQ ID NO: 63269 - DNA, 100 bp, Homo sapiens
ggacggcggctggtgggaaggcgagaaggaggacgggctccgtggctggttcccggcgagctacgtgcagttgctggagttacagatgaggacacagtaa

SEQ ID NO: 63270 - DNA, 75 bp, Homo sapiens
ttcagacagaatctattaccttgctgttgaatttgtgtgaggctgaagattcagctttaacaaagctgccctgtt

SEQ ID NO: 63271 - DNA, 100 bp, Homo sapiens
cttcgcccggctttgcagcggggacttcggcggcggcgcctcaggcacctcggcccgggaggcaggtggaagtcatcataaagtttctgtttcacccgtc

SEQ ID NO: 63272 - DNA, 88 bp, Homo sapiens
cgtccatttcgggctacaccttcagtgctgtgtgtttccacagcgccaacagcaacgcggaccaccagtcccagctatctgacttcat

SEQ ID NO: 63273 - DNA, 100 bp, Homo sapiens
gtacggtaatagacagtggagatggtgtcactcatgtcattcctgtggtgaaggcattctcatctcctcagaggcttcagagcttctcgatttcatagac

SEQ ID NO: 63274 - DNA, 100 bp, Homo sapiens
tctccttcgacttggagtctttgtccaggacgccacataaagaagatccctaatagtcatttctcaacaattatatagtcaactgatgtaacaatggtac

SEQ ID NO: 63275 - DNA, 100 bp, Homo sapiens
cggcgctcggcgtgtacgtgggcagcggcggctggcgcttcctgcgcatcgtctgcaagaccgcgaggcgagacctcttacttcaatccccgactcggaa

SEQ ID NO: 63276 - DNA, 83 bp, Homo sapiens
tcggtcccgcgctgcgcatccccgcggacgccacagcgctgtgtcgtgaaaactacccctaaaagccaaaatgggaaaggaaa

SEQ ID NO: 63277 - DNA, 75 bp, Homo sapiens
ttaattttagggtcctttatatagaagggagagtagatgtgaaatctggcaactatacagtgttacaagttgtgg

SEQ ID NO: 63278 - DNA, 94 bp, Homo sapiens
gtggcccaggcctcggactccgcggccggcccggcgcggcccagcgccctcagacctgcctagagctggaacgttacctccagagcgagccctg

SEQ ID NO: 63279 - DNA, 100 bp, Homo sapiens
tgaagggtattgccgctgttactgatatacctttaggattaaagcaaggagagccaatcatgactggcaaaacacagaccagcaacgtcaccaataagaa

SEQ ID NO: 63280 - DNA, 100 bp, Homo sapiens
gaaatctccccacaaagagaagtctcaagatcccagattccctgctgtaaagaagaaatttatggcggagctaaaagaattacggcacaaagagcagaac

SEQ ID NO: 63281 - DNA, 100 bp, Homo sapiens
aggccggagaaggccgccgggcccgggcatggtggtctggggcaacgcggaagagaagatggcgaattagaagatggtgaaatagacgatgcaggatttg

SEQ ID NO: 63282 - DNA, 100 bp, Homo sapiens
gcttcaacaagagctagaaaacctaaaggaagtactggaagacaagttgaatacagccaatcaagaggttttgactggatcatctcgtcaaagttattca

SEQ ID NO: 63283 - DNA, 76 bp, Homo sapiens
ccacgcgtttgatggcttcgaggtgaactggaccgagcagcagcagatgcgccgtgaagaacctggtggacagcag

SEQ ID NO: 63284 - DNA, 82 bp, Homo sapiens
cgcagggcctgccaggtggcgctcgtaaggaagagcccaacactgctggaagtgagcatgccccatttcatgagaaccaaca

SEQ ID NO: 63285 - DNA, 100 bp, Homo sapiens
tgactgcaagcacccctttcttgaaccgaacagagtcaagtggaatcaaagtgacagtgatgaaaagcctctcaaaggaagccttcggtcccttaatagg

SEQ ID NO: 63286 - DNA, 83 bp, Homo sapiens
caaagacaagtatgttggggtttcctcagacagtgttggaggattcagatacatacggactccagaattcctcagcagcatcc

SEQ ID NO: 63287 - DNA, 82 bp, Homo sapiens
gtcgggtatatttttctgtctccaaactagattggcagccgttttttgagagcaggtggtccgggactacaatcttcagctg

SEQ ID NO: 63288 - DNA, 50 bp, Homo sapiens
cggaccacggcctgtcagcacgtcctatcagcttatcactgtggtgatcg

SEQ ID NO: 63289 - DNA, 83 bp, Homo sapiens
gcgcagggcctgcagcgggagctggacggcgagcgcgagcggcgcgagaaaaaacctctgtagaggagcaggatgcaaccgac

SEQ ID NO: 63290 - DNA, 82 bp, Homo sapiens
tccgtcccccgcgggtctgctctgtgtgccatggacgggagccagggagtaacgaagagatcaaagagttcgccgcgggcta

SEQ ID NO: 63291 - DNA, 100 bp, Homo sapiens
agcctggctaagcaaaaccctgcagaacggctgcctaatttacagcaaccatgagcaagcgaccgatgttgaggtgggaactgaccttgtcccttctgtc

SEQ ID NO: 63292 - DNA, 82 bp, Homo sapiens
aatcatagcagcacttttcacagcatcagcagtcatctcactagttatgttcaaaaaagtttgcagctaaaactgtgcacag

SEQ ID NO: 63293 - DNA, 96 bp, Homo sapiens
gggagagcgcgttggtggcgacggccgagtcagtactactgctaaagtgcagcagaggctgataggattcatgcgtcctgaaaacggaaatcccca

SEQ ID NO: 63294 - DNA, 75 bp, Homo sapiens
gcgcaagatcgtcttcagctgttcatagcatgatgaaacatgcttggaataattataaaggttatgcctggggat

SEQ ID NO: 63295 - DNA, 99 bp, Homo sapiens
tcagctagaaccatgcagtcaactgtcaccactgactaaagaagagaaaactgcggcagagcaattcaaatttcacatgccagatttatgaagaaatgg

SEQ ID NO: 63296 - DNA, 96 bp, Homo sapiens
atttctaagtactttctcctactccataaagacttcaaattcagaatggacagtttagaagaacctcagaaaaaagtctttaaggctcgaaaaacg

SEQ ID NO: 63297 - DNA, 101 bp, Homo sapiens
ccctctcaggctcctgggatggaaccctgcgcctctgggatctcacaactgacaggatcacagaatgtgaattttgaacagatctgaaaagttattaagtt

SEQ ID NO: 63298 - DNA, 131 bp, Homo sapiens
ggaggtgatgatgccctattcgacagaactgatattttatattgaaatggatcctccagaccaaactagagtcagaacgaatactagcatcagtggggaagaaacctccccaggaaattggaattaaagtg

SEQ ID NO: 63299 - DNA, 83 bp, Homo sapiens
cgggtcctccctgcctgccgatgtgcatcggtacatgaagatcccgaggacgaggaggacgaggagccggcgctggaggagct

SEQ ID NO: 63300 - DNA, 74 bp, Homo sapiens
gcagagtgaggacgaggacagagaagccaagaggaagaaggaggaggaaggtctttctgtggaatttggaacaa

SEQ ID NO: 63301 - DNA, 82 bp, Homo sapiens
cgctgttctcgctccggagccgctgcacatttcgaactattatggagctgctaagatgatattttctgacaacccacttggt

SEQ ID NO: 63302 - DNA, 75 bp, Homo sapiens
ctggaagaaccgcaccctctgatgttccagaaactccaggaccaggagactccatcctctgccaatggcccttcc

SEQ ID NO: 63303 - DNA, 75 bp, Homo sapiens
gctggttatccaacagaagcttctggtgcccaaagaatcttatgtgtttggggattctcagcagttgcggctggt

SEQ ID NO: 63304 - DNA, 74 bp, Homo sapiens
gggaagcgtcgggattaggtgaaagccggaaggtggtggtcgtacgctgtgaaggcatcaacatttctggcaat

SEQ ID NO: 63305 - DNA, 83 bp, Homo sapiens
agctgcagaagcgctcggaggtggcggtgcctactgcctctcagtgtctgacttcgacaacgccaagggcctcaacgtgaagc

SEQ ID NO: 63306 - DNA, 100 bp, Homo sapiens
tgtaatcccagcactttgagaggctgaggactgggacaagcccgagcatatccctgaccctgatgctaagaagcccgaggactgggatgaagagatggac

SEQ ID NO: 63307 - DNA, 100 bp, Homo sapiens
ggaattcggagcctcccctgcagcgactcggaagattcgaggcggcgggggacaagtcggcgccccagagcggacgagaccttcctgatgtaaatgataa

SEQ ID NO: 63308 - DNA, 75 bp, Homo sapiens
cagcctcaggcgtgcgcggacggtgtgcggggacttgccatgaggtgttgaagccttgtttcactgagttggaga

SEQ ID NO: 63309 - DNA, 142 bp, Homo sapiens
ccgaagtcagttccttgtggagccggagctgggcgcggattcgccgaggcaccgaggcactcagaggaggtactccaaagattcaggtttactcacgtcatccagcagagaatggaaagtcaaatttcctgaattgctatgt

SEQ ID NO: 63310 - DNA, 101 bp, Homo sapiens
taaagtctgtaaaggaatctttgcaagaatcagtggaagattctctagcaacagcatttaaatcaaacggtattgagatggattgggttatgaaacataat

SEQ ID NO: 63311 - DNA, 100 bp, Homo sapiens
ggagacagcccaaatatcctcggaagagcgctcccaggagaaacaagtaatatctctttgccaaagctggatgaacaagagccattcccacacagctgag

SEQ ID NO: 63312 - DNA, 98 bp, Homo sapiens
gtaacaacagcgaggaagaagaggacgacgacgacgaggaagaggaggtttctgaggtggtggaagatggatatgaattttttgctaaacgacagttg

SEQ ID NO: 63313 - DNA, 50 bp, Homo sapiens
caggacctgtctgttcatctctgatgatgattattctccaccgtctaaga

SEQ ID NO: 63314 - DNA, 74 bp, Homo sapiens
ggtctactttgaactgaggccagtggtggaaacagcccgagtgattgatgtatctaatgggaaagttcatgttg

SEQ ID NO: 63315 - DNA, 98 bp, Homo sapiens
ctgattacctgccacccattgtgtcttctcaagaaggccaaacttccagatctgcaaccatttccttctccagatggtgatacagtgacccaacatga

SEQ ID NO: 63316 - DNA, 75 bp, Homo sapiens
tttgcaaaggccttggagagcccagagcgacccttcctggccatcctgggcggatccctagatttgtttccatca

SEQ ID NO: 63317 - DNA, 73 bp, Homo sapiens
agctctgcagccacatactatccgtttgttcaggaaccaccagtgacagaagggagagacaagctcaacgaga

SEQ ID NO: 63318 - DNA, 51 bp, Homo sapiens
aatcatccgtgtaggaggtgctctcaaggtgaaaggagatgaccttcaggc

SEQ ID NO: 63319 - DNA, 87 bp, Homo sapiens
tgatttcacagtccgagacgtcaaactcctagtgggggttgcagatggtgtaggaggctggagagactatggagttgatccatctca

SEQ ID NO: 63320 - DNA, 100 bp, Homo sapiens
ggcggcgtgatgttctcggcaggagcggagagtttgctccaccaggccagaaaaatggctacaaacttcctagcacatgagaagatctggttcgacaagt

SEQ ID NO: 63321 - DNA, 107 bp, Homo sapiens
ggcggccatgagctcgcggaagctgagcgggccgaaaggcaggaggctcaggggtgagcccctccagactccgaataggagatcaagagtttgattcattgcctgct

SEQ ID NO: 63322 - DNA, 100 bp, Homo sapiens
tgggatcctacgtgcatgaagatggacgaggtcctgtacagcatcgccgagaagccaagaccgaggataggtgtggccattggcgaccagatcctggacc

SEQ ID NO: 63323 - DNA, 75 bp, Homo sapiens
agcagccttcagcttttggcagcatgaaagttagcagagatttactgaccttaagcactatagtgatgaactgca

SEQ ID NO: 63324 - DNA, 83 bp, Homo sapiens
aaacaaaaatgggtggagtacagatctctgcagttacaggaacatcgtctgcttcatggtgtgagttcttgatacgaatgaaa

SEQ ID NO: 63325 - DNA, 74 bp, Homo sapiens
gctcattaaggacggctctctgctcattggggcgttgaggagtgtcctgatggcaaatttcaagggccacgcgc

SEQ ID NO: 63326 - DNA, 81 bp, Homo sapiens
gtcagaacaatcttgaatcatgaagctactaaccagagccggctctttctcggaaaatgtttcaacgtgcgcaagagttgc

SEQ ID NO: 63327 - DNA, 75 bp, Homo sapiens
ggaatcgacctcgttgaaaagaaatccaagaaccatattagatggattggccaatccgccatggtatagttgaag

SEQ ID NO: 63328 - DNA, 100 bp, Homo sapiens
gctttaaccctgatgagctgataaggtacatgtcccagagcaagcacacggaggcccgggagctcatgtactcgggagccctgctcttcttcagccatgg

SEQ ID NO: 63329 - DNA, 137 bp, Homo sapiens
ccggtcccgagccggacaaggcgccgcggcgactcaacaagcggcgcttcccggggctgcggctcttcgggcacagatgtccctaaaccaatgactgctttagtagggagatttttgccagcatcaacaaaattaaa

SEQ ID NO: 63330 - DNA, 75 bp, Homo sapiens
agcaattgtgatgagatattctgctgagtggaaggacttgagcagccccagccagtacgacacaggtgttgcact

SEQ ID NO: 63331 - DNA, 83 bp, Homo sapiens
gcgctcgagacttaccagagccacaagagtccagatgcctgtccagcctccaagcaaagacacagaagagatggaagcagagg

SEQ ID NO: 63332 - DNA, 100 bp, Homo sapiens
caaggagaactcccccagtgtttctgcaggtgtcttcagtgccctgggtttgcctgtgacccaatgcccactgggactgaatgccaaaggactcccttta

SEQ ID NO: 63333 - DNA, 100 bp, Homo sapiens
gcggcgcgctgctggacgaagagctctcctccttcttcctcaactatctcgctgacacgcaggcaagaaataccgcccacgaatggatcaggaagtctct

SEQ ID NO: 63334 - DNA, 100 bp, Homo sapiens
cgtgacggtcatcggcggcgggctgatgggcgccggcattgcccaggggctatctgatgggttagagtgcctttgagaagaaatcagtggatactggatt

SEQ ID NO: 63335 - DNA, 100 bp, Homo sapiens
gagaggagctgtggataacgggaggtgaatttccatgtcaacatagtcctgctcctgagccagtcaaatatacagcagagtgactattctgcagccctaa

SEQ ID NO: 63336 - DNA, 97 bp, Homo sapiens
ccaaacaggccctccagaatgagctggagagactgaaagagtgtgttcacaatgaaaccaagaatgaattggagaagatgttgaaatgtaatgagga

SEQ ID NO: 63337 - DNA, 98 bp, Homo sapiens
ccctgcaggaaggacggacttcaggggcagttattagaggaagtaacacaaggggatatgagtgcagcagacacatttctgtccgatctgccaaggga

SEQ ID NO: 63338 - DNA, 74 bp, Homo sapiens
ccgccgattcctcctccttggtcgccgcgtccttggctggcgtcggaatcggacatgtccaaaccaccgtgtta

SEQ ID NO: 63339 - DNA, 75 bp, Homo sapiens
tcatcccaggttgccttggaaaatgccaacgccgtgtctgaaggtgctggagaatctggtaaaagcaccattgtg

SEQ ID NO: 63340 - DNA, 75 bp, Homo sapiens
ttacgcggatgtcggcgaagagttcaaccagattctggctgtgactcagtcactgacactgagcctgaggacgag

SEQ ID NO: 63341 - DNA, 99 bp, Homo sapiens
catcggtgacctcaccgcctcggttcgccctcagccgccccgtatttttcagtgctgtacaagcgtcttgaattactctggtagcttttccagaaagac

SEQ ID NO: 63342 - DNA, 75 bp, Homo sapiens
ttcgtaatcagcaggccaaagactcagagcaacagccaactcagtttataaatccagaaacacctggctatgttg

SEQ ID NO: 63343 - DNA, 73 bp, Homo sapiens
actggaggcacaaggaggacgccggcgtcttctgctcagacccaacatgagtgaagtttcctgcaagaaacgg

SEQ ID NO: 63344 - DNA, 109 bp, Homo sapiens
ctggggatcgctacggaccttaaaatacccgcaacagccccttcgtcccaatcttccgtgtgtgctaagatcgtgcagctcctggggcagaatgaggtggactatcgcc

SEQ ID NO: 63345 - DNA, 100 bp, Homo sapiens
cagaaaccagaaactttaaatcttgagaaaagaagattgtctatcatgaaggaggattttgatgtagattcccaaatccgtgctgagatgcacagaaaaa

SEQ ID NO: 63346 - DNA, 99 bp, Homo sapiens
gacaaaggggacactctgaagattattgagcggctggaccacctggagaatgtcatcaagcagcacattcaagcttggcagcagcatgatgtacaagaa

SEQ ID NO: 63347 - DNA, 97 bp, Homo sapiens
gtcccgatcaggacgggatgtctttcgatatagacagagatgacctcttggtacttcatctctctgacctcattcgcatggcattcatggctgcaac

SEQ ID NO: 63348 - DNA, 51 bp, Homo sapiens
ttcagttgattatgccagccagatgcagtgtttacaggcattggagttttt

SEQ ID NO: 63349 - DNA, 74 bp, Homo sapiens
ttacacacagcaagttcctgcttctgggacagctctactgacgatttctctatgaatcatcatcaagaactctg

SEQ ID NO: 63350 - DNA, 90 bp, Homo sapiens
caaatgatgaagaaactttggctgataatattgcagcattttccagattttaggtgatgggcaagtcagaaagtcagatggatataactg

SEQ ID NO: 63351 - DNA, 100 bp, Homo sapiens
cgcggcacaacctgggcctgcagctctcggtggagacgctggatgcggagctggagtttgttcagatcatcatcatcgtggtggtgatgatggtgatggt

SEQ ID NO: 63352 - DNA, 90 bp, Homo sapiens
gccagttcgtgattcacaggagcctctgtatcagcaccatgcagcacacagcaagaaggaggccatcagcaaactgggaagaggaccctc

SEQ ID NO: 63353 - DNA, 100 bp, Homo sapiens
tgggaaaaccagaacattgatgatcagcaccaaaatctcaggagaaatccaagaccattactgggacttccacccccaccacgtgcacagcgagttcgag

SEQ ID NO: 63354 - DNA, 50 bp, Homo sapiens
gtcttgaagacttccgagtagatgtccggcccggagcggccatgtcccac

SEQ ID NO: 63355 - DNA, 82 bp, Homo sapiens
atatgatcgtattcttggtattccaacacagctgtatagtcatcattttcagagagctgtaactgaagttcgtgaagtcacc

SEQ ID NO: 63356 - DNA, 100 bp, Homo sapiens
ggaagcgccctggagagaggagagaaaatgtccactggacctctgtccagacttgccttcaaggtgtgcaagtaaggacttatctccagaaaagaacact

SEQ ID NO: 63357 - DNA, 75 bp, Homo sapiens
tagctcccttactcatgtcttacgaagccttacccctaatgcaagggatctcttcaatgctgcatttgtgtcctg

SEQ ID NO: 63358 - DNA, 50 bp, Homo sapiens
ctcaactgctgaccccggggtcagatgatgattattctccaccgtctaag

SEQ ID NO: 63359 - DNA, 82 bp, Homo sapiens
ctggcagcactttcctgttgaagaaatcttcctggcgtgtggtttcaaagtgcctccaggcccaaggtcagcatcccactgt

SEQ ID NO: 63360 - DNA, 100 bp, Homo sapiens
tttgctgacctgataatgaagaattattttgcaccactggatgttgtttactgaactcacgtgctgtgtgtcagactgagctttccctgattcattctac

SEQ ID NO: 63361 - DNA, 96 bp, Homo sapiens
agatagcttgaacagggctgacaacatttttccttttccggttctttcagagcacggcttcggccccatcactaccgacatccgggagggacagac

SEQ ID NO: 63362 - DNA, 100 bp, Homo sapiens
ggacactttgcgttcgggctgggagcgtgctttccacgacggtgacacgcttccctggattgggtaaagatgatgattcttttgatcggaaatcagtgta

SEQ ID NO: 63363 - DNA, 96 bp, Homo sapiens
tcaggttccttagaaaaatttggatgtgtaaaaagaactcttaacggcgatgcaggtcttccacagctaaggtgattcgcaaggggtggctcacca

SEQ ID NO: 63364 - DNA, 75 bp, Homo sapiens
aagccactatcatggcctttgatgccctggtgaccttctgtgaagaactgggaggccgggaagttaaacttgtag

SEQ ID NO: 63365 - DNA, 100 bp, Homo sapiens
tacagatgaaacctgctgacagtgagaagaacaatgggacaccatgtggcggatctttactggatcgctgctggtagaggagaagtcaagtgcccttctg

SEQ ID NO: 63366 - DNA, 96 bp, Homo sapiens
agccgtgtgacagtaactgaacattggtctaaagtctttccaaaaggtcaaggttcacaagctttaccgatttgttacaactcaagcaagggccag

SEQ ID NO: 63367 - DNA, 95 bp, Homo sapiens
tcacgttgtcaccctggccgctgtgtggcactggcgcaggggacgtcggtgggcgcaggacgagcaaggacctgaaggagaagaaggagaaggtg

SEQ ID NO: 63368 - DNA, 75 bp, Homo sapiens
caagactggggctgctcccatcattgatgtggtgcgatcggttcatgtgaaaatggcggatgaggctgtctgtgt

SEQ ID NO: 63369 - DNA, 98 bp, Homo sapiens
gaaattggatcaagaatgggtcccatattcaacatctgctagtctgtatattcgtcctacattcattggaactgagttggtggcagtaaaccttttcg

SEQ ID NO: 63370 - DNA, 96 bp, Homo sapiens
ggtggagtaatgggaaatttaggtccaggtggtgaccaagaatatggcccaggtgaccaaagccctggacaaggccctgagcaccatggacctgca

SEQ ID NO: 63371 - DNA, 100 bp, Homo sapiens
caaacactccagccacgaagtcaaggctctgggggccatgtggaaactacataagatttcctcctctgatgctcctcttcagcctttggtatcctctcct

SEQ ID NO: 63372 - DNA, 100 bp, Homo sapiens
gtccctcgtccagccacccccaggtcacggtctagatcacattctcgatccagaggaaggcgatactctcgctcacgcagcaggagcaggggacgaaggt

SEQ ID NO: 63373 - DNA, 83 bp, Homo sapiens
ccaggatccgcggggagaccttgggcatcatcggacttgaccatggtgaatccgggcagcagctcgcagccgcccccggtgac

SEQ ID NO: 63374 - DNA, 50 bp, Homo sapiens
ccagaagatcacacagtgttgggcggagaaactcatcatccacctgcgga

SEQ ID NO: 63375 - DNA, 98 bp, Homo sapiens
gctgttcacctacgggcctgatcaaacttgccttcctgttctccaagaccaggggcaacctgggctccttgcagctggaggtgcggctgcgggacgag

SEQ ID NO: 63376 - DNA, 100 bp, Homo sapiens
gaaattcctcggagctttcgtcacctgtccttctacattttcgatagagacgttttccggagggattccatcatagtgtgcaggagaagagaattgggtg

SEQ ID NO: 63377 - DNA, 83 bp, Homo sapiens
ctgagtggtttttcggatcatgtctggtggctccgcggattataacagcggccctccaggcactgaagcgtaagaagaggtat

SEQ ID NO: 63378 - DNA, 99 bp, Homo sapiens
tagcgacatccgagtgcagaacctgcaagcgccatcatgaccgggtcctataacaacttcttcaggatgtttgatagagacacgcggagggatgtgacc

SEQ ID NO: 63379 - DNA, 100 bp, Homo sapiens
tgatgtagactatttcagcttcttattttccacacttacagggtctggaacagaatctgacagtgatgaatcagtaccagagcttgaagaacaggattcc

SEQ ID NO: 63380 - DNA, 98 bp, Homo sapiens
ctctatcatgtttctagtagcgcttagtgaatatgatcaagttctcgtggagtcagacaatgagtctccacaaaccggaggactacccccagactgca

SEQ ID NO: 63381 - DNA, 83 bp, Homo sapiens
cgtcccgcggcttccgcagcgaggtggacatgttcgtggcccaggccgtgctacaagtccggcagcgtcttctcttgagggag

SEQ ID NO: 63382 - DNA, 100 bp, Homo sapiens
taccgtatgcagtcccccaggatacagggtcaaaggagagcacaaccatcgcagttggaagcccatggggcaggcaatttcttgcaaccaccaccgaggc

SEQ ID NO: 63383 - DNA, 73 bp, Homo sapiens
cagcctctgcttggcatccccttgctggacagtggctgtgatgctgagcacctgaagaccctgtccctgtcct

SEQ ID NO: 63384 - DNA, 100 bp, Homo sapiens
gtgctcggcgtacagcagacgctggaggagatggacttcgagagggacttaattcagtgcacaaatgagatgaatgtgaacatcccacagttggcagaca

SEQ ID NO: 63385 - DNA, 51 bp, Homo sapiens
ctgatcctggacctggagaagaatgaatcccagggatttatgctgtctcca

SEQ ID NO: 63386 - DNA, 98 bp, Homo sapiens
cgacaagatggcggacggggagctgaacgtggacagcctcatcacccggctgctggagggtatgtcgagagtaccaacgtggcaattgcaaccgagga

SEQ ID NO: 63387 - DNA, 82 bp, Homo sapiens
acctgcagaaggtctctggagacatcttcagcagttcattcccagcactgaccctttccagaaggccctgagagaagaagag

SEQ ID NO: 63388 - DNA, 97 bp, Homo sapiens
tggaaccagataatgctacaacatatgttcataaaggtgagatgtataaaagagctcaaggaagaactcggattggaaaaaagaattttaagaaacg

SEQ ID NO: 63389 - DNA, 100 bp, Homo sapiens
atcgcttaacgtcccagtggatgactccttggttaaggaggaactggataaggcccaggaggacatactgaaacatcaggctagcattagtgaactcaag

SEQ ID NO: 63390 - DNA, 100 bp, Homo sapiens
tggctctctgtgtggatcaaagcgtatgcttttgtgcacactggtgacaactcaagagcaatcagtaccatctgtgctgtggagcatccgagtgtgccag

SEQ ID NO: 63391 - DNA, 50 bp, Homo sapiens
cttctaaaagggccgtgactcaagatgggggctccggaggtggcgcccag

SEQ ID NO: 63392 - DNA, 50 bp, Homo sapiens
ggattccaagtaactcttatttgattcctgggaacaccaccatggagggc

SEQ ID NO: 63393 - DNA, 100 bp, Homo sapiens
gattccaagtaactcttatttgatgagaactggactgatgaccaactgcttggttttaaaccatgcaatgaaaaccttattgctggctgcaatataatca

SEQ ID NO: 63394 - DNA, 100 bp, Homo sapiens
ctggcttgtatggaagagttccagaaggaggagatgttaaagtaacccatcttgcaggacgacattgaagattggtcttctgttgatctaagatgattat

SEQ ID NO: 63395 - DNA, 50 bp, Homo sapiens
ccaaacaagtgctcctacattctgcggagctccctgggtcctcagcagtg

SEQ ID NO: 63396 - DNA, 102 bp, Homo sapiens
tatttgctactcttgagtgctagaatgatgaggatcttaaccaccattatcttaactgaggcacccaaaatgggccgccgggccggagatggatggagggac

SEQ ID NO: 63397 - DNA, 75 bp, Homo sapiens
aggtgaatttccatgtcaacatagtccaggactcctagaagtaccccaccccacccctgctccttggaggacaac

SEQ ID NO: 63398 - DNA, 80 bp, Homo sapiens
aagcaagcagttcagaagagccaaggaataaacatgcaatgaacccaaaagggtaggagcattgcttttcgtggtgaaag

SEQ ID NO: 63399 - DNA, 75 bp, Homo sapiens
tgtccccactgagctcttggaagagaggggttggcatctgcacatccttcctgggcatctcgtgggcactgctcg

SEQ ID NO: 63400 - DNA, 98 bp, Homo sapiens
agtaaatgaaattgctgtaaaagtgccttctgtttttaagcttctaattaaagagagggttattcaacacaatgctttggaagaccgatccatatctg

SEQ ID NO: 63401 - DNA, 100 bp, Homo sapiens
gttcctgcgcgcccgggatttcgatctggacctggcctggcgggttcctccactttggcggtggccctctgctcgacggtgccttcgctggccctgacat

SEQ ID NO: 63402 - DNA, 100 bp, Homo sapiens
cagagttccattttggaacgcccgtgccgcgtctccgcgttcccagcccgggtccccgcgttcacagccccagcgcaggctccccacaggtgcaggaagc

SEQ ID NO: 63403 - DNA, 100 bp, Homo sapiens
gccctttcgggggaccttcgagacaaggctgtcagcccctaggttatgaagacagtatggagtttccagaccatagtagacatttgctacagtgtctgag

SEQ ID NO: 63404 - DNA, 95 bp, Homo sapiens
cgtgggacattgatgaagctttgcgaagaaggttagaaaaaaggatatatatacctctcccaacaggccataaaattttgagtagaaaaatccag

SEQ ID NO: 63405 - DNA, 50 bp, Homo sapiens
gactcatggaggctgagcatttattcagatctgacaggatggcatctgat

SEQ ID NO: 63406 - DNA, 149 bp, Homo sapiens
ccgcgcccggcggcggcgggagcccaggagcctgccccgccctggggacgaagagctgcagctcctcctgtgcgggttgggcacaataaacaaccaagtataaggagctcagaagatttccatctaaatagtttcaataatcctccaag

SEQ ID NO: 63407 - DNA, 75 bp, Homo sapiens
aggggacgctgagggcccatgtgctgaaaatccgaagtgccgcggaaagtggagataataattgtgcagtttggt

SEQ ID NO: 63408 - DNA, 73 bp, Homo sapiens
tcctgcaatgattattggcattcctgtgtatgtgggccgcaaggagtagatcccataatagatcacgttcaag

SEQ ID NO: 63409 - DNA, 100 bp, Homo sapiens
caaaatcaaggatgtggatgagaaagcagacatcgcactcatcaaaattgaccaccaggtgacatttagtgatgtggctatagacttctctcatgaagag

SEQ ID NO: 63410 - DNA, 100 bp, Homo sapiens
atcattgtcatgctgccagacaaccagagcttgggatcatagacggtatttctatgtaaacgaacagtcgggcgagtctcagtgggagtttccagatggt

SEQ ID NO: 63411 - DNA, 139 bp, Homo sapiens
ggggaggcgccgcggactgtcctttcgtggctcactccctttcctctgctgccgctcggtcacgcttgaccaagatcactccatggatgaaatgacagctgtggtgaaaattgaaaaaggagttggtggcaataatggg

SEQ ID NO: 63412 - DNA, 80 bp, Homo sapiens
ggttgtccttatcagcagatcaaaggataaacttgaccaggtttccagtgaaataatgcgacttcatgatagcatatcag

SEQ ID NO: 63413 - DNA, 83 bp, Homo sapiens
ctccagttgtccgcggttcctcctcctgtcgctgcccgtgtgattactgagactcagcaaacggggattcagcgtccgatcct

SEQ ID NO: 63414 - DNA, 96 bp, Homo sapiens
cggcgacctgacgctactatgggccgagtggcagggacgacgcccaggctgggacgcagagaccggcagcgattcggaggacgggctgcggcctga

SEQ ID NO: 63415 - DNA, 137 bp, Homo sapiens
ttatgcttagacggtggcttgttgcagatcctgattgtaggtggtgtccagctccagactgtggcttaacaaacaacagttgcagttactgaaagaacggttccaggccttcctcaatggggaaacccaaattgtag

SEQ ID NO: 63416 - DNA, 90 bp, Homo sapiens
ctgggctcgcggcgtctccggggaaagccgtggccccgagggcggatccgagagtcgacttcaatgttcctatgaagaacaaccagataa

SEQ ID NO: 63417 - DNA, 100 bp, Homo sapiens
taaatgggaagctatttcctttgcctgctcaccagctggattccctcctgggggcttcattcccaaaacggccaccacgcccaaaggcagcagctcctgg

SEQ ID NO: 63418 - DNA, 100 bp, Homo sapiens
ctttggaattccattcttttccttattcttctgatgtggatccagggatgatcatggtgattttactgctgcttgtggctatcgtggttgttgcagtctg

SEQ ID NO: 63419 - DNA, 89 bp, Homo sapiens
ttctcacgtgcccatcagtgacagcaagtccattcagaacaggatggagctggagtgaggtggaggggccgcaagctgctgaccggcgt

SEQ ID NO: 63420 - DNA, 83 bp, Homo sapiens
gggcagacggattcatttagagctgcggaacaggacgccctctgataacaccttccaccatgaccacctcagcaagttcccac

SEQ ID NO: 63421 - DNA, 99 bp, Homo sapiens
gacctccagtaagggagggcaagaagatatgaacctgagccttcagtcaagaccctccagcttgcctgtgaggagccggaagaggaaccgaaagtgaaa

SEQ ID NO: 63422 - DNA, 50 bp, Homo sapiens
cgccgccaccacccactccggacacaggaaacagctttgaagtgtggagc

SEQ ID NO: 63423 - DNA, 96 bp, Homo sapiens
ctcaccaacagatgaagacagatgcaccaacgagcccacagaacttaattgcccaatctcagtctggtactggtaaaacagctgccttcgtgctgg

SEQ ID NO: 63424 - DNA, 100 bp, Homo sapiens
atatctacttatacaactttctaaagagacagaaggcaccaagatcaaaattgataagtgtgcttaaggtgcagctatcttctttgaattcaaacactac

SEQ ID NO: 63425 - DNA, 83 bp, Homo sapiens
ccaggagcagcggctgcagggcgagttaacaagcacaagccctggctggagcccacctaccacggcatagtcacagagaacga

SEQ ID NO: 63426 - DNA, 77 bp, Homo sapiens
agccgtagacaccagctccgaaatcaccaccaaggttaatttggagtggcccctggagtcagtttcctacaccatcc

SEQ ID NO: 63427 - DNA, 97 bp, Homo sapiens
cactgctggcgctgaccttcatcacagacaacagcctggtggcagcgatggggaaacaggctcagagaggtaaggtcacatgcccaaggccccacag

SEQ ID NO: 63428 - DNA, 74 bp, Homo sapiens
ggagctgaggaaccagatatcttgaaaagctgccagaaagctgctgtgacttactcgaagcctcgattggccac

SEQ ID NO: 63429 - DNA, 113 bp, Homo sapiens
gcgagcggcgcggagctggacgccgcgatcgtggggcccgcgaggcgggcagccggggcgtccagacttctgcctggtgtcgaaggtggtgggcagatgccgggcctccatgc

SEQ ID NO: 63430 - DNA, 73 bp, Homo sapiens
cccggggaacgctgcctctgccgcaaagatgcccccttccgctggaaagcgggccggtgcataaacttctccc

SEQ ID NO: 63431 - DNA, 100 bp, Homo sapiens
cgggacctgggctgggaacccgcggtggagcgggacacgaacgtggtcatcatcagatttgaaatatttaaagtggatacaaaactatttcagcaatgca

SEQ ID NO: 63432 - DNA, 90 bp, Homo sapiens
gattcacgtggtggcggtggaaatttcggaccaggaccaggaagtaactttagaggaggatctgtggaattggggctgaatgaagatgat

SEQ ID NO: 63433 - DNA, 100 bp, Homo sapiens
ctacaatcaggtgcagcattcagagaccgtcgaaagcggattccaaggaatccaggtctgtttctgtcgactgtggaccacttatgtgcgatccgtggac

SEQ ID NO: 63434 - DNA, 82 bp, Homo sapiens
agagctcgccccgaacgggggtcttcctcctccgccgttgacagcggaaggagagttttacatggaagtggcttacagaaac

SEQ ID NO: 63435 - DNA, 75 bp, Homo sapiens
ttgaaaccctccaaaccacgtcatctgatttgaacagcagagaatttcaaaggaccttgctaatatctgtaagac

SEQ ID NO: 63436 - DNA, 96 bp, Homo sapiens
ttctgggaggcatgaaacatctgctttgacggtggaggcaaccagtagcatcagggaaaaagttgctttttagttggagaaggagcctacagatgg

SEQ ID NO: 63437 - DNA, 124 bp, Homo sapiens
ctcattcgtcatcccgtgtccagaccggccggcgtcacagcgaatgtggaggatagactacagtgccgctgattggagctggagtgagccttccaggaattttggctgccaaatgtggtgcaga

SEQ ID NO: 63438 - DNA, 78 bp, Homo sapiens
ggagaactacaggaacgtggtctccctgggagacagtcttgctctgttgcccaggctgtagtgcagtggcacaatctc

SEQ ID NO: 63439 - DNA, 50 bp, Homo sapiens
cctgaaaacaaccctctggcaggacagtcattttgtttactcattcagcc

SEQ ID NO: 63440 - DNA, 100 bp, Homo sapiens
catccttcacccatctgaagggaggaaatagtggcaggtgacagtctgcatgtgcagttttcagcgggtatttctgtgggacttggatgaaaccatcatc

SEQ ID NO: 63441 - DNA, 82 bp, Homo sapiens
gctttgtatgttggccaaagcccgagagagtgcctcaggagcagctgatgagccagatccgggagacgcagcagctctgcca

SEQ ID NO: 63442 - DNA, 100 bp, Homo sapiens
acacgcgttgtctgtgtcggttttcaataacaagaacagacctggccatgggcacagatgctgagggagagaagatcaaggaccctatgcgagccatcgt

SEQ ID NO: 63443 - DNA, 50 bp, Homo sapiens
atggtatgacactgaaatctgtaacggccatcgaagacggcaatttggag

SEQ ID NO: 63444 - DNA, 98 bp, Homo sapiens
aacagagaggttccagaaatggctgcaggccaagcgcctcacgccggacctggtgcaggggcctttatcatctgctggactcctggattggttttgtt

SEQ ID NO: 63445 - DNA, 75 bp, Homo sapiens
ccgctgactcgggaggaggacctgatcaagactgatgatgtcctggatctgaatgcccccctcggaagcctggag

SEQ ID NO: 63446 - DNA, 96 bp, Homo sapiens
gcggcttcctagtgagtcggcggctgatttagaaggaggttcaggctacggtgagccgaagtgcagtcattggagaaatcgatgaagaaacagatt

SEQ ID NO: 63447 - DNA, 75 bp, Homo sapiens
ccgggatctcaggtcctcgggggcggcggccacgccaaggacggcatttacagccgaacaataccagcaacatca

SEQ ID NO: 63448 - DNA, 80 bp, Homo sapiens
cgcggatttccatcaccagggccgagaacgacaggtgagaagccctaccactgcaactgggacggctgcggctggaagtt

SEQ ID NO: 63449 - DNA, 75 bp, Homo sapiens
gcttccccctattatctttgagtctggatattcattacacaagttggctggatctattattggcaaaggtggtca

SEQ ID NO: 63450 - DNA, 100 bp, Homo sapiens
gaaaagtccatgtgctggcagcacttccctgagccactctccaggctgctccagtactcaagggaacggaacctcaagaaggcatgaagccagcccctgc

SEQ ID NO: 63451 - DNA, 75 bp, Homo sapiens
attttgcaactcttttctagcacattggtggtcgtgatgtctcgggagtcggatgttgaggctcagcagtctcat

SEQ ID NO: 63452 - DNA, 49 bp, Homo sapiens
atgctggaaaacagcctaaagagtcaggtcaattcagtgaagatatgat

SEQ ID NO: 63453 - DNA, 100 bp, Homo sapiens
cagtattttgacatcagttatattccatctactgtctttttcttcaatgggcagcatatgaaagtggattatggggtgtccgcaatgttgccagtgtctg

SEQ ID NO: 63454 - DNA, 100 bp, Homo sapiens
gggcggtgttctgcccaacatccaggctgtactgctccccaagaagactgagagtcaccacaaggccaagggaaaggccgagggggacggcaagatgcac

SEQ ID NO: 63455 - DNA, 51 bp, Homo sapiens
gagcgaagtacagcttatggatgggccatgaccacaatgtttcttcagtag

SEQ ID NO: 63456 - DNA, 100 bp, Homo sapiens
gagaagagaaagcacaaagcatggagaccctccctccaggcactttgtgagtgtgccctccagactccttatgacagcttaaaactagggatgttgtctg

SEQ ID NO: 63457 - DNA, 90 bp, Homo sapiens
cccacctaactacggaaaacctgatcccaaaattattgaaaacactcgaaggggagaagaagtgggtgactgtgggtgacacgtccctga

SEQ ID NO: 63458 - DNA, 50 bp, Homo sapiens
gaccagatgaacggagtggccggaggtagctacagcaagctgggtagcag

SEQ ID NO: 63459 - DNA, 98 bp, Homo sapiens
gaaggagctggagacggtcgtagctgcggtcgcgccgagaaagaagaagacgtaaagcaggctaccagcaattttgagaacttgcaaaaacagcttgc

SEQ ID NO: 63460 - DNA, 85 bp, Homo sapiens
ccggacggtacttctgccactgctgctccgtggagatcgtcccgcgcctgccggagcaggccgggctctcgccatgggtcactgt

SEQ ID NO: 63461 - DNA, 100 bp, Homo sapiens
ggctgaggctggggccaggacccagacagagacacacggtcactgcagctgaagccgctgcccctgctacaggggttggcatctgcacatccttcctggg

SEQ ID NO: 63462 - DNA, 75 bp, Homo sapiens
gcctgcacacaaagggagcagctgaatggaggttgtcactctctggaaaaggctcaagccaggacagaacagctg

SEQ ID NO: 63463 - DNA, 100 bp, Homo sapiens
ggacctgctttgaggtcaacgagagggaggaggcagacaaggcgaccagccagctcctgttggagacagattgggagtccattttgcagatctgcgacct

SEQ ID NO: 63464 - DNA, 87 bp, Homo sapiens
gacagcagccaggagtcatgagcgacagcggcgagcagaactacggcgagcgggttcgagaacttgtcttggacaattgcaaatcaa

SEQ ID NO: 63465 - DNA, 75 bp, Homo sapiens
ccagagacatgcgccgcttccaggtggtggtggagctgatcctgcagggccggccttgggcccaagtcctgaaag

SEQ ID NO: 63466 - DNA, 73 bp, Homo sapiens
ggttggtggtaccctaaaattagggcatgattaagatttgtcccatcagatgaaaagaagaaacaaggttgtc

SEQ ID NO: 63467 - DNA, 85 bp, Homo sapiens
ataagaccaagaagcaaaccgaggaagactgtgaggatcccgagagacagcactattcctgatcagagaactccagttgcttcaa

SEQ ID NO: 63468 - DNA, 98 bp, Homo sapiens
cagaagtccagagctgaggactgcctgtttgcagtgtcactgtcaatggcgctacatggactttgtaataaccctttgaggcacatagctgggtgcca

SEQ ID NO: 63469 - DNA, 74 bp, Homo sapiens
agcattggtgaagttgaatctgcaaaacttattcgggataaagtagcaggttttccagaagagattcaatggct

SEQ ID NO: 63470 - DNA, 74 bp, Homo sapiens
aggtggataatgatgaaaatgagcaccagttatctttaagaacggcaatagtttgggatgaatacctaactgga

SEQ ID NO: 63471 - DNA, 82 bp, Homo sapiens
gcggcagccgcgctcggggctctaaggtgggtttggaggatttgggacaacatctacaactgcaggttctgcattcagcttt

SEQ ID NO: 63472 - DNA, 90 bp, Homo sapiens
tccgtgggggtccgggtgttcgcggtcggccgccaccaggtcaccctggaagagtcgctggccgaagaaattgcatctgatggtctcaag

SEQ ID NO: 63473 - DNA, 100 bp, Homo sapiens
ggtttcgagaagaagaccggagttgctggggaggacatgcaagacagccgatcgccagtacatggagggcttcaacgacgagctggaagccttcaaggag

SEQ ID NO: 63474 - DNA, 99 bp, Homo sapiens
ggggaccctgtacgtgtacatcatttacggcatgtacttctgcatgaacatctccagccagggtgctggagaatctggtaaaagcaccattgtgaagca

SEQ ID NO: 63475 - DNA, 100 bp, Homo sapiens
gttcgagcccaaacagcagaactttttgccaaaatgacagcagataaactgataggtccaaagctctgtgcagtgtgcctagaagacttcaagcctcgag

SEQ ID NO: 63476 - DNA, 101 bp, Homo sapiens
ggaagagagactgactgggaaacatgttattcagaattaccgaattgatgggatatgagccagaagaacttttaggccgctcaatttatgaatattatcat

SEQ ID NO: 63477 - DNA, 100 bp, Homo sapiens
cagaatatgaagttactccagatgaaaaactgggagagaaagggaaggaaattatgaccaagtacctcaccccaaagatctgggcggaccccggcaaata

SEQ ID NO: 63478 - DNA, 88 bp, Homo sapiens
ctcctcgtcgggaagaatcgtttggtctcctgccgtgcccgtcctggaaagacaagcatcatgcctctgaccagtgccttcagggctg

SEQ ID NO: 63479 - DNA, 98 bp, Homo sapiens
tgtcccgatggcagcgatgaagagaactgcaaagccctacaggtggcaactactagcccaactgccaatactactggtactgctactacttcctcaac

SEQ ID NO: 63480 - DNA, 100 bp, Homo sapiens
catgctctggaattttggcatcaaggacaaacccaccttcatcaaaggggtgcacaaatggagtccagaggaggctgtaagagccatcgccaagatccgg

SEQ ID NO: 63481 - DNA, 100 bp, Homo sapiens
agaggactcgcgtgggagcgaggtgccggccccgacaggacggtgaggctggctacagcaaacatcattcaagatgtccagcaaagggagcagcacagat

SEQ ID NO: 63482 - DNA, 83 bp, Homo sapiens
gccagttgattctgaccatttctcatgaacagaaacacctaggaagggagaactggttttaaaatcaaagatgggaaaatcgg

SEQ ID NO: 63483 - DNA, 50 bp, Homo sapiens
ccggcatctgtcttgagctcccagcaagtgggaagtaccttctgtctata

SEQ ID NO: 63484 - DNA, 82 bp, Homo sapiens
ggccgccgcgagcccgctttccaccccgacctctgcccaggccgcagacgcatcttctctccagactgccgatcccagaaag

SEQ ID NO: 63485 - DNA, 101 bp, Homo sapiens
ttcagggacctttcctattcggttcctgaaggaccctggtggaggaagaaagtctatcaggtgtttgaaagtgtggctaagaagtatgatgtgatgaatga

SEQ ID NO: 63486 - DNA, 74 bp, Homo sapiens
ggaaactctgcattctcgcttcctggagaatctgaattatccagaacagaaagttgtgactgttggacagttca

SEQ ID NO: 63487 - DNA, 99 bp, Homo sapiens
cttctggacccaactgtggaatatgtgaagtgtgacaagtacaagactggagttattgatgggcctgcatgtaacagcctttgtgttacagaaactctt

SEQ ID NO: 63488 - DNA, 50 bp, Homo sapiens
caggaacaccgtcacgctgctggaggagagcccaaatcttgtgacaaaac

SEQ ID NO: 63489 - DNA, 89 bp, Homo sapiens
gctggaggaggaacttcgaaccatggaccaggccctcaagtccctgatggcctcagaggaggaggggagcaagggagcccccggtcctg

SEQ ID NO: 63490 - DNA, 49 bp, Homo sapiens
caacgatatatgtcagatctaaaggttgtactccaggatttagataaaa

SEQ ID NO: 63491 - DNA, 83 bp, Homo sapiens
cgtgaccgagaccgtgaccgagagcgtgaccgagagcgcgaatatcgtcatcgttagaaggaactagaaattcaggctcgtac

SEQ ID NO: 63492 - DNA, 101 bp, Homo sapiens
catatgcccattttgctgtgtgttacagacatatctgaagagatggattaagaatgctttggattaaggattgtggagcacatttcaatcattttaggatt

SEQ ID NO: 63493 - DNA, 75 bp, Homo sapiens
aagatccggcgcggggcacaggatccggagctggagcccccagaaaaatggctacaaacttcctagcacatgaga

SEQ ID NO: 63494 - DNA, 98 bp, Homo sapiens
cttaagcaaacttaatataccagacactgcaactgaatccaaaggactgcatgacacaccataggatatagtcaagaagcctttggacatgggagttt

SEQ ID NO: 63495 - DNA, 100 bp, Homo sapiens
caaatacggggagcaggattggtttaaaatccgggaagaggtgccaggtaggagcgatgcccagtgccgagatcgctttgtgtccctggtgatgttggaa

SEQ ID NO: 63496 - DNA, 90 bp, Homo sapiens
ccgtgttgccctcacccatcagaagcgatgagccagcctgcagagccaagcctgatgccagcatggccctctttggattccagtacgatg

SEQ ID NO: 63497 - DNA, 54 bp, Homo sapiens
gaccccctggagctggtgatgacaggattctacaacaaacccaccctctcagcc

SEQ ID NO: 63498 - DNA, 97 bp, Homo sapiens
aacttatgcagagggagatgtccatggatagtgctccaagctcccgaagccgaagtctcactttgctcccacatggaacacccaattctgcgtctcc

SEQ ID NO: 63499 - DNA, 75 bp, Homo sapiens
tccagccccctcacctcatatctcagccatacaccatccagtccaatggatcagatgggcaagatgagacctcag

SEQ ID NO: 63500 - DNA, 102 bp, Homo sapiens
gatgactgcgtgcagactgatgaggaggaattgatgttgatgctgaaaattgtgcagtgtgtattgaaaatttcaaagtaaaggatattattagaattctgc

SEQ ID NO: 63501 - DNA, 98 bp, Homo sapiens
gagaaatgacagatgtgatcattgagaccatgaagtccaacccaggagagaagatgactgaggaggaggtggagaccgttctggcaggacacgaggac

SEQ ID NO: 63502 - DNA, 75 bp, Homo sapiens
atgtcagcccttcagaaacagtattacaagtggttgtgtcaaaccgattggtgacatctccatgctgtattgtca

SEQ ID NO: 63503 - DNA, 50 bp, Homo sapiens
actggctgagggcagagactctcccgaacatccatgatagcagtcttctg

SEQ ID NO: 63504 - DNA, 100 bp, Homo sapiens
atgggtctcccaactccagaagacaaccttgaccattacagagaagaacaaagtatgctagctatggaagatgagggcacagtacaactcccattggaag

SEQ ID NO: 63505 - DNA, 100 bp, Homo sapiens
cctaaacaagacagtgactccaggatttctgaagactattgtggaagaagcatccattaaggttctctttgttcccagacactggtggcattacgtagaa

SEQ ID NO: 63506 - DNA, 97 bp, Homo sapiens
agaaaatccccgttgtttttcgattgcaagaggaaagagagcttgaggcaaacaaaaaagaaaaaatgaaagaagcacaacttgaagctgaagtgaa

SEQ ID NO: 63507 - DNA, 76 bp, Homo sapiens
aaagtgctgggattgcaggtgaggctattctgcagaccatcctgttattaaggtcttctggagagttgtggaaggg

SEQ ID NO: 63508 - DNA, 75 bp, Homo sapiens
cggcgccgcggctcttttctaaaagtgttctccttactatgacaatgtccgccccctctcttaccctgattcgga

SEQ ID NO: 63509 - DNA, 100 bp, Homo sapiens
aaatgcacaattctatctcttgggcaatcttcacggggctggctgctctgtgtctcttccaaggccatttcataattctgaatcatgtctgataacggag

SEQ ID NO: 63510 - DNA, 95 bp, Homo sapiens
gagctgagtggttgtgtggtcgcgtctcggaaaccggtagcgcttgcagcatgccctgggcgctgcctatggcacagccaagagcggtaccggca

SEQ ID NO: 63511 - DNA, 100 bp, Homo sapiens
cctgaatgcaggttcctatgcgtcactaggttctgaagtaattgttggagtaaataagtaccagttggaaaaagaagacgctgtagaagttctggcaatt

SEQ ID NO: 63512 - DNA, 98 bp, Homo sapiens
cgagatcctctccaggccctgcggcgccgcaatcaggagctgaagcaacaggaatccaggtaaaaatggcttgtctaatagctgcattttgttagata

SEQ ID NO: 63513 - DNA, 75 bp, Homo sapiens
cagtgttctgctttcatggagttcacagaagagtcgaggaggtatcattgcccagtgcctaagatcttttatgtt

SEQ ID NO: 63514 - DNA, 88 bp, Homo sapiens
ctcgctccgctcgtcccgctcgtcatggcctacccgggatacggaggagggacgggacatgaaagcttttggtgtgcacgtctcatgc

SEQ ID NO: 63515 - DNA, 75 bp, Homo sapiens
aaatttgccagttgaagatatacagaggagctggctctgtgtggctccaggctgctggtcttgggctccttcctg

SEQ ID NO: 63516 - DNA, 83 bp, Homo sapiens
caagtgggtatctgtcatggagcggcccaagacttgtggagatcacccaatcaggagcccgacctgcccctgacctctgcttc

SEQ ID NO: 63517 - DNA, 100 bp, Homo sapiens
acatcagatctctccatattttggtggaaagcggtgacacgccaaaggaccctgcggtgatctccaagtccccatccatggcccaggactcaggcgcctc

SEQ ID NO: 63518 - DNA, 75 bp, Homo sapiens
cggggacgccagcaagtgcactgtcacagtgcctccggagccagcgtggtggccatagacaacaagatcgaacag

SEQ ID NO: 63519 - DNA, 83 bp, Homo sapiens
ggcttcactacccttatcccggagagctgacaatgatgaatctcagaaaaattccggaactgttggcttcgggcatggttgat

SEQ ID NO: 63520 - DNA, 96 bp, Homo sapiens
ccagggttctgcatccactacaacattgtcatgccaagatctaaaattgcagtgtttgataaaatgtggacctacatgcggagtgcggagccctct

SEQ ID NO: 63521 - DNA, 97 bp, Homo sapiens
acccgggaagctatccctgccctcgggggctcgagcctggagtggggcttgcagcagagcatcctggccagaacaagccaaggagccaagacgagag

SEQ ID NO: 63522 - DNA, 75 bp, Homo sapiens
ccagacaatgccggtggaggaatttgtggctggctggatctctggaaatgaaaccaatttctacaacataggaat

SEQ ID NO: 63523 - DNA, 100 bp, Homo sapiens
gatggtcttcctgctggggctcatgtttgaggaaaatcatcagcgtgttagcattttctttgactatgcaagatgtagcaagaacactgcgtggccctac

SEQ ID NO: 63524 - DNA, 100 bp, Homo sapiens
accgggcctcaaaatggccacacgcgtacccccgtagcggaaaaacatctttaatctcatgaagtacgacagctacagccgcttcttaaagtctgacttg

SEQ ID NO: 63525 - DNA, 58 bp, Homo sapiens
ctgtctttcccttccagcctggaagtgttgcagaggacataagcagctctatgaccaa

SEQ ID NO: 63526 - DNA, 75 bp, Homo sapiens
tgctacagcatcccacattaagtcaacgctcaagtttccaagtctcttaaggagcgattaggcatgtcagctgat

SEQ ID NO: 63527 - DNA, 74 bp, Homo sapiens
aagctcgtggcctgcctctgcgtgcgctgaacatgaactaaatctggcaagaaaaatgagggaatggaaactat

SEQ ID NO: 63528 - DNA, 74 bp, Homo sapiens
gaagccgaaagtgttccagattctcaggattcggaaacttcagatacgaaatatcccgcctcatttacagtggg

SEQ ID NO: 63529 - DNA, 89 bp, Homo sapiens
gcggcgggaccatggagctcagagcgcagccccggcgccggcggcgggaccgcggaccggaagaatccccagcacaagatagaatatag

SEQ ID NO: 63530 - DNA, 82 bp, Homo sapiens
gatgaagtgcagaggtttttttctggtacttcgacctggtgtcctgtggtttctaaggaatttgaatgatccagatttcaat

SEQ ID NO: 63531 - DNA, 100 bp, Homo sapiens
tgagaacttggagcttcggaagaaggtagaggttctagagaacactaataggtatctcagatgaagacatcatcaacattactcttcctactggagtccc

SEQ ID NO: 63532 - DNA, 100 bp, Homo sapiens
acttcctacacagcctgctgaagaagcagcacgaaagagagaggtccgtctaatgaagaacagcactggaagatcaattcttttatcatccatactttag

SEQ ID NO: 63533 - DNA, 74 bp, Homo sapiens
atcctgcccttgctgcacttgggcttcctggagcaaacttgaactctcaggcactatgtcgtccgaggcccaga

SEQ ID NO: 63534 - DNA, 101 bp, Homo sapiens
ggaagtggggcagctgcgggcgctgcgtgccgtgttccggagccagcagcaggtggagccccctgagctgcccgctgatctgcagcactggatctcctaca

SEQ ID NO: 63535 - DNA, 101 bp, Homo sapiens
cattgggaggccgaagggtccccgggacccgcctgctgagtggacccgggtggccaagaccagcttcaagtctccatggtaccagaaaacaacaacctcac

SEQ ID NO: 63536 - DNA, 123 bp, Homo sapiens
cttcgtgggcaccccattctggatggcacccgaggtcatcaaacagtcggcctatgactcgaaggaaaaatgccagctgtgggacaaggagtgcaggccgcacaacctcggcaggcaccgggg

SEQ ID NO: 63537 - DNA, 74 bp, Homo sapiens
gaccgcgcagcgcgggaggcaggttccgcacggatgccgaggaatgtgacagggctgggagtgtggccacctgc

SEQ ID NO: 63538 - DNA, 100 bp, Homo sapiens
agagctgcgcctgaataaagcctgtggaaccgttgccgactgcacatttgaagagctgtgtgagagagatgaccagtgtcccagtgaaggaacgagtgaa

SEQ ID NO: 63539 - DNA, 83 bp, Homo sapiens
ccgctacatactcatcatggggctcctgtacaaggtggtctttgggaagaagcttcctgcctttgccaccatccccatccacc

SEQ ID NO: 63540 - DNA, 100 bp, Homo sapiens
aacgaaattaaacagtgcctgtggcaaatgctgcttcccagccaattagaagtaggagtgaaaacatccacaccaggtgaacaccagaagtgccaccagc

SEQ ID NO: 63541 - DNA, 100 bp, Homo sapiens
ggagagtggcgatgaggacgaagacgaccctgacaagcgcatctcgacccagagacaggctgatttccaacgtcctccaggggctgccgagccagagccc

SEQ ID NO: 63542 - DNA, 88 bp, Homo sapiens
gaaaaaggagagcctctgagctcaacggaggattgtgcctgagaagaacccacagagttgctcctactattcaggaaattaaatctgg

SEQ ID NO: 63543 - DNA, 50 bp, Homo sapiens
ctccaccacatctagcagaagaggaaacaccaattggaagcctccgctca

SEQ ID NO: 63544 - DNA, 82 bp, Homo sapiens
ctcgctggactgctcagggtgccagacctcatcatgaagatgaggagagtgaggaatcaagtgaagaagaatctagcttgga

SEQ ID NO: 63545 - DNA, 88 bp, Homo sapiens
gtgaaggagggttggctgcacaaacgaggtatggaacgccgtggactccgggcactgcctgcagacctactccctgcacacagaggca

SEQ ID NO: 63546 - DNA, 98 bp, Homo sapiens
actgcaacttcaagtagtggaaggagtacagggaagtctataagctttgcaacagaattacagagtatgatccctgctcctactctggaagaagtcaa

SEQ ID NO: 63547 - DNA, 102 bp, Homo sapiens
ccccgtggagtacccctaatggctttcccaaggatagaaagccctctggaaaccttaagtgcacagaccaggatgaaagagcagctgagctcagcagggagc

SEQ ID NO: 63548 - DNA, 100 bp, Homo sapiens
gctactaccgcgactggctgctgcggcgcgagcatcagacaacagtcagcgctttcgagaaacctgttttgcatttgccttgacaccacaacaagtgcag

SEQ ID NO: 63549 - DNA, 83 bp, Homo sapiens
ctgctctcttagctgtgattcactattattgcccagagcagatgaaactggatgatcaatgtccgagttaccaccatggatgc

SEQ ID NO: 63550 - DNA, 90 bp, Homo sapiens
ggcaaatcagagtgaagaggaagccagaagatgggagagacatttttgaagtttattgggcacttcctagcaccaggcactgcaataaga

SEQ ID NO: 63551 - DNA, 100 bp, Homo sapiens
cagagaaacttatacagagatgtgatgctggagaattatgagaacgtggccaaagtagatgcaactgtgaaagttccttttcttaagaaatgcaaggaag

SEQ ID NO: 63552 - DNA, 76 bp, Homo sapiens
cagtgggtcaacctttagcagtccagcctcaagggacagtaatggatatgggccctcacattttccaaacctgtcc

SEQ ID NO: 63553 - DNA, 133 bp, Homo sapiens
ccaggcccagggaccaggcggaggcgtcgcgggagcctttggggcaccacagagatgcggaatacgccagacaccttttgaaagctaatttttggtgaagaaatggattcggttacataagagtgcaacttca

SEQ ID NO: 63554 - DNA, 100 bp, Homo sapiens
gcaaatcaaggaaggctgctggtgatcatgctaagggtcttcatataccacgattaacagagttctcttggagatgttgaaatagctgaagtgaatgtca

SEQ ID NO: 63555 - DNA, 83 bp, Homo sapiens
ctcgggcctggtgctgctcgcctacttcctgccggcgcaggatgaaggatttgggggcagagcacttggcaggtcatgaaggg

SEQ ID NO: 63556 - DNA, 98 bp, Homo sapiens
tgaagagttggccaaatgtttgtccactgagctgatctcctctctggagcaccggggccaccaggagggagtcagactggttcttcagtgacgaagag

SEQ ID NO: 63557 - DNA, 95 bp, Homo sapiens
gcgggacggagcggccggggcctggggctgcctgccgggcggccgggcgcggcgagcccaggtgtgatgaatgcagactctgctaccattttggc

SEQ ID NO: 63558 - DNA, 90 bp, Homo sapiens
agatccacttaataactatgcagtcaaggcctcattgctacgatttcagagtaccctggtaatagctgagcatgcaaatgattccctagc

SEQ ID NO: 63559 - DNA, 100 bp, Homo sapiens
aagaggctaggtattcctgacaggattgcttcacggtggaaggagaagatttgagacatgactttgagcgcctacaacttgccatggaaatggtaggatt

SEQ ID NO: 63560 - DNA, 98 bp, Homo sapiens
ctaagaacagactgtaccgggaaaatgactgcatgttcccctcaagtgaacagcagagaatttcaaaggaccttgctaatatctgtaagacggcagct

SEQ ID NO: 63561 - DNA, 98 bp, Homo sapiens
aagactctcttcgctctttgcatcttaactgcaggaagctctacagaggatcatttcaactctggcaaataaaaatgatgaaattcagaactttattg

SEQ ID NO: 63562 - DNA, 90 bp, Homo sapiens
ggacatttcattaccatccagaagtgtctcccactgaaggcatccgtggttgtttttaagatatgccctgcaaggactctgccctgcaga

SEQ ID NO: 63563 - DNA, 100 bp, Homo sapiens
tggagaggttaaagagacccgttcagagtcctacagtggcagtttctcttcagcaacgggtagcagaattggaaaaaattaatgcagaatttttacgtgc

SEQ ID NO: 63564 - DNA, 98 bp, Homo sapiens
agccgtgcgacaggatttggcccagctcatgaattcgagcggctctcataaagatctggctggcaaaaaaccagtctatccaagaccaggcacctatg

SEQ ID NO: 63565 - DNA, 100 bp, Homo sapiens
ctttcagaaggttgtaaatgtagccaatgtaggtgcagtcccttctggccaggataatatacacagaatatcctccgaatcctaaatctagagctccaag

SEQ ID NO: 63566 - DNA, 100 bp, Homo sapiens
tgtatacttacttcagtgctgttgctggacagacctgtcatttactccatcctttatagtgatgctacaggacgaagaggaatggataaaaacattggcg

SEQ ID NO: 63567 - DNA, 50 bp, Homo sapiens
caggggagcaggcggaggcaagggtgcgcttcccttcccacttcagctct

SEQ ID NO: 63568 - DNA, 75 bp, Homo sapiens
atatttattacttcatctgcttggtagaggtggctttagtgaagtgtataaggaccatcagcacgtgcccatcga

SEQ ID NO: 63569 - DNA, 90 bp, Homo sapiens
ggaatccaccagctacatccagctccctgaggcaggtgtgagctgtcagtggagaagtccacagtgctgcagtctgagctggaatcctgt

SEQ ID NO: 63570 - DNA, 100 bp, Homo sapiens
ttggaccaagaactcaaactttttgtatctcgacactctgcaagattctctcctgaagtcccaggctggcttagcaggagctccagcccgtgctgtatca

SEQ ID NO: 63571 - DNA, 80 bp, Homo sapiens
ctttatccctttgtgtctgcccataagatcagcaaacattccaggtcgtaaaacttttccaagagctagaaggacccagg

SEQ ID NO: 63572 - DNA, 96 bp, Homo sapiens
cgctgaggcggccaccgcgactccggctctgcgctcggctgcctgacttcttcctgctgctgcttttcaggggggctaagtgatggatcttgtact

SEQ ID NO: 63573 - DNA, 100 bp, Homo sapiens
cagtagaagcgatgcaggtcccagcggctcctgtgatccgcccaattatcgcgaccaacacataccagcaggtatttattacagtatcaggagccaatac

SEQ ID NO: 63574 - DNA, 74 bp, Homo sapiens
aaaaagcagtctaaacctgtgaccacccctgaagaaattgcacaggaaaaaatgcgccacctgctgcatgtcct

SEQ ID NO: 63575 - DNA, 51 bp, Homo sapiens
agttttttctaatggctattcaagtgcatttgaaacgccactttatgtttc

SEQ ID NO: 63576 - DNA, 96 bp, Homo sapiens
catcttctgtcccctcatgtccttccgccagggggcctgcgtgggaaaatatatgcagatgatgaacattcttaagccaattgcctttgatgttat

SEQ ID NO: 63577 - DNA, 50 bp, Homo sapiens
caggctggcaggcaacaccttaggacaattgtggcaattaataaagaccc

SEQ ID NO: 63578 - DNA, 83 bp, Homo sapiens
cgcaaacagcacaggccatcaaatgcagaattcacaagatccaatcccttgtccttaaaagtttggtgccctggttgtcagat

SEQ ID NO: 63579 - DNA, 100 bp, Homo sapiens
ctgatatactggatacttataataaaattaaagcagaagaacgaaacagtactgatgcagaggagaaaacatccagtacagacctttctgatatccctgc

SEQ ID NO: 63580 - DNA, 98 bp, Homo sapiens
ccagaagaagcggatggacagcaggccccgcgccggcagaagatggctgtgccacccacgtatgccgatcttggcaaatctgccagggatgtcttcac

SEQ ID NO: 63581 - DNA, 88 bp, Homo sapiens
cagggaaaggatgacatatttttggacctgaaacagaaattctggaacacctatatggctggagtatagtggcatgatcatagatcac

SEQ ID NO: 63582 - DNA, 101 bp, Homo sapiens
tgaagcttgatgtctactgttttgaagcgttcgatcttttaacatcacatcacatgctgacagcacaagaagattgtggtatctgaacgggaactatttgg

SEQ ID NO: 63583 - DNA, 143 bp, Homo sapiens
caagaatccaggatgatgatcccagattgccagcgcaggttggaagccgcatatttggatcttcaacggatactacattggattcaaaggctaacaatttgtccagtctgtccaagaaataccgccaggatgcgaagtacttg

SEQ ID NO: 63584 - DNA, 100 bp, Homo sapiens
agccgatactgagcttcttcctatttgccatggaagaagcagactacagtgcctttggtacagacacgctaataaagaagaagaatgttttaaccaacgt

SEQ ID NO: 63585 - DNA, 90 bp, Homo sapiens
tccttatgctgggtgaaaacaaagacagatgtgctggtgctgagctgtgatctgataacagacgttgccttacatgaggttgtggacctg

SEQ ID NO: 63586 - DNA, 100 bp, Homo sapiens
caagttcttctttggagtgaagtcaaagtatttgtgtggaagtaatcgaaaagacaacatatttattgatcctggataccaaacatttgagcaagaattg

SEQ ID NO: 63587 - DNA, 75 bp, Homo sapiens
tctctgccacatcgttcggttcccacaacagcctgccctggcctcccacgactacatcctgaagattgtgcccac

SEQ ID NO: 63588 - DNA, 83 bp, Homo sapiens
caccaaggaagatgtatttgtacaccaggttttaaaatcaaagatgggaaaatcggagaaaattgcccttccccatggccagc

SEQ ID NO: 63589 - DNA, 99 bp, Homo sapiens
ggacgatctggaccccgctgagaggaactgcttttgagtgagatggtcccagaggcctggaggagcggactgaagcagcgatcggagatggatgtctct

SEQ ID NO: 63590 - DNA, 100 bp, Homo sapiens
cagctgaaaactttacaagaggttcactttctgctgcacccgagtgatcatgaaaatattcaggagaatgaagtttctagattagaagacataatgcagc

SEQ ID NO: 63591 - DNA, 89 bp, Homo sapiens
gggcgcccactgcacctcgtcctgctcagtgcctccctggctggcctcctgctgctcggggaaagtcatgcccaggcggaggtgcgctt

SEQ ID NO: 63592 - DNA, 101 bp, Homo sapiens
cggccgggcatgagttagtcgcagacatggacaccaaacatttcctgccgctcgatcgggagcggtgccgagaaaaatttccttactagatgacatttcat

SEQ ID NO: 63593 - DNA, 100 bp, Homo sapiens
tctcctagttggaagaagtggtaagcccacgaacacaaatgcaggagggagaggtgccaagaagcagcggtacacgtaaaagtcttgcagtgaaaaaccc

SEQ ID NO: 63594 - DNA, 75 bp, Homo sapiens
tgttcctcgcacctcagccaccagaggagtagccaggaccacaggaaaaccaattctgtgtcctcggaggaccac

SEQ ID NO: 63595 - DNA, 75 bp, Homo sapiens
acctgagatcctaggggattcccagcacgctgatgtggggaaagaactcagccggcattttgcacagaggccgtg

SEQ ID NO: 63596 - DNA, 82 bp, Homo sapiens
cagacgctgccagcatcgccgccgccagattatttactggcaagatgagcaggattaccatgaaagaaaagtccagatggac

SEQ ID NO: 63597 - DNA, 83 bp, Homo sapiens
gacatttgctacagcatcccacattaagtcaacgggatgtgacagatgatgaatcctttgttgatgaactgagaataacatta

SEQ ID NO: 63598 - DNA, 100 bp, Homo sapiens
ctgcttgtttacaagtggtgtcaaggcatcttatgttaacctacctaccattgcgctgtgtaacacagattctcctctgcgctatgtggacattgccatc

SEQ ID NO: 63599 - DNA, 101 bp, Homo sapiens
caatgttctcgatgccaatctctgcttgaaaggagaagacttggattctcagggacaatgactcattcttcccaggacactggttcttgtggcattcagga

SEQ ID NO: 63600 - DNA, 89 bp, Homo sapiens
ggcgatcagcaccaagaacccactgcaggctttttgggcaagacggtctctgcgcatcctgtgacaagcggattcgtgcctatgagatg

SEQ ID NO: 63601 - DNA, 122 bp, Homo sapiens
cggcatgcaaaatctggaggtacagcacttcacgttgcagctgctaaaggctatacggaagttttaaaatctcagaaaattttcactgtgacctgaactctgaccagttcaaaggatttctg

SEQ ID NO: 63602 - DNA, 98 bp, Homo sapiens
cagcgggctttgccagcaaaaccgaaacaggtggcagagatgcatggcgagctgattgagttcaacgagcgcctgcacagggccctggtagccaagga

SEQ ID NO: 63603 - DNA, 100 bp, Homo sapiens
ttcagccgcatccacgagatccagtttgctaatccagactttacacaacctatctcagaagttgtagatgaagtaattcagaattgtcctattgatgtca

SEQ ID NO: 63604 - DNA, 83 bp, Homo sapiens
gtcgcttgaaaagactgggcttgtccttgctggtgcatgcgtcgtcggcctctgggcagcagttcctaaggacggtctgaaga

SEQ ID NO: 63605 - DNA, 98 bp, Homo sapiens
tgacctgtaaatcatcctttaggatgaatttcacccattcatcgaggcacttcttccacatgtccgtgcaattgcctatacttggttcaacctgcagg

SEQ ID NO: 63606 - DNA, 50 bp, Homo sapiens
gcatttagagagcatcagcaataatacactctgtgcagttttagagagag

SEQ ID NO: 63607 - DNA, 82 bp, Homo sapiens
accctgcccttctaccccaagagcccacagtggtatcacggaaaacttgacagaacgatagcagaagaacgcctcaggcagg

SEQ ID NO: 63608 - DNA, 100 bp, Homo sapiens
gaagagcaaagctgtcctaggccaaccagagattcatctttcatgcagtgacatgttgataaaaaatgatgggggatgcgggtgtcactggccgtaagat

SEQ ID NO: 63609 - DNA, 75 bp, Homo sapiens
ctcctccttctttgttcaagactgggcttccaccgagcaggacgattactgagagccaatcagattagtttcaac

SEQ ID NO: 63610 - DNA, 95 bp, Homo sapiens
ctcgggccgacgccatgaagatcaaagatgccaagaaaccctgtccctgcggatgtgatggcccagctatggctgtcctgcttcctccttcctgc

SEQ ID NO: 63611 - DNA, 90 bp, Homo sapiens
ctgggcacagcatgcggaaaatactacagagtgtgcacactggctatcattgatccagttttgctacttgagaagatagaacatgatgac

SEQ ID NO: 63612 - DNA, 100 bp, Homo sapiens
aaaaatgaattgtcgatacttcaccgatggaaagggtgtgggccgaagatatgctcatgtggtgttgaggaaagcagacattgacctcaccaagagggcg

SEQ ID NO: 63613 - DNA, 100 bp, Homo sapiens
agacgcggctgccgtacgtggccctcgatgtgctctgcgtgttgctggatggccgccaagaacgagtcatgtttgacaaaattacatctcgaatccagaa

SEQ ID NO: 63614 - DNA, 97 bp, Homo sapiens
cagacgctactcccgctggtttctcagcggggatctgatgagcttctttcttctggcatcattaacggaccttttaccatgaatagttctactcctt

SEQ ID NO: 63615 - DNA, 82 bp, Homo sapiens
gcttggacgaagatggggagaaggaagcgagactcatacgcaacctcaatgatgtgaagttcatttccaatccgccctccat

SEQ ID NO: 63616 - DNA, 100 bp, Homo sapiens
gcgggtctgtcatcatgtcgcgttacgggcggtacggaggagttggaatcgaagcctcttaaaatggcagatgacttggacttcgagacaggagatgcag

SEQ ID NO: 63617 - DNA, 98 bp, Homo sapiens
gtcctaccgggccaagctgcctctgaggatatttctggctgtcgccaactccatggctttccaggatgaagttaaaggaagtagatcgtacagccatg

SEQ ID NO: 63618 - DNA, 100 bp, Homo sapiens
cacagtaaggccaaaaatgtgcatactcacagagttagagagagggatggtgatggactcattgactgcatggatcccgattgctgcctacagagttcct

SEQ ID NO: 63619 - DNA, 83 bp, Homo sapiens
cttccccaaccagcctggaggcaagaggctcctgcagacccctggcttcctaacactcgtgaaactgctcaggccatcaaggg

SEQ ID NO: 63620 - DNA, 100 bp, Homo sapiens
cttggagagtcataacatatcactgactggcatcaagcatgatggaaccatgtgtgatacctgccgccagcaaccaatcattggcattcgatggaagtgt

SEQ ID NO: 63621 - DNA, 90 bp, Homo sapiens
gtacctgtaccgagagttgctggttcaccttgacgatccagagagggccatccaggatgcaattttaggaaagattctgaagcttggcgg

SEQ ID NO: 63622 - DNA, 100 bp, Homo sapiens
gaagtgtatagggaaacctgggggctccctggacaactccgagcagacttcccaagtaagaagcggaagaggagccgctggaaccaagacacaatggaac

SEQ ID NO: 63623 - DNA, 100 bp, Homo sapiens
cagaaagtgaacttggcattttagatctaattcaagtttactcctggcttgggggcattaggaagcactggaggctcttcgggaactaatggatctaacg

SEQ ID NO: 63624 - DNA, 83 bp, Homo sapiens
catactttaaagccaaagcagcaggagtttggaagcccttttcctccaaatcctgggaaagccatgaagactttgaatttatt

SEQ ID NO: 63625 - DNA, 75 bp, Homo sapiens
cagacattccagaaatgctgttagaagacctcctgccccccgaggtctgcagtctcctgaacccagcagccatct

SEQ ID NO: 63626 - DNA, 75 bp, Homo sapiens
cacatctttagaagacctaagctctacacccagagcgcctacaagaatgagctcctgaccaccacagtgcccgag

SEQ ID NO: 63627 - DNA, 100 bp, Homo sapiens
ccgtggaggccatggagatccctgccccggagcccgagaagacagccctttcttttcagaagacacatttagacaatcaccattcacctccaattcaaaa

SEQ ID NO: 63628 - DNA, 98 bp, Homo sapiens
ccggattatagtctctcgccacagcggcctcggcctccccttggattcagacgccgattcgcccagctatatcgagaagtttactgactttcttcggc

SEQ ID NO: 63629 - DNA, 74 bp, Homo sapiens
ggtggtggtgactgagcggagcccggtgacaggatgaactttcacgatggccgtaaagcacagcagcacatcga

SEQ ID NO: 63630 - DNA, 100 bp, Homo sapiens
aacttccatgcctctaacactcatcttcaaaagactgaatcttcagctagatgaagaaacccaataccaaactgctgttgaagaatcttttcaagtaaac

SEQ ID NO: 63631 - DNA, 75 bp, Homo sapiens
ctctaacgtgaacgcggaccaggaggactatacaggctccaacccaagttccagtggttgtgtctcctaggaatc

SEQ ID NO: 63632 - DNA, 80 bp, Homo sapiens
ctaaagctgcgggatacaaagtcagcccaggcagacctccaggcatggaagaggagatggttcgtgttacgcagtggccg

SEQ ID NO: 63633 - DNA, 89 bp, Homo sapiens
gaatctggcacatggattcagtatggagaagagctgatgttctaatcatgtcagataaagatgatattgagactccactgctaactgaa

SEQ ID NO: 63634 - DNA, 98 bp, Homo sapiens
ctgaactgagcgtatgtgccacgccgcccaggagacccctctgctgcaccacttcatgtggtgtgctgagctccattgggaagattttcaaagaggaa

SEQ ID NO: 63635 - DNA, 74 bp, Homo sapiens
taggaagctgtcctggctcagatggctcggtcatcacgggttgcaaaagcttctcatttcagagagatgccagg

SEQ ID NO: 63636 - DNA, 75 bp, Homo sapiens
ccgaggagcacatctaccatctgaagagcattctgctaagtgatgaatccagcgaggctgattctcagagtgaag

SEQ ID NO: 63637 - DNA, 82 bp, Homo sapiens
cgggtgtctcgtgtgtgaacatcacagctggagaatgctggaggagaccttaaggatggccaccaccactatgaaggagctg

SEQ ID NO: 63638 - DNA, 82 bp, Homo sapiens
agttgttcctagacaatgagatgagtcttcctctggaaaacacaagaaacgtaaatattttcaccacgatcgattagactgg

SEQ ID NO: 63639 - DNA, 50 bp, Homo sapiens
agccgccaaagaccccgtccggatggcacatttcctagaggcagaatcct

SEQ ID NO: 63640 - DNA, 76 bp, Homo sapiens
atttgtagtcatgtacagaacatgatcaagggtgttacactgcaggttcaggagaagtggcacctggtggaggacc

SEQ ID NO: 63641 - DNA, 90 bp, Homo sapiens
gtccagcatcaatgaggagatcacaccccgacggcagtccatgacggtgaagaagggagaggtccccgcggaagccgcggtgtcggcgcc

SEQ ID NO: 63642 - DNA, 83 bp, Homo sapiens
tgagattgcactgctgcagtccaggctgaagacagagggctctgatctgtgcgacagacagcccctgtcaaagggaacaggaa

SEQ ID NO: 63643 - DNA, 111 bp, Homo sapiens
gcgtgtatccgcggccgtagcagccgggctggtcctgctgcgagccggcggcccggagtggggcggcgggctcttgcagccaatgccggaacaggatttgctgttgctgag

SEQ ID NO: 63644 - DNA, 80 bp, Homo sapiens
ctcagcgtcgctggcagccgctgtacttgagtcattcaggagagcaggaaagaaaaggccatccctgtggatgtcgcgct

SEQ ID NO: 63645 - DNA, 73 bp, Homo sapiens
aaaacaccttggcccgccggaagggcaggcacatgggcataggtgcagcagcgaaggcaggaactggaacagg

SEQ ID NO: 63646 - DNA, 100 bp, Homo sapiens
tccttcagcaaaagctgtccttacaggaaagaccacagcaagattctttcattcgtctcctcctagcctgggggaccaggctcgaactgaccctggacat

SEQ ID NO: 63647 - DNA, 73 bp, Homo sapiens
caagaggaggacagttcgctacacagcaatgcatcgagggaagtcgagataacatgagtattgtactagtttg

SEQ ID NO: 63648 - DNA, 51 bp, Homo sapiens
cagctggctggcttcagtggaccatactcaagaaaaatggggttatcccag

SEQ ID NO: 63649 - DNA, 100 bp, Homo sapiens
gcagccttagccctagtgtagagggttctcatgtatcagccatcttctgtaagggtgcccagtgtgacttcggttgatcctgctgctattccgccttcat

SEQ ID NO: 63650 - DNA, 75 bp, Homo sapiens
ctgtgcatcccagcagcggattcaccatctcaaaacctcatccagcacagtgagcggcccctgggcaccaccaga

SEQ ID NO: 63651 - DNA, 98 bp, Homo sapiens
ggacctcaagctctgggggatcgaccgggacagctaccggcgcatccttatgataatagaatctgtccctccagctggccctgaggcatctgagtcaa

SEQ ID NO: 63652 - DNA, 74 bp, Homo sapiens
cttcaaaatttcaggtcttaaatctggtggaattctactaagtatcagtcggccctacaagacaaagcccaccc

SEQ ID NO: 63653 - DNA, 75 bp, Homo sapiens
gggaagaatgagaagtcatggaatgacagaacctgagccagcagaagagtacactgagcaaagtgaagttgaatc

SEQ ID NO: 63654 - DNA, 100 bp, Homo sapiens
cctcttcttcttctgcaacacggccactgtgtacaagatatgtgcctggatgcagctcacctccggttttaaatgcacagagagcaggatacaaggcagc

SEQ ID NO: 63655 - DNA, 97 bp, Homo sapiens
ttgtaagtgcagatggaacacaacaggtggtccgtactgagaagaacagtttgaacaaccgattcttaccctggaatgaaattgagacagaggccat

SEQ ID NO: 63656 - DNA, 82 bp, Homo sapiens
caggatggctgcgttgacacgtcttatttaatccacatcatagacgctgaccggaaaggagattgagattgacattgaacct

SEQ ID NO: 63657 - DNA, 75 bp, Homo sapiens
gtgtgtgcgcgcgaaggagcggaagaatggcagtgctcaaactcaccgaccaggacactgtaatttatgatcgac

SEQ ID NO: 63658 - DNA, 74 bp, Homo sapiens
taaaagatcactgaagttggatggtctgttagaagaaaatgacttgcaattgtgaccaaatatattacaaaggg

SEQ ID NO: 63659 - DNA, 83 bp, Homo sapiens
agacgctctgaactgactgccccgcatcaccggagcgtcccagctgcgaggagggtcagccaggaggaaagggaaagaccagc

SEQ ID NO: 63660 - DNA, 82 bp, Homo sapiens
cggttaaccacgtctcgtccacgacctccctagattgagaggatccagaatccagatctctggaatagctaccaggcaaaga

SEQ ID NO: 63661 - DNA, 83 bp, Homo sapiens
ctctgcagaaagtgcaaagccttggcatgttacacagctgacgtaagagtgatagagtacagttgaaagcagagtgtaacaag

SEQ ID NO: 63662 - DNA, 74 bp, Homo sapiens
gcggagccagctgctcactggccgctaccagtatgccgagattttgctgtcctggaggaccacaccctggctca

SEQ ID NO: 63663 - DNA, 82 bp, Homo sapiens
ggcgccgcccggggcgaggcagggccagcagcaggcgggaggtgtccttaagtttgctcgcttggtcaagtcctacgaagcc

SEQ ID NO: 63664 - DNA, 82 bp, Homo sapiens
gtgggcacagacaaggagctcagtgacctcctggacttcagcatggtccctgtgcgttttattgcgacctgccggtgggaac

SEQ ID NO: 63665 - DNA, 96 bp, Homo sapiens
ggcagcgggctgcagctggcggccggaatccgcgcgcagcccgggtgtcatggagaaactccagctgggcccagagattctgcagcgggaaaatcc

SEQ ID NO: 63666 - DNA, 83 bp, Homo sapiens
tgggcgaattgcagaattcttccctgatgcagtacttattatgcactcgactatgacatcaacattgaggagattgggtgaag

SEQ ID NO: 63667 - DNA, 83 bp, Homo sapiens
ctggcctcagcccgccacatcaccctgacctgcttacgcccagatcaatgtccgagttaccaccatggatgcagagctggagt

SEQ ID NO: 63668 - DNA, 100 bp, Homo sapiens
tgcccagctttgcagcccccgaacgcggcctcgcacagatccaggatgagaagactgataaaagaagaagctagctgaacagctgtaaaatgcccaaatc

SEQ ID NO: 63669 - DNA, 100 bp, Homo sapiens
tgagatcgtgtatgtgggtccaatcaattgattctacacaaagatgttcccgctgcctgtcaccaacgggaagggccggcccgcctccctggccggggcg

SEQ ID NO: 63670 - DNA, 82 bp, Homo sapiens
agacactgaacgaggagccagtgtcgggaacatgccctgtgtgccgccgtcatttcccacctgcggttattgaagcatctgc

SEQ ID NO: 63671 - DNA, 82 bp, Homo sapiens
atcaggggccttgataacacagagtttcaaggtggtacagaagttggtcctgccctttgggcgactgaactacctgcccctg

SEQ ID NO: 63672 - DNA, 74 bp, Homo sapiens
cgacgtggaactcagcagcggaggctggacgcttgcatggcgcttgaggccgacttaacattacctatcccatg

SEQ ID NO: 63673 - DNA, 132 bp, Homo sapiens
ctcaagaagacctagagtacaagttgaagggattaattgacctaaccctggataagagatcaccggcgtaatcaacccagcgttggacaaatactttccgtcagactctggagtgagaatcatagctgagcc

SEQ ID NO: 63674 - DNA, 75 bp, Homo sapiens
ctcaaaaacaaaattctgaactcaggacttggcaaatacttggcatatcgaaattttatgattgacacgtatcgt

SEQ ID NO: 63675 - DNA, 100 bp, Homo sapiens
ggcggcgatcgagaaagtgcgcaaatgggcaacgggcatgaggaggtagttgcatgcgcctgggatggacagacatatatcattgatcacaaccgcaccg

SEQ ID NO: 63676 - DNA, 88 bp, Homo sapiens
aaagatggaatcacaaacggcgcacattggtatgatgtggaaggaataagacgagttggaagaagacctgatcaacaacttcagggtg

SEQ ID NO: 63677 - DNA, 76 bp, Homo sapiens
attgctggctacagcttcagaagaccgaagcgttcgtatctggaaggtgctccagaggctggtggacctgagcgga

SEQ ID NO: 63678 - DNA, 73 bp, Homo sapiens
ttgtgaaggcgctggaattacatgaacataccaccctagtaaagatcattgagaagcagccaggccacattcg

SEQ ID NO: 63679 - DNA, 82 bp, Homo sapiens
cgggtgtccggccgtgtcccgaggaagtgcaagacccgggaactctaatgatccaggacaaagaagttaccctggagtatgt

SEQ ID NO: 63680 - DNA, 74 bp, Homo sapiens
ggatgcccagctgaagagcctgctgatgtcagtgggacccattcaggtggatccataaagaacccagccaaccc

SEQ ID NO: 63681 - DNA, 50 bp, Homo sapiens
cgtcgggtcagatccgacagaaggattgtcttacctttctccaaccctct

SEQ ID NO: 63682 - DNA, 90 bp, Homo sapiens
tcttctgataactcaggatttacttgaaatgaaaggagattccaacctacttcaggagatgcgctctgtgctgcggaaggcgggctcccc

SEQ ID NO: 63683 - DNA, 90 bp, Homo sapiens
gtcaggctacatcagcaaaggggctgcttctgatgcttggaagatatcctctcagccacaaagatggtaataaatctttgcctcccacag

SEQ ID NO: 63684 - DNA, 100 bp, Homo sapiens
cctgctgggcgatcttctctgtgctactgcaacttgctctgtgggattatcagaggtgccttggaaatgttctgtggctcctgatggatctgagaagatg

SEQ ID NO: 63685 - DNA, 101 bp, Homo sapiens
gaagatccgcagctccacgcagcaagacccgcgccgccgggacccccaggacgacgtgtacctggacatcaccgacaaggcgcctctgtcgaagagccttc

SEQ ID NO: 63686 - DNA, 100 bp, Homo sapiens
gaccacatcaaagacagctttcacagtttgcgggactcagtcccatcactccaaggagagaaggccatcgaggagggcacgctggaggagatcgaagagg

SEQ ID NO: 63687 - DNA, 111 bp, Homo sapiens
cgccagagaggcccgcccaccagttcgcccgtccccctgccccgttcacaatgtgctggagaatctggtaaaagcaccattgtgaagcagatgaggatcctgcatgttaat

SEQ ID NO: 63688 - DNA, 98 bp, Homo sapiens
agaaagctgcgttaatgtttgcaaatgcagaggaagaatttttctatgagtttaattggttggggtcagataagaagaggagtgacaatcaagccaac

SEQ ID NO: 63689 - DNA, 100 bp, Homo sapiens
cttccagagcaagcatggagcaacaggatcagagcatgaaggaagggggcggcgactggcggcgcgatggacctgaccgggctcctgctggacgaagaag

SEQ ID NO: 63690 - DNA, 75 bp, Homo sapiens
gaggaatattggacctcaatacctataacgtcggtggagccgccaccaaaatgcagattttcgtgaaaaccctta

SEQ ID NO: 63691 - DNA, 100 bp, Homo sapiens
caaggatgtgatgccagaggtcaacaaggttctggacaagatgaagtctttctgccaggcattagtatcatttgaagacgtggttgtgaccttcactgga

SEQ ID NO: 63692 - DNA, 78 bp, Homo sapiens
gggctccgggaaaactacactggccaggtaactaggatttctacctcaaccgcgagacctatgcaaggacggtgtgga

SEQ ID NO: 63693 - DNA, 98 bp, Homo sapiens
cgggatcgtgaccgagaccgtgaccgagagcgtgaccgagagcgcgaatatcgtcatcgttagaaggttatttccagaaagaagagaatggcaaagta

SEQ ID NO: 63694 - DNA, 83 bp, Homo sapiens
aaggacgccagcatcatacaccggctgttcgaggccttgactgtagcaattctgtggtgttcttggtcacacatttatggagt

SEQ ID NO: 63695 - DNA, 74 bp, Homo sapiens
gaatgctgaactagagaaggatgctcagaacagattggcacccattgggagtttgaagatgccgcatttggatt

SEQ ID NO: 63696 - DNA, 74 bp, Homo sapiens
ggctcagtctgcggccaagactccgtcctgcaagaataactgaagtgaagtgatggactccgatttggagagta

SEQ ID NO: 63697 - DNA, 100 bp, Homo sapiens
caggccagacctcatggataattatttggcactgatactctctgcatttattcgtaatggacttttagaggtgtggcagaaaaaacacagcttctgaaat

SEQ ID NO: 63698 - DNA, 82 bp, Homo sapiens
ctgggcgctccggtggcggcggagatcaggcctttgtgacactaaccacaaacgatgcctacgccaaaggtgccctggtcct

SEQ ID NO: 63699 - DNA, 50 bp, Homo sapiens
ggaagttttccacctaccatgctctcggtgaactatggaaaagtttgtaa

SEQ ID NO: 63700 - DNA, 89 bp, Homo sapiens
ctcagccagacacaggcagagcaagctgcacaggacagagcgggatgccaccagcttgtccaaagggaagttccaggagctcctggtgg

SEQ ID NO: 63701 - DNA, 100 bp, Homo sapiens
agtttcttgggctatgccagttttaaagtgggagagctgctgaagtcaaaggagcaattgctggtcctgagcctgagtgccgcaggttcttcaaagctgc

SEQ ID NO: 63702 - DNA, 98 bp, Homo sapiens
gcgccgccagtggagcccccgcgcgcccggccggcccggagcaccgagctcgcggcacggtaggagggcggcgacgacctggaccccaactacgtgct

SEQ ID NO: 63703 - DNA, 83 bp, Homo sapiens
ctttggggagactcctacattcctagcctccaaaatcggcagacactttggcttcatgtttgaaagctcgccgggcggcaatc

SEQ ID NO: 63704 - DNA, 83 bp, Homo sapiens
cgaaggcccgagcgcccgaggcgtctgggatggtgtgggaccgggtttggtgcacctcgatttggaggaagtagggcagggcc

SEQ ID NO: 63705 - DNA, 100 bp, Homo sapiens
tgacccggcgtgtgcaaaaggcagctcggagacaggccaagcaggaggagcttaagcggctgcatcgagcccaggggatggactgaacggacagttccag

SEQ ID NO: 63706 - DNA, 98 bp, Homo sapiens
gagagcttcatcaaaaatagtgatagctttgataagtactgaacgacacctgggtctccttcccttcctggtctgaggactccacgttcgtcagctcc

SEQ ID NO: 63707 - DNA, 80 bp, Homo sapiens
tatttctcttttgtctgcccctattgtaagtgcagatggaacacaacagacagagtttcactcctgttacccaggctgga

SEQ ID NO: 63708 - DNA, 75 bp, Homo sapiens
ggagcagcacttccacagccaagtgcgggagtccacggctcaggccacagggtcaccacatacatcgcccaccca

SEQ ID NO: 63709 - DNA, 76 bp, Homo sapiens
attccattcttttccttattcttctgatgtggatccaggtttttcgttggaatatacgttgcacatttatggcgat

SEQ ID NO: 63710 - DNA, 75 bp, Homo sapiens
ctctacgacatccctgaagccgggaaatggagtggagtcaacatatcaatggagcaagtcacagtcgtcgatgcc

SEQ ID NO: 63711 - DNA, 82 bp, Homo sapiens
aacagattcagaaggagcaggattaccaaaggaacctgtctccagagaagattttccacgtcattgtggccccttgttatga

SEQ ID NO: 63712 - DNA, 100 bp, Homo sapiens
cgagaccccaggcacagagaccccatcctacaagatccggaagaccacggccagccaggtgtacgagacattgctcacctacagtgacgtcgtgggcgcg

SEQ ID NO: 63713 - DNA, 82 bp, Homo sapiens
ccagaacccggccctcaccgccctcaccacccctatccagacggctgcccttcaagtaccactctattaccaggttttaaac

SEQ ID NO: 63714 - DNA, 83 bp, Homo sapiens
ccaggatctcgggctcggaacgagactgcacgcagggtaccaccatcttaaggacagaaaagctacaggactctaggaggcca

SEQ ID NO: 63715 - DNA, 101 bp, Homo sapiens
aacaagtttagggagtccatggccagaaaacttttggggatgctgatatgctaactggtgatgagcaagtatggaaggaagttcaagaatccctgaaaaaa

SEQ ID NO: 63716 - DNA, 90 bp, Homo sapiens
gacggcagacccagcagccagagagtgaaaggtccctgacaggctggatgaaatgagatccccatgtagcaattgccatggaaacctgtg

SEQ ID NO: 63717 - DNA, 80 bp, Homo sapiens
atatcctgacactatgaatgctacttggatgcctcttaaggagggagatactgagagtgaaccatatgatgatgaagaat

SEQ ID NO: 63718 - DNA, 100 bp, Homo sapiens
tcatcttcaataagaagggccaaattgaattgactgggaaaagatgtaggtgcaaaaaactacagacatctctgtgctgtttattacaacaagaatcctg

SEQ ID NO: 63719 - DNA, 83 bp, Homo sapiens
cacccgggtcgctgttcctgagtgtactaatggtcacttgatgtgcgctggctgttttatccacctactagcagatgcccggc

SEQ ID NO: 63720 - DNA, 50 bp, Homo sapiens
ctgcaatttgccatttatttgtaataaggctccacttaacactcctgtaa

SEQ ID NO: 63721 - DNA, 100 bp, Homo sapiens
gagacgttcccagatttcgtcgatgcctgtggctacagcgacccggaggatgagagcaaggaagtcgaggctcaagaggttctcaaattgatagtcacag

SEQ ID NO: 63722 - DNA, 75 bp, Homo sapiens
ttccagaggccgacgatctactatgtgatgtcagggcctgcgtgcttccaatcagaagactatacaacctcctag

SEQ ID NO: 63723 - DNA, 75 bp, Homo sapiens
ccacagtaccctattcacgctctgtgcttgtgccaaggagccaaaaacctgtatatcatctccgtgaaggggatc

SEQ ID NO: 63724 - DNA, 82 bp, Homo sapiens
ttctgcctcgggccctgcccctacatttggagcctggacacgcagtacagcaagagctgttgcgcagccattggtacctgta

SEQ ID NO: 63725 - DNA, 101 bp, Homo sapiens
tctgtaaaagcataattgaatttgtttcacccccgtggattccagtgggcccgacagcgcaacagattcatgatgttgctatcaaaagttgagaaattgtc

SEQ ID NO: 63726 - DNA, 100 bp, Homo sapiens
gcctctgcggtgtaaacagccgcggcgggcaggccaggactgtcagtgcccgcccctcggggcagatttaaattccaggttgtcatcaatggccgagagt

SEQ ID NO: 63727 - DNA, 75 bp, Homo sapiens
ttacgagatcttcatctgtcacgccaacgtcatccgctacatcgtgtgcaggtggctattatcatggaaaactaa

SEQ ID NO: 63728 - DNA, 83 bp, Homo sapiens
gtcacacacggtcctaagagctgggcaccaggaagcgaaggctggtgcccgtggttgacacgagctgtgtccccagctgttcc

SEQ ID NO: 63729 - DNA, 74 bp, Homo sapiens
ttcgaggactggatgacatcaaggacttgaagcccatgcagaatgccaccaagtatggcaacatgacagaggac

SEQ ID NO: 63730 - DNA, 51 bp, Homo sapiens
ggagaccatagctgcacagccagaagttcaccatgtctattctcaagatcc

SEQ ID NO: 63731 - DNA, 100 bp, Homo sapiens
tttaacttctatgttttcccgaaacccttcaatagatcctcaccagatgtcaaatttgtttgtcagggaaatgtttcaacgtgcgcaagcgttgcggcgg

SEQ ID NO: 63732 - DNA, 100 bp, Homo sapiens
agcaagatgggtcaccagcagctgtactggagccacccgcgaaaattcggccagggttctcgctcttgctttgggacccccgcccctggcttctcctcca

SEQ ID NO: 63733 - DNA, 99 bp, Homo sapiens
agaaacagaaacgattgtggaaacagctattgacctgaaaagtggttctggaaaagtgtaccaaggccctgcaaaaggtgctgctgatacaacaatcat

SEQ ID NO: 63734 - DNA, 100 bp, Homo sapiens
gacgatcctctagagcactgtgtgtctccccggacgcgagcccgctcccctgacccaataggggcacaaaacgtccccgggatgatgaagaggaggagca

SEQ ID NO: 63735 - DNA, 100 bp, Homo sapiens
agcgtgctgagcaaccgcagcctccgcggccgagagtgcagcgaggagtgcatccgccccaacccttttccccctcgtctcctgtgagaattccccgtcg

SEQ ID NO: 63736 - DNA, 87 bp, Homo sapiens
attgtactgtgaataatgatgaaggagagtggagtggcccaccacctgaatgcagagatcctgataacttaagtgactctctctttt

SEQ ID NO: 63737 - DNA, 83 bp, Homo sapiens
gctggtggcctcgtgctggagcccggacgggcgccacattctcaacaccacggaattccataatatactgatgataatgctct

SEQ ID NO: 63738 - DNA, 90 bp, Homo sapiens
tccaaaatgaagccccctgtgattcccttcgtgcctctgatcctcaaagtgcggatttgcgaggcgcgccctggagctgctagagatccg

SEQ ID NO: 63739 - DNA, 97 bp, Homo sapiens
aggagcttatcaagatacaattgaataatcaaagggtggagcctggacaaaatgtttacttgtctggtgtgatgaatgcagactctgctaccatttt

SEQ ID NO: 63740 - DNA, 82 bp, Homo sapiens
cgcagcctccgcggccgagagtgcagcgaacaatgcagatcttcgtgaagactctgactggtaagaccatcaccctcgaggt

SEQ ID NO: 63741 - DNA, 75 bp, Homo sapiens
ggaaacaaagttattttgctcggtcaataactgggagatggacaaactagagatggaagatgcagtcacattttt

SEQ ID NO: 63742 - DNA, 83 bp, Homo sapiens
ggtttccctattacaactccctcaaggactgcctttcctggtaactaggatttctacctcaaccgcgagacctatgcaaggac

SEQ ID NO: 63743 - DNA, 50 bp, Homo sapiens
ctaatgaaagcctattgtgaacgacagaggaaagaatgttttggaatctg

SEQ ID NO: 63744 - DNA, 100 bp, Homo sapiens
gaagaggcaggagggcaggagcagcacacagacactggaagacagctgattcatcacaagagagctacaagagcctggaagaagctgaagactgctaccc

SEQ ID NO: 63745 - DNA, 58 bp, Homo sapiens
agtccctagaacacctcgaacacctacaagaagccagtcaccatacggtgaggacact

SEQ ID NO: 63746 - DNA, 75 bp, Homo sapiens
gctgctcatggaatttcaagtaattgggtatcaaatttaattggttggggtcagataagaagaggagtgacaatc

SEQ ID NO: 63747 - DNA, 83 bp, Homo sapiens
aaggcccagatgataggaatcccatctcatttagccatcactggtgcaagctatatttaacggagatcctgatgaagttcgag

SEQ ID NO: 63748 - DNA, 100 bp, Homo sapiens
ctgcgggcagccgtggtggaccggaaaggtacaggtttgcagattccgccagcagcacagcaagctctacagatgagtggctctttggcatttggtgctg

SEQ ID NO: 63749 - DNA, 119 bp, Homo sapiens
ggaattttgaagtacaccgtggtgacattgtatcattggtggtcccgggattcttgagctgtgcccagctgacgagcttttgaagatggcacaataaccgtccagtgatgcctgaccat

SEQ ID NO: 63750 - DNA, 98 bp, Homo sapiens
agaaattcagaacctcaagcttttcaggcatcctcatataattaaactgaactgatgaggagtttcaacagagacaggcggattttttgtgccattct

SEQ ID NO: 63751 - DNA, 100 bp, Homo sapiens
ccccaccctgctgccaccccagaaggatctggatagctcagcgatgggtgacagtgacaccactgaggatgcgcctacacagagccctacaaagtctgtc

SEQ ID NO: 63752 - DNA, 90 bp, Homo sapiens
cctttctccaggaccttgccagatatctttttgaaaatggaagggtagatgacattttctccgatctttattatgttcggttcacggagt

SEQ ID NO: 63753 - DNA, 50 bp, Homo sapiens
cataggcccgagtccctgtcacccgaggcgaaggcagcgaaagaggcgca

SEQ ID NO: 63754 - DNA, 59 bp, Homo sapiens
ttggagaagatctatgggtcagacagaattccagaaacccttgctgcatttacagggta

SEQ ID NO: 63755 - DNA, 87 bp, Homo sapiens
cacattaagaagtacaatagcattcgcgataaaccgagaaaactggtgtacaatagagccatgccctgatgcagcatctcttctggc

SEQ ID NO: 63756 - DNA, 75 bp, Homo sapiens
tgtccagcatgaatcccgaataatctgaattctacaaacacattgtgctttctggagggtctactatgtatcctg

SEQ ID NO: 63757 - DNA, 80 bp, Homo sapiens
ctctgttcgtcaggaacgtggccgacgacaccaggatgtacagttacccagcacgtgtacctcctcctcctcctattgct

SEQ ID NO: 63758 - DNA, 89 bp, Homo sapiens
gcatctttttaccttttgtgctgagccaactcgagccaggctgcaaaaagaaatgcgcccatgctggttccagctggatcagatcccct

SEQ ID NO: 63759 - DNA, 51 bp, Homo sapiens
atgataattgggcctccaagatttcttaaacaattaggtctacatcctaac

SEQ ID NO: 63760 - DNA, 83 bp, Homo sapiens
cccggagacagcggcacagaggtgcttctgccagctatgaaacccacgtagtcgaacaccgtgatgcttctcctgcagggcgt

SEQ ID NO: 63761 - DNA, 100 bp, Homo sapiens
gacggagtatctggaaagctcgggacaggatgtacctggagtagaacagaaaaattattatgtctgtgttcccttgggactcattggaaattgtacagtg

SEQ ID NO: 63762 - DNA, 150 bp, Homo sapiens
gtggctgaaaccatcaaaagttggatttttttttctcagtgcaataagaaagatgacttacttcacaagttggtatggcagatcccagaaaatggactcaccctttccctgactgaacctgtggtgattttggaaggccactcaaagaga

SEQ ID NO: 63763 - DNA, 100 bp, Homo sapiens
gttacttcttcctcaacaccagcaccgcagatgttgtcaaggtggcctaccaggaggccaggggtgtcgccatggggccctggcctccagtctgagtgct

SEQ ID NO: 63764 - DNA, 100 bp, Homo sapiens
tgcccagcagaatttgtatagagatgtgatgttggagaactacagaaacctggtctccctagagggccaagatgggtcgccgagctcaacaggagtcagc

SEQ ID NO: 63765 - DNA, 107 bp, Homo sapiens
ctttgaattcagccagtggtcacagctggatgtttgcgacatcccagagagcttccagagcaaggcactgacgtttcttctgctacagcctccaagccccaaacttc

SEQ ID NO: 63766 - DNA, 82 bp, Homo sapiens
gcctgcggcgcctgggcgctctgagcttcaaggttactgactttttatgatgtttggtggctatgagactatagaagcatac

SEQ ID NO: 63767 - DNA, 75 bp, Homo sapiens
gtaccctccaaatagcaaatgtacttggaaaatcacaattcctgaatttgacaacttgtacctggatatgaatgg

SEQ ID NO: 63768 - DNA, 82 bp, Homo sapiens
gcggggcgctgggccgccagcctcggcaccgtcctttcctttctccctcgcgttaggtgagaagccctaccactgcaactgg

SEQ ID NO: 63769 - DNA, 100 bp, Homo sapiens
cagccgcctctttgggttcgtgagatttcatgaagatggcgccaggacgaaggccctactgggcaagcatcaacaacagcaacttgtgattggcggtgac

SEQ ID NO: 63770 - DNA, 100 bp, Homo sapiens
tggcagcgagcttgaagaaacagaggtcaaaggaaaaagaaaaaggggtcgtcctggccggcctccactgctggaacccaatgtgaatattggactggcg

SEQ ID NO: 63771 - DNA, 75 bp, Homo sapiens
ttttggcattgacatttaattttagggtcctttatatagaagggagagtagagttcaagctgaagaagatgtgga

SEQ ID NO: 63772 - DNA, 75 bp, Homo sapiens
cggagagtgacggagtcggcgagcccccgcggcgacagaaaattgtacaagctggagataaggaccttgatgggc

SEQ ID NO: 63773 - DNA, 50 bp, Homo sapiens
gtggagccaccagcctctccttgggcttcctgttgcagctgttccaggag

SEQ ID NO: 63774 - DNA, 100 bp, Homo sapiens
acttgcccagccctgtggaagattagcggccatgtattccaatgtgataggaactgtaacctctggaaaaaggataagtgtgagccactggagaagcagc

SEQ ID NO: 63775 - DNA, 134 bp, Homo sapiens
ggcggcggcggctgccgcggcggtggcgacggccgcggggactcggagctgagaggagctgctgctcggaccagcgcggactttgtttggagaagctgcctatttcttcttctaccagtaatctccatgtggac

SEQ ID NO: 63776 - DNA, 100 bp, Homo sapiens
tgcgccgcgcgggacccggaggaccgtatccccagcccactgggctacgcaggccattctggaggaaaacaaggagaagctgccacttgacatcaacccc

SEQ ID NO: 63777 - DNA, 100 bp, Homo sapiens
aggatggcaggaaatggaaccattgctttctctgtaaaaagtgtgtaaagccttggccgtccccatgttgcgttttccgacctgtttcccatccttccgg

SEQ ID NO: 63778 - DNA, 75 bp, Homo sapiens
cttttctcaatggggatgtggcttcagtctctgtccagagttttgcggcctccaggtggtggatccaatttttca

SEQ ID NO: 63779 - DNA, 76 bp, Homo sapiens
cccaggacgccttctgcaactccgacatcgctgctcctgctaaggccaagccggctgaagctcctgctgctgcagc

SEQ ID NO: 63780 - DNA, 83 bp, Homo sapiens
ggggagcttctgcccggtgattggtcaaatgaggccgatacaaagcaggggaaaaggagccagatcccaagacgtggaaggcc

SEQ ID NO: 63781 - DNA, 100 bp, Homo sapiens
cggaggccgagaagcgagtcaaggcctcccactccttcctccgagggctgtttgggttttgaagtacaggaagaaggttatctggcaaaaatcctggtcc

SEQ ID NO: 63782 - DNA, 95 bp, Homo sapiens
attctgcagaatccactcatgatcaaaatcaaccaggatcccttaggcatccagggacgcaggattcacaagtagagacagggattcaccatgtt

SEQ ID NO: 63783 - DNA, 75 bp, Homo sapiens
tgaggcagagggtggcccatgagccggttgcgccacccgaggacaagcccaataggggcacaaaacgtccccggg

SEQ ID NO: 63784 - DNA, 75 bp, Homo sapiens
tggaaaagagggtggaaaaagcagggaggttatgaggcttaataaagaaggtattattaacccaaagaatccaaa

SEQ ID NO: 63785 - DNA, 74 bp, Homo sapiens
tatctcctgtgtgttctttcttatgatccaactaaacatccagcaacagcagcagcaacagcaacagcagcagc

SEQ ID NO: 63786 - DNA, 83 bp, Homo sapiens
ggccctgcggagctgcttcgccgctgcgatcaggatcctcatgaccagccaaagagaagaagaattaggaagcataaatcaaa

SEQ ID NO: 63787 - DNA, 50 bp, Homo sapiens
tgatgaacttgtacttcacgcagattgcagagggaatggcatacatcgag

SEQ ID NO: 63788 - DNA, 75 bp, Homo sapiens
aaaagactgtcttcctcagaaacccccgcctctacgtagcctcaatcctggtcctctggatgctccaaggctccc

SEQ ID NO: 63789 - DNA, 96 bp, Homo sapiens
ccgaaaaagaggggccacttctcagcgattcacatgtagctttcaggtaactctctgtcctggtatggtggggaatcctacatccagagcatggag

SEQ ID NO: 63790 - DNA, 90 bp, Homo sapiens
ctccctgcagccttgccacgatcctgttgtcacgttacctgggcttgtatgtgttctatgtggtcactgtgattctctgcacctggatct

SEQ ID NO: 63791 - DNA, 51 bp, Homo sapiens
ctgccctttcttgggctgtgttcacggccttagaaaatttacgtgtatacc

SEQ ID NO: 63792 - DNA, 100 bp, Homo sapiens
cccagtttaagattctggtcagcttgttagctttaaggaagcctcctatttcagtttctcaacatgaaagtcatcaagcaatctcccatcttccaactgg

SEQ ID NO: 63793 - DNA, 74 bp, Homo sapiens
tgctgctaaaaacaagactggggctgctcccatcattgatgtggtgcgatcggacaggaagatgtcacccaagc

SEQ ID NO: 63794 - DNA, 100 bp, Homo sapiens
aagtgttattatttctgccctttgtacccttacaagcaaactgaaaccgtgtcagttcagtcttcggtattggggaagggtgtaaaacatcgacccccac

SEQ ID NO: 63795 - DNA, 101 bp, Homo sapiens
caggatgcagccaacaaaaacccattcagctcggccagtgggggctttggatccacagctacctcaagactcacaccacccggcaagaactgctcactacg

SEQ ID NO: 63796 - DNA, 75 bp, Homo sapiens
agcctcccaagtagctgagattacaggaattcaactgaaaaaggtgcaggagcagcgggagcaggaggccaagcg

SEQ ID NO: 63797 - DNA, 100 bp, Homo sapiens
ggcgcggtggctcatgcccgtaatcccagcattttcggaggccgaggctggagcaagcttttataagatgactggcctgggtcctttgcctcaagctctt

SEQ ID NO: 63798 - DNA, 100 bp, Homo sapiens
cttcattaagcagatcctggatggggtgaactaccttcacacaaagaaaattgctcactttgatctcaagttccgaagacagcacccaccaatgtaagcg

SEQ ID NO: 63799 - DNA, 75 bp, Homo sapiens
cgctggcgctagtctgaccctccgccaggcaaaaggaagtattggtaaaggttttcaaggtgtcatgaaaagatg

SEQ ID NO: 63800 - DNA, 100 bp, Homo sapiens
cacaggtccagggcagaggaccaacatgggcattttgtttatgagcaaggtggagctggctctgtgggacacagcagggcaggaagactatgatcgactg

SEQ ID NO: 63801 - DNA, 100 bp, Homo sapiens
ggtttgagtccagcagtgctttaggagcagacaagatggagacaaattcctctctccccacgaacatctctggagggacacctgctgtatctgctggcta

SEQ ID NO: 63802 - DNA, 98 bp, Homo sapiens
aagcccaacccgctgcaggacgcgaacctctgctcacgcgtgttcttctgataattttccccagatggcccatcagaagcggttcatcgaacggaagt

SEQ ID NO: 63803 - DNA, 51 bp, Homo sapiens
gcaccgcatgatggtacccaaagtcaggttccataggcagttcttaccaag

SEQ ID NO: 63804 - DNA, 76 bp, Homo sapiens
ttgcttttctgtggaacctcagaggccagcctcgacttcctggagacccccaggctgatctactggctgacctttg

SEQ ID NO: 63805 - DNA, 100 bp, Homo sapiens
gccaatgtggacggactcactgccctgcaccagacacgatgaggcgagtggtacgacagagcaagtttcggcatgtatttgggcaagcggtgaaaaatga

SEQ ID NO: 63806 - DNA, 100 bp, Homo sapiens
tacctggacttaaatttaaggactgggtatcaagtaaacgaagtttgctggaaaccatgtctcattatacagatgaacccagatttaccatagagcagat

SEQ ID NO: 63807 - DNA, 75 bp, Homo sapiens
tcaccagatgataagcttttggctagttgttcagctgatggaaccttaaaggtggacccccaaaagtacaagggc

SEQ ID NO: 63808 - DNA, 100 bp, Homo sapiens
caaaatccacacccttatcacagcccagtgccaatggagtccagacggaaggacttgactatgacaggctgaagcagccgcgtcatgacgtaccgggagc

SEQ ID NO: 63809 - DNA, 100 bp, Homo sapiens
gatctccacaccctttttcctgggtctcattctgttgcccaggctggagtgcagtggtgcgatctcggctcacagcaacctctctgcctccaggttcaag

SEQ ID NO: 63810 - DNA, 100 bp, Homo sapiens
cgcatggtcagtgccatttcgcctttatcgtggtggagtccaccctggctgtggttctgtggacaatcacaatgggaatccaaggagggtctgtcctgtt

SEQ ID NO: 63811 - DNA, 100 bp, Homo sapiens
tggaaaaactcagtgagacacaatttatcattgaataagtgttttaagaaagtggacaaagagaggagtcagagcccacccacctttgggttcctgttgg

SEQ ID NO: 63812 - DNA, 100 bp, Homo sapiens
ctggcacagtcctttgcattctactggtgtggatgtgcaagaggaggaacgacgtagaagagaggaagagatgatgattcgtcaacgtgagatggaagaa

SEQ ID NO: 63813 - DNA, 74 bp, Homo sapiens
tctgggtgcagttcctgcagtaccccactctacgatcaggtgtttcccattaaacactaccaggacaaaatcag

SEQ ID NO: 63814 - DNA, 86 bp, Homo sapiens
gctcgcgctactctctctttctggcctggaggctatccagcgttatttggaaatagcggtgcttgcagcgcttgcggacagtcgat

SEQ ID NO: 63815 - DNA, 100 bp, Homo sapiens
attgaaaaatttgagaaggaggctgctgagatgatggaggaggatttgcaaggagcttcccaagttaaagaagaaacagacatagcagagcagaaatcag

SEQ ID NO: 63816 - DNA, 100 bp, Homo sapiens
ccgggctccccaagatctacatccaccgagtcggccggacggcccgtgcagatatcatggtgacagagtacgtggagcacggacccctggatgtgtggct

SEQ ID NO: 63817 - DNA, 100 bp, Homo sapiens
gaacaatttgagagagatttgacaagagcacagatggtggaatcaaatttacaggataaatatcagttagttgaatccatggacatgaaacccacagata

SEQ ID NO: 63818 - DNA, 100 bp, Homo sapiens
aaaatctccccggtgactttcagaggtcctgctgtactagccaccaaagcagctgctggtactaagaaatatgatcttagtaaatggaaatatgcagaac

SEQ ID NO: 63819 - DNA, 97 bp, Homo sapiens
ttgcaagcatggtcgcgccggggcttgtactcgggctggtgctgccattaatcctgtgggccgacagaagtgcagggatcgatttgcttagtggtat

SEQ ID NO: 63820 - DNA, 82 bp, Homo sapiens
cagaaagcaggcgaacccgcggcgcaataacgggtcctcactgagcagcgagtcgtcccccgtgtcctctccggccaccaac

SEQ ID NO: 63821 - DNA, 90 bp, Homo sapiens
ggcagaggcacttatgcttgtcagggtcgagctgtgcagttttagcgggtacaagatctaccccggacacgggaggcgctacgccaggac

SEQ ID NO: 63822 - DNA, 100 bp, Homo sapiens
tcaccatacacctgaaggaaggccggaacctggttgtccgagatcgctgtgaataactgaagtgaagtgatggactccgatttggagagtagtaagacgt

SEQ ID NO: 63823 - DNA, 75 bp, Homo sapiens
tcagtctgtgacctgccccttctctttacggttatatcctgtgttgtgacctcatggtttaagtgggaataaaga

SEQ ID NO: 63824 - DNA, 74 bp, Homo sapiens
cggcgtgcggcctagcgtctcaggtttggtgcacctcgatttggaggaagtagggcagggcccttatctggaaa

SEQ ID NO: 63825 - DNA, 90 bp, Homo sapiens
cgcacaagtgttatctctgtaccgggcgatgctgagagagagcaagcgtttcagcgcctacaattacagatgatgctgtgtatctggaca

SEQ ID NO: 63826 - DNA, 97 bp, Homo sapiens
taagaattcggaatgtctgaaagagcagcagaaacgctactttccaggacacattcagctaacgtattttagcaggtggagtgaggttgaagattcc

SEQ ID NO: 63827 - DNA, 95 bp, Homo sapiens
gcagcaaggatcccatcgatgtcaactatgagaagctcaaaactgacattaaggtggtcttccgggatccgtatcggtttaagaagcggacggag

SEQ ID NO: 63828 - DNA, 100 bp, Homo sapiens
ctgttcttcagtggaccaagcatgatgattcttcagataacttctgtgaagctgatgcaatggctgccatccggaagaaactggtgattgttggtgatgg

SEQ ID NO: 63829 - DNA, 100 bp, Homo sapiens
ccgggtttctttgatgcgacctcaggaaggagatgaggtggattctccacagttttcctcgtgcgtactcacggtggaatccgatgtgcattgaagcgaa

SEQ ID NO: 63830 - DNA, 75 bp, Homo sapiens
gtccgcggctggccgcgtgagtaggccaaagatgaagaggaagcctttctggattggagtgatgatgatgatgat

SEQ ID NO: 63831 - DNA, 96 bp, Homo sapiens
agccacctctctcaactgtatagctatcctctttttaagggctgggagaactcaggaagcctgagagaactcgatgccaccgcaacggtattggcg

SEQ ID NO: 63832 - DNA, 100 bp, Homo sapiens
catgcacctgaaaagacatgtgcgagaggaactcgtgtccctgaagccttgtaaagctgcggagctggttgccacccacttttctggacatattgaaacg

SEQ ID NO: 63833 - DNA, 100 bp, Homo sapiens
aggaagccatggactctaccaagtctgaacccctgaagggatcaccagaggaatgaatctgaagtctgctgcagtaaaacacagaaggctttaaaatgtt

SEQ ID NO: 63834 - DNA, 75 bp, Homo sapiens
cgtggagctccgccgccccgaaactttcaccgcgagcggaaaaatggctacaaacttcctagcacatgagaagat

SEQ ID NO: 63835 - DNA, 75 bp, Homo sapiens
gaaaggagaggatcccggagccgctggaagccaaacatctggaaagacaatctggctcagaaaccagttgctgga

SEQ ID NO: 63836 - DNA, 50 bp, Homo sapiens
cccaacctggtgcccggcccgcagccgcggcgagtcctttgcacatgttg

SEQ ID NO: 63837 - DNA, 100 bp, Homo sapiens
acaccccccctcccttgacctacccggtcatgagagaatgggaagaggcagaacgtcaagcaaagaacttgcctaaagctgataagaaggcagttatcca

SEQ ID NO: 63838 - DNA, 113 bp, Homo sapiens
gggtcctcgacctgcagggagcagaggggacagaggcaccaaggacctccaagacagattgtgacaccaggactgaagacaaggagtttcttcacaaggaagacattcatgaa

SEQ ID NO: 63839 - DNA, 75 bp, Homo sapiens
tgttaaattcagcccctcttccagataccatttggctttcggctgtgcaggctctcaccacacacttgttcatgg

SEQ ID NO: 63840 - DNA, 100 bp, Homo sapiens
gtcatcaaacatgattgaacgatctgtggtggaagcagcagtccaggaatgcagtcagtctgttgatgaaactatgagtggacctaccctatgagacgag

SEQ ID NO: 63841 - DNA, 88 bp, Homo sapiens
cttagatctgtcgtatgggccaggaccaagcctccgccctcagaaacctgagctggctggaggagaaagagaaggaagttgtcagtgc

SEQ ID NO: 63842 - DNA, 143 bp, Homo sapiens
gggacaaggaagaggaagaggaggagaggccggggacgagcccgcctccagctccaggccggtccgctgccaggctacgcccaggaggaacagctgaaagaagaggaggaaataaaagaagaggaggaggaggaggacagcgg

SEQ ID NO: 63843 - DNA, 90 bp, Homo sapiens
ctgggggtgcgcgcctgcgacctgcccgcctggaatgacagcccatatcaaggcggtgtattctttttgacaattcattttcctacagac

SEQ ID NO: 63844 - DNA, 100 bp, Homo sapiens
cagcctcgctatggctcccagcagcccccggcccgcgctgcccgcactcctggtcctgctcggggctctgttcccagatcactattatcttcaaagccca

SEQ ID NO: 63845 - DNA, 83 bp, Homo sapiens
gagaaggcacggagtcgccgcggagcgcagccgccaccggcacggccaggccagcatggtggaccacttacttccagtggacg

SEQ ID NO: 63846 - DNA, 99 bp, Homo sapiens
agaaagagaagctagaatctgccgtcttttgaagcaccctaatattgatcaacagtacaaattctgaagtttgtaaacttgctgatggtggtggtaagc

SEQ ID NO: 63847 - DNA, 100 bp, Homo sapiens
aagaacctgaagaagatggatgtgggtggcttatccgggttatttatgtccaaatgaatttattgctactcaaggtccactaccaggaacagttggagat

SEQ ID NO: 63848 - DNA, 100 bp, Homo sapiens
cttcgtggggcgtgaggagtgtgagctcatgctacaggtgaacttcacggtagaccagatccgcgccatcatggacaagaaggccaacatccgcaacatg

SEQ ID NO: 63849 - DNA, 98 bp, Homo sapiens
ctgggagcctgggctgcctgtgtgtcggctggatgctgccaggaacaccagcctcgctccggcctcttgcagtcctccctcatcaccctctacactat

SEQ ID NO: 63850 - DNA, 96 bp, Homo sapiens
attggagtagcgaggaatctgattccaagcaaaaaccaggtaaaaggattcttcagctctttgaaagaaaatggttctcagctccgttgtgtccaa

SEQ ID NO: 63851 - DNA, 100 bp, Homo sapiens
tgaagatgaacacagtattgaaatgcatttgccttatacagctaaagccatggaaaggacagaactgtaccgctctctttttggccagctccaccctccc

SEQ ID NO: 63852 - DNA, 100 bp, Homo sapiens
aaggattccaagtaactcttatttggctatgtggttgatgttgcagaatgatgagccggaggacttcgttatagctactggggaggtccatagtgtccgg

SEQ ID NO: 63853 - DNA, 100 bp, Homo sapiens
aattaaattttaaccatgagggaaatcgtgcacatccaggctggtcagtgtggcaaccagatcggtgccaaggacagtcattttgtttactcattcagcc

SEQ ID NO: 63854 - DNA, 100 bp, Homo sapiens
ctacagcggggtggtgaacctcagcaccgagaacatctactctttcaactacaccagccagcccgaccaggtaaaagtgcagttttaaagtgtctcctgg

SEQ ID NO: 63855 - DNA, 76 bp, Homo sapiens
tctttctgaagccgggagagggcctgtaggggcatttttagatgaattcactaactggtcaagaataaatcccaac

SEQ ID NO: 63856 - DNA, 100 bp, Homo sapiens
gcaagatacgagagcttttagcagagaaggcaactttttcctgtacctgtgaggagcagtacgtgggtactttctgtgaagaatacgatgcttgccagag

SEQ ID NO: 63857 - DNA, 83 bp, Homo sapiens
ctccatcctgcgggatgccttgaaccaggccacgagccaggtggagagcaagctcgggacgtgtacgaggaggccatccggac

SEQ ID NO: 63858 - DNA, 100 bp, Homo sapiens
cttctccgcggcgctccgggcccgggcggctggcctcaccgcccactggaggcgagtctggagccgggaaaaccgaaaacaccaagaaggtcattcagta

SEQ ID NO: 63859 - DNA, 51 bp, Homo sapiens
gcagtctgtggtgtgtttgctgttcccaggccgagtgtactacttcaacca

SEQ ID NO: 63860 - DNA, 87 bp, Homo sapiens
aacctccagagcaggagaccttctacgagcagcccccactgcactggaagatcaattcttttatcatccatactttagaggcagcaa

SEQ ID NO: 63861 - DNA, 75 bp, Homo sapiens
ggaaccagactgggggcgagctgagcacctgtagtcaatcacacgcaggtagcagaaggtcaagaaatttgtgtg

SEQ ID NO: 63862 - DNA, 71 bp, Homo sapiens
ggaagaactcgtcatgctctttgtagcgtggtgcttctgttgctcacagtgcaaggatgatgctgaaagga

SEQ ID NO: 63863 - DNA, 90 bp, Homo sapiens
cagaacattctcaaaattggcttcctgaatgacaaggtgaaaggtgtagcagtcactcggcctacacccacagcatcgaccttgtgaacc

SEQ ID NO: 63864 - DNA, 75 bp, Homo sapiens
cattctgcctgggaaagaaatgaaagtctttccaatgcagacaaaaagccttggcatccacgggaggaagaagtg

SEQ ID NO: 63865 - DNA, 50 bp, Homo sapiens
ccgccctggccatctaccatgtggtggtgtttggactctagaccatgtgc

SEQ ID NO: 63866 - DNA, 50 bp, Homo sapiens
cgccatacgcgctctccctgtttagtgtgccccctaccaccggagccaga

SEQ ID NO: 63867 - DNA, 100 bp, Homo sapiens
gaagattctgctccattttttctgattatggattctgttcagaaggaagccgaattttaagtcatcgttctaggatagctgtgccctcctggctgaagaa

SEQ ID NO: 63868 - DNA, 100 bp, Homo sapiens
ctggaacccttgaaggatgcaggtgatggtgttcgatacttgctcaggagcgattggttacatgggaacaagtgcctttgtccgaaaaatctatactaat

SEQ ID NO: 63869 - DNA, 78 bp, Homo sapiens
aatcgtatcgtatgtccgctatccagaacctccactctttcggaccaggaatcaccttcaagcctatgtcgtgaggct

SEQ ID NO: 63870 - DNA, 74 bp, Homo sapiens
caaggagacgctcctggcactgcagtgtgtaaatatgttgctgtggagctgaagtcagcctttgaggaaaccgg

SEQ ID NO: 63871 - DNA, 100 bp, Homo sapiens
aacgggtgaggctggatgacgatgatgaggaagaagaatttggtgttgatgattcttattctgaacaaggagcacaagacagtccgactcatctagagat

SEQ ID NO: 63872 - DNA, 50 bp, Homo sapiens
aagctgttgtctcagggagcacagaaatcatcgatgtgaggccagcctcc

SEQ ID NO: 63873 - DNA, 100 bp, Homo sapiens
gacgtctcagagaggctgtgcagctgctggaggactataagcatgggaccctgcgcccgggggtcaccaatgaacaggtggtacaagctgcactccaagc

SEQ ID NO: 63874 - DNA, 75 bp, Homo sapiens
gcctcagttggaagcagccgatccagcctgcggagcctgtggggcagtatcgtcagtgaagcaggagcatcaatc

SEQ ID NO: 63875 - DNA, 98 bp, Homo sapiens
tccactgaggatatgtgtcacactttggagtcggctggtcttagccctcagctgttgttggagaagctaaaacttacttatgaggaaaagtgtgaaat

SEQ ID NO: 63876 - DNA, 73 bp, Homo sapiens
gtaacaacctgcgtgggcaagagtttccacacctatgacgatgactcactggttgtgtggaaggaagtcgatt

SEQ ID NO: 63877 - DNA, 76 bp, Homo sapiens
ccgcgaaccaacggttagcggtggcaggggctgactgagagcgtctgcttgggtcttgctctgttgcctgggctgg

SEQ ID NO: 63878 - DNA, 101 bp, Homo sapiens
tcggagatctcctgccacatccagtccccaaagctccagagatagatccagtagagtgtttggtggcagataactctgtaacagtggcttggagaatgcca

SEQ ID NO: 63879 - DNA, 83 bp, Homo sapiens
gcagaaggtctctggagacatcttcagcaggttatggaaacaaaggacatgctttacatcgtcactgaatttgctaaaaatgg

SEQ ID NO: 63880 - DNA, 101 bp, Homo sapiens
gaaaatctccatcgaagggaacatcggcactgaaggatagcacagaagtagaaattgtggatgagaaaatgagaaaaaagatagaaccagaaaaatggcca

SEQ ID NO: 63881 - DNA, 118 bp, Homo sapiens
ctcagccgggatacctatgagtgcacctgtcaagtcgggtttacaggctcaacagcatgctgatggaagtggaagagcctgaagtcttgcaggactcactggatatatgttattcgac

SEQ ID NO: 63882 - DNA, 74 bp, Homo sapiens
ctacgcgtccctttgggtttagcacgatgagctcaatcggcactgggccgattacacctcaacaagaaggcaac

SEQ ID NO: 63883 - DNA, 100 bp, Homo sapiens
caatttctagctttgtaggagcatggcttggagcacttcctattccactggattgggaaagaccatggcagggtatgttagagcccaccaaggaaccact

SEQ ID NO: 63884 - DNA, 101 bp, Homo sapiens
tgtccagtggaagaccatctacatctcccacaggaagtgtcacacagcagtcaagtatgtcccaaacgtcttgatgctattgctgagattagagccatttg

SEQ ID NO: 63885 - DNA, 83 bp, Homo sapiens
ggaaccaaccggttgtttggtgaaacctaccccagagcctcccgcggcccacagagcacagttatctccagaagaagaagaga

SEQ ID NO: 63886 - DNA, 74 bp, Homo sapiens
tggcggacatcactttagaccctccacctaattgcagcttttcgctgtggcctgcagtttttaggcaacattgc

SEQ ID NO: 63887 - DNA, 83 bp, Homo sapiens
ctgtgttgtttcagctgtattagggctgcgatggatagtgctcggcttagtgctgccaaatcttctccaatgatggaaacaat

SEQ ID NO: 63888 - DNA, 89 bp, Homo sapiens
caaagtcaaagcagtgggagaggactatacaggctccaacccaagttccagtggttgtgtctcctaggaatcagcagttgcatacagta

SEQ ID NO: 63889 - DNA, 107 bp, Homo sapiens
cttgtcatctggccttcagttgctccgcagagtcttccactgtgggaaggctactaataaaattgccagaactaaactatcaggtaaaggttaaggcatcaattgac

SEQ ID NO: 63890 - DNA, 100 bp, Homo sapiens
atcacctcctccaagaccgtgctggtctttctcaacctcatcttctggggtggccattcagggcaactggggccttcgtcagttgccccttcattccgcc

SEQ ID NO: 63891 - DNA, 82 bp, Homo sapiens
acatgcgcaaagttctgagaacattacagcagatcaagaaatccagctcaagaactgcaagcacatgttgaccagataactg

SEQ ID NO: 63892 - DNA, 75 bp, Homo sapiens
ttaaggacatgagcaaatccttaaccaatgccgagcatgtcgggactccacctggtgaagaggggacgggaacac

SEQ ID NO: 63893 - DNA, 75 bp, Homo sapiens
gcagctaacttcacacgccgaaacctggctgactgtcttcggagtcgggagtatagtcatggccaacagcaaaaa

SEQ ID NO: 63894 - DNA, 100 bp, Homo sapiens
cacctctgtgaacatcactgactgcaagcctccctcaatttctggtggattggtgatagaaaagcagtgctttgatcccacctgtacacacattgttgtg

SEQ ID NO: 63895 - DNA, 82 bp, Homo sapiens
gttgcagctcccccagaagtagcacctgctcccaaatcatgggccagtaacaagcaaggttacgttatatataggattcgtg

SEQ ID NO: 63896 - DNA, 75 bp, Homo sapiens
aaaagcaagtatctggatcttttaccagctaaatttggagcttttctgcaattagataaaaaaggaccacaaaaa

SEQ ID NO: 63897 - DNA, 100 bp, Homo sapiens
gccaaggacacagaggctcagagaggacctcagcaatggagaatatccccatcatcacaactgtcatcactctgccgcacgtgattgtggagaatatccc

SEQ ID NO: 63898 - DNA, 100 bp, Homo sapiens
agctctgcgctgttctggacagctgcgacggcgcgctgggctggcgcggcctggcacaggttggagctgaaggagtgcccaggctgcggatggaggaagg

SEQ ID NO: 63899 - DNA, 89 bp, Homo sapiens
cagcctactggtgactcggctgcagcttctggtagatgaattgagagatgcagtgctgctactttttgcaaacaaacaggatttgccaa

SEQ ID NO: 63900 - DNA, 74 bp, Homo sapiens
gtctccttgcgatggagcatatccggacgaccaagtgttctaagaacggaagcatctgggctggatggaattta

SEQ ID NO: 63901 - DNA, 82 bp, Homo sapiens
cccagagcaaattgagacgtccggatgttggtgaccttcaaggatgtggctgtgacctttacccgggaggagtggagacagc

SEQ ID NO: 63902 - DNA, 100 bp, Homo sapiens
actccaaaatgagtctacagttataccaagtggatagtagaacttatctactggatttccgtagtattgatgggccgcgatgggcctcttggaacattgg

SEQ ID NO: 63903 - DNA, 51 bp, Homo sapiens
agcatatgaagttcgtgatattaagatccgagcagttggcagactaaaaag

SEQ ID NO: 63904 - DNA, 100 bp, Homo sapiens
aaataagctatatactttggttacctatgtacctgttaccactttcaaaagcactaacataaatagtgactctccagttggaaaaaagctgaccattcat

SEQ ID NO: 63905 - DNA, 100 bp, Homo sapiens
gcagctggagatgtccgagcccaaggcaattgatcccaagttgtcgacgaccgacagggtggtgaaagaaagttcaggagccctggaaaggagaaggaat

SEQ ID NO: 63906 - DNA, 75 bp, Homo sapiens
ggagaacaagttgctcccgttgagaagaggacgactgggtttggattcagaagaggattattatacaccacaaaa

SEQ ID NO: 63907 - DNA, 50 bp, Homo sapiens
ccgcccctcctggaagaaggaagaggaacctggccactgctccttggtcc

SEQ ID NO: 63908 - DNA, 75 bp, Homo sapiens
cagctggaaccatgacaggcatgttgtataaatgtacaggggcccctggtctgcccaggccttgctggtgttcag

SEQ ID NO: 63909 - DNA, 74 bp, Homo sapiens
gagccctggatggtgaagcgagagctgacaggaagcctgttctcaggtattgaattgaaacacctttgtttgga

SEQ ID NO: 63910 - DNA, 100 bp, Homo sapiens
ctattgaaagagagtatgcacagtaccaaaagaattggtggagctccatttgaagctgatgaggaaaattggcaaatctgttactgcagacagatgggaa

SEQ ID NO: 63911 - DNA, 100 bp, Homo sapiens
ttcttaacccctagaccggtttttagtccattgactatgcagcctaatgaccttattgcaatatgcaagcaacaagaatgcatcagaacatattgtgtat

SEQ ID NO: 63912 - DNA, 124 bp, Homo sapiens
taggagtgtgtgcagaaaaacaggatggatatgactctctgcagcgggatcaagctgtgtgcattagtacaaatggtacaggtttgcagattccgccagcagcacagcaagctctacagatgag

SEQ ID NO: 63913 - DNA, 100 bp, Homo sapiens
ggatgacatatttttggacctgaaacagaaattctggaacacctatatgcatccttcggaaagctctggacaagatcgcggaaatcaagtctctgttgga

SEQ ID NO: 63914 - DNA, 98 bp, Homo sapiens
tggaaactaattctaagccagactgctggagatcaccctgttctagtgtgtggaggcttccaccaggagaccagcatgttttggaaatttgatcttca

SEQ ID NO: 63915 - DNA, 100 bp, Homo sapiens
ccaacagacccaacagcattgacccagctctacggcgatttgggtttgaacatcctcatccctgtgttagaccggatccgatatgtgcagagtctcaagg

SEQ ID NO: 63916 - DNA, 75 bp, Homo sapiens
caggtttactggagtaggtgttagtaaggatgagctcaggtttctacaaaaatgtggtgaagattcaaaagcatg

SEQ ID NO: 63917 - DNA, 100 bp, Homo sapiens
gagagcgtgaccgagagcgcgaatatcgtcatcgttagaagcctcttatacctagaagtcccacaagcagcgttgccacgccttccagcaccatcagtac

SEQ ID NO: 63918 - DNA, 98 bp, Homo sapiens
ttgggagcggaggtttgaccacatgcagcagcattcagacacagctgtgatcagtccccaggatcccacgcttctcatcggctcctccctgctggcca

SEQ ID NO: 63919 - DNA, 95 bp, Homo sapiens
gctggagctgggggcaccgcagctcaccttgctgtggttggtggtggcgatggagactacagagcaccagagcgtgagaagcgccaccttcaagt

SEQ ID NO: 63920 - DNA, 100 bp, Homo sapiens
catcaactcctggcccttcctgctggggaaggtccggggaatcatcgatgagctccagggcaaggcgctcaaggtagatgatgagctggagatcaaggcc

SEQ ID NO: 63921 - DNA, 100 bp, Homo sapiens
tggtggcgggtcgccggagctctgatcgccgggaacccttgccgctgctgtcctgcgaccccaagcagggcttcataaacttcacttaccaaatacttca

SEQ ID NO: 63922 - DNA, 82 bp, Homo sapiens
caaatgtctgactctgactctcggactgagaaacgcaaggagatggtaacctgcacctcaatgtgacggcggaggccttcag

SEQ ID NO: 63923 - DNA, 75 bp, Homo sapiens
tggaacatcattctcaccaccagtctcttctctgaggccaagtgaggttggtgcagggaggaggtgcagcaaatt

SEQ ID NO: 63924 - DNA, 100 bp, Homo sapiens
tgtagtggacaaagatttccttgataagatgcatcatctgcagacatcagaaaagcatatcgtaagctttcactaactttacatccagacaagaataaag

SEQ ID NO: 63925 - DNA, 100 bp, Homo sapiens
cgggagtcgtagggaggacgccgggacacctggaagccgagaaatgattgcagccttcttcgctgagtctctgcccagtgtgggagggcagatcattccc

SEQ ID NO: 63926 - DNA, 100 bp, Homo sapiens
gaacagctccggtctacagctcccagcgtgagcgacgcagaagacgggtgatttctgcatttccatctgagatggagtcttgctctgtcccccaggctgg

SEQ ID NO: 63927 - DNA, 58 bp, Homo sapiens
ctgggtagttcgaggggtttttgcgctgagatctgtatctgtggacctgaatgttgat

SEQ ID NO: 63928 - DNA, 75 bp, Homo sapiens
aaaatcaaactggcagtgcgaatggataaaccagcacatatgaagcatagtggcgttcaggaattcatgaccttc

SEQ ID NO: 63929 - DNA, 82 bp, Homo sapiens
accgggggtgacagctccgggaccggccgaaaggcgaggaaccgtaagactttgaccccgacgcaggcttcagtgattgccg

SEQ ID NO: 63930 - DNA, 90 bp, Homo sapiens
gagcagcccgcggcgaccaagatcaggaacctgccctgacttcattagaggggtggtagactcggaggatctccctctaaacatatcccg

SEQ ID NO: 63931 - DNA, 100 bp, Homo sapiens
ggaacttgctcgtgccttagacaagaaactcctttccttaaaggtggcgacatgtctaagaatgtgagccagtcacagatggcaaaattgaaccaacaaa

SEQ ID NO: 63932 - DNA, 116 bp, Homo sapiens
actcttcgttcgattattagctttagtgaaatgggctaataatgctggcaaagtggaaaaatgtgcggttaacagaaccttctggatatttaacagatggcccaattaactataaa

SEQ ID NO: 63933 - DNA, 106 bp, Homo sapiens
acgacgttcccgaagcaaaagtccattcagaaaagacaagagccctgtgaggaactagaggctgctatccagccagatactagcctggtgtcagtcatgactgtga

SEQ ID NO: 63934 - DNA, 51 bp, Homo sapiens
tggaaccccgtcacaggctacaccagcagagacggggtttcaccattttgg

SEQ ID NO: 63935 - DNA, 99 bp, Homo sapiens
tatgtaacctggacaaacacatgtctaaagaagagacccaagatctgtgggaacagagcaaagagttcctgagaatgacagggagagagtttttctctc

SEQ ID NO: 63936 - DNA, 98 bp, Homo sapiens
tcgggaggaggccttgtccacagtgttgctaacaaccacaagcagaatttgatgacggtggcaaaccttggtgtggtgtttggacccactctgctgag

SEQ ID NO: 63937 - DNA, 75 bp, Homo sapiens
gttccacgctatgttgggagtgttcgctttcgaggaatcaaagatcaactcccactgaggacaaatggacctgta

SEQ ID NO: 63938 - DNA, 100 bp, Homo sapiens
ccccagtaccacggcccggcgcctgcactcgtttcctgcaggagagttctgtggctcctgatggatctgagaagatggacgtggaggatgaaaatctgtc

SEQ ID NO: 63939 - DNA, 130 bp, Homo sapiens
ggagacccagtctgagtgtctgtccccagagcctcagtttgtgcaggacaccgacatggaacagggactcactggggactgggctggcttagatgaagatgaagatgcacatgtctgggaggataattgg

SEQ ID NO: 63940 - DNA, 99 bp, Homo sapiens
gcacaagacaagaaccaaaggctgtgaaatggcccgtcaggcacaccaaaaattggctgccatctcaggaaccccagctcaaagggattgtgacaaggt

SEQ ID NO: 63941 - DNA, 101 bp, Homo sapiens
tcgcggagactggcttcccggtgtcggagcagcggctgtggcgcggcggccgcgagacaaatgctgtgcttcatgaagttaaaagagaggggctccccgtg

SEQ ID NO: 63942 - DNA, 90 bp, Homo sapiens
gcgcaaattcactccccagtacaaagaatgtgaaagatgttgcagaagtgttccagaagtggctgaagatagaaggaaaaaagtgccact

SEQ ID NO: 63943 - DNA, 76 bp, Homo sapiens
gcaagcaggcaacctgaatacagtctgaatcaccatcttattctcctcagcctcagccatttccacagaactcttc

SEQ ID NO: 63944 - DNA, 100 bp, Homo sapiens
ccagacccgaggatggagccggcgctgggcgctgcagctgctcccggcgcgtccccgaccagttggctgattgcaattctggcccaactcaaccctctct

SEQ ID NO: 63945 - DNA, 50 bp, Homo sapiens
ttatacaggcttcatatccctccagaattcccctctgtgccctgataaat

SEQ ID NO: 63946 - DNA, 96 bp, Homo sapiens
atcccgctgtgtgtctcgggcgttcagccgctcgctctccgccttccagaagggtcttactgaagtaacacaaagcttaaaaatggaaaatgaaga

SEQ ID NO: 63947 - DNA, 83 bp, Homo sapiens
gcccggcggctgctgctgctgctgacgctgctgctgcccggcctcgggactgtgccctgtccacggtgcctcctgcatgtcct

SEQ ID NO: 63948 - DNA, 74 bp, Homo sapiens
tcttgtttgtggatcgctgtgatcgtcacttgagttgctacgatggaagttaaagggaaaaagcaattcacagg

SEQ ID NO: 63949 - DNA, 74 bp, Homo sapiens
acacttcaagctaccaaccagaccaggacttaataaagcacaacttgttgaggaagacagagatgtcaatgacc

SEQ ID NO: 63950 - DNA, 98 bp, Homo sapiens
accacttcaagtatcatttgccgttctcagttctcctaataaatcatcaatctctgagaccctttcagcatttcagagaaaagctgccttcgtatgga

SEQ ID NO: 63951 - DNA, 96 bp, Homo sapiens
cgtgctcaagagggactggacggctgagctgggcatccgacacgtactgctggtatccatgtttctaaaggacaaagttcagaataataacggtcg

SEQ ID NO: 63952 - DNA, 83 bp, Homo sapiens
cctgtcgtccgttctctcaggctcccgttcaggaggatcccttttcccccagaaattactcaatgctgaaacctctcaaagtg

SEQ ID NO: 63953 - DNA, 75 bp, Homo sapiens
ctagaccggtttttagtccattgactatgcagcctaatgggtgtccgcaatgttgccagtgtctgtctgcagatt

SEQ ID NO: 63954 - DNA, 100 bp, Homo sapiens
aaccaaagatgaacgatttgaacaaagcgctagcaacttctaccaacaacagccagaagactttccgcgtggtggctggagaccataacctgagccagaa

SEQ ID NO: 63955 - DNA, 100 bp, Homo sapiens
ctgctgactgcgcacttggaatagtagcaggcggcggcggcggaacgccaggcaggtccggcctctttggcctacccccgttggctccgctgccccaggt

SEQ ID NO: 63956 - DNA, 80 bp, Homo sapiens
accgagagcgtgaccgagagcgcgaatatcgtcatcgttagaagtttcagctcctggcatcagctctattcaaatctggt

SEQ ID NO: 63957 - DNA, 75 bp, Homo sapiens
cctatttgaagtatttgacgaaaatagactggtctacatgttcaagtgcgtgtggcggtgctacagattgatcaa

SEQ ID NO: 63958 - DNA, 75 bp, Homo sapiens
ggagttcgtctcttacgtctgcggaagtgcagctgcctcagttcttagcgcagttggggttagacttggaggaac

SEQ ID NO: 63959 - DNA, 75 bp, Homo sapiens
gtctcattatctacttgagacctccagggtggtgtttcagctcctctgtagaaacagcagcctaggcagcccgtc

SEQ ID NO: 63960 - DNA, 90 bp, Homo sapiens
gctttcctttccctcagcacacagaggatgatgctgactttgatgaagaaaccatttctccaccgaaggaggagagtccgaaagcgcaaa

SEQ ID NO: 63961 - DNA, 100 bp, Homo sapiens
gggctccgccttcacgctcaccgagatcacatgtacatgaagacaatggaaagttatttccttcatccagtctacaaatacccaaggaccataatgcaag

SEQ ID NO: 63962 - DNA, 83 bp, Homo sapiens
ccggcgcgaagaggctggactcggattcgttgcctgaggtttactcctggcttgggggcattaggaagcactggaggctcttc

SEQ ID NO: 63963 - DNA, 100 bp, Homo sapiens
ggagaggccgagggtttgatgaaggtggaggcagcgcggctctcagggggggccctcagcctcttggccttgaacgggctgttcatcttgattcacaaac

SEQ ID NO: 63964 - DNA, 49 bp, Homo sapiens
tggacctccagatttccttactgagcaccactaacacgaagctcttctg

SEQ ID NO: 63965 - DNA, 87 bp, Homo sapiens
cccgggcgagcgggtgcgtctgccgcagagtcggcacctgaaggacatggaggttgttgaggcatcttcattaagctggagtaccag

SEQ ID NO: 63966 - DNA, 100 bp, Homo sapiens
ctgctgtctggagggggcggcgcggcaggagcgcgttgagggacttatggtttgaagtggtgaacatggatttttctcggcttcacatgtacagtcctcc

SEQ ID NO: 63967 - DNA, 92 bp, Homo sapiens
atagatacatggagcccatcagaatggcagatggcttatgaaccacaggtttactcctggcttgggggcattaggaagcactggaggctctt

SEQ ID NO: 63968 - DNA, 75 bp, Homo sapiens
gggtcgcagttcttgtttgtggatcgctgtgatcgtcacttgcatgatgccttcttctgtagagtgggcgctttg

SEQ ID NO: 63969 - DNA, 90 bp, Homo sapiens
ggctgcttttcactggagcctcttgggaccagaacatcctcttgcatcacttaagctgccactgcagagccccgccatggaagacacgcc

SEQ ID NO: 63970 - DNA, 101 bp, Homo sapiens
cgcggggactcggagctgagaggagctgctgctcggaccagcgcgaagaagatagtggtgagctggcaaagccaaagattggttttccagagacaacagaa

SEQ ID NO: 63971 - DNA, 98 bp, Homo sapiens
ggcagaacccactcgtcgctctgggtgccattggtgatggaagctgttttattgtccagcaagacttagactatgtcactgagctcactggggctgac

SEQ ID NO: 63972 - DNA, 90 bp, Homo sapiens
agaaacttccctccacacagatgagcggtgggggaagttgctgaagttatatttgtaggtgctaacccgaagaattcagtacaaaaccag

SEQ ID NO: 63973 - DNA, 51 bp, Homo sapiens
gttcctatggcctaatgaacaacttccaggctcaaagtctaactccccagg

SEQ ID NO: 63974 - DNA, 74 bp, Homo sapiens
gccacaatcttcaatgagtaaacatattcctgtggatccataaagaacccagccaacccgcagagggaggggag

SEQ ID NO: 63975 - DNA, 90 bp, Homo sapiens
ttgagccccatcgtggattccaagacatccctgctgagagagccaagataagtaatggaacatcatctgtgatcgtctccagaaagaggc

SEQ ID NO: 63976 - DNA, 82 bp, Homo sapiens
gcaagaaggcaacgacgttccatctgtggaaggacctaccaaccagatctattccagaggggagcttcaccacttcattgac

SEQ ID NO: 63977 - DNA, 83 bp, Homo sapiens
cccggcggctgtggaggccacgctcagctcgccaggcggcgcaggctcctgggctataacgaaaagccaataaatctacaaat

SEQ ID NO: 63978 - DNA, 80 bp, Homo sapiens
ctgagatcgtcaagtctcccagcgaccccaagcaataccgggtttggattcaggatttgttcctagtgtccaagattttg

SEQ ID NO: 63979 - DNA, 100 bp, Homo sapiens
tggaagtttgagagaagtttaagagaagaaatggacatgattgcctaaatcagccaaacacagggcagcagtgaggatgccagagttcatgggtttctag

SEQ ID NO: 63980 - DNA, 100 bp, Homo sapiens
atctacttgaaaaattaagtgaattgatttggttggaatgctcttttaccgatgctttaacatacagccactagggttgaagctttgagagaagcagcaa

SEQ ID NO: 63981 - DNA, 100 bp, Homo sapiens
cctagaacgctttgcgtcccgacgcccgcaggtcctcgcggtgcgcaccgtttgcgacttgattgttctctggggccggactgagaaatgcctgaaggag

SEQ ID NO: 63982 - DNA, 98 bp, Homo sapiens
gggggaccagtgccagcactgccagggcaggttcaagaaggatctgagtctctccctgcggagacagccctgaagaactcctgtaacgtcaagctggc

SEQ ID NO: 63983 - DNA, 100 bp, Homo sapiens
cccccaatgctgaccaaggaggagcctgttccagaactgctggaagctgagccagttctggtgactcagtccgcagctatagttccagtaagaactaaaa

SEQ ID NO: 63984 - DNA, 82 bp, Homo sapiens
gccaggtgtggcccgacgactgtgacgaggacgaggaggcagccacggggcccctgggttaacacagaaatctgcctcctgg

SEQ ID NO: 63985 - DNA, 75 bp, Homo sapiens
gagccactgacctgcctgagaggttccagataatgttaattcaagactctcgaagagaagcttcagtgcagatgg

SEQ ID NO: 63986 - DNA, 82 bp, Homo sapiens
gattttacacatccttgaaagcaagcactcaaggagttgcccctggtcctgtaattggacttcaggcaccatctactggtct

SEQ ID NO: 63987 - DNA, 90 bp, Homo sapiens
caggctcggagcgcggcacggagacggcggcagcgctggactaggtggcagcatggcacattacacttctgtggatttaaagtccttgcc

SEQ ID NO: 63988 - DNA, 75 bp, Homo sapiens
gtgttcagcctgaccccgcctcaccaatacacggctgtcacatggtgactgaagaacttcattccataacgtttg

SEQ ID NO: 63989 - DNA, 75 bp, Homo sapiens
ctgaagatcaggtatccaaaacaagaatggctttgactacttactaacatacagtgacaatccccaaacggtgtt

SEQ ID NO: 63990 - DNA, 75 bp, Homo sapiens
agaagactcttgtcacactaattgccaacaacaatggtggcaagtgcaggcagctgtcccggttatgccggaatc

SEQ ID NO: 63991 - DNA, 101 bp, Homo sapiens
tgggcacccacggagcctccggggctggatacatccagcggcggctgatcaagtccatggagtcagtgatggtgaagtacgacgcgactgtgcggaactcc

SEQ ID NO: 63992 - DNA, 101 bp, Homo sapiens
atgacaatgtagaggatgacttctctaatcagttacgatattgatgagtgtgcagctaagatgcattactgtcatgccaatactgtgtgtgtcaaccttcc

SEQ ID NO: 63993 - DNA, 96 bp, Homo sapiens
aatggcagcaaggtgggcccggacggcacaccctacgttaccgtgctcaagccgcttacaaacacgcagatggcaagaagattgatggcaggaggg

SEQ ID NO: 63994 - DNA, 100 bp, Homo sapiens
ggaatgatcatcaaacagctatggtgatgattagagacatactaatgtacatggagttgtatcccgcattttgtattcacaacggaggctccgaccttga

SEQ ID NO: 63995 - DNA, 98 bp, Homo sapiens
gatagaaacgtgttcgctgcccagaagaagggaaggcgcgagtgaggaaaggaggtactgtaggtgtaatcgaatcctggaccggaaaggggaagcag

SEQ ID NO: 63996 - DNA, 83 bp, Homo sapiens
ccaagggacaatggtcaccgtctcttcagctaaagccaattcaaatactttcaaatccactgtctacatacaatcagcaacta

SEQ ID NO: 63997 - DNA, 83 bp, Homo sapiens
cagcctacacagaacagagccaaatcaaaggctgtgaaatatcacctacggttcagttacacacggagaaattacatgtggac

SEQ ID NO: 63998 - DNA, 56 bp, Homo sapiens
ccccggtacatctgaaagccgggaaatggacccagtggcttttaaggatgtggctg

SEQ ID NO: 63999 - DNA, 74 bp, Homo sapiens
ctggtgagggtgatgttcgggaggaggccttgtccacagaactgataaatttcaaacggaagagagtggcagca

SEQ ID NO: 64000 - DNA, 75 bp, Homo sapiens
aattcgatttgcaaatcattcagtgaatcccaactgttatgccaaagtgagaaagatcagtctaaagaaaaggag

SEQ ID NO: 64001 - DNA, 96 bp, Homo sapiens
tcaaggcgtggccctcggaatgaaggcagcagcaataagagctaactgccatcaagagccatcagtatgtcttcaagctgcatgcccagaaagctg

SEQ ID NO: 64002 - DNA, 100 bp, Homo sapiens
ctgcccaaggccttcctgtcccgcgggaagcggcaggagccgccgccgacacctgaaggagtatgctgctgctgttccgctttgcgtcctcgctacaaac

SEQ ID NO: 64003 - DNA, 97 bp, Homo sapiens
gtgagaaagcaaaggctgctctgaagcgcacgacctccgactactttctccttcaagccatgctgcggatggtctcagcagttctccagtttggcaa

SEQ ID NO: 64004 - DNA, 100 bp, Homo sapiens
cttggcctggtgggcccagtcctcggtgcggcgcggccagagtatggtctccggcttgggagtcagatcttcgtaaaggaaatgacccgaacgggtctgg

SEQ ID NO: 64005 - DNA, 100 bp, Homo sapiens
tctttgctcaacaatgcaaggaggtagacatccttatcagcacagcacttattccagggctgatcccttatccaacatggttctaaccttcagtactaaa

SEQ ID NO: 64006 - DNA, 100 bp, Homo sapiens
gagtgcaagcagcttccaagccctcaaagtttgaaaggcaaaattctagtgaaggtgagccagccatgagagggtatcttgtggccatattcctgagtgc

SEQ ID NO: 64007 - DNA, 100 bp, Homo sapiens
cgccgccttgctgctgctcaaagctgctgccgccccttgggctaaaagggctctaattcggccacttccaagtcaacaaatgtttgaacatatgcagaag

SEQ ID NO: 64008 - DNA, 89 bp, Homo sapiens
gcaagcgggagtcggggatagtgtcatcgattctacgggaaaatgtgggccccctccacctattgacaatggggacattacttcattcc

SEQ ID NO: 64009 - DNA, 75 bp, Homo sapiens
ccaactcaccctcatccttgtcgaccatcatatcttatccaaaatcctcactatggatgggctcattgaggacat

SEQ ID NO: 64010 - DNA, 98 bp, Homo sapiens
caaagacccccgttacggagccagccccctccactgggccaagaacgcagaggactcatctgatgatgtgagaagagttcagaggagggagaaaaatc

SEQ ID NO: 64011 - DNA, 101 bp, Homo sapiens
aacatccaaggcaagactggcacccagcacagcagatccataatgagatggcatcaacatcagataaaggtgcccaaggaagaaatgacaagaaagattct

SEQ ID NO: 64012 - DNA, 75 bp, Homo sapiens
aaacctgcccaccccaatgaccagtaaatcggcatcagccttggtcatctataatttcctgagcctgtgctatga

SEQ ID NO: 64013 - DNA, 100 bp, Homo sapiens
gctgaagctgaggacacacccaggaaaagactcaggacggacaagcacagtcttcggaagatgtgtcttgctgaatcagggctctcttatccctgccatc

SEQ ID NO: 64014 - DNA, 100 bp, Homo sapiens
cttctacaaccagagctacagatttgaagaatcttttcagcaaatatgggaaggtggtgttgagttgatgtccgatgtccctattcgtcactcaaggaaa

SEQ ID NO: 64015 - DNA, 75 bp, Homo sapiens
ctcgccttggggaataatcactttattgacttcgacccccaccacttctggcagtggagcagcttctcggactac

SEQ ID NO: 64016 - DNA, 100 bp, Homo sapiens
ggggatctggcactgtggttcctgcatgaagacagtggctggcggtgcctggacgtacaagcatgttggagacttgggcaatgtgactgctgacaaagat

SEQ ID NO: 64017 - DNA, 80 bp, Homo sapiens
ctgctggttcattctggctgccatctaccacctgggggctgcgggagccaccaaagagacgtctcccacaacctgctccg

SEQ ID NO: 64018 - DNA, 49 bp, Homo sapiens
gatcgctgtgatcgtcacttggatctagtgaaaagccatttgatgtatg

SEQ ID NO: 64019 - DNA, 75 bp, Homo sapiens
gtttttcggatgatgccttcaatactacctttatttccaccatagggcggcgactggcggcgcgatggacctgac

SEQ ID NO: 64020 - DNA, 82 bp, Homo sapiens
tcggttctacctgggagaatccaccgccatccgccaccatgagggagacgctgttgcggcagctggagacgaaccagctgga

SEQ ID NO: 64021 - DNA, 90 bp, Homo sapiens
aaacaatagctcaaggaaacctttccaacacagatgtccaagctgccaacggatctgaaaagaacaattgctgtccttctggatgacatt

SEQ ID NO: 64022 - DNA, 82 bp, Homo sapiens
atggatacagatagtgaaaccagttctccaggtgaaatggaaacagatgagccagatgatgaatccagccaggatcaagaac

SEQ ID NO: 64023 - DNA, 87 bp, Homo sapiens
agatatcagcctgtctgactacaaagacgccacaggtcatcatctggatcatcccattctggttcccgttcaagttcaaaaaagaaa

SEQ ID NO: 64024 - DNA, 100 bp, Homo sapiens
acaagaacagtgggccacaggggccccgaagaactcccacaatgccacaggaggaggcagcaggtgtatcagttcctatccctgtgattggactgaggga

SEQ ID NO: 64025 - DNA, 75 bp, Homo sapiens
ggctagggaggacctcacttccccggggtgtaataatgttaactgaggtcagcccaaggccaaccccactgtcac

SEQ ID NO: 64026 - DNA, 82 bp, Homo sapiens
tatctggacatctggaacatccatgatccagacatttaatgtggatgcaccatgccagaccgtggaagatttaacgaatggg

SEQ ID NO: 64027 - DNA, 90 bp, Homo sapiens
tttgaagattctacagataaatcagatgcctgaaaacttcatgcctcctgttcccatcacatcaccaatcatgaacccgttgggtgaccc

SEQ ID NO: 64028 - DNA, 50 bp, Homo sapiens
gtcgtaggaggctgtcctgtctgcagacaaggcgcctctgtcgaagagcc

SEQ ID NO: 64029 - DNA, 75 bp, Homo sapiens
tggccttggtctcacctctcttcagggggggccctcagcctcttggccttgaacgggctgttcatcttgattcac

SEQ ID NO: 64030 - DNA, 75 bp, Homo sapiens
tccaaggggacgacagcgtcgttattggggtgacagtgctggctacaatgctatccagccggtggtggccaagtt

SEQ ID NO: 64031 - DNA, 101 bp, Homo sapiens
gccagcgagccgccgacccgccgagcaaaatgctatgtgatgatgatgccatttaaacgacaggctctagtggaatttgaaaacatagatagtgccaaaga

SEQ ID NO: 64032 - DNA, 75 bp, Homo sapiens
ctactgcacagttgcaccactgagaaggacagggacgtccagatcggtgacatcgtcacagtgggcgagtgccgg

SEQ ID NO: 64033 - DNA, 100 bp, Homo sapiens
gactggcattacaagaagagccagatcattctaaagaggtcagctttgtgaaagaagctatcatgaaggtgttgaacttggctctcatgtttgcagacgg

SEQ ID NO: 64034 - DNA, 90 bp, Homo sapiens
gtgattttcaaagctaattatgaaaacatttatcattggaatcagtggctcgtttgacagcaagtttgtttaccagcaaataggactcgg

SEQ ID NO: 64035 - DNA, 97 bp, Homo sapiens
aagtttattgcattccaacagctcattttatgttgcactctacacccccaagtgcatatgggtctgtcaaagcctatactaactttgatgctgagcg

SEQ ID NO: 64036 - DNA, 73 bp, Homo sapiens
ttaccaaacttattaataggaataccactattccaaccaagaagagccagggcttccgttacaagatgaggtc

SEQ ID NO: 64037 - DNA, 88 bp, Homo sapiens
acataagaccgttggttctgacgaggcacagcgtttcttgcaagaatgggaggtgatttgatgaaggctgctgcaggagagttcgcag

SEQ ID NO: 64038 - DNA, 100 bp, Homo sapiens
ctacaacccggccaagatgccggggcatggatggggaccgaggtttgggggttgtggagcctattccacgccctccctgaaaccgaaacttcattgcccc

SEQ ID NO: 64039 - DNA, 90 bp, Homo sapiens
ggacgacgacgacgaggaagaggaggtttctgagaaaatatttacaccagcagctccagttcataccaataaagaagatcctgctaccca

SEQ ID NO: 64040 - DNA, 82 bp, Homo sapiens
ttcgactcgctatgtccactaacaatatgtcggacccacggaggccgaacaaagtgctgagtactcaagaaaaatggggtta

SEQ ID NO: 64041 - DNA, 100 bp, Homo sapiens
cgctacgccctggatgagatgaaaatggacccaagtggggtcaaagtgctggaaacagcagaggacatccaggagaggcggcagcaggtcctagaccgat

SEQ ID NO: 64042 - DNA, 83 bp, Homo sapiens
gtccacccaccgccgccgcctcccaggtgctttgcaagatatcaccttgtcacagcagaccccctccacttggaaggacacgc

SEQ ID NO: 64043 - DNA, 74 bp, Homo sapiens
tgagttcaacatgatagagcagagtggaccaccccatgaacctcggttggatggcaagcatgtggtgtttggca

SEQ ID NO: 64044 - DNA, 98 bp, Homo sapiens
gttgggagcagatcgattttaccttggataccctgctttgggtgtgggaaccgctgagcagaacaccctcccccagcgggaaatccgggacacgcagg

SEQ ID NO: 64045 - DNA, 100 bp, Homo sapiens
gacactggcaggagaaaatcaaacagcatttgagattgaagagcttaataggaatgccggtggtggtgtgcacattgagccccggtatagacagttcccc

SEQ ID NO: 64046 - DNA, 98 bp, Homo sapiens
gaattacctcccttgacggctctaattttacttgaacaagtgtcattcaaggatgtatgtgtggacttcactcaggaagagtggtatctgctggaccc

SEQ ID NO: 64047 - DNA, 100 bp, Homo sapiens
cgaatcctccgctccgagcccgtccggactcccccgatcccagggccatgaagcccccaggaggagaatcgagcaatctttttggaagtccagaagaagc

SEQ ID NO: 64048 - DNA, 82 bp, Homo sapiens
taattgataacaccctgtaacagctgaatggctcgcccaagaacgatgacggacacaagactgaacagcctgacgaagagta

SEQ ID NO: 64049 - DNA, 82 bp, Homo sapiens
cccggggcaagagcaggagcccggcaccccccgccgacaaggaggagcccaaatcttgtgacaaaactcacacatgcccacc

SEQ ID NO: 64050 - DNA, 100 bp, Homo sapiens
ctcgatgtgctctgcgtgttgctgggacaaggtggagcagacacctcgcagtcaacaagacccggcaggaccaggactccccgcacagtctgaccgactt

SEQ ID NO: 64051 - DNA, 76 bp, Homo sapiens
tcagaacgccacttgcacaagatacaggggcataaggaaatggtggcaggcacttcctcctaacaagaaggaagta

SEQ ID NO: 64052 - DNA, 74 bp, Homo sapiens
agacattttcaatggaggtaaccatgcctgctattttaaagtgtcttcattggctgctctggcatggagctgat

SEQ ID NO: 64053 - DNA, 97 bp, Homo sapiens
tgtttctcagacacattcatttttacaccccagagacggggtcttgctacattgcccaggttggtcttgaactcctggcctcaagtgatcctccctc

SEQ ID NO: 64054 - DNA, 75 bp, Homo sapiens
atcgctcctgagaccggtccggcatacagatgtcagctctttccagacaatggaccaaatggtgtcaaatatgag

SEQ ID NO: 64055 - DNA, 75 bp, Homo sapiens
ggccctgtgggtgctgggcctctgctgcgtcctgctgaccttcgacataaccagtgcggtgcaatccaagcgaag

SEQ ID NO: 64056 - DNA, 100 bp, Homo sapiens
ggataatgcaattatgattgttgctatccagatgtaccagctctcgaggttgcttcatgattaccacagagacctctacaatcacctggaggagcacgag

SEQ ID NO: 64057 - DNA, 115 bp, Homo sapiens
gggacttccagacactggaaaactggatgctgcagacactgaacgaggagccagtgtatgaccacaagcgaatctcaaagttgtcagagcggctgatacagaatataatgaagag

SEQ ID NO: 64058 - DNA, 74 bp, Homo sapiens
cgagtgaggaaaggaggtactgtaggattgtcagctgacctctgtcctgtgtgcccagtggccccaggtgacgt

SEQ ID NO: 64059 - DNA, 73 bp, Homo sapiens
gaaacatggcggcggcgggtgttgtgagcgggaagatgtgtatatctcatgattgatatggagaaactagtca

SEQ ID NO: 64060 - DNA, 90 bp, Homo sapiens
ccaagaaattactgtctcaagtgatacgctaggtgacgtgatggttgacattgcaagtaacatcatgttggctgatgaacgtgtcctgtg

SEQ ID NO: 64061 - DNA, 100 bp, Homo sapiens
agaagatgccgcagcccgagtcccagaaggcggcgatcctgggctgcgggcaaggcgtattcacaggcctccactgggctctcagtaggtgggatttgtc

SEQ ID NO: 64062 - DNA, 75 bp, Homo sapiens
tcaacaagatgttgtcctgtgctggggctgacagaactaatgagaggctagcagaggtcaacaccaaacttcttg

SEQ ID NO: 64063 - DNA, 74 bp, Homo sapiens
ctttggcatcgtcggcctcaacatgaatggctactttcacaagcgagatgagcgcagtgtgaagagcacagctg

SEQ ID NO: 64064 - DNA, 75 bp, Homo sapiens
ctcttcgccctctgcctggccgcagcccgctgtctgcagaactgtttggattgcataagaaagtcatcaatatgg

SEQ ID NO: 64065 - DNA, 97 bp, Homo sapiens
gttctctgcgacccatagtgattgatggcagcaacgtggcgatgaggtattgttgcagcatctggcagtgagactgaggatgaggacagcatggaca

SEQ ID NO: 64066 - DNA, 100 bp, Homo sapiens
ggagtcaggcggagaccgcaggctgaccccgcagcggccgggctgtcgcggcccccacctcaggccatggatcatctgcagtcattcattgcagattgtg

SEQ ID NO: 64067 - DNA, 74 bp, Homo sapiens
tgatcctttcatctcagcctcctcagtagctgagactacaggattcaggagcagttccagaaaaatcccgacag

SEQ ID NO: 64068 - DNA, 75 bp, Homo sapiens
gtcctgcaagctccattcatgggcagcccaatggatccaatggtgatgaagagacctcagttgtatggcatgggc

SEQ ID NO: 64069 - DNA, 74 bp, Homo sapiens
aaaagcaagagtttctgtttagatgaccagtctcctggaccgagatctcactcagcagacagcagcagcccggg

SEQ ID NO: 64070 - DNA, 121 bp, Homo sapiens
cactgtatgtaggctgggagtgtctgctgatcacttggagtgctgtcccttggaacaggaggagtaagattgaggaatatattattcgagtgcaaagaggaatttctgtggaaaacagctg

SEQ ID NO: 64071 - DNA, 92 bp, Homo sapiens
cccactttctcggcgccgcggctcttttctaaaagtactaatagggatgccaaaggaaaaatatgatcctccagatcctcgcagaatttata

SEQ ID NO: 64072 - DNA, 90 bp, Homo sapiens
cacagtgaaaaccattttgcggggcagttgttataatgttaatccttcccctctaccaccggatatggctcctgggcagagttatcaacc

SEQ ID NO: 64073 - DNA, 97 bp, Homo sapiens
acggtgatcggggaagcatggggatccgggagaagcacccacaaaactagcatcctcctggaggagctcgggaaacatgatgaaagtattgaggggg

SEQ ID NO: 64074 - DNA, 100 bp, Homo sapiens
tgaatgagattgttacacaaattgatgcacaaaataagctggaaaaatctgaggtcagatgtaccaacagtaccagcaacaggccggctatggtgcacag

SEQ ID NO: 64075 - DNA, 90 bp, Homo sapiens
ggaacagaaagaaaagtccgaaagagctgaccagcatctcagacatgtcgaaaaagatgttttgatccctaaaataatgagagaaaaggc

SEQ ID NO: 64076 - DNA, 100 bp, Homo sapiens
tgctcatggcaaaagggaagctgaaaccaactcagaatgcttctgagaagttctttatagctccaagctctacagattcttcaaatatattgagaatagg

SEQ ID NO: 64077 - DNA, 101 bp, Homo sapiens
gctcgcttcacggaggcaatagctagccgagttcaaagaggccttttcattgtttgaccggaccccgactggagagatgaagatcacctacggccagtgcg

SEQ ID NO: 64078 - DNA, 83 bp, Homo sapiens
gtgccttcgcgcacggccccctggacctgcggccgcccgtgtgtgacgtcagggactttgaacatgtcggggatcgccctcag

SEQ ID NO: 64079 - DNA, 82 bp, Homo sapiens
cttctttcttcagccgaggccgccgccgcctctccttgctgcagccatggacacatgattaagtaccggtacatcccgttca

SEQ ID NO: 64080 - DNA, 50 bp, Homo sapiens
tcagccttcccagtagctgggaccacagtgggaaaggggaacctgtgact

SEQ ID NO: 64081 - DNA, 96 bp, Homo sapiens
ggcggaggcactcgcgcgggggcccgtggaccgggagcccgtggaccgggagccggtggtgtgccaccccgacctggaggagcggctgcaggcctg

SEQ ID NO: 64082 - DNA, 98 bp, Homo sapiens
cgctgggagagaggtacctctccttttccctctccctttccctaaggtattatagctgcaaatgtccttgtattctgtttatggagagtaccttctct

SEQ ID NO: 64083 - DNA, 102 bp, Homo sapiens
ccagatggtgctttcagctccccacccaggcctgagcgaagcccacaaccccgccgggcacatgtgaaagggacacgtcaaaggctacatatcgcatcagca

SEQ ID NO: 64084 - DNA, 100 bp, Homo sapiens
ggaagcgaagccgaaaaaggcagcagcgaagcccctggcaggttctgaggatggtgcctgggcacagaccttcccggccagcgtgctgcagttcctcagc

SEQ ID NO: 64085 - DNA, 82 bp, Homo sapiens
gtatcgtatgtccgctatccagaacctccactctttcggtgtcgtgaaaactacccctaaaagccaaaatgggaaaggaaaa

SEQ ID NO: 64086 - DNA, 146 bp, Homo sapiens
gtattgcaatcatggtgcagaaataccagtccccagtgagggtgtacaaatacccctttgaattaattatggctgttttgacaagcttgcatcatgcgtgagtataagctagtcgttcttggctcaggaggcgttggaaagtctgc

SEQ ID NO: 64087 - DNA, 75 bp, Homo sapiens
agccctggggtgttccccgtcactgtccctggtacctgacagtgtaaagaaggagctcctacaaagaataagaac

SEQ ID NO: 64088 - DNA, 75 bp, Homo sapiens
aggagctgaaagcctctaacacccacagatccctctatgactgcaatgtgagcatggagcagatccaactaaaaa

SEQ ID NO: 64089 - DNA, 74 bp, Homo sapiens
gtgaacagtacgcagtgaatgttgtccattcaactgcaattgaatattggagttgagcagattcgagttgtaca

SEQ ID NO: 64090 - DNA, 90 bp, Homo sapiens
gagtcttgtccacagctggcaaattcagtgcagatcaggttgggtatctacagccattggttgctgttcaggtcagctttgctcctaaca

SEQ ID NO: 64091 - DNA, 75 bp, Homo sapiens
aaaaggcattgaggaactcaatcaaaccagtattcttttcacacaggtgacttaagagattaaaattaatttggt

SEQ ID NO: 64092 - DNA, 101 bp, Homo sapiens
ccgaactggcccaggacaagtacgtggccgacttcttgcagtgggttggctagagatttactacatccgtccttggaagaggaaaagaaaaaacataaaaa

SEQ ID NO: 64093 - DNA, 74 bp, Homo sapiens
ttgtccatctgtaacttcattaagacttatctaaaaacagactggttgaagttccaatggaattgtgccatttt

SEQ ID NO: 64094 - DNA, 100 bp, Homo sapiens
tggcaactttcctggcccttttgaagaggaaatgaagggtattgccgctgttactgatatacctttagcaaaccagtccagctacgggggcccagccagc

SEQ ID NO: 64095 - DNA, 98 bp, Homo sapiens
gctacgctatgtggcgaatatcttcccttacaagggttatatatggaattatggtaccctccctcagatgctattaactgagtacttggatatgaaaa

SEQ ID NO: 64096 - DNA, 97 bp, Homo sapiens
cgacggctggaagcgcttcctggatgagaagagcggcagtttcgtgagcgacctcagcagagtttaccttccagcagccctacgaccaggcccacct

SEQ ID NO: 64097 - DNA, 83 bp, Homo sapiens
agaccgcgcgcagggcctgcagcgggagctggacggcgagcgcgagcggcgcgagaaagagaagacagactgctgctttggac

SEQ ID NO: 64098 - DNA, 90 bp, Homo sapiens
tacagtgaactctatagattctgctggtatacagctacatccaggagagaatgctgacagtcctgcagaaatatcgacagtatatggcag

SEQ ID NO: 64099 - DNA, 98 bp, Homo sapiens
gccgccgccgccgccgccgccgcccgctccgccgccgcccgcccggggctcatatcagtacccatctctggaccagcttgcagacatgatcccttgcg

SEQ ID NO: 64100 - DNA, 100 bp, Homo sapiens
gctttacaagaaaaccacctaaatatgaaagattcatcaggccaatgcccaggccattcagcccacctgtaacttccaacaccagcccacctcctgctgc

SEQ ID NO: 64101 - DNA, 99 bp, Homo sapiens
gttagtgggagatccttgttgccgtcccttcgcctccttcaccgccgcagaccccttcaagttctagtcatggctggcctgctgtctgccttgggctcc

SEQ ID NO: 64102 - DNA, 50 bp, Homo sapiens
ctgaaatcaagtccggatgaaggaagttccaggttaaaggcagcctcagc

SEQ ID NO: 64103 - DNA, 100 bp, Homo sapiens
gaccccttcgctttcatccacaagatccggcccatagccgagcagactggcatctgtaaggtgcggccgccgccggctgctttgtaccgcctcagtggag

SEQ ID NO: 64104 - DNA, 90 bp, Homo sapiens
agtcgtagggaggacgccgggacacctggaagccgagaaatggttagaaaatggatttctgactggaatctcaccactgaaaaaaagcac

SEQ ID NO: 64105 - DNA, 75 bp, Homo sapiens
gtttgattttaatgtggataaagccgtgcaagcctttgtggatgatattgatgatgttaagaagttcaaaccggg

SEQ ID NO: 64106 - DNA, 82 bp, Homo sapiens
gagtaattgcctgctttgattccctaaaggcacagatgaggagagcatcctgactctgttgacatcccgaagtaatgctcag

SEQ ID NO: 64107 - DNA, 101 bp, Homo sapiens
gagctgagtggttgtgtggtcgcgtctcggaaaccggtagcgcttgcagcatggttcgatacaagaggctgttttcctagcgtggcttgctgcctttggta

SEQ ID NO: 64108 - DNA, 97 bp, Homo sapiens
gaaggcatatgttcgactggctcctgattacgatgctttggatgttgccaacaaagtgtggatgaggtcaccattgtcaacattttgaccaaccgca

SEQ ID NO: 64109 - DNA, 101 bp, Homo sapiens
gaatccctgtctgggtgcggactcggagaagccctcgagcatccccacaggattcttacagaagcagagattgatgctcaccttgttgctctagcagagag

SEQ ID NO: 64110 - DNA, 100 bp, Homo sapiens
ctcggaactcgggcatcatggcctcagtggtctcggaaagagggtcgtggtcccgcacggatgcgcttgttgggagaaaccttggagattcacggcaagg

SEQ ID NO: 64111 - DNA, 51 bp, Homo sapiens
ggatcttccaggagcccacggagccggtgacaaccaaagccaagcaactga

SEQ ID NO: 64112 - DNA, 87 bp, Homo sapiens
gacatgaaaaaaatgcattatgtggaccctgaccatgtaaaggtgctgtacttctttgcagtatacaaggactagcagttaatattg

SEQ ID NO: 64113 - DNA, 96 bp, Homo sapiens
acatttctggctctgaaggcgaacgcttcgctggccatttaggagctctgctcaaagccagacgggagcaccatcatgtacggggcgctgctgctg

SEQ ID NO: 64114 - DNA, 100 bp, Homo sapiens
ctacatttatagtcattgtcgaaaggtaacagttaacctcttccacatgcagcatctgcaggctgcttcccttgcagacagtttacagtctctctgtgat

SEQ ID NO: 64115 - DNA, 50 bp, Homo sapiens
tggcgatttctgagtgttccggaatgggaatggaaggcataggatttgga

SEQ ID NO: 64116 - DNA, 90 bp, Homo sapiens
caccgtcctgccccccgacgagagcggccggccccgcaggtcttgccgccttggtagcttgctcctggtatggccatcagattgtcacag

SEQ ID NO: 64117 - DNA, 98 bp, Homo sapiens
ccattttaccagtgtgcagaagttctcgaatcattctttgtacagaaattgaaaggcttcaaagctagcagggttggattgagattgttggatgtgct

SEQ ID NO: 64118 - DNA, 50 bp, Homo sapiens
ccaggacccactggaagcctagaaatgatgatccacaagctggcagcccg

SEQ ID NO: 64119 - DNA, 74 bp, Homo sapiens
agccacgcatctgaccttgttgtctctgctttctatccgtcaagatgataaagtcgtgtgcccgagaaccaaag

SEQ ID NO: 64120 - DNA, 75 bp, Homo sapiens
ggagttttacaaaaaggatgggcattgtctgcctcatcaatattatcgggatccattacaacccaactgtgtggc

SEQ ID NO: 64121 - DNA, 82 bp, Homo sapiens
gcgtaactttctcccttgatccgggagtctttccactggatggagttttaacattgaatgcggagaacactaattatgccta

SEQ ID NO: 64122 - DNA, 90 bp, Homo sapiens
tgtgcctcaacaaccatttctaagtgaaactatgttccaacttcctgtcaacaatcttggcagtttaagaaaagcccggaaaactgtgaa

SEQ ID NO: 64123 - DNA, 100 bp, Homo sapiens
gcctcatgatcacaaacatttaatgccaacccaaattatacctggttctgcaggtgcagttaataaccaaagcaggccacaaagccacagcagtggagaa

SEQ ID NO: 64124 - DNA, 98 bp, Homo sapiens
gtcgctccatttcgaattctgcttcaagttcccggctcccaggtttattctcccatagcatgtggcatttattaatacagcaaaagaaatttatgaaa

SEQ ID NO: 64125 - DNA, 100 bp, Homo sapiens
gtcatctgtcagcatctctttccctaatcgactctcatctggtggtgcagagatgtttcatgtccaggaaatggtgtattgacttgaagctgaaagaaaa

SEQ ID NO: 64126 - DNA, 74 bp, Homo sapiens
cggcggctgcggtcgaagaaggggacgccgacaaggttcggagtgttcagtggacacacgcttggcagtgtaat

SEQ ID NO: 64127 - DNA, 82 bp, Homo sapiens
gtagactgttcaatgcaacaaggcaagggccttgatacaaagcatgcttgaaaaatgcgatcggtttctctggtcccagcag

SEQ ID NO: 64128 - DNA, 75 bp, Homo sapiens
agcctccgcggccgagagtgcagcgagtttaagaaaatctacgaagaaacgcagtgagtctccacctgctgagct

SEQ ID NO: 64129 - DNA, 98 bp, Homo sapiens
gccaacttccattgaacttcccagcactcgaaagggaccgaaatggagagcaaaggtgagaagccttataagtgctcatgggagggatgtgagtggcg

SEQ ID NO: 64130 - DNA, 95 bp, Homo sapiens
tgctattcttatagaaaatatggatctttacatgttgaatccttgcagcactaaaatttgggagaccctgcagcgtcatggtgctggagctggtg

SEQ ID NO: 64131 - DNA, 74 bp, Homo sapiens
ggtccaggacacctaccagatcatgaaggtggagggtgcacattcaggttcccgagcacaaacatcaagataac

SEQ ID NO: 64132 - DNA, 50 bp, Homo sapiens
cccctttccagagagccagaaagaagctggagtgcaatggcgcaatctcg

SEQ ID NO: 64133 - DNA, 100 bp, Homo sapiens
tcaggagtggtgacgcctaagctatcactggacatatcaaggacttcactaaattagcagtgtgtgctgtatttgtgggccttgaaaattctctacccca

SEQ ID NO: 64134 - DNA, 98 bp, Homo sapiens
ccatagagagtctccgggtccctggaaaggtatggcacagtcacaagggtgggtgaaaagatacatcaaggccttttgtaaaggcttctttgtggcgg

SEQ ID NO: 64135 - DNA, 75 bp, Homo sapiens
agctgtgttgaagaaataatccgggttacggcctccgctgccacagggccatcatcaccatctgccggctcattg

SEQ ID NO: 64136 - DNA, 100 bp, Homo sapiens
ggagctttggacaggaggtcatacagctgatactacccacccccggttacgcctgtcacataaagggtacagctcgcagaaagaagaaggtggtacatag

SEQ ID NO: 64137 - DNA, 100 bp, Homo sapiens
gggaaatggctgcgagaccctagaggcctgcgagactctgacctgtttttgttggacacccgtgtagtatgggcctcagaagaaggctggctggaatttg

SEQ ID NO: 64138 - DNA, 98 bp, Homo sapiens
caggagtccagggctggagagaaaacctctgcgaggaaagggaaggagcaagccgtggtgatgatccaatgccctttgacattaaagctgagatgaca

SEQ ID NO: 64139 - DNA, 100 bp, Homo sapiens
ggcgactcagcgccccagagcccccttgtgcccatcaagatggaggacaccacccaagatctgactgcagccatgagcagcaatgagtgcttcaagtgtg

SEQ ID NO: 64140 - DNA, 83 bp, Homo sapiens
ggagctgaaacagaacctgtccaggagctggcatgacgtgcaggtctctagcgcgggtcgggccccggctcagtggtcccagg

SEQ ID NO: 64141 - DNA, 100 bp, Homo sapiens
cgtggttcagaaatgcattgaatgtgtacagccccagtctttgcaatttatcatcgatgcgtttaagggacagtatgggaattctggtggtcctctggtg

SEQ ID NO: 64142 - DNA, 75 bp, Homo sapiens
gtcagccttcccagtagctggaactacagcctctcatccatgtctttgcaaagaacctggtagcgtttgtgtctc

SEQ ID NO: 64143 - DNA, 76 bp, Homo sapiens
aattctatctgtgtgggtttcaagagagactactacctaataaggatggactctcgtcctgtcacccaggctggag

SEQ ID NO: 64144 - DNA, 90 bp, Homo sapiens
ctcgagcctggggtcggcggagacagctggtgtctgaagccgctcgcgcccagcaacacagtcactcctggcggcaaaccaaacaaaacc

SEQ ID NO: 64145 - DNA, 74 bp, Homo sapiens
gggggtcagccccccgcccggccagccgccccgtccgggagagggagctgaaggaccaacttcaggcccttcaa

SEQ ID NO: 64146 - DNA, 75 bp, Homo sapiens
cagcaagaggcaaaacttcggacatagaggccaaccaacctttggagatgagaactggactgatgaccaactgct

SEQ ID NO: 64147 - DNA, 82 bp, Homo sapiens
acagagggttctgtggaggacataagggagatagtgcagagactgaagtccacaggtcctggctaccctgggaagagacaag

SEQ ID NO: 64148 - DNA, 90 bp, Homo sapiens
gctcttcctgaggttttcctaagccatcccctggcggaaccgcccccaggtggatcatccatgccatggagtatgaacttcagatccgtg

SEQ ID NO: 64149 - DNA, 74 bp, Homo sapiens
tagctaagactccaggacacccctgaagccgagaaatggtgatctttagacagtgactgagtatggatcatttg

SEQ ID NO: 64150 - DNA, 51 bp, Homo sapiens
cattgccttcctgtgtgggaaaaccctggcctccccatggccacccatgga

SEQ ID NO: 64151 - DNA, 82 bp, Homo sapiens
tccctcgtgaagaacctgaaggacacactagacaatgcagatcttcgtgaagactctgactggtaagaccatcaccctcgag

SEQ ID NO: 64152 - DNA, 98 bp, Homo sapiens
gaaaacggcaccttttcattagtgctaggcagcaaaggcattcatgagcttcggagcagcaccagtgccctgcaccatgccctagaggagtcggcttc

SEQ ID NO: 64153 - DNA, 75 bp, Homo sapiens
aggaggtcctgccgtccatgcggaagatcgtcgccacctggatgctggaggagggtgaggacaaaatcttcttaa

SEQ ID NO: 64154 - DNA, 75 bp, Homo sapiens
ccgacccgggccggaccgaccccaggcggcggcagaggtggaggagacactgaagcgactgcagagccagaaggg

SEQ ID NO: 64155 - DNA, 76 bp, Homo sapiens
gggccccgggacctgggctgggaacccgcggtggagcgggacacgaacgtggtggtctttgggaagaagcttcctg

SEQ ID NO: 64156 - DNA, 100 bp, Homo sapiens
ggggcttcttgtggccaacttcagagcctgtcaccaggaaagttactccacaggatccgctgaacataggatgttgccacaaaatctacctcgtgtattt

SEQ ID NO: 64157 - DNA, 75 bp, Homo sapiens
tgggggccacctgccagctgggctgcccaacatacatggatgttgtcattgtcttggatggctccaacagcatct

SEQ ID NO: 64158 - DNA, 88 bp, Homo sapiens
tcagcaagactggagtccctgatggaattatgcagtttattaagggagtggacatccgccataacaaggaccgaaaggttcggcgcaa

SEQ ID NO: 64159 - DNA, 83 bp, Homo sapiens
tccggcctttggcggagaaaaccggcatctgcaaaattcggccgcccaagtaagacctatacccaccggcgcctgaagttcct

SEQ ID NO: 64160 - DNA, 82 bp, Homo sapiens
actttagaccctccacctaattgcagggggatatgagactttctactcggaatatcctgagtgttgcgtggatgtaaaaccc

SEQ ID NO: 64161 - DNA, 100 bp, Homo sapiens
ggaaagtgatgtccctctgaaaactgaggaatttgaagtgaccaaaacagcaggtgacaacatccgggaattcttgctgagcctcagatactttcgaatc

SEQ ID NO: 64162 - DNA, 97 bp, Homo sapiens
catgtatttgtggcttaaactcttggcatttggctttgcctttctggacacagaagtatttgtgacagatgccagaggaacaagcattctgtgtttt

SEQ ID NO: 64163 - DNA, 75 bp, Homo sapiens
ctttggtgccccccgtgtacactgtcagccagctcttagcttctgccagctatgatgacacagtgaagctgtacc

SEQ ID NO: 64164 - DNA, 75 bp, Homo sapiens
tacatgaaaagtctgttaaaaatctttgcgattggggaccacaaattcagtgcccaccggattgtcttagcagcc

SEQ ID NO: 64165 - DNA, 74 bp, Homo sapiens
ccaatggcatttgcaaaacctaaactgcagcgggttcaaggcagcggaggaggagaaagagatggacctcccgg

SEQ ID NO: 64166 - DNA, 100 bp, Homo sapiens
ggccctatcaggacatggagtatgaaagacggtgcccgcctggctgggtgggtgagcggtgtcagctggaggacccctgtcactcaggcccctgtgctgg

SEQ ID NO: 64167 - DNA, 100 bp, Homo sapiens
gtttgccaggagagaaaggtgaaaggggtactggatcttcaggacctcgggggctgcctggccccccaggtggtcaagaagaatacgtcttatcttatga

SEQ ID NO: 64168 - DNA, 100 bp, Homo sapiens
tcccaaggtgctgggattacaggttggcgttgcaaacgctatggtcaccgaacgggtgacaaagaatgccctttctttatcaaaggcaaccaaaagttag

SEQ ID NO: 64169 - DNA, 95 bp, Homo sapiens
tatgtggacgtgacttacataggtggatatcatccagtgaaaattggagacctcttcaatggccggtatcatgttattagaaagcttggatgggg

SEQ ID NO: 64170 - DNA, 99 bp, Homo sapiens
gcggggcgccggctccatggcgaccgggctcggggagccggtctatggactttccgaagacgaggtatcagcagatgttgcacacaaacttggtatacc

SEQ ID NO: 64171 - DNA, 99 bp, Homo sapiens
cagggtcttctaagtcagagacatcaaaacctggaccttctggattacaggccaaattagcaaagtacagttgctgtgttgcagaatgttaaaaacctc

SEQ ID NO: 64172 - DNA, 50 bp, Homo sapiens
ccaatgttggtgctggcaaaaagagttctagtaactcatgttctgtactt

SEQ ID NO: 64173 - DNA, 74 bp, Homo sapiens
gcaatgcctcctgcaccaccaactgcttagcacccctggccaaggccatcatcaacagcactgtcactcccaac

SEQ ID NO: 64174 - DNA, 75 bp, Homo sapiens
tcagtggttgaatcataggcaagtggtgtgtggcacaaaatgcaacacgtatgacttctctttggaaaagaaaac

SEQ ID NO: 64175 - DNA, 82 bp, Homo sapiens
gccgcgcggactgaaggagactgaaggtccggcctctttggcctacccccgttggctccgctgccccaggtcgatgagtccc

SEQ ID NO: 64176 - DNA, 76 bp, Homo sapiens
ggagcccggccccggggaactagggagcgtctccggctgcacagcgctcaggcatgtcgacatcagtgtccgtttc

SEQ ID NO: 64177 - DNA, 80 bp, Homo sapiens
aaagtggcatgatcctttgcagaaatgactacattaggttatgggtgctacatgtgtgctttcagagcagtagtgtgagg

SEQ ID NO: 64178 - DNA, 107 bp, Homo sapiens
aggcgcagtatctgccgtcccagtcccagcagaggtaccagccgcagcagaagctcattcacacagaagacccatttaatgatgaacatcaggagaggcaagaggtg

SEQ ID NO: 64179 - DNA, 98 bp, Homo sapiens
ggaaaaggaagagagagctgaggcagacgatgtaagatctgctgttacttcttgctgtgtgaccttggtttcttatctcagtcatcactatggtgctt

SEQ ID NO: 64180 - DNA, 76 bp, Homo sapiens
ggtttggtcaatctacctggaaaaacaactggaaggaagagggaatggtttaaaatagaagacgccataaaagtgc

SEQ ID NO: 64181 - DNA, 74 bp, Homo sapiens
ccggaggaaagatggaagactaccaggctgcggaggagtgggctcgggatgagtttgaaggcctcttcaagcag

SEQ ID NO: 64182 - DNA, 100 bp, Homo sapiens
cgtccgagtctccgccgctgcgggcccgctccgacgcggaaggcatttccggagagttcttttgaagtcacttcagaaggatctacatgaggaaatgaac

SEQ ID NO: 64183 - DNA, 88 bp, Homo sapiens
aatttctggaaacaaaagaacagttgtacaagttgcaggatggacacagcattgttggttttgccatgtactattttacctatgaccc

SEQ ID NO: 64184 - DNA, 98 bp, Homo sapiens
cgctcccctcgcccgcccgggccgccagggcgcggatggcgtcggggcgccccgaggagctgtgggaggccgtggtgggggccgctgagcgcttccgg

SEQ ID NO: 64185 - DNA, 100 bp, Homo sapiens
gacggcgtgcgagagactcacgggacgcgacgcgccccgcctcccccgtccggtccctctctccacgggcttcctcagccgccgcctcaagggctccatc

SEQ ID NO: 64186 - DNA, 100 bp, Homo sapiens
ttttgtcgtttcccagcgctgcgcaggacttctcctggcggcgctgcggatccagggggtcggctgccaggtacaggcctggcgtttccttgaccatgca

SEQ ID NO: 64187 - DNA, 51 bp, Homo sapiens
cagagttgcgaccgcgcggcagagctttcagcagaggccaaggcagcattg

SEQ ID NO: 64188 - DNA, 75 bp, Homo sapiens
cgcggacagcgggctggagcctgacgagctggcggccctgggcgctgcctatggcacagccaagagcggtaccgg

SEQ ID NO: 64189 - DNA, 90 bp, Homo sapiens
gaaataaatcggctggccctactgcaatctactgcactcgaggtaccattaggcttctcagctccaccagatggcctcccccaagtcccc

SEQ ID NO: 64190 - DNA, 75 bp, Homo sapiens
tgttgtcctgtgctggggctgacaggatgctgcagctgattcagagtaggctacaagaagagcattcacttcaag

SEQ ID NO: 64191 - DNA, 90 bp, Homo sapiens
agcttggctacgtggtgcaagagtcaggccagaacttcagcaccctggctgagaagatcactgtcgtcttcctgaaagatgagaagtacc

SEQ ID NO: 64192 - DNA, 90 bp, Homo sapiens
agtgcccttgtggcgaatggggctcacgtcgagtatctagaagagcagaagacagagaatggaaaagataaggaacagaaacaaacaaat

SEQ ID NO: 64193 - DNA, 123 bp, Homo sapiens
cgggaccataagggcttaactcatatatttaacccccctccaaaaagcctccgaccagggagaccttccatcctcctccacctgttccacccagaggacgctgattccacctcctaaaacctg

SEQ ID NO: 64194 - DNA, 74 bp, Homo sapiens
ggttttcctcgcagaacgcctttatgcagaaggtagaagatgacagattattgaggttgtcccaaaagaagttc

SEQ ID NO: 64195 - DNA, 82 bp, Homo sapiens
caaaggccagccctgcaggctccaagcaacaaattgtggctactaatttgccccctgaagatcaagatggctctggggatga

SEQ ID NO: 64196 - DNA, 75 bp, Homo sapiens
cgggaagcgtcgggattaggtgaaaaatgccgggtctaagttgtagattttatcaacacaaatttcctgaggtgg

SEQ ID NO: 64197 - DNA, 82 bp, Homo sapiens
cctcacagaagtcccggcgagaggagcatcagatccatgctgctgctgactcggagccccacagcttggcacaggctctctc

SEQ ID NO: 64198 - DNA, 74 bp, Homo sapiens
gcggctccaacggggccttctacaaggtccctgtccttcgaatggtggaaggtgataccatctatgattactgc

SEQ ID NO: 64199 - DNA, 100 bp, Homo sapiens
tgagatgcctccacacatctatgctatatctgaatctgcttacagatgcatgcttcaagataaggatgacattcggctgctgccgtcagcattgggtgtg

SEQ ID NO: 64200 - DNA, 74 bp, Homo sapiens
aaacttcttccctcgaggcctgttaaaacccagcctctctagattcagaccaggatgtagcactcaaacttgcc

SEQ ID NO: 64201 - DNA, 100 bp, Homo sapiens
cctgtcctcagccatgaagctgatgcccgggcggcaggccaaggaccctgagtgcaagacagagaattattttccagtaccactctccatggaataaaag

SEQ ID NO: 64202 - DNA, 97 bp, Homo sapiens
atgattttgagggaagaaacacagttcacagatgacaacggcaacacgacaagaagtccttggcctctaccgcagcattttcaggcttgcgaggaaa

SEQ ID NO: 64203 - DNA, 100 bp, Homo sapiens
gatctctaccatttaattaagaaagcagttgctgttcgaaagcatcttgagaggaacagaaagggtctaccttctgcttccctggaaaggatgaatttac

SEQ ID NO: 64204 - DNA, 85 bp, Homo sapiens
ctgaatgttgtgaccactaatttggatattagaaatggctactccccagtcaattttcatctttgcaatctgcattttaatgata

SEQ ID NO: 64205 - DNA, 75 bp, Homo sapiens
atctccggccctctcggcgtccgccagcgatggcacaggtttggtgcacctcgatttggaggaagtagggcaggg

SEQ ID NO: 64206 - DNA, 100 bp, Homo sapiens
cttctaaggatcgctgtcctgacagaagagcttcgcaaacctgggtatacttcatgtgacaaagaaaaaagtatttgaaacactggaagcacgaatgaca

SEQ ID NO: 64207 - DNA, 100 bp, Homo sapiens
tgaagtgaacactgcagggccatttgtacagagcaactgattttgttgttcctgggcctggaaaagtagagataacctacacaccaagtgacggaaccca

SEQ ID NO: 64208 - DNA, 96 bp, Homo sapiens
cggtgctccggggaggtcacctgacgaggaggacactcatgaggaccatgatacttccactgagaatacagacgagtccaaccatgaccctcagtt

SEQ ID NO: 64209 - DNA, 100 bp, Homo sapiens
ccaggacccgggctttagctatggcagcggcagcaccgggagtcagcagagtgaagagcactgcagtttcctcctgaaggctggctccggctctccctca

SEQ ID NO: 64210 - DNA, 87 bp, Homo sapiens
gttattcgtcagtgaggcggaaattgtggtgtacttgttcactgtgtgcccagtattctgcagacaaacgagaagatgagaagatgt

SEQ ID NO: 64211 - DNA, 78 bp, Homo sapiens
cacggacgagtatcagcttttcgaggagcttggaaaccggcgcgacctggagattgagcgaccaatgccgggaaccca

SEQ ID NO: 64212 - DNA, 80 bp, Homo sapiens
ctgcagaaggtctctggagacatcttcagcaggcaattcgaagttttcaagtagcccttcacatctatccaatgaaccct

SEQ ID NO: 64213 - DNA, 83 bp, Homo sapiens
gctatcgtggacgtcactggccctggtggggattgacagccacgggaagtttggtgccctggttgtcagatgttggaaagcag

SEQ ID NO: 64214 - DNA, 82 bp, Homo sapiens
gttctggcctcccgatacggggtagatatagttgtaggtactccgggaagactagatgacttggtgtcaactggaaagctga

SEQ ID NO: 64215 - DNA, 85 bp, Homo sapiens
gcaagcaagtttaatcagacctgctcacacttcagaatagagaagtttttgaatcagagccgacaggcacttgaattgaaaatgg

SEQ ID NO: 64216 - DNA, 101 bp, Homo sapiens
cattgacctcaccaagagggcgggagaactcactgaggatgaggtatatgctgttgactggagtccagatggccagagagtggcaagtggtgggaaggaca

SEQ ID NO: 64217 - DNA, 101 bp, Homo sapiens
ctcacatatcagagggcattatgaacgaattctcaacccctacaacttattcctgtccggagacagcctaagggaaaagaccagtgccctcagtctgagca

SEQ ID NO: 64218 - DNA, 90 bp, Homo sapiens
aaatggttcccagtttttcatctgcactgccaagactgagtggctaaagaattacctccaaagccattgtcaagaccacagcagtcatct

SEQ ID NO: 64219 - DNA, 83 bp, Homo sapiens
catgacgtgaggccgtggatgcaggcattaagatagaagcagatttgggatatcctggaggtaaagcaagaattattcataag

SEQ ID NO: 64220 - DNA, 87 bp, Homo sapiens
ggctggaggaacagaagcggaacagccacagcagcctcccaaggagtctgcaagttgtgtttacaggcattggagtttttacatgct

SEQ ID NO: 64221 - DNA, 101 bp, Homo sapiens
ccaagaaggacaagcccctgtatgagggcagaagtgcagttgaccaagcaggtggtgcacagattgtaattgaccatttaaggtcactgtgcagtataaca

SEQ ID NO: 64222 - DNA, 103 bp, Homo sapiens
gtcgccgccactgccgcaggaggcgtgaggtgctggagaatctggtaaaagcaccattgtgaagcagatgaggatcctgcatgttaatgggtttaatggagag

SEQ ID NO: 64223 - DNA, 75 bp, Homo sapiens
cggaggaggaggaggaggcgaggaggagagactgttcaggaagatttgactgaagagaaaaaaagggaactggag

SEQ ID NO: 64224 - DNA, 96 bp, Homo sapiens
aatcagacactgcccgatatgttacatcaaaaattcttcatctggctcagagtcaagccgcctttttatagccgaaacacagctgaaatgtacgac

SEQ ID NO: 64225 - DNA, 83 bp, Homo sapiens
aactcttaacggccgatgcagctcttccaaagctaagtgcctccggagccagcgtggtggccatagacaacaagatcgaacag

SEQ ID NO: 64226 - DNA, 95 bp, Homo sapiens
tttgtgaagaggaatgatccagatggacctcattcagacagaatctattaccttggctttccttaaagtttcccatgtctcaatggactcctgaa

SEQ ID NO: 64227 - DNA, 80 bp, Homo sapiens
atcaacatcacaaataatgaaaaagttgttgttaaaattctcaaggacctagatgtgaaggctggtggaggctgtgtaat

SEQ ID NO: 64228 - DNA, 102 bp, Homo sapiens
gttcccgttaaccttagccacaaagtcaaaggcatgcggctaccaagggcatccttgtggctatggtctgtactttcttcgacgctttcaacgtcccggtgt

SEQ ID NO: 64229 - DNA, 100 bp, Homo sapiens
tgatctcatagacaagtttgtacatccaaagccattctcaagcacaacctgggtgaggctctgtcattgcttaatggatcagctgtatagtaacagcaga

SEQ ID NO: 64230 - DNA, 83 bp, Homo sapiens
cccgcacaggccgccgcgtgtcgagtccgcgcggggagcgcacgcggggcgggcggcgacagaaggatatggccctgaagcca

SEQ ID NO: 64231 - DNA, 100 bp, Homo sapiens
aggaggcggaaaaggtgctgaggagccatatcagcgggaacaagattggctgggagaagacgggaagccactcagagcctcaggcacgaggagacccagg

SEQ ID NO: 64232 - DNA, 75 bp, Homo sapiens
gctgcaggtgtgcggcccagtccgagacagcagatggatcctgagcttgaaaaaaaactgaaagagaataaaata

SEQ ID NO: 64233 - DNA, 100 bp, Homo sapiens
cacccccccgtgctggtctcctctgcagcctcgagccaggcagaggcagacaagatgtcaggacgtgttcctcatgatccggcgccacaagaccaccatc

SEQ ID NO: 64234 - DNA, 100 bp, Homo sapiens
tgttgaagaagggagccaacaaaaattgttttttctacctgttgacgtgtcaagcactaactgagaagatgtatggtcttatgcaaagggacttcctcac

SEQ ID NO: 64235 - DNA, 100 bp, Homo sapiens
gattataggcgtgagccactgcacctggcacagataacaacgaacttgatgcaagtgataggtttgccaaggtcagacctctcatcatccggatgaactg

SEQ ID NO: 64236 - DNA, 100 bp, Homo sapiens
gagaccccgggagcctcttcggcttctcgctggccatgcactggcaactgcagcccgaggacaagcggctgttttgacacaagggcgcatatcttcaaag

SEQ ID NO: 64237 - DNA, 101 bp, Homo sapiens
caaacctgtgaacccacccgagagcaacaaagcaggcgactacagccacgtgaaggaagatgacgattcagagactgaaaaacctgaggctgatgacccaa

SEQ ID NO: 64238 - DNA, 100 bp, Homo sapiens
gatgaggtgaagtccacaatcaagttccaaatgaagaaggtgtgatgttagctgttgatgctgtaattgctgaacttaaaaagcagtctaaacctgtgac

SEQ ID NO: 64239 - DNA, 51 bp, Homo sapiens
cttaaccgagatcaacctgtctggaatctatggatttcctgaaatatgttg

SEQ ID NO: 64240 - DNA, 101 bp, Homo sapiens
ctctacgtacttgtggtctacgccaagacaatgcaaactccagtgaacattcccgtgcctgtgctccggctgccccggggccctgatggcttcagccgtgg

SEQ ID NO: 64241 - DNA, 83 bp, Homo sapiens
gattgtgacatatcgttggacccagaattgaggtttatcaggtagaagatgtgtgtgaagaagaaatgccagaagagtcagat

SEQ ID NO: 64242 - DNA, 83 bp, Homo sapiens
gcgacgtcctctcgcggccctcagggcacagcccaaggctgtcagcctcccggcccaggtgttccccccacactggggctccc

SEQ ID NO: 64243 - DNA, 76 bp, Homo sapiens
ggaacatctcttcccagcggctcagcgagggcggcactgctcacaggacggctacccatccgcaatggcttctaca

SEQ ID NO: 64244 - DNA, 75 bp, Homo sapiens
acaaccaccagcgctttccctctatcagtgaagaaaaggcagctggtggaatttttgaagaaaatggaatctcga

SEQ ID NO: 64245 - DNA, 75 bp, Homo sapiens
gaagctgtcggagcttcccaagcagatataatttctacagtagaatttaatcattctggagaattactagcaaca

SEQ ID NO: 64246 - DNA, 101 bp, Homo sapiens
gaagttgaatctgcaaaacttattcgggataaagtagcaggttgaaccatgattccggtgacagagctccgctactttgcggacacgcagccagcataccg

SEQ ID NO: 64247 - DNA, 95 bp, Homo sapiens
ccagaatggactgattaaaatagaatggcctaattggaaagaatttcaggatcaccggtttctcctgcttcatattaaagaagctaattgatcaa

SEQ ID NO: 64248 - DNA, 87 bp, Homo sapiens
gctcaaccagatcgcgcgggagtgcaccgtccaggtgaggttagagctggggcatcgcgcccaactgcgcaagaagcccaccacgga

SEQ ID NO: 64249 - DNA, 80 bp, Homo sapiens
tgagaagggagacgacgctgctgggtccgctgagcggggcgacccgagccaattgcatgatttctggcgtttggattact

SEQ ID NO: 64250 - DNA, 132 bp, Homo sapiens
tatccttcagtggggctattggactgacttttcttatgctgggatgtgccttagaggattatgggtttttgccaatccagaagactgtgtagcatttggcaaaggagaaaatgccaagaagtatcttcgaac

SEQ ID NO: 64251 - DNA, 98 bp, Homo sapiens
ttatacagtatgcgatttttgagatatgactttgacactcagtatgctttcgttggtgattattctgggcagatcaccctgctgaagcttgaacagaa

SEQ ID NO: 64252 - DNA, 82 bp, Homo sapiens
tcggactcccgcggcgggaggagcctgttcccctgagtttaaaattggtggtgaatggtggacatggatcgattataaccgc

SEQ ID NO: 64253 - DNA, 50 bp, Homo sapiens
ccgctatccagaacctccactctttcggttggtggttctgtcagatgaaa

SEQ ID NO: 64254 - DNA, 75 bp, Homo sapiens
cagcacactcctcgcgagcaagcggagattctggagctggctggcaatgcagcgagagacaacaagaagggacgg

SEQ ID NO: 64255 - DNA, 83 bp, Homo sapiens
ggaggtcgcacctgctgggggaagttttgtagtgcatccctgagcatgagcacagaatgaagcggcgtttggatgaccaggag

SEQ ID NO: 64256 - DNA, 98 bp, Homo sapiens
ctgaacctggtgttttagaggataccttggtcccagagtcatcatgaagattgtaaaccatggctgtgtggatacaagctcagcagctccaaggagaa

SEQ ID NO: 64257 - DNA, 100 bp, Homo sapiens
gaaggcactcaaaagtggggggcaggaaagggacatgagagatggctttagaagaaaaagtttctactcttcccattatgcgagagagcggtctccttat

SEQ ID NO: 64258 - DNA, 83 bp, Homo sapiens
attcagcctcagtgatgtccatgaggatattagaaatggctactccccagtcaattttcatctttgcaatctgcattttaatg

SEQ ID NO: 64259 - DNA, 50 bp, Homo sapiens
caagaacaaaggccgcgacttggagaatttcgctaaggagtttgtgatca

SEQ ID NO: 64260 - DNA, 100 bp, Homo sapiens
acagcgattggacagaatttgtgaagcatcctgaggttagcattacacttctcccagtggagcccatgacttctgatcaggacgctaaggttgtggctga

SEQ ID NO: 64261 - DNA, 74 bp, Homo sapiens
ttttaccgatgctttaacatacagccactagttgagtcagcagatactggagttatttgaaacatgtcagcagc

SEQ ID NO: 64262 - DNA, 74 bp, Homo sapiens
gatttggttggaatgctcttttaccgatgctttaacatacagccactagcctgattacatcaaccccagagccg

SEQ ID NO: 64263 - DNA, 82 bp, Homo sapiens
tggctcttgccctcatcctggttctggaatcctcagttcaaggtgagaagcgccactgctttgatgtcaactataattcaag

SEQ ID NO: 64264 - DNA, 76 bp, Homo sapiens
aaattttagcattggtcttccaagcaataatgaatcgtatttccaggagcgaatccgtttagctcgacagattgag

SEQ ID NO: 64265 - DNA, 74 bp, Homo sapiens
aaatacgtatattactcttccatggatgccccttgataacagatcattaaaatccgtgcccagacggaaggaat

SEQ ID NO: 64266 - DNA, 114 bp, Homo sapiens
gtggaggccacctctaggcttaagaccttcaacttgatcccggctgttgtctctggcatctctatcccctatgaggcaccacgtaagacctcctgcccttagctctcttgctca

SEQ ID NO: 64267 - DNA, 98 bp, Homo sapiens
acgtgcagacatctacaaccttcgatctcctgacgaatgtgtcagaagaattggatacaaaactccctcttgatggtggattagacaaaatggaagat

SEQ ID NO: 64268 - DNA, 100 bp, Homo sapiens
ggaagctctttgaccttctggatgtccttgagttcaaccagctggaaaacaggcttgggggagaagagaaattccaggaacgggtgacaaagcacctgat

SEQ ID NO: 64269 - DNA, 100 bp, Homo sapiens
ctgagcagtccctatgatgtccagctgagatctgtatctgtggacctgaatgttgatccctcgcttcagattgacatacctgatgcgctcagtgagagag

SEQ ID NO: 64270 - DNA, 114 bp, Homo sapiens
gccgccccgtcgtcgtctgccttcgcttcacggcgccgagccgcggtccgacatgccaatgaagatgtggaaagaatgttactaggaaacaagtgtgatatggacgacaaaaga

SEQ ID NO: 64271 - DNA, 75 bp, Homo sapiens
ggaacttcatcatcatctacttcacaggaattgccatttgaatacatggtttacaggaagcatacctacatgagg

SEQ ID NO: 64272 - DNA, 99 bp, Homo sapiens
agatgcccatcctgaaggacgtggccactgtggccttctgcgacgcgcagtccacgcaggagatccatgagaaggtcgcaatggaagaagagatcgccg

SEQ ID NO: 64273 - DNA, 50 bp, Homo sapiens
gcgagttgcagatctacacttggaaatctgaaatagagtactatgctatg

SEQ ID NO: 64274 - DNA, 101 bp, Homo sapiens
cctacgtaccgggccgtgctgcttatggcggcgctggagagggggcgctgagctgttggggctggcagtgatggtgaaagcataggaaactgccccttttc

SEQ ID NO: 64275 - DNA, 98 bp, Homo sapiens
cttcgggtcgggcgtctccgccggctactgccgcttcagttctcccggtgtggccacgagtcggactgctctggcccatttagagtctcttgcagtgg

SEQ ID NO: 64276 - DNA, 100 bp, Homo sapiens
gcagctgtcgggacacttctgcaaccccgcagagcgcatccatcaaagctttgcgcaacgccaacctcaggcgagatgcaactccgatccaatatccgag

SEQ ID NO: 64277 - DNA, 82 bp, Homo sapiens
cctgtccccgaggaggggaccatgacacaccttatgccagcctggaccatcttggaggcagtgtaggatcatggaagaactt

SEQ ID NO: 64278 - DNA, 111 bp, Homo sapiens
cctttgttaccttccgagccacccgaaaacctctagtacagacaaccccaagtaataacatagatgccgcaatagaaaacattgaaaatatgcttacttcagagaataaag

SEQ ID NO: 64279 - DNA, 100 bp, Homo sapiens
tgctggacatgcccaatgttagagaggaaattctgaaacagccacacctacaaatgtagacttgcctcaggtcatccccaagtctgagaacagcagccag

SEQ ID NO: 64280 - DNA, 51 bp, Homo sapiens
gattcgcagtggtcgcttcttctccttggcccctgtgggtgcagtaccctc

SEQ ID NO: 64281 - DNA, 98 bp, Homo sapiens
gaagttctcgaatcattctttgtacagaaattgaaaggcttcaaagctagcagggacgcttgactttcagggatgtggctatagagttctctttggag

SEQ ID NO: 64282 - DNA, 50 bp, Homo sapiens
cccaggaagggattataactgtcaaaaagattattcaggacagaatattc

SEQ ID NO: 64283 - DNA, 75 bp, Homo sapiens
tccttttggcttagagatcactaatccatcttcagcttcaattacaaagggcagtggaagcatgagaggaggagg

SEQ ID NO: 64284 - DNA, 100 bp, Homo sapiens
ggggctggagaactccaccgggctatgcgaacagaatcctgcgaaggttggtcaaagaaaaagtgatgtatgaaaaagaggcaaaacaacaagaagaaaa

SEQ ID NO: 64285 - DNA, 100 bp, Homo sapiens
aataggagctggggagcccttctgcgccacagagcttactcacatagcatattggtatatcaaaatgaaatgcaaggaaccaaaaataacataattgaag

SEQ ID NO: 64286 - DNA, 82 bp, Homo sapiens
aaccttgcttctaggagataaaaaggtccattttagcttcctatctcctgaaggaaaagctcaacatcttgggcaagttggg

SEQ ID NO: 64287 - DNA, 87 bp, Homo sapiens
cggccaagaaagacaaagacccagtgaacaaatccgggggcaaggccaaaaagaagcactgaacctaccagatgtatttgggttggt

SEQ ID NO: 64288 - DNA, 100 bp, Homo sapiens
gcttccgccactggtggaggagaatggtgggcttcagaaggccagacgggtgcagggaacaactgggcgaaagggcactacacggagggcgcggagctgg

SEQ ID NO: 64289 - DNA, 100 bp, Homo sapiens
ataccaaggtcctaccaagatgacaaaagaagagttaaatgccctcaagtcgacaggggatgggaccctaggaccacgttatgtggtacaaataggtgac

SEQ ID NO: 64290 - DNA, 75 bp, Homo sapiens
gtcgcacgctggactggatttattcagtgctagaacaacagaggcagcagttgcttactgaacgccaaaacttcc

SEQ ID NO: 64291 - DNA, 95 bp, Homo sapiens
tcgagaccaacgtggaggagctgtgggtggaagcatggcagggggcttgagatattcctttttaacactgagcagccagttaaaacctaaacctg

SEQ ID NO: 64292 - DNA, 119 bp, Homo sapiens
ttagtagcccagaagcaaaagagacccacagatttggatgtagatacgttagccagtttacttagtgtggatgaggtcaccattgtcaacattttgaccaaccgcagcaatgcacagag

SEQ ID NO: 64293 - DNA, 98 bp, Homo sapiens
ggcaccatcggcatgcggcccaacgccaagaacaacgtattctgcctttgactgcaactcttgtcgtcttatgtgggtgttgaattgatctgtctctg

SEQ ID NO: 64294 - DNA, 100 bp, Homo sapiens
gggaacgattgggctgagcagaggacgacatgttgcttttcgtggagacaatgcagatcttcgtgaagactctgactggtaagaccatcaccctcgaggt

SEQ ID NO: 64295 - DNA, 75 bp, Homo sapiens
cagacctgctgtgtgtgcttctgcgccccagacctcctgccccccgaggtctgcagtctcctgaacccagcagcc

SEQ ID NO: 64296 - DNA, 82 bp, Homo sapiens
ccagcccgtgccgcgagcgcggcctgcaggagaaatctatgacaagttcaagcagagtacacacagcatatatatgttcttc

SEQ ID NO: 64297 - DNA, 76 bp, Homo sapiens
tgatatgataaatcccgtgcaacaggcgtcgaccagaagattatgatattcataacagcagaaagaaaccaaggat

SEQ ID NO: 64298 - DNA, 100 bp, Homo sapiens
tatgaacgcacaggccgtcgctatgagcgggaccaccctgggcacagcaggcatcggaggtgtcatggagaaactccagctgggcccagagattctgcag

SEQ ID NO: 64299 - DNA, 75 bp, Homo sapiens
ggaattcagtctccaggacattgagctggaagctctttgacatcctttggaacagaaacatcaaacagtggtacc

SEQ ID NO: 64300 - DNA, 100 bp, Homo sapiens
ctctcccgggattttaatccaacagccacagtcaagatgttgccaacattcgtaaggtccattcctgatggctctggtcagcccaagactaccccgtcgg

SEQ ID NO: 64301 - DNA, 91 bp, Homo sapiens
ctgactgattatgaaagaagcagtagactggtatcaagaatcagtcagattataagcgccatggctatggctagtgttaaattgcttgccg

SEQ ID NO: 64302 - DNA, 113 bp, Homo sapiens
ggagacccaaggaacagtgccaagttagatgccgattacccacttcgagtcctttattgtggaggctagaaacgaaactctcagcaacacgttagtggaactttctgcccagg

SEQ ID NO: 64303 - DNA, 100 bp, Homo sapiens
gagattcagccgtgaagcaagtgcagatagatggccttgtggtcttcaagctgacagagaagctgacggaacagaaggagtggatgaagatataattgtg

SEQ ID NO: 64304 - DNA, 75 bp, Homo sapiens
ggtgaaggagtgtgtgcagcggtctgaaggacacaccaactcaggaagactggctggtgagtgtgcttcctgaag

SEQ ID NO: 64305 - DNA, 100 bp, Homo sapiens
gaactgatggaggacacgcagcacaaattgcgcagcgcggtggaagagactggcattgctcgggtaccacttgctggagctgctggaggccctggggttg

SEQ ID NO: 64306 - DNA, 101 bp, Homo sapiens
ttattgacagagctctgatagttgttccttgtgcagaagtgggggatggaagaatgggatatgctgaagaagccccttatgatgccattcatgtgggagct

SEQ ID NO: 64307 - DNA, 74 bp, Homo sapiens
gtctgagactcctgctcagtgtagcattaagagctccctctttgcccactagcagggcattagctggtgctgaa

SEQ ID NO: 64308 - DNA, 74 bp, Homo sapiens
cttagaagaaacaattcttcgacatactctccagcttcaaaaagacttccgagtgcaggaactcccactggctc

SEQ ID NO: 64309 - DNA, 98 bp, Homo sapiens
gacaccaggacctggcctgaagacatttcctctcctcccctctggatttctcagaggttgtatcagagtaagatggacggtagctttgattgtgattg

SEQ ID NO: 64310 - DNA, 100 bp, Homo sapiens
ccgctcgtcccgctcgtcatggcctacccgggatacggaggagggctccagggcccacaacggcagtgtcctacatgtcggtgaaatgtgtggatgcccg

SEQ ID NO: 64311 - DNA, 90 bp, Homo sapiens
gtggacgccgccgaagaagcatcgttaaagtctctcttcaccctgccgtcatgtctaagtcagagccgtggtccttcagcatatctctgt

SEQ ID NO: 64312 - DNA, 75 bp, Homo sapiens
acaatcttggcatgttggtctggtcacccaatcaaaatctgtcagaagcaaagtatctggggacagcagacagat

SEQ ID NO: 64313 - DNA, 100 bp, Homo sapiens
caggatctcacagctgcagtctaatagtaacacagaggtggtgaagcagtattttccaatttgaagattcatttgaaggtggctcctgccacctgctaat

SEQ ID NO: 64314 - DNA, 82 bp, Homo sapiens
ttggaacttcgttgcttgcttgcctgtgcgcgcgtgcgcggacatggcctcaaacgagctagagccggtgcaggccacgcag

SEQ ID NO: 64315 - DNA, 51 bp, Homo sapiens
cggaggcgttcagctgcttcaagatgaagctcctggtaacgtttttatcca

SEQ ID NO: 64316 - DNA, 75 bp, Homo sapiens
cctcaaggactacagtatgcacttaatgtccctcagggagaaggttttaaggtgaaaacgaagaaagaaatccgg

SEQ ID NO: 64317 - DNA, 75 bp, Homo sapiens
acagaggagaaaagcacggaacaattactgccagggatccccccatggctgtaacccttggactccgcatggaag

SEQ ID NO: 64318 - DNA, 50 bp, Homo sapiens
tcaagctacactgaatatgtcttctaccggaactctaatgatccaggaca

SEQ ID NO: 64319 - DNA, 82 bp, Homo sapiens
ctgggcgctccggtggcggcggagatcttcgtgaagactctgactggtaagaccatcaccctcgaggttgagcccagtgaca

SEQ ID NO: 64320 - DNA, 82 bp, Homo sapiens
accttcagtcctggctctgacaagccctccagctggagaagaagcaggcgctccctccattccagccacagatcacagacga

SEQ ID NO: 64321 - DNA, 80 bp, Homo sapiens
cgtgtcactgggtgcgccctgggggggcgtggccaagaccctgcgcgtcctggcttcagaagaagatagtggtgagctgg

SEQ ID NO: 64322 - DNA, 75 bp, Homo sapiens
gcttccttctggttcaagcctgaataaggtgacacccagttgacaactgtgcagggagttgtcacaagtttctgt

SEQ ID NO: 64323 - DNA, 97 bp, Homo sapiens
ggagacacagttgttgtggttgagaaagatcatttcatggatgatttcttccatcagcgagtaaccagctcataaatcacatcgaacagtttttgga

SEQ ID NO: 64324 - DNA, 106 bp, Homo sapiens
ctcctcctttgacagggacatcagtggagccttctcagacccacagtgtaaacaggaacatcgataagtagtgtaaaaacttgcacaatgaaatccgaagccaagg

SEQ ID NO: 64325 - DNA, 98 bp, Homo sapiens
ttggacatgactgaagaggaggtgcagatggcactttccaaagtggatgcctccggggagaacctcaagaaggcatgaagccagcccctgcagtgccg

SEQ ID NO: 64326 - DNA, 100 bp, Homo sapiens
gagcctgtgtcctttgatgtgcagaccgcccagatcttcttcaccaaaaatgggaagcgggtgtgcggcgacatccatggacaattctatgacctcaaag

SEQ ID NO: 64327 - DNA, 100 bp, Homo sapiens
gacagtgacagtgaccaggaagagaagcatgcttttcacttccactgcatctctcgctggctcaaaacacgacaggtgtgtccattggacaacagagagt

SEQ ID NO: 64328 - DNA, 98 bp, Homo sapiens
ccttgagcgaggaggagctggacaatgaagactattactcgttgctgaacgtgcgcagggaggcacaaggaaggacagacccagtctctgtccttatg

SEQ ID NO: 64329 - DNA, 50 bp, Homo sapiens
ggacaggaacaagtctgtcttcatgaggggggcagtacccaaaggaaacg

SEQ ID NO: 64330 - DNA, 98 bp, Homo sapiens
tacagatgctggtcttaccacttatcatctccagtcttgtcacaggttcgttccaccagtcataaaccagatgaaatctatggcatgattgaaagact

SEQ ID NO: 64331 - DNA, 75 bp, Homo sapiens
aaaaaactaatggaattagcctgcaacatgaaggtttgctcactagagagattccgctccttacaggacaaacta

SEQ ID NO: 64332 - DNA, 100 bp, Homo sapiens
ggacgcggcgccgcggcaccagggcgcgcagccgggccggcccgaccccaccggccatacgccgccgccatgtctgcgcatctgcaatggatggtcgtgc

SEQ ID NO: 64333 - DNA, 90 bp, Homo sapiens
cttttatatactgattacaagactgacacctatcaagtatgatgatggagatggcgatggagatggagcaactggaaagaagaagaaaaa

SEQ ID NO: 64334 - DNA, 83 bp, Homo sapiens
gagcgacaagccgctggcagccgcggatctcaccgccgctcaggcctcaaggaataggttctcctagtgtctatcatgcagtt

SEQ ID NO: 64335 - DNA, 100 bp, Homo sapiens
cgcattgccactgatgcttgctgagccgctggatgacaccaaaatcctcccaggcaacatgaaggataacttctgggagatgggtgacacgggcccctgt

SEQ ID NO: 64336 - DNA, 119 bp, Homo sapiens
ggatctagcttctcctcgccttcaggatgaaagctcagggggaaaccgagggatgaatttcatcctttcatcgaagcacttctgccccacgtccgagcctttgcctacacatggttcaa

SEQ ID NO: 64337 - DNA, 98 bp, Homo sapiens
tgaatgccatgtcaactttgttcggaagttgcctttccccatcttcctggttctgctccttcgtggcctagtcttgtggacaccagcaagcagtggga

SEQ ID NO: 64338 - DNA, 100 bp, Homo sapiens
tttcatctaataccaaagctgctgatttgaagaacctctttggcaaatatggaaaggttactgaagctaaaggagatgtttaactccaagtttggatcta

SEQ ID NO: 64339 - DNA, 75 bp, Homo sapiens
ccggataaaccaaagacagcatctgagcacagaaaggtcaaaatgcagatcttcgtgaaaacccttaccggcaag

SEQ ID NO: 64340 - DNA, 99 bp, Homo sapiens
catggttatttgatgcagcatttgttcactgtaaacttcataatgggataaacagagacagcagcatgactggatgattgaggaaagtgggaacaagcg

SEQ ID NO: 64341 - DNA, 97 bp, Homo sapiens
cgctgcggagattgggctagaggcggaggcctgggccacggcggaggcgctggataagccatcaccaaactcagaaaatgaacaaaattctgttacc

SEQ ID NO: 64342 - DNA, 83 bp, Homo sapiens
tttgtgtccatgtgaacaactgatggtccagcagtttggggtggattttgagaagaggatcgagggctcaggagatcaggtgg

SEQ ID NO: 64343 - DNA, 101 bp, Homo sapiens
gtaccatgagaatgacacgatagccaagtacgagatcatggacggggcaccagtgcgaggtagcaatgaagtgatgaggatactgatctctagaagcctgc

SEQ ID NO: 64344 - DNA, 99 bp, Homo sapiens
gaaaactgtttctttggggacaagcactttatatcatcgcaaaactcctgggtcaccatccttgtcagcctggccctagctttccttgcgtgcatcgtg

SEQ ID NO: 64345 - DNA, 83 bp, Homo sapiens
caggctaccatggtctacaagactctcttcgctctttgcatcttaactgcaggttatcctgaatacatgtctaacaattttcc

SEQ ID NO: 64346 - DNA, 82 bp, Homo sapiens
tgtggccgaggcccacctgctgacatctacctgccagggggatatgagactttctactcggaatatcctgagtgttgcgtgg

SEQ ID NO: 64347 - DNA, 100 bp, Homo sapiens
tggttacaaggttcggggtttcggccagggctgcgcccggaaaggggctgctcgccacgccacccgcaatcatgggtgcttatctctaaagagctgatat

SEQ ID NO: 64348 - DNA, 100 bp, Homo sapiens
gtctattctaaggaccagctgcagactttctcagaggaggtgaaatgacaatggatgctctgttggctcgattgaaacttctgaatccagatgaccttag

SEQ ID NO: 64349 - DNA, 97 bp, Homo sapiens
gaaactcagccactggttgccttggtaggcaataaaaaacccagtgacttgattgtaaaaatttacagagcggaatcatatgctggtctccaagagt

SEQ ID NO: 64350 - DNA, 101 bp, Homo sapiens
gtatcaactgcggctctttaaggatgggaaactcaagtaccaggaagcagcttaccacccagaagtggcccctgatgtgcggcttcgagccctgcactatg

SEQ ID NO: 64351 - DNA, 75 bp, Homo sapiens
gccgcgtcccggaggcgccgccagcacagccagtatatttaaagttggagttcgttgctaaagatggcagaccca

SEQ ID NO: 64352 - DNA, 74 bp, Homo sapiens
atcaactgtggccttaatgagcatgttgacagcatcgatgctagacagacagtccggtttatcactaaaatatg

SEQ ID NO: 64353 - DNA, 146 bp, Homo sapiens
gccaagctggagaacgccgaagtgctggagctgacggtgcggcgggtccagggtgtgctgcggggccgggcgcgcgggtctgagcacctccctcatgcagacagagccccggctcccatgttcaccatgctgagaaagacctgcgg

SEQ ID NO: 64354 - DNA, 50 bp, Homo sapiens
atcaggagtgaagctgcagaccttcgcgaaggaacccagccagccggcgg

SEQ ID NO: 64355 - DNA, 100 bp, Homo sapiens
ctcggcacaagcatgtacggcaaaggcaagagtaacagcagcgccgtcccgtccgacagccaggcccgggagaagttttgtgatgaaggaacctgtacag

SEQ ID NO: 64356 - DNA, 100 bp, Homo sapiens
gtctgaaaggcactttattatgcaggtggtctgtgaagccacacagtgtccagatacgagggctactgatgcccgaagggcttttccttgctgggatgag

SEQ ID NO: 64357 - DNA, 90 bp, Homo sapiens
acttaaaacctgaaaacattggaccacacaaagtcttactggaatgcaactcccatgtaaatcgagggaagattgtgctttgtttgtttc
